United States Patent Application Publication US 2004/0029129 A1 - sequence listing, part 22

SEQ ID NO: 69397 - protein, 337 aa, Pseudomonas syringae
MSAVRIGPYTVHNGLILAPMAGVTDQPFRQLCRQLGAGLVVSEMVTSDMSLWNSRKSRLRMIHAGDPEPRSVQIAGGDAQMMADAARANVELGAQIIDINMGCPAKKVCNKAAGSALLKDEQLVNDILQAVVAAVDVPVTLKIRTGWDRDNRNGLTVAKIAEQAGIQALAVHGRTRADLYTGEAEYDTIAMIKQAVSIPVFANGDIDSPEKARHVLQATGADGLLIGRAAQGRPWIFREIEHYLLTGKTLPALQSSEVERILLEHLAALHVFYGDVMGVRIARKHVGWYLATLPGAREFRALFNRLEDTEAQCANVREFFSQGCKGPDNQNDKEVAA

SEQ ID NO: 69398 - protein, 100 aa, Pseudomonas syringae
MDLTPREKDKMLIFTAGLVAERRLARGVKLNYPEAMAYISAALLEGARDGQTVADLMHYGTTLLTRDQVMEGIPEMIPEIQVEATFPDGTKLVTVHQPIA

SEQ ID NO: 69399 - protein, 77 aa, Pseudomonas syringae
MSRVCQVTGKGPVTGNNISHANNKTRRRFLPNLQHHRFWVEGEKRFVRLRVSAKGMRIIDKRGIEVVLAELRRDGKI

SEQ ID NO: 69400 - protein, 330 aa, Pseudomonas syringae
MADKRHSSEISFRLFMLLTHARAVKREVIMLNKRHLPSIAALQCFEAVTRHLSFTRAAEELNLTQSAVSKQVAQLEELVQHLLFQRVRRRLQLTPAGALYLAEVRKILTQIEMSTHFLRSYGGETEVLRVSTPSTFGARWLVPRLKGWRLRHPHIHLDLINEQESDDLLKGRCDVSFYFGQAAIPGAESVKLFGEELVPVCSPDSLPAEPFTDPTQLSELVLLQNAFRPQAWHEWFESQGYHTDHSYHGPRFETFYMCIRAAQVGCGVALLPRFLVEEELAEGKLVIAWDYALPSTNSAYYLSYPEHTADVPKIRVFLQWMLEQLDQPAR

SEQ ID NO: 69401 - protein, 407 aa, Pseudomonas syringae
MSESAFSNRIVQSLLDTDFYKLTMMQAVLHNYPNVDVEWEFRCRNGEDLRPYLGEIQHQIELLCELSLSPEHLVFLERITFMKPDFLRFLGLFRFNTRYVKTSIENDELCIRLHGPWLHVILFEVPLLAIVSEVRNRHRYPDTLLSQARDRLYDKFEWLTVNATPDELAELKVADFGTRRRFSYRVQEEVLNVLKLDFPGQLVGTSNVHLARQLDLKPLGTMAHEWIMAHQQLGPRLIDSQIAALDCWVREYRGLLGIALTDCITTDAFLNDFDLYFAKLFDGLRHDSGDPVKWAEKCISHYQKLGIDPMSKTLVFSDGLNLPKALDIFRALRGRINVSFGIGTNLTADIPGIAPMNMVLKMTACAGQAVAKISDESGKTQCKDPNFVAYLRHVFKVPDLPSPAKPA

SEQ ID NO: 69402 - protein, 413 aa, Pseudomonas syringae
  MISC_FEATURE (384)..(384): X=any amino acid
VQKHGEVDVWFNPPPIPMTTDEMDYVFGMPYARVPHPAYGKEKIPAYDMIRFSVNIMRGCFGGCTFCSITEHEGRIIQNRSEESIIREIEEIRDKVPGFTGVISDLGGPTANMYRIACKSPEIESACRKPSCVFPGICPNLNTDHSSLIQLYRSARALPGVKKILIASGLRYDLAVESPEYVKELVTHHVGGYLKIAPEHTEEGPLNQMMKPGIGSYDKFKRMFEKYTKEAGKEQYLIPYFIAAHPGTTDEDMMNLALWLKGNGFRADQVQAFYPSPMATATAMYHSGKNPLRKVTYKSDAVTIVKSEEQRRLHKAFLRYHDPKGWPMLRAALERMGRADLIGPGKDQLIPLHQPATDTYQSARRKNRHRLAATRWARTRKPRXSRPSTPACRRVAAMAASRGTNAKKPRLPQ

SEQ ID NO: 69403 - protein, 474 aa, Pseudomonas syringae
MPMNCPRVESMTHPALIDELQALADPGKVLTDAGSLETYGKDWTRQFTPAPLAIVFPKTTEQVQAIVRWANERLVALVPSGGRTGLSAAAVAANGEVVVSFDYMNQVLELNLTDRTAVCQPGVITRQLQALAEDNGLYYPVDFASSGSSQIGGNIGTNAGGIKVIRYGMTRNWVAGLKVVTGKGDLLELNKDLIKNATGYDLRQLFIGAEGTLGFVVEATMRLDRAPKNLTAMVLGTTDFNSIMPVLHAFHGKLDLTAFEFFSDKSFARVMARGDVPSPFDTPCPFYVLLEFEATTEDLADQALATFEHCVEQGWVLDGVMSQSEQQLRNLWKLREYISETISHFTPYKNDISVSVSKVPEFLAEIDAIVAEYYPDFEVLWYGHIGDGNLHLNILKPENLDKDEFFVKCARVNKWVFETVEKYNGSISAEHGVGMTKRDYLTYSRSPVEIEYMKALKAVFDPNGIMNPGKIFAV

SEQ ID NO: 69404 - protein, 315 aa, Pseudomonas syringae
MVSMPPAQLARVTSMRRSTRSLLLLIALVPLAGLFMLANERYRYVERVLFDWQVFWQSDSLEAIGLDQYRAVTEGQVINGLEDDVSGLSFDPDRKSLFTVTNQNPELVELSLDGRVLRRIALVGFGDAEAVEYISPGVYVISDERQLRLIQIHVDDSTKSLNAADAEQLTLGLTASGNKGYEGLAYDSRGKRLFVARERDPVQIIEVRGFPRVNADAPGNLQVITDGKRDGKLSVRDLSSLQFDEVSGHLLALSDESKRILELDTTGRPIGSGSLKEGDMGLSKSVPQAEGMAMDDEGTLYLVSEPNLFYVFRKP

SEQ ID NO: 69405 - protein, 325 aa, Pseudomonas syringae; identical to SEQ ID NO: 69226

SEQ ID NO: 69406 - protein, 220 aa, Pseudomonas syringae
MSFGVISINESSFVQIDSETPRLCVLTKGTYSGTTNANVTFPRAVTSADPPIVFIRPDQNGIVQVPISVWFTGGPGNWTGFAMKASNVQSTLSGQYFIAAWAAMSTASFGMRIWGAGGELVYDSGAPPVVVTFAAGNWTYVGSDQLSVGRRYIWSIDKLLGAGEFISINSFAMSCHNGASGGGCGIAVDYTNSKIMMYSLATTAWTDQGHRPFLCAKLTA

SEQ ID NO: 69407 - protein, 228 aa, Pseudomonas syringae
  MISC_FEATURE (55)..(55): X=any amino acid
MGFAIAGFFLENRQINAPEPLRDWSLIDLQPVLEERFGMPVWLENNATTAAIGEXLVGVGAWASNFIYLSFNFGFGAGVVINGKPYFGSHGNAGEITLYNDEESINRPALRYLLEELHQKGVQVDSIEDLRLRFDPNWPGVDTWLKRIQPTLDRLVNALAGLFDPQAVVFGGQLPAELGKRLIAATTFWGTHRYNSPPPRPRLLLSETNGDAAAIGAALVPLKERFFV

SEQ ID NO: 69408 - protein, 323 aa, Pseudomonas syringae
MKQYLELVAHVIKHGTLQANRTGVNTISFPGAMLRYDLQEGFPAITTRRMAFKSAIGEMVGFLRGVSNAAEFRELGCKVWDQNANENAQWLNNPFRKGEDDLGEIYGVQWRKWPAYKRIDTGNVAAIELALGQGYRQIAESEEDGQSFVVLYKAIDQIRQCIDTIINDPGSRRILFHGWNCAQLDEMALPPCHLLYQLHPNPQTREISLTLYIRSNDLGLGTPFNLTEGAALLSLIGRLTGYTPRWFTYFIGDAHVYENHLDMLNEQMTREPYPMPKLVISDRVPEFAKTGVYQPEWLELIEPSDFSLEGYQHHPAMTAPMAV

SEQ ID NO: 69409 - protein, 279 aa, Pseudomonas syringae
MMELRPLHSLDGLLKFAGLARSTFYYQQKVLLADDKYAGLKDLIQATFYEHKGRYGYRRITAALRRAGHLVNHKTVQKLMGQLGLKSLIRVKKYRSYKGETGKAAPNLLKRDFKAQYLNQKWATDVTEFKVGGQKLYLSPIMDLYSGEIISYAIARRPLYSMVDEMLEGAFKRLGPHEKPILHSDQGWQYRMPIYQRLLNENSITASMSRKGNCYDNAAIESFFSTLKFEFFYLNKFNDLDELQAGIEEYIEYYNHSRIKLKLNGLSPVEYRMQAAKAA

SEQ ID NO: 69410 - protein, 293 aa, Pseudomonas syringae
MNRFRFSNLMLVFGLLFIYAPMVILVIYSFNASQLVTVWGGWSVKWYVGLLDNSQLMGSVMRSLEIACYTAIAAVALGTMAAFVLTRISRFKGRTFFGGLVTAPLVMPEVITGLSLLLLFVAMAQMIGWPQERGIMTIWIAHTTFCAAYVAVVVSARLRELDLSIEEAAMDLGARPWKVFFLITIPMIAPSLAAGGMMSFALSLDDLVLASFVSGPGSTTLPMEVFSAVRLGVKPEINAVASLILLAVSLATFLVWFFTRRAENNRKRAIQQAIEESAADAWTQPDPRRAPAV

SEQ ID NO: 69411 - protein, 270 aa, Pseudomonas syringae
MLVAALTFASSELYQLIQPKGPGVVGIVWQPDNATVGISGDWDKLGARQLLVQWTAVDDQSFIPGTDLPNVPVLPDWSRIGQQPWAQEVILGLAGYFSENRSRDNIEQLAVLSAQMAKVKTPLNVTGWYFPAEVDPSWSRAKELPALLANLPRPLWISVYDGANIGPAATADWLKTWLPDDIGVFFQDGVGVYARTAPVARTYADALRKRLGKDRVRIIVEAFRPQFGGGFRSATAAELKPQIAAFDGYPLYLFDGPHYVTPELIEALNK

SEQ ID NO: 69412 - protein, 346 aa, Pseudomonas syringae
MKCLSNNNKRTHPMNTLKRTLLASALALLSLPVMADAAHPKIGFSIDDLRLERWSRDRDYFVAAAEKLDAKVFVQSADANEQKQISQIENLISRGVDVIVIVPFNATVLTNAIAEAKKAGIKVVSYDRLILNADIDAYISFDNEKVGEMQASGVLQAAPKGNYFLLGGAPTDNNAKILREGQMKVLQPAIDKGDIKIVGQQWVKEWNPTEALSIVENALTRNDNKIDGIVASNDATAGGAIQALAAQKLAGKVPISGQDADLAAVKRVIDGTQTMTVYKPLKLIATEAARLSVQLVRNEKPAFTSQYDNGSKKVDTILLTPTPLTKDNIDLLEKDGFYTKAQMGGQ

SEQ ID NO: 69413 - protein, 438 aa, Pseudomonas syringae
MSYFPTVDKVIYEGPDSDSPLAFRHYDADKRVLGKPMREHLRMAACYWHTFVWPGADMFGVGTFKRPWQRAGDPMELAIGKAEAAFEFFSKLGIDYYSFHDTDVAPEGSSIKEYRNNFAQMVDRLERHQEQSGIKLLWGTANCFSNPRFAAGAASNPDPEVFAYAGAQVFSAMNATQRLKGSNYVLWGGREGYETLLNTDLKREREQLGRFMRMVVEHKHKIGFKGDLLIEPKPQEPTKHQYDYDSATVFGFLHQYGLQDEIKVNIEANHATLAGHSFHHEIATAVSLGIFGSIDANRGDPQNGWDTDQFPNSVEEMTLATYEILKAGGFTHGGYNFDSKVRRQSLDDVDLFHGHVAAMDVLALSLERAAAMVQNDKLQQFKDQRYAGWQQPFGQSVLSGGFSLASLAEHAFANELNPQAVSGRQELLEGVVNRFIYT

SEQ ID NO: 69414 - protein, 680 aa, Pseudomonas syringae
MFAPANQTHFSLTIEGLSNDLQVLALQGREAISQPFAFEVDLVSEQPSLDLETLLHKPAFLQLSPDGSGIHGQIYRASQGDSGKRLTRYAVTLRPQLAYLAHRTNQRIFQNLTVPKIIGIVLEEHGIQGNAYEFKVGSIYPERIYCVQYDESDLHFVQRLCEEEGIHYHFQHSTNGHTLVFGDDQTVFPKLAPVAYQQDSGMVATDPVVKRFDLRMETRTSRTTRRDYDFEKPRLTLESENRGDAIPDLEDYDYPGRFVDRERGKQLAKRALERHRSDYQLAVGKSDQPLLVSGHFLALTQHPKAKWNDLWLLTEILHEGKQPQVLEESVTSDTTDLKDDFHQGYRNRFQATPWDVPNRPPLTHPKPRILGSQSAVVTGPKGEEIHCDQYGRVKVQFPWDREGQSDDKTSCWLRVSSAWAGAMYGGIAIPRIGMEVLVTFLEGDPDQPLISGCLYHKENVVPYDLPANKTRSTFKSMSSPGGGGFNELRIEDKKGQEQIFLHAQRDWDENVENDQKIRVGNERHDTVEQNSHSEFKAEEHHTVYADRKVEARADDHLTVGANQHVKVGTGQFIEAGQEIHLSSGVKVVLEAGSELTLKAGGSFIKIDASGVTLSGPFIHVNDGGSPGNGTPAAPLMPGPLLQADADKAGAALTPAQINTLKRNAPFCEECEKCKDGACAI

SEQ ID NO: 69415 - protein, 1572 aa, Pseudomonas syringae
MDRVADIEAQLDSFKDSLTLYREQTKTWYAELADKGSRATDMPSLLGMERVIKAGGSSKAVSMNDDDFSYVAKCPLVGPLLIESKFESLYDIPVGDIQVDVIAVEGGAKTTVMLDKQGKGSFQGQPGKAYKIHVHDKVTPAQIDALFKSYDGLSADLEGFLRKEWAGFKPQWSNQSASATAMAIGAGILEGGWEAIKGVWDGITKALDILQNPKKFAEELGAGADELVKLAKEAPDVMKKAMLLASDEAALFLMVRCASIWVAGLPPTQAAGQTAKMTSAATIGILIDIVISVVLTLAAEGAGLFYLAARLAKYGKIILNAVTGFVKAVFNIIKGFMGYVSKYVAVAARGAVSATNQGVAQLRFDGKRNTTVRTSKRLDDAASQSRTHDGKSAAAAQDTCVNGCPVSMVTGEELLTLTDGQLDGLLPFEWTRLYRTSAVETDSRLGYGWSHALSHRLQLDDEGVLWIDNENRQTRFPMPTEHRPAITNSLAKAAIYLGNTPGELILTQAGKQPRFYHFRAGRLITISDAYDNQLQITYDLVDRVQRIDNNAGRSLLLRYEDRHIVAVDYQQQRPDYTDQGERQDPWATVQTLVTYQYNVKGQLVSATTAAGESEHYRYNEQNVIQERQLAGGASFFWEWENEGKSSRSIHHWANFSQMDSRYIWDDAGQVTVLNADGSEQVYVHDENARLISETTPDGAETQKAYDEKGRLIAEKDPLGAITEYRYDEDGLLIALIPPEDEPVAYEYHRGFVSDVRRGKATWKYQRNEQGDITVQTDPDGNETHYSYDLRGRLLEIRHPDGSRHQLGWNGLGQLLEERLPDGGQRKYRYDALGRQITRQEETGAITHYQWDAANRLAQATLPGGATRAFSYNAYGKVTAERDELGRITRYEYADNLHLVSRRINPDGSQLRYRYDNARLLLTEIENERGEHYHLDYYSNGLIQRETGFDGRSTAYEYDLNGQLLKKTEFGDDGSELSTEYQRDAAGRLLVKTLADGSAIHYRYDALGRLVSVDDGHWPLAYEYDLQDRLITEHQGWGTLRYEYDTVGQLKHCRLPDGSKLDYHHQRGGQLGSIDLNGSRLTTHQFSAGREQQRQQGLLLSQYQYDEQGRLQAHSVSQQDRHLFHRHYAYDANGNLAGVNDSRKGNRSYHYDPLDRLINVRGTTPESFAHDPAGNLLGQGDQPAANLANVKGNRLLMQGDRHYDYDAYGNQIRERRGTGQKLVTEYRYDCQHRLIGVSLPGGSVASYKYDAFGRRIEKTIDGHITEFLWQGERLIAESADNRYRSYIYEPGTFRPLAMLDGEGPLKAAPFYYQLDHLGTPQELTDYSGEIMWSAKYRAYGNLATLDIAEIENPLRFQGQYFDAETGLHYNRHRYYNPGTGRFLTPDPIKLAGGLNNYQYVPNPTGWVDPLGLSGECPDSEKNKIPVEEASSPSNSYDNSEELRPPESNGRRYAAGKHYVNPQDINFSQRGVHGNEYEAKMSQGDWDWSRPGSALNVMEVDGQLVSYDNRRLRAARSVGLNSIPIQIVLAEDIMPGSKKTWEKAFKLRREDRRNLLDGEPVPPKGLNTLPKINE

SEQ ID NO: 69416 - protein, 1063 aa, Pseudomonas syringae
MNFSKFFISRPIFAAVLSLLILIAGAISLFQLPISEYPEVVPPTVVVRASFPGANPKVIGETVASPLEQAITGVEGMLYMSSQATADGKLTLTITFALGTELDNAQVQVQNRVTRTEPKLPEEVTRIGITVDKASPDLTMVVHLTSPDQRYDMLYLSNYAVLNIKDELARLGGVGDVQLFGMGDYSLRVWLDPNKTASRNLTATDVVNAIREQNRQVAAGQLGSPPSPNATSFQMSINTQGRLVSEEEFENVVVRAGPDGEITRLKDVARIELGSSQYALRSLLNNQPAVAMPIFQRPGSNAIDISNDVRARMAELKKGFPEGMDYSIVYDPTIFVRGSIEAVIHTLFEALILVVLVVVLFLQTWRASIIPLVAVPVSLIGTFAVMHMFGFSLNALSLFGLVLAIGIVVDDAIVVVENVERNIELGLEPVEATHKAMAEVTGPIIATALVLCAVFVPAAFISGLTGQFYKQFALTIAISTVISAFNSLTLSPALAAVLLKAHDAPKDRFSRFLDKILGGWLFRPFNRFFEKASHGYVGTVARVIRSSGIALLVYAGLMVLTWLGFASTPTGFVPSQDKQYLVAFAQLPDAASLDRTEDVIKRMSELALKQPGVENAIAFPGLSINGFTNSPNNGVVFVALKPFDERKDPSLSANAIAGALNGQFASIQEAYMAIFPPPPVQGLGTIGGFRLQIEDRGNLGYDELYKETQNIITKSRSVPELAGLFTSYTVNVPQVDAAIDREKAKTHGVAVSDIFDTLQVYLGSLYANDFNRFGRTYQVNVQAEQQFRQDADQIGQLKVRNNLGEMIPLATFVKVSDTAGPDRVMHYNGFITAEINGAAAPGFSSGQAQTAVEKLLREELPNGMVYEWTDLTYQQILSGNTALFVFPLCVLLAFLVLAAQYESWSLPLAVILIVPMTLLSAIAGVIIAGSDNNIFTQIGLIVLVGLACKNAILIVEFAKDKQAEGMSPLDAVLEACRLRLRPILMTSFAFIMGVVPLVLSSGAGAEMRHAMGVAVFSGMLGVTFFGLLLTPVFYVLIRNYVGRQEARKAAKAQKLQNLPAEMH

SEQ ID NO: 69417 - protein, 542 aa, Pseudomonas syringae
MSGRPLLTRLLFAAITVTLLGCSPPSQDSQAGKTLKVTFFRDNTTLVSLDPFQVYWLEHRVVLRNVAESLTDQDPQTGNIIPWLAERWDVSDNALEYTFHLRKDVTFSNGTRFDAQAVKTAYDTNKAFADQLPATFGATYLKGYDHAQVLDDFTVKLVLAKPNAGFLQATSTTNLAILAPQSYALSVKERSLGAIIGTGPFVLERYTPESGLRLTKRKGYAWPSANAQNKGEAHLDAVDVSYVPEESVRNGQFVQGQVDILWPRTPFSEVDLNLFKSRGATIQSRSLPGPALNMYPNTRGNRILADRNVRLALQKAIDRKTYAATVYNPQFPVVSGIYDVTTPFYKNQADKLAYDPKGAERLLDEAGWAKNADGYRYKDGKRLKLAYNLSPAETAGDVLIQDQLRKVGIELKLNVVTTAEWAANNAAGNYDLTYNYMTRADPIILQTIIDPRSANSSTLATNLYAPQTLPKALELFDAGLTATRSEQRAKAYGDLQDLLIDEGSAFPVYERVWQAATAKNVRNFHWTAEGFALFNDIEIAAP

SEQ ID NO: 69418 - protein, 227 aa, Pseudomonas syringae
MYRLVFKCLPVFKLLEEIDMAQMGRPRTFDRDVAITQAMHLFWEHGYDATSLSQLKANIGGGITAPSFYAAFGSKQALFTEVMERYLTTHGRVTDSLFDTTLPPREAIELTLRRSAKMQCEPDHPKGCLVSLGLMSACSEESKAISAPLAQARNLNRAGLIACIDRAIASGELPATVIPETFAAVFDSFMLGLSTLARDGVAHATLDSAVTQVMGLWDSLRVVADDQ

SEQ ID NO: 69419 - protein, 105 aa, Pseudomonas syringae
MYWSETQGTDLPEGKCLVVKLGAEVCDLSEDMRCVLEVGTAKIIQRISACVEMGVSDGSIHPEGDHQGFAESLYQLWLGASLLVKVNKSTESFDKALNMTKRLLK

SEQ ID NO: 69420 - protein, 297 aa, Pseudomonas syringae
MACGLLTLLASAAQAAPIDIDDGQHKVHLPDTPKRVVVLEFSFLDGLASVGVTPVGAADDGDASRVLPKVRKAVGEWQSVGLRSQPNIEVIARLKPDLIIADLGRHQALYNDLASLAPTLMLPSRGEDYQGSLKSAGLIGMALGKGPEMQARIAENRQHLKTVAEQIPADSNVLFGVAREDSFSVHGPHSYAGSVLQAIGLQVPEVRNNAAPTEFVSLEQLLALDPNWLLVGHYRRPSIVDTWSKQPLWQVLGAVRNKQVAEVDGDSWARNRGIMASEQIADDALAVLKGGKAVLNP

SEQ ID NO: 69421 - protein, 269 aa, Pseudomonas syringae
MWSLRNWRRRRTLARHPVAEELWQQVRKRLPILDGLSTEQDAHLRDACVLFLNDKHLSALPGVELDDEQRLFLAAQAQLPLLSLGELNWYQGFHEIVLYPDDFVSPQRHRDASGVEHEWDGEHSGEAWLQGPVILAWPGVLSSGDWDGYNLVIHELAHKLDMLNGDANGLPPLHSDMRVTDWASVMQSAFDDLNRQLDQDPDAQTVIDPYAAQDPGEFFAVTSEYFFSAPDLLHESYPAVYAQLQAFYRQDTLARLNALRHQDPAYRDH

SEQ ID NO: 69422 - protein, 329 aa, Pseudomonas syringae
MRRWLMAGVIAATCLGLFWVSLFALSSFSIRQIDAWNGLFTQGREGGNIAYIVAQLRVPRALCAALVGACLGVAGALMQGITRNRLASPSLFGVTAGAALGLALFSTGLVALPFAGGALLMTCIGGALAWITVFSLGGAWSPTTAQGRLVLAGVAVAALCAALTRLTVILVEAQAQSVLNWLAGSLANVGAEQLQLLWPCTLIGLVLAIACAPRLNLINLGEDAARSLGVRIGALRLLVFVVSLLLVGASVCAVGPIAFVGLIAPNIARQWLGNDYRWLVPISAGLGAAIVLASDLISRAVAFPVETPAGVVTALIGAPFFLFLARRAL

SEQ ID NO: 69423 - protein, 322 aa, Pseudomonas syringae
MNQPRSRLLLLIMLLALALLLSLSAGTVWLKPGAVLDHLIAHDSKDFEVWNHRLPRGLIAIMTGCALGLAGAIVQGVIRNPLASPEILGVTQGAGLALTIAIIGLPQLPVAALPFVACLGGAAGALLLALYNTGVQFSGMRFALSGVAIAVTLSSITEFLILSNPLDINTALLALTGSLWSRNWHHVLLATPLLLLIPLSMLLAKPLNLIGLGDEAAQSLGTSLKRIRWLAMGSAVLLTSLGVGIIGPVSFVGLVAPHMARRLVGGHHQYLLPASMVLGALLLVLADTLGRTLIAPSEIPAGILTAVIGAPYFLWLLARFKG

SEQ ID NO: 69424 - protein, 263 aa, Pseudomonas syringae
MSILKAQHLDIGYGATRIVQDLSFSPPAGQVTALIGPNGCGKSTLLKAFARILTPQSGSLSLDGKGYSQLSARELACKVAFLPQVLPIPEGVNVRQLVAYGRSPHNSLWGRLSGADQHSVDQALQRMELATLAERPLSDLSGGQRQRAWLAMILAQDAAIVLLDEPTTYLDISHQVELLDLMRELSAEGKTVITVLHDINQACRYADHLAVMQGGRLVTCGAPGDVLTAELVCQVFDVHVQIMREPVAGTPMCIVERSTRCTS

SEQ ID NO: 69425 - protein, 217 aa, Pseudomonas syringae
MTLLVIFSLVTWALLLGKTLQHWRLSRQNRRYSTQFWAARDLKNALHLPHSEGSLARLTDAGAQALATPHDSPDLGHSWNRQDLLERSLRQQIHKERRRLESGMILLASIGSTAPFIGLFGTVFGIIHALTAISQAKSASIAVVAGPIGEALVATGVGIAVAVPAVLAYNFFGRRMKLVIADLEEFAVDFLNLSQRNAFRLQPEGRDKAAPNLKGVS

SEQ ID NO: 69426 - protein, 337 aa, Pseudomonas syringae
MKAIAYYQSLPISDAQALQDIELPEPVAGARDLLVEVKAISVNPVDTKIRQNVQPEDGAAKVLGWDVAGVVKAVGSQVTLFKPGDKVFYAGSLTRPGGNSELHVVDERIVGHMPKTLSFAHAAALPLTAITAWELLFERLQVAQRKGEGSQSLLIVGAAGGVGSILTQLARQLTSLKVIGTASRAETESWVRELGAHEVLDHSKPLSEELKRVGLDQVTHVASLTQTEQHLDQLVEALRPQGKLGLIDDPKALDVSKLKRKSLSLHWEFMYTRSMFETEDMIEQHNLLNRVAELIDAGTLKTTFGEHFGTINAENLRRAHAMLESGKAKGKVVLEGF

SEQ ID NO: 69427 - protein, 398 aa, Pseudomonas syringae
MNLRTILILGSLSAFGPLAIDFYLPGFPAMASYFGTDEKHVQLTLAAYFLGLSLGQLAYGPVADRFGRRIPMLVGVTLFMLASVACAFAPSLEWLIGARFIQALGGCAGMVLSRAIVSDKCNAVESAKVFSQLMLVMGLAPILAPMLGGVLVSTFGWQSIFASLALFSAACLTAVALWLPESMPASTPRQPLNGALRQYVNLLQDRVFIGHALTGGIAMAGMFAYVAGSPFVFIKLYGVPAEHYGWLFGMNAAGFILVAQINARILRKTGPAFLLSRTVWIYLAAALVLLAITGLRTEALWPLLVPLFICVASLGCIIPNASACAMNGQWARAGSASALLGCLQFSVAAVAASLVGVLHDGTATPMALVISLCGVLTVSISVLTRRAQARRDVLAQTA

SEQ ID NO: 69428 - protein, 748 aa, Pseudomonas syringae
MARLILAGIQSQGVLQMQDITTFDLPISGMTCASCAGRVERALAKVPGVNSVTVNLANERAHVSVAPQTDPHTLISAVTRAGYGATLIQDRQADAEKKIQHLHRERWALLLAIALALPLIAPMLLTPLGVHWMLPAWAQFALATPVQFILGARFYLAAWKAVRAGAGNMDLLVAIGTSAGYGLSVYQWLHAAPGTTPHLYFEASAVVIALVLLGKYLESRAKRQTASAIRALEALRPDRALRLIDGIEQDVAISELRLGDAVLVKPGERFPVDGEVLEGRSHADEALITGESLPVAKQPGDKVTGGAINGEGRLLIRTAALGAETVLARIIRLVEDAQAGKAPIQKLVDKVSQVFVPTVLVIAFFTLAGWLLVGASLEVALINAVAVLVIACPCSLGLATPTAIMAGTGVAARYGILIKDAEALERAHDVDAVVFDKTGTLTSGTPRITNMSAVLGNEEHLLQLAGALQRGSEHPLAKAVLDVCDEWQLTLDPVENSHALSGRGIAGTVQGRELALGNRRLLDESGLPMGDLAESARIWEADGRTLSWLIEQAPEPKVIGMFAFGDTLKPGTDQAIRALNARGITSHLLTGDNRGSAQMVARALGIHDVHAEVLPADKADTVMRLKSNHVVAMVGDGINDAPALAAADVGIAMGGGTDVAMHAAGITLMRGDPRLVPAALDISQRTYAKIRQNLFWAFVYNLIGIPLAALGYLNPVLAGAAMALSSVSVVGNALLLKTWKPRNLEDKP

SEQ ID NO: 69429 - protein, 295 aa, Pseudomonas syringae
MIASYQAQSQTRVNAALEGLFQAPSPELSRLYEAMRYSVMNGGKRVRPLLAYAACEALGGVAEDANGAACAVELIHAYSLVHDDLPAMDDDDLRRGQPTTHKAFDEACAILAGDGLQSLAFTALLAPHLSSRNAATRLQMVSTLAAAAGPAGMVGGQAIDLGSVGLKLDQAALEYMHRHKTGALIEASVRLGALASGQADQARLDALQVYARAVGLAFQVQDDILDVESDTATLGKRQGADIARDKPTYPALLGLDAAKGYALELRDQALAALSLFDTTAEPLRELARYIVERRH

SEQ ID NO: 69430 - protein, 321 aa, Pseudomonas syringae
MGEFELIRNYFAAAPCAQAGEEVVLGIGDDCALLALPPGEQLAISTDTLVADVHFPAVCDPFLLGQRALAVSASDLAAMGARPVAFTLALTLPHVDADWLQRFAHGLSLMAQGCSLRLIGGDTTRGPLSLTLTVFGAVPSGLALTRSGARVGDLLCVGGALGDGAAALPLVLNQRSAEASIAEPLLARYWSPQPQLALGQALRGKATSALDISDGLLADCGHIARASGVRLLIERDGLPMSPHLLALFDLQAAQQAALSGGDDYVLAFTLPPEHLAGLLDAGWPVHVIGRVEAGNDVVLIDHAGADITPDTRGYQHFGGPQ

SEQ ID NO: 69431 - protein, 394 aa, Pseudomonas syringae
MLTAALEGLIERFNLHGLRMGEVATGAVLKHSRDFNLTRECVLGSRLSAQTPAYDIQQACGTGLEAALLVANKIALGQIECGIAGGVDTTSDAPIGVNEGLRAILLQVNRCKTPADKFKALLQLRPHHLKPELPRNGEPRTGLSMGQHCELMAQTWGIERSTQDQLALESHLKMAAAYAEGWQDDLMTPYLGLIRDNNLRPDLTLEKLASLKPAFERSAKGTLSAGNSTPLTDGASVVLLASEDWARERGLPVLAYWRDGEAAAVDFVKGTEGLLMAPVYAVPRLLARNGLTLQDFDYYEIHEAFAAQVLCTLKAWEDADYCKTRLGLDAPLGSIDRSKMNVKGSSLAAGHPFAATGGRIVANLAKLLAAAGSGRGLISICAAGGQGVTAILER

SEQ ID NO: 69432 - protein, 165 aa, Pseudomonas syringae
MISDDTDQFNPRDAKSPEIAKGKSAKRREARQMATQALYQRHMAGHALNEIEAQFRVDNDFSNVDGTYFRELLHGVAINQTEIDTALTPCLDLTIEELDPIELAILRLSTFELLKRIDVPYRVVINEGIELAKVYGSTDGHKFVNGVLDKLAPRLREVEVKAHKR

SEQ ID NO: 69433 - protein, 363 aa, Pseudomonas syringae
MALNNIEELVEDIRQGKMVILMDDEDRENEGDLIMAAECVKPEHINFMARFARGLICMPMTRERCETLKLPLMAPRNGSGFGTKFTVSIEAAEGVTTGISAADRARTVQAAAAKEAKAEDIVSPGHIFPLMAQAGGTLARAGHTEAACDLARMAGFEPTGLICEVMNDDGTMSRRAELEEFTLQHDIKIGTIADLIHYRMIHERTVQRIAEQPMDSELGSFNLVTYRDSVEGDVHLALTLGKICAEEPTLVRVHNMDPLRDLLMVKQPGRWSLRAAMRAVSEAGSGVVLLLGHPLDGDVLLAHIRETAGQQPIKTPTTYSTVGAGSQILRDLGVRKMRLMSSPMKFNAISGFDLEVVEYVPSE

SEQ ID NO: 69434 - protein, 220 aa, Pseudomonas syringae
MFTGIIESIGSIRALTPKGGDVRVYVETGKLDLSDVKLGDSIAVNGVCLTAVELPGDGFWADVSRETLTVTAFVDLKSGSRVNLEKALTPTTRLGGHLVSGHVDGVGEIVARADNARAIQFTVRAPRELAKYIAHKGSITVDGTSLTVNSVNGAEFELTIVPHTLSETIMADYLPGRKVNLEVDLLARYLERLLLGDKAAEPGHGTITESFLAETGYLKS

SEQ ID NO: 69435 - protein, 378 aa, Pseudomonas syringae
MLTEQAALDVHYMAHALELARKGLYSTHPNPRVGCVIVRDGQIVGQGWHARAGEPHAEVHALREAGELARGATAYVTLEPCSHQGRTPPCADALISAGLARVVAAMQDPNPQVAGSGLLRLMTAGISVQCGVLEGEARALNKGFIKRMETGRPYVRVKMAMSLDGRTAMASGESQWITGPEARSAVQRLRAQSSVVLTGADTVLADKARLTVRPDELGLNAELTALAAACPPLRVLIDGRLRVPLDTPFFQAGSALVVTCAAASARGRYQEDGHEMLALADSAGHVDLRRLMGELGARGVNEVLVEAGPRLAGAFTRLGLVDEFQLFIAGKFLGSSARPLLDLPLAQMSEALELNIIEMRAVGNDWRVIALPVSAPGV

SEQ ID NO: 69436 - protein, 464 aa, Pseudomonas syringae
MASFSHSVGAQTYRFDSLKEVMAKASPARSGDYLAEVAAQNDAERVAAQMALANIPLKHFLEEALIPYEQDEVTRLIIDTHDKLTFAPVSHLTVGGFRDWLLSDQADETSLRALAPGLTPEMAAAVSKIMRVQDLILVAQKIRVVTRFRNTMGLRGRLSTRLQPNHPTDDPSGIAASVLDGLLYGNGDAMIGINPATDSTSSIVALLEMLDAIIQRYDIPTQSCVLTHVTTSIEVINRGVPVDLVFQSITGTEAANASFGINLKLLQEGYEAGLSLNRGTLGQNLMYFETGQGSALSANAHHGVDQQTCETRAYAVARHFNPFLVNTVVGFIGPEYLYNGKQIIRAGLEDHFCGKLLGVPMGCDICYTNHAEADQDDMDTLLTLLGVAGINFIMGIPGSDDIMLNYQTTSFHDALYARQSLGLRPAPEYEAWLEKMGIFTQTDGRVRFGDSLPPAFRQALAHLA

SEQ ID NO: 69437 - protein, 228 aa, Pseudomonas syringae
MNKHLLRASLAALALTAPLAANAYEKGDFIVRAGAAHVQPNEDSGEVRLDGAKVSGTKSTLDGDTQLGLTFAYMLTNHIGIELLAATPFNHTVSVKGLGPGLDGKLADVKHLPPTLSLQYYPMEPSSRFQPYAGVGINYTTFFDNDLTSDRKSQGFSNLKLKDSVGLAAQLGMDYMITDNVLVNASVWYVDINTEATVDGPSALAVGQTKVDVDIDPWVYMVGVGYKF

SEQ ID NO: 69438 - protein, 625 aa, Pseudomonas syringae
MGDFLALSFVWIGSFAVLTTLGRFLAVRLCRTNFIHVRERSQALLKYVLPFTLPAIICLPLTLYVSHFMPASVGRALALCFAYATSSGIVSTSVLLCVIVMFNSGHKRAAVRMIRRYAPRPLFVVGFLAALSDALTSPQIARQLGSNVTTSVAVFTGLFASVVFCMLIIKVRRPVAHLIRNRSLGSRLQRPALQQSLKIFSNLWHLPILLMILVSAINLIGAAEDSQEALRCALFTTILLIATVFLSTVFQHLFKPNESLGRGGHVYKARLLSLLYAVVRIALAITFIEVLGRIWGFSMFEFAQRNTLGRVISDSLSSIGLIFVVTWLLWVVLDTAIQEALKPPVNHRSGRQPSTRIKTILPLLRNAVKIILVVICAITTMANLGINVAPLLAGAGVVGLAIGFGSQQLVQDVITGLFIIIEDTFSVGDWVVLSTGHSGSVESLTIRTVRLRDGKGFVHSVPFGQIKAVTNQSRQFAYAFFSVQFTYDSDIDDALALIRETGQSISDDILLKHNLQGPLEVFGVDSMNLNGMVLTAQFRTSSGGQYAVGRAFNERLKRLVDKNPNVRFSQTYPQVVMGPGFNNPQAGTEPEGPPAPSDPAAATPSAPAPAPLGLPKGGGAPGPAA

SEQ ID NO: 69439 - protein, 376 aa, Pseudomonas syringae
  MISC_FEATURE (182)..(182): X=any amino acid
LTISSDFDSGNIQVLDSSDPAHIKLAIRPDTQSAHFQWFHFKVDGLNVGQTYGLSLSNASESTFNSAWTGYNAVASYDHKHWFRVPSGFDGKALNFSLAAEQAQVWFAYFEPYSRERHDGLIEQAQTNAGMQVLATGKSIEGRDIQLLRKGDGSEGKRKIWFIAQQHPGEHMAEWFNEGVIXALQQKDDTVLQQLLDSADLYLVPNMNPDGAFHGHLRTNAAGKDLNRAWQDSTEAQSPEVLFVRQQMEKYGVDMFLDVHGDEEIPHVFTAACEGNPGYTIHQRQLEERFRSRLSDVTVDFQTVYGYPRSAPGQANMNLAANAIGERYKCLALTLEMPFKDHDNAPDPLTGWSGKRSAQLAKDVLSVLAQMVEELR

SEQ ID NO: 69440 - protein, 1161 aa, Pseudomonas syringae
MIAHLRKPRAWILLAFVVQRLFYQGASNDLLPLLWRRTVRPSGSQRIIKIRRDYNRLVADETMEDYALRFTPKSFRKWSEWRISNTAVGAVSFLALEAIGGALVISYGFTNTLWAILATALVIFLTGLPISYYAARYGVDMDLLTRGAGFGYIGSTITSLIYASFTFLFFALEAAIMALALELYFHIPIALAYIICSIIVIPLAVYGVTLISRLQMWSQPLWLTLLLVPYVFVIWKNPDALGDWLSFSGREGEGGTFDLLFFGAAFSVALSLVTQIGEQVDYLRFLPEKTRHNRKRWWAALLMAGPGWIIPGALKIMAGAFLAFLALQHEVPVERAAEPTQMYLVAFRYVFSSPEWALAAMTLFVIISQIKINMTNAYAGSLAWSNFFVRVTHSHPGRVVWLVFNVAIALVLMELGVFDAIEQVLGLYANVAIAWIGALVADLVINKPMGWSPKHIEFKRAHLYDINPVGVGAMSIASLVSFCAHFGLFGAIAQAAPPLISLAIALVTAPLLAWLTDGKYYIARTSSDTLLYPQGRQESLLCGLCNNAFETPDMAYCPAYRTPICSLCCSLDARCGDQCKPRARLSMQFEDLIGKVLPRFPRHYLHTRLAQYLGLLTILVAGSSGALALIYNQVAHGLIDQSPEAHHLLMLAFLKAFLTVCVFAGVLAWWVVLTRESRRVAQEESERQTSLLIQEIDAHEKTDQALQKAKEASEAANAAKSRYITGLSHELRTPLNSILGFTQILQRDTTTPPHHQDPLATIMRSSSHLLSLINGLLDVAKIEAGKLKLEPTEILFQEFLHDLEKMFAGTAQEKNLGFRLELEGRMPMVVRGDEKRVRQILINLLGNAVNFTDSGEVVLRVSYRRETAIFDIVDSGIGIAPEQIERIFQPFERGGQTRHDNGVGLGLTITRMLTALMGGALSVSSTPGEGTHFKVRLFLSEVRVPKAVIDVNHDVVGYDGERRLVLVVDDHIEHRKVISGMLEPLGFTVAQAENGMEAVRQVSLLHPDLILMDLSMPDMDGWATLRMIRRNARSNAPVIVLSANANASTDDDIGHDYLSKPVHLRDLLDRLKHHLNLNWQHRSRTASETKTPWILPPREDLEDLYTLCGLGYVRGIQNKLDAIETSNIASGSFVTDLRALAKGFRLDELSLHLKEMLDERP

SEQ ID NO: 69441 - protein, 284 aa, Pseudomonas syringae
MSLNFPLLLVIAVFVCGVLALIDLVFLAPRRRVAISNYQGSVGEPDIAVVERLNKEPLLVEYGKSFFPVLFIVLVLRSFLVEPFQIPSGSMKPTLDVGDFILVNKFSYGIRLPVLDQKVIELGDPQRGDVMVFRYPSDPSVNYIKRVVGLPGDRIRYTSDKRLFINGELVAKKLIGTEPGTLGSAELYEEQLGTVEHQIRQEMSRYRAPPDSEWTVPAAHYFMMGDNRDNSNDSRYWDDPNIPKDELGMVPDKNIVGKAFAVWMSWPEPKLSHFPNFARVGLIK

SEQ ID NO: 69442 - protein, 468 aa, Pseudomonas syringae
MIAAVLMLGQVATAQAENLPDFTGLVEQASPAVVNISTRQKLPDRAVANKQMPDLEGLPPMLREFLERSMPPGSRAPGAGKGDRQREAQSLGSGFIISPDGYVLTNNHVIDGADEILVRLSDRSELKAKLIGTDPRTDVAVLKIEGKDLPTAKLGNSNTLKVGEWVLAIGSPFGFDHSVTKGIVSAKGRSLPNDTYVPFIQTDVAINPGNSGGPLFNMAGEVVGINSQIFTRSGGFMGLSFAIPIDVAMDVANQLKASGKVSRGWLGVVIQEVNKDLAESFGLDKPAGALVAQVLEDGPAAKGGLQVGDVILSANGQPVVMSADLPHLIGNLKDGSKAELEVIRDGKRQKLTVTVGALPDEGLEMGGAAGASAERSSNRLGVSVIELTAEQKKTLDIKGGVAIKEVTDGPASLIGLQPGDVITHLNNQAITSGKQFTDVAKSLPKDRSVSMRVLRQGRATFITFKLSE

SEQ ID NO: 69443 - protein, 84 aa, Pseudomonas syringae
MVEDVELNRLYWHSRRGMLELDVLLVPFVREVYPHLNDVDRDLYRRLLTCEDQDMFGWFMQRAESEDAELQRMVRMILDRVQPK

SEQ ID NO: 69444 - protein, 230 aa, Pseudomonas syringae
MRLDRFLSNLPRFNRKSVRLALASGRVQVDGQITTDPHYDVREFSCVAFDMQILQPGKAARYFMLHKPQGCVSATTDAQHATVLDLLDEPDKHELHIAGRLDFNTTGLMLITNDGQWSRRLTQPHTKMPKVYYVETEQLIDERYALTFAEGLFFSFENIITQPAQLTVLGPRSARLSIIEGRYHQVKRMFGHFDNKVLQLHRESIGALILDPALPPGGYRSLQAAEIALF

SEQ ID NO: 69445 - protein, 315 aa, Pseudomonas syringae
MTMAHTAFFCTLSHEGVLAVRGVDAGKFLQGQLTCNLNYLDENTSSLGARCTQKGRMQSSFRLVFEGDGCLLAMASELIEPQLLDLRKYAVFSKSKLTDESSAWVRFGLQEGDGALVGLGLDLPQDTGTVVRANELIAIRVSPARAELWVRAEQADTLKARLASQLAEGPLNDWLLGQIRVGIGQVFGSTREEFIPQMINLQAVGGVSFKKGCYTGQEIVARMQYLGKLKRRLYRLTLRSDEIPAPGTALFSPVHGSAVGNVVIAAQAGQDVELLAVLQGDAAENGHIHLGSPEGAALHMNELPYTLDSKLETQR

SEQ ID NO: 69446 - protein, 300 aa, Pseudomonas syringae
MNDTTATRCGYVAIVGRPNVGKSTLLNHILGQKLAITSRKPQTTRHNMLGIKTEGTVQAIYVDTPGMHKNGEKALNRYMNKTASAALKDVDVVIFVVDRTRWTDEDQMVLERVQYVQGPVILAINKTDRIEDKSDLMPHLEWLQGQLPNASIVPISAQHGHNLEALESLIASHLPENDHFFPEDQITDRSSRFLAAELVREKIMRQLGAELPYQITVEIEEFKQQGRTLHIHALILVERDGQKKIIIGDKGDRIKRIGSDARRDMEVLFDSKVMLNLWVKVKGGWSDDERALRSLGYGDL

SEQ ID NO: 69447 - protein, 903 aa, Pseudomonas syringae
MPYEEKTQAGLSITDCRGAPLYEFRYPQQFYATFASVPPLLVHSLLFIENRDLLDPQQPLANPAVDWPRFVKAAWSQVAKMFALPGQSAGGSTLATQLEKYRHSPDGLTQSGSEKLRQMISASVRAYQPGAETLEVRQRVVRDYLNSVPLSAVPGHGEVHGLAEGLRVWFGVDFARTNQLLASGPTDQQGLADKALALREVLSLVIAQRRPSHYLAKGRTELAELTDSHIRLLAQANIIDPPLAEAALAAKVTYRDWAQQPTLQPIETNKGISVARTRLSNLLNRPLYDLDRLDLSATSTLHGDLQRSVSQYLRDLADPEFAAKVGLLGERLLTPASTTQVRYSFTLFERGVDGSRVRVQTDSTDQPFDINEGSKLELGSTAKMRVLTTYLEIIAELHGRYAGMSTAELRKVTVEEPDRLTRWAVDYLLLNKDRDLAKMLSAALDRTYSASPAEAFFTGGGLHRFNNFRREDNERIPTLRESLRESINLPFIRLMRDVVRYSTYQAPNNSAALLKDDDDPRRQEYLSQFADREGTVFLLRFWKRYKDKTTQERLDTFLDGIHPTAIRLAAVHRYLLPGADQATFNTFVRAHLEEPKATSTLTDKRLTDLYQSYGPGAYNLPDQGYIARVHPLDLWLVGYLLKHPDAQFKDAAAASRFERQEVYGWLFKSRHKGARDSRVRTMMEVEAFLDIEQRWQRVGYPFDHLVPSLATAIGSSGDRPAALAELIGIIQNDGIRLPPVRIDSLHFAADTPYDTELIINPELGQRVLPSEVATAMREALSQVVDGGTAKRVQGTFKMQDGSVLAMGGKTGTGDNRIESIGAGGRILSSRAINRTATFVFYIGDNHFGALTAFVPGRAAEGFRFTSALPVQVLKGMAPILTPYLENHGQAMCNAPLADPPTGA

SEQ ID NO: 69448 - protein, 212 aa, Pseudomonas syringae
MPIREIRHPLIRHKLGLMRRADISTKNFRELAQEVGALLTYEATADLTLESYDIQGWAGTVSVEKIAGKKITVVPILRAGIGMLDGVLSLIPGAKVSAVGVARNEETLQAHTYLEKLVPEIDERLAMIIDPMLATGSSMVATIDLLKKAGCKEIRAMVLVAAPEGIAAVERAHPDVMIYTASIDERLNEHGYIIPGLGDAGDKIFGTKQKDA

SEQ ID NO: 69449 - protein, 684 aa, Pseudomonas syringae
MGLTSISLGLVRTLERAGLKVGFFKPIAQPHPGDLGPERSTELMARTHGLKPPKPLGLAHVERMLGDGQLDELLEEIINLYQQAAVGKDVLVVEGMVPTRSASYAARVNLHLAKSLDAEVILVSAPENEVLTELSGRVELQAQLFGGPKDPKVLGVILNKVRTEESMEVFAARLKEHSPLLRNGDFRLLGCIPYRAELNAPRTRDVAELLGAQVLNAGDYDQRRMSRIIICARTVLNTVPLLKPGVLVVTPGDRDDIILAVSLAAINGVPLAGLLLTSDTVPDPRIMELCRGALQAGLPVLSVSTGSYDTANRLNQLNKEIPIDDRERAEIITDFVASHLDASWLHQRCGTPRELRLSPAVFRYQLIQRAQAANKRIVLPEGNEPLTIQAAAICQARGIARCVLLARPEEVQAVAQAHGIELPPGLEILDPDLIRERYVAPMVELRKSKSLNAPMAEQQLEDPVVIGTVMLALDEVDGLVSGVVHSTANTIRPALQLIKTAPGCTLVSSVFFMLFPEQVLMYSDCIMNPHPSASELSEIALQSADSATAFGISPRVAMISYSSGNSASGEEVEKVREATQLARETRRDLLIDGPLQYDAAANEHVARQLAPDSQVAGRANVFVFPDLNTGNTTYKAVQRSADCVSLGPMLQGLRKPVNDLPRGAQVDDIVYTIALTAIQADTLS

SEQ ID NO: 69450 - protein, 53 aa, Pseudomonas syringae
MPMPALALKVLLGELSVLLLGGQRARPERLQEAGFTFKYAELDTALQDLLGRH

SEQ ID NO: 69451 - protein, 229 aa, Pseudomonas syringae
MFTSRRLIIVATAVALLSGCATSNPYDNQGQAQSSGGMSKTAKYGGLGALAGAVAGAAIDHNNRGKGALIGAAVAGAASAGYGYYADKQEAALRASMANTGVEVQRQGDQIKLIMPGNITFATDSSAIASSFYSPLNNLANSLKQFNQNNIEIIGYTDSTGSRQHNMDLSQQRAQSVATYLTSQGVDQSHLSVRGAGPDQPIASNADANGRAQNRRVEVNLKPIPGQQY

SEQ ID NO: 69452 - protein, 259 aa, Pseudomonas syringae
MQAVLSDQELLRYSRQILLQHVDIEGQLRLKQSRALVVGMGGLGSPVALYLAAAGVGELHLADFDHVDLSNLQRQIIHDTQSIGQAKVDSAMARLAAINPQIKLIAHRAALDADSLSAAVQAVDLVLDCSDNFATREAVNAACVAAGKPLVSGAAIRLEGQLSVFDPRRAESPCYHCLYGHGSETELTCSEAGVIGPLVGLVGSLQALEALKLLAGFGEPMVGRLLLIDALSTRFRELKVKRDPACSVCGPINGQGEHA

SEQ ID NO: 69453 - protein, 395 aa, Pseudomonas syringae
MLKKIPVADLALGMHIHKICRRWTDDPFWISLVEVMLEDADVLKRIQQSGTREVWIETGKSRVLALPPAAATTQGQNDTAPASLDKEVLRARLICGRARNAVMAMFTEARMGQAMDVDNVQLLVEEISNSILRHPHALISLSRLKTSDEYTYMHSVAVCALMVALARRMGMPDEQVREAGVAGLMHDVGKMMIAPDVLNKPGRLTHEEFETMKAHPELGLKILKENQPVAAMVMDVCLHHHEKIDGSGYPHGLQGEQISIFARMGAVCDVYDAITSDRPYKKGWGVAHSIREMASWKGHFDERVFQSFVKTVGIYPIGTLVRLESGRLGVVVEQSEESLLKPRVKVFMSARTGKTFAAQIIDLGCSADPDAIVKIELPGDWGLAEVDTLWAGTPA

SEQ ID NO: 69454 - protein, 277 aa, Pseudomonas syringae
MTIIASLLRSAELPDSPTARLDIELLLAAALGKPRSFLHTWPERIVSTEAAVAFAGYLQRRRTGEPVAYILGQQGFWKLDLEVAPHTLIPRPETEMLVEAALELVPAFAPAQVLDLGTGTGAIALALANDRQQWKVTAVDRVPEAVALAERNRQRLQLDYAQVLNSHWFSALEGRQFDLIISNPPYIADADPHLSAGDVRFEPSSALTAGADGLDDLRTIIADAQAHLNADGWLLLEHGYDQGPAVRELLTRHGFERIQTRRDLGEHERITFGCKPC

SEQ ID NO: 69455 - protein, 360 aa, Pseudomonas syringae
MKASLLNKLDVLSDRFEELTALLGDAEVISDQTRFRAYSREYAEVEPVVALYKQLARVQGDLEGAQALLKDSDPDMREMAVEEVRETKQQLVELEAQLQRMLLPKDPNDGRNVFLEIRAGTGGDEAAIFSGDLFRMYSRYAERRGWRVEILSENEGEHGGYKEVIARVEGDSVYGKLKFESGAHRVQRVPKTESQGRIHTSACTVAVLPEPDEQQAIEINPADLRVDTYRSSGAGGQHVNKTDSAIRITHLPSGIVVECQEERSQHKNRARAMSWLSAKLNDQQTSAAASAIASERKLLVGSGDRSERIRTYNFPQGRVTDHRVNLTLYSLDEVLAGGVDAVIEPLLAEYQADQLAALGE

SEQ ID NO: 69456 - protein, 645 aa, Pseudomonas syringae
MTTTTPFWRRAKLPLAVSLASSLAGPAFGVTFNVGEIEGSFDSSLSVGASWSTEKANKNLIGANNGGRGLSQTSDDGHLNFKRGETFSKIFKGIHDLELKYGDTGVFVRGKYWYDFELKDENREFKDISDSGRKEGAKSSGFQLLDAFVYHNYSIADQPGAVRFGKQVISWGESTFIQGGINSVNPVDVSAFRRPGSEIKEGLIPVNMFYLSQSLTDNLSAEGFYQLEWDQTVVDNCGTFFSQPDVIADGCNNNLAVLRSRSGLNSSLTAAGLPAGARGAVFNSLSQQGVVFGNPDEGAVVRRGPDRDARDSGQFGFAMRYNFEPLDTEFGAYMMNYHSRAPVFSGRGGSAASFSPQGLVGSLVRNGLPAGTAAALAPTLLPVVVAGNSSYYVEYPEDIRLYGLSFSTTLPTGTAWSGEISYRPNAPVQVNTTDILYSGISPLNPNVSLLSGRPNTDQPGYRRKEITQMQTTFTQFFDQVMGAERLTVVGEVGWTHVGGLESTSKIRYGRDPVYGPGPLPGGQCATLNAGTLTGAEQNNLTRYCEDDGFTTANSWGYRARAIWDYNSVFAGVNLRPSVAWSHDVKGYSPGPGGNFEEGRKAVSLGLDAEYQNTYTANLSYTNFFDGKYTTVDDRDFVALSFGMNF

SEQ ID NO: 69457 - protein, 371 aa, Pseudomonas syringae
MYIEHEHLGADSILAWLANYHHLSLEELRASAYVHEDDAAVRHMMRVASGLDSLVLGEPQILGQMKSAYAVAREAGTVGPLLGRLFQATFSAAKQVRTDTAIGENPVSVAFAAVSLAKQIFSDLQRSQALLIGAGETITLVARHLHDLGVKRIVVANRTLERASILAAEFGAHAVLLSDIPAELVNSDIVISSTASQLPILGKGAVESALKLRKHKPIFMVDIAVPRDIEPEVGELDDVYLYSVDDLHEVVAENLKSRQGAALAAEQLVSVGAEDFMSRLRELAAVDVLRAYRQQSERLRDEELSKAQRMLANGSNAEDVLIQLARGLTNKLLHAPSVQLKKLSAEGRVDALAMAQELFALGEGSTDKTPQ

SEQ ID NO: 69458 - protein, 332 aa, Pseudomonas syringae
MDPRSEVLLRQPELFQGSLLLVGLPADDLLGKLPNARGWCWHAGDQAALDARFEGRVDFGVEAPEATFEAAVLFLPKARDLTDYLLNALASRLAGRELFLVGEKRGGIEAAAKQLSPFGRARKLDSARHCQLWQVTVENAPQAVTLESLARPYQIELQDGPLTVISLPGVFSHGRLDRGSALLLENIDKLPSGNLLDFGCGAGVLGAAVKRRYPHNDVVMLDVDAFATASSRLTLAANGLEAQVVTGDGIDAAPMGLNTILSNPPFHVGVHTDYMATENLLKKARQHLKSGGELRLVANNFLRYQPLIEEHVGYCHVKAQGNGFKIYSAKRS

SEQ ID NO: 69459 - protein, 313 aa, Pseudomonas syringae
MSKMMVFTGNANPDLARRVVRQLHIPLGDVSVGKFSDGEISTEINENVRGKDVFIIQPTCAPTNDNLMELVVMADAFRRSSASRITAVIPYFGYARQDRRPRSARVAISAKVVADMLTVVGIDRVLTVDLHADQIQGFFDIPVDNIYGSPVLVDDIEDQRFENLMIVSPDIGGVVRARAVAKSLGVDLGIIDKRREKANHSEVMHIIGDVEGRTCILVDDMVDTAGTLCHAAKALKEHGAAKVFAYCTHPVLSGRAIENIENSVLDELVVTNTIPLSAAAQACSRIRQLDIAPVVAEAVRRISNEESISAMFR

SEQ ID NO: 69460 - protein, 203 aa, Pseudomonas syringae
MNDFTLNAELRSDLGKGASRRLRRLASLVPAVVYGGDKAPESISMLAKEVAKLLENEASYSHIIELNVGGTKQNVIIKALQRHPAKGHVLHADFVRVVAGQKLTAIVPVHFIGEEAPIKKGGEVSHVTSELEVSCLPKDLPEFIEVDVSALEIGSIVHLSDVKAPKGVEFVALAHGNDLAIANVHAPRVVKDEDEEAAEGAAE

SEQ ID NO: 69461 - protein, 366 aa, Pseudomonas syringae
MGFNCGIVGLPNVGKSTLFNALTKSGIAAENFPFCTIEPNTGIVPMPDPRLAALAAIVNPKRILPTTMEFVDIAGLVAGASKGEGLGNKFLANIRETDAIAHVVRCFEDENVIHVSNSVDPKRDIEIIDLELIFADLDSCEKQLQKVTRNAKGGDKDAVVQKGLLEQLIAHFSEGKPARSLMKSMSNDDKAVIRGFHLLTTKPVMYIANVAEDGFENNPLLDVVRAIAEEEGAMLVPVCNKIEAEIAELDDGEEKDMFLEALGLEEPGLNRVIRAGYEMLHLQTYFTAGVEEVRAWTVRVGATAPQAAGVIHTDFEKGFIRAEVVAYDDFIQFKGEAGAKEAGKWRLEGKEYIVKDGDVMHFRFNV

SEQ ID NO: 69462 - protein, 338 aa, Pseudomonas syringae
MRSRVAGELVKLYFQEGQKVKAGDLLAEIDPRSYQVALQQAEGTLATNQALLKNAQLDVQRYRGLFAEDSIAKQTLDTAESLVSQYQGTIKTNQAAVADAKLSLDFTRIRAPIAGRVGLKQLDVGNLVAANDTTALVVITQTQPISVAFTLPEKDLSAVISRYRTGDKLPVEAWDRGDTKMQATGVLASLDNQIDVATGTLKFKARFENNDEILFPNQFVNVRLRADTLKQAILVPTAAVQFGTDGTFVYVLDGDKKVKLKLLKTGPSDETSTVITEGLAAGERVVLEGTDRLRDGAEVEVVNDSKDVPAGPGQKLQGKPDSKSEKSAVLGKVEKPNV

SEQ ID NO: 69463 - protein, 361 aa, Pseudomonas syringae
MGRAHALAFGSANAALELPARIHLAALADADSARAEQCAQAWGFDRSHADWQQLVEDPRVQIVAITTPNHLHFPMAMAAIAAGKAVYCEKPLAVSLAQADEMQRSAKAAGVVTQVGYNYQHNPMIGLAREMIEAGELGDIVSFQGEFSEDFMGSATSPWSWRCEAAHAGGALADLGSHLLAMARYLLGDIEAVCADANTVHSQRPASPGSNEMRAIAVDDQTHALLRFASGARGTFSSSWLKHGYKNHLSFEISGTQGTLTYDQERLNELRIYRPGAPGRDGFQRLLAGPAQPGYAAFCPAPGHQLGYNELKALEVQALILAVCGQGSRGPDFEEAWQIERLATAIRLAAHEQRWVALDDI

SEQ ID NO: 69464 - protein, 355 aa, Pseudomonas syringae
MALTDQSTDIRAGEELDVAVIDPYLKAHIAQLHGTPTISQFPGGASNLTYLIQYANRELVLRRPPFGQKARSAHDMGREYRILNQLRDAFPYCPEAYLHCTDESLIGSEFYVMQRLKGIILRSDLPPELALDAQHTESLCKSFIDKLVDLHQVDYQACGLGDLGKPHGYVQRQIAGWSERYEKAMTPDAPAWQQVKAWLVDKMPADSPASSIVHNDYRFDNVILDPADPMRIIGVLDWELTTLGDPLMDLGNTLAYWVQADDPLAVQMTRRQPSNAPGMLTRQAFVDYYAERSGIRIDNFDFYYTYGLFRLAGIVQQIYYRFFHGQTQDKRFARFIDMNRLLEQMSLGVIAKSSL

SEQ ID NO: 69465 - protein, 480 aa, Pseudomonas syringae
MSTTISPTAYNYRVVRQFAIMTVVWGVIGMSLGVFIASQLVWPGLNLELEWTTFGRLRPLHTNLVIFAFGGCALFATSYYVVQRTCQTRLISDGLAAFTFWGWQAVIVGAIVTLPMGYTTTKEYAELEWPVAILLAIVWAAYAAVFFGTIVKRRTRHIYVANWFYGAFIVVTGMLHVVNHVSLPVSLFKSYSAYAGATDAMIQWWYGHNAVGFFLTTGFLGMMYYFVPKQAERPVYSYRLSIVHFWALITLYIWAGPHHLHYTALPDWAQSLGMVMSIILLVPSWGGMINGMMTLSGAWHKLRTDSILRFLVVALAFYGMSTFEGPMMAIKTVNSLSHYTDWTIGHVHAGALGWVAMITIGSVYHMIPKLYARPQMHSVGLINAHFWLATVGTVLYITSMWVNGITQGLMWRAVNDDGTLTYSFIETMQASHMGYIVRVIGGVIFTSGMLLMAYNVWRTVRASDPQAAQAAARIAVAGAH

SEQ ID NO: 69466 - protein, 214 aa, Pseudomonas syringae
MSSMVTPQHAQELSTGARELGIDLSEAQHEQLLAYLALLIKWNKAYNLTAVRNPDEMVSRHLLDSLSVVPFIEGTRWMDVGSGGGMPGIPMAILFPERNISLLDSNGKKTRFQTQVKLELKLDNLEVIHSRAENYQPDVPFDGIISRAFSSLEDFAGWTRHMGDVNTRWLAMKGLHPADELVALPSDFHLDSAQALTVPGCQGQRHLLILRRTA

SEQ ID NO: 69467 - protein, 194 aa, Pseudomonas syringae
MDNHIRPVELEKAYRLLNHGPTVLVSSSHEGTHNVMAAAWACALDFSPPKVTLVIDKITKTRGLVEKSGYFALQVPNLDQLQMTFDVGTQSKVFTPDKLDKANVDLFRIEDHHTPLVAGCSAWLICKVIPEPHNEQTYDLFIGEVVGAWADNRVFNEGHWQFEKADPKWRSLHYIAGGHFYTIGEPAVVETGEE

SEQ ID NO: 69468 - protein, 1239 aa, Pseudomonas syringae
MSDRSARHQAFITALKQRILILDGGMGTMIQSYRLEEEDYRGKRFADWPSDVKGNNDLLILTRPDVIGAIEKAYLDAGADILETNTFNATQVSQADYGMESIVYELNVEGARLARKVADAKTLETPDKPRFVAGVLGPTSRTCSLSPDVNNPGYRNVTFDELVENYTEATKGLIEGGADLILIETIFDTLNAKAAIFAVQGVFEELGFELPIMISGTITDASGRTLSGQTTEAFWNSISHAKPVSVGLNCALGASELRPYLQELANKANTHVSAHPNAGLPNAFGEYDELPSQTAKIIEEFAQSGFLNIVGGCCGTTPEHIKAIAEAVSGYAPREIPDIPKACRLSGLEPFTIDRQSLFVNVGERTNITGSARFARLIREDNYTEALEVALQQVEAGAQVIDINMDEGMLDSKKAMVTFLNLIAGEPDISRVPIMIDSSKWEVIEAGLKCIQGKGIVNSISMKEGVEQFIHHARLCKRYGAAVVVMAFDEQGQADTEARKKEICKRSYDILVNEVGFPPEDIIFDPNIFAIATGIEEHNNYAVDFINACAYIRDELPHALTSGGVSNVSFSFRGNNPVREAIHSVFLLHAIRNGLSMGIVNAGQLEIYDQIPAELRDCVEDVVLNRNPEGTEALLAIADKYKGDGSVKEAETEEWRSWPVNQRLEHALVKGITTHIVQDTEESRLGFTRPIEVIEGPLMSGMNVVGDLFGAGKMFLPQVVKSARVMKQAVAHLIPFIELEKGDKPEAKGKILMATVKGDVHDIGKNIVGVVLGCNGYDIVDLGVMVPAEKILQVARDEKCDIIGLSGLITPSLDEMVHVAREMQRQDFHLPLMIGGATTSKAHTAVKIEPKYSNDAVIYVTDASRAVGVATQLLSKELKPAFIEKTRLEYVEVRERTSARSARTERLSYGAAVAKKPKFDWESYTPAKPTFTGTRVLQDIDLNVLADYIDWTPFFISWDLAGKYPRILTDEVVGEAATALFEDAQQMLRKLIDEKLISARAVFGFWPTNQINDDDLEVYGEDGKPLAKLHHLRQQTIKPDGKPNFSLADFVAPKDSGLTDYIGGFITTAGIGAEEVAKAYQDNGDDYNSIMVKALADRLAEACAEWLHQQVRKDYWGYAKDEALDNEALIKEQYMGIRPAPGYPACPDHTEKGTLFALLDPLPEGTPEHTPGKSGVFLTEHYAMFPAAAVSGWYFAHPQAQYFAVGKVDKDQVESYTARKGQDLSVTERWLAPNLGYDE

SEQ ID NO: 69469 - protein, 535 aa, Pseudomonas syringae
MAILHTRINVRSTEFALNHDALLKQVEELRSLLGKVRQGGGAKAQERHTSRGKLLPRERINRLLDSGSPFLEIGQLAAHEVYGEDVPAAGVIAGIGRVEGVECMIIANDATVKGGSYYPLTVKKHLRAQTIAQQNRLPCIYLVDSGGANLPRQDEVFPDREHFGRIFFNQANMSAQGIPQIAVVMGSCTAGGAYVPAMADEAIMVRQQATIFLAGPPLVKAATGEVVSAEDLGGADVHCRTSGVADHYADSDEHALGLARRSIANLNWRKQGQLNAIAPIAPLYAGEELYGIIPADTKQPFDVREVIARLVDGSTLDEFKALFGTTLVCGFARLHGYPIAILANNGILFAEAAQKGAHFIELACQRGIPLLFLQNITGFMVGQKYEAGGIAKHGAKLVTAVACAKVPKFTVIIGGSFGAGNYGMCGRAYDPRFLWMWPNARIGVMGGEQAAGVLVQVKCEQAERAGQAFSAQQQAELKQPILDQYEHQGHPYYSSARLWDDGVIDPAQTREILALALCASLNAPIEPTTFGLFRM

SEQ ID NO: 69470 - protein, 1108 aa, Pseudomonas syringae
MAKKPDAATFIKDPLWYKDAVIYQVHVKSFFDANNDGIGDFAGLIEKLDYIAALGVNTIWLLPFYPSPRRDDGYDISEYRDVHSDYGTMADAKRFIAQAHKRGLRVISELVINHTSDQHPWFQKARNAKPGSKARDFYVWSDTDQKYDGTRIIFLDTETSNWTWDPVAGQYFWHRFYSHQPDLNFDNPHVLDAVLEVMRFWLDLGIDGLRLDAIPYLIERDGTNNENLPETHQVLKRIRAEIDANYPDRMLLAEANQWPEDTQLYFGDSKGPDGDECHMAFHFPLMPRMYMALAQEDRFPITDILRQTPEIPENCQWAIFLRNHDELTLEMVTDRERDYLWNYYAADRRARINLGIRRRLAPLVERDRRRVELLNSMLLSMPGTPTLYYGDEIGMGDNIYLGDRDGVRTPMQWSIDRNGGFSRADPASLVLPPIMDPMYGFQSVNVESQERDPHSLLNWNRRMLAVRKQQKAFGRGTLKMLSPSNRRILAYTREYTAPDGHSEVVLCVANVSSAAQAAELDLSGYAGTVPVEMLGGSAFPPIGQLNYLLTLPPYGFYWFLLATENQMPSWHVEPAQSMPDFPTLVLKKRLEELLEEPLRSTMEDTSLTVYLPKRRWFAGKDKAIEKVNIAYAVRFGDEAHPVLLSEIEVTAGGQTDRYQLPFGLLGEDDISSALPQQLALARVRRSRDVGLITDAFTLETFIRAVIQGMQSDTVIPCADGQLRFEQSSQLAPLGLTHESEVRYLSAEQSNSSVVVGSSLVLKLIRKVSAGTHPELEMGAFLTHAGFKNISPLLGSLVRVGNDGQPNLLMIAQGYLSNQGDAWEWTQNNLERAVRDELAHGVSGQEQHYNALLELADFSRSLGQRLGEMHQILASPTDNADFAVEITSAQDSKASATSVNAQLERALQLLEQRKGDLDKDDQQLVSDLLAHRKQIRQRVEGLAKRSAGGLRIRVHGDLHLGQVLVVKGDAYLIDFEGEPARALEERRAKHSPFKDVSGVLRSFDYAAAMAVRSAQSVDTSPQAAAARKQVAETYLAQAREAFIEGYRLATSGIAHAWKDAKGEDSALELFTLEKAAYEVIYEAENRPAWLAVPLQGLRGLLQPSDGEPI

SEQ ID NO: 69471 - protein, 521 aa, Pseudomonas syringae
MQFGAKPLFENVSVKFGAGNRYGLIGANGCGKSTFMKILGGDLEPSGGQVMLEPNVRLGKLRQDQFAYEEFTVLDTVIMGHEELWKVKAERDRIYSLPEMSEDDGMAVAELETEFAEMDGYTAESRAGELLLGLGIGIEQHTGPMSEVSPGWKLRVLLAQALFSDPEVLLLDEPTNHLDINTIRWLENILTQRNSLMIIISHDRHFLNSVCTHMADLDYGELRLFPGNYDEYMTVATQSREQLLSDNAKKKAQISELQSFVSRFSANASKAKQATSRAKAIDKIQLAEVKPSSRVSPFIRFEQTKKLHRQAVIVDRMAKGFDGKTLFKDFSFQVEAGERVAIIGPNGIGKTTLLRTLVNELTPDAGTVKWTDAAELGYYAQDHAHDFEDDCNLFDWMGQWTQGGEQVVRGTLGRMLFSNDEILKSVKVISGGEQGRMLFGKLILQKPNVLIMDEPTNHLDMESIEALNLALENYPGTLIFVSHDREFVSSLATRIIELSASGVVDFSGTYDDYLRSQGVTF

SEQ ID NO: 69472 - protein, 176 aa, Pseudomonas syringae
MTITQRDASSADAICLSALGMQVFLDTYATQGIRESIAREALDAFSPQAFAHLLAEPATLIIVAESQGHLIGFAQFALRTDHPMLGIPTAAELQRLYVQERFTGRGVGRLLLEAAEQRAAAGNATLLWATVWVGNPRALGVYPRQGYEVKGSPRYVFQGETHENCLFAKAIVKAVR

SEQ ID NO: 69473 - protein, 301 aa, Pseudomonas syringae
MSKTTKITDPSYELMDDHNGLSIIYREHGFPCPLVRWHFHKEYELHLIVASSGKVFVGDYIGNFNPASLFLTGPNLPHNWISQVDEGEVVARRDMLVNFTDELLESGNQVFAELKTLTPLLERARYGIEFRCKRTIRQAMKQMQKIADSRGITRLGHFFILLELLAASDDYQLLSGTAVAHTADEHSVDRTNRAVDYIFAHYSRELPLEEVAEYLGMKPTYFSRVFKQATGRCFVEFVNRLRISKSCELLADGDKTVTDVCFESGFNNISNFNRRFQQLKGMTPSHYRRLAVQRLTEQNLY

SEQ ID NO: 69474 - protein, 71 aa, Pseudomonas syringae
MPAVKVKENEPFDVALRRFKRSCEKAGVLAEVRSREFYEKPTSERKRKAAAAVKRHAKKVQREQRRAVRLY

SEQ ID NO: 69475 - protein, 1215 aa, Pseudomonas syringae
VSLIALLLLVIVSASLLLGTQAGSRWALASVPGLQLENFQGRLGGQWGAERLVWQQGEDRVEVQAVDFAWTPACLLKMTLCIDRLHAGQVLLRFPPSGAPSDEGPVNLPALRLPLALQLDDVQLGSLQLDGAEQLRDLKLAAHWTAQGLQIDSAHLQRDALILDLNGLLKPEGDWPLTAKRAIAASAAGRPAVDAGSGYSGRRAQDPATEADSSGYLTGVLSGELQPLAEHLPARLKLTAEHFKPSAALPDTLQLDQLLLTAEGNLDSGYLINGSASLPAEKDPVALALQGRVDANGASIAALDLAADDQQRLTINGTLNWQNGFSADANIDWLDFPWQRLYPVASEPQVALHAFKGEVSYTDGNYLGNFNASLKGPAGAFTVVSPFSGNLQEIHLPQLEVVAGQGKASGHLNLQFADGIGWDTALDLSALDPSFWVAELPGTLAGPLRSKGQFRNEQLELNADLDLKGRLRGQPAVLQAKADGRDQQWTVSSLNIRLGDNRIQGTGSLQQRLNGQLDLDLPRLGQLWPRLQGQVKGRLDLAGTLQTPQGQLALQGSQLALQDNRLQSLALTARLDQAQRAALNVKGVGIQAGDTALGTLLVDGQGTLKAQQVKLDLQGPLLKLAIALDGGLDKGNWRGRLASGTVQSGGQNWRLQQPAKIERLADGRLNFGAHCWLSGAASLCGGDQRLMPDPRLRYQLKNFPLDSLAQWMPKDFAWKGTLNANVQLDIPAAGPSGQISIDAGGGTLRVRNNDQWLDFPYQTLKLASTLTPKRIDSRLDLKAANWAVLLLNAQIDPLAKNKTLAGDFNLSGLDISVARPFAPMVQKLSGRLNGNGRLSGSLLAPLVNGSVTLEGGEVAGAELPMELHDLKVQALIAGESVQINGGWKSGSTGQGSIGGQVAWGQSLLVDVSLKGSRLPINVEPYAAVEAAPDLKISMQGERLAISGKVLVPKGAITVRELPPSTVKLSGDTVIVGQQTGEGAPPLAVAMDINVEVGQEKLSFSGFGLTANLVGRVHIGDNLDTRGELNLNDGRYRAYGQRLTIRKARLLFAGPVDQPYLDIEAIRQTDDVIAGIRLTGSAEQPTTEVFSEPAMSQEQALSYLVMGRPLSTSGEDNNMVAQAALALGVAGSSSTTGKLADNLGIKDFELDTSGTGDKTNVVASGKITEKLSLRYGVGVFEPANTIALRYLLSKRVYLEAASGVASSLDIFYKRDF

SEQ ID NO: 69476 - protein, 220 aa, Pseudomonas syringae
  MISC_FEATURE (201)..(201): X=any amino acid
MNYQLNFDAVWRDFSNLLAGLGLGLELALISIAIGCVIGLMNAFALLSRYRALRIVASIYVTVVRNTPILVLILLIYFALPGLGIRLDKLASFVVTLSLYAGAYLTEVFRAGLLSIHKGQREAGLAIGLGEWQVRAYIIVPVMLRNVLPALSNNFISLFKDTSLAAAIAVPELTYYARKINVESYRVIETWLVTTALYVVXCYVIAMLLRTLEQRLAIRR

SEQ ID NO: 69477 - protein, 233 aa, Pseudomonas syringae
MTFRFFALFCTTLLITASLPAQAQAPRTFSEAKKVAWGLYAPQSTEFYCGCKYTGKRVDLAGCGYVPRKSAKRASRIEWEHIVPAWQIGHLRQCWQNGGRKNCTKSDPVYKRAEADLHNLVPSIGEVNGDRSNFSFGWVPEQKGQYGSCLTQVDFKAKKVMPRPSIRGMIARTYFYMSKQYNLRLSRQDQQLYQAWDKTYPPQIWERQRNQQVACVMGRGNEFVGPVDLKACK

SEQ ID NO: 69478 - protein, 405 aa, Pseudomonas syringae
  MISC_FEATURE (381)..(381): X=any amino acid
SNQLFDAYFTQSDMRDIFSDEGRVQGMLDFEAALARAQARVGLIPQQVVADIEQSCRAELFDFDELAIAIGSAGNSAIPLVKALGRQIAARNPQAERYVHMGATSQDVMDSGLVLQIRRAIVLLERDLAQLAKALAEQAQRHAATPLAGRTWLQQATPVTLGMKIAGWLGAITRHRQRLNEIKPRLLCLQFGGASGSLAALGDRAFPVAQALAGELQLELPEQPWHTQRDRLVEFASVLGLIAGSLGKLGRDVSLLMQTEVGEVFEPSAPGKGGSSTMPHKRNPVGAAVMIGAATRAPGLVATMLSAMPQEHERSLGLWHAEWETLPELCCLVSGSLQQALQVIPGLQVDAERMRVNLESTQGLVLAEAVSIALAQRIGPXRGPSSDRTMLSACGGAGRASASGA

SEQ ID NO: 69479 - protein, 309 aa, Pseudomonas syringae
MNIDTRIKFRHLVCFLEVARQGSLARASDALAISQPALSKSLKELETLLATTLFVRSKSGAALTDAGVAFMRFAGPSVQALRDGVSSLRSGEHETVTARLGVLSTAESLLVPEVVKRLHTRHPALIVSVMTGPSAYLLSQLRVGELDLVVGRMTDSPQIQGLTFEHLYHESMTLVVRNDHPLLAAPLKRESLEQFPLVLPLAGTTIRKFADSLFVQCGIQMPRQRLETLSLTLSRRYVQCSNAIWIAPLDAVLLELKGGTLVELDMGIREPGGSVGLCSNPALPLTRAAQWCVDELRTVGAAYREGQYA

SEQ ID NO: 69480 - protein, 405 aa, Pseudomonas syringae
MLMNNEPKTLLPVEEAIARLLAMAEATPITERQRVSLADAEGRVLAVDLVSTLDLPPWPNSAMDGYALRHTDWTGEPLTVSQRIFTGQAPEPLAPGTCARIFTGAPMPEGADCVEMQENADVMADQRVRFGEPLSVGQNIRPQGQETRIGDSVLAAGTRLGPIELGLAASLGLAELEVIRRVRVAVLSTGDELIEPGQPLGPGQIYNSNRVLLCSWLKRLHCDVVDAGILPDDLLQTRAALANLHDVDLILSTGGVSVGEADFLGHALREEGELTLWKLAIKPGKPLTFGHFRGVPVIGLPGNPASTLVTFALLARAYLLRRQGVMEVAPMQFPVPAGFVWTRPGNRREYLRGRLEQGRAVVYRNQSSGVLRSAAWADGLIEVREGTTVAEGDWVSFIPLSEVLG

SEQ ID NO: 69481 - protein, 130 aa, Pseudomonas syringae
MTLGTESAPPEGTPGSTPRRLGAAFLGLLHSHVELFGIELQEQKARTVSLLLFAGLALVFGLLLLTGLSALLLIVLWDSYRLAGIIGLCTFYFLAAIFCGLRLKAAIFDESSPFHATLEELANDRERLMP

SEQ ID NO: 69482 - protein, 284 aa, Pseudomonas syringae
MTHAEHTSVLAGLIGSGIQASRTPAMHEHEGDAQGLRYLYRLIDIDALQLDINALPRLVESAQNCGFTGLNITFPCKQAVIPLLDELSDEARGIGAVNTVVFKDGKRIGHNTDCLGFAEGFQRGLDKAPRQHVVQMGAGGAGAAVAHALLSAGVERLTVFEVEPQRAQGLVDNLNEHFGAGRAQVGLDLPAAMAEADGLVNTTPVGMAKLPGTPLPVELLRPALWVAEIIYFPLETELLKHARTLGCRTLDGSTMAVFQAVKAFELFSGRSADAQRMMAHFHTL

SEQ ID NO: 69483 - protein, 177 aa, Pseudomonas syringae
MRQDKRAAPKAPINENISAREVRLIGADGEQIGIVSIDEALRIAEEAKLDLVEISADAVPPVCRVMDYGKSIFEKKKQVAAAKKNQKQIQVKEIKFRPGTEEGDYQVKLRNLVRFLSDGDRAKVSLRFRGREMAHQELGMELLKRVEGDLLEYGSVEQHPKMEGRQLIMVIAPKKKK

SEQ ID NO: 69484 - protein, 640 aa, Pseudomonas syringae
MPTITLPDGSQRSFDHAVSVADVALSIGAGLAKATVAGKVDGKLVDACDLIENDASLQIITPKDAEGLEIIRHSCAHLVGHAVKQLYPTAKMVIGPVIDDGFYYDIAYERPFTPDDLAAIEQRMQQLIEKDYDVIKKVTPRAEVIEVFTARHEDYKLRLVEGMPDEQAMGLYYHEEYVDMCRGPHVPNTRFLKSFKLTKLSGAYWRGDAKNEQLQRVYGTAWADKKQLAAYIQRIEEAEKRDHRKIGKRLGLFHTQEEAPGMVFWHPQGWTLYQVLEQYMRKVQRENGYLEIKTPQVVDRSLWEKSGHWANYADNMFTTQSESRDYAIKPMNCPCHVQVFNQGLKSYRELPLRLAEFGACHRNEPSGALHGIMRVRGFTQDDAHIFCTEDQMQAESAAFIKLTLDVYADFGFKDIELKLSTRPEKRVGSDELWDRAESALASALDSAGLPYDLQPGEGAFYGPKIEFSLKDCLGRVWQCGTLQLDFNLPIRLSAEYVSEDNSRKNPVMLHRAILGSFERFIGILIEHYEGAFPAWLAPTQAVIMNITDKQADFALEVEKTLAESGFRAKSDLRNEKIGFKIREHTLLKVPYLLVIGDREVEMQTVAVRTREGADLGSMPVAQFAEFLAQAVSRRGRQDTE

SEQ ID NO: 69485 - protein, 325 aa, Pseudomonas syringae
MSLLSTAAVQAAEKRDLIIDTDPGADDVVALLLALASPEELNVMAITTVAGNVRLDKTSRNARLAREWAGREEVPVYAGAPKPLVRTPIYAENVHGQEGLPGVPIHEPAKGLAEGNAVDYLIRTLTQAKPHSITIAMLGPQTNLALALVQAPEITQGIKEVVVMGGAHFNGGNITPAAEFNLFADPHAAQIVLASGVKLTYVPLDVTHKILTSEQRLKQIAALGNNAGKLVDGILNEYVKLDMEHYGLPGGPVHDASVIAWLLKPELFSGRQINVAIDTREGIGFGQTVADWYGTLKQPQNVFWVEDGNAQGFFDLLTERLKRLK

SEQ ID NO: 69486 - protein, 134 aa, Pseudomonas syringae
MKKTPLLNIALSRVIASLGHGDILMIVDAGMPVPPGVELIDLALTRGVPDFVSVLDVVLSEMQVESHVLAREMADIKPPALQIIESLNLDDQLGQQRWISHEDLKALSRTAKAIIRTGECQPYSNLALVSGVVF

SEQ ID NO: 69487 - protein, 338 aa, Pseudomonas syringae
MATIKDVAALAGISYTTVSHVLNKTRPVSEPVRLKVEAAIAQLDYVPSAVARSLKAKTTSTIGLLIPNGMNPYFAELARGIEDYCERNGFCVILCNSDDNPEKQRSYLRVLLEKRVDGLIVSSVAGDTSVTCGLTEVRTPLVIVDRELQGIDADMVRIDHEQGAWLATRHLLDLGHRHIACIAGPRESAVAELRLAGYRRAMQQASIEVGAGWAVHSEFTSPAGHEAAGRLLAEHAPTAIFAGNDVIAIGVLRAAAERSIRVPQDLSVIGFDDIQISRYVYPALTTVGQSIMQLGETAAGMLLSRIASPHATPVEKRLVKPCVVVRESTAAPNTSSNE

SEQ ID NO: 69488 - protein, 161 aa, Pseudomonas syringae
  MISC_FEATURE (148)..(148): X=any amino acid
MSQMSFSDFEYAGKRKQTRRERFLAEMDQVVPWTGLLGLIEPFYPKAGGGRKPYPLETMLRIHLLQNWFSLSDPAMEEALYEITPMRQFARLTLSAPIPEDTTIMNFRHLLEKHQLAPAILAVINGYLQDKGLSLRQGTIVSTPTKKXPPSVLNRQLSFDP

SEQ ID NO: 69489 - protein, 164 aa, Pseudomonas syringae
MHQTKKGNQYFFGMKAHIGADAESGLVHHVHGTAANVADVTQVAELLHGEESAVYADAGYTGVEKREEHESREVIWQIAARRSTYSRLNKRSVLYKAKRKIEYCKAQTRAKVEHPFRVIKRQFGYVKVRFRGLMKNTAQLTTLFALSNLWMARKQLMGMGELRV

SEQ ID NO: 69490 - protein, 258 aa, Pseudomonas syringae
MGRGLLNAMASLRIEVISLFPEMFSAISEYGITSRAVKQGLLQLTCWNPRDYTTDRHHTVDDRPFGGGPGMVMKIKPLEDALVQARQAAGDAAKVIYLSPQGRQLNQAAVRELAQEEAIILIAGRYEGIDERFIEAHVDEEWSIGDYVLSGGELPAMVLIDAVTRLLPGALGHVDSAEEDSFTDGLLDCPHYTRPEVYADQRVPDVLLSGNHAHIRRWRLQQSLGRTYERRADLLESRSLSGEEKKLLAEYIRERDDS

SEQ ID NO: 69491 - protein, 1016 aa, Pseudomonas syringae
MNPLFRISPLAFAITLALLPEAHAVDYVLTNGQDTFSSDRVIDGAIDVNSTDGNTSTLTINSGATVTSEGGRIVGQASRTGVNMAQANVVVEGAGSRWVVPRTSFVLGNTIVVGGVGQGDLTVRNGGQVSVRDLDLGDVSGARSNAFSNATLSVSGQNSLVDAVNIEAGGVFVYRSSITANEGARINSQQVDIDSVVRLSGAGTRWDNSGSFRNRNDLTLENGAVLTSNELRLGSAVVNRSNQVNVTGQGTRLDAQTLTLGTSIVRTYLTLADGAELSATNGMLISLVNDSNTATRGTLAIGGSVAVDPDRTDVDSMTAGAAQAAGRLNPQTAVSFGTGNGSLAFNHTDPDLQFANTLNGTGRVYAFSGNTTLSGDTSGLAGSVVVRGGRLVLSGNVDQVNQRGNTATTQSVSRFNVGNGTLVVNGIAGRTEFGTYTNSAQVLDGGILAGVGQVGTTQVSAGGTLSPGENAIGALAIQGDLDMAAGSRYAADIAGDGRADKINVSGTATLRGTQVNVTALDPAQSYQSGRTYTLLSAQGGLVDGAAAGTAYAQALTNSAFLNVGLQRTANDLNLTIEQKSVEPTPTPTPTPTPTPTPTPTPEPTPTPTPTPTPTPEPVPTPTPTPTPEPAPTPAPEPAPAPGIFQTVMLTQNQFNTAGALSVLAQSGEPLRLYNNLLVLDAEGARDAADQLSGDYHSSTSTALIANSQVVSGVLGTRLRNLLDTGTLRMPAMALNLMPSAPTTQNGAWVQPFGNWTKVDGNNGAGGLQQSTGGLLFGADGSFTPDWRGGVYAGYSRSKFDADNRDADGHSDNYHLGLYTGAQIDALRLSADVGYTWHKLESERNVAFAGFSDHLTGKRNAQSLQASGEAAYRIPIGRVALEPFAGLSYVRYDAKDMHEKGGPAALDVSSDKQDTFFSTLGLRASSNIDVANINTQVYGSLGWRRAYGDLDPRNIQSFAGGPNFEVQGVAQARNTALTEVGAKLRLNQRTDLDLSYQGQFGTDTRFHSVNAGVTVRF

SEQ ID NO: 69492 - protein, 927 aa, Pseudomonas syringae
MKAGLPQREPQTLQRWDSIGLYQKLREIGKDRPKFVLHDGPPYANGTIHIGHAVNKILKDMILRSKTLAGFDAPYVPGWDCHGLPIEHKVEVTHGKNLSADRTRELCRAYAAEQIEGQKSEFIRLGVLGDWSNPYLTMNFANEAGEIRALAEMVKGGFVFKGLKPVNWCFDCGSALAEAEVEYQDKKSSTIDVAFPIADEAKLAAAFGLPSLGKPASIVIWTTTPWTIPANQALNVHPEFEYSLVDVGDKLLVLASELVESCLARYKLEGTVVATTTGQALELINFRHPFYDRLSPIYLAEYVELSAGTGIVHCSPAYGVDDFTICKQYGLSNDDIISPVQSNGVYVESLEFFGGQFIFKANQNIIDKLVEVGSLMDTETISHSYMHCWRHKSPLIYRATAQWFVGMDKQPESGETLRKRAVKAIEDTEFVPAWGQARLHSMIANRPDWCISRQRNWGVPIPFFLHKESGDLHPRTVELMEEVALRVEKEGIEAWFKLDASELLGDEAAKYDKISDTLDVWFDSGTTHWHVLRGSHPMGHETGPRADLYLEGSDQHRGWFHSSLLTGCMLDDHAPYRELLTHGFVVDENGRKMSKSLNNVVAPQKVNDSLGADIMRLWVSATDYSGEMAVSDQILQRSADAYRRIRNTARFLLSNLSGFNPATDILPAEEMLALDRWAVDRTLLLQRELQEHYGEYRFWNVYSKIHNFCVQELGGFYLDIIKDRQYTTAADSTARRSCQTALFHISEALVRWIAPILAFTADELWQFLPGERNESVMLNTWYEGLTELPADFEMDRAYWERIMAVKTSVNKEMENLRAAKAIGGNLQAEVTLYAEDSLVADLSKLSNELRFVLITSTASVAPFVSAPADAVVTEVAGLKLKVVKSGHAKCARCWHHREDVGVNPEHPEICGRCIDNISGAGEVRHYA

SEQ ID NO: 69493 - protein, 304 aa, Pseudomonas syringae
  MISC_FEATURE (79)..(79): X=any amino acid
MQLVRGLHNLRPEHRGCVATIGNFDGVHRGHQAILARLRERAVELGVPSCAVIFEPQPREFFAPQTAPARLARLARQAXTAGCEGVDRVLCLSFNQRLSKLSAASFVETVLIDGLGVQHLEVGDDFRFGYDRVGDFDFLQQAGTTYGFTVEAAQTVEIDGLRVSSTKVRKALAAADFALAERMLGRPFQITGRVLHGQKLARQLGTPTANVQLKRRRVPLSGVYLVSMDIDGKPWPGVANIGVRPTVAGDGSAHLEVHLLDFAGDLYGRRLTVAFHHKLRDEQRFASLEALKTAINADVAAARA

SEQ ID NO: 69494 - protein, 493 aa, Pseudomonas syringae
MGFVRDTIIARTFGAGMATDAFFIAFKLPNLLRRIFAEGAFSQAFVPILAEYKSQQGEEATRTFVAYVTGLLTLALAVVTLLGVIFAPWVIWATAPGFADTPEKFALTSDLLRVTFPYILLISLSSMAGAILNTWNRFSVPAFVPTLLNVSMIFFALFLTPYFAPPVMALGWAVLVGGLLQLLYQLPHLKKIGMLVLPRLNLRDTGVWRVMKQMLPAILGVSVSQISLIINTIFASFLVAGSVSWMYYADRLMELPSGVLGVALGTILLPILSKTYAQRDRQEYSRILDWGLRLCFVLVLPCTLALGLLAEPLTVSLFQYGQFNALDAAMTQRALVAYSVGLLGIILIKVLAPGFYAQQNIRTPVKIAIFTLIVTQLLNLAFIVPLQHAGLALAISVGACINAGLLFWQLRRQDLFQPQPGWTKFLFKLIVAVAVMSAVLLGLMHVMPAWDEGHMLERFLRLGALVAAGVVTYFAMLLMLGFRLRDFARKAIM

SEQ ID NO: 69495 - protein, 92 aa, Pseudomonas syringae
MANTPSAKKRAKQAEKRRSHNASLRSMVRTYIKNVVKAIDAKDAEKAQAAYVLAVPVIDRMADKGIIHKNKAARHKGRLNGHIKALSLAAAA

SEQ ID NO: 69496 - protein, 325 aa, Pseudomonas syringae; identical to SEQ ID NO: 69226

SEQ ID NO: 69497 - protein, 361 aa, Pseudomonas syringae
MIADVNLNTLVDYRYTRHFDAERGANGGSADCTGRKGEELVLRVPVGTTIIDATTQEIIGDLTKDGQRLMVAQGGWHGLGNTRFKSSTNRAPRQTSPGKPGDQRDLKLELKVLADVGLLGLPNAGKSTFIRSVSAAKPKVADYPFTTLVPNLGVVSVDRWKSFVVADIPGLIEGASDGAGLGIRFLKHLARTRLLLHLVDMAPLDETSAPDAAEVIVSELEKFSPSLAERDRWLVLNKCDQILEEEQEARKQEIVDRLGWTGPVYVISAIAKEGTEQLTRDIMRYLEERSLRIAEEPGYAEELAELDQRIEDEARAQLQALDDQRALRRSGVKSVHDIGEDDWDEEDVDDEDGPEIIYVRD

SEQ ID NO: 69498 - protein, 91 aa, Pseudomonas syringae
MAHKKAGGSTRNGRDSEAKRLGVKMYGGQAIIPGNIIVRQRGTQFHAGYGVGMGKDHTLFAKVEGVIKFQVKGAFGRRYVSIVPKTEVSAA

SEQ ID NO: 69499 - protein, 322 aa, Pseudomonas syringae
MQPQAFYRAVADDFSAVDLIIKKQLTSRVPLVSKIGDYITSAGGKRLRPLLVLLCGKALGREGDDIRLLAATIEFLHTATLLHDDVVDMSGMRRGRSTANALWGNAPSVLVGDFLYSRSFEMMVELGSMEVMKILSKATRIIAEGEVLQLSKIRDASTTEETYMEVIRGKTAMLFEASTHSAAALCKASEAQTEALRTFGDHLGVAFQLVDDLLDYRGDAETLGKNVGDDLAEGKPTLPLIYTMREGSPEQAALVRQAIQKGGLEDLESIRNAVESAGALDYTAQLARDYAARAIACLDALPPSEYRDALIELSEFAVARTH

SEQ ID NO: 69500 - protein, 575 aa, Pseudomonas syringae
MKFEPLARSLIATALIVAYSPTFAASQAPVAAENGMVVTAQHLATHVGVDVLKNGGNAVDAAVAVGYALAVVYPAAGNLGGGGFMTIQLADGRKTFLDFREKAPLAATANMYLDKDGKVIPDLSAKGHLAVGVPGTVSGMEMALNKYGTRKREEVIAPAIKLAEDGFVLGQGDVDMLSSATDVFKADMADSGSIFLDKGKPMQVGQKLVQKDLARTLKEVSEKGSDGFYKGWVAKALVDSSQAGKGIITQADLDHYKTRELAPVECDYRGYHVVSAPPPSSGGVVICQILNILEGYPMKELGFRSAQGMHYQIEAMRHAYVDRNSYLGDPDFVKNPVEHLLDVKYAAKLREAIEPQKAGDSNKIKPGVAPHEGSNTTHYSIVDKWGNAVSVTYTLNNWFGAGVMASKTGVILNDEMDDFTVKVGVPNMYGLVQGEANAIAPGKTPLSSMSPTIVTKDGKTVMVVGTPGGSRIITATLLTMLNVIDYGMNIQEAVDAPRFHQQWQPEATNIDTFAVSPDTLKILESWGHKFAGPQPLNHVAAILVGAPSLGGKPVGNNRFYGANDPRRNTGLSLGY

SEQ ID NO: 69501 - protein, 697 aa, Pseudomonas syringae
MSRSFDDLLPTALDDISLADLSPLTRADDLLMLLERWVERGWLRALDRAFVAFLSDLDPQADPLVLVAAALTSHQLGHGHVCLDLYETLKEPDFALSLPPEGDQQDGAMLLPSQLLAALDGAAWCQALARSMLVAQATDSSAEALQKPLVLAERRLYLRRYWTYERRIAAALRRRLEQADAPPDDLPQRLNALFGPANSAPDAIIDWQKLACALATRRAFSIITGGPGTGKTTTVVRLLALLQAPAVQSGQPLRIRLAAPTGKAAARLTESISQQVQSLDVSAEVRQKIPSEVTTVHRLLGSRPGTRHFRHHAGNLLPLDVLVVDEASMIDLEMMANLLDALPPHARMVLLGDKDQLASVEAGAVLGDLCRDAEDGFYSPQTQTWLEAVSGEDLSKGTLRQGDAQQHPLAQQVVMLRHSRRFGQGSGIGQLARLVNQQQDQQARALLSAGSHTDLFALALKGEQDLKFERLVLEGLGQGEQGPQGYRHYLNVLGAERPAVGAELDDECWTRWARSVLDAFDSFQLLCAVRKGPWGVEGLNQRITHALFNAQLIESDQQWYEGRPVLMTHNDYGLGLMNGDIGITLRLPERDGEGKQVLRVAFPRNDGSGGVRFVLPSRLNEVETVYAMTVHKSQGSEFAHTALILPEALNPVLTKELIYTGITRAKHWFSLIEPRQGIFEEALRRKVKRLSGLMLGL

SEQ ID NO: 69502 - protein, 1220 aa, Pseudomonas syringae
  MISC_FEATURE (875)..(875): X=any amino acid
  MISC_FEATURE (882)..(882): X=any amino acid
MSNQSLPLALRFPLRGSQLIEASAGTGKTFTISALYLRLVLGHGSEQSGFGRELLPPQILVVTFTDAATKELRDRIRTRLAEAARFFRDEICAPDELISQLREQFEAEQWPACASRLDIAAQWMDEAAVSTIHSWCQRMLREHAFDSGSLFTQTLETDHSDLLGEVLRDYWRRFCYPMSGDALAWVRENWSGPAALLPRVRGLFGHDRSTNTQAPAELIEASLLERRAALAALKAPWAVWSDELYTLCQDAVARKVVDGRKMQERFFKPWFEKLAAWAADETQEALDLGTGFTRLTPDGVAEAWKSDPPSHPAFAAMAQLKAALDGLPKPDAAVLQHAAQWVSARFEEEKRRRAEMGFDDMLLRLDGALHGAGGERLATLIREQFPVALIDEFQDTDPVQYRIFDSIYRLEGNDEQTGLFLIGDPKQAIYAFRGADIYTYLRARQATDGRWHTLDTNYRSSHAMVESVNHVFTRAEQRPEGKGAFLFRDEEGNQVPFSDALAQGRKETLEVDGAALTALTVWHLESEQPVSGVVYRQQLASRCASEIVRLLNAGQQGRAGFTAPGNAQRGLRPADIAILVRDGKEAQAVRSQLTARGVRSVYLSDKDSVFAAQEAHDLLSWLKACAEPDSERTLRAALACITLDLPLAELERLNQDELAWEQRVMQFRGYRAVWRSQGVLPMLRRLLHDFALPQTLMTRTDGERVLTNLLHLSELLQQAAAELDGEQALIRHLGDHLALSGQAGEEQILRLESDEQLVKVVTIHKSKGLQYPLVFLPFICSSKPVDGSRLPLQFHDADGRAQISLQPTEALIQQADDERLAEDLRLLYVALTRSEHACWLGVADLKRGNANSSMLHRSALGYLLGGGTALPESGXPQGLAAXSGRGCSAIALQPVPEPTDDSFSAPRNEASLVKLLVPKRRAAENWWIASYSALRIGDTVTAGADESPDSPQAQKLFDDERLDPEAPRDILVSGGDIHRFPRGPNPGTFLHGLLEWAGNEGFANTAHDSVQLQDAVARRCNRRGWAGWINTLRDWLQHMLNMPLRLSPDSTPVALGDLNQPNQYRVEMEFWFASTNVNVAQMDTLVRRFTHDNAPRAATETVSLNGMFKGFIDLTFEHEGRYYVADYKSNWLGSDDDAYTDLAMETAILDNRYDLQYVLYLLALHRQLKTRMADYDYDQHMGGALYLFLRGSRSASQGAYFTRPPRELIESLDLLFQGKP

SEQ ID NO: 69503 - protein, 398 aa, Pseudomonas syringae
MSLPSLRLKANADRRLRAGHLWVYSNEIDVAATPLNGFAAGDQALLEAAGGKPLGIVAMSPNNLICARLLSRDIKLPLDKSLLVHRINVALSLRERLFDKPFYRLVFGDSDLLPGLVVDRFGDILVVQLASATMENHKEDIIAALVQVIKPSGILFKNDSAARDAEGLNRYVETVFGLVPEWVALEENGVKFEAPVMAGQKTGWFYDHRMNRARIAPYVKGKRVLDLYSYIGGWGIQAAAFGASDVTCVDASSFALDGVERNAALNGFAEKMTCIEGDVFEALKELKAGEERFDVIVADPPAFIKRKKDMKNGEGAYRRLNEQAMRLLSKDGILISASCSMHLPEDDLQNILLTSARHLDRNIQLLERGGQGPDHPVHPAIAETRYIKSITCRLLPNS

SEQ ID NO: 69504 - protein, 270 aa, Pseudomonas syringae
MPELPEVETTRRGIAPHLEGQRVSRVIVRDGRLRWPVPEDLDIRLSGQRIVQVSRRAKYLLIQAEVGTLISHLGMSGNLRLVEAGLAALKHEHVDIELESGLALRYTDPRRFGAMLWSHDPHNHELLIRLGPEPLTDLFDGERLYERSRGKSIAVKPFIMDNAVVVGVGNIYATEALFAAGIDPRREARGISRARYLKLAIEIKRILAYAIERGGTTLRDFIGGDGKPGYFQQELFAYGRGGQPCKVCGTTLREIKLGQRASVYCPKCQR

SEQ ID NO: 69505 - protein, 52 aa, Pseudomonas syringae
MINPNLCTECVGHYDEPQCQQVCPVDCIPLDENHVESKEQLMDKYRIITSNV

SEQ ID NO: 69506 - protein, 568 aa, Pseudomonas syringae
MTTQSEYDYIIIGAGSAGNTLAARLTEDAGVTVLLLEAGGPDYRLDFRTQMPAALAFPLQGRRYNWAYETEPEPHMDNRRMECGRGKGLGGSSLINGMCYIRGNAMDYDGWAKEPGLEDWSYLDCLPYFRKAETRDIGPNDYHGGEGPVSVTTPKAGNNPLFHAMVEAGVQAGFPRTDDLNGYQQEGFGPMDRTVTPKGRRASTARGYLDEAKKRDTLSIVTHALTDRILFEGKRAVGVAYLVGDSDTRIEVRARKEVLLCGGAIASPQILQRSGVGPAEVLNKLDIPVVHDLPGVGQNLQDHLEMYLQYACTQPVSLYPSLKWWNQPAIGAEWMFLGTGIGASNQFEAGGFIRSSEAFEWPNIQYHFLPVAINYNGTKGVQEHGFQAHVGSMRSPSRGRVHVKSKDPREYPSILFNYMASDQDWQEFRDGIRLTREIMQQPALDPYRGREISPGIDVQSDEALDQFVREHAETAYHPSCSCKMGTDEMAVVDGQGRVHGMQNLRVVDASIMPIITTGNLNAPTIMIAEKIADKIRGRQPLPRSTADYFVAGDKPARGKPLREISHQA

SEQ ID NO: 69507 - protein, 172 aa, Pseudomonas syringae
MSSVPSAHSEIVGALYRDHRGWLLAWLRRNVACPQRAQDLSQDTFVRLLGRDELQLPREPRAFLATIAKGLMFDYFRRAALEQAYLGELLQVPEAEQPSPEEQLLILEDLKAIDRMLGTLSSKARAAFLYNRLDGLSHGEIAERLGVSVSRVRQYLAQAVRQCYVALYGEPT

SEQ ID NO: 69508 - protein, 450 aa, Pseudomonas syringae
MNALARRAAGLLLSTICLPLTALAADPQPTHEFTLDNGLKVVVREDHRAPVVVSQIWYKVGSSYETPGQTGLSHALEHMMFKGSSKTGPGESSLILRDLGAEENAFTSDDYTAYYQVLARDRLSVALELEADRMATLKLPADEFGREIEVIKEERRLRTDDKPMGKAFERFKAMAYPASGYHTPTIGWMADLERMKVEELRHWYESWYTPNNATLVVVGDVQPDEVKALAERFFGPIPRRDVPPSKKPLELAEPGERKITLHVKTQLPSLIYGFNVPSVATAEDPRSANALRLIAALLDGGYSARIPTRLERGEELVSGASSRYDAFARGDSLFMISATPNMQKKKTLADVEAGIWRLLDDLKTKAPSAEELERVRAQVIAGVVYERDSITSQATMIGELETVGLSWKLMDKELEDLQSVTPQDIQKAANTYFTRERLSVAHVLPEEKAK

SEQ ID NO: 69509 - protein, 513 aa, Pseudomonas syringae
MFGSSDDKKTPAAAGEKKGLFGWLRKKPQQEAEPTPPESSPAQPEPVIDQVIKTPLVEPSAAPQPAPESIPQADAPAPQINVEPGAPSPQPWLTLPVNEESVALSDEREPHVTPAIPLQGHVHVVPEPVVSEPVAYEPQAEPVADILPLSAQESVLVEPAAEPAPEPEPVAAQPVLQPVQPAQTVVPIIAPAAPAPVPEAEAGKVGFFARLKQGLSKTSASIGEGMASLFLGKKAIDDDLLEEIETRLLTADVGVEATSVIIKSLTQKVARKQLTDAQALYTSLQGELAAMLKPVEQPLVIKAEHKPFVILVVGVNGAGKTTTIGKLAKKLQLEGKKVMLAAGDTFRAAAVEQLQVWGERNHIPVIAQHTGADSASVIFDAVQAAKARGIDVLIADTAGRLHTKDNLMEELKKVRRVIGKLDADAPHEVLLVLDAGTGQNAINQAKQFNQTVTLTGLALTKLDGTAKGGVIFALAKQFGLPIRYIGVGEGIDDLRTFEAEPFVQALFAERERP

SEQ ID NO: 69510 - protein, 209 aa, Pseudomonas syringae
MSAPTMTLYFNAASPFARKVMVMLHETGQLDRVQLQPTVLTPVSPSAELNEDNPAGKLPALRLADGNVIHDSRVILDYLDHQHVGQPLIPREGSARWRRLTLASLADAVLDAAVLIRYETALRPQEKHWDQWLDNQQQKIERSLSYFERDAITELSSSFDVASISVAAALGYLDFRQPELRWRNTYPRLANWYLEVSQRPSMLATQPPA

SEQ ID NO: 69511 - protein, 167 aa, Pseudomonas syringae
MKPILALLSLLALPVMAAEPTLYGRYENIKVLEIGQTFKAKMDTGALTASLSAKDIELFQRDGDDWVRFRLATKGADDKVYEHKVSRISKIKGRAEGDDEDDEGINPAKRPVVDLELCLGNKKRTVEVNLVDRSHFNFPLLIGAKALREFGAAINPARRYTADEPDC

SEQ ID NO: 69512 - protein, 71 aa, Pseudomonas syringae
MLGGNSANNSMLNSALGNVQNMNDVNTAFKALGMDSTMVSQFAPLILQYLGQQGASGSALQSLSGLWGAGS

SEQ ID NO: 69513 - protein, 366 aa, Pseudomonas syringae
MSQSFLSPVTTQTWANGRHLVRVVKVIQETWDVRTFCFMADQPIMFFFKPGQFVTLELEIDGVPIMRSYTISSSPSVPYSFSITVKRVPGGKVSNYLHDTLSEGQELAVHGPVGLFNAIDFPNPKILYLSGGVGITPVMSMARWFYDTNANVDMVFVHSARSPKDIIYHRELEHMASRIDNFSLHLVCEKHGLGEPWAGYRGYLNQKMLELMAPDFMDREVFCCGPTPYMTAVKRLLQENGFNMAQYHEESFGATPPEARADAVEQAEIAADAPDVDAADLHQVEFTDTGKSIRVAPGETVHAAAAKLGLMIPKACGMGICGTCKVMKLSGEVEMEHNGGITDEDVAEGYILSCCSVPKGDVRIEY

SEQ ID NO: 69514 - protein, 278 aa, Pseudomonas syringae
MNYRHAYHAGNHADVFKHLTLTRLIALMARKEQPFAYLDTHAGLGLYDLKGDQATRTGEWLEGIGRLWNIPDLPALAADYLQVLHDMNPDGELRYYPGSPELARRLTRERERVLLNEKHPEDGRLLKENMKGDRRVAVHLGEGWHVPRALLPVAEKRAVMLIDPPFEQLDEMKRCAVALKETIGRMRQTVAAIWYPIKDPRLLRRFYQDLAETGAPKLLRVELYVHPLDTPASLNGSGLAIANPPWGLEEELRELMPYLAEKLGQTQGGWKMDWLIAE

SEQ ID NO: 69515 - protein, 284 aa, Pseudomonas syringae
MLVPFLIMLREGIEAALIVGIIASYLKQTGRGEWMPAVWVGVFLAAALSLFVGGGLELMSAEFPQKQQELFEGIVGLIAVGILSSMVFWMRKVARSIKHALHESLDAALAGSKNQTYALIAMVFFAVAREGLETVFFLLAVFQQSEGSSAPLGALLGLLLAVGFGVAIYSGSMRLNLGLFFRWTGLFILVVAAGILANSVQALHEAGVWNHLQGVVFDISALLPMDGPAGSVLAGMFGYQDAPTVSTLSVYLIYLIGALVLFFMPHTPKAGKPVQPHPSSVTNE

SEQ ID NO: 69516 - protein, 222 aa, Pseudomonas syringae
MRSRVQAQLSRGVTITSALYEAGYNSNSRFYEASQNMLGMKPSEYRAGGANIDIRFALGESSLGSILVATSRKGICAISLGDDPDALIQGFQDQFPNANLIGADAQFEALIATVVGFVQSPATGLTLPLDIRGTVFQERVWQALRDIPAGSTATYTEIARQLGMPSAVRAVANACGANKLAVAIPCHRVVRSDGSLSGYRWGVERKRKLLDIESGGGTGLFS

SEQ ID NO: 69517 - protein, 225 aa, Pseudomonas syringae
MKILMVLTSHDQLGDTGKKTGFWLEEFAAPYYVFKDAGAEVTLVSPAGGQPPLDPKSDEPDAQTAETERFAKDADAQKVLANTGLLAEVNAADFDAVFYPGGHGPLWDLAEDQHSIALIEAFAKADKPHGLVCHAPGVLRKVKAQNGEPLVKGRRVTGFTNSEEEAVGLTDVVPFLVEDALKELGGDYSKGDDWSVYVLTDGKLVTGQNPASSAQAAKDVLTLLS

SEQ ID NO: 69518 - protein, 291 aa, Pseudomonas syringae
IRIGINPISWSNDDLPALGGETPLSTALSEGKDIGYEGFELNGKFPKDAKGVGDVLRPYGLALVSGWYSSRLAQRSVAEEIEAITPHVQLLRRDGASVLVYGEVADSIQGQRIPLVERPRFHSDAAWREYAEKLTELARFTLSRGVRLAYHHHMGAYVESPQDIDKLMALTGNEVGLLFDSGHCYMGGGEPLQVLGKHIERVCHVHFKDVRKPVVQLARNNLWSFPDCIINGTFTVPGDGDIDFSALLKVLLQADYSGWLVVEAEQDPAVAPSYVYAKKGYDTLRQLLADA

SEQ ID NO: 69519 - protein, 386 aa, Pseudomonas syringae
MSRFATVITRNAPFTALASPREAIRQFTPNWFAVTMGTGILSLALAQLPGNLAWLRDAGEALWFLNVALFALFSVMYASRWMLFFDEARQIFGHSTVSMFFGTIPMGLATIINGLLVFGPARWGDAVVPVAEALWWLDVAMALACGVLIPFMMFTRQEHSIEKMTAVWLLPVVAAEVAAACGGSLTAHLATTSAQFTVLITSYVLWAYSVPVALSILVILLLRLALHKLPHESMAASSWLALGPIGTGALGMLVMGSDAPEIFAAHGLASVGTVAAGVGVIVGTLFWGLGLWWMALAGLITLRYFKQGLAFNLGWWAFTFPLGVYALATLKLGATLNMSFFDVFGVGLVAMLAVMWSIVAVHTLAGAYRGHLFVSPCIAARACARR

SEQ ID NO: 69520 - protein, 462 aa, Pseudomonas syringae
MRRQPSLTLRSTLAFALVAMLTVSGAGLYLYQSIEQTVLQRSDHAVLARLDHFRKLLRYDLTMDNLKGSPQLFENMLDSEEDIFIIGEPGKPPVVSVNPQHAPLPDLPTVAQDQPLRVDDLRSGMSLQGVPLRAAAAQVMSNGVEVRLQAAHLMVKEMAMLASFRQSIYIAVALAFLITAVLGYVLLRRGLRPLRKMAAHAAAITPASLHKRLDSHDTPVELQQLSNAFNAMLDRIDDGYRRLMQFSADLAHEIRTPVGSLMGHCQVALRQDRSVDEYQALLASNLEELERISRLVESILFLARADEAQAALERQPLDLHDELQRVAGYFEGLADERNLKLSPSGRGTLLADPILLRRALSNLVANAIRYADEDSEILIRVVTVDQQWRIEVENQGPVLPHATLARLFDRFYRGDASRHERSDSNGLGLAIVTAIMHLHGGCVEVAQPAVGRICFSLVFPAA

SEQ ID NO: 69521 - protein, 206 aa, Pseudomonas syringae
MKTRPIHPWPVRLTHWVNAVGMVCMFMSGWAIYNASPLMPFTFPKFLTLGGWLGGSIAWHFAVMWLLVVNGLIYVLYGVFSRHFRRDLLPVRPSEVKRDMSDALHFRLAHVKGQYNAVQRLMYWLVLIMGVLVVVSGLAIWKPVQFQGLVALLGGFDFARWVHFGAMTAIGAFVVVHLVLVVLVPSTLLPMITGGRQPNEDGTAQP

SEQ ID NO: 69522 - protein, 256 aa, Pseudomonas syringae
MNEPRKRITQRIRLEPAQQSQLIDIQRRSFLRAGLTVGAMSMLTGCNLQDGDQVDKVLWAMSRWNDRVQAWLFNGQKLAPTYTKAQLTNPFPFNAFYPEYNVPELELAEYRLAVSGLVRDKQPWTIDALRKLPQRTDITRLICIEGWSAIGQWGGVPLKTFLEYIGADTTARFVGFKCADRYYSSLDMPTALHPQTLLALDFGEVALPPDYGYPLRVRVPTKLGFKNPKHIVEIFVSNENPGGYWEDQGYNWFSGI

SEQ ID NO: 69523 - protein, 440 aa, Pseudomonas syringae
MKTPDSNPDATNAPVSLQRRRVLMGLGAAGAALAGSSLSGNVLAAAPAQVTEAPNSEKTQDHNDFHGLHQTGIVNPRPAAGMLVAFDVLAADRDDLERLFRTLNERIAFLMTGGPVPEIDPKLPPPDSGILGPIVTPDNLTITVSVGESLFDERFGLAALKPLRLSRMTGFPNDALDPASCHGDLSIQFCANTADSNIHALRDIVKNLPDLLLVRWKQEGTVPPQAPKKPGQPAESARNFLGFRDGSANPDSNNQKTMNELVWVQPGSDEPAWAANGSYQAVRIIRNFVERWDRTPLQEQESIFGRSKTTGAPMDGKVESDVPNYAADPEGKKTRLDSHIRLANPRTAESQRNLILRRPFNYSNGVNKNGQLDMGLLFICYQADLEKGFITVQSRLNGEPLEEYLKPVGGGYFFTLPGVTGEQDFIGRSLLAAASSTQTA

SEQ ID NO: 69524 - protein, 305 aa, Pseudomonas syringae
MTQRRAMLILHGKQSLNEDVRDAVADKRKQGWELDVRLTWEAGDAQRLVNEALAAGHRHIVAGGGDGTLRDIAEALALAATKASLTILPLGTANDFARAAGVPLDVSKALQLMDVAPRAVDLGEVGGKLFLNMATGGFGSQVTANTSEDLKKVLGGAAYLFTGLTRFSELHAAHGELTGPDFHWRGDLLALGIGNGRQAGGGHELCPTALADDGLLDISILPAPQEVVGTLRSLLEGGLGIDNMFIRARLPWVELKSAQGLDINLDGEPLSGEDLRFVARPGALQVHLPANSPVLGSTPLLNRPD

SEQ ID NO: 69525 - protein, 396 aa, Pseudomonas syringae
  MISC_FEATURE (309)..(309): X=any amino acid
MKSFQEGFGGVLGFVGIILGLGTMLGKLMADSGGADQIAQTLIRTFGKQKVHWAMMFSAFLVGIPLFFEIGFVLLIPLVFIVARRTGVSIVKIGIPLLAGLSAVHGLVPPHPGPLLAIGIFGADIGKTIFYGLIVALPTAIIAGPIYGNWISKRIPGTPSQELMDQIAKESSTENLPGFGITLITILLPVFLMLLKTFADVVLPENNMFRIWMDLIGHPITALLAALLLAFYTFGAARGFDRTKIMKLLDQSLAPVAAIVLIVGAGGGFKQMLVASGVGDVIGHMAVQAQINPIMLAWLVAAVIRIATXSATVATITGAGIVAPVVGLIPGVNRELLVLATGAGSLILSHVNDAGFWLVKQYFNMTVAETFKTWTVMETILSVVGLIFIMLLSMAL

SEQ ID NO: 69526 - protein, 326 aa, Pseudomonas syringae
MRDMQKKASRNTSALTHMTEPVSPGAPLDIAWLTGIIPLGFVPAEIAISPDETTLYVAHESGREVSVVDIATMSVVGSIKRAGAGAITLSPDGKRLYTIGQKRCYVVDTRLREVIRILPAANVNRILCSPDGRFICLSFQNARGGLIRLIETENYTVENEFDLGALTNASLALGISPLNDRFYATMLVDRTAPTDVMAINRIDYLQHDIPGFSDPRSMAFSSDGAWLYVGGIDEVYIVNAATHKTFYREKLGTQGYPVKVIGVTPDDRYVYAIYTCNYDVYRIDTVKGIATCIAYFPSVGGAVLNKTATYIYSTHPDMSWISIYRL

SEQ ID NO: 69527 - protein, 636 aa, Pseudomonas syringae
  MISC_FEATURE (263)..(263): X=any amino acid
  MISC_FEATURE (264)..(264): X=any amino acid
  MISC_FEATURE (269)..(269): X=any amino acid
  MISC_FEATURE (285)..(285): X=any amino acid
MTLLKFSDVSLAFGAMPLLDKVSWQIARGERVCIIGRNGTGKSSMLKLVKGVQKPDDGAVWRAPGLKIGELPQELPVADGRTVFDVVAEGLDGVGALLAEYHHLAQNCVTEEDLNKLMHVQQDLEARDGWRLQQLVDSTLSRLQLPADKTLAELSGGWRRRVLLAQALVSEPDLLLLDEPTNHLDIGAIAWLEEALKEFQGAVLFITHDRAFLQNLATRILELDRGGLIDWNGDYASFLVHKEAALAAEETANALFDKRLAQXXVWIRXGIKARRTRNEGRVRAXKELRVERSERRERTGKANIQLDTAEKSGKQVMILDNVSFAHPGGPMLIKDFSMVLQREDRIGLLGANGTGKTTLLKLMLDNLQPTGGKVEVGTRLDVAYFDQLRHQLDLEKTVIDNVAEGRDFIDIDGQSRHVLSYLGDFLFSPQRARTPVKALSGGERARLLLAKLFSKPANLLVLDEPTNDLDVETLELLEEVLLTFKGTVLMVSHDRAFLDNVVTSTLVFEGEGKVREYVGGYQDWLRQGGSPRLLGVADTKSGKAELASAVVQAAPVAAQDMPVAKKKLSYKLQRELEALPAQIDEVEGKMAVLNAEMAEPGFYQRSAEQTAAVLAQLENLQADLDKLLERWAELDE

SEQ ID NO: 69528 - protein, 721 aa, Pseudomonas syringae
MIYEGKAITVKALESGIVELNFDLKGESVNKFNRLTLNELRQAVDAVKADASVKGVIVTSGKDVFIVGADITEFVDNFKLPEAELVAGNLEANRIFSDFEDLGVPTVVAINGIALGGGLEMCLAADYRVISSSARVGLPEVKLGLYPGFGGTVRLPRIIGADNAIEWIASGKENSAEDALKVGVVDAIVAPEKLQAAALDLIQRAISGEFDYKAKRQPKLDKLKLNAIEQMMAFETAKGFVAGQAGPNYPAPVEAIKTIQKAAIFGRDKALEIEAAGFVKMAKTSAAQSLIGLFLNDQELKKKAKGYDEVARDVKQAAVLGAGIMGGGIAYQSAVKGTPILMKDIREEAIQLGLNEASKLLGGRLEKGRLTAAKMAEALNAIRPTLSYGDFGNVDLVVEAVVENPKVKQAVLAEVEANVGENTILASNTSTISISLLAQALKRPENFVGMHFFNPVHMMPLVEVIRGEKSSEEAVATTVAYAKKMGKNPIVVNDCPGFLVNRVLFPYFGGFARLVSAGVDFVRIDKVMEKFGWPMGPAYLMDVVGIDTGHHGRDVMAEGFPDRMKDDRRSAVDALYEANRLGQKNGKGFYVYETDKKGKPKKVNDPAVLDVLKPIVYEQREVSDEDIINWMMIPLCLETVRCLEDGIVETAAEADMGLIYGIGFPPFRGGALRYIDSIGVAEFVALADRYAELGALYQPTAKLREMAANGQSFFGQASSEV

SEQ ID NO: 69529 - protein, 341 aa, Pseudomonas syringae
MSNAILQNKPALAPTGKKRRLPTELSIFLVLIGIGLIFELFGWIVRDQSFLLNSQRLVLMILQVSIIGLLAIGVTQVIITTGIDLSSGSVLALSAMIAASLAQTSDFSRAVFPSLTDLPVWIPIVVGLGVGLLAGAINGSIIAITGIPPFIATLGMMVSARGLARFYTEGQPVSMLSDSYTAIGQGAMPVIIFLVVAVIFHIALRYTKYGKYTYAIGGNMQAARTSGINVKRHLIIVYSIAGLLAGLAGVVASARAATGQAGMGMSYELDAIAAAVIGGTSLAGGVGRITGTVIGALILGVMASGFTFVGVDAYVQDIIKGLIIVAAVVIDQYRNKRKTKR

SEQ ID NO: 69530 - protein, 383 aa, Pseudomonas syringae
MIVDFGRTPMGRSKGGMHRNTRAEDMSAHLISKLLERNNKVDPAEVEDVIWGCVNQTLEQGWNIARMASLLTQIPHTSAAQTVSRLCGSSMSALHTAAQAIMTNNGDVFVIGGVEHMGHVSMMHGVDPNPHMSLHAAKASGMMGLTAEMLGKMHGITREQQDAFGLRSHQLAHKATLEGKFKDEIIPMQGYDENGFLRVFDYDETIRPDTTLESLAALKPAFNPKGGTVTAGTSSQITDGASCMIVMSAQRAQDLGIQPLAVIRSMAVAGVDPAIMGYGPVPATQKALKRAGLSISDIDFFELNEAFAAQALPVLKDLKVLDKMNEKVNLHGGAIALGHPFGCSGARISGTLLNVMKQNGGTFGVSTMCIGLGQGIATVFERV

SEQ ID NO: 69531 - protein, 869 aa, Pseudomonas syringae
MGKSLVIVESPAKAKTINKYLGNQYVVKSSIGHIRDLPTSGSASAAKDPAAKRGKAAAGEGPVLTPKEKAQRQLVSRMGVDPEHGWKAKYEILPGKEKVIEELRKLAKDADTIYLATDLDREGEAIAWHLREAIGGDDSRYKRVVFNEITKKAIQEAFSRPGELDIARVNAQQARRFLDRVVGYMVSPLLWQKVARGLSAGRVQSVAVKLVVEREREIRAFNPEEYWEIHADLGTAKGANVRFDVAREKGEAFKPLNEKQAMAALEKLKASSYSIVKREDKPTSSKPSAPFITSTLQQAASNRLGFGVKKTMMMAQRLYEAGYITYMRTDSTNLSADAVSMARDYIETEFGKKYLPEAANVYSSKEGAQEAHEAIRPSDVNTHPSKLTGMERDAERLYELIWRQFVACQMLPAQYLSTTVTVAAGDFELRAKGRILKFDGYTRALPQMAKPGDDDVLPDMAQGEVLKLNTLDPSQHFTKPPARYSEASLVKEMEKRGIGRPSTYAAIISTIQDRGYVALHNRRFYSEKMGDIVTGRLSESFANLMDYGFTAGMEENLDDVAKGQRDWKNVLDEFYGDFRKKLEVAEAPDSGMRANQPVMTDIPCKVCARPMQIRTASTGVFLGCSGYSLPPKERCKATVNLTPGDEIADDDDESESRVLRGKHRCPICSTAMDAYLLDEKHKLHICGNNPDCTGYEIEEGTYRIKGYEGPSLECDKCGSEMQLKTGRFGKFFGCTNAECKNTRKLLKSGDAAPPKMDPVKMPELKCDKVDDTYILRDGASGLFLAASQFPKNRETRAPLVAEIAPHKDEIDPKYHFLCEAPKQDPDGRPTVIRYSRKTKEQYVQTEVEGKPTGWRAFYDGSAWKVEDKR

SEQ ID NO: 69532 - protein, 336 aa, Pseudomonas syringae
MSSGLQGSLMVDVAGTWLTSEDRQFLRQPEVGGLIIFARNIEHPRQVRELSAAIRAVRPDLLLAVDQEGGRVQRLRQGFVRLPPMRAIADKPEALLLAEHCGWLMATEVLAVGLDLSFAPVLDLDYQRSAVVGTRAFEGDPERAALLAGAFIRGMNAAGMAATGKHFPGHGWAEADSHVAIPNDERSLEQIRANDLVPFARLSQQLAAVMPAHVIYPKVDSQPAGFSRRWLQDILRDELKFDGVIFSDDLSMAGAHVVGDAASRIEAALTAGCDMGLVCNDRAAAELALIAAQRLKVKPSPRIARMRGQASASTDYRQHPRWQAALQALRTAQLID

SEQ ID NO: 69533 - protein, 477 aa, Pseudomonas syringae
MPEWRLGLFKGVRMAVYNYDVVVLGSGPAGEGAAMNAAKAGRKVAMVDSRREVGGNCTHLGTIPSKALRHSVKQIIQFNTNPMFRAIGEPRWFSFPDVLKNAEMVISKQVASRTSYYARNRVDVFFGTGSFADETSVNVVCANGVVEKLVANQIIIATGSRPYRPADIDFSHKRIYDSDTILSLGHTPRKLIIYGAGVIGCEYASIFSGLGVLVELVDNRDQLLSFLDSEISQALSYHFSNNNVMVRHNEEYERVEGLDNGVVLHLKSGKKIKADALLWCNGRTGNTDKLGLENIGLKANGRGQIEVDEAYRTSVSNVYGAGDVIGWPSLASAAYDQGRSAAGSMVDNGSWRYVNDVPTGIYTIPEISSIGKNEHELTQAKVPYEVGKAFFKGMARAQISGERVGMLKILFHRETLEVLGVHCFGDQASEIVHIGQAIMSQPGEANTIKYFVNTTFNYPTMAEAYRVAAYDGLNRLF

SEQ ID NO: 69534 - protein, 2641 aa, Pseudomonas syringae
LSYAQQRMWFLWQLDPHSAAYNLPMSVCLNGPLELPLLERAFSALVERHESLRTTFGQEGDRTFQRVAPPAPVNIRLIDLSPLPPQQRWSNARQAMAEQSAQTFDLQRGPLFTVQVLRLAEQEHLLLLNLHHMITDGWSMNVLIDEWLRGYDALLGGKPLPFQPLAVQYRDYAVWQRSWLEAGEQERQLDYWRKHLGEEHPVLELPTDRPYPALPSHEGARLELALAPELLRNLKILAQRQGVTLFVVLLATFKSLLHRYSGQTDIRVGGLIANRTRSETEGLIGCFINTQVLRSEVTAQTRFVDLLHTVRDASTGAQAHQELPFDAIIDALQPERSQSHNPLFQVMFNHQPVVADLLDKQLSGGLRVANLSAEQQALAQRSHAAASDLMLATSGEGEQLNAAFTYATDIFDQPTIARLAAHWRNLLTSVCADPLQTIAELSMLSADERTHLLAVDSAIKADTTTPAHRQFEAQVQRTPDALALILAGESPSPSLTYCELNERSNRLAWQLREQGVGPDVLVGVALGRSLDMPVALLAVLKAGGAYVPLDLSAPSERLRHVLQDSGLKRLLTHSEQRPTLPELAGIQCLCIDQMNSEAASAENPVVDIDPAHLAYVIYTSGSTGRPKGVAISHGALAEFVTLGADYSDLREGDRVLQFATQSFDGFVEQFYPPLCRGAAVVLRDERLWDSATFHHAIVEHGVTLADLPAAYWLTLVQDFAASPPVHYGALRQIHVGGEAMAVEGLRLWQHAGLGHVRLLNTYGPTEATVVSSIHDCSALTPEQVSWRGVPIGKGLAGRRLYVLDDQLNLLPQGALGELYIGGPGLARGYHAQPGLSAERFVADPFVAGERLYRTGDRARLRADGAIEYIGRVDHQVKIRGFRIELGEIESRLQQCTGVREAVVLAVALAGSAQLVAYVVPSVVANSDTEQMALRRRIKGQLQASLPDYMVPTHLLLLAQLPLTPSGKLDRKALPAPDSSQLQARYRAPHSEVEICLAAIWQEVLHAQQVGLDDHFFELGGHSLLAAQVIARIKTRLGVSLPLRVLFEKPLLGELAAEVALLTDNATDNDWSDMDQFMDSLEEFGRMTATTAARIAKRFVGLSLEQRQQFLTRLRQEGKDFSLLPVPVSRHDFSAIPLSFAQQRLLFLWQLDPLSDAYKMTTGLRLQGPLNESALRRAFDHLIERHEVLRTVFQTDGDQALQVLLHNQSIALDSIDLSVLADSELRDAELALQVTTLTSQPFDLRTGPLLRAHLFRLASDEHVLVVNMHHIVSDGWSMDVMIQEFVHCYQAYVEGREPSLPALPLQYADYAIWQRRWLEAGEGERQLDYWRGQLGDEQPLLDAAQDFPRPVTQSFQGEHLRFDFGAELSHQLNTFARTQGMSLFMLVLAGFSLFLSRKAGQRDIRIGVPNANRGRAETEGLIGFFINTQVLRCQIDERLSYLDLLAQIRDTSFGAQAHQDVPFEQLVDHLAPERNLGHNPLFQAKFNQNVVLKQKTALKLAGLEVSEYAFEKQGAHFDLALDITDDGTLIHGDMTYASDLYRRATVEGFIPELLDLFKTLLNAPDVPLFSLGALAVELPREVREPAPQVLQLWDRQVESQPDALAARCLDRTLSTRELDQAANQLAHHLIGLGVREGQPVAVLMERSLDWLTAVLAIFKAGGVYMPLDVKAPDARLQQMLSNAQTKVLLCAEGDRRETSLNVAGCQGLAWTPALWQSLPTSRPDIELPADSAAYVIHTSGSTGQPKGVVVSQGALASYVRGLLEQLQLAPEVSMALVSTIAADLGHTVLFGALCSGRTLHVLTESLGFDPDAFATYMAEHQIGVLKIVPGHLAALLQAAQPADVLPQHALIVGGEACSPALVEQVRQLKPGCRVINHYGPSETTVGVLTHEVPALSELNAIPQVSRFPQCSAHSGDPLRSVPVGAPLPGASAYVLDDVLNPVATQVAGELYIGGDSVALGYLGQPALTAERFVPDPFAQDGARVYRSGDRMRHNHQGLLEFIGRADDQVKVRGYRVEPAEVAQVLLSLPSVAQVSVLALPVDEDESRLQLVAYCVAAAAASLTVDSLREQLTARLPDYMVPAQILLLDQLPLTANGKLDKRALPKPGVVKQRYTAPVGEIEEKLAAVWADVLKLEQVGSTDNFFELGGDSILSLQIIARAKRQGIKLSPKQLFEKQTIGQLASVARLIEKKPAAAAEQVSGSLPLLPIQARFFEMDIPERQHWNQALMLKPLQTLDVTHLQAALTALIEQHDALRLGFTQQNGQWQATFGALNTRDLLWVHELDSPERLTELANEAQRSLDLKNGPLLRAVLVNLPHGEQRLLLVIHHLAVDGVSWRVLLEDLQQAYVALTKGQPVALAAKTTSLKRWAEQLQQYATGAVLTAERDYWLRALQGDDQPLPRDKPEGSMRTRDAAHASSWLSKDLTHKLLKVAPAAYRTQVNDLLLTALAQVLCEWSQQPSVLVQLEGHGREDLFDDTDLSRTVGWFSSLFPVRLTPHIAPGASLCGIKEQLRAVPNKGIGYGVLRHMADSTFAQPLAALPQARVTFNYLGQFDGTFNEQQGALFVPSADSVGIALCEDGPLGNWLSLNGQVFDGQLQLDWTFSREVYQASTIDTLARRYEQALTTLIEHCIAGHQGVTPSDF

SEQ ID NO: 69535 - protein, 3196 aa, Pseudomonas syringae
  MISC_FEATURE (1064)..(1064): X=any amino acid
  MISC_FEATURE (1065)..(1065): X=any amino acid
LAHLTQAQLDALPIAAGEIEDIYPLSPMQQGMLFHSLFDSGAGNYINQMRVNISGLDVPRFHNAWQSAVNNHEVLRSCFVSQSEQSLQVVQSQVTLPFVELDARGKPQNWLDDWAQADRQQGFDLAQGPLLRLAVLRTADDRWQLIYTSHHILMDGWSSSRLLGEVLQRYSGQMPPKQAGRYRDYIQWLQDQDADVSERFWTAELAELDEPSRLLQAFKTSTDQQGYGDYIQLIDADGTRRLNEFAREQHVTLNTLVQSAWLLLLQRYTGQSSVTFGATVAGRPAELSGVEEQLGLFINTLPVIASPRSEQTVGDWVQQVQAKNIALREHEHTPLYTIQRLARHSGEALFDNILVFENYPVSEALQRAPDGLVFSDLRNQEQAHYPLTLVVEANDVLSVRFSYDRQHFSAEGILQLAAHFDHLLQSLSASATARLGELALPAVWTQTVQRYPSEHCAHQRIEAQAARTPQAIALSLGAEQLSYQQLNRRANQLAHKLREQGVGPDVRVGLAAERSLEMIVGMLAILKAGGAYVPLDPDYPQDRLSFLMQDSGIELLLSQTQLLGQLPIPAHVQTLDLADALDGYSTENPINQTSPDNLAYVIYTSGSTGKPKGTLLAHHNLMRLFAATDDWFKFNEKDVWTLFHSFAFDFSVWEIFGALLHGGRLVIVPCEVTRSPEEFHALLVDQQVTVLNQTPSAFKQLMRVACDSTSVLSLETIIFGGEALDVASLKPWFARFGDQTPRLINMYGITETTVHVTYRPITLADTHNPASPIGEAIADLSWYVLDADFNTVAQGCSGELHIGHAGLARGYHNRAALTAERFVPDPFANDGGRLYRTGDLARYKTAGTIEYAGRIDHQVKIRGFRIELGEIEARLQAHSAVREVIVLAVDGQLAAYLLPAQPDQDQQALRGTLKAELRANLPDYMVPTHFIFLDKLPLTANGKLDRKALPAPDAGQLQAAYVAPQGELEEQLASVWSAVLKVEQVGRSDNFFELGGHSLLAVQMLVRVREQLQREVGLKDLFEQPVLADFCAALQEKNGESDHALDELTKSLGGTQTFISGGNXXFDCLAGETPVQQLLDSVKSLSARERKALAILLKRQGVNLYGVTPIARRETPAASALSYAQQRQWIIWQLEPHSAAYNIPLALRLHGALDVEALRRSVEQLIERHETLRTTFEQQGDEALQVVHPASPFALNVDQLALGETVESYVDLEVQRPFDLQHGPLLRVRLLELSEQEHVLVLTQHHIVSDGWSMPIMVDELMQCYQAASLGREAELAQLPIQYADYAIWQRNWLEMGEQERQLAYWTQQLGDQQPILELPTDRPRPALRSYDGARLNIELDAALLNTLKALARQQGITLFMLLLASLQTLLHRYSGQADIRVGVPVANRTRSETQGLIGFFVNTQVLKAEFGAQTTVADLLQQIKQTAVQAQAHQDLPFEQLVEALQPQRDLSRSPLFQVAYNHQSEGYNEARELAGLRLEYQVSDKHTAQFDLTLDTCERQNGLAASLTYATDLFDATTIERMAGHWRNLLSGMCRDANQRIADLPLLSVEERQNTLRDWNHKLAVYPTEQCAHQRIETQAERTPQAIALSLGAEQLSYQQLNSRANQLAHKLREQGVGPDVRVGLAAERSLEMIVGMLAILKAGGAYVPLDPDYPQDRLSFLMQDSGIELLLTQTQLLGQLPIPAHVQTLDLADALDGYSTENPINQTSPDNLAYVIYTSGSTGKPKGTLLAHHNLMRLFAATDDWFKFNEKDVWTLFHSFAFDFSVWEIFGALLHGGRLVIVPREVTRSPEEFHALLVDQQVTVLNQTPSAFKQLMRVACDSPVPMSLQKVIFGGEALDVASLKPWFARFGDQMPRLINMYGITETTVHVTYRPITLADTHNPASPIGEAIADLSWYVLDADFNPVAQGCSGELHIGHAGLARGYHHRAALTAERFVPDPFSNDGGRLYRTGDLARYKTAGTIEYAGRIDHQVKIRGFRIELGEIEARLQAHSAVREVIVLAVDGQLAAYLLPAQPDQDQQALRETLKAELRANLPDYMVPTHFIFLDKLPLTANGKLDRKALPAPDASQLQAAYVAPQGELEQQLAAIWADVLKVGQVGRSDNFFELGGHSLLATQVISRIRQQLDVELSLRDLFEARDLAAFAQAAGAGQGNDAPRFIKADRNQPLGLSYAQQRQWFLWQLDPESTAYTIPAALRLSGSLDIAALEHSFSALIARHETLRTTFRQQGEQAVQIIHAPRALTLTVESVPAGQTLEACVEQEMQRPFDLEQGPLLRVRLLNLAADEHVLILTQHHIVSDGWSMPIMVDELVRLYEGYSQGREVLLAELDMQYADYALWQRSWMDAGEQARQLAYWKQQLGDQQPILELPADHPRPVVQSHVGARLAVELAPALIDDLKQVARQQGVTLFMLLLASFQTLLHRHSGQLDIRVGVPIANRTRAETEGLIGFFVNTQVLRAEFDLHTTFSELLQQVKHTALQAQAHQELPFEQLVEALQPQRSLSHSPLFQVMFNHQSQASAEVRALPGLQVEALVSESYPAQFDLTLNTAEQNGGLSAALTYATALFERSTIERMAGHWLALLQAICANAGQRIADVPMLDAAEQQQIVREWNATAAQFPSELCLHSLIEAQVLATPNAPALIFADEQLSYTQLNARANQLAHRLREAGVGPDVLVGICVERSLELVIGLLAIIKAGGAYVPLDPDYPEDRLAYMMQDSGIGLLLTQTSLLERLPVQVQSMCLDQDGDWLEGYSTANPVNLSHPQNLAYVIYTSGSTGKPKGAGNSHRALVNRLHWMQKAYALDDSDTVLQKTPFSFDVSVWEFFWPLLTGARLAVALPGDHRDPERLVQTIRQHEVTTLHFVPSMLQAFMTHPQVESCNSLSRVMCSGEALPAELVGQVLKRLPQVGLFNLYGPTEAAIDVTHWTCTTDDVLSVPIGRPIDNLKTHILDDGLLPAAQGVAAELYLGGVGLARGYHNRAALTAERFVPDPFDGQGGRLYRTGDLARYRDEGVIEYAGRIDHQVKIRGLRIELGEIEACLLEHDSVQEAVVIDVDGPSGKQLAAYLVVEQRSDHLRELLKAHLKASLPDYMVPTHFIVLDSMPLTANGKLDRRALPAPDATQLQRQYVAPVSEQEQQMAAIWADVLKVERVGLSDDFFELGGHSLLATQLISRIHTGLGIDIPLRLIFEKPQLNEF

SEQ ID NO: 69536 - protein, 394 aa, Pseudomonas syringae
MQSPPHDPASALAIRNHYRQSQSRAARLRLLVDTGQELIQLPPEAMRKCVLQRACAFVAMDHGLLLEWGADNGVQTTARHGSKERLSTLETTADPLAIGPQWLERPGTHLPCVLLLPLRGADEGSFGTLVLANSVAISAPDGEDIESLQLLATLLAAHLENNRLLEALVARDRTMSQLVRQLFTAQEDERKRVAYDLHDGLAQTLAGLHQRLQGFAGRCPELPAQLDADLQAILKLAQHCVGEGRQLISGLRPAVLDDFGLWQAVDKEADRLREAGIIVQWTSQSLERLPSHLEIALFRIAQEGINNVLKHANASCVELALELSDGNVSLRLQDNGRGFITEKPINGTGVQKLGLVAMQERASLLGGRLTCVSRPGRGTRLRTIVPFTADKAIT

SEQ ID NO: 69537 - protein, 2882 aa, Pseudomonas syringae
MKWRVSDMDKSAAERIAQRFTGLPVEQRRQILAKMHETGQSFKLLPIAVTRHGAARIPLSYAQQRMLFLWQMEPDTAAYNVPMAVRLSGPLDRQALSAALDQLVQRHETLRTRFVSEDGAFYQEILQQATVALEFASVEPADIADQVRAELHKPFDLLSGTLLRVKLFQLGDTEHVLTVCMHHIVSDGWSGEVLIRECVQLYQAQVSGQPAQLPALAIQYADYAIWQRAWLEAGEGERQLEYWKQQLGSEHPLLSLPLDHERPLQPSQRGATVRVDLPEHLSAQLKTQARNSGQTLFMLMLAALSVVLSRFSGQADIRIGAPNAGRTRSELEGLIGFFINTQVLRVQVDERQSFAQLLDQVKQVVTGAQSHQELPFEHLVDALAPERNLGHNPLFQFKINQHVLAAEDSGQRVSGLTVDEFPMGSSDARFDLAFDFTDTPGGIRGYFTYATDLFEPPTIERMANALRAVLQALVADTDQRLADQPQTVSLPAAEQSADFACRDFLSLWQQGLHIGRGKTALRVGQQTLSFDELEQRSNQFARYLHTQDIQPGMAVALCLDRSVEWVVSLLAVLKLGAVYLPLDSAQPAERLQQLTRDSGAALLIHASGDDKAAQLGVCPVLAFDAALWSEVDGGELSVRIIAEQPAYIIYTSGSTGQPKGVVISHGALANYVQGVLARLSLNDGASMAMVSTVAADLGHTLLFGALASGRPLHLLSHEQAFDPDGFARYMAEHQVEVLKIVPSHLQGLLQAAHPADVLPSQLLMLGGEASSWALIEQVRALKPGCRIVNHYGPTETTVGILTHEVAERLNACRSVPVGQPLANCKARVLDAYLNPVAERVSGELYLGGQGLAQGYLGRAAMTAERFVPDPDADGQRLYRAGDRARWVDGVLEYLGRADDQVKIRGYRVEPGEVGQVLQTLENVAEAVVLAQPLESDETRLQLVAYCVAAVGVRLNVESLREQLAARLPEYLVPAQFMLLEKLPLTANGKLDKRALPKPGVVKQRYTAPVGEIEEKLAAVWADVLKLEQVGSTDNFFELGGDSILSLQIIARAKRQGIKLSPKQLFEKQTIGQLASVARLIEKKPAAAAEQVSGSLPLLPIQARFFEKDIPERQHWNQALMLKPLQTLDAIPLQAALTALIEQHDALRLGFTQQNGQWQAAFGALNTRDVLWTHELDSVERLSELADEAQRSLDLKNGPLLRAVLIDLPQGEQRLLLVIHHVAVDGVSWRVLLEDLQQAYVAIVAGRPLSLPAKTSSLKSWAEHLQAYAQSPALEQELGYWQAQLQEVSDALPCDYPHGGQQQKHALSVATQLNGELTRQLLQDAPAAYRTQINDLLLTALARVVSRWTAQPHALIRLEGHGREDLFDALDITRTVGWFSNLYPVRLTPQATLAESIMTIKEQLRAVPDKGIGYGALRYLGSESARRTLQALPQGSIVFNYLGQFDGSFDAQGALFTPSADSSGASQSADAPLAAPLSLNGQVYGGQLRLSWTFSGAVFERDTVQRLADEYAVELQQLIAHCTTEGVAGVTPSDFPLARLTQSQLSRLPMPAAQIEDIYPLAPMQQGMLFHTLFEQEAGNYINQMRVEVSGLDVPRFRAAWQATLDAQEVLRSGFVSHLEQSLQVVLRDVSMPFVERDARGQASEWVDDWANADRQQGFDLTQGPLLRLAVLRTGEQTHQLIYTSHHILMDGWSSSRLLGEVLQRYSGQTLPRQVSRYRDYIEWLQRQDAALSERFWTGQLAGLDEPTRLVQAFKAPENGQGHGDYLQLIDAENTRQLSEFAREQRVTLNTLVQSAWLLVLQRYTGQSSVTFGATVAGRPAELPGVEEQLGLFINTLPVIASPRPEQRVADWVQQVQAKNIALREHEHTPLYDIQRWARSAGEALFDNILVFENYPVSEALQQSAPQGLVFGGLHTQEQTHYPLTLVVNLGETLSMRFSYARQSFSELHMAQLSAHLRQVLQALARDPQAAIGELALLDDHQQQQVLRSWNTTTADFPNEHCLHSLIEAQVLATPNAPALIFAAEQLSYAQLNALANQLAHRLREAGVGPDVLVGICVERSLELVIGLLAIIKAGGAYVPLDPDYPEDRLAYMMQDSGIGLLLTQTSLLECLPVPEHVQSICLDQDGDWLAGYSTANPVNLSHPQNLAYVIYTSGSTGKPKGAGNSHRALVNRLHWMQKAYALDGSDTVLQKTPFSFDVSVWEFFWPLLTGARLAVALPGDHRDPERLVQTIQEHQIRTLHFVPSMLQAFLTHPQVESCNSLRRVVCSGEALPAELAGQVLKRLPQASLYNLYGPTEAAIDVTHWTCTTDDVLSVPIGRPIDNLKTHILDDGLLPAAQGVAAELYLGGVGLARGYHNRAALTAERFVPDPFDEQGGRLYRTGDLARYRNEGVIEYAGRIDHQVKIRGLRIELGEIEARLHEHAGVREANVIDIDGPSGKQLVAYLVLADLDQGPDVLREALKTHLKAHVPDYMVPTWFVFIDVMPLTANGKLDRRALPKPDVSRSQQGYVAPRTEFEQRLAALWQQVLQVEQVGLNDNFFALGGHSLLAVSLAGRIRETFDISIKLHDFLLMQTLGELADFMRADEARVKSAVIAMNANQSGAAPLICLPPGGGGTYSYYPLAGQLSDSRPVYGLVNKAYVVPGWFDTSWQEMVAYYVEQIRTTQPQGPYNLLGWSMGGALAIEVAHVLEREGDTVSFLGLVDTQLPASLAMEWVEEAPEVTTQKQGENYYRSLIKSLQAFVPGLQEASIVGLIDTARHSVASEGEVIDWVVDEVAQQAGMNADNLRSIFQDIAVQDEIETGYKLLEANAQLSQAFTLKKLNVQADCWWAGQSRAPGQIAKAETVLLEQCSVNGLRSSTTVDQRHDNVVLAEAFLQGLAERLA

SEQ ID NO: 69538 - protein, 791 aa, Pseudomonas syringae
MKTRGLRLGGMGLVLALAFQGEALAEEFEFDIPAQALNSALKELGRQGDLQILYNPDDVNGKLGSAVHGRLTPEQAVADLLKKADVAHSFEANTLILGVAASAQPMNLGPVAIKGDHFGITTEGSGSYAATGISINKTAQSLRDTPQSVTVVTRQLMNDKNLTGLDEVMAQTPGITFSQRNFGSHVFSSRGFALEDESYTIDGVAGQGYSVTGWMTPDMQIYDRVEVLRGAAGLLIGAGNPGGAVNLVRKRPTALPQFSITTRAGSWDQYRVDLDGSSKLNDSGSVRGRFVTSYEDRGSFIDGLQKTAPLLYGILETDLSEDTTLTLGLRHQSADIHGFSIFGLPRYSNGKAIDLPRSTSLAQNWNRHQTRTDEVFSELETHFDENWSGTLSATHSEGAFEQKVAYAQGAIDPATQSGSRLVKTLFRSDALRSDGFDSHLDGRFDAFGLTHQVMVGGNWSEQKRDSRYATVNANQPLDIFNTDHNAITEPARPAWRSTDYSDKRYGVYSNLRLSLTESLSLVMGGRVSWYDYQSQSAGVTTRAQENNQVTPFLGVIYDLNRDWSWYASYTDIFLPQSGYRSASGAFLDPAIGASHETGIKGELFDKRLNVSFALFYVKQKDVAVEDDAHAGQCLSNDAYGTCYVNGDIRRSKGIDMEISGEPLPGLQTLAGYTFNLTRGSDGQSISAETPRHMVRLSSSYTLPGTWRRLTVGAGVSAQSGYSEHETTQPIDNPGRAIWDARASWKIDEHWSVALNGNNLLDHKYYKATGDIDRGNYYGDPRNYVMTLRGDF

SEQ ID NO: 69539 - protein, 743 aa, Pseudomonas syringae
MHNPSRLTPLSNALLLRQMFRSRPSMAAMGLALCMPVATQAQEAAADGSTQTATVNLAPTAIDSQYLGTATDGTGSYTTGAVSIGKGAPQSLRETPQSVSVMTRQVMDDNNLNSLSKVLEDTPGISFQYRNFGGHVYTSRGFSLLAESFLVDGIGGQGYQITGWMQPDMAIYDRVEVLRGASGLLVGAGQPGGAVNLVRKRPTADNKFSITTRAGSWDQYRVDLDGSGKLNDSGTVRGRMVAAYDDSGSYLDGRDSRTPLLYGIVEADVSDDTTLTMSLRRQEQVINGYSIYGLPRYSNGQSLGLSRSTNLAQKWNRLESDMTEVFTEVAHRFNEDWISKTSLTYSQGGFDQAIAFARGAVNPTTLAGSTFQNTLFRRDEVDSTGLNTQLEGNFNAFGLEHQVTLGADWSKQNANTHQATAPTRSAINIFDVNQNAFAKPARPAWTTDIDTTEERAGLYANTRIHLSEPLSVVLGTRLSWYDYTYDVKTGAANSYESKQTQEFTPFAGVIYDINDSWSWYASYADIFTPQANYVTAGGSPLDPAIGSNYETGFKGELFDKRMNLSMALFYIKQKDVAGVDVNTTQLCPTSSDGSCYLQDGISRSKGVDVEASGEVLPGLQVFGGYTFNMLRNNGDSDVAYETPKHMLRLNTSYNLPGAWNRLTLGTGVSADSGYEVPSNKQLGVAGKAVWDARASWKLDENWKVSLNAENLFDRKYYSTSIANDRSNVYGEPRSYVLTLRGDF

SEQ ID NO: 69540 - protein, 2246 aa, Pseudomonas syringae
QQSRDLAGMTVDYLVNDARATKFDLNLEVTELDHRLGCCLTYSTDLFDEPRIAQMAEHWLNLLQALLVNPQQRLSELPLLQNAERQQLLDSLGVEAGEQRLDQCIHSLFAEQARLRPQAAALTFAGETLSYAELNARANQLAGMLRQRGVGPQVRVGLALPRSLDMVVGLLAILKAGGAYVPLDPEYPLERLHYMIEDSGVGLLLSDRALFAALGELPAGVAHWCLEDDQPLLEAFSSDELPFISLPQHQAYLIYTSGSTGKPKGVVVSHGEIAMHCQAVMRRFDMQPDDCELHFYSINFDAATERLLVPLLSGARVVLRAQGQWDAEEICTLIREQQVNILGFTPSYGSQLAQWLAIQGQTLPVRMCITGGEALTGEHLQRIRAVFQPELFFNAYGPTETVVMPLASLAPQQLEEGEASVPIGRIVGARVAYILDADLALVPQGASGELYIGGAGLAQGYHQRPGMTAERFVADPFASNGGRLYRTGDLVRQRTDGLVEYLGRIDHQVKIRGFRIELGEIESRLLEHESIREAVVLALDTPSGKQLAGYLVSEMAGQGDEQQAQLRESLKAHLKAQLPDYMVPTHLMLLASMPLTANGKLDRRALPAPGPELNRQHYIAPASELEQQLAAIWCAVLNVEKVGLNDNFFELGGDSILSIQVVSRARQAGIHFSPRDLFQHQTVQTLAAVATTRELIQAEQGLLEGASALTPIQHWFFDTPIPQRQHWNQSLVLEPVSALDPRILEQALRAVLEQHDALRLSFTEQNGKWQAEHRAVTAETLLIQARVADMAECAALYADTQRSLDLQNGPLLRALLVDGAQGQQRLLMVIHHLVVDGVSWRVLLDDLQTAYRQLSDVTPVRFAAKTSAFRDWAARLQAYAGNESLREELHVWQRQLGGPATNLPCHNSQGGQQNRHAQTVSVRLDAERTRQLLQQAPSAYRTQVNDLLLTALAQVVCRWSGQPSALIQLEGHGRETLFDDIDLTRTVGWFTSAYPLRLTPALAADAAPGDSIKAIKEQLRQVPHKGLGYGMLRYLADAASKAAMQALPVAPITFNYLGQFDQSFADDALFRPLEESAGAAHDPHAPLPNELSIDSQVYGGELLLRWTFSAERYQPAAIEALAQAYLNQLQALIAHCLSDGSGGLTPSDFPLADLDQTQLDALPVPATHIEDVYPLTPMQEGMLLHTLLEPGTGLYYMQDRYRINSALDPERFAQAWQAVIARHEALRASFCWDIGETMLQVIHKPGSTPIDYLDWRDVLADEQEPRLQALLKSEREAGFDLLNQPPFHLRLIRVDEARYWFMMSNHHILIDAWCRSLLMNDFFDIYTALGEGREAQLTPAPRYRDYIGWLQRRGLVQARDWWQHNLRGFERPTPIPSDRPFLREHAGDSGGMVVGDCYTRLDERDGAQLRELAQQHQLTVNTFAQAAWALTLRRMSGDRDVVFGVTVAGRPVELPQMQRTVGLFINTIALRVGMPGDEQRCTVRDWLSQLLDSNMQLREYEYLPLVTIQENSELPKGQPLFDSLFVFENAPVEVSVLDRAQSLNATSDSGRTHTNYPLTAVCYPGDDLGLHLSYDQRYFDESTVQSMLDEFKRLLLALIEGFHGDMAGLALVSEQERTFLIEGCNQSDHAYPLDKSYVELFEAQVEAHPERIAVSCLDRQLGYAELNIASNRLGHALIEAGVGFDQPVALLAERGPELLGMIIGSFKAGAGYLPLDPALPNVRLSGIIAQSRTPVLVCSAQCLDQGRALLEVLPESHRPQLRVWEDVQQSESAQHNPGRYSAADNLAYVIFTSGSTGLPKGVMVEQRGMLNNQLSKVPYLNLRDSDVIAQTASQSFDISVWQFLAAPLFGARVDIVPNDIARDPQALLAHVQAQRISVLESVPSLITGLLAEQHATLDSLRWLLPTGEAMPPELASQWLQRYPAIGLVNAYGPAECSDDVAFFRVDADSTRSAYLPIGSPTDNNRLYLLDDALDLVPLGAVGELCVAGAGVGRGYVADPSRTVPVFVPHPFGAPGERLYRTGDLARRRKDGVLEYVGRVDHQVKIRGYRIELGEIETRLLEHPAIRESVVLDIDGPLGKVLAAYLVPSAATQDHDALRDALKSHLKASLPDYMVPAHLVILDAMPLTPNGKLDRKALPAPDVSQAQQEYLAPQTEMEQQLATIWADVLKVERVGITDNFFELGGHSLLATQVVTRAQKLLQRNVPLRAMFEFNTVQALAEHLESLGGAQVDEQKFDRLADLMAELE

SEQ ID NO: 69541 - protein, 233 aa, Pseudomonas syringae
MPVTGAGFIKRLTQLSLCAGMALVPVAVQAAESDPWEGINRSIFSFNDTLDAYTLKPLAKGYQYIAPQFVEDGIHNFFSNIGDVGNLANNVLQAKPEAAGVDTARLIVNTTFGLLGFIDVGTRMGLQRSDEDFGQTLGYWGVPSGPFVVIPLLGPSTVRDAIAKYPDTYTSPYRYIDHVPTRNTALGVNLVDTRASLLSAERLVSGDRYTFIRNAYLQNREFKVKDGQVEDDF

SEQ ID NO: 69542 - protein, 544 aa, Pseudomonas syringae
MTISRRGFMAGLALTGAALPAAYYAHRELTRVEEPVTPGEATAGPADTATQRLADKLRGVWTLRFEGRDAGLSGAPLQGLEMFLDIAPRGRGLRGYIDTAEQLRGEGMPRFRVIGDLQPANAAKLYLRVMDGHAGNDPHSDTPDYEFSLTLDEVWGAFGNAGSGTLSGRVERLDRPLALPELENRLIAIKQVFPEARERVALSPPFLAWLVSREHRLFHQLWHASRDKWHKLPEDKRDALRGIGWQPGPRDKERDARGPRKDRNGSGEDFFYMHRHMLIQARKIQDLPSWPRFPLPQPELERDRLGFARYFDNHDGCALPPNWLAQGDEEYTQLVSDIKSHETYHTHFEVWESQYRDPRFLSKLTLGQFGSQVELELHDWLHMRWASVARDPANGQPVPMARRSDDFAERWFEPENDFLADPFSSHVNPVFWMFHGWIDDRIDDWFRAHERFHPGEVKRLDVNGVPWFAPGRWVEVSDPWLGPETHGCSTVPGQTAGTTMEMDPEVMKLALRITFAADDKLSNLLRRVPRRPWYARNLLPERWF

SEQ ID NO: 69543 - protein, 309 aa, Pseudomonas syringae
MTSKLDQLKKFTTVVADTGDFGAIKSLKPQDATTNPSLLLKAASSESNDQMLADAFSGAKGDIGLACDRFAVAIGQEILKVVPGRVSTEVDARLSFDTDALIERSERIIGLYDTAGISRDRVLIKLAATWEGIRAAEKLEKDGIQTNLTLLFSFAQAVACAEAGVFLISPFVGRIYDWYKKSSGTDYVGADDPGVQSVTRIYNYYKANDFKTVVMGASFRNLNQIEQLAGCDRLTISTELLKQLAEDTGTLEQKLAPGNAGEARQSLTESQFRWASNEDAMATEKLAEGIRQFARDQEKLEALLSAKKS

SEQ ID NO: 69544 - protein, 300 aa, Pseudomonas syringae
MRLLSSQALLYTEMVTTGALLHGDRERFLRHDETEHPLALQLGGSTAAGLAACARLAEAAGYDEVNLNVGCPSDRVQNNMIGACLMAHPQLVADCVKAMRDAVGIPVTVKHRIGINGRDSYAELCDFVGTVHDAGCQSFTVHARIAILEGLSPKENRDIPPLRYDVVAQLKTDFPELEIVLNGGIKTLEQCSEHLQTFDGVMLGREAYHNPYLLAQVDQQLFGSVAPVISRHAALESMRPYIAAHIASGGNMHHVTRHMLGLGLGFPGARRFRQLLSVDIHKAENPLLLLDQAAKFLEGH

SEQ ID NO: 69545 - protein, 1107 aa, Pseudomonas syringae
MTADSQSAERLEQELKFFAPTLPVLHFPDWETLPYDLFSPHQDIISQRIASLYRLPELEHGVLVVPITTALHRLAPTKFLLGSSLVLDVGQKLDVNAMRTRLEASGYRYVDTVYEHGEFTVRGALIDLFPMGSKLPFRIDLFDDEIETLRTFDPDTQRSIDKVESVRLLPAREFPLQKEEVTRFKARFRERFDVDFRRSPIFQDLSSGITPAGIEYYIPLFFEETSTLFDYLPQDTQVFSLPGIEQAAENFWNDVRNRYEERRVDPARPLLPPAELFLPVEDCFARLKNWPRVVASQQDVDAGAGRERFPAQALPDLSIEAKATQPLAALAKFLDDFPGRVLFTAESAGRREVLLELLERLKLRPKTVDGWLDFVEGEDRLAITIAPLDEGLLLDQPALALVAESPLFGQRVMQRRRREKRTDGGNNDAVIKNLTELREGAPVVHIDHGVGRYLGLATLEVENQVAEFLMLAYAEDAKLYVPVANLHLIARYTGSDDEMAPLHRLGSETWQKAKRKAAEQVRDVAAELLDIYARRAAREGYAFADPKADYATFSAGFPFEETPDQQTTIEAVRADMLAPRPMDRLVCGDVGFGKTEVAMRAAFIAVHGGRQVAILVPTTLLAQQHYNSFRDRFADWPVTVEVMSRFKSAKEVSAAVANLAEGKIDIVIGTHKLLQDDVKIKNLGLVIIDEEHRFGVRQKEQLKALRSEVDILTLTATPIPRTLNMAVSGMRDLSIIATPPARRLSVRTFVMEQNKPTIKEALLRELLRGGQVYYLHNDVKTIEKCAADLAELVPEARIGIGHGQMRERDLEQVMSDFYHKRFNVLIASTIIETGIDVPSANTIIIERADKFGLAQLHQLRGRVGRSHHQAYAYLLTPPRKQITSDAEKRLEAIANTQDLGAGFVLATNDLEIRGAGELLGDGQSGQIQAVGFTLYMEMLERAVKSIRKGEQPNLDQPLGGGPEINLRVPALIPEAYLPDVHTRLILYKRIANAADEDALKDLQVEMIDRFGLLPEPTKNLVRITLLKLQAEQLGIKKVDGGPQGGRIEFATETPVDPLTLIKLIQSQPNRYKFEGATLFKFMVPMERPEERFNTIEALFERLTPKTA

SEQ ID NO: 69546 - protein, 419 aa, Pseudomonas syringae
MLELAAGFICLTSLLTYVNYRFIGLPPTIGVMVTALMFSLLLQGLSFLGYPGLEDRVQQLIGQIDFGDLLMNWMLSFLLFAGALHVNLADLKSYRWPIGLLATFGVLIATTVIGALAYWIFALFGWHVSPLYCLLFGALISPTDPIAVLGVLRTANASKPLKTTIVGESLFNDGTAVVVFTVLLGIAQLGETPTVGETALLFVHEAVGGVLFGGLIGYAVYLMIKSIEQYQIEVMLTLALVIGGSAMASELHVSGPIAMVVAGLIIGNLGRNLAMNDMTRRYMDGFWELLDDMLNALLFALIGMELLLLPFSWQHLIAASLLAVAILLSRFVTVAPAILLLRRWRKVPHGTIRILTWGGLRGGVSVALALALPNGPERDLLLSITYIVVLLSILFQGLTIGKLVNAVTREPQAKDPAGH

SEQ ID NO: 69547 - protein, 480 aa, Pseudomonas syringae
MQLKDSTLFRQQAYINGQWLDADGGQSIKVNNPATNEILGTVPKMGAAETRRAIEAADKALPAWRALTAKERGNKLRRWFELMIENQDDLGLLMTLEQGKPLAEAKGEITYAASFIEWFAEEAKRVYGDVIPGHQPDKRLIVLKQPIGVTAAITPWNFPAAMITRKAGPALAAGCTMVLKPASQTPFSALALAELAERAGIPAGVFSVVTGSAGDIGSELTGNPIVRKLSFTGSTEIGRQLMAECAKDIKKVSLELGGNAPFIVFDDADLDKAVEGAMISKYRNNGQTCVCANRIYVQDGVYDAFAEKLKVAVGKLKIGNGLEDGITTGPLIDEKAVAKVKEHIADAVSKGATVLTGGNSLEGSFFEPTILVNVSKDAAVAREETFGPLAPLFRFKDEAEAIALANDTEFGLASYFYAQNMSRVFRVAEALEYGMVGINTGLISNELAPFGGIKSSGLGREGSKYGIEDYLEIKYLCLSV

SEQ ID NO: 69548 - protein, 1053 aa, Pseudomonas syringae
MFERLIQFAIEQRIVVMLAVLLMAGLGIASYQKLPIDAVPDITNVQVQINTSAPGFSPLETEQRVTFAIETNMAGLPGLQQTRSLSRSGLSQVTVIFEDGTDLFFARQLVGERLQIAKDQLPEGVDAMMGPISTGLGEIFLWTVEARDGALKEDGTPYTPTDLRVIQDWIIKPQLRNVPGVAEINTIGGFAKQYQIAPDPKKLAAYKLTLNDLVAALERNNANVGAGYIERGGEQLLIRAPGQLGTVDDIANIVIANVQGTPIRISSVAEVGIGKEMRSGAATENGREVVLGTVFMLIGENSRTVSQAVAAKLADINRTLPEGVEAVTVYDRTNLVEKAIATVKKNLIEGAILVIVILFLFLGNIRAALITAMVIPLAMLFTFTGMFTNKVSANLMSLGALDFGIIVDGAVVIVENAIRRLAHAQKKYGRMLTRSERFHEVFAAAREARRPLIFGQLIIMVVYLPIFALTGVEGKMFHPMAFTVVIALLGAMILSVTFVPAAIAMFVTGKVKEEEGFVMRTARQRYAPILSWVLSHRAIAFGMAFVLIVLSGFTASRMGSEFIPSLSEGDFALQALRVPGTSLSQSVDMQQRLEKAIIEKVPEVQRVFARTGTAEIAADPMPPNISDSYVMLKPQSEWPDPDKSRETLIADLQKAAASVPGSNYELSQPIQLRFNELVSGVRSDVAVKVFGDDMNVLNQTAAKIAATLQKVPGASEVKVEQTTGLPVLTINIDRDKAARYGLNVADVQDAIAIALGGRQAGTLYEGDRRFDMVVRLSEQLRTDVDGLSSLLIPVPANASSQQISFIALSQVASLDLVLGPNQISRENGKRVVIVSANVRGRDLGSFVEEAGTTIDSGVQIPAGYWTNWGGQFEQLQSAAKRLQIVVPVALLLVLALLFMMFNNLKDGLLVFTGIPFALTGGVMALWLRDIPLSISAGVGFIALSGVAVLNGLVMISFIRSLREEGRSLHDAINEGALTRLRPVLMTALVASLGFIPMALATGTGAEVQRPLATVVIGGILSSTALTLLVLPALYQWAHRREEEQEEDEVKALK

SEQ ID NO: 69549 - protein, 396 aa, Pseudomonas syringae
MSEYSLFTSESVSEGHPDKIADQISDAVLDAIIAEDKYARVACETLVKTGVAIIAGEVSTSAWVDLEDIVRNVILDIGYNSSDVGFDGATCGVMNIIGKQSVDIAQGVDRSKPEDQGAGDQGLMFGYASNETDVLMPAPITFSHQLVQRQAEARKSGLLPWLRPDAKSQVTCRYENGKVVGVDAIVLSTQHNPDVSYKDLREGVMELIVKHVIPAHLLHKDTQFHINPTGNFIIGGPVGDCGLTGRKIIVDTYGGMARHGGGAFSGKDPSKVDRSAAYAGRYVAKNIVAAGLAERCEIQVSYAIGVAQPTSISLNTFGTGKLSDDKIIKLVRDNFDLRPYAITTMLDLLHPMYQATAAYGHFGRTPVEMTVGDDTFTAFTWEKTDRADALRAAAGL

SEQ ID NO: 69550 - protein, 647 aa, Pseudomonas syringae
MQKANSGHPGAPMGMADIAEVLWRDYLKHNPTNPSFADRDRFIMSNGHGSMLVYSLLHLTGYDLSIDDLKNFRQLHSRTPGHPEFGYTPGVETTTGPLGQGFANAVGFAAAEKTLAAQFNRPGHSIVDHHTYVFMGDGCMMEGISHEVASLAGTLQLGKLIAFYDDNGISIDGEVEGWFTDDTPKRFEAYGWQVIRNVDGHDADEIKTAIDTARKSDQPTLICCKTTIGFGSPNKQGKEESHGAPLGADEIALTRAALKWNHGPFEIPADIYAEWNAKEKGLAVEAEWDQRFAAYSAAFPELANEFIRRMSGELPADFAEKSAAYVAEVNAKGETIASRKASQNALSALGPLLPEILGGSADLAGSNLTIWKGCKSITGEDPNGNYLHYGVREFGMAAMMNGIALHGGFVPYGATFLIFMEYARNAVRMASLMKKRVIYVFTHDSIGLGEDGPTHQPIEQLTSLRTTPNLDTWRPADAVESAVAWKYSLERNDGPSALIFSRQNLTHQAREQQQIDAIARGGYVLRDCAAEPELILIATGSEVGLAVEAYEKLTAQGRNVRVVSMPCTSVFEAQDAGYKQAVLPLQVSARIAIEAAHADYWYKYVGLEGRVIGMTTFGESAPAPLLFEEFGFTLENVLSIAEELLED

SEQ ID NO: 69551 - protein, 360 aa, Pseudomonas syringae
MGQRTPLFDLHLALGAKMVDFGGWDMPLHYGSQVEEHHQVRRDCGVFDVSHMNVIDVLGREAKAWLRRLLANDVDKLKTPGRALYSAMLDEQAGVIDDMIVYLTADGYRLVVNAATGAKDLAWMQSQLGDFDVQLLARSEMAMLAIQGPQARNRIAQLVSSARAELIRQLKPFEGLDDGDWFIARTGYTGEDGLEIMLPADEAQRFFNELVGAGISPIGLGARDTLRLEAGMNLYGQDIGEHVSPLASNMAWSIAWEPAERDFIGRQALESERAEGTAFKLVGLVLEERGVLRAHQVVRVAEIGEGEITSGSFSPTLSKSIALARVPMATADRAEVEIRGKWYPVRVVQPAFVRHGKTLI

SEQ ID NO: 69552 - protein, 594 aa, Pseudomonas syringae
MAALAPSSQDRWLDLNDVLRELVTEGYLSQDDTETALSQRRSAVNIQLHPLEFLASQQFDDLKRPGKKLDLETLTAWLAKASGQPYMRIDPLKINVAAVTPLMSYAFAQRHKILAVAVDRESVTIASAQPYVRSWEADLAHVLKLQIKRVVANPTDIQRMAMEFFRLAKSVSGANASEQKMSNMGNFEQLLKLGASDQEPDANDAHIVNIVDWLFQYAFQQRASDIHIEPRREQGTVRFRIDGVLHNVYQFPAQVIMAIVSRLKSLGRMNVAEKRKPQDGRVKTTTPENREVELRLSTLPTAFGEKMVMRIFDPEVLLKDFDQLGFSSDDLRRWQEMTRQPNGIILVTGPTGSGKTTTLYTTLKKLATSEVNLCTIEDPIEMVEPAFNQMQVQHNIDLSFAAGVRALMRQDPDIIMIGEIRDLETAEMAIQAALTGHLVLSTLHTNDAPSAISRMLELGVPHYLLKATILGVMAQRLVRTLCPHCKAPINLNETDWQTLTRPWQAPVPPGAHQAVGCVECRDTGYRGRAGVYEIMVMSDNIKALISADLDLTAMRRQAFKEGTRSLRLSGAQKVSAGLTTLEEVLRVTPQSEQR

SEQ ID NO: 69553 - protein, 471 aa, Pseudomonas syringae
MGCAPVISISVWIPPAMQKETEIKLRVSRETLAALREHPLLKKRNKSGWERLELSNQYFDTPERELAHAKVALRIRRDGDQIIQTMKTRGQSVAGLSERNEYNWDLTKAKLDLKKLEGDCWPEQLTELDKKSIKPLFTTDFIREKAEIAWGRGKTKVVIEAALDLGQVVAGKQKEEICELELELREGDPAALLELAAELAATLPLMPCDISKAERGYRLLDASSYSLSLPAPTLNAETPLDDAYSALAWHLLGSSQRLAEQYRFNGHWRLLQDWVEMLGELRALTSSLGQAAPRTSTAQLRTALDALLEDWRPLVQAGQEDADVRGAAHEQFLEELQDTRWGEFSLNTSRWLLARSWTAERNTRGNRQGAALLSSWLPRLLGEEATSLQLSRYQQQPEDLAEQLPRIERIQAWLHWARGALDLPELDRLYGELRKLEELAHLDISDEILDARVQQAITVFQSRAWKTLLRL

SEQ ID NO: 69554 - protein, 230 aa, Pseudomonas syringae
MIKLVTFDLDDTLWDTAPAIVGAEAALRDWLAEQAPKLGPVPVEHLWEIRSRLLDEDPSFKHRISALRRRVLFHALEDAGYDSDEAQQLADESFEVFLHGRHQVQIFPEVQPTLEILAKTFTLGVITNGNADVRRLGLADYFAFALCAEDLGIGKPDPAPFLEALRRAKVDASAAVHVGDHPSDDIAGAQQAGMRAIWYNPQGKAWDADRLPDAEIHNLSQLPEVLARWA

SEQ ID NO: 69555 - protein, 299 aa, Pseudomonas syringae
MEQHLDAYCMHLRSERQVSPHTLEAYRRDLSKVLAYCQKARLSSWNDLDIQHLRSFTARQHQQGQSSRSLARMLSAVRGFYKYLNREGLCQHDPANGLSPPKGERRLPKTLDTDRTAQLLDGGVEDDFLAHRDQAIMELLYSSGLRLSELTGLNLDQLDLRDGLVQVLGKGSKTRVLPVGSKARQALETWLPLRALTNPQDDAVFVSQQGKRLGPRAVQLRIKTAGERELGQNLHPHMLRHSFASHLLESSQDLRAVQELLGHADIKTTQIYTHLDFQHLATVYDSAHPRAKRKGAADD

SEQ ID NO: 69556 - protein, 773 aa, Pseudomonas syringae
MDSINSRIAEELGVRPQQVAAAVALLDEGSTVPFISRYRKEVTGSLDDTQLRHLEERLRYLRELDDRRVSILASIEEQGKLTPELARDIKLADTKTRLEDLYLPYKQKRRTKGQIALEAGLGELADGLFNDPSLTPDAEAARFVDAEKGVADVKAALEGAKYILMERFAEDASLLDKLRSFLKQEAVISARVVPGKEEEGSKFRDYFEHDEPLKSMPSHRALAIFRGRNEGFLSSALKVGEELPGAMHPCELMIGERFGIQNQSRAADKWLAEVVRWTWKVKLYSHLETDLLGELREGAETEAINVFAHNLHDLLLAAPAGQRATLGLDPGLRTGCKVAVVDATGKLLDYATVYPHVPKNQWDQTIAVLAALCAKHSVDLIAIGNGTASRETDKLAADLIKKYPGLKMTKVMVSEAGASVYSASELAAKEFPDLDVSIRGAVSIARRLQDPLAELVKIDPKSIGVGQYQHDVSQLKLARGLDAVVEDCVNAVGVDVNTASVALLARISGLNTTLAQNIVAHRDENGAFKTRAALKKVSRLGEKTFEQAAGFLRVMTGDNPLDSSAVHPEAYPLVQRIAAETDRDIRSLIGDASFLKRLDPKKFTDETFGLPTVTDILQELEKPGRDPRPEFKTAEFQEGVEDLKDLQPGMILEGVVTNVTNFGAFVDIGVHQDGLVHISALSEKFIKDPREAVKAGDVVKVKVMEIDIPRKRVGLSMRMSDTPGEKIDGARGARPGASPRQQNSAPRKETTAPAPANNAMASLFANAKQLKKR

SEQ ID NO: 69557 - protein, 418 aa, Pseudomonas syringae
MLIVVLFSKALTLVYLLMNEDVLVDRQYSHGVALTLRAYWAADENDREAIAEAAGLIRVVGGGVPEGEQHWPYSEIYQRQMQAELGADTEVRLRVHAPPALWVRAPSLGDGWLKVPLYPHPLRGQKIWSVLGWFLAIGLLSTASAWIFVRQLNQPLKRLVFAARQLGQGRSVRLPVSDTPSEMTEVYRAFNQMAEDVEQAGQERELMLAGVSHDLRTPLTRLRLSLELMNDNEFSEGMVRDIEDMDAILDQFLAFIRDGRDEEIEEVDLGDLVRDVVAPFNNAEGSIRLCLEPIPPFPLRRVSMKRLLTNLIGNARHHAGNGIEVAAYVSGDRNAPYVVLSVLDRGAGIDPSELDTIFNPFIRGDRARSGKGTGLGLAIVKRIAAMHGGNVELRNRSGGGLEARVRLPLGLMLPRDAI

SEQ ID NO: 69558 - protein, 591 aa, Pseudomonas syringae
MKLRTRLFLSISALITVALLGLLLGLVSVMQMARTQESLIQHNFAILDLGLKLRQNLGDQLVLMTGATRNPPELEKIQRQFEELLEEASAQDTQEDVRNGLEGTWVDYRRFIDALKQFGTDPRGIRGNPQLSESFDSLRNGLLNVHRKALENISSAEINSRDRALWIAGLLGLVGLAVLCIGFVTAHGIARRFGAPIEALAKAADRIGEGDYEVTLPISSAAEMNLLTRRFGIMAEALRQHQATNVDELLAGQQRLQAVLDSIDDGLLMIDRQGHLEHLNPVAQRQLGWDESRLGQSLGEALSRPELDEQLHLVLRGGTLERAPEDLAIDIDGESRLLTYSMTPVSHTKGHILGAVMVLHDVTEQRAFERVRSEFVLRASHELRTPVTGMHMAFGLLQERLHFAPESREADLLNTVTEEMQRLMQLINDLLNFSRYQNGLQKLKLAPCSIETLLEEARARYEGQAQEQEIVLMLDIQEPMPRLHADQSQLERVLDNLLDNALRHTPPNGLIRLQARRHGERAIISVEDNGEGIAYGQQGRIFEPFVQVGRKKGGAGLGLALCKEIVQLHGGRMGVYSRPGQGTQFYMALLL

SEQ ID NO: 69559 - protein, 264 aa, Pseudomonas syringae
MERDVTDFPTSLTAPKKGCEGCTGSPELGFSFDYAYQPIVNLHDQSIFAHEALVRGPNGEGAMSVLNQVTDQNRYRFDQKCRTTAIAGAAKLGMTERLSINFLPNAVYRPELCIRSTLEAAKQHDFPIERLIFETIESEHVDNNNHLSNILREYREFGFMTAIDDFGAGYSGLTLLADFQPDLIKLDMNLVRDIHRDRARQAIVRGVVTMCKDLGIKLIAEGIEHIEERDFLADCGISLMQGYLFAKPAFKALAQIAPEAWQKP

SEQ ID NO: 69560 - protein, 328 aa, Pseudomonas syringae
MAPDTFECRTALFPPRAIHCHYLRYPLLMHDFPDIDFTQRFIFDESDVRGELVALERSYAEVLAKHPYPEPVAQLLGELMAAAALLVGTLKFDGLLILQARSSGAVPLLMVECSSERELRGIARYDEALITPGAGLQDLMPDGSLALTVDPRQGKRYQGIVALDGVDLSESLSNYFVMSEQLGTRFWLKADGHRARGLLLQQLPAAQITDPEERDASWEHVVTLASTLTAEEMLSLDNQTVLHRLYHEDPVRLFDVQPICFRCSCSRERSANALASLGLEDAQQLVIEHNGSIEIDCQFCNERYLFDATDVAQLFAGGGVDSPSDTRH

SEQ ID NO: 69561 - protein, 514 aa, Pseudomonas syringae
MTQINNAVHTDLSTDELVKEALARNEGVLSDTGALVVETGHRTGRSPVDRFIVEEPSTQDAIAWGPINRKFPAEKFDALWNRVGAYLAERERFVSHVHVGSDPAHYLPVKMTTETAWHNLFGRCLFINPEQYNPAGKDEWEIQNAPWFVCDPERDGTNSDGTVIINFAARKVLIAGMRYAGEMKKAMFSVQNFLLPAVDVLPMHCAANMGEEGDVTLFFGLSGTGKTTLSADESRYLIGDDEHGWGVGVVFNIEGGCYAKCIDLSEKNEPVIWKAIQHGAVLENVVLDPVTKTADYADSSLTQNSRAAYPRELIEKRAPKNLGGEPNAVIFLTCDLTGVLPPVSILSEEQAAYHFLSGYTALVGSTEMGSGSGIKSTFSTCFGAPFFPRPAGEYAELLIKRIRGFKSKVYLVNTGWTGGGYGVGKRFNIPTTRGVIAAIQSGALIGAETEHLDTINLDVPKLVPGVDTGLLNPRNTWADKAAYDEAAKALAGLFVENFKKFDVSDAIKAAGPKL

SEQ ID NO: 69562 - protein, 921 aa, Pseudomonas syringae
MTQAPLVLVDGSSYLYRAFHALPPLTTSKGLPTGAVKGVLNMLKSLRRQYPDSPLAVVFDAKGGTFRDALYTDYKANRPSMPDDLRVQVDLLHACVKGMGYPFLCVEGVEADDVIGTLARSSAAADRPVVISTGDKDMAQLVDGHITLVNTMTGSVLDVAGVKEKFGVGPEHIIDYLALMGDKVDNIPGVPGVGEKTAVGLLVGVGGGIKELYDNLEMVATLPIRGAKTLAAKLEEHRAMAFLSYELATIKIDVPLDIELEQLHCSEPDRDKLMELYAELEFKSWIEDLQRDAKRAGQELVVEEPTVAAKEAAYEVILEQGQFDAWLKKLQAAPLFAFVTQSNGTDAQRAQLVGLSFAIQPHEAAYIPLTHSYMGVPQQLDRDTVLKTLKPLLEDPNKIKVGQHAKFAINLLANCAIGGDQAQGIELQGVRFDTILESYVLDSTATRHDRDSLVAKYLTHTPINFQDIAGKGAKQLTFDQIAIEQAGNYAAEEADLTLRLHEVFEARLAAIPTLQPVLNEIEMPLVPVLARIERQGALVDANLLGIQSVELGDKMTALEREAFAIAGEEFNLGSPKQLGVILYEKLGMPILSKTATGQPSTAEAVLAELAEQDFPLPKVLMQYRSMSKLKSTYTDRLPEQINPRTGRIHTSYHQAVAVTGRLSSSDPNLQNIPIRTAEGRRIRQAFVAPKGYKLLAADYSQIELRIMAHLAKDEGLLHAFRNDLDVHRATASEVFGVELENVTTDMRRSAKAINFGLIYGMSAFGLAKQIGVDRKQSQAYVDRYFARYPGVLDYMERTRTQAAEQGFVETIFGRRLYLPDINAKNPSLRNGAQRMAINAPMQGTAADIIKKAMVAVNGWLDESGLDARVILQVHDELVLEVREDLVDQISEQIRPHMSGAAELAVPLLVEVGVGNNWDEAH

SEQ ID NO: 69563 - protein, 345 aa, Pseudomonas syringae
MTYIAAENRYKDMPYRRTGRSGLVLPALSLGLWHNFGDSTPIDTQRAMLRTAFDLGINHFDLANNYGPPYGSAEINFGRLLREDFKRYRDELIISSKAGWDMWPGPYGQGGGSRKYVLASLDQSLQRMGLDYVDIFYSHRFDPDTPLEETASALATAVQQGKALYIGISSYSGAKTREIAALLKEWKVPLLIHQPAYNLLNRWVEKDLLDATEELGAGVIAFTALAQGLLSDKYLNGVPKDARVNRPGGGSLQASHLSEQNIAHVRALNEIAQRRGQSLAQMALAWTLRDPRVTSALIGASRPEQIIENVGALQNLAFSSEELAEIDSFAVEGGINLWEKPSLAE

SEQ ID NO: 69564 - protein, 501 aa, Pseudomonas syringae
MCSMPAAPRFLEHYRKADRIMLGLIWLLFVYALGLGFWFDTFTQAVVVGGGTALVLTGLYRVIGGTRLMRCCVGIGLMVMAALHINQAHGQIEIHFGIFVFLAVLTFYRDWLPILVAAVTIAIHHIGFHALHHSGFPVYVMQHGGGWSMVAMHAVYVVVESTILVYLAVQNQAEAVENQDMLDRMLATTNQFSPDSRIDERSGKHVSLAQRFEQFLAQITGLVDGVVRDTRGLGELGHDLAKASGTLETGAQHQLSEIARMTGAMQRMGDAMNDISGHVAQAVQRAGDASDQVAHGRDSVDRAQSEITQLAARISTTDETVQALANQSEQIGKVLDVIGSIAEQTNLLALNAAIEAARAGEQGRGFAVVADEVRNLAQRTASSTKEIQTIIEDLQKGSRQAATAMSDSLQGVGRCVENSQRASESLRSVGEGIGHITQLNGLIATTTEQQATASREIADQLRSVQAIAEHTAANIGVLASSSQSLSPLAVRLAALGQSFHN

SEQ ID NO: 69565 - protein, 468 aa, Pseudomonas syringae
MSKSVQLIKDHDVKWIDLRFTDTKGTQHHVTMPARDALEDDFFEVGKMFDGSSISGWKGIEASDMILLPDDETAVLDPFTEEPTLILVCDIIEPSTMQGYDRDPRAIARRAEEYLKSTGIGDTVFAGPEPEFFIFDEVKFKSDISGSMFKIYSEQGSWMSDQDVEGGNKGHRPGIKGGYFPVPPFDHDHEIRTAMCNALEEMGQTVEVHHHEVATAGQNEIGVKFNTLVKKADEVQTLKYVVHNVADAYGRTATFMPKPLYGDNGSGMHVHMSIAKDGKNTFAGEGYAGLSDIALYFIGGIIKHGKALNGFTNPATNSYKRLVPGFEAPVMLAYSARNRSASIRIPYVNSPRGRRIEARFPDPAANPYLAFAALLMAGLDGIQNKIHPGDAADKNLYDLPPEEAKEIPQVCGSLKEALEELDKGRAFLTKGGVFSDDFIDAYIALKSEEEIRVRTFVHPLEYELYYSC

SEQ ID NO: 69566 - protein, 606 aa, Pseudomonas syringae
MIENLRNIAIIAHVDHGKTTLVDKLLRQSGTLERGELNDERVMDSNDQEKERGITILAKNTAINWNGYHINIVDTPGHADFGGEVERVMSMVDSVLLLVDAQDGPMPQTRFVTKKAFEAGLRPIVVINKVDRPGARPDWVLDQIFDLFDNLGATEEQLDFKVVYASALNGIAGLDHTEMAEDMTPLYQSIVDNVPAPAVDRDGPFQMQISALDYNSFLGIIGVGRIARGKVKPNTQVVAIDANGKRRNGRILKLMGHHGLHRVDVEEAAAGDIVCISGFEELFISDTLCDPQNVEAMKPLTVDEPTVSMTFQVNDSPFCGKEGKFVTSRNIKERLDKELLYNVALRVEEGDTADKFKVSGRGELHLSVLIETMRREGFEMGVGRPEVIIRMVDGVKHEPFENVTIDLPEESQGSIMEQIGIRKGDLTNMVPDGKGRVRLEYNIPARGLIGFRNEFLTLTSGAGILTSIFDRYDVMKSGDMSGRQNGVLVSVATGKALTYSLETLQARGKLFLGHGEDVYEGQIVGINSRDNDLGVNPTKGKKLDNMRASGKDETIALVPPIRFTLEQALEFVQEDELCEVTPKSIRLRKKILGESERTRAAKKSGN

SEQ ID NO: 69567 - protein, 468 aa, Pseudomonas syringae
MQDRLAQVVDLLQRQRIVEDLTHRQEGQNQDRVENLVHRQNLVELQRKLEDLHSADVAYILEALPLEDRLTVWQLVKADRDGDILLEVSDSVRETLIADMDDHELLAAARDMDADELADLAPELPRDVVHELMEALDSQQRERVRSALSYDEDQVGALMDFEMVTIREDVSLEVVLRYLRRLKELPGHTDKLFVVDSEGVLKGVLPIKRLLVNDPEKQVGEVMANDPVSFHPEDDAYDAAQAFERYDLISTPVVDKNGKLIGRLTIDEIVDLIREESENEVLNMAGLREEEDIFASVWRSLRNRWAWLAVNLVTAFLASRVIGLFEGSIEKLVALAALMPIVAGIGGNSGNQTITMIVRAMALDQVNTGNTSRLLRKELAVGLINGLLWGGVIGVVAYLLYGSWSLGVVMTAAMTLNLLLAALMGVSIPMALARLGRDPAMGASVMITAMTDSGGFFIFLGLATIFLL

SEQ ID NO: 69568 - protein, 154 aa, Pseudomonas syringae
MRKTLIALMFATALPAIAMAAPPAPPAGAPDADAPGMHMQRGDRGPGMHRGPGPLKELDLTREQRQQIDRLMREQMHERREITQNYLEKMPAADQKAMRDEIEAKRSKTDSEVRALLKPDQQKQFDEIKKKEDERRAEWAEFKAWKAAKTAKAQ

SEQ ID NO: 69569 - protein, 410 aa, Pseudomonas syringae
MALIVQKFGGTSVGSVERIEQVADKVKKFREAGDDLVVVLSAMSGETNRLIELARQISDQPVPRELDVIVSTGEQVTIALLAMALMKRGVPAVSYTGNQVRILTDSAHNKARILQIDDQKIRSDLKAGRVVVVAGFQGVDEHGNITTLGRGGSDTTGVALAAALKADECQIYTDVDGVYTTDPRVVSQAQRLDKITFEEMLEMASLGSKVLQIRAVEFAGKYNVPLRVLHSFKEGPGTLITIDEEESMEQPIISGIAFNRDEAKLTIRGVPDTPGVAFKILGPISAANIEVDMIVQNVSHDNTTDFTFTIHRNDYQAALQVLETTAREISAREVSGDTKIAKVSIVGVGMRSHAGVASRMFEALAKESINIQMISTSEIKVSVVIEEKYLELAVRALHTAFELDAPRQGE

SEQ ID NO: 69570 - protein, 186 aa, Pseudomonas syringae
MQALEVLLNRVSVPRLVDPAPDAAQREIMFGAALRSPDHGQLKPYRFLTVEGSARERMGDLLVEALQQSGNEVTPQALEKARLGPLRAPLVVVVIACLQDHFKVPRKEQLITAGCAAHGVLLAAYALGVGAVWRTGDLSYASQVAQGFGLAAGEEVIGFLYLGTPLNPPREAPKVDVGEFVSEWQG

SEQ ID NO: 69571 - protein, 833 aa, Pseudomonas syringae
MNQFKDCFLGQEKRAYTRAVTSQKCVRAGGKHNDLENVGYTARHHTFFEMLGNFSFGDYFKRDAITYAWTFLTSEKWLNLPKEKLWVTVYATDDEAYDIWTKEIGVPAERMVRIGDNKGAPYASDNFWTMGDTGPCGPCSEIFFDHGADIWGGPPGSPEEDGDRYIEIWNNVFMQFNRTADGVLHPLPAPSVDTGMGLERVSAVLQHVHSNYEIDLFQSLLTASANAIGCSNDNQASLKVVADHIRSCGFLIADGVLPSSEGRGYVLRRIIRRACRHGNKLGAKGSFFYQIVAALVAEMGSAFPELVQQQSHIERVLRGEEEQFAKTLEQGLKIIEQDLAELKGTVVPGEIVFKLYDTYGFPMDLTGDIARERNLTLDEEGFEREMEAQRVRARSASSFGMDYNSLVKVDVATQFTGYSATTGSASVVALYKDGQSVTHLNAGEEGVVILDTTPFYAESGGQIGDSGFLLAGDARFDVSDTTKTGGAFLHHGVVASGSLSVGVQVETQVADEVRDATKLNHSATHLLHAALRQVLGEHVQQKGSLVDSQRLRFDFSHFESIKPEQLRALEDIVNAEIRKNTPVVTEETDIDTAKKKGAMALFGEKYGDSVRVLSMGGEFSVELCGGIHASRTGDISLFKIVSEGGVAAGVRRIEAVTGAAALAWLNSAEDQLKEAATLVKGNRDNLLDKLTAVLERNRLLEKQLEQLQAKAASAAGDDLSSAALDVKGVKVLATRLDGQDGKALLALVDQLKNKLGRAVILLGSVHEDKVVLVAGVTKDLTGQLKAGDLMKQAATAVGGKGGGRPDMAQGGGVDATALDSALALAVPFVEQGI

SEQ ID NO: 69572 - protein, 484 aa, Pseudomonas syringae
MSLPTFRIIGFIIGIFLITLAVAMIVPMATLVIYDRFEDLRSFLWASAITFIAGLALVVPGRPDNVQLRPRDMYMLTVSSWIVVCIFAALPFLLTQHISYTDSFFESMSGITATGSTVLSHLDSMSPGILIWRSMLHWLGGIGFIGMAVAILPLLRIGGMRLFQTESSDRSEKVMPRSHMVAKFIVLAYVGFTALGSLAFWAAGMSLFDAINHAMSAISTGGFSTSDLSLARWPQPAVHWVAIVVMILGSLPFTLYVATLRGNRKALIKDEQVQGLIGLLLITWLVMTVWYANTTDLPWTEALRHVALNVTSVVTTTGFALGDYSLWGNFSLMLFFYLGFIGGCSGSTAGGVKIFRFQVAYILLKTNLNQLIHPRAVMKQKYNGHRLDDEIVRSILTFSFFFTITICLIALMLSLLGLDWMTALTGAASTVSGVGPGLGEVIGPAGNFSTLPDAAKWILSGGMLLGRLEIITVLVLCVPAFWRH

SEQ ID NO: 69573 - protein, 627 aa, Pseudomonas syringae
MRLGIDELINPLEKHTWLFISAPLAAIPLFIRFGMYRAVMRYFGNDALIAIIKAVTMSSLILGCMVYVYSNHQQLVPRSVIFNYWWLSLVMIGGLRLAMRQYFLGDWFAAAQHVPFAKSDNGLQKVAIYGAGAAGNQLVAALRMGRLMHPVAFIDDDESISNRVISGLQVYKPRNIQRMIDSTGAQEILLAIPSSSRGRRREILGFLEGFPLHVRSVPGFMDLAAGRVKVDDLQEVDIADLLGRDAVPARENLLEHCIKGKTVLVTGAGGSIGSELCRQILLLQPVQLLLLDHSEFNLYSILSELEQRSARESLSVKLLPILGSVRNHPKLLSIMKTWKVDTVYHAAAYKHVPMVEHNIAEGVINNVVGTLNTAQAALQAGVSNFVLISTDKAVRPTNVMGSTKRLAELILQALSRETAPVIFGDKANVYQVNKTRFTMVRFGNVLGSSGSVIPLFHKQIQSGGPLTVTHPKITRYFMTIPEAAQLVIQAGSMGHGGDVFVLDMGEPVKIVELAEKMIHLSGLAIRSEKNPHGDISIEFTGLRPGEKLYEELLIGDNVVATEHPMIMSASEDCLAWDVLKGRLVKLLDAVERDDYNSVRQLLRETVSGYTPEGEIVDWMYQERSGEP

SEQ ID NO: 69574 - protein, 335 aa, Pseudomonas syringae
MLALGKLLELTLAGREPAEKTQLTVEGVRMRWLAEGALEVRPPQARDNGTDLLLSAGIHGNETAPIELLDELIRSIARGDLKPRARILFLFGNPAAMRLGARYVEQDVNRLFNGRHEQSGGAEALRACELERLAASFFSLPDRYRLHYDLHTAIRGSKIEQFALYPWKEGRQHSRFELARLRAAGISAVLLQNKPSIVFSAYTYEQLGAEAFTLELGKARPFGQNRHVNLAPLRLRLEQIIEGSEPQPDERLEGLQLFSVAREVIKRSDAFTFNLADDVENFSELEKGYVLAEDVSDSRWVVKEEGARIIFPNPKVKNGLRAGIVIVPADADGLG

SEQ ID NO: 69575 - protein, 563 aa, Pseudomonas syringae
MSESFAELFEESLKTLNLQAGSIITAIIVDIDYQAGWVTVHAGLKSEGLIPLEQFHNDAGELTIKIGDEVHVALDAVEDGFGETKLSREKAKRAECWIVLEAAFAAEEVVKGVINGKVKGGFTVDVNGIRAFLPGSLVDVRPVRDTTHLEGKELEFKVIKLDQKRNNVVVSRRSVLEAENSAEREALLESLQEGQQVKGIVKNLTDYGAFVDLGGVDGLLHITDMAWKRIKHPSEIVNVGDEIDVKVLKYDRERNRVSLGLKQLGEDPWVAIKARYPESTRVTARVTNLTDYGCFAELEEGVEGLVHVSEMDWTNKNIHPSKVVQVGDEVEVMVLDIDEERRRISLGIKQCKSNPWEDFSGQFNKGDKISGTIKSITDFGIFIGLDGGIDGLVHLSDISWNEVGEEAVRRFKKGDELDTVILSVDPERERISLGIKQLESDPFSEYVTVNDKGAIVRGIVKEVDAKGAIITLADDIEATLKASEISRDRVEDARNVLKEGEEIEAKIISVDRKSRVISLSIKSKDVEDEKEAIQSLRSKPEVAESTGPTTIGDLLRAQMEKQN

SEQ ID NO: 69576 - protein, 928 aa, Pseudomonas syringae
MGELAKEILPVNIEDELKQSYLDYAMSVIVGRALPDARDGLKPVHRRVLFAMSELGNDWNKPYKKSARVVGDVIGKYHPHGDTAVYDTIVRMAQPFSLRYLLVDGQGNFGSVDGDNAAAMRYTEVRMTKLAHELLADLHKETVDWVPNYDGTEMIPAVMPTRIPNLLVNGSSGIAVGMATNIPPHNLGEVIDGCLALIDNPELTIDELMQYIPGPDFPTAAIINGRAGIIEAYRTGRGRIYMRARSIVEDIDKVGGRQQIVITELPYQLNKARLIEKIAELVKEKKLEGITELRDESDKDGMRVVIELRRGEVPEVVLNNLYAQTQLQSVFGINIVALIDGRPRILNLKDLLEAFVRHRREVVTRRTVFELRKARERGHILEGQAVALSNIDPVIALIKASPTPAEAKEALIKTPWESSAVVEMVERAGADSCRPENLDPQYGLREGKYFLSPEQAQAILELRLHRLTGLEHEKLLGEYQEILAQIGELIRILNSATRLMEVIREELELIRAEYGDARRTEILDARLDLTLGDLITEEERVVTISHGGYAKTQPLAVYQAQRRGGKGKSATGIKDEDYIAHLLVANSHTTLLMFSSKGKVYWLKTYEIPEASRAARGRPLVNLLPLSEGEYITTMLPVDLEAMRKRADEEGEALEGELDDAENSSETEEERKARIKAADKKKAPFIFMSTANGTVKKTPLVAFSRQRSVGLIALELDEGDILISAAITDGEQEIMLFSDGGKVTRFKESDVRAMGRTARGVRGMRLPEGQKLISMLIPEEGSQILTASERGFGKRTAISEFPEYKRGGQGVIAMVSNERNGRLVGAVQVLDGEEIMLISDQGTLVRTRVGEVSSLGRNTQGVTLIKLASDEKLVGLERVQEPSEVEGEELEGDEVVDGVIVDVDGADADEAGEDLQADAAPDDDEPQN

SEQ ID NO: 69577 - protein, 489 aa, Pseudomonas syringae
MMSTLYIAGAWQAGQGELFHSLNPVTLHVLWSGQGATAEQVDHAVQAARQAFPAWALLSLDQRIAVLDAFAVSLKAHADELANCIGEETGKPLWESATEVTSMVNKIAISVQSYRERTGEKSAPLGDATAVLRHKPHGVVAVFGPYNFPGHLPNGHIVPALLAGNTVLFKPSELTPKVAELTVKCWIEAGLPAGVLNLLQGGRETGIALAANPGIDGLFFTGSSRTGNALHQQFAGRPDKILALEMGGNNPLVVDQVQDIDAAVYTIIQSAFISAGQRCTCARRLLVPEGDWGDALLARLVAVSATLDVGAFDQQPAPFMGSVISLEAARALLDAQRHLLANGAVTLLEMRQPQPGAALLTPGIVDVSAVANRPDVELFGPLLQVVRYAGFDAAIAEANATQYGLAAGLLSDSEARYQQFWLQSRAGIVNWNKQLTGAASSAPFGGVGASGNHRASAYYAADYCAYPVASLETGSLTLPATLTPGVRLS

SEQ ID NO: 69578 - protein, 491 aa, Pseudomonas syringae
MTQRGSNAMTDQRPAGYSPRLHNDDLGPVPQKWTWYNILAFWMSDVHSVGGYVFAASLFALGLASWQVLIALLVGICIIQVIANLVAKPSQQAAVPYPVICRLAFGVFGANIPAIIRGLIAVAWYGIQTYLASSALVIVVLRFFPDLAAYQSVTFLGLSWLGWFGFLALWVVQAAVFWTGMESIRRFIDWAGPAVYAVMFALAGWIVWRAGWENISFTLAEKELSGWAAFGQVVMAIALVVSYFSGPTLNFGDFSRYCRSMADVRRGNFWGLPVNFLAFSLVTVVIVSGTLPIFGEMIHDPIATVARIDNTTAVLLGAFTFVTATVGINIVANFVSPAFDFANVAPSRISWRVGGMIAAVASIFITPWNLFNNPEVIHYTLDVLAACIGPLFGILLVDYYLIKKQQIDVDALFNDTPSGRYWYTNGINWIAVKALLLTALVGLCFTFIEWFKPIANFAWFTGCILGGALFYAMTRWSPVQSANMPTPVAQS

SEQ ID NO: 69579 - protein, 254 aa, Pseudomonas syringae
MLIGALALSVLAQPTFADEKPLKIGIEAAYPPFASKAPDGSIVGFDYDIGNALCEEMKAKCTWVEQEFDGLIPALKVRKIDAILSSMSITDDRKKSVDFTGKYYNSPARLVMKDGVTVSDSLAELKGKKIGVQRGSIHERFAREVLAPKGVEVTPYGSQNEIYLDIGAGRLDGTIADATLLQDGFLKTDSGKGFAFVGPAFTDPDYFGDGIGIAVRKGDKANLDRLNAAIAAIRANGKYKAIQDKYFDFDIYGK

SEQ ID NO: 69580 - protein, 625 aa, Pseudomonas syringae
MYQQSVVNPDGFWREQAQRLDWIKPFSVVKQTSFDDHRVDIKWFADGTLNVAYNCLDRHLAERGDTIAIIWEGDDPSEHREITYRELHEEVCKFANALRGQDVHRGDVVTIYMPMIPEAVVAMLACARIGAIHSVVFGGFSPEALAGRIIDCSSKVVITADEGLRGGKKTALKANVDRALTNPETSSVQKVIVCKRTGGEIEWNRHRDIWYHALLEVASSTCAPKEMGAEESLFILYTSGSTGKPKGVLHTTAGYLLYAALTHERVFDYKPGEIYWCTADVGWVTGHSYIVYGPLANGATTLLFEGVPNYPDITRVSKIIDKHKVNILYTAPTAIRAMMAEGTKSVEGADGSSLRLLGSVGEPINPEAWGWYYNTVGKQNCPIVDTWWQTETGGILISPLPGATALKPGSATRPFFGVIPALVDNLGNLIEGAAEGNLVILDSWPGQSRTLYGDHDRFVDTYFKTFRGMYFTGDGARRDEDGYYWITGRVDDVLNVSGHRMGTAEIESAMVAHPKVAEAAVVGVPHDLKGQGIYVYVTLNAGEEPSDALRTELRNWVRKEIGPIASPDFIQWAPGLPKTRSGKIMRRILRKIATAEYDALGDISTLADPGVVQHLIETHKSMSAA

SEQ ID NO: 69581 - protein, 574 aa, Pseudomonas syringae
  MISC_FEATURE (561)..(561): X=any amino acid
FAALELHPNIVAAVVATGYEEPSAIQQQSIPIILAGHDMIGQAQTGTGKTAAFALPILHRIDPTKREPQALILAPTRELALQVATAFETYAKQMPGVTVVAVYGGAPMGPQLKAIRNGAQIVVATPGRLCDHLRRDEKVLATVNHLVLDEADEMLKLGFMDDLEVIFKAMPETRQTVLFSATLPQSIRAIAERHLRDPKHVKIQTKTQTVTAIEQAHLLVHADQKTSAVLSLLEVEDFDALIMFVRTKQATLDLASALEAKGYKAAALNGDIAQNQRERVIESLKDGRLDIVVATDVAARGLDVPRITHVFNVDMPYDPESYVHRIGRTGRAGREGRALLLVTPRERRMLQVIERVTGQKVAEVRLPDAQAVLDARIKKLTNSLAPLVADAESTHGDLLDRLTADIGCSPRALAAALLRKATNGQALTLAAIERDRPLVPNNAPRGDRPERSGSSDRGDRGDRPERERRAPVPLAEGRARCRTALGARDGIAAKNLLGAILNEGGLAREAIGRIQVRDSFSLVELPEDGLERLLTKLKDTRVAGKQLKLRRIAKTDLPLSXSANKKSPTGSGIF

SEQ ID NO: 69582 - protein, 246 aa, Pseudomonas syringae
MFDYSAHPELLKGRVILVTGAARGIGAAAARAYAAHGASVVLLGRTEASLAEVSDQIKSAGQPQPLIIALNLENATAQQYRELAARVEHEFGRLDGLLHNASIIGPRTPLEQLPDEDFMQVMHVNVNATFMLTRALLPLLKRSEDASIAFTSSSVGRKGRANWGAYGVSKFATEGLMQTLADELEGVTAVRANSINPGATRTGMRAQAYPDENPLNNPAPEDIMPVYLYLMGPDSTGINGQALNAQ

SEQ ID NO: 69583 - protein, 558 aa, Pseudomonas syringae
MPIPLLLPLLVDEVLLGRGDAALNVMNHLLPDSLQKAVGYIGLMLLLTLVLRVGALVFNVLQARLFAGLAKDIVYRIRLRLIERLKRISLREYESLGSGTVTTHLVTDLDTLDKFVGETLSRLLVSTLTLAGTAGILMWMHWKLALLIMLFNPLVILLTVKLGKRVKHLKKLENDSTSRFTQALSETLDAIQEVRAGNRQGFFLGRLGAKAQEVRDYAINSQWKSDASGRASGLLFQFGIDIFRAAAMLTVLFSDLSIGQMLAVFSYLWFMMTPVEQLLNLQYAYYAAGGALTRINELLARADEPHYAGGADPFKGRETVSVEVRGLSFGYGEDLVLDQLNLSIAPGEKVAIVGASGGGKSTLVQLLLGLYTARTGVIRFGGVSQQDIGLDTVRENVAVVLQHPALFNDTVRANLTMGRDCSDEACWRALEVAQLESAIRDLPQGLGSVLGRSGVRLSGGQRQRLAIARMVLSDPKVVILDEATSALDAATEFNLHQALARFLRSRTTLIIAHRLSAVKQADRVLVFDGGRIVEDGDHQQLIADGGLYAKLYGHLQQI

SEQ ID NO: 69584 - protein, 317 aa, Pseudomonas syringae
MTQESINQPIVVAALYKFVTLSDYVAFREPLLQAMVDNGIKGTLLIADEGINGTVSGSREGIDGLMAWLKSDPRLIDIDHKESYCDEQPFYRTKVKLKKEIVTLGVEGVDPNKSVGTYVEPKDWNDLITDPEVLLIDTRNDYEVSIGTFEGAIDPKTTSFREFPEYIKAHFDPAVHKKVAMFCTGGIRCEKASSYMLGEGFEEVYHLKGGILKYLEEVPEQESQWRGECFVFDNRVTVRHDLTEGDYDQCHACRTPISAEDRASEHYAPGVSCPHCWDSLSEKTRRSAIDRQKQIELAKARNQPHPIGRNYRLPSEA

SEQ ID NO: 69585 - protein, 408 aa, Pseudomonas syringae
MSEKDKQDSQEIGPAGEKLQKVLARIGVGSRRDVEAWITQGRIKVNGKDATLGQRVDLHDAISVDGRVIKREEAAETVRRVIMYNKPDGEICTRDDPEGRPTVFDRLPRPKEGRWINIGRLDINTTGLLMFTTDGELANRLMHPSFEMDREYAVRVRGEVDDDMLLRLKNGVILEDGPARFTDIKQAPGGEGFNHWYHCVVMEGRNREVRRLWESQGLVVSRLKRVRYGPVFLNSDLPMGRWREMSQYEVDILSAEVGLQPVAQPQMNAKTKDKMERLQRQSSRPLGKGERVVRTLRPAAGAPATGDRTPRQPQITGSERDRPRGGDSTQRPVRKDSGKPGSRAPRPADNSRGTPVAERPSDMNKRPAKPGPKRVGIKLVNDDAPSGKRRGPPAGSGQRPGFGRRKPE

SEQ ID NO: 69586 - protein, 287 aa, Pseudomonas syringae
MNVDLHCHSTASDGALSPTALVARAHEYGVRVLSLTDHDTLEGLEEARTAAHSLGMQLVNGVELSCTWGGATIHVLGYGFDTQAPALTEAIARLHEGRWLRAEEISRKLAIKGMPGALEGARAIQQALGDSGNAPARPHFADFMVRAGFVKDRAEAFRKWLGAGKLGDVKQHWPTLEDTVATLRASGAWVSLAHPSHYDFTRSKRRKLVGDFVQAGGHAIEVVNGMQPADQVGTLAILAREFGLLVSAGSDFHGPGNWGEIGTYRPVPEDLPPLWCRFKHEQPTAAV

SEQ ID NO: 69587 - protein, 396 aa, Pseudomonas syringae
MLGLFGTAIGAGTLFLPINAGIGGFWPLLALALLAFPMTFYAHRGLTRFVLSGREGADITEVVEQHFGKSAGAMITLLYFFAIFPILLIYSVALTNTVGSFLEHQLHIAPPPRAVLAFLLIMGLLALVRCGERFIVKAMSVMVYPFIVALLFLAMFLIPHWTGGILSTATTLPEPSAFLSTLWLAIPVMVFSFNHAPIISAFAVDQKRQYGENAEVRSSQILARAHVLMVVMVLFFVFSCVLTLSPAELAEAKAQNISILSYLANHFNNPTIAFVAPLIAFVAISKSFLGHYIGASEGLKGLVLKSGRRPAPKVLDRMTAAFMLVVCWIVATLDPSILGMIENLGGPVISVLLFLMPMYAIYKVPSMRKYAGAWSNYFVIAAGLVAISALIFSLTR

SEQ ID NO: 69588 - protein, 204 aa, Pseudomonas syringae
MVDAKSGATPLEGNGKRILMVYGTPKAISFCHALGDAYAQTARGEGHVVRIIRLGELDFDPILHNGYDQTQTLEPDLLEAQRQIHWAEHLVFVYPVWWGGLPALLTGFFDRVLTPGFASKAHGRKQHANELLRGRTAELLVAMDTPPRYFRWIYGAPAHRQMVRTILSFCGIKTTRLTEFAPIHSATEQQRQEWIVQAQALGKR

SEQ ID NO: 69589 - protein, 182 aa, Pseudomonas syringae
MVTVLLSTRSSTWLWIKVYVPIFVEIDLSLQAFPFNLLHCTSHPGSDDRVWFTPRNCMKFRFLLWMLGRMMARASRDNPDFQQQLAGKNLTFQLQTIDGRIARHFVVQDQRIRTASGVVAEPAFAIAFRDAAFGFATLQAKNKQLAFMRGVQDKDIQIKGNPALVIWFQGLTKYLKPKKKAA

SEQ ID NO: 69590 - protein, 688 aa, Pseudomonas syringae
MLVHRIAWLMQVEQASPHSVLSVTFTNKAAAEMRHRIEQLMGISPAGMWVGTFHGLAHRLLRAHWQEAGLVQTFQILDSDDQQRLVKRVMRELGLDEQLWPARQAQWFINGQKDEGLRPKHIQASGDLFLTTMKSVYEAYEAACQRAGVIDFSELLLRALDLWRDNPGLLAHYQRRFRHVLVDEFQDTNAVQYAWLRLLAQGGDSLMVVGDDDQSIYGWRGAKIENIHQYSDDFPDTEVIRLEQNYRSTASILKAANGLIINNSGRLGKELWTDVGDGELINLYAAFNEHDEARYVVETIESALKTGISRNDIAILYRSNAQSRVLEEALLRERIPYRIYGGQRFFERAEIKNAMAYMRLLEGRGNDAALERVINVPARGIGEKTVEAIREHARHADVSMWEAMRLLVANKGLTGRAAGALGGFIELIENLSAKVMEMPLHLMTQTVIEQSGLITYHEQEKGEKGQARVENLEELVSAARAFENHESDEELTPLAAFLGHASLEAGDTQAQEHEDSIQLMTLHSAKGLEFPHVFLVGMEEGLFPHKMSLEEPGRLEEERRLAYVGITRAMKQLVMTYAETRRLYGSETYNKVSRFVREIPPALIQEVRLSNSVSRPFGGTPKFNSGSLFNGTGIPETEFAMGQRVQHAVFGEGVILNFEGAGAQARVQVNFAEGSKWLMMGYAKLVAL

SEQ ID NO: 69591 - protein, 446 aa, Pseudomonas syringae
MDPSPSFNLSSLFADFGMILFALFLVLLNGFFVAAEFAMVKLRSTKVEAIADKNGWRGHILRKVHGQLDAYLSACQLGITLASLGLGWVGEPAFAHLLEPLLAAMGVDTPELIKGVSFFTAFFIISYLHIVIGELAPKSWAIRKPELLSLWTAAPLYFFYWLMYPAIYLLNASANAILRIAGQGEPGPHHEHSYSRDELKLILHSSRGQDPSDQGMRVLASAVEMGELEVVDWANSREDMVSLDFNAPLKEILALFRRHKFSRYPLYDAERGEFVGLLHIKDLLLELAALDHIPESFNLAELTRPLERVSRHMPLSQLLEQFRKGGAHFAVVEEADGKIVGYLTMEDVLEVLVGDIQDEHRKVERGILAYQPGKLLVRGDTPLFKIERLLGIDLDHIEAETLAGLIYETLKRVPEEEEQMEVEGLRIIIKKMKGPKIVLAKVLKLD

SEQ ID NO: 69592 - protein, 133 aa, Pseudomonas syringae
MIELEQEDPTPQGDLALQITALPRETNGFGDIFGGWLVSQMDLAGTAMASKVAGGRVATVAIDRMAFLVPVAVGEQLSFYTRTLEVGRTSIKMMVEVWSDDPVTSEWRKVTEAAFVFVAIDSSGRTRSVPARR

SEQ ID NO: 69593 - protein, 585 aa, Pseudomonas syringae
MRDVNDQRFTTHDGVELFYRHWPVAHPTPGAPRQAVLLFHRGHEHSGRIAHLVDELDLPGFDFFAWDARGHGQSPGARGDSPSFATSVRDVQTFVDHLRVTFDIAEENMAVIAQSVGAVIAATWAHDYAPKIRALVLASPAFKVKLYVPFARTGLALLRRFKGNFFVNSYVKARFLSHDPQRIASYDSDPLITKAISVNVLLGLYEAADRVVADAQAIQIPTQLLISGSDFVVHRAPQERFFEQLGSLRKEKHILPGFFHDTLGERDRHLALSRARRFVLQSFETPMHRPSLLDADRLGATCAESEELAAPLPHNSLRDLYWRMTHASMRLGSKLSTGVKLGFDTGFDSGSTLDYVYRNRPAGKGALGRMIDKNYLQSIGWRGIRQRKLHAEELLRLAMAHLRNQGKPVRIVDIAAGHGRYILESLRGVEPLPESILLRDYSDINVRDGSLLIEQKDLEDIARFVKGDAFDRNDLATLDPKPTLAVVSGLYELFSSNQMVGDSLAGLAAAVEPGGYLVYTGQPWHPQLELIARALTSHREGQAWVMRRRSQSEMDQLVEAAGFRKITQRVDEWGIFTVSLAQRIQ

SEQ ID NO: 69594 - protein, 472 aa, Pseudomonas syringae
  MISC_FEATURE (361)..(361): X=any amino acid
VHIGVPLETQAGETRVAATPETIKKLISQGHRITVQRGAGIQASVPDSAFEAAGAVIGEASEAFAGELILKVVAPNDNELALINSGSVVIGMLNPFNNELIGKMADRGVTAFALEAAPRTSRAQSLDVLSSQANIAGYKAVLLAAHHYPRFMPMLMTAAGTVKAARVLILGAGVAGLQAIATAKRLGAVVEGSDVRPAVKEQIESLGAKFIDVPYETDEERECAEGVGGYARPMPASWMQRQAAAVHERARLADIIITTALIPGRKAPVLLSAETVAQMKPGSVVIDLAAAQGGNCPLTVADEVVVAHGVTLVGHTNLPALVAADASALYARNLLDFMKLLFDKDGTLSINLEDDIVPRAXCAATVKSYAKTAEDTPMDELISPGVYNLIIFVLAIYVGYHVVWNVTPALHTPLMAVTNAISAIVIVGAMLAAALTVTPLGKTMGTLAVALAAVNVFGGFLVTRRMLEMFRK

SEQ ID NO: 69595 - protein, 469 aa, Pseudomonas syringae
MTVGMSGFTRAGEAKAVPHALAERAKVTPLKISLMTGASLGNDLDKQLTESGVLSRRMPFQVDSTLRKAINNGTVMFIDQHLSDTVELLRNRQIKAVDLAVIECVAITEEGHLVLSTSVGNSASFAILAKQVIVEINLSQPLELEGLHDIYIPSYRPTRLPIPVLEADSRIGSHAVKIDPAKIVGIVISNQPDSPSTVTPPDADTQAIANHLVEFFKKEVREDRLTDKLMPLQAGIGNIANAVMHGLLESPFTDLTMYSEVLQDSTFDLFDAGKLTFASGSSMTLSAAKHAEVFADFNRYKSRLVLRPQEISNHPEVIRRLGIIGINTALEFDLYGNVNSTHICGTRMMNGIGGSGDFSRNAHLAIFVTKSIAKGGAISSVVPMVSHVDHTEHDVDILVTEQGLADLRGLAPRERARVIIDNCVHADYRDALNAYFDAACALGGHTPHILREALSWHINLEENGRMLPT

SEQ ID NO: 69596 - protein, 81 aa, Pseudomonas syringae
MGIIGTIFIGLIVGLLARFLKPGDDSMGWIMTIVLGIAGSLAATYGGQALGIYHAGEGAGFLGALVGAIILLVIYGMIKKK

SEQ ID NO: 69597 - protein, 290 aa, Pseudomonas syringae
MSKVRFLGKTIGYVGWSLFWLLIWDVIVTVDFMLFLDRKINLPSLPLTLLGSALVVLTSFRNSSAYNRWWEARTLWGAMVNSSRSFARQVLTLVEDDNGINPVKAILLRRHVAYVKCLSAHLKGVEPGDEIQMLIPREEFERRRDTNNFPNDLLNTSAALLAKEYQAGRLDSIRLARLESTMVDLSNCQGGMERIANTPLPYPYVAFPRLFITLFCLIVPIGLVETLGWFTPLASTVVGFMLLAIEKIGTDLQSPFRASEHVIQMNALCENIERNLDSMLRGAQEESKAS

SEQ ID NO: 69598 - protein, 602 aa, Pseudomonas syringae
MTKKIFVTDTILRDAHQSLLATRMRTEDMLPICDKLDKVGYWSLEMWGGATFDACVRFLKEDPWERLRQLRAALPNTRLQMLLRGQNLLGYRHYSDDVVKAFVAKAAVNGIDVFRIFDAMNDVRNLRVAIEAVKAAGKHAQGTIAYTTSPVHTIEAFVAQARQMEAMGCDSVAIKDMAGLLTPYATGELVRALKAEQSLPVFIHSHDTAGLAAMCQLKAIESGADHIDTAISSFAWGTSHPGTESMVAALKGSEFDTGLDLELLQEIGLYFYAVRKKYHQFESEFTAVDTRVQVNQVPGGMISNLANQLKEQGALNRMSEVLAEIPRVRKDLGYPPLVTPTSQIVGTQAFFNVLAGERYKTITNEVKLYLQGGYGKAPGQVDEKLRRQAIGSEDLIDVRPADLLKPEMTKLRADIGALAKSEEDVLTFAMFPDIGRKFLEERAAGTLTPEVLLPIPEAGSVAKAGGEGVPTEFVIDVHGETYRVDITGVGVKAEGKRHFYLTIDGMPEEVVFEPLNEFVGGGASKRQQASAPGHVSTTMPGNIVDVLVKEGDVVKAGQAVLITEAMKMETEVQASIAGKVVAIHVAKGDRVNPGEILVEIEG

SEQ ID NO: 69599 - protein, 360 aa, Pseudomonas syringae
MGDKTEARRSMIKAGVPVTPGTEGNVADIEEALVEGERIGYPVMLKATSGGGGRGIRRCNSRQELEQAFPRVISEATKAFGSAEVFLEKCIVNPKHIEAQILGDSFGNVVHLFERDCSIQRRNQKLIEIAPSPQLTPEQRAYIGDLSVRAAKAVGYENAGTVEFLLAEGEVYFMEMNTRVQVEHTITEEITGIDIVREQISIASGLPLSVKQEDIIHRGFALQFRINAEDPKNNFLPSFGKITRYYAPGGPGVRTDTAIYTGYTIPPYYDSMCLKLIVWALSWEEAMDRGLRALDDMRLQGVKTTAAYYQEILRNPEFRSGEFNTSFVESHPELTNYSIKRKPEELALAIAAAIAAHAGL

SEQ ID NO: 69600 - protein, 316 aa, Pseudomonas syringae
MNALLTRLALVMLLCSPMAHAAYPVTVQSCDRSVTFTAAPQRAVSNDVNLTKMMVALGLQSHMVGYSGITGWNKPDQALLHDLGNLPELASKYPSLETLLNANADFYFAGWNYGMRVGGDVTPQSLAPLGIQAYELTESCAQIMPRAEATLADVYNDLLNLGRIFDVQTRAETLVAQMRRSVSDVQANVAGKTSPRVFLYDSGEDRPMTAGRLAIPQALISAAGGHNIMADVAASWTHVNWESVVQGNPEVIVIVDYGEVSAAQKQHFLESNPALQSVDAIRNRRYVVLPYVAVTPGLDNVSAIETLAAAFHDLKQ

SEQ ID NO: 69601 - protein, 352 aa, Pseudomonas syringae
MSASTTATLRHDWTLAEVRALFVQPFNDLLFQAQTLHRAHFDANRVQVSTLLSIKTGACPEDCKYCPQSGHYNTGLEKEKLLEVQKVLEEAARAKSIGSTRFCMGAAWKHPSAKDMPYVLEMVKGVKAMGLETCMTLGRLDQEQTEALATAGLDYYNHNLDTSPEFYGSIITTRTYGERLQTLAYVRDAGMKICSGGILGMGESLDDRAGLLIQLANLPEHPESVPINMLVKVAGTPLENAEDVDPFDFIRMLAVARILMPQSHVRLSAGREAMNEQMQALAFFAGANSIFYGDKLLTTANPQADKDMLLFSRLGIKPEAGEGHADEVHQAAIEQALVEQQSSAMFYDAASA

SEQ ID NO: 69602 - protein, 349 aa, Pseudomonas syringae
MGLANHPEVIAAWQAGAERWGVGGGASHLVIGHSTPHHELEEALAELTGRPRALLFSNGYMANLGAVTALVGQGDTVLEDRLNHASLLDAGLLSGARFSRYLHNDAGSLNARLEKAVGDTLVVTDGVFSMDGDIADLPALAQAAKAKGAWLMVDDAHGFGPLGANGAGIVEHFGLSMEDVPVLVGTLGKSFGTSGAFVAGSEELIETLIQFARPYIYTTSQPPALACATLKSLQLLRSEHWRREHLASLIGQFRRGAEQLGLQLMDSFTPIQPIMIGDAGRALRLSQLLRERGLLVTAIRPPTVPAGSARLRVTLSAAHSEADVQLLLEALEQCYPLLDASESTEPVHA

SEQ ID NO: 69603 - protein, 601 aa, Pseudomonas syringae
MPDYKAPLRDIRFVRDELLGYEAHYQSLPACHDATPDMVDAILEEGAKFCEQVLAPLNRVGDTEGCTWSESGVKTPSGFKQAYKQFVEGGWPSLAHDVAHGGQGLPESLGLAVSEMVGEANWSWGMYPGLSHGAMNTISEHGTPEQQDAYLTKLVSGEWTGTMCLTESHCGTDLGMLRTKAEPQADGTYKVTGTKIFISAGEHDMADNIVHIVLARLPDAPAGTKGISLFIVPKFLSAADGGVGERNAVNCGSIEHKMGIHGNATCVMNFDGATGYLIGPPNKGLNCMFTFMNTARLGTALQGLAHAEVAFQGGLKYARDRLQMRSLTGPKAPEKAADPIIVHPDVRRMLLTMKAFAEGTRAMVYFTAKQVDIVKYSEDPEQKKSADALLAFMTPIAKAFMTEVGFEAANHGVQIYGGHGFIAEWGMEQNVRDSRISMLYEGTTGIQALDLLGRKVLMTQGEALKGFTKIVHKFCQSNEGNEGVQEFVTPLAALNKEWGELTLKVGMAAIKDREEVGAASVDYIMYSGYACLAYFWADMARLAAEKLAAGTADEAFYRAKIQTARFYFQRILPRTRTHVAAILSGAGNLMDMKEEDFGLAY

SEQ ID NO: 69604 - protein, 554 aa, Pseudomonas syringae
MQTPAGLRLWLFSDPYLRVSQLLIGERDGSTAVDLEKLDSLSRVAVRMPSATADYLRSNFPHLNLQGVPLERQALQLLLSQQARYAVVDEAQLSRLLREPEFAGLAVVGDTGLPQLLRVASRRDAPELAAIVSEALRAVPAKELEQLHARWMPLTPSHFSESTKLWKNLCILLLVMLLACFAIVIWQRRQQQALEQELLAGREHLARRVASEEALRLAQFSIDQSTVGILWVNWDSRVRYANRAVESMLGYAPGQVVERPLIDFEPDLHMDRWLNLWKNARSSEDSAQVFETHCLRADGSLLPADVSLSFLRFRDAEYLVVFLSDVSERRRAHDQLRELSAHLESVREEEKARIAREVHDELGQMLTVLKLETSMCELAYADLDPGLSERLDSMKRLISQLFQLVRDVATALRPPILDAGIASAIEWQARRFEARTQIPCLVQVPDNLPALSDARATGMFRILQEALTNVMRHAQAHTVEISLTLQDGMMCMTVADDGQGFVVESGRAVSFGLVGMRERVLMLGGRLELDSEAGEGTTLRAYIPLDPTAQERSQ

SEQ ID NO: 69605 - protein, 403 aa, Pseudomonas syringae
MKSVEEQLALIKRGADELLVEAELVEKLKRGQPLRIKAGFDPTAPDLHLGHTVLINKLRQFQDLGHQVIFLIGDFTGMIGDPSGKSATRPPLTREQVLDYAETYKSQVFKILDPAKTEVAFNSTWMDKLSPADFIRLSSQYTVARMLERDDFDKRYKSNQSIAIHEFLYPLVQGYDSVALKADVELGGTDQKFNLLMGRELQRAYGQEPQCILTMPLLEGLDGVKKMSKSLGNYVGIQEAPGIMYSKLVSIPDSLMWRYFELLSFRSMEEINGLRADCEAGANPRDIKIKLAEELVARFHGEEAAATAHRSAGNRMKEGELPDDLPEISVAAIEDMPISAVLNKAGLVKNAAVARDLLASGGVRIDGEVVDRSFIVKLGATHVCQAGKKAFGRITLVSDESSK

SEQ ID NO: 69606 - protein, 177 aa, Pseudomonas syringae
MAKRWYVVHAYSGYEKHVMRSLVERVKLAGMEDGFGEILVPTEEVVEMRNGQKRKSERKFFPGYVLVQMDMNEGTWHLVKDTPRVMGFIGGTADKPAPITDKEAEAILRRVADGSDKPKPKTLFEPGEVVRVTDGPFADFNGTVEEVNYEKSRIQVAVLIFGRSTPVELEFSQVEKA

SEQ ID NO: 69607 - protein, 166 aa, Pseudomonas syringae
MAIKLEDKKAIVAEVNEAAKAGLSAVVADARGVTVGAMTGLRKEAREAGVYVRVVRNTLLKRAVADTEFSVLNDVFTGPTLIAFSNEHPGAAARLFKEFAKGQDKFEIKAAAFEGKFLAANQIDVLATLPTRNEAISQLMSVIQGATSKLARTLAAVRDQKEAAAA

SEQ ID NO: 69608 - protein, 1357 aa, Pseudomonas syringae
MAYSYTEKKRIRKDFSKLPDVMDVPYLLAIQLDSYREFLQAGATKDQFRDVGLHAAFKSVFPIISYSGNAALEYVGYRLGEPAFDVKECVLRGVTYAVPLRVKVRLIIFDKESSNKAIKDIKEQEVYMGEIPLMTENGTFVINGTERVIVSQLHRSPGVFFDHDRGKTHSSGKLLYSARIIPYRGSWLDFEFDPKDCVFVRIDRRRKLPASVLLRALGYTTEQVLDAFYTTNVFHVRGENLNLELVPQRLRGEIAVLDILDDKGKVIVEQGRRITARHINQLEKAGIKELEVPLDYVLGRTTAKVIVHPATGEIIAECNTELNTEILGKIAKAQVVRIETLYTNDIDCGPFVSDTLKIDSTSNQLEALVEIYRMMRPGEPPTKDAAETLFNNLFFSPERYDLSAVGRMKFNRRIGRTEIEGSGVLCKEDIVAVLKTLVDIRNGKGIVDDIDHLGNRRVRCVGEMAENQFRVGLVRVERAVKERLSMAESEGLMPQDLINAKPVAAAVKEFFGSSQLSQFMDQNNPLSEITCKRRVSALGPGGLTRERAGFEVRDVHPTHYGRVCPIETPEGPNIGLINSLAAYARTNQYGFLESPYRVVKEGLVTDEIVFLSAIEEADHVIAQASAAMNDKQELIDELVAVRHLNEFTVKAPADVTLMDVSPKQVVSVAASLIPFLEHDDANRALMGSNMQRQAVPTLRADKPLVGTGMERNVARDSGVCVVARRGGVIDSVDASRIVVRVADDEVETGEAGVDIYNLTKYTRSNQNTCINQRPLVSKGDRVQRSDIMADGPSTDMGELALGQNMRIAFMAWNGFNFEDSICLSERVVQEDRFTTIHIQELTCVARDTKLGPEEITADIPNVGEAALNKLDEAGIVYVGAEVGAGDILVGKVTPKGETQLTPEEKLLRAIFGEKASDVKDTSLRVPTGTKGTVIDVQVFTRDGVERDARALSIEKSQLDEIRKDLNEEFRIVEGATFERLRSALVGRVAEGGAGLKKGQEITNEVLDGLEHGQWFKLRMAEDALNEQLEKAQAYIVDRRRLLDDKFEDKKRKLQQGDDLAPGVLKIVKVYLAIRRRIQPGDKMAGRHGNKGVVSVIMPVEDMPHDANGTPVDIVLNPLGVPSRMNVGQILETHLGLAAKGLGEKINRMLEEQRKVIELRKFLNEIYNEIGGRQEALEDLTDNEILDLAKNLRNGVPMATPVFDGAKESEIKAMLKLADMPESGQMQLFDGRTGNKFERPVTVGYMYMLKLNHLVDDKMHARSTGSYSLVTQQPLGGKAQFGGQRFGEMEVWALEAYGAAYTLQEMLTVKSDDVNGRTKMYKNIVDGDHRMEPGMPESFNVLIKEIRSLGIDIDLETE

SEQ ID NO: 69609 - protein, 1399 aa, Pseudomonas syringae
MKDLLNLLKNQGQVEEFDAIRIGLASPEMIRSWSFGEVKKPETINYRTFKPERDGLFCAKIFGPVKDYECLCGKYKRLKHRGVICEKCGVEVALAKVRRERMAHIELASPVAHIWFLKSLPSRIGLLMDMTLRDIERVLYFESYVVIDPGMTTLEKGQLLNDEQYFEALEEFGDDFDARMGAEAVRELLHAIDLEHEIGRLREEIPQTNSETKIKKLSKRLKLMEAFQGSGNLPEWMVLTVLPVLPPDLRPLVPLDGGRFATSDLNDLYRRVINRNNRLKRLLDLSAPDIIVRNEKRMLQEAVDALLDNGRRGRAITGSNKRPLKSLADMIKGKQGRFRQNLLGKRVDYSGRSVITVGPTLRLHQCGLPKKMALELFKPFIFGKLEMRGLATTIKAAKKMVERELPEVWDVLAEVIREHPVLLNRAPTLHRLGIQAFEPVLIEGKAIQLHPLVCAAYNADFDGDQMAVHVPLTLEAQLEARALMMSTNNILSPANGEPIIVPSQDVVLGLYYMTREAINAKGEGRVFADLQEVDRVFRAGEAALHAKVKVRIHETVNDRDGGSVKNTRIVDTTVGRALLFQVVPAGLSYDVVNQPMKKKAISKLINQCYRVVGLKETVIFADQLMYTGFAYSTISGVSIGVNDFVIPDEKARIIDAATEEVKEIESQYASGLVTQGEKYNKVIDLWSKANDEVSKAMMSNLSKERVIDRHGVEVDQESFNSMYMMADSGARGSAAQIRQLAGMRGLMAKPDGSIIETPITANFREGLSVLQYFISTHGARKGLADTALKTANSGYLTRRLVDVAQDLVVTEVDCGTEHGLLMTPHIEGGDVVEPLGERVLGRVIARDVFKPGTEEIIVPAGTLVDEKWVEFIELNSIDEVIVRSPISCETRYGICAKCYGRDLARGHQVNIGEAVGVIAAQSIGEPGTQLTMRTFHIGGAASRTSAADSVQVKNGGTVRLHNLKHVERVDGHLVAVSRSGELAIADDFGRERERYKLPYGAVISVKEGDKVDAGSIVAKWDPHTHPIVTEMKGTVTYVGMEEGITIKRQTDELTGMTNIEVLDAKDRPAAGKDIRPAVKMVGLDGKDLLLPGTDVPAQYFLPANALVGVADGAQIAIGDVIARIPQETSKTRDITGGLPRVADLFEARRPKEASILAEVSGTIAFGKETKGKRRLVITPNDGSDPYEELIPKWRHLNVFEGEQVNRGEVISDGPSDPHDILRLLGVSALAKYIVNEIQDVYRLQGVKINDKHIETILRQMLRKVEIAESGDSSFIKGDQMELTHVLVENERLGADDKFVSKFTRVLLGITKASLSTESFISAASFQETTRVLTEAAVTGKRDYLRGLKENVVVGRLIPAGTGLAYHSERKRRREMDKPTRVSASEVEAALTEALNSSGN

SEQ ID NO: 69610 - protein, 303 aa, Pseudomonas syringae
MYIQILGSAAGGGFPQWNCNCVNCAGFRDGSLRAQARTQSSIALSDDGVNWVLCNASPDIRAQLQGFAPMQPGRALRDTGISAIVLMDSQIDHTTGLLSLREGCPHQVWCTDMVHEDLSTGFPLFEMLKHWNGGLNWNRIELQGSFVIPACPNLRFTPFPLRSAAPPYSPHRFDPHPGDNIGLLVEDTRTGGKLFYAPGLGKVDEALAEKMRDADCLLVDGTMWDDDEMQRRGVGTRTGREMGHLAQNGPGGMLDVLEGFPEQRKVLIHINNTNPILDEDSPERAELVRRNVEVAFDGMSIEL

SEQ ID NO: 69611 - protein, 324 aa, Pseudomonas syringae
MAHPFATLTPDLVLDAVESIGFLSDARILALNSYENRVYQVGIEDGQPLIAKFYRPQRWTNEAILEEHSFTFELVDVEVPVVAPMVHNGETLFEHAGFRFTLFPRRGGRAPEPGNLDQLYRLGQLLGRIHAVGSTKPFAHREALGVKNFGNDSVNYLLENNCIPRSLLPAYESVARDLLKRVEDVYAATPHTNIRMHGDCHPGNMMCRDEMFHIVDLDDCRLGPAVQDIWMMLAGDRQERLGQLSELMDGYNEFHDFDSRELALIEPLRALRLMHYSAWLARRWDDPAFPHSFPWFGTERYWGDHILALREQMAALNEEPLKLF

SEQ ID NO: 69612 - protein, 652 aa, Pseudomonas syringae
MAGLIPQSFIDDLLNRTDIVDVVSSRVQLKKAGKNYSACCPFHKEKTPSFSVSPDKQFYYCFGCGAGGNALGFIMDHDNLDFPQAVEDLAKAAGMEVPREQGVKGQKPRQPTDSPLYPLLNAASEFYRQALKSHPSRKAAVDYLKGRGLSGEIARDFGLGFAPPGWDNLYKHLSSDSLQQKVMIDAGLLIENAETGKRYDRFRDRVMFPIRDSRGRIIAFGGRVLGDDKPKYLNSPETPVFHKGQELYGLFEARKFNRNLDEIIVVEGYMDVIALAQQGLRNAVATLGTATSEEHLKRLFRVVPNVLFCFDGDQAGRNAAWRALEAALPNLQDGRRARFLFLPEGEDPDTLVRSEGTDAFKARINQHAQPLADYFFEQLTKESDPRSLEGKAHMATLAAPLIDKVPGANLRILMRQRLSEITGLTGEAVSQLVQSAPADAPPSYDPYVDYDAMPDFADYQPQGGYEAQQEWTPKKAGGPNQKKWDNNKSWGKKGKRQEFEPRTPRVPTAVEPPMQAALRTLLHHPELAEKVENASHFAAEDQSNAQLLVALIEARQKNPSLRSLQLIARWHGTEQGRLLRALAEKEWLIETDNLEQQFFDTITSLSARQRERSLDHLISKARQTELSAEEKIQLRELLNRNVPAQNPTSTGA

SEQ ID NO: 69613 - protein, 341 aa, Pseudomonas syringae
MLVLGLETSCDETGVALYDSERGLLADALFSQIDLHRAYGGVVPELASRDHVKRMLPLIRQTLAEADCVATDIDAIAYTAGPGLVGALLVGASCAQALAFAWDIPALGVHHMEGHLLAPMLEENPPQFPFVALLVSGGHTQLVRVDGIGQYELLGETLDDAAGEAFDKTAKMMGMQYPGGPEISKAALQGVPGRFVFPRPMTDRPGLAFSFSGLKTSALNTWQQCQSAGDDSEQTRCDIALAFQQAVVETLTIKCKRALKQTGLKSLVIAGGVSANKALRVSLESMLGELRGHVYYARPEFCTDNGAMIAFAGCQRLQAGQKEDLSISVQARWPMEQLSGL

SEQ ID NO: 69614 - protein, 189 aa, Pseudomonas syringae
MFWLLATFAYLLGSLSFAILLSRLSGSPDPRASGSGNAGATNMLRLAGKKLAVLTLLGDLCKGLIPVVLAGAWGLDPSQQGWIGVCAVLGHLFPLYFRFRGGKGVATAAGVLLGLYPPAAALAIAAWLLTLYLTRTSSLAALIATPLTLPLLAWQEPHALLPMSVLTLLIVWRHRGNLRDLLAGRERHF

SEQ ID NO: 69615 - protein, 353 aa, Pseudomonas syringae
MSTPMNIKSALNRVVNQLDLSTDEMRDVMREIMTGQCTEAQIGAFLMGMRMKSETIDEIVGAVSVMRELADKVELKTLDGVVDIVGTGGDGANIFNVSTASAFVISAAGCTVAKHGNRAVSGKSGSADLLEAAGVYLNLTPVQVARCIDSVGIGFMFAQSHHSAMKHTAGPRRELGLRTLFNMLGPLTNPAGVRHQVVGVFNQALCRPLAEVLLRLGSKHVLVVHSQDGLDEFSLAAPTFVAELKNGEVTEYWVQPEDLGIKSQSLYGLAVESPAQSLELIRDALGRRKTEIGQKAAEMIVLNAGAALYAADHATSLKEGVALAHDALHTGLAREKLDELGAFTAVFKQENEA

SEQ ID NO: 69616 - protein, 123 aa, Pseudomonas syringae
MATINQLVRQPRKRIVEKSDVPALQNCPQRRGVCTRVYTTTPKKPNSALRKVCRVRLTNGFEVSSYIGGEGHNLQEHSVVLIRGGRVKDLPGVRYHTVRGSLDTSGVKGRNQGRSKYGTKKPK

SEQ ID NO: 69617 - protein, 662 aa, Pseudomonas syringae
MGEVHDGAATTDWMVQEQERGITITSAAITAFWQGSEKQHKDQYRFNVIDTPGHVDFTIEVERSLRVLDGAVVVFCGTSGVEPQSETVWRQANKYGVPRIVYVNKMDRAGANFLRVIAQIKQRLGHTPVPIQLAIGAEDNFQGQIDLMAMEAVYWNDSDKGMVPVRKPIPAELQELADEWRGNMVEAAAEASEELMNKYLEGEELTNEEIKAALRQRTIAGEIVLAVCGSSFKNKGVPLVLDAVIDYLPAPIDIPAIKGSDPDNEEILMERHADDSEPFSALAFKIATDPFVGTLTFVRVYSGVLASGDGVINSVKGKKERVGRMVQMHANAREEIKEVRAGDIAALIGMKDVTTGETLCNADKPIILVRMDFPEPVISVAVEPKTKDDQEKMGIALGKLAQEDPSFRVKTDEETGQTIISGMGELHLDILVDRMRREFNVEANIGKPQVSYRERITKNCEIEGKFVRQSGGRGQFGHCWIRFAPADEGQEGLQFVNEVVGGVVPKEYIPAIQKGIEEQMKNGVVAGYPLIGLKATVFDGSYHDVDSNEMAFKVAASMATKQLAQKGGGELLEPIMAVEVVTPEDYMGDVMGDLNRRRGMILGMEDTVSGKVIRAEVPLGEMFGYATDVRSMSQGRASYSMEFKKYNTAPSHIVETVTKKQG

SEQ ID NO: 69618 - protein, 188 aa, Pseudomonas syringae
MARPLDDAISTAFSTWHDALQRTPFVDEDGGDLEVINVCAFVMLGVGYSRLQHFLQDLGGFLTAESQQVERFAHLLPADLVGDQAGFLGGDSSARQLSGYFHRSLPLNAWLSCLPRAHDMCGYRQTRLVYGRPCLRSQELGHVDDRYALQWSNRPFVAESSNDATRFSPVCDHSFPPPLRSSSVGEDQ

SEQ ID NO: 69619 - protein, 228 aa, Pseudomonas syringae
MGQKVHPIGIRLGIVKEHTSVWYADGRTYADYLFADLKVREYLQDKLKSASVSRIDIHRPAQTARITIHTARPGIVIGKKGEDVEKLRQDLTKQMGVPVHINIEEIRKPELDGMLVAQSVAQQLERRVMFRRAMKRAVQNAMRIGAKGIKIQVSGRLGGAEIARTEWYREGRVPLHTLRADIDYANYEAHTTYGVIGVKVWIFKGEVIGGRQEELKPQAPAPRKKAAK

SEQ ID NO: 69620 - protein, 137 aa, Pseudomonas syringae
MLQPKRTKFRKQMTGHNRGLALRGSKVSFGEFALKSVARGRLTARQIESARRALTRHVKRGGKIWIRVFPDKPVTKKPLEVRMGKGKGNVEYWVAQIQPGKVLYEIEGVTEELAREAFALAAAKLPLATSFVKRTVM

SEQ ID NO: 69621 - protein, 64 aa, Pseudomonas syringae; identical to SEQ ID NO: 68063

SEQ ID NO: 69622 - protein, 409 aa, Pseudomonas syringae
MQIYKVGGAVRDRLLGQPVTDIDWVVVGASTEDMLVKGYRPVGTDFPVFLHPLTNEEYALARTERKSGVGYGGFVFHASPDVTLEQDLIRRDLTINAMAEDKDGNLTDPYNGQQDLEARVLRHVSPAFAEDPLRVLRVARFAARYAGHGFTVAPETLELMRQLSESGELKALTAERSWKEISRALMEDQPQVFIQVLHDCGALSELMPEVEALFGVPQPAAHHPEIDTGVHVLSVLEQSAIHKHPLTVRWACLLHDLGKGLTPESEWPRHIAHEHTGLRLIKAVNERFRVPRDCQELALLVGQYHTHGHRALELKPSTLLELLHSFDVYRRPQRFEEFIAACEMDARGRHGFEQRSYPQADYLRGAAHAARTVSVQPLLEKGLKGKELGDALKNERLKALKTYKAGHVA

SEQ ID NO: 69623 - protein, 520 aa, Pseudomonas syringae
MTAREQKRQPLSTGSEWTFELIRAYDREIGRIAERYALDTYPNQIEVITAEQMMDAYASVGMPLGYHHWSYGKHFLSTEKSYSRGQMGLAYEIVINSDPCIAYLMEENTICMQALVVAHACYGHNSFFKGNYLFRTWTDASSIIDYLVFAKQYIMQCEERHGIDAVEDLLDSCHALMNYGVDRYKRPYPISAEEERRRQKDREEHLQRQINDLWRTIPKNADKSSKEDNARFPAEPQENILYFIEKHAPLLEPWQREVVRIVRKIAQYFYPQRQTQVMNEGWATFWHYTLMNDLYDEGLVTDGFMMEFLQSHTSVIYQPGFDSPYYSGINPYTLGFAMYQDIRRMCEHPTDEDRQWFPEIAGTDWLTAIKFAMSSFKDESFILQYLSPKVIRDLKLFSIMDDDQKEDLLVPAIHDENGYRTIREILAAQYNLGNREPNVQIYSIDRRGDRSLTLRHQQHNRKPLGDSTDEVLKHLHRLWGFDIHLETLQGDQLIKTHHVPPKGEHADGEYPRLDMAVVHL

SEQ ID NO: 69624 - protein, 423 aa, Pseudomonas syringae
MSYVIDRRLNGKNKSTVNRQRFLRRYRDHIKKAVEEAVSRRSITDMEHGEQISIPGRDIDEPVLHHGRGGKQTVVHPGNKEFTTGEHIARPQGGAGGKGPGKAGNSGEGMDEFSFQITQEEFLEFMFEDLELPNLVKRNLTGTDTFKTVRAGISNEGNPSRINIIRTLRSAHARRIALSGSSRAKLREATSELERIKREEPDNFGDIQALEVEIDRLKARIRRVPYLDTFDLKYNLLVKQPNPSSKAVMFCLMDVSGSMTQATKDIAKRFFILLYLFLKRNYDKIDVVFIRHHTSAREVDEEEFFYSRETGGTIVSSALKLMQEIMAARYPSSDWNIYAAQASDGDNWNDDSPICREILTKQIMPFVQYYTYVEITPREHQALWYEYERIGDDFADTFAQQQLVSAGDIYPVFRELFQRRLVS

SEQ ID NO: 69625 - protein, 268 aa, Pseudomonas syringae
MTEQFQHRARKRFGQNFLHDAGVIDKILRAIRAKPEDRLLEIGPGQGALTEGLLNSGAQLDVVELDKDLIPILNSQFASQPNFNLHQGDALKFDFNTLGAEPRSLRVVGNLPYNISTPLIFHLLQNASLIRDMHFMLQKEVVERMAAGPGGGDWGRLSIMVQYHCRVEHLFNVGPGAFNPPPKVDSAIVRLVPYETLPHPAKDHRVLERVVREAFNQRRKTLRNTLKLLLSSDEITASGVDGSLRPEQLDLAAFVRLADTLSEKVLTE

SEQ ID NO: 69626 - protein, 217 aa, Pseudomonas syringae
MPMATERQYSPIDRLLLQADSAMRTLLPSSAHSRRPSPAIVQPDHKMSDVDTRHVAGLMRINHTGEVCAQALYQGQALTAKLPKVRKAMEHAAEEEIDHLVWCEQRIHQLGSHTSVLNPLFYGLSFGIGAVAGVISDRVSLGFVAATEDQVCKHLGEHLEQLPIEDGKSRAILEQMLSDEEHHAESALEAGGFRFPAPVKFGMGVLAKVMTKSTYRI

SEQ ID NO: 69627 - protein, 658 aa, Pseudomonas syringae
MNYVGGPLLVLAGAGSGKTSVITRKIAHLIQNCGIRAQYIVAMTFTNKAAREMKERVGTLLKGGEGRGLTVSTFHNLGLNIIRKEHTRLGYKPGFSIFDETDVKALMTDIMQKEYSGDDGVDAIKNMIGSWKNDLILPAEALENARNPKEQTAAIVYTHYQRTLKAYNAVDFDDLILVPVKLFQEHPDVLEKWQNKVRYLLVDEYQDTNASQYLLVKLLIGTRNQFTVVGDDDQSIYAWRGARPENLMLLKDDYPSLKVVMLEQNYRSTSRILRCANVLISNNPHAFEKQLWSEMGHGDEIRVIRCRNEDAEAERVAMEILTLHLRTDRPYSDFAILYRGNYQAKLIELKLQHHQVPYRLSGGNSFFGRQEVKDLMAYFRLLVNPDDDNAFLRVINVPRREIGSTTLEKLGNYATERKVSMYAATEEIGLGEHLDSRYTDRLQRFKRWMDGVRQQCAQNDPIAALRSMVMDIDYENWLRQNSSSEKAADYRMSNVWFLIEALKNTLEKDEEGGMTIEEAIGKLVLRDMLERQQEEEDGAEGVQMMTLHASKGLEFPYVFIMGMEEEILPHRSSIEADTIEEERRLAYVGITRARQTLAFTFAAKRKQYGEIIDCAPSRFLDELPPDDLAWEGNDDTPTEVKAVRGNTALADIRAMLKR

SEQ ID NO: 69628 - protein, 470 aa, Pseudomonas syringae
MGRFAIRHLSWSRTMNVPRETIAAIATAQGRGGVGIVRVSGPLAGKTAQAITGRMPKPRFAHYGPFADESGQVLDEGIALYFPGPNSFTGEDVLELQGHGGPIVLDMLLQRCLQLGSRLARPGEFSERAFLNDKLDLAQAEAIADLIEASSAQAARNALRSLQGVFSQRVDNLTEKLISLRIYVEAAIDFPEEEIDFLADGHVLGMLDDVRAELSTVLREAGQGALLRDGMTVVIAGRPNAGKSSLLNALAGREAAIVTEIAGTTRDVLREHIHIDGMPLHVVDTAGLRDTQDQVEMIGVQRALKAIGEADRILLVVDATAPEAADPFALWPEFLEQRPDPAKVTLIRNKADLSGDSIALQTSADGHVTISLSARSGGEGLELLREHLKACMGYEQTSESSFSARRRHLEALRHASDSLEHGRAQLTLAGAGELLAEDLRQAQQALGEITGAFSSDDLLGRIFSSFCIGK

SEQ ID NO: 69629 - protein, 367 aa, Pseudomonas syringae
MYSGVIEGIGPRYCPSIEDKIHRFADKESHQVFIEPEGLTTHELYPNGISTSLPFDVQLQIVRSIRGMENAHIVRPGYAIEYDYFDPRDLKYSLETKVIGGLFFAGQINGTTGYEEAGAQGLLAGTNAALRAQGRDSWCPRRDEAYIGVLVDDLITLGTQEPYRMFTSRAEYRLILREDNADLRLTEKGRELGLVDDARWAAFCTKRESIELEEQRLKSTWVRPGTQQGDAISAHFGTPLTHEYNLLNLLTRPEIDYNSLIALTGQGCADPLVAEQVEIKTKYAGYIDRQQEEIARLRASEDTRLPEDIDYTGISGLSKEIQSKLGITRPETLGQASRIPGVTPAAISLLMIHLKKRGAGRQLEQSA

SEQ ID NO: 69630 - protein, 230 aa, Pseudomonas syringae
MLLIDLDPQGNATMGSGVDKHTLENSVYDLLIGECDLGEAMQFSEHGGYQLLPANRDLTAGEVVLLEMQMKESRLRNALAPIRENYDYILIDCPPSLSMLTLNALVAADGVIIPMQCEYFALEGLSDLVDNIKRIGELLNPQLKIEGLLRTMYDPRLSLINDVSAQLQEHFGEQLYDTVIPRNIRLAEAPSFGMPVLAYDKSSRGALAYLALASELVRRQRRGAKSAQPT

SEQ ID NO: 69631 - protein, 289 aa, Pseudomonas syringae
MAEQTASGYIQHHLQNLTFGHLPNGDWGFAHTAAEAKEMGFWAFHVDTLGWSVALGLIFVLIFRMAAKKATSGQPGALQNFVEVLVEFVDGSVKDSFHGRSAVIAPLALTIFVWVFLMNAVDLVPVDWIPQLAMMISGDEHIPFRAVPTTDPNATLGMALSVFALIIFYSIKVKGIGGFIGELTLHPFGSKNIFVQALLIPVNFLLEFVTLIAKPISLALRLFGNMYAGELVFILIAVMFGSGLLWLSGLGIVLQWAWAVFHILIITLQAFIFMMLTIVYLSMAHEDNH

SEQ ID NO: 69632 - protein, 85 aa, Pseudomonas syringae
METVVGLTAIAVALLIGLGALGTAIGFGLLGGKFLEGAARQPEMVPMLQVKMFIVAGLLDAVTMIGVGIALFFTFANPFVGQLAG

SEQ ID NO: 69633 - protein, 156 aa, Pseudomonas syringae
MNINATLIGQSVAFFIFVLFCMKYVWPPVIAALHERQKKIADGLDAASRAARDLELAQDKVGQQLREAKAQAAEIIEQAKKRGTQIVDEARETARVEADRVKAQAQAEIEQELNGVKDALRAQLGSLAVNGAEKILGATIDQNAHAELVNKLAAEI

SEQ ID NO: 69634 - protein, 172 aa, Pseudomonas syringae
MARPYAKAAFEHAQAHQQLANWSAMLGLAAAVSQDDTMQRMLKAPRVTSAQKATTFIEVCGEKFDAKAQNFIHVVAENDRLPLLPEIAELFDLYKAEQEKSVDVDVTSAFALNQEQQDKLAKVLSARLGREVRLHAAEDASLIGGVVIRAGDLVIDGSVRGKIAKLAEALKS

SEQ ID NO: 69635 - protein, 160 aa, Pseudomonas syringae
TAVSANTGTINFEGQITGSTCPIEVVNPGDGAVGNLVKMGSVDAGRFTAVGQEYSGKSFALRVKDNGSCGLTGTADVATVKFDGAADGSSSYFAVTPTADGATGVAIAIRDFSGDSIEPGTESAPYPLVVGGVTDMTFDAYYRSTAATVTPGTASADINF

SEQ ID NO: 69636 - protein, 325 aa, Pseudomonas syringae; identical to SEQ ID NO: 69226

SEQ ID NO: 69637 - protein, 455 aa, Pseudomonas syringae
MSLDIVILAAGQGTRMRSALPKVLHPVAGNSMLGHVIHSARQLSPVGIHVVIGHGADAVREQLAADDLNFVMQDKQLGTGHAVAQALPALTAETVLILYGDVPLIEVETLQRLLKRVTPEQLGLLTVKLDDPTGYGRIVRDDQHRVCAIVEHKDATDAQKAITEGNTGILAVPASHLQDWLGRLSNNNAQGEYYLTDVIAMAVNDGLVVATEQPHDAMEVQGANDRKQLSELERHYQLREARRLMAAGVTLRDPSRFDVRGEVSVGRDVLIDINVILEGKVIIEDDVVIGPNCVIKDSTLRKGVVVKANSHIDGALLGECSDAGPFARLRPGSVLGAKAHVGNFVELKNANLGEGAKVGHLTYLGDAEVGARTNIGAGTITCNYDGANKHKTTLGADVFIGSNNSLVAPVDILDGATTAAGSTITQNVPAEQLGVARARQRNIEGWKRPVKITKD

SEQ ID NO: 69638 - protein, 611 aa, Pseudomonas syringae
MCGIVGAVAERNITAILLEGLKRLEYRGYDSAGVAVFTNEGVLERRRRSGKVSELEQALAGEPLIGRLGIAHTRWATHGAPCERNAHPHFSADELAVVHNGIIENHEALREQLKSLGYVFVSDTDTEVIVHLLHHKLKDTPDLAVALKSAVKELHGAYGLAVINAAQPDRLLAARSGSPLVIGVGMGENFLASDQLALRQVTDRFMYLEEGDIAEIRRDSVQIWTVDGLPVVREVVQYHEGAEAADKGEYRHFMLKEIHEQPKVVQRTLEGRLGQHQVLVHAFGPQAAELFAKVRNVQIVACGTSYHAGMVARYWLEGLAGIPCQVEVASEFRYRKVVVQPDTLFVSISQSGETADTLAALRNAKELGFLASLAICNVGISSLVRESDLTLLTQAGPEIGVASTKAFTTQLVALLLLTLSLGQVKGSLEEGVEAQLVEELRRLPTRLGEALAMDGTIEKVAELFAEKHHTLFLGRGAQFPVAMEGALKLKEISYIHAEAYPAGELKHGPLALVDADMPVVTVAPNNELLEKLKSNLQEVRARGGELIVFADEQAGMKNGEGTHVIAMPHIIDALAPILYTIPLQLLSYYVAVLKGTDVDQPRNLAKSVTVE

SEQ ID NO: 69639 - protein, 490 aa, Pseudomonas syringae
MARFELQKLYIDGGYVDASNTETFDSINPANGEVLAKIQRASKEDVERAVVAAEKGQKIWAAMTAVERSRILRRAVDILRERNDELAALETLDTGKAISETRYVDIVTGADVLEYYAGLVPAIEGEQIPLRDSSFVYTRREPLGVVAGIGAWNYPIQIALWKSAPALAAGNAMIFKPSEVTSLTTLKLAEIYTEAGVPNGVFNVLTGSGREVGTWITEHPRIEKVSFTGGTDTGKKVMASASSSSLKEVTMELGGKSPLIVFDDADLDRAADIAMMANFYSSGQVCTNGTRVFVPNALKGEFEAKILERVKRIRPGNPEDENINFGPLVSFEHMESVLGYIAKGKEQGARLLCGGDRLTGGVFDKGAFVAATVFTDCTDEMTIVREEIFGPVMSILGYDTEDEVVRRANDTDFGLAAGIVTRDLNRAHRVIHLLEAGICWINAWGESAAQMPVGGYKQSGVGRENGISSLAQYTRIKSVQIELGDYASVF

SEQ ID NO: 69640 - protein, 56 aa, Pseudomonas syringae
MAAAVCCAEAPLRFEELVMKVRASVKKLCRNCKIIRREGVVRVICSAEPRHKQRQG

SEQ ID NO: 69641 - protein, 325 aa, Pseudomonas syringae; identical to SEQ ID NO: 69226

SEQ ID NO: 69642 - protein, 172 aa, Pseudomonas syringae
MIGPFAYGWKVLAIVAVLISCWVWGFNHGSNKVEADWQQKWDRELKTQSQAVASTTTEYRTEEQRRQKAANQVANDARQEQAVAIADAVVADASGDRLRSEAGKLAASASCVPSDPGIADRGKNAARAAMVLSDLLSRADSRAGELARHADRLTVALQACNASYIGVTGSAH

SEQ ID NO: 69643 - protein, 448 aa, Pseudomonas syringae
MNPRLAAAKALAAVLSGKASLNSSLPTQLDKVELRDRGLTQDLAFGTARWQPRLSALAAKLLQKPFKAADADVEALLLVGLYQLFYSRIPAHAAIGETVGCADKLKKPWAKGLLNAVLRNAQRDGEALLIELEHDPVVRTAHPRWLQKALKAAWPEQWEAICAANNAHPPMILRVNRRHQRRDQYLELLKTAGLEASACTFSQDGIVLAEPCDVRSLPGFAEGWISVQDEAAQLAADLLELAPGQRVLDACCAPGGKTCHLLEVQPQLSGVVAVDLEAKRLVRVRENLERLGLDAELIAADARETAQWWDGKPFQRILLDAPCSATGVIRRHPDIKLTRQLDDIAALATLQGELLDALWPTLQVGGMLVYATCSTLPTENTDVIEAFLARTSGARELDIAGQAGQPPAGIKQPHGRQLLAQQGGHDGFYYAKLIKIAAQDRGGAGVTS

SEQ ID NO: 69644 - protein, 457 aa, Pseudomonas syringae
MKIIILGAGQVGGTLAEHLAGEANDITVVDTDGDRLRDLGDRLDIRTVQGKGSYPAVLRQAGADDADMLVAVTSSDEANMIACQVAHTLFHTPTKIARIREAAYLTRAGLFDKNAIPVDVLISPEQVVTNYIKRLIEYPGALQVIDFAEGKAQLVAVKAYYGGALVGQQLRQLRAHMPNVDTRIAAIYRRDRAILPKGDTVIEADDEVFFIAARADIRAVMGELRRLDENYKRIVIAGGGNIGERLAEAIESRYQVKIIEVNPARCRYLSENLDSTVVLQGSSSDRDLLLEENIGNTDLFLALTNDDEANIMSSLLAKRLGARKVMTLINNPAYVDLVQGGEIDVAVSPQLATIGTLLAHVRRGDIVSVHSLRRGAAEAIEIVAHGDPKSSKVVGRAIKDINLPTGTAIGAIIRDEQVLIAHDVTLIESGDHVIMFLVDKKCIRDVERLFQVGLSFF

SEQ ID NO: 69645 - protein, 355 aa, Pseudomonas syringae
MYKGSSLHQKQRVIGLPGVDVRPNRVYSRSLNRSPAQVKFVSQPTPAVRTFQDLILALQQYWAEQGCVVLQPYDMEVGAGTFHTATFLRAVGPETWNAAYVQPSRRPTDGRYGENPNRLQHYYQFQVILKPNPDNFQELYLGSLKHIGLDPLVHDVRFVEDNWESPTLGAWGLGWEIWLNGMEVSQFTYFQQVGGIECYPVTGEITYGLERLAMYQQGVDSVYDLVWADGPFGKVTYGDVFHQNEVEQSTYNFEHANVDKLFELFDFYESEAARLIELELPLPGYEMVLKASHTFNLLDARRAISVTARQQYILRVRTLARSVAQAYLQARARLGFPMAPPDLRDEVLAKLEAAQ

SEQ ID NO: 69646 - protein, 256 aa, Pseudomonas syringae
MSIMQAIRTFIFYLLLGTSSLLWCTLSFFIAPFLPFKARYRFINVYWCRCALWLTRVFLNIKVEVSGADNVPKTPCVIISNHQSTWETFFLSAYFEPLSQVLKRELLYVPFFGWAMAMLRPIAIDRDNPKAALREIAKKGDELLKDGVWVLIFPEGTRVPYGQVGKFSRGGTALAVNADLPVLPIAHNAGKYWPRDGWGKKPGTIQVVIGEPMYAEGTGPRAIAALNERVQTWNEDTQRALGSPVAPATSTEKVPA

SEQ ID NO: 69647 - protein, 231 aa, Pseudomonas syringae
MAKLTKRQKAIAEKIEAGKSYNFVDAAALLTELSTVKFSESIDVAVNLGVDPRKSDQVVRSATVLPHGTGKTVRVAVFTQGPAAEAALAAGADRVGMDDLAAEMKAGDLNYDVVIASPDAMRVVGQLGQVLGPRGLMPNPKVGTVTPDVATAVKNAKAGQVRYRTDKNGIIHTSVGKVGFDAVKLKENVEALIADLKRIKPASSKGIYVKRITLSTTMGPGLVIDQGSLEA

SEQ ID NO: 69648 - protein, 367 aa, Pseudomonas syringae
MHFTIQREALLKPLQLVAGVVERRQTLPVLSNVLLVVQGQQLSLTGTDLEVELVGRVQLEEPAEPGEITVPARKLMDICKSLPNDALIDIKLDDSKLIVKAGRSRFTLSTLPANDFPTVEEGPGSLTFNLVQSKLRRLIERTSFAMAQQDVRYYLNGMLLEVSAGILRAVATDGHRLAMCSMSADIEHADRHQVIVPRKGILEMARLLTEQDGMVSIVLGQHHIRATTGEFTFTSKLVDGKFPDYERVLPKGGDKLVLGDRQSLREAFSRTAILSNEKYRGIRLQLANGQLKIQANNPEQEEAEEEIGVEYNGEALEIGFNVSYLLDVLSVMTTEQVRLILSDSNSSALVQESDNDDSAYVVMPMRL

SEQ ID NO: 69649 - protein, 511 aa, Pseudomonas syringae
MSVELWQQCVELLRDELPAQQFNTWIRPLQVEAEGDELRVYAPNRFVLDWVNEKYLGRLLELLGERGQGMAPALSLLIGSKRSSAPRAAPNAPLAAAASQALSGNSVSSVSASAPAMAVPAPMVAAPVPVHNVATHDEPSRDSFDPMAGASSQQAPARAEQRTVQVEGALKHTSYLNRTFTFENFVEGKSNQLARAAAWQVADNPKHGYNPLFLYGGVGLGKTHLMHAVGNHLLKKNPNAKVVYLHSERFVADMVKALQLNAINEFKRFYRSVDALLIDDIQFFARKERSQEEFFHTFNALLEGGQQVILTSDRYPKEIEGLEERLKSRFGWGLTVAVEPPELETRVAILMKKADQAKVDLPHDAAFFIAQRIRSNVRELEGALKRVIAHSHFMGRDITIELIRESLKDLLALQDKLVSVDNIQRTVAEYYKIKISDLLSKRRSRSVARPRQVAMALSKELTNHSLPEIGDVFGGRDHTTVLHACRKINELKESDADIREDYKNLLRTLTT

SEQ ID NO: 69650 - protein, 562 aa, Pseudomonas syringae
MDIKRTILIVALAIVTYVGVLKWNQDYGQAAMPTQNVAASNTAPGIPDTAAGNNGSASADVPSATGNTTSAAPLETPAVASKDLIHVKTDVLDLAIDPVGGDVVQLRLPLYPRRQDRPDVPFQLFDNGGERTFLAQSGLTGTNGPDARASGRPVYSSAQKSYQLADGQDSMVVELKFSENGVNYIKRFTFKRGLYDLVMTYVVDNQSAQPWAGNLFAQLKRDASSDPSSTTATGTATYLGAALWTAAEPYKKVSMKDIDKGQIKENVQGGWVAWLQHYFVTAWIPDHNVTNAVQTRKDSQGNYIIGFTSPTLSVAPGAQGETTATLYAGPKSQAVLKELSPGLELTVDYGFLWFIAQPIFWLLQHIHAILGNWGWSIIVLTMLIKGLFFPLSAASYKSMARMRAVAPKLAVLKEQHGDDRQKMSQAMMELYKKEKINPLGGCLPILVQMPVFLSLYWVLLESVEMRQAPWILWITDLSIKDPFFILPIIMGATMFIQQRLNPTPPDPMQAKVMKMMPIIFTFFFLWFPAGLVLYWVVNNTLSIAQQAYITRKIGAATKKAAA

SEQ ID NO: 69651 - protein, 198 aa, Pseudomonas syringae
MMNLTQLVLASHNGGKLKELQAMLGGSVTLRSVSEFSLVEPEETGLSFVENAILKARNASRLSGLPALADDSGLAVDFLGGAPGIYSARYADGQGDAANNAKLLEALKDVPDEQRGAQFVCVLALVRHADDPLPILCEGLWHGRILHAASGEYGFGYDPLFWVPERNCSSAELGPSEKNQLSHRARAMVLLRQRLGLQ

SEQ ID NO: 69652 - protein, 589 aa, Pseudomonas syringae
MKDEDFKKPIIAIANSFTQFVPGHVHLKDMGQLVAREVERAGGVAKEFNTIAVDDGIAMGHDGMLYSLPSREIIADSVEYMVNAHCADAIVCISNCDKITPGMLMAALRLNIPVVFVSGGPMEAGKTKLASHGLDLVDAMVIAADSTASDEKVAEYERSACPTCGSCSGMFTANSMNCLTEALGLALPGNGSALATHSDREQLFLQAGRTIVDLCRQYYKENDYSVLPRNIANFKAFENAMTLDIAMGGSTNTILHLLAAAQEAEIDFDLHHIDRLSRKVPQLCKVAPNIQKYHMEDVHRAGGIFSILGELARGGLLHTDLPTVHSKTMAEGIAKWDITQTDDEAVHTFFKAGPAGIPTQTAFSQSTRWESLDDDRENGCIRSVEHAYSQEGGLAVLYGNIALDGCVVKTAGVDESIHVFEGNAKIFESQDSAVRGILADEVKAGDIVIIRYEGPKGGPGMQEMLYPTSYLKSKGLGKDCALLTDGRFSGGTSGLSIGHASPEAAAGGAIGLVRDGDKVLIDIPNRSINLMIDDAEMAERRAEQDKKGWKPVESRPRKVTTALKAYALLATSADKGAVRDKALLDKLVP

SEQ ID NO: 69653 - protein, 402 aa, Pseudomonas syringae
MADQGSPRRFARIDRLPPYVFNITAELKMAARRRGEDIIDLSMGNPDGATPPHIVEKLVTVAQREDTHGYSTSRGIPRLRRAISNWYKKRYEVDIDPESEAIVTIGSKEGLAHLMLATLDQGDTVLVPNPSYPIHIYGAVIAGAQVRSVPLVPGVDFFAELEKAIRGSIPKPKMMILGFPSNPTAQCVELDFFERVVALAKQYDVLVIHDLAYADIVYDGWKAPSIMQVPGAKDIAVEFFTLSKSYNMAGWRIGFMVGNPELVNALARIKSYHDYGTFTPLQVAAIAALEGDQQCVLDIAEQYRQRRNVLVKGLHELGWMVENPKASMYVWAKIPEAYAHLGSLEFAKKLLAEAKVCVSPGIGFGEYGDDHVRFALIENQDRIRQAVRGIRSMFRADDKLKS

SEQ ID NO: 69654 - protein, 578 aa, Pseudomonas syringae
MKDTIRQLIQQALTRLVTEGVLPEGLTPAIQVENARDKTHGDFASNIAMMLAKPAGMKPRDLAEKLIAALPADEQVSKVEIAGPGFLNFFQNTAALASRLDAALSDPQLSVRKAGAAQRVVVDLSAPNLAKEMHVGHLRSTIIGDGVANVLEFLGDTVIRQNHVGDWGTQFGMLLAYLQEKPATSDELSDLENFYRAAKQRFDESEEFAERARGLVVKLQAGDAECLTLWTRFKDISLSHCQQTYERLNVKLTPADVMGESAYNDDLANVVNDLKAAGLLVESNGAQCVFLEEFRTADDTPLPVIVQKAGGGYLYATTDLAAIRYRSKVLKADRALYFVDQRQALHFQQVFEVARRAGFVHEGMQLEHMGFGTMNGADGRPFKTRDGGTVKLIDLLDEAQERAYTLVKEKNPQVAEAELRSIAKAVGISAVKYADLSKHRASDYSFNFDQMLSFEGNTAPYLLYAYTRVAGVFRKLGTPFDASKGHIVLEAPQEQELAARLAQFNETLNNVAEKGTPHVLCAYLYDLAGLFSSFYENCPILGAENPDQQQSRLRLAALTGRTLKQGLDLLGLETLERM

SEQ ID NO: 69655 - protein, 192 aa, Pseudomonas syringae
MSLHQGIFAPQCGDSPLTTIVSVRRHGKVVMAGDGQVSLGNTVMKGNAKKVRRLYHGEVIAGFAGATADAFTLFERFEAQLEKHQGHLVRAAVELAKDWRTDRSLSRLEAMLAVANKDASLIITGNGDVVEPEDGLIAMGSGGAFAQAAARALLLKTDLSAREIAETSLHIAGDICVFTNHNITIEEQDLAD

SEQ ID NO: 69656 - protein, 192 aa, Pseudomonas syringae
MLKKSLAALALGTALLSAGQAMAADYVIDKEGQHAFVDFKISHLGYSFIHGTFKDWDGTFSFDAAKPEASKINVELKTASLFTNHAERDKHISSKDFLDVAKYPEAKFVSTAVKSTGEKTADVTGDLTLHGVTKPIVIKATFNGEGKDPWGGYRAGFNGTSTLNLNDFGIKGPGPTSQTLDLDITFEGVQKK

SEQ ID NO: 69657 - protein, 481 aa, Pseudomonas syringae
MRLSELKNAGRTPELPMSLTLADAAGPAKLQLLSLLRVLPGQRYVGAGVWRGRTVLAKLLVGDKAARHFQRELAGVRLLAEQGLTTPLLLADGLQEGEGGWLLFEFLEQASSLGDAWTEVEELPPLADEQQAVLGEALTAIAQQHAKGLWQEDLHLDNLLRHKGQLYLIDGAGIRAEQAGKPLSRQKVLENLGVFFAQLPKAFEPFTEELLVHYLLSNGEHGLPMEALQRQIDKVRSWRLKDFLGKTVRDCSLFSVEDTASVFRAIRRNEEAAMLPVLEQADALLGKGHLYKTGGAASVGRVEASGRTLVIKRYNIKNFSHWLKRFWRPSRAWHSWREGNRLMFLGIATPKPLAVQERRFLGLRSKAWLVTEFIDGPDIIERFAPYVESGDAPEAELLALDTLFAQLIQARISHGDFKGHNLFWHKDRWAMIDLDAMQQHSSQSSFAAAYARDRARFMRNWPVHSALHQKLEQRLPKIEPA

SEQ ID NO: 69658 - protein, 354 aa, Pseudomonas syringae
MRVLLIKTSSLGDVIHALPALTDAARALPGIRFDWVVEEGFAEIPAWHPAVDAVIPVAIRRWRKNLWQTFRSGEWRRFKARVREQRYDLVIDAQGLFKSAWLTRYIDAPVAGLDRDSAREPVASRFYDRALPVARGQHAVERLRQLFAQALGYPLPSGMGDYGLKPLAALDDTLQAPFVLFLHGTTWDTKHWPELYWRQLAELMVARGLHVQLPWGNPTEKARAERIAEGLESAHVLPKLNLAGVARVLASAQACVAVDTGIGHLAAALDVPTVSLFGPTNPGLTGAYGKSQVHLASDYPGCTPCLQKKCTYQPSADDQRRFDLKREWPLCFTRLNPERVASQLGALLLAKEPG

SEQ ID NO: 69659 - protein, 256 aa, Pseudomonas syringae
MNDQRKGSDAEPTTHFGYKNVPESQKAEKVAEVFHSVAAKYDLMNDLLSGGMHRLWKRFAIELSGVRTGNRVLDIAGGTGDLTRKFSNLVGPTGQVVLADINASMLKVGRDRLLDLGVSGNVEFVQADAEKLPFPDNHFDCVTIAFGLRNVTHKEDALRSMLRVLKPGGRLLVLEFSKPTNKLMSKAYDAYSFAFMPLMGKLVTNDSESYRYLAESIRMHPNQETLKSMMVDAGFDRVTYHNMTAGVVALHRGIKP

SEQ ID NO: 69660 - protein, 468 aa, Pseudomonas syringae
MGLNDQWMQRDLKVLWHPCTQMKDHENLPLIPIKRGEGVWLEDFEGKRYLDAVSSWWVNVFGHANPRINQRIKDQVDQLEHVILAGFSHQPVIELSERLVKLTPEGLTRCFYADNGSSCIEVALKMSFHYWLNRGQPAKKRFVTLTNSYHGETMAAMSVGDVPLFTETYKALLLDTIKVPSPDCYHRPDGMGWEEHSRNMFAAMEQTLAEHHASVAAVIVEPLIQGAGGMRMYHPIYLKLLREACDRYGVHLIHDEIAVGFGRTGTMFACEQAGIRPDFLCLSKALTGGYLPLAACVTTDDVYDAFYDDYPTLRAFLHSHSYTGNPLACAAALATLDIFEQDNVIENNKALAQRMATATAHLVDHPHVAEVRQTGMAIAIEMVQDKATKTAYPWQERRGMKVFQHALERGALLRPLGSVVYFLPPYVITPEQIDFLAEVATEGIDIATRSSISVAVRENFHPDFRDPG

SEQ ID NO: 69661 - protein, 239 aa, Pseudomonas syringae
MRLSRFFTETPLSLGEHELPEAQAHYISRVLRMTEGDALQLFDGSGQEFSGTLLEVGKKRVRVQLTERFAGQVESGLRIHLGQGLSRGERMDWAIQKATELGVSEITPIVSERCEVRLKDERAEKRQAHWQQIAISACEQCGRSVVPVIHPPMPLADWIKLTEADLKLVLHPVAEPLTSHAKPASLAFLIGPEGGLNDAEVDQAQNAGFHAARLGPRVLRTETAPVVALSVAQQLWGDF

SEQ ID NO: 69662 - protein, 163 aa, Pseudomonas syringae
MAIYGACLVTLYSVSTVYHSVKGRSKSIMQKVDHFSIYLMIAGSYTPFCLVTLRGAWGWTLFGIVWGLALIGILQEIKPRSEARIMSIVIYAVMGWIVLVAVKPLIAALGLAGFIWLAGGGVLYTVGILFFAYDQIRHFHGIWHLFVIGGSLMHFVAICFYVL

SEQ ID NO: 69663 - protein, 712 aa, Pseudomonas syringae
  MISC_FEATURE (76)..(76): X=any amino acid
TNILVRGWRRLTGKSNPPKPDHSDLPRDLPKVSLAYRRFDPPLHSADPHAGSDDCGWLVHERHLAVSGLVAGFAGXNHPQTFVQTALQVLPYALQTSILLLFGILFCWVSAGFWTALMGFLELLTGRDKYRISGASAGNEPIEAGARTALVMPICNEDVPRVFAGLRATFESVAATGNLDRFDFFVLSDTNETDIAVAEQQAWLDVCRETKGFGSIFYRRRRRRVKRKSGNLDDFCRRWGGEYRYMVVLDADSVMSGECLTSLVRLMEATPDAGIIQTAPRASGMDTLYARMQQFATRVYGPLFTAGLHFWQLGESHYWGHNAIIRMKPFIEHCALAPLPGKGAFAGAILSHDFVEAALMRRAGWGVWIAYDLPGSYEELPPNLLDELKRDRRWCHGNLMNFRLFLVKGMHPVHRAVFLTGVMSYLSAPLWFFFLVLSTALLAVNTLMEPTYFLEPRQLYPLWPQWHPERAVALFSTTIVLLFLPKLLSVILIWAKGAKGFGGKFKVTVSMLLEMLFSVLLAPVRMLFHTRFVLAAFLGWAATWNSPQRDDDSTPWLEAVKRHGPADLAGRMLGTAGVLVEPQFLWWLAPIVVSLMLSIPVSVISSRTNLGLKARDEKFFLIPEEFEPPQELVSTDQYTHENRWHALKQGFIRAVVDPRQNALACALATSRHRQAQPIEVVRMERVDHALKVGPAKLDNQHRLMLLSDPVAL

SEQ ID NO: 69664 - protein, 559 aa, Pseudomonas syringae
MSEQVLLRRDIVSELIRVPDIGNGEGEVIELMVKVGDRIEADQSVLTLESDKASMEIPAPKAGVIKAMKVKLGDRLKEGDELFELEVEGEASAAPAPAAEPAAAAAPAAAEKPAEAAPAAAEPAPAAAATVQDIHVPDIGSSGKAKIIELMVKVGDSITADQSLITLESDKASMEIPSPAAGVIESIEVKLDQEVGTGDLILKLKVAGAAPAAAPAPAASAPAAAPAKAEAAAPAAAPAPKAEAAPAPAAPAKDGAKVHAGPAVRQLAREFGVELSAVSATGPHGRVLKEDVQVYVKAMMQKAKEAPAGGASGGSGIPPIPEVDFSRFGEIEEVPMTRLMQLGASGLHRSWLNIPHVTQFDQADITDLEAFRVAQKGAAEKAGVKLTVLPLLLKACAHLLKELPDFNASLAPSGKAVIRKKYVHIGFAVDTPDGLLVPVIRDVDQKSLLQLAAEAAVLAEKARSKKLTANDMQGACFTISSLGHIGGTGFTPIVNAPEVAILGVSKATIQPVWDGKAFQPKLMLPLSLSYDHRVINGAAAARFTKRLSELLTDIRTILL

SEQ ID NO: 69665 - protein, 418 aa, Pseudomonas syringae
MTQSVTRGIPMRSVGTIATYRSRKHAVPVTDVVIIGAGAAGLMCAFTAAARGRKVMLIDHANKPGKKILMSGGGRCNFTNMYTEPANFLSQNSHFCKSALARYTQWDFIALVAKHGVPYHEKKLGQLFCDNKSSDILEMLLEECRQAGVSLHMDTSVQQIDKTESGYSLHTTLGTLSCESLVIATGGLSIPTLGATGFGYQVGKQFGHTLLPTRAGLVPFTITDQLKELCTELSGTSVDCLVSCHDTSFRENILFTHRGLSGPAILQISSFWQPGDTVEINLLPDHDVPAWLTQQQAERPNSELKTLLGEIFTKKMANLIAEHWFVSRPMKQYTHAELADIAEKLASWKVVPAGTEGYRTAEVTLGGIDTREVSSKTMESLKSPGLYFVGEVLDVSGHLGGFNFQWAWASAYAAAQYA

SEQ ID NO: 69666 - protein, 251 aa, Pseudomonas syringae
MSQWLRAVGLLVFLLMANATAAEKLRLVADPWPPFTDALLLNGGLATDIVNTALKRAGYTTLYEQVPWARALLGLSEGRHDVLINAWFSEDRKKIGQFSAEYLLNRIRFIKRKESPIDALTHEQLHHYLIAVVRGYAYSPAFDSDVLLKKVPVQNFSTAVRMLAAERVDLTLEDEYVARYNLALEANEVRARVEFLPGSLSENSLHILVSLKNPHHAKIVADFDREIAAMKADGTYEELLRLHGLQGPPEL

SEQ ID NO: 69667 - protein, 247 aa, Pseudomonas syringae
MIVVEKLTKEFKGNQVLKGIDLRIEAGEVVAIIGPSGSGKTTLLRCLNLLETPTSGRIKVGDIEIDGTRSIGQQQGLIRQLRQQVGFVFQNFNLFPHRTALENVIEGPVVVKKIAREAAEALGRQLLAKVGLTGKEDAYPRRLSGGQQQRVAIARALAMEPQVILFDEPTSALDPELVGEVLTTIRALAEENRTMVIVTHEMSFAREVANRVIFIDKGVIVEQGEAKALFANPQEERTRQFLERTRS

SEQ ID NO: 69668 - protein, 1129 aa, Pseudomonas syringae
MFSLRSICAAALFALCLSIFPALAAEPPTRDAVQQSLDKIADRKLPDADQKALQQVLEQTLAFLNSKDDSEQKLTALKQQLAQAPKQTSDNQRELARLKESKVVAVAQRYGGLDVPQLEQLLSQRSTQQSDLQSELNDANSLAITAQTRPERAQTEISANQTRIQQINAILKNGKDNGKTLSADQRNLLNAELASINALNLLRRQELAGNSQLQDLGNSQHDLLTEKVARQEQEIQDLQTLINDKRRAQSQKTVADLSLEAQKSGGSSLLATESAANLKLSDYLLRGTDRLNELTQQNLKTKQQLDNLTQTDQALSEQINVLSGSLLLSKILYKQKQSLPHLELDKGLADEIANIRLYQFDINQQREQMSTPTAYVERLLATQPPENITPQLRRTLLDLAITRSDLLERLNRELSALLNESITLQLNQKQLTSTAVGLRSTLDEQMFWIPSNKPLDLEWFQNIWPRLQKQVATLPWTSSLSELSDGLTQRPLLFLPLLLLIGVLTWRRKALYQKLNRLHADIGHFKRDSQWKTPLALLINVLLAMPVALGLALCGYALQIDARGQNANLGEALLQIALAWLVFYTAYRVLAPSGVAQLHFRWEPAQVAFLRGWVRRLGLVVLALVAVVAVAEHQPAALADDVLGIGVVLTCYALMTWLLGRLLLSSPTHHNASLFRKTLGVAFTALPVALFLAVCFGYYYTALKLSDRLIDTLYLMMIWLMVEATFVRGLGVAARRLAYQRALAKRQAARENGDSDIPVEEPKLDIEQVNQQSLRLIRLALLAGFVGALYLVWAELITVFAYLDNIILYEYTSGTGANMSMVPISLSDFLGAGVIIVITFVLAGNLPGLLEVLVLSRMNLAQGSAYATTTLLSYTIAGIGFVTTLSTLGVSWDKLQWLVAALSVGLGFGMQEIFANFISGIMILFERPVRIGDTITIGALSGTVSKIRIRATTITDFDRKDIIVPNKTFITGQLINWSLTDTVTRVTLKLGVDYGSDLDLVRSLLLQAARENPRVLKEPEPIVYFLNFGESTLDHELRMHVRDLGDRNPVLDEINRFINREFKKQHINISFRQMEIYLKNTQGLEYKLVPAEPGEKHGAPAGQTTLQPVNTKVAPATKDAPEPPELRLD

SEQ ID NO: 69669 - protein, 227 aa, Pseudomonas syringae
MPGNWHRVWRYWVMWVDRLLQGTLDTFLMVGVSSLIALLLGIPLAVILVTSSKGGIYEAPAINRVLGGFVNLFRSIPFLILMVALIPFTRMIVGTTYGVWAAVVPLTIAATPFFARIAEVSLREVDHGLIEAAQAMGCRRWHIIWHVLLPEARPGIVGGFTITLVTMINSSAMAGAIGAGGLGDIAYRYGYQRFDTQVMLTVIVLLVAVVALVQLGGDRLARSFDRR

SEQ ID NO: 69670 - protein, 680 aa, Pseudomonas syringae
MSSTDRSREGARSRTQIILLFVALIVFIMLLFANFAYLNTQSNYDKQYIGHAGELRVLSQRIAKNATEAAAGKTQAFKLLADARNDFDVRWGYLRKGDPATGLPAAPELIRDELRTVQRDWEGLRKSTDVILASEQTVLSLHQVAATLAETIPQLQAEYDKVVENLLQSRAPAAQVVVAQRQALLAERILGSVNTVLAGDETAVQAADAFGRDASQFGRVLNGMLEGNATLRITQVEDRDARARLAEIAELFEFVSGSVDEILETSPELYQVREASGNIFNTSQTLLDETSVLANSLENLAKRRTMNTVGGYVLGLLALMSIILIGLVMVRETNRQLRETAQKSERNQTAIMRLLDEIENLADGDLTVTASVTEDFTGAIADSINYSIDQLRELVVTINLTAEQVASAVTETQATAMQLSAASEHQALQISAASTAVNDMAASIDQVSANASESSAVAERSVAIANKGNEVVQNTIHGMDNIREQIQDTSKRIKRLGESSQEIGDIVSLIDDIADQTNILALNAAIQASMAGDAGRGFAVVADEVQRLAERSSSATKQIETLVRAIQNDTNEAVISMEQTTSEVVRGARLAQDAGVALGEIEGVSRVLAELIESITDAAHQQAESAGQISQTMTVIQQTTSQTTSGTSATAESIGNLAKMASEMRRSVSGFTLPPSKKIG

SEQ ID NO: 69671 - protein, 418 aa, Pseudomonas syringae
MNPAVAPPTTDLNTSAKPSGDSYIEKNTPLFKRTALALFAGGFSTFTLLYCVQPMMPTLSTEFSLSAAQSSLILSVATAMLAIGLLITGPISDRLGRKSVMVMALFCASLFTIASALMPSWEGVLITRALVGLSLSGLAAVAMTYLSEEIHPTHLGLAMGLYIGGSAVGGMSGRLIVGVMIDYVSWHAAMLVVGGLALIAAVVFWKILPESRNFRPRSLHPRSLLDGFVVQFKDAGLPLLFLIGFLLMGAFVTLFNYIAYRLLSEPYNLSQAVVGVFSVVYLSGIYSSAKIGSLADRLGRRKVLWAVIVMMLAGLIMTLFTPLALVIPGVLIFTFGFFGAHSVASSWVGRRATTARGQAASLYLFCYYAGSSVAGTGGGVFWHYAGWNGIGLFIGALLLMALGVALRLARLQPLGARV

SEQ ID NO: 69672 - protein, 423 aa, Pseudomonas syringae
MKLSILGARVIDPVSGLDQTTDLHIEAGKLVAIGAAPAGFEPTQVIDATGLVAAPGLVDLNVSLREPGYSRKGSIASETRAAVAGGVTSLCCPPQTKPVLDTSAVAELILDRAREAGFSKVFPVGALSKGLEGEQLAELIALRDAGCVAFGNGLSSFSNTRTLCRALEYAATFDLTVIFNSQDRDLAEGGLAHDGPTAAFLGLAGIPETAETVALARDLLLVEQSGVRAHFSQLTSARGAALIAQAQARGLPVTADVALYQLILTDEALIDFSSLYHVQPPLRTRADRDGLREAVRSGVIQAISSHHQPHERDAKLAPFGATEPGISSVELLLPLAMTLVDDGLLDLPTLLARLSSGPADALRLPAGKLSAGAPADIVLFDPTASTVAGETWLSKGDNCPFIGHCLPGSVRYTLVDGRISYSR

SEQ ID NO: 69673 - protein, 344 aa, Pseudomonas syringae
MDITELLAFSAKQGASDLHLSAGLPPMIRVDGDVRRINLPPLDAKEVKALIYDIMTDRQRQDFEERLETDFSFEVPGVARFRVNAFNQNRGAGAVFRTIPSKILSMEDLGMGSVFRKITDVARGLILVTGPTGSGKSTTLAAMIDYLNCNKHHHILTIEDPIEFVHESKKCLVNQREVHRDTLGFSEALRSALREDPDVILVGEMRDLETIRLALTAAETGHLVFGTLHTTSAAKTIDRIVDVFPAQEKSMIRSMLSESLHAVVSQALLKKVGGGRVAAHEIMMGTPAIRNLIREDKVAQMYSSIQTGGSLGMQTLDMCLADLVKRGLITRESARERAKVPDNF

SEQ ID NO: 69674 - protein, 228 aa, Pseudomonas syringae
MSTIAANISTLEQRIRDAALAAKRDPASVGLLAVSKTKPAGDLREAYTAGLRDFGENYLQEALGKQLELADLPLCWHFIGPIQSNKTRAIAENFAWVHSVDRLKIAQRLSEQRPEGLEPLNICIQVNVSGEASKSGCAPQDLPALAAAINALPRLKLRGLMAIPEPTDDPAAQAASFAAVRTLQEQLNLSLDTLSMGMSHDLEAAIAQGATWVRIGTALFGARDYGQP

SEQ ID NO: 69675 - protein, 472 aa, Pseudomonas syringae
MAERLSNDFQFIDVGRKDPKKKLLRQRKKEFVEIYEPFKPQQSADQAHRCLGCGNPYCEWKCPVHNFIPNWLKLVAEGNILAAAELSHQTNTLPEVCGRVCPQDRLCEGACTLNDGFGAVTIGSVEKYITDTAFAMGWRPDMSRVIPTGKRVAIIGAGPAGLGCADVLVRGGVTPVVFDKNPEIGGLLTFGIPEFKLEKSVLSHRREVFTGMGIEFRLNTEVGKDVTIDQLLEEYDAVFMGMGTYTYMKGGFAGEDLPGVHDALDFLIANVNRNLGFEKAPEDFVDMKGKRVVVLGGGDTAMDCNRTSIRQGAKSVTCAYRRDEENMPGSRKEVKNAKEEGVRFLYNRQPIAIVGEGKVEGVKVVETRLGEPDARGRRSPEPIPGSEEIIPADAVVIAFGFRPSPAPWFEQFTISTDSQGRVVAPEQAQYKHQTSNPKIFAGGDMVRGSDLVVTAIFEGRNAAEGIMDYLGV

SEQ ID NO: 69676 - protein, 1481 aa, Pseudomonas syringae
MKAGLYQPDEFKDNCGFGLIAHMQGEPSHHLLQTAVQALTCMTHRGGINADGKTGDGCGLLIQKPDGFLRAMASEHFGVELPRQYAVGMVFLNQDDTKAKAARENMNREILAEGLELVGWRQVPIDTSVLGQLALERLPKIEQVYIGGEGLSDQEFAIKLFSARRRSSVANAADSDHYICSFSHKTIIYKGLMMPADLTAFFPDLSDERLQTAICVFHQRFSTNTLPKWPLAQPFRFLAHNGEINTITGNRNWAQARRTKFTNDLMDLDELGPLVNRVGSDSSSMDNMLELMVTGGIDLFRGVRMIIPPAWQNVETMDPDLRAFYEYNSMHMEPWDGPAGIVMTEGRHAVCLLDRNGLRPARWVTTKNGYITLASEIGVWDYKPEDVIAKGRVGPGQIFAVDTETGQILDTDAIDNRLKSRHPYKQWLRKNALRIQATMEDNDHGSAFYDSEQLKQYMKMYQVTFEERDQVLRPLGEQGQEAVGSMGDDTPMAVLSRRVRSPYDYFRQQFAQVTNPPIDPLREAIVMSLEICLGAERNIFQESPEHASRVILSSPVISPAKWRSLMNLERPGFERHIIDLNYDESLGLEAAVRNVADQAEEAVRSGHTLIVLSDRHIAPGKLPVHASLAVGAVHHRLTEQGLRCDSNILVETATARDPHHFAVLIGFGASAVYPFLAYEVLGDLIRTGEVLGDLYEVFKNYRKGITKGLLKILSKMGISTVASYRGAQLFEAIGLSEEVCNTSFRGVPSRLKGARFVDIEAEQKALAAEAWSPRKPIQQGGLLKFVYGGEYHAYNPDVVSTLQAAVQQGDYSKFKEYTALVDQRPVSMIRDLLQVKTLDQPLNIDEIEPLSEILKRFDSAGISLGALSPEAHEALAEAMNRLGARSNSGEGGEDPARYGTIRSSKIKQIATGRFGVTPEYLVNADVLQIKVAQGAKPGEGGQLPGGKVNGLIAKLRYAVPGVTLISPPPHHDIYSIEDLSQLIFDLKQVNPAALVSVKLVAEAGVGTIAAGVAKAYADLITISGYDGGTGASPLTSIKYAGAPWELGLAETHQTLRGNDLRGKVRVQTDGGLKTGLDVIKAAILGAESFGFGTAPMIALGCKYLRICHLNNCATGVATQNEKLRKDHYIGTVDMVINFFTYVAEETREWLARLGVRTLEELIGRTDLLDILPGETEKQRHLDLTPLLGSDHIPADKPQFSLVDRNPPFDKGLLAEKMVELAKPAIEALSGGEFELDICNCDRSIGARISGEIARLHGNQGMNKAPITFRFKGTAGQSFGVWNAGGLNMYLEGDANDYVGKGMTAGKLVIVPPKGSPFKTNESAIIGNTCLYGATGGKLFAAGTAGERFAVRNSGAHTVVEGTGDHCCEYMTGGFVCVLGKTGYNFGSGMTGGFAYVLDQDNTFVDLVNHELVEIQRISGESMEAYRTHLQSVLNEYVAETDSEWGRNLAENLDDYLRRFWLVKPKAANLKSLLSSTRANPQ

SEQ ID NO: 69677 - protein, 814 aa, Pseudomonas syringae
MIRLLKFFWWSLVAVFCSLLLGLSGAFLYLSPTLPSVEALRSIQLQIPLRVFSSDGKLIAEFGEMRRTPIRFAEIPPNFINALLSAEDDNFANHYGVDPSSLMRAATQLVKSGHIQSGGSTITMQVAKNFFLTSERSFSRKTTEILLALQIERQLTKDEILELYVNKIYLGNRAYGIEAAAQVYYGKSIRDVSLAQMAMIAGLPKAPSRFNPLANATRAKERRDWILGRMFRLGKIDQAAYQAALNEPLNASYHVPTPEVNAPYIAEMARAEMVGRYGSEAYTEGFRVTTTVPSDLQEHANKSIQQGLIDYDQRHGYRGPESRFPGMTRAGWTQELTKQRTINGLEPAIVTQIDKTGLRVLTRNGEKEETVDWASMKWARPYLNTNSLGANPKQPGDVAKVGDLVRLLRQDDGSLKFSQIPVAQSALVSLDPQNGAIRALVGGFAFEQSNYNRAMQAKRQPGSSFKPFIYSAALDNGYTASSLVNDAPIVFVDEYLDKVWRPKNDTNTFLGPIRLREALYKSRNLVSIRLLQALGVDSTIDYITRFGFAKQDLPRNLSLALGTATLTPMEIATGWATFANGGYKVSPYLIQTIENRDGQTLFVANPPSVPVNDVNTAPNTSTFAVHDSPSVVASPPGSPAQPQAPAVAERIVDGRTTYILNSMLQDVIKRGTGRRALSMNRPDIAGKTGTTNDSKDAWFSGYNADYVTTVWSGFDQPESLGRHEFGGTVSLPIWMDYMSAALKDKPPHQQAEPSGILSLRVDPLSGRAATPSTPNAFFELFKSEDTPPSVNELGGGSAPGSPLPADESAPIDLF

SEQ ID NO: 69678 - protein, 258 aa, Pseudomonas syringae
MFERLREDIQSVFHRDPAARNAFEVLTCYPGMHAIWLHRFAHVLWRNGWKWLARVVSSFGRWMTGVEIHPGARIGRRFFIDHGMGIVIGETAEIGNDVTLYQGVTLGGTSWNAGKRHPTLEDGVVVGAGAKVLGPFTVGAGAKIGSNAVVTKAVPAGATAVGIPGRIIVKSDDETEARRKVMAEKLGFDAYGVSGDMPDPIARAIGQMLDHLQAVDGRLEGMCDALGRLGSDYCAKDLPQLRNEVFDCVKDAREDTVD

SEQ ID NO: 69679 - protein, 274 aa, Pseudomonas syringae
MLRFIAPLFALLLCLPAHADSFITRALDKPVPGGVAVIDLGTGAQAPTATYQGKPVLVVKEQGTRWLAIVGIPLTVKPGTQQVTSGGRTMSFTVGSKKYPEQHITLKNKRQVNPNPEDNKRIEGELAEQIRAYRSFSPGTPSNLILDKPVNGPLSSKFGVRRFFNGEERNPHSGLDFAVPAGTPIKSPAAGKVILTGNYFFNGNTVFVDHGQGFISMFCHLSKIDVKVGDQVPRGGVVGKVGATGRATGPHMHWNVSLNDARVDPAIFIGAFQP

SEQ ID NO: 69680 - protein, 128 aa, Pseudomonas syringae
MAYSEKVIDHYENPRNVGKMNAEDPDVGTGMVGAPACGDVMRLQIKVNEHGVIEDAKFKTYGCGSAIASSSLATEWMKGKTLDEAETIKNTQLAEELALPPVKIHCSVLAEDAIKAAVRDYKQKKGLL

SEQ ID NO: 69681 - protein, 463 aa, Pseudomonas syringae
MMLAMIKDPFARLGLDREVLTVSQLNGRARVLLEDVFSSIWVEGEISNLSRPASGHVYFTLKDSGAQVRCALFRQSAARVRQALKDGLQVKVRGKVSLFEGRGDYQLILDTVEPAGDGALRLAFDALKAKLSDEGLFSADRKVALPLHPQRIGIISSPTGAVIRDIISVFRRRAPRVELTLIPTAVQGREAINQIVRALKLADARGFDALILARGGGSLEDLWCFNEEAVARAIDACVTPIVSAVGHETDVSISDFVADVRAPTPSAAAELLAPDSSDLHRRVDNLHRRLVSRMQDRLMRERLRLEGISRRLRHPGERLRQQSQRLDDLDMRLRRAFEQSMHKKQVRLAHMESRLTAQHPGRTLAFLRQRLDALAERLPRAIREQIKVRKLQLQSQMQTLNVVSPLATLGRGYSILLDERGHAIRNAAQTQPGQRLTARLGEGELQVRVEDNHLTPVTLSLLD

SEQ ID NO: 69682 - protein, 186 aa, Pseudomonas syringae
MIATSRIPVENLLVLLFPLGMITVLLAQFAPSGTVQPIMEEPGILSHILLSLLAYGMFTIAVFQALLLLLQDYRLKHKHPSGLIKNFPPLQTMESLLFGFLWAGWTLLSLSLLSGWLFVENLFAQHLVHKTLLAFLAWVVFSVLLWGRNRLGWRGHKAIRWTLGGFCLLMLAYFGSKLVREFILHI

SEQ ID NO: 69683 - protein, 458 aa, Pseudomonas syringae
MFENLTDRLSQTLRHVTGKAKLNEDNIKDTLREVRMALLEADVALPVVKDFVNSVKERAVGTEVSRSLTPGQAFVKIVQAELESLMGAANEDLVLNVTPPAVILMAGLQGAGKTTTAGKLARFLKERKKKTVMVVSVDVYRPAAIKQLETLANDIGVTFFASDISQKPVDIALAAIKEARLKFIDVVIVDTAGRLHVDVEMMGEIQALHAATKPAETLFVVDAMTGQDAANTAKAFGDALPLTGVILTKVDGDARGGAALSVRAITGKPIKFIGMGEKSEALEPFHPDRIASRILGMGDVLSLIEQAEQTLDKDKADKLAKKLKKGKGFDLEDFRDQLQQMKNMGGLGGLMDKLPSIGGVNLSQMGNAQGAAEKQFKQMEAIINSMTPAERRDPDLISGSRKRRISQGSGTQVQDIGRLIKQHKQMQKMMKKFSAKGGMAKMMRGMGGMLPGGGMPKM

SEQ ID NO: 69684 - protein, 85 aa, Pseudomonas syringae
MLTIRLALGGSKKRPFYHLTVTDSRNARDGSHKEQIGFFNPVARGQEIRLSVNEERVNYWLSVGAQTSERVAQLLKEHNKTKAAA

SEQ ID NO: 69685 - protein, 329 aa, Pseudomonas syringae
MNPNTVPTPARGAIRWEAHTCLPLLPNQDMSALLRYRDNGFHHVSVNVGMDMTAVGDVMQVIAGFRQWLIKHPENFMLAGTLADLQRARVQDKLAVSFDLEGSNMLLQDQAMVRLYADLGVRQMLLAYNLDNSCAGGCHGSGMGLTALGREFVGAINSAGIVMDCSHASKRASMEIIELSQRPVVFSHTNIKAVYDHPRTVDDEQIMACVESGGVIGLTGMGIFLGDPQASVEAFVRQIDYLAERAGTAHIGLGLDIELHPDDKDLAEGVNEDDWWPKEFYGGINGHRQLQPEALGQVAEALLRIGYDAAQINGIFGGNFMRVAQATWP

SEQ ID NO: 69686 - protein, 123 aa, Pseudomonas syringae
MELVSGRLQSKFLVVKLKGLDDREEARLLSGYEICVPRNLFPDLDDGEYYWYQLEGLKVIDQLGQLLGKIDHLLETGSNDVMVVKPCAGSLDDRERLLPYTEQCVLAIDMAAGEMKVEWDADF

SEQ ID NO: 69687 - protein, 116 aa, Pseudomonas syringae
MTNKIILALEAEQMTKEIPTFAPGDTIVVQVKVKEGDRARLQAFEGVVIAKRNRGVNSAFTVRKISNGVGVERTFQTYSPQIDSMAVKRRGDVRKAKLYYLRDLSGKAARIKEKLS

SEQ ID NO: 69688 - protein, 298 aa, Pseudomonas syringae
MAAIDHPLIDRFLDALWLEKGLSDNTRDSYRSDLALFNGWLQERNVDLPGAGREVILDHLAWRVENAYKPRSTARFLSGARGFYRYLLREKLISVDPTLQIDMPQLGKPLPKSLSEADVEALLAAPDLSEPIGERDRAMLEVLYACGLRVTELISLTLEQVNLRQGVLRVMGKGSKERLVPMGEEAIVWVERYMRGARDELLGGKPSDVLFPSTRGDQMTRQTFWHRIKHQATVAGIGKSLSPHTLRHAFATHLLNHGADLRVVQMLLGHSDLSTTQIYTHVARARLQEMHAKHHPRG

SEQ ID NO: 69689 - protein, 57 aa, Pseudomonas syringae
MLVSGLKRKGETLDVSGKPPLTLRLGFARGAQVSYNGQAVDVAPFTSGETARLKLGQ

SEQ ID NO: 69690 - protein, 475 aa, Pseudomonas syringae
MLGACVEKPTTLERVKEDGVLRVITRNSPATYFQDRNGETGFEYELVKRFADDLGVELKIETADNLDDLFDQMNKPGGPVLGAAGLIETSKRKQQARFSHSYLEVTPQVVYRNGQSRPTDPGDLVGKRIVVLKGSAHAEQLAALKAQTPAIEYEESDAVEVVDLLRMVDEGQIDLTLVDSNELAMNQVYFPNVRVAFDLGEAREQRWAVAPGEDNSLLNEINAYLDKVEKNGTLQRLKDRYYGHVDVLGYVGAYTFAQHLQERLPKYEKHFQTSAKKEQVDWRLLAAIGYQESMWQPAVTSKTGVRGLMMLTQNTAQAMGVTNRLDARQSIQGGAKYFAYVKDQLDDKIQEPDRTWLALASYNIGGGHLEDARKLAENEGLNPNKWLDVKKMLPRLAQKKWYSKTRYGYARGGEPVHFVANIRRYYDILTWVTQPQLEGSQVADGNLHVPGVDKTQPPAPTAPVVPASSPEKPAL

SEQ ID NO: 69691 - protein, 369 aa, Pseudomonas syringae
MHGESPIKRRESRKIWVGSVPVGGDAPIAVQSMTNSDTNDVAATVAQINRLEAAGVDIVRISVPDMDAAEAFGRIKQLVKVPLVADIHFDYRIALRVAELGVDCLRINPGNIGREDRVRAVVDAARDRGIPIRIGVNAGSLEKDLQKKYGEPTPEALVESALRHVEHLERLNFKDFKVSVKASDVFMAVAAYRLLAKQIVQPLHLGITEAGGLRSGTVKSAVGLGMLLAEGIGDTIRISLAADPVEEVKVGYDILKSLRLRSRGINFIACPSCSRQNFDVVKTMNELEGRLEDLLVPLDVAVIGCVVNGPGEAKEAHIGLTGGTPNLIYIDGKPAQKLTNDNLVDELERLIREKAAEKTAADASVIVRG

SEQ ID NO: 69692 - protein, 1298 aa, Pseudomonas syringae
MLILRGAPALSAFRHSKLLEQLKQKVSAVSGLYAEFAHFADVNDVLTGEEQQVLDRLLKYGPSVPVQEPAGRLFLVLPRFGTISPWSSKASDIARNCGLTKIQRIERGIAFYVEGQFSDADAQAIADSLHDRMTQLVLGDHAQAAGLFSHAEPKPLTAVDILGGGRAALEKANVELGLALAEDEIDYLITSFNGLGRNPHDIELMMFAQANSEHCRHKIFNASWDIDGQSQEKSLFGMIKNTYEMHSEGVLSAYKDNASVIVGSVAGRFFPDPDTRQYGAVQEPVHILMKVETHNHPTAIAPFPGAATGSGGEIRDEGATGRGAKPKAGLTGFTVSNLQIPGFVQPWEVPYGKPERIVTALDIMIEGPLGGAAFNNEFGRPALTGYFRTFEQSITTPHGDEVRGYHKPIMLAGGMGNIREDHVQKAEITVGSKLIVLGGPAMLIGLGGGAASSMATGTSSADLDFASVQRENPEMERRCQEVIDRCWQLGDRNPISFIHDVGAGGLSNAFPELVNDGDRGGRFELRNVPNDEPGMAPLEIWSNESQERYVLAVGVADYERFKAICERERCPFAVVGEATAEPQLTVTDSHFGNSPVDMPLEVLLGKAPRMHRSVAREAEIGDDFDPSTLDIEESVQRVLRHPAVASKSFLITIGDRSITGLVARDQMVGPWQVPVADCAVTATSFDVNTGEAMAMGERTPLALLDAPASGRMAIGETLTNIAASRIEKLSDIKLSANWMSAAGHPGEDARLYDTVKAVGMELCPELGITIPVGKDSMSMKTRWSDEGTEKSVTSPLSLIVTGFAPVVDIRKTLTPELRMDKGITDLILIDLGRGQNRMGASILAQTHGKLGRVAPDVDDAEDLKAFFAVIQGLNSDGHILSYHDRSDGGLLVSTLEMAFAGHCGLNLHLDGLADNVSELSAILFNEELGAVIQVRQDATPLVLAQFSAAGLEDCVAVIGQPINNDEVSISFLGEPVFSGQRRLLQRQWAETSYQIQRLRDNAECADQEFDALLEEDNPGLTVKLGFDVNEDIAAPYIKTGVRPQVAVLREQGVNGQVEMAAAFDRAGFNAIDVHMSDILAGRVDLNDFKGMVACGGFSYGDVLGAGEGWAKSALFNSRARDAFQGFFERSDSFTLGVCNGCQMLSNLHELIPGSEFWPHFVRNRSEQFEARVAMVQVQESASIFLQGMAGSRMPIAIAHGEGHAEFRNDDALLEADVSGTVALRFVDNHGKVTESYPANPNGSPRGIGGMTTLDGRVTIMMPHPERVFRAVQNSWRPEDWNEDAAWMRMFRNARAWVN

SEQ ID NO: 69693 - protein, 429 aa, Pseudomonas syringae
MSKSLQAIRGMNDILPEQTPLWRHFEGTVSRLLDNYGYRQIRMPVVEFTDLFKRSIGEVTDIVEKEMYTFADRNGDSLTLRPEGTAACVRAVLEHGITGGGQVQKLWYIGPMFRHERPQKGRYRQFHQIGVEVFNLDGPDIDAELIVMTWRLWGMLGIRNAVKLELNSLGTSEARARYRDALVEFLSAHLDQLDEDSQRRLKTNPLRVLDTKHPETQAVLVDAPKLADYLDDESRIHFEGLKARLDAAGIPYVINPKLVRGLDYYSKTVFEWVTDQLGAQGTVCAGGRYDGLVEQMGGKPTAGVGFAMGIERLVLLLETLEQVPEEIARQVDVYLCAFGEAAELAALALTEQVRDRLPNLRLQVNAGAGSFKSQFKKADKSGALYALILGEEELAAKIIGVKPLRGQGEQQNIAWDALSEHLASCVVQG

SEQ ID NO: 69694 - protein, 469 aa, Pseudomonas syringae
MRYISTRGQAPALNFEDVLLTGLASDGGLYVPENLPRFTQEEIASWAGLPYHELAFKVMRPFVAGSIPDADFKKILEETYGVFAHSSVAPLRQLNGNEWVLELFHGPTLAFKDFALQLLGRLLDYVLAKRGERVVIIGATSGDTGSAAIEGCRRCDNVDIFILHPNNRVSDVQRRQMTTIFGDNIHNIAVEGNFDDCQEMVKDSFADQSFLKGTRLVAVNSINWARIMAQIVYYFHASLQLGGPARSVSFSVPTGNFGDIFAGYLARNMGLPVNQLIVATNRNDILHRFMSGNQYVKETLHATLSPSMDIMVSSNFERLLFDMHGRNGSAIADLMSNFRQGGGFSVEEERWTETRKLFDSLAVSDEDTCKTIAEVFASTGELLDPHTAIGVKAARECRRSLDTPMVILGTAHPVKFAESVEKAGVGKALELPAHLSDLFERDERCTVLPNDLKAIQAFVSQHGNRGKPL

SEQ ID NO: 69695 - protein, 355 aa, Pseudomonas syringae
MPPAELTDFKEEVVLHKQWSRSIGDGQGKTYNMMVPAIDGDRIYAADVTGEVFSLDRLTGDVIWKKDLDLPVSGAVGVGYGLVMIGTLKGEVVAMDASTGEEKWRARVTSEVLAPPATNGSVVVVQTQDDRVVGFDASTGSQLWIYESTPAVLTLRGTGAPLATNRLAVAGLSTGKVVALDISNGVPIWEQRVAIPKGRSELDRVVDIDGGLLLSGGTLYVATYQGRVAGLELESGRVLWQRDASSYSGVAQGFGSVYATLASGTVEGIDERSSSALWSNESLARRQLGAPEVYSSYVAVGDMEGYLHLLSQVDGRFVGRERIDSDGLRARPLVVGDMIYVYGNSGKLEALSIKQ

SEQ ID NO: 69696 - protein, 493 aa, Pseudomonas syringae
MESLMVPVIALVGRPNVGKSTMFNRLTRTRDAIVGDLSGLTRDRQYGEAKWQGRSYILIDTGGISGDEHGMDEKMAEQSLLAIEEADVVLFLVDARAGYTAADQMIGEHLRKRNKRSYVVANKIDNIDENLARAEFSPMGLGDAIPVAGAHGRGISQMLEIALREFPKDEDELEEGEVEEVAEGQEAKRIPGPSEKDGIKIAIIGRPNVGKSTLVNRMLGEDRVIVYDEPGTTRDSIYIPFERNEEKYTLIDTAGVRKRGKIHEEVEKFSVVKTLQAIKDANVVIFVMDAREGVVDHDLNLLGFALEAGRALVIALNKWDGMTPGERDFVKIELERRLFFVDFADIHFISALHGTGVGNLYQSVQNSFKSAVTRWPTSRLTQILEDAVSEHAPPMVGSRRIKLRYAHLGGANPPLIVIHGNQVEKVPKSYVRYLENTYRRVLKLVGTPIRIEFKGGENPYEGNKNTLTDRQVNKKRRMMSHHKKADKKRRDKR

SEQ ID NO: 69697 - protein, 198 aa, Pseudomonas syringae
MLDELLRRVVSHTPETLDSDRQFPEAAVLVPVTRSEQPELILTLRASGLSTHGGEVAFPGGRRDPGDPDLIFTALREADEEIGLPPGLVEVIGPLSPLISKHGIKVTPYVGVIPDFVEYRPNDGEIAAVFSVPLEFFRQDTREHTHRIDYEGRSWYVPSYRYGEYKIWGLTAIMIVELVNVLYDTRISLHHPPERSTN

SEQ ID NO: 69698 - protein, 176 aa, Pseudomonas syringae
MVDLCRSCRRLQLHTVLVTDRTCSVTLASSFSLIRENLMRAYKNLTAKIGGFLLALTIIGTSLPAFAVNDCDLDNDNSTGATCGGNDKDLDNDNVTDAAFGGNDKDMDNDHHTDAAFGGNDKDLDNDHHTDAAFGGNDKDLDNDNKTDAAFGGNDRDLDNDNNTDNYNGTPSAAKK

SEQ ID NO: 69699 - protein, 354 aa, Pseudomonas syringae
MRVADFTFELPDSLIARHPLAERRSSRLLTLDGPTGALAHRQFTDLLEHLRSGDLMVFNNTRVIPARLFGQKASGGKLEILVERVLDSHRVLAHVRASKSPKPGSSILIDGGGEAEMVARHDALFELRFAEEVLPLLDRVGHMPLPPYIDRPDEGADRERYQTVYAQRAGAVAAPTAGLHFDQPLMEAIAAKGVETAFVTLHVGAGTFQPVRVEQIEDHHMHSEWLEVSQDVVDAVAACRARGGRVIAVGTTSVRSLESAARDGQLKPFSGDTDIFIYPGRPFHVVDALVTNFHLPESTLLMLVSAFAGYPETMAAYAAAIEHGYRFFSYGDAMFITRNPAPTAPQESAPEDHA

SEQ ID NO: 69700 - protein, 371 aa, Pseudomonas syringae
MSFELLATDGKARRGRLTFPRGVVETPAFMPVGTYGTVKGMLPRDIEATGAQMILGNTFHLWLRPGTEVIKGHGDLHDFMQWKGPILTDSGGFQVFSLGAMRKIKEEGVTFASPVDGAKVFMGPEESMQVQRDLGSDVVMIFDECTPYPADEDVARVSMELSLRWAKRSKVAHGENTAALFGIVQGGMHENLRKRSLEGLDEIGFDGLAIGGLSVGEPKHEMIKVLDYLPGLMPADKPRYLMGVGKPEDLVEGVRRGVDMFDCVMPTRNARNGHLFIDTGVLKIRNAFHRHDNTPLDPTCDCYTCKNFSRAYLHHLDKCGEMLGSMLNTIHNLRHYQLLMAGLREAIQQGTLAAFVDAFYAKRGLPTPPLG

SEQ ID NO: 69701 - protein, 303 aa, Pseudomonas syringae
MIKQRTLKNIIRATGVGLHSGEKVYLTLKPAPVNTGIVFCRADLDPVVQIPARAENVGDTTLSTTLVNGDVKVDTVEHLLSAMAGLGIDNAYVELSASEVPIMDGSAGPFVFLIQSAGLEEQDAPKKFIRILREVTVEEGGKRATFVPFEGFKVSFEIDFDHPVFRDRTQSASVDFSSTSFVKEVSRARTFGFMSDIEYLRKHNLALGGSVENAIVVDKDGVLNEDGLRYEDEFVKHKILDAIGDLYLLGNSLIGEFRGFKSGHALNNRLLRALIEQTDAWEVVTFEDASTAPISYMRPVAAV

SEQ ID NO: 69702 - protein, 395 aa, Pseudomonas syringae
MFELVDNVPQSPVIKVIGVGGGGGNAVNHMVKSNIEGVEFICANTDAQALKNIGARTILQLGTGVTKGLGAGANPEVGRQAALEDRERIAEVLQGTNMVFITTGMGGGTGTGAAPIIAEVAKEMGILTVAVVTRPFPFEGRKRMQIADEGIRMLSESVDSLITIPNEKLLTILGKDASLLSAFAKADDVLAGAVRGISDIIKRPGMINVDFADVRTVMSEMGMAMMGTGCASGPNRAREATEAAIRNPLLEDVNLQGARGILVNITAGPDLSLGEYSDVGSIIEAFASEHAMVKVGTVIDPDMRDELHVTVVATGLGAKIEKPVKVIDNTLQTTQQAPAQQAARQEAPSVNYRDLDRPTVMRNQAHAGATAAAKMNPNDDLDYLDIPAFLRRQAD

SEQ ID NO: 69703 - protein, 205 aa, Pseudomonas syringae
MGVTNRLACYSDPADHYSHRVRIVLAEKGVSAEIIEVVAGRHPPQLIEVNPYGSVPTLVDRDLALYESTVVMEYLDERYPHPPLLPVYPVTRANSRLLIHRIQRDWCGLVDLILDTRSKEPARVQARKELRESLTGVSPLFAEKAFFMSDELSLVDCCLLPILWRLPILGIELPRPAKPLLDYMERQFAREAFQASLSAAEREMR

SEQ ID NO: 69704 - protein, 410 aa, Pseudomonas syringae
MIVGLDIGTSKVVALVGEVAADGSLEIVGIGTHPSRGLKKGVVVNIESTVQSIQRAIEEAQLMAGCRIHSAFVGVAGSHIRSLNSHGIVAIRDREVSAADLERVLDAAQAVAIPADQRVLHTLPQDYVIDNQEGVREPLGMSGVRLEAKVHVVTCAVNAAQNIEKCVRRCGLEVDDIILEQLASAYSVLTDDEKELGVCLVDIGGGTTDIAIFTEGAIRHTAVIPIAGDQVTNDIAMALRTPTQYAEEIKIRYACALAKLAGAGETIKVPSVGDRPPRELSRQALAEVVEPRYDELFTLIQAELRRSGYEDLIPAGIVLTGGTAKMEGAVELAEEIFHMPVRLGVPHSVKGLADVVRNPIYSTGVGLLLYGLQKQSDGISLSGIVGNSSYSDETKAPVLERIKRWVQGNF

SEQ ID NO: 69705 - protein, 142 aa, Pseudomonas syringae
  MISC_FEATURE (83)..(83): X=any amino acid
MKTFTAKPETVKRDWFVVDAAGQTLGRLATEIASRLRGKHKPEYTPHVDTGDYIVVINAEQIRVTGAKTTDKIYYSHSGFPGXIKSINFEKLIAKAPERVIETAVKGMLPKNPLGRDMYRKLKVYAGAVHPHTAQQPLELKF

SEQ ID NO: 69706 - protein, 289 aa, Pseudomonas syringae
MYGPSARPQPPAPGRNKPVPRGASRMVAKEPLSARLPKANFSFLKRLFWPVLLVVLGFGTYEGAQRLLPYADRPIARINVQGDLSYISQQAVQQRIAPYVASSFFKIDLAAMRTELEQMPWIAHAEVRRVWPDQVVIRLEEQLPVARWGDEALLNNQGQAFTPRELSNYEHLPQLFGPQRAQQQVMQQYQVLSQMLRPMGFSIVRLELRERGSWFLTTGAGSAGPGIELLLGRDHLVEKMRRFIAIYDKTLKEQITNIARVDLRYSNGLAVGWREQAAATTDKPAVAKN

SEQ ID NO: 69707 - protein, 479 aa, Pseudomonas syringae
MPQPEMRRIRRIHFVGIGGVGMCGIAEVLLNLGYEVSGSDLKGSAVTERLESFGAQIFVGHRAENTVGADVLVVSSAVNTSNPEVATALERRIPVVPRAEMLAELMRYRHGIAVAGTHGKTTTTSLIASVFAAGGLDPTFVIGGRLNAAGTNAQLGTSRYLIAEADESDASFLHLQPLVAVVTNIDADHMATYGGDFNKLKKTFVEFLHNLPFYGLAVMCIDDPVVRDILPLVKRPTMTYGFSEDSDVRAINVRQDGMLTFFTVLRRDREPLDVSVNMPGNHNVLNSLATIAIATDEGVSDEAIVQGLSGFQGVGRRFQVYGELPVEGGHVMLVDDYGHHPREVAAVISAVRGGWPDRRLVMVYQPHRFSRTRDLYDDFVQVLAEANVLLLMEVYPAGEEPVPGADSRNLCHSIRQRGQLDPIYIERGVELAPLVKPLLRAGDILLCQGAGDIAGLAPRLLNSPLFVGAKVASTEGKLK

SEQ ID NO: 69708 - protein, 449 aa, Pseudomonas syringae
MTTRILTGITTTGTPHLGNYAGAIRPAIVASRQSDVDSFYFLADYHALIKCDDPLRIQRSRLEIAATWLAAGLDVDRVTFYRQSDIPEIPELTWLLTCVAAKGLLNRAHAYKASVDKNVESCEDPDAGITMGLYSYPVLMAADILMFNAHQVPVGRDQIQHVEMARDIGQRFNHLFGKGREFFVMPEALIEESVATLPGLDGRKMSKSYDNTIPLFSSAKDMKSAISRIVTDSLAPGEAKDPDNSHLFTLYQAFSTPEQCAQFRSELLQGLGWGEAKTRMFTLLDEQLGEAREQYLSLIERPADLEDILLAGAQKARRVATPFLEELREAVGLRSFRTAVQNADTGKKKTTKGARFVSFREDDGSFRFRLLAADGEQLLLSRTFADGKAAGIVSKQLQQGGELDLRSEADRFTLWLNGECVADSPVFADATARDNAVETLKLALAPQQD

SEQ ID NO: 69709 - protein, 356 aa, Pseudomonas syringae
MDANVLIMAGGTGGHVFPALACAREFQARGYKVHWLGTPRGIENELIPQAGLPLHLINVTGLRGKGRLSLLKAPFMLLKALMQARKVVRQVKPVCVVGFGGYVTGPGGLAARLAGVPLIIHEQNAVAGTANRSLASFASRVCEAFPNTFAASAKRRTTGNPVRVELFLETPRQALAGRKARLLVLGGSLGAEPLNKLLPDALAQLPQDIQPEVFHQSGKNHDAVTAERYRNVGVEAQVAPFIQNMAQAYSWADLVVCRAGALTISELAAAGLPSLLIPLPHAIDDHQSRNADYLAREGAAFVMPQATTGAAEMAARLKEVLMQPEQLNSMARTARSLAKPDATNTVVNVCVEVAHG

SEQ ID NO: 69710 - protein, 147 aa, Pseudomonas syringae
MEHSLLVWLLPTLALVAGVVIGFLVARLLPNTVPNSTQRQLDDIQERFDTYQNEVVTHFNSTANLVQKLSQSYQDVQEHLAEGANRLALDDLTRQRLLAALHPEANQAHRDHRDRLTPPRDTETPKDYAPKSPNTPGMLDEHYGLKK

SEQ ID NO: 69711 - protein, 404 aa, Pseudomonas syringae
MIFGVIKPYPSPLISGRGIDLDFPMLVGCLALLGLGLVMITSASSEVAAVQSGNTLYMMTRHLVYLLIGLGACGVTMMIPVATWQRLGWLMLLGAFGLLLLVLVPGIGREVNGSMRWIGFGAFNVQPSEIAKVFVVIFLAGYLIRQQQEVRESWMGFFKPFIVLLPMAGLLLMEPDFGATVVMMGAAAAMLFLGGVGLFRFSLMVVLAVASVVVLVQAQPYRMARLTNFTDPWADQFGSGYQLTQALIAFGRGEWIGVGLGNSVQKQFYLPEAHTDFVFSVLAEELGVVGSLITVALFLFVAIRGMYIGMWAERAKQFFGAYVAYGLSFLWIGQFLINIGVNVGLLPTKGLTLPFLSYGGSSLVICCASLGLLLRIEWESRNNMGSEEAEFKESDFAEETPHGR

SEQ ID NO: 69712 - protein, 394 aa, Pseudomonas syringae
MEVRCGELDVDFLCRADELYVSPGLALATPALQQAHARGAKLSGDIELFARYAKAPVIAITGSNAKSTVTTLVGEMAAAAGKRVAVGGNLGTPALDLLSDDVELYVMELSSFQLETTDQLNAEVATVLNISEDHMDRYSGLPAYHLAKHRIFRGARQVVVNRQDALSRPLIGEGLPCWTFGLNKPDFHGFGLREENGEKFLAFQFENLMPVSELKVRGAHNQANALAALALGHAVGLPFDAMLSSLREFTGLEHRCQWLRERNGVDYYNDSKATNVGAALAAIEGLGSDIGGKLVLIAGGDGKGADFSGLRAPVAKYCRAAVLLGRDAELIAQALGDAVPLIRVDTVQAAAERSAELAQRGDAVLLSPACASLDMFKNYEERGRVFAQAVECLS

SEQ ID NO: 69713 - protein, 360 aa, Pseudomonas syringae
MLLLLAEFLQQFYKGFAVFQYLSLRGILGVLTALTLSLCLGPWMIRTLQMRQIGQSVRNDGPQSHLSKSGTPTMGGALILSSIGISTLLWADLSNRYVWVVLLVTFLFGAIGWVDDYRKVIEKNSRGLPSRWKYFWQSVFGLCAAIFLYTTAPSATETTLIVPMLKDVRIPLGIGFIVLTYFVIVGSSNAVNLTDGLDGLAIMPTVMVGGALGIFCYLSGNVKFAEYLLIPYVPGAGELIVFSGALIGAGLGFLWFNTYPAQVFMGDVGALALGAALGTMAVIVRQEMVLFIMGGVFVMETLSVVIQVASFKLTGRRVFRMAPIHHHFELKGWPEPRVIVRFWIITVILVLIGLATLKLR

SEQ ID NO: 69714 - protein, 452 aa, Pseudomonas syringae
MTFSELTVPLDARLVGGDCSFDGVSTDSRGIAPGQLFVALTGPRFDGHEYLDQVAAKGAVGALVEHEVEGAALPQLVVLDTRKALAQLGAMNRNGFVDRPVAAVTGSSGKTTVKEMLASILRTRGPVLATRGNLNNELGVPLTLLELAPEYTSAVIELGASRVGEIAYTVSLTKPHVVIITNAGTAHVGEFGGPERIVEAKGEILEGVEASGTAVLNLEDKAFPIWRKRAGHRNILTFALADAAADFHAGELSRDARGCPSFTMASPLGSAQVQLNLLGTHNVTNALAAAAAACALGVSLEGIVAGLNNVQPVKGRAVAQIASNGVRVIDDTYNANPGSINAAVDILTGFTGRTVLVLGDIGELGEWAEQGHHDVGAYAAGKVSALYAVGPLMTHAVSAFGEHAYHFASQAELIAALGAEQDPNTTLLIKGSRSAAMENVVAALCGSSLEKH

SEQ ID NO: 69715 - protein, 576 aa, Pseudomonas syringae
MMKLEGALYPWRFRVVVGLLVSLVLAICWRIVDLQVIDHTFLKEQGDARSLRHIPIPAHRGLITDRNGEPLAVSTPVTTLWANPREMQQDKSKWPMLAAATGQDLKALTDRLESQATKEFIYLVRGMTPEQGQAALDLKVPGVYGIEEFRRFYPAGDVTAHMVGFTDLDDHGREGVELAYDDWLAGVPGKRQVIKDRRGRLIKDVQVTKNAKAGKTLALSIDLRLQYLATRELRNAIVENEAKAGSMVIMDVKTGEVLAMVNQPTYNPNNRRTMVPAAMRNRAIIDVFEPGSTMKPISMTAALDSGRWKPTDKVEVYPGTLQIGKYTIRDVTKTEGPVLDLTGILINSSNVGMSKVAFDVGGEAIFRAMQRVGFGQYTGLGFPGERVGNLPNYREWRKAETATLSYGYGLSVTALQLVHAYGALANNGRIVPLTILKTDKEPESTQAIPEKTAKTLQGMLQQVIEDPRGVYRARVPSYHVGGKSGTARKTSIGTKGYAENSYRSLFAGFGPMSNPRYAIVVVIDEPSKGGYYGGLVSAPVFSKVMSGTLRLMNVTPDNLAPPEQVNVAPAAKGGRG

SEQ ID NO: 69716 - protein, 313 aa, Pseudomonas syringae
MNSGFTHITVLLEEAVEALAVRADGCYLDGTFGRGGHSRLILNHLGPDGRLLGFDKDPQAIATGQALAAEDGRFVIVQRSFAELGSQAQELGLAGKVSGILLDLGVSSPQLDDPERGFSFMNDGPLDMRMDPTRGVSAAEFIASAPAEEIARVFKEYGEERFAKRMANAVVQRREIQPFERTADLAEVLKVANPAWEKGKNPATRAFQGLRIHVNNELGDLEAGLEAAMESLEVGGRLVVISFHSLEDRIVKLFMRKLAKGEADNMPRNLPIQYKAFEPKIKIHGKAQFASDVETKANPRSRSAVMRVAEKLR

SEQ ID NO: 69717 - protein, 151 aa, Pseudomonas syringae
MFRGANAINLDAKGRLAMPSRYRDELDSRSAGQMIVTIDAVDPCLCLYPLSEWELIEAKLRDLATFREENRRLQRLLIGNAVDLELDGSGRFLVPPRLREYARLDKRVMLVGQLNKFQLWDEDAWNALADADLAAIQKPGAMPDELRDLIL

SEQ ID NO: 69718 - protein, 132 aa, Pseudomonas syringae
MVKEEPRTLIYYEAPHRILECLQDMELVFGADRHALLAREITKTFETLKGLPLGELRAFVEADSNQQRGECVVLVAGWTQPEDEDVIGAEARRILDLLLEEMPLKRAAALAAEITGVRKNLLYQVALEKQKG

SEQ ID NO: 69719 - protein, 678 aa, Pseudomonas syringae
MPLRQRLENLPVGQKLLAALLVLMTTVLLVANLTFIGAAYYISQEAMAPQALQTIGRLISSADLNERALYSPNEARALLKELKSYGPLRAAALYDNDGERLEQMQQGQSLELPRHFKDLDSWRLTEFRSTQVITVPKGDEPPGHLLLVASSELPPAFYTGTLTASLGILVFSVLLWLVVARQIRRLITEPIYQLEELSRQVTREENYALRAEPGNVDEIGSLAEAFNTMLSRIEAREQQLKRARDDSQEAYDQAQGLAEETRHTNRKLELEVQVRSKIEKKLTGFQNYLNSIIDSMPSAMIALDEQLYVTQWNQEATALSGTTLDEALNQPIFLAFEPMRSFLPQIKHTVERHSVTKIERVNWIKNDEARHYALTFYPLTGDAGRGVVIRIDDITQRISLEEMMVQSEKMLSVGGLAAGMAHEINNPLGAILHNVQNIRRRLSPELPKNIEQAEADGIDLAQVNLYLESRDVPKLLDGIQQAGARAAKIVSHMLNFSRLSSRQLSPSDLPALVDQAVEIASNDFDLTIGFDFKGQHIIRQFDPELGPVPCIANELEQVLLNLLKNAAQAIHQRPESEEPGRIILRTRLNPPWAEIQVEDNGIGMSESVRKRTFEPFFTTKEIGQGTGLGLSVSYFIITNNHKGQMEVQSSLGTGTCFTLRLPLVANQVNVQQQVISKS

SEQ ID NO: 69720 - protein, 200 aa, Pseudomonas syringae
MSLHLIIGDKRYSSWSLRPWLVLEMIGAPFTDQVIRLNQPDTRDNILQYSPTGKVPALQCEHGTIIDSLAICEYLVERFPDADLWPRDIAARAQARSACAQMHSGFVSLRSNMPMDLRRDQALEVISVDTQNDIDRIVALWAECHAAAVETGPFLFGKPSIADAFFAPVAIRLRGYRVQLPAEALAYVETLYQWPAFKRW

SEQ ID NO: 69721 - protein, 893 aa, Pseudomonas syringae
MLKTVQIVNAFEEQMVALSDEQLRAKTEEFKARIAKGETLDQLLPEAFAVAREAGKRVMGMRHFDVQLIGGMTLHEGQIAEMRTGEGKTLVGTLAVYLNALSGKGVHVVTVNDYLARRDANWMRPLYEFLGLTVGIVTPFQPPEEKRAAYAADITYGTNNEYGFDYLRDNMAFSMDDKFQRELNFAVIDEVDSILIDEARTPLIISGQAEDSSKLYTEINRLIPKLEQHIEEVEGEVTKPGHFTVDEKTRQVELNEAGHQFIEEMLTEVGLLAEGESLYSAHNLGLLTHVYAGLRAHKLFNRNVEYIVQDGQVLLVDEHTGRTMPGRRLSEGLHQAIEAKENLNIQAESQTLASTTFQNYFRLYNKLSGMTGTADTEAFEFHQIYTLAVMVIPPNKPLARKDFNDLVYLTAEEKYAAIVTDIKACLAENRPVLVGTATIETSEHMSRLLNNEGIEHKVLNAKFHEKEAEIIAQAGRPGALTIATNMAGRGTDILLGGNWEVEVANLEDPTPEQIAQIKADWQKRHQQVIEAGGLHVIASERHESRRIDNQLRGRAGRQGDTGSSRFYLSLEDSLMRIFASDRVKNFMKALGMQSGEAIEHRMVTNAIEKAQRKVEGRNFDIRKQLLEFDDVANEQRKVIYHMRNSLLAAENIGDTIADFREEVLNSLVSQHIPPQSLPEQWNVAGLEAALNTDFAVKMPIQQWLDEDDNLHEDSLREKIMAQLLVAYNEKEDQASAEALRSFEKQILLRVVDDLWKDHLSTMDHLRHGIHLRGYAQKNPKQEYKRESFTLFQELLDSIKRDTIRVLSHVQVRREDPEEEEARLRREAEELASRMQFEHAPAPGLDQPLADEEGGEVPVAVVSEPIRNDQKLGRNELCWCGSGKKFKHCHGQIN

SEQ ID NO: 69722 - protein, 618 aa, Pseudomonas syringae
MNPLHSLRAQAAGLLLASLACTVQAAPQHGVTLYDEQPKYPADFKHFDYVNPDAPKGGTFRQAGFGGFDSLNPFINKGVPADDIGLIYDTLARASLDEPFSEYGLVAGKIEKAPDNSWVRFYLRPEARFHDGHPIRAEDVEFSFKTLMEHGSPMYKGYYADVDQVVVEDPLRVLFKFKHKGSREMPLILGQLPVLPKHFWADRDFSKGNLDFPLGSGPYKVVDVKAGRSVRYERVKDYWGKDLPINKGFYNFDVLTTDYYRDNTVALEAGKAGQFDYWIETSAKNWATAYNTPAVRDGRLVKEELPNGNPTGMQGFVFNLRKPVFQDARVREALTLLLDFEWTNKQLFNGAYSRTKSYFDNSEMASSGLPSAEELKILEPLRGKIPDRVFTEAFQLPVTDGSGMIRPQQRRAFQLLQEAGWKIVDDKMVDTQGNPVKLEFLIAQTEFERILLPYKRNLSNLGIELVIRRADVSQYINRLRSRDYDMIVSSFPQSSSPGNEQRVYFDSSSADNPGSRNVIGLKDPAVDTLVNGLINADSRASLINYTKALDRVLLWGFYVAPNWHIKTWRVAYWNHIDHPKAKALSDIGLMTWWAKPDVKPVTATPSATDQAKPANAEQ

SEQ ID NO: 69723 - protein, 437 aa, Pseudomonas syringae
MSSVSNRKAYRAAIVHSIADPAEVAIEASYAYFADGLLLVEDGKIVALGHAADLLGSLGSDVELIEYQDALITPGFIDTHIHLPQTGMIGAYGEQLLDWLNTYTFPCESQFADPEHSAGVADIFIKELLRNGTTTALVFGSVHKESVEAFFSAAQALDLRMIAGKVMMDRNAPDYLVDTPESGYADSKALIERWHGKGRLSYAVTPRFAPTSSPEQLSLAGQLLTEYPGLYLQTHISENLQEIEWVKALFPERKHYLDVYDHFNLLSERSVFAHGVHLCDEQCARLAQTGSAIAFCPTSNLFLGSGLFNLPMAEKHKVNVGLGTDVGGGTSFSILQTLNEAYKVMQMQGARLSPLKSLYLATLGGARALRLEDKVGSLKPGNEADFLVLDYNATPLLSYRLKQAKSIEEILFVLMTIGDDRTVKHTWSGGRLVHERG

SEQ ID NO: 69724 - protein, 792 aa, Pseudomonas syringae
MSEHSSPLTQADMLALFQQDLSTGVGRSVKHDSADKHVSGEAVYIDDRLEFPNQLHVYARLSDRAHARIVSIDTAPCHAFEGVRIAITHQDIPGLKDIGPLLPGDPLLAIDKVEFVGQPVLAVAARDLDVARQAAMAAIIEYEDLEPVLDVVQALRQKHFVLDSHTHKRGDSATALQGATHRLQGNLHIGGQEHFYLETQISSVMPTEDGGMIVYCSTQNPTEIQKLVAEVLNVPMNRIVVDMRRMGGGFGGKETQAASPACLCAVIARLTGQPTKMRLQRFEDMQMTGKRHPFYIEYDVGFDDNGRLQGIQLDLAANCGYSPDLSASIVDRAMFHADNAYYLGEATINGHRCKTHTASNTAYRGFGGPQGMVAIEEVMDCIARFLGKDPLAVRKANYYGKTERNVTHYYQTVEHNLLEEMTADLEQSSQYAERREAIRGFNASSPILKKGLALTPVKFGISFTASFLNQAGALIHIYTDGSIHLNHGGTEMGQGLNTKVAQVVAEVFQVDIDRIQITATNTDKVPNTSPTAASSGTDLNGKAAQNAAEILKQRLVEFAARHYNVAETEVEFRNGHIRIGEIVLPFAELAQQAWMGQVSLSSTGYYKTPKIFYDRSQAHGRPFYYFAFGAACVEVIVDTLTGEYKTLRTDILHDVGASLNPAIDIGQVEGGYIQGAGWLTTEELVWNDKGKLMTSGPASYKIPAVADMPLDLRVKLVENRKNPEDTVFHSKAVGEPPFMLGIAAWCAIKDAVASLGDYRHQPNIDAPATPEKVLWGCEQMRQLHTAETHEYE

SEQ ID NO: 69725 - protein, 1162 aa, Pseudomonas syringae
MRLKCIKLAGFKSFVDPTTVNFPSNMAAVVGPNGCGKSNIIDAVRWVMGESSAKNLRGESMTDVIFNGSTSRKPVSQASIELVFDNSDGTLVGEYAAYAEISIRRKVTRDSQNSYYLNGTKCRRRDITDIFLGTGLGPRSYSIIEQGMISKLIEAKPEDLRNFIEEAAGISKYKERRRETENRIRRTHENLARLTDLREELERQLERLHRQAQAAEKYQEYKAEERQLKAQLSALRWQALNEQVGQREAVIGNQEVGFEALVADQRSADASIERLRDGHHDLSERFNLVQGRFYSVGGDIARVEQSIQHGQQRLRQLQDDLREAERARLETESHLGHDSTLLATLGEELEMLEPEQEMTSAAAEESAIALEDAESAMQGWQEQWDVFNQQSAEPQRQAQVQQSRIQQLEQSIERLAERQRRLAEERQLLTADPEDAAILELSEDLATRDMTLEELHMGEEQTVERLEQLREALQNASHAQQQAQGELQRLNGRLASLEALQQAALDPDTGTAEWLRDQQLAERPRLAEGLSVEAGWELAVETVLGADLQAVLVDDFDGLDLASFQQGDLRLLSASADTVRVPGSLLEKVESTVDLSAWLGQVMPVENLDEALARRTQLSAGQSLISRDGYWVGRHFLRVRRASEAQSGVLARGQELQRLGLERDEREATLASLEEQLLSLREQQSQQEDAREQLRRRVQDETRQQSELKAQLSAARVKVEQLTLRRTRLDEELAELGEQRSVEHEHLGESRLQLQDALDSMALDTEQREVLQAQRDALRERLDRIRQDARQHKDHSHQLAVRLGSIKAQYDSTRQALERLRMQSERLTEKREQLSLNLEEGEAPLEELRLKLEELLERRMVVDDEMRIAKNALEDADRELREAEKRRTQAEQQSQLLRGQLEQQRLEWQALSVRRTALQDQLHEDGYDLHGVLATLTSEASEQAAEQQLESIAGRIQRLGAINLAAIDEYQQQSGRKRYLDAQDADLVEALDTLENVIRKIDKETRNRFKDTFDQINSGIQALFPKVFGGGSAYLELTGEDLLDTGVTIMARPPGKKNSTIHLLSGGEKALTALALVFAIFKLNPAPFCMLDEVDAPLDDANVGRYARLVKEMSQTVQFIYITHNKIAMEMADQLMGVTMHEPGCSRLVAVDVEQAMALVDA

SEQ ID NO: 69726 - protein, 288 aa, Pseudomonas syringae
MEIGLREWLIVIGIIVIAGILFDGWRRMRGGKGKLKFRLDRSFSNLPDEEETTSAEVLGPPRVLDTHKEPQLDEHDLPSMSANPRDNKRGAGSEKRGDKKRKDEPQQGDLNLDLDGPSLFTARDDDFPDDKPAQRITEDKDLPPVEEVLVISVISRNEGGFKGPALLQNILESGLRFGEMDIFHRHESMAGNGEVLFSMANAVKPGVFDLDDIDHFSTRAVSFFLGLPGPRRPKQAFDVMVAAARKLAHELDGELKDDQRSVMTAQTIEHYRQRIVEFERRALTQRRG

SEQ ID NO: 69727 - protein, 632 aa, Pseudomonas syringae
MKAAETRILELRAELDQHNYRYHVLDEPSIPDAEYDRLFHELKALEAENPHLVTPDSPTQRVGSAALSAFTQVRHEMAMLSLGNAFEENDLREFDRRVTEGLDLPAGDLFGEGGKVQYSCEPKLDGLAVSLLYRDGALVRGATRGDGTTGEDISVNVRTVRNIPLKLQGKGWPELLEVRGEVFMSKAGFERLNASQLEVGGKTFANPRNAAAGSLRQLDSKITANRPLEFCCYGLGQTSAEIADTHIGVLETLKKWGMPVSRELKLADGVEECLAYYRDIGERRLSLTYEIDGVVFKVNNLAAQRELGFRAREPRWAIAHKFPAMEELTELLDVEFQVGRTGAVTPVARLKPVKVAGVMVANATLHNMDEVARLGLMIGDTVIIRRAGDVIPQVVQVVVERRPETAKPVEVPQSCPVCGSHVERTQLIKRSKGKETVTEGAVYRCVGRLACGAQLKQAIIHYVSRRAMDIEGLGDKTIEQLVDEKLIGSPADLYKLKYEQIIDLEGFAEISSNKLLKAIADSRQPTLARFIYALGIPDVGEETAKVLARSLASLDRVKQALPEVLTYLPDVGLEVAYEIHSFFEDEHNRNVIDALLGECGLQLQDQGELGAEFAASTTLEGPDRPSCTHSHR

SEQ ID NO: 69728 - protein, 798 aa, Pseudomonas syringae
MKTTIELPLLPLRDVVVYPHMVIPLFVGREKSIEALEAAMTGDKQILLLAQRNPADDDPDEKALYSVGTIATVLQLLKLPDGTVKVLVEGEQRGSVERFIEVDGHYRADVALIDEVDAPDRESEVFVRSLLAQFEQYVQLGKKVPAEVLSSLNSIDEPGRLVDTMAAHMALKIEQKQEILEIIDLSARVEHVLALLDAEIDLLQVEKRIRGRVKKQMERSQREYYLNEQMKAIQKELGDGDEGHNEIEELKKRIDAAGLPKDALAKATAELNKLKQMSPMSAEATVVRTYIDWLVQVPWKAQSKVRLDLARAEAILDADHYGLDEVKERILEYLAVQKRVKKIRGPVLCLVGPPGVGKTSLAESIANATNRKFVRMALGGVRDEAEIRGHRRTYIGSMPGRLIQKMTKVGVRNPLFLLDEIDKMGSDMRGDPASALLEVLDPEQNHNFNDHYLEVDYDLSDVMFLCTSNSMNIPPALLDRMEVIRLPGYTEDEKINIAVKYLSPKQIQANGLKKGEVQFDEAAIRDIIRYYTREAGVRGLERQIAKVCRKAVKEHTMEKRFSVQVTAEMLEHFLGVRKFRYGLAEQQDQIGQVTGLAWTQVGGELLTIEAAVVSGKGQLIKTGSLGDVMVESITAAQTVVRSRARSLGIPADFHEKHDTHIHMPEGATPKDGPSAGVGMCTALVSALTQIPVRADVAMTGEITLRGQVLAIGGLKEKLLAAHRGGIKTVIIPEENVRDLKEIPDNIKQDLQIKPVKWIDEVLQIALQYAPEPLPDVATDLVAKDEKRESDSKDRISTH

SEQ ID NO: 69729 - protein, 264 aa, Pseudomonas syringae
MGFLAGKRVLIVGVASKLSIASGIAAAMHREGAELAFTYQNDKLKGRVEEFAAGWGSGPELCFPCDVASDEEINKVFEELSKKWDGLDVIVHSVGFAPGDQLDGDFTNATTREGFRIAHDISAYSFVALAKAGREMMKGRNGSLLTLSYLGAERTMPNYNVMGMAKASLEAGVRYLAGSLGPEGTRVNAVSAGPIRTLAASGIKNFRKMLAANEAQTPLRRNVTIDEVGNAGAFLCSDLASGISGEIMYVDGGFNTTAMGSMDE

SEQ ID NO: 69730 - protein, 1044 aa, Pseudomonas syringae
MSKFFIDRPIFAWVIALVIMLVGALSISSLPINQYPSIAPPAIAIQVTYPGASAQTVQDTVVQVIEQQLNGIDNLRYVSSESNSDGSMTITATFNQGTNPDTAQVQVQNKLNLATPLLPQEVQQQGIRVTKAVKNFLMVIGLVSEDGSMGKEDLANYIVSNMQDPISRTSGVGDFQVFGSQYAMRIWLDPAKLNNFQLTPVDVRDAITAQNVQVSSGQLGGLPSISGQQLNATIIGKTRLQTAEQFGNIFLKVNTDGSQVRLKDVATVGLGAENYSTDSQFDGKPASGLAIKLATGANALDTAKAIRATVSSLEPFFPPGMKVVYPYDTTPVVSESIKGVVHTLIEAIVLVFLVMYLFLQNFRATVITTLTVPVVLLGTFGILAGFGFTINTLTMFGMVLAIGLLVDDAIVVVENVERVMEEEKLSPRDATIKSMTQIQGALVGIALVLSAVLLPMAFFGGSTGVIYKQFSITIVSAMALSVVVALIFTPALCATMLKPIDEKTHGQPKRGFFGWFNRTFDRSVVSYERGVGNMLKHKWLSYLGYIVIVAGMVFMFMRIPAAFLPEEDQGVIFAQIQTPAGSSTERTQEVIDNMREYLLTKESGAVKSVFSVNGFNFAGRGQSSAIAFVMLKPWEERDAENSVFKLAERAQGYFFSLRDAMVFAIVPPSVLELGNATGFDVYLQDQGGVGHAKLMEARNQFLGMAAQSKILAGVRPNGLNDEPQYQLLIDDERASALGITLSDINNTLSIALGGSYVNDFIDRGRVKKVYIQGDAGARMTPEDLKKWYVRNSAGEMVPFSAFASGKWTYGSPKLSRYNGVAAEEILGTPAPGYSSGDAMAEVEALAKKLPQGIGISWTGLSYEERLSGSQAPALYALSLLVVFLCLAALYESWSIPIAVILVVPLGVIGALMATSLRGLSNDVFFQVGLLVTVGLAAKNAILIVEFAKELHEQGKSLTDAAIEACRMRLRPIIMTSMAFILGVVPLAISSGAGSGSQHSIGTGVIGGMITAVVLAIFWVPLFFVSISGLFKSKQKHISHDEAGQ

SEQ ID NO: 69731 - protein, 207 aa, Pseudomonas syringae
MSDAIHSYEPSKGHGLPHDPFNAIVGPRPIGWISSQDANGKLNLAPYSFFNAFNYVPPIIGFCSVGRKDSLNNIEQTGEFVWNLATRSLAEAMNQSCAPVSPDVSEFELANLTPLKSQIVSVPRVLETPVSFECKVTQIIQLQRADKELVPSWLILGEVVAVHIEKSLLKDGVYDTAAAEPILRGGGPADYFQLGPEALFKMFRPGA

SEQ ID NO: 69732 - protein, 490 aa, Pseudomonas syringae
MIDLFSGLDAWVLVSLLLALAFVLTFEFINGFHDTANAVATVIYTKAMPPHLAVFFSGVFNFLGVLLGGVGVAYAIVHLLPVELLINVNTGHGLAMVFSLLAAAITWNLGTWYFGIPASSSHTLIGSILGVGLANALINGIPLADGVNWQKAIDIGASLVFSPLAGFIVAGLVLLALKWWRPLSKMHKTPDQRRKLDDKKHPPFWNRLVLVISAMAVSFVHGSNDGQKGIGLIMLVLIGIVPSQFVLDLTSTTYQIERTRDATQHLSQFYQRNSSTLGEYLAMGKAEKGDLPSSSACNPKQTEPTIDALLDRLKGVSDYHSLAPESRIEVRRYLLCLDDTARKVGKLPDLSAREKSDLDKLRKDLTTTTEYAPFWVILAVALALGIGTMVGWKRVVLTIGEKIGKQGMTYAQGMSAQITTACAIGLANVFSLPVSTTHILSSGVAGTMVANKSGLQGGTVRTILLAWVLTLPATVALSAALFWLASKALS

SEQ ID NO: 69733 - protein, 361 aa, Pseudomonas syringae
MLAIRKYGFLKALIVTDAGLAKAGVASQVAGLLVEQGIDSVVYDGARPNPTIANVENGLALLRKRQCDFVISLGGGSPHDCAKGIALCASNGGHISDYEGVDRSAKPQLPLIAINTTAGTASEMTRFCIITDEARHVKMAIIDRNVTPLLSVNDPNMMVAMPKSLTAATGMDALTHAIEAYVSTAATPITDACALQAMSLIANNLREAVSNGTNITARENMAYAQFLAGMAFNNASLGYVHAMAHQLGGFYDLPHGVCNAVLLPHVQRFNASVSAARLTDVAHAMGASVRGLSPEEGAHAAIEAIRALSAAVEIPAGLTALGVKEEDFPVLAANALKDACGFTNPRPADLEQIQELFRQAL

SEQ ID NO: 69734 - protein, 237 aa, Pseudomonas syringae
MKSVSRLMLCMVMFLGGVFRADAQEPALVFPPMTGSVVDAAQMLDSQTTVRLARLLRAHEQATGERVVVVTQADLQGASLEEFGARLGDAWGLGLHGEDDSVLLMIDRDKRKVFMEVGAALQDRLSDAQSSLIIDMLMTPEFDDGRFAVGIERGARAVIAALGGQIPDYPEPTRQMAGYEEQASDDQVWLFAVVLTLIVLAIVVISIRRGAAVRPARDRTAERSGGRFGGGGASGNW

SEQ ID NO: 69735 - protein, 765 aa, Pseudomonas syringae
MNKLCLLGLLVGMASQSVMAQSAAATDNTTLQAKNAFIGKLMKQMTLDEKIGQLRLISISGEMPQPQILKEIAAGRIGGTFNSITRSENRPLQEAAVANSRLKIPMFFAYDVVHGHRTIFPISLGMAASWDMDAVALMGRVSAKEASADSIDMTFAPMVDISRDPRWGRSSEGFGEDTYLVSRISDVMVRSFQGKNVAANDSIMAAVKHFALYGAVEGGRDYNTVDMSMTRMYQDYLPPYKAGIDAGAGGIMVALNSINGVPSTSNKWLMQDLLRKDWGFKGVTISDHGAIKELIEHGVAKDYREAAKLAIKAGVDLSMNDVAYGEQLPGLVKDGEVSMKEIDSAVREVLGAKYDMGLFASPYGRIGVAADDPADTYSDDRLHRAEARDVARKTLVLLKNQNDTLPLKKQGTIAVIGGLAQSHLDMLGSWSAAGRPAQSVTVYEGLANAVGDKAKLLYARGANVSDNEHVLTYLNFIEKEVEIDPRPAQEMIDEAVKVAEQSDVIVAVVGESRGMSHESASRSSLNIPGKQRDLIKALKATGKPLVLVLMNGRPLVLVDEQEQADAMLETWFPGTEGGNAVADVLFGDYNPSGKLAMSFPRSIGQLPVYYAHLNTGRPYHEGKPGNYTSHYFEEPNGPLFPFGFGLSYTQFDVSDIKLSDANMARKGKLTASVTVKNTGKVAGATIVQLYLHDVAASISRPVKELKNFDKVMLEPGEEKVVTFTLGEDDLKFYNSELKYAAEPGEFKVMIGLDSQTVKEATFNLL

SEQ ID NO: 69736 - protein, 151 aa, Pseudomonas syringae
MFHVILFQPEIPPNTGNVIRLCANSGCTLHLIEPLGFELDDKRLRRAGLDYHEYATLQTHADLASCLEKIGNPRLFAFTTKGSRPFHDASFAPGDAFLFGPESRGLPADILDSLSSEHRLRLPMREGCRSLNLSNTVAVAVYEAWRQHGFA

SEQ ID NO: 69737 - protein, 510 aa, Pseudomonas syringae
MTEAKTLLSRMIMKLPTITGACCIAALLPFSIHAAATDLGEGLLSLAPSKVLLNADSSRDHWNGIGRIKSKGGSSCTATLIDTRSPDSTPDAPAYVVTSGHCISRQNGVIITDREVEGSIQFNFFTDSTARSYPLKRINWSSMQGVDLAVVELQPTLKSLIDDGIQPLALASEMPEQDREILWVGAPLNKDTGHLRMAACVHQPSEVIMEQPWVWRQTVRNQCRDVDTGASGSPLLTRDNNEVYAVLNLTNQASSDNATENFSDEIPGFPPMVADSNYGNPVTLLNKCFVDGTLSTDPAICDLFPTFSVDFETLGRQPAQLARVQLDAEGRNVYPSWDLRFLIDTPLYRYKKVDSAMQCEDPVGYSHTISSQDAAIDDPVDRQIGINWLCMIGVSSAEHLPTVGLMRNALTLAIELQPAGPTPEPQVKIGKNRFGASSVSWSYEHRLIDHYTVKMGPPDTTDCSEPEGFKTQLRDLTLRAKSLPQKICTYAHDINGQHSALREDIVPAAG

SEQ ID NO: 69738 - protein, 260 aa, Pseudomonas syringae
MRFLGSLLLALSITGAAHAAPVDHAEKTSKAYFTLIIDDLGQNPVRDSRTLALPGPVTLAIMPDTPHATEFAREAHRAGKTVILHMPMDPATGPYAWHPELPLPELESRLNAALLKVPYAAGINNHMGSRMTAEPVAMTWLMAELQRRHLFFVDSRTSAKTVAAAEAQRIGLASVSRDVFLDDERTAEAITRQLQTAIKLAQKHGSAVVIGHPYPVTLDVLERELPKLKAQGVEWIDLRSMISERGNQASAAHGKNGLYR

SEQ ID NO: 69739 - protein, 137 aa, Pseudomonas syringae
MVAHLLEFATTHYLITGAFVILLGLLIAYELSKGGASLSTRELTALVNSDQGVVIDVRSKKDFTAGHIVGSLNFPQDKVLTRTAELQKYKDKTLIIVDAMGQHAGSTARELLKTGFKAAKLSGGISSWRGDNLPLVK

SEQ ID NO: 69740 - protein, 83 aa, Pseudomonas syringae
MAQVIVYSSDYCPYCIRAKQLLQSKSVAFEEIRVDGKPQLRAEMTKKAGRTSVPQIWIGPTHVGGCDDLFALERAGKLDALLA

SEQ ID NO: 69741 - protein, 443 aa, Pseudomonas syringae
MLSIAGVIGAGLFVGSGHAIAEAGPAVLLAYAAAGTLVVLVMRMLAEMAVASPDTGSFSTYADRAIGHWAGFTIGWLYWWFWVLVIPLEANAAATILHAWFPDIAIWMFTLVITLLLTATNLFSVKNYGEFEFWFALIKVVAIIAFVVLGVAAIFGLLPTSSVSGVSHLFDTGGFLPNGMGAVLAAMLTTMFSFMGTEIVTIAAAESRNPGKQITKATNSVIWRIFLFYLVSIFIVVSLVPWNDPRLAEVGSYQTVLDAMGIPNAKLIVDLVVLVAVTSCLNSALYTASRMLFSLGKRGDAPALSKRTSKGGTPYWAVIMSTAAAFLTVFANYVAPAAVFDFLLASSGAIALLVYLVIAVSQLRMRQKRIAAGETIDFKMWLFPWLTWAAIAFIVAVLTIMLIQQEHRVEIIATGVLSLLVIGAGLIVSRRRKAGPVGAAALG

SEQ ID NO: 69742 - protein, 146 aa, Pseudomonas syringae
MGLISFIKEAGEKILDALTPDHANADDVLKKHISEVGLGNPNVQTEVSGGTVTVKGQVANQEEREKIVVTLGNIHGVDKVDDQMTVAGGETAESEYVEVKSGDTLSDISKRVYGDANQYQKIFEANKPMLKDVNKIYPGQKLRIPK

SEQ ID NO: 69743 - protein, 256 aa, Pseudomonas syringae
MRAIDLNSDLGESFGAWSMGDDAAMLDIVTSANVACGFHAGDPAGILRTLKAAAAKNVTIGAHVSYPDKVGFGRRNMDVASDELTADVIYQIGSLQGLAKAAGTSVRYVKPHGALYNTIAHDRRQAMAVIEAIRAIDPALVLVALAGSTLIELARSEGLQCIAEAFADRAYTPQGTLVSRREPGAVLHDPELVAQRMLRLVQSGSIEAIDGSLVRIEADSICVHGDSPAAVEMARELRRVLEQASTSLQPFAGKRS

SEQ ID NO: 69744 - protein, 1040 aa, Pseudomonas syringae
MTEDQLEQETLGWLAETGYSHVYGPTIAYDGESPERDNYRQVLLVERLRSAIVRLNPKVPLAAREDALKQVQELGLPVQLSANRLFHRLLVSGVPVQYQKDGETRGDFVRLIDWVEVKANDWLAINQFSIQGPKHTRRPDIILFVNGLPLVLLELKNPADVKADLGKAFDQIQTYKEQIPDLFQYNEILVISDGSEARMGSLSADVERFMNWRTIDGKDLDPLGQFNELETLVRGALAPPMLLDYLRYFVLFEDDGRLVKKIAGYHQFHAVRAAIGQVVSASRPGGTHKGGVVWHTQGSGKSITMTCFAARVMQDAAMENPTIVVITDRNDLDGQLFGVFSLSHDLLREQPFQVESRGDLRSKLTNRPSGGIVFATIQKFMPGADEDIFPILSDRSNIVVIADEAHRTQYGFGAELKVSEATADTASQTRYQVGYAQHLRDALPNATFVAFTGTPVSSEDRDTRSVFGEYIHIYDMQQATEDGATVAIYYESRLAKLSLKDSELPAIDDQFDELAEDEEDDQQSRLKSRWAALEKVVGAEPRIRNVAADLVKHSEERNQGLVSMGQMPGKAMIVAMSREICVHLYNEITALRPEWHDEDPEKGAIKVIMTGSASDKASLRPHIYSGQIKRRLEKRFKDPLDPLKLVIVRDMWLTGFDAPCVHTLYVDKPMKGHNLMQAIARVNRVFKDKQGGLVVDYIGIANELKAALKEYTGSKGKGRPTVDAHEAYSVLEEKLDVLRSLLHGFDCSDFLTGGHKLLAGAANHVLSLEDGKKRFADTALAMSKAFTLCCTLDEAKAVREEVAFFQAIKVILIKREVSQQKKTDEERELVIRQIIGNAVVSGDVVDIFQAVGLDKPNIGLLDDTFLAEVRNLPEKNLAVELLERLLEDEIKSHYSTNLAQEKKFSELLVNVIKRYQNRSIETAQVIEELIGMAKKFAAASQRGDALGLNDDELAFYDALANNEASVRELGHEILAKIAHELTASLRANVSVDWNSRESVRAKLRILVRRILRKYKYPPDHAEEAAQLILNQAETLCEAWL

SEQ ID NO: 69745 - protein, 342 aa, Pseudomonas syringae
MRGALTKTQRIDPWPSLCGSRDLEKLMSSGKDFFVHSHALCESENIGKDSRVWAFAHILPGARLGSECNVCDNVFIENDVIIGDRVTLKCGVQVWDGITIEDDVFIGPNATFTNDLFPRSKVYPQTFARTIIRKGASLGANCTILPGITIGINAMVGAGAVVTRSVPPNAIVVGNPAKIIGYVDAKPVNANSETRAEQKAPGVTATSVKNVTLHTMNEVADIRGSLSAGEFERSVPFKTERYFLVYDVPTAETRGEHAHRICHQFLVAVKGSVHVVADDGVNREEFILDKPNQGIHLPPMTWGIQYRYSQDAVLLVFASHYYDAGDYIRNYEEFKSLIANAE

SEQ ID NO: 69746 - protein, 576 aa, Pseudomonas syringae
MTDQKGEQAINSLAEQALNEARARFSPNESGAEPEFEPLKKKPGRKAAVTATSSTLQDLEKTLWATADKMRANMDPAEYKHIVLGLIFLKYISDSFAGRRAELERKFSDAGDDYYLGGDDPTYLASELEERDYYKEVNVFWVPEPARWESLRAAAKQVDIGKRIDDALADIEAENPQLKNILDKRYARAQLPDGKLGELVDMISIIGFSSDANKARDLLGQVYEYFLGQFASAEGKRGGQFYTPASIVKTLVAVLNPHHGKVYDPCCGSGGMFVQSEKFIEAHGGKLGDVSIYGQESNPTTWRLAAMNLAIRGMDFNLGKEPADSFIRNQHSDLRADFVLANPPFNISDWWHGSLDGDSRWVYGTPPQGNANYAWLQHMLFHLKSSGRAGIVLANGSMSSSQNSEGDIRRAMVEADVVEVMVALPGQLFFNTQIPACLWFLAKQKNKRPGEVLFIDARKLGTNISRVQIELLDSDIESIAQTVANWRGVPLEVDGEIAEYADVAGFCRSVPLAEIAEHGHVLTPGRYVGAEAVEDDDEAFADKMQDLTALLGEQLAKGTELDQLIRHKLGGLGYEF

SEQ ID NO: 69747 - protein, 471 aa, Pseudomonas syringae
MRPWGSGSSKRHVKDSLMSSDQPVISVQNVSKCFYTYDKPHDRLKQALVPKLQRWSGQPTTTYGKEFWALRDISFDVGKGETVGIVGRNGSGKSTLLQIICGTLSPTIGEIQTRGRVAALLELGSGFNPEFTGRENVYLNAAVLGLTRDEVDERFDAIAGFADIGEFLDQPVKSYSSGMAVRLAFAVQAQVDPEILVVDEALSVGDARFQAKCFERLRQLKENGTSILLVTHSSEQVVTHCNRAILLEKSRIEMIGESRPVINRYTDLLFGRDKSPITDKSLDLAEAERVEAAPVETDKIALRFDEDVYASRPGYNPHEYRWGDGAATLLDFHMSASGREFPNSVESGEEIVLDLALQFNSTVVNPIIGFTIKTKEGVTVYGTNSYMQDCEGTGLIGNAGNQAKARVKFRNALATGDYFISIGIASRQSEEIVPHDRRYDSIHFVVEPTPKLLGLIDLGASMEIEPVIVDV

SEQ ID NO: 69748 - protein, 1563 aa, Pseudomonas syringae
MSMFELDRYGYNLDTGTGVWVRSDYQGIAYSDGDNSENELAKIVREANDVSVLSSELTHHCTDWPKLYHLSSTRGNIFRPFEHLLEGKSVLEIGAGCGAISRYLGEAGANVLSLEGSPRRAAIAASRTRDLDNVTVLAERFDDLKVDQQFDVVTLIGVLEYASMFSNDEDPAFGMLMRVRKLLKPDGHLFIAIENQLGLKYFAGAPEDHVGVAMYGIEGRYADRQPKTFGRKGLEVLIARAGFASSSFLSPYPDYKIPNSLITENGFRSNNFDAAALACQNTRKDPQLPSNTTFNLEKAWPVVIENHLGMDLANSFLVVASCQQYEAVPADVLAYHYSTGRNSEYCKASVFVETPEGIEVQYQRLAGTESEENPGDPFRFILPAAHGYAKGDLLSLQFLDASTTQNWTVETFTPFLTTYLDSLSYLLATEGHACTLDNVDVCLPGHYIDAVAQNIIIDTEGKPHLIDIEWEMKEGVELGHLLMRGLLLLIASTIPFYPSTTMISRRDFIIQLIGSTGLEVTEEELNRYAVLEAMFQERVTGRDAASFLNWSPEATLQKMGSLKDKTPKLATLYIGDSEGNFKEERTISQFVHDGRQTLVFTVPATYQCAALRFDPTNIRQSFSIDAITIFEANVRVWSWRDSAEAPLKAAGTTAFVNDVNDSTMFMALNDDPHIVLPVDLNSLLARKSFKIQVTFTLFTEGQVAERLLQQEEELKLALESISDLNLKDRSALEAVEVANLAVEESHRLALEELEAENLAVQDKHRQALEKLEAEHLASQENHRSVLEQFEAVHLASQESYRLALEEREAANLAAQESHRLALQEREAANLAIQESHRTATESLKAENLRVQADHLRVLADIDAATLDAQEKHRAKLAELEIAILAAQESHRLALVDKDTHVHNLNLHIIAMESSHSWKVTAPLRKITRSFFRAKRVASSLPLIIRRGGGLSSTAKKAYQVWRLRGLAGVIAQARWVRGEAQHAFVGSELREVPDRHDYSRWVQYYDTLGEAEISRINEHMNRWIEYPLISIIMPVYNPPLDLLREAVDSVRAQLYTNWELCLADDASTNPAVIEYLKSLKAQDKRIKVVFRGSNGHISQASNSALAVAKGVFVALMDNDDLLPAHALYWVARTIRENPDVGLIYSDEDKIDTDGNRSSPYFKSDWNEFLFRSQNMVCHLGAYRRDLVNEVGQFRVGFEGAQDYDLALRCVEKLRSDQIVHIPRVLYHWRIHAGSTAMAGDEKPYAALAGVKALDEHLQRKGNVGTTELLPTGQYRVHYNLPATLPLVTLVIPTRNAHALVKQCIDSIQNLTTYKNYEIILIDNGSDDPESLEYFAKIDQEENIRVLRDDGPFNYSALNNGAVRIANGELIGLINNDIEVITPEWLGEMVSIALQPRVGAVGARLWYPDNRLQHGGVVVGIGGVAGHAHKYLPKGAHGYFCRAELIQEFSAVTAACLIIKKSIFDEVGGLNEADLKIAFNDVDFCLRVQEAGYLNVWTPFSELYHHESATRGLEDTPQKQERFGQEIRYIKNRWPNILVDYAYSPNLTLDHEDFSLAWPPRIKN

SEQ ID NO: 69749 - protein, 452 aa, Pseudomonas syringae
MTITSFGPANRIARTAETHPLTWRLRDDGEPVWLDEYQTKDGYAAARKALTQQAPDDIVQSVKDSGLKGRGGAGFPTGVKWGLMPKDESMNIRYLLCNADEMEPNTWKDRMLMEQLPHLLIEGMLISARALKAYRGYIFLRGEYVTAAKHLNRAVAEAKAAGLLGKNILGTGFDFELFVHTGAGRYICGEETALINSLEGRRANPRSKPPFPAAVGVWGKPTCVNNVETLCNVPAIVNNGNDWYKSLAREGSEDHGTKLMGFSGKVKNPGLWELPFGVQARELFEDYAGGMRDGFTLKCWQPGGAGTGFLLPEHLDAQMYAGGIAKVGTRMGTGLAMAVDDSVNMVSLLRNMEEFFAQESCGFCTPCRDGLPWSVKILRAIENGHGQPGDIETLLGLVNFLGPGKTFCAHAPGAVEPLGSAIKYFRSEFEAGIAPASAAMLVPGKSPTVVGA

SEQ ID NO: 69750 - protein, 165 aa, Pseudomonas syringae
  MISC_FEATURE (3)..(3): X=any amino acid
  MISC_FEATURE (9)..(9): X=any amino acid
HEXPADSDXPFRLSETERSAIEHELHHYEDPRAASIEALKIVQKERGWVPDGAIYAIGDLLGIPASDVEGVATFYSQIFRQPVGRHIIRVCNSMVCFIGGHENVVDEIKTSLGIGLGQTTADGRFTLLPVCCLGNCDKAPAVMVDDDTFGDVQPATVAKMLEGYL

SEQ ID NO: 69751 - protein, 432 aa, Pseudomonas syringae
TREQQIAALEKDWAENPRWKNVTRTYSAADVVRLRGSVQPEHTFARLGADKLWNLVTQGARPSFRPDKDFVNCMGALTGGQAVQQVKAGIQAIYLSGWQVAADNNSAESMYPDQSLYPVDSVPTVVKRINNSFRRADQIQWKAGKTPGDEGYIDYFAPIVADAEAGFGGVLNAYELMKNMIEAGAAGVHFEDQLASVKKCGHMGGKVLVPTQEAIQKLVAARLAADVAGVPTIILARTDANAADLLTSDCDPYDKAFVTGERTHEGFYKVRAGLDQAISRGLAYAPYADLIWCETAKPDLDEARRFAEAIKKEYPDQLLSYNCSPSFNWKKNLDDATIAKFQRELSAMGYKHQFITLAGIHNMWYSMFNLAHDYARNDMTAYVKLQEQEFADAAKGYTFVAHQQEVGTGYFDDMTTVIQGGRVIGHRADWLH

SEQ ID NO: 69752 - protein, 391 aa, Pseudomonas syringae
MALTDTALRQAKPKDKAYTLPDSLGLSLYVAPTAIKSWHFRFTWLGKQVRISLGTYPEIGLKEARIRRDEAREEVARGIDPRESRKEKKALLINAQGHTLRRVYEEWLAFRRGSLKPGSLRIISNSMELDWLPSFGNRQMNSITRSEIVSVIRRIEKRGSVTTAVKTRQRLSQIFRYAIATGIVDTNPTLEMHTVTERITLQRHFPFLPFSELPKTISTILGCSAGQQYKSAFMMMIYCASRPGEVRHAMWKEIDFDNAIWTIPAGKMKMRRDHVVPLPNQAIELLKTMLPLTGHLEYIFVHRSDPTKPVSTNYANNVIELSGLTGIQSPHGFRHLFSTEMNGRGYNRDWIERQLAHSDTSIIRDTYNHATYIEQRREMMQDWADLVTVVV

SEQ ID NO: 69753 - protein, 472 aa, Pseudomonas syringae
MYDVRPFRCQTVREHPMQLSSLTAVSPVDGRYAGKTQALRPIFSEYGLIRFRVMVEVRWLQRLAAHPQITEVPAFSAQANAILNTLAEDFSVEHAERVKEIERTTNHDVKAVEYLLKEQAAKLPELENVSEFIHFACTSEDINNLSHALMLREGRDTVMLPLMRQIADAIRELAIRFADVPMLSRTHGQPASPTTLGKELANVVYRLERQITQIAAVPLLGKINGAVGNYNAHLSAYADIDWEANARAFIEDELGLGFNPYTTQIEPHDYIAELFDAVARFNTILIDFDRDIWGYISLGYFKQRTIAGEIGSSTMPHKVNPIDFENSEGNLGIANALFQHLASKLPVSRWQRDLTDSTVLRNLGVGFAHSVIAYEASLKGISKLELNEQRIAADLDACWEVLAEPIQTVMRRYNIENPYEKLKELTRGKGIGPEALQTFIDGLDMPAQAKAELKKLTPANYIGNAAAQAKRI

SEQ ID NO: 69754 - protein, 376 aa, Pseudomonas syringae
MRDPAPSNSEMKRVIVGMSGGVDSSVSAVLLMEQGYQVEGLFMKNWEEDDGTEYCTAREDLADAQAVCDRIGIKLHTANFAAEYWDNVFEHFLEEYKAGRTPNPDILCNREIKFKAFLDYALMLGADLIATGHYVRRRDIDGRTELLKGLDPNKDQSYFLHAVGGEQIARTLFPVGELEKPQVRAIAEKHGLATAKKKDSTGICFIGERRFTDFLRQYLPAQPGDIKTTEGEVIGRHSGLMYHTIGQRQGLGIGGLKDASDDPWYVLVKDLDNNELIVGQGNDHPWLFSRALVSSEIYWVNPIDLSSPRKLTAKVRYRQSDQPCTLEKTAGGYRATFDDPQRAVTPGQSVVFYDGEICLGGGVIEIAEPWTSKDKR

SEQ ID NO: 69755 - protein, 930 aa, Pseudomonas syringae
MALWFPQIADGGVIREEYFWLPSLGMNFVLRIDGFAWLFSMLVLGIGALVSLYARYYMSPDDPVPRFFAFFLAFMGAMLGLVMSGNLIQIVFFWELTSLFSFLLIGYWHHRADARRGAYMALMVTGAGGLALLAGMMILGHVAGSYDLDRVLASGDAIRAHALYPVLLTLILIGALTKSAQFPFHFWLPHAMAAPTPVSAYLHSATMVKAGVFLMARMWPALSGTEQWFWIVSGAGACTLILGAYAAIFQNDLKGLLAYSTISHLGLITLLLGLNSPLAAVAAVFHILNHATFKASLFMAAGIIDHESGTRDIRRLSGLVKLLPYTATLAMVASASMAGVPLLNGFLSKEMFFAETVFISATAWVEIALPVIATIAGIFSVAYSLRFTVDVFFGPAAKDLPHLPHEPPRWMRAPVELLVLTCLVVGIFPAQSVAPLLAAAARPVVGGTLPQYSLAIWHGWNLPMVISLVAMAGGIILYLLLRKPLKHERITTPPLVGRLNGKRFFERSLVVVMHWARRFERKVSTRRLQPQLFLLVLAAVLGGFIPMYFSGLTWGDRPKIPGSGVFVTLWLIAIACAIGAAWQGKYHRLAALVMVSVCGLMTCITFVWFSAPDLALTQLVVEVVTTVLILLGLRWLPRRNEDVAPLSARLRARTRRIRDFGLAVLVGLGMAILSYAMLTRQTPNAISSFYLSRALPQGGGTNVVNVMLVDFRGFDTFGEITVLAAVALTVFALLRRFRPPKESILLPTQQRLLARDVVTDLVNPRSASDTALGFMMVPAALVRLLLPIAFIISMYLFVRGHNQPGGGFVAGLVMSVAFILQYMVAGTQWVEAQMSLRPLRWMGTGLLCAVLTGAGSMLLGYPFMTTHTAHVDLPILGDIHIASALFFDVGVYAVVVGSTLLILTALAHQSVRSHRPTQLPKPVANPQGIL

SEQ ID NO: 69756 - protein, 385 aa, Pseudomonas syringae
MHGFSTTLLTTTLLKKTLLAAAVMSGLMLSSGMAAAADAPGKVLSEKYGLPWPAAIAHRGASFDAPEETIPAYTLARDLGADYLEMDIQRTKDGVLIALHDDVLERTTNIAQVFPTRVKDPVSTFTLAELKQLDAGSWFNKAYPDRARDSYNGLQILTLDEVIDIAEGGANKPGLYIETKVPNKFPGVEADLKKVLAKRGWLTQRPAAAAGHVNVAHMPGRVVLQTFEKQSLELLQKEMPQVPKVLLLWIGEGSIEPKSSVAFKDSGAKDKASYYAAQEVKSPEEFQKWIDWAKAHGAIGTGPSSQLAQGGDQSYMDLVKPWMNNLTHEKGMVIHPYTVDDAADFKRIRNDGVDGFFTNRTAELLKFYDRPAKESIDAILKRNGY

SEQ ID NO: 69757 - protein, 368 aa, Pseudomonas syringae
MSGQLLTLPHSPALATSIRATAQVFEDPKSRALLAHVRQVAPSDASVLIIGETGTGKELVARHVHELSARRDKPFVAVNCGAFSENLIEAELFGHDKGAFTGAISAKAGWFEEANGGTLFLDEIGDLPMTLQVKLLRVLQEREVVRLGSRKSIPIDVRVLAATNVQLEKAINAGHFREDLYYRLDVVNLELSPLRDRPGDILPLARHFIEVYSQRLRHGPVRISAEAEHKLRTYSWPGNIRELENVIHHTLLVCRDGIIQRDDLRMSNLRIERQDEQNQADESAEQLLNRAFQKLFEEQAGALHEKVEDTLLRTAYRFCHHNQVHTASLLGLTRNVTRTRLIKIGELAVNKRRPGENVQGDRMLHLSV

SEQ ID NO: 69758 - protein, 426 aa, Pseudomonas syringae
MLDSKLLRTQLQDVADRLASRGFTLDVARIESLEAQRKVVQTRTEQLQAERNARSKSIGQAKQRGEDIAPLMADVERMGNELSEGKVELDAIQAELDALVLNIPNLPHESVPVGADEEGNVEVRRWGTPTAFGFEVKDHVALGEKFGWLDFETAAKLSGARFALLRGPIARLHRALAQFMINLHINEHGYEETYTPYLVQAPALQGTGQLPKFEEDLFKISREGEADLYLIPTAEVSLTNIVSGEILDAKQLPLKFVAHTPCFRSEAGASGRDTRGMIRQHQFDKVEMVQIVAPDDSMAALESLTGNAERVLQLLELPYRTLALCTGDMGFSAVKTYDLEVWIPSQDKYREISSCSNCGDFQARRMQARWRNPETGKPELVHTLNGSGLAVGRTLVAVLENYQQADGSIRVPEVLKPYMGGLEVIG

SEQ ID NO: 69759 - protein, 464 aa, Pseudomonas syringae
MEFLPLFHNLRGSRVLVVGGGEIALRKSRLIADAGAVLRVVAPEIETQLRELVAHSGGELILRGYSESDLDGCVLIIAATDDEPLNAQVSRDARLRCVPVNVVDAPALCTVIFPAIVDRSPLVIAVSSGGDAPVLARLIRAKLETWIPSSYGQLAGLAARFRNQVKGLLPNVQQRRAFWEEVFQGAIADRQLAGQGAEAERLLIAKIAGEPPAQTGEVYLVGAGPGDPDLLTFRALRLMQQADVVLYDRLVAPTILDLCRRDAERVYVGKRRAEHAVPQEQINQQLVALAKQGKRVVRLKGGDPFIFGRGGEEIEELAAHGIPFQVVPGITAASGCAAYAGIPLTHRDHAQSVRFITGHLKNGTTDLPWSDLVAPAQTLVFYMGLIGLPVICAELIKHGRSADTPAALVQQGTTVNQRVFTGTLANLPQLVAEHEVHAPTLVIIGEVVKLREKLAWFEGAQATL

SEQ ID NO: 69760 - protein, 332 aa, Pseudomonas syringae
MGLLVDGRWQDQWYESSKDGAFQRENAQRRNWVTRDGQAGPSGEGGFAAEAGRYHLYVSLACPWAHRTLILRKLKGLEKLIDVSVVSWLMLENGWTFDQQKGSSGDALDDFQFFHQRYTADDPRYTGRVTVPVLWDKQQQRIVSNESAEIIRMFNAAFDELTGNTLDFYPSALQSSIDELNEQIYPKVNNGVYRAGFATSQGAYEEAFDDVFAELDVLENLLGEKRYLTGKHLTEADIRLFTTIVRFDAVYYSHFKCNLRRIADYPNLSNWLRELYQWPGIAETVDFEHIKGHYYASHRTINPTGIIPKGPALDLQAGHDRERLSGEGAWSK

SEQ ID NO: 69761 - protein, 99 aa, Pseudomonas syringae
MATLHIVSHSPFADTRLDSCLRLLGTHDGLLLCGDAAYALMPASAQTQNLQPLIDSVKLFVLDEDLKARDLQLPAGVNSIDYPAFVDLSLRFDKVNTWL

SEQ ID NO: 69762 - protein, 391 aa, Pseudomonas syringae
MEQHCEVAVLGLGAMGAATVYQLAKAGVDVIGVDRYAPPHTQGSSHGDTRITRLSVGEGPQYLPLVRSSHRIWRELEALSGESLFEQCGVLVMTSSPSYDAADADDFTHKTIALARAYGVEHQVLMATAIRERFPQFAPVLDTAIGYFEPEGGFVRPERCIGVQLRLAAQHGARLLTHETVTHLQPYGEQVRITTEKGSIIADKVVVSAGMWSTELLGAPFSDLLRVCRQKLFWFERQQDAVFAPRSPSFIMIHGPGDADVSYGFPPLPGENSMKVATEQYIEDSAPNTLDRTVTASEEQDRFDTQIKGKIAGLSPHVVKSSVCAYTVTPDYHFIIDEHPYLKNVTVVSACSGHGFKHSAGLGLALAQRCIHGKSDVDLSAFSLARFSAAV

SEQ ID NO: 69763 - protein, 784 aa, Pseudomonas syringae
MHYRLKEGALIAFGALCLYLMMALLTYDQSDPGWSHTSSNAGQVQNAAGWAGAFCADILFMILGYFAYIFPLLLAIKTWQVFRHRHEPWQWSGWLFSWRLIGLVFLILAGAALAHIHFHFSAGFPGSAGGVLGEVLGDLAKRALNIQGSTLLFIALFLFGLTVFTDLSWFKVMDVTGKITLDLFELFQGAANRWWTARAERKQMVAQLREVDMRVNDVVAPVAPDRREQAKARERIIEREVSLSKHMTEREKHVPAVIAPAPSKPAEPSKRVLKEKQAPLFVDSAVEGTLPPISILDPAEKKQLNYSPESLAAVGHLLEIKLKEFGVEVSVDSIHPGPVITRYEIQPAAGVKVSRISNLAKDLARSLAVTSVRVVEVIPGKTTVGIEIPNEDRQIVRFSEVLSTPEYDNAKSPVTLALGHDIGGKPVITDLAKMPHLLVAGTTGSGKSVGVNAMILSILFKSGPEDAKLIMIDPKMLELSIYEGIPHLLCPVVTDMKDAANALRWSVAEMERRYKLMAKMGVRNLSGFNQKVKEAQDAGEPLADPLYKRESIHDEAPLLTKLPTIVVVVDEFADMMMIVGKKVEELIARIAQKARAAGIHLILATQRPSVDVITGLIKANIPTRMAFQVSSKIDSRTIIDQGGAEQLLGHGDMLYMPPGTSLPIRVHGAFVSDEEVHRVVEAWKLRGSPDYNDDILAGVEEPGSGFDGGSSEGGEDSESDALYDEAVKFVLESRRASISAVQRKLKIGYNRAARMIEAMEMAGVVTSMNTNGSREVLAPGPVRD

SEQ ID NO: 69764 - protein, 440 aa, Pseudomonas syringae
MDLFSREPIAQPLAARLRATNLDEYVGQEHVLAHGKPLREALEQGALHSMIFWGPPGVGKTTLARLLAKVSDAHFETVSAVLAGVKEIRQAVEVAKQQAGQYGKRTILFVDEVHRFNKSQQDAFLPYVEDGTLIFIGATTENPSFELNNALLSRARVYVLKSLDEAALRKLVNRALTEDRGLGQRKLTLSDEGFAMLMAAADGDGRRMLNLLENASDLAEDGSEIDIELLQSLLGDSRRRFDKGGEAFYDQISALHKSIRGSNPDAALYWFARMIDGGCDPLYLARRVVRMASEDIGNADPRALPLCMSAWDVQERLGSPEGELAVAQAIVYLACAPKSNAVYMAFKAAMREAGEHGSLEVPLHLRNAPTKLMKQLGYGEEYRYAHDEPEAYAAGEDYFPDELEPRQYYQPVLRGLELKIGEKLRHLNALDTASARQRRK

SEQ ID NO: 69765 - protein, 225 aa, Pseudomonas syringae
MISISARPDTFTFEPSRTAVVIIDMQRDFLEPGGFGAALGNDVAPLQAIVPTVQQLLALAREQGLVVIHTRESHLPDLSDCPQAKLDHGLPGLRIGDPGPMGRILVRGEPGNQIIDALTPLASEWVIDKPGKGMFFATDLQQRLTVAGITHLIFAGVTTEVCVQTSMREACDLGYRCLLIEDATESYFAAFKQATLDMITAQGAIVGRVASLANLQHALHTRSTQ

SEQ ID NO: 69766 - protein, 636 aa, Pseudomonas syringae
MRADINVRHRDSLLHHARDGFQSRDSRRLVSWCKLEGLLIKRSGFFQTPACQGMPSKMNFALKKLAAATLLLTSLSAVTTSAYANLDAQQSAVIVKTFSGTSLTDFRQFLASVNKNDIARSANIGPAIAAFLDNKKLSEAQQNEIHRLLGLYARIKYGSAATETLRELVAIPTVRVDGVAQHENPEFIKIAEKIKSLAERFDLKFRNIDNRVYEVSLDGSGDEVVGIHVHADVVPVTPENWVLPDGTRLDPFKVTLIGDRMYGRGTEDDKNGIVVSLYAMKVIKEEKLPLARNFKLLIDTTEETAGDAIPYYFERNPTPNYNLALDGGYPVVIAEKGYGTVMASFAKRAAQGEGAEIVSMTGGMATNQIPSKSVVTLVTDKPAQLAASLQQAGADYVKRNGGNFEIAANVEGKDVKLTVTGVSAHSSAPESGVNPVARMLDFINSLDGNVALKHNHITDAARYAADNWGLDYLGGKLGVGFSDEFMGPLTTSLTYVALDDKAFKLAVNLRVPKGKSPELLKSEIAEKLTAWSTKTAINPVFDYSIAEPMYRNPEGEWVKALLAVATENLDMKHAFGTSAGATSVHELPNGVQFGLARPEVKYTGHTDNEFKTTEQFLLDLQIVTEMMGRIGQLPKL

SEQ ID NO: 69767 - protein, 333 aa, Pseudomonas syringae
MTLRIAINGFGRIGRNVLRALYTQGYRQDLQVVAINDLGDSEMNAHLLRFDTVHGPFSGTVECDKESLTVNGDRISVSAIRNPAELPWKAQDIDVVFECTGLFTSRDKAAAHLTAGARKVIISAPASGADATIVYGVNHDTLRQSHQIISSASCTTNCLAPVAQVLHRELGIESGLMTTIHAYTNDQNLIDVYHTDPYRARSATQSMIPSKTGAAEAVGLVLPELAGKLTGMAVRVPVINVSLVDLTVTLKRETTAEEVNALMKEASQHSKVLGYNTLPLVSHDFNHNPLSSIFDANHTKVSGKLLKVLSWYDNEWAFSNRMLDNCLALHNAE

SEQ ID NO: 69768 - protein, 344 aa, Pseudomonas syringae
MIEGVMSQESINWDTLGFDYIKTDKRYLSHWRDGAWDQGSLTEDNTLHISEGSTALHYGQQCFEGLKAYRCKDGSINLFRPDQNAQRMQRSCSRLLMPHVPTDVFIEACKQVVKANERFIPPYGSGGALYLRPFVIGVGDNIGVRTAPEFIFSIFCIPVGAYFKGGLKPNNFVISGYDRAAPNGTGAAKVGGNYAASLMPGSEAKKHSFADCIYLDPQTHSKIEEVGSANFFAITSDDVFLTPKSPSVLPGITRLSLIELAKNRLGLTVEEGDVFIDQLDTFKEAGACGTAAVITPIGGISYQDNLHVFYSQTDVGPVTQRLYKELTGVQSGDIEPPAGWIVKV

SEQ ID NO: 69769 - protein, 422 aa, Pseudomonas syringae
MTLPADQGGLGLNAYSEGMITASLIVGAAFGSLASGYISDRFGRRLTLRLLSVLFIAGALGTAIAPSIPFMVAARFLLGIAVGGGSATVPVFIAEIAGPSRRARLVSRNELMIVSGQLLAYVLSAVMAALLHTPGIWRYMLAIAMVPGVLLLIGTFFVPPSPRWLASKGRFDEAQDVLEQLRSNKDDAQREVDEMKAQDEQARNRPKAKELLRQRWVIKLLLIGIGLGFTAQLTGVNAFMYYTPIILKNTGMGTNAALTATIGNGVVSVIATLLGIWAIGRYGRRHLLMTGLVMVILMQAALGCVLQFMPQNLTQSYTALACILVFLLFMQMCISPVYWLLMSELFPMQVRGLLTGTAVSMQWLFNASVAFTFPIAVDTIGNPTFFIFAAINVGSLIFVFLCLPETKGKSLEQIEKHLKKEL

SEQ ID NO: 69770 - protein, 294 aa, Pseudomonas syringae
MMPSENQSLTPKPLVSIVAPCYNAERFLDAAIQSIFAQDYEHFEVIIVDDGSTDNSIAMLESLQERYPFQLYRQANQGVSAALNHGLQYAKGVYLSTPDLDDIMLASSVRIRAEYLDKHPEVGCVGALISYMDCDGKRIKCQSRDYIERLTFDDVLRGAVVVGAPVALYRMKAMRDANGYDPTIKVQDFQATLRIAYLGYQIHVIPEVVTRYRRHPNNLSRKYKVLLDADLKSIEPYRNHREYQRGRTLLVNKALKYATVADKRYAWSLLRSIPLRYANLTTLRRCKRLLLSYR

SEQ ID NO: 69771 - protein, 670 aa, Pseudomonas syringae
MFGKLSLEAVPFHEPIVMVTLAMIALGGIAVVGLITYFRKWTYLWSEWLTSVDHKKIGVMYIIVAMVMLLRGFADAIMMRTQLAMAQNGAEGFLPPEHYDQIFTAHGVIMIIFMAMPFFTGLMNIVLPLQIGARDVAFPFLNSLSFWLLVAGMLLINLSLGVGEFAKTGWVAYPPLSGLQYSPGVGVDYYIWALQLSGLGTTLTGVNFLVTVLKMRTPGMKLMDMPIFTWTCTWANILIVASFPILTATLALLTLDRYMDFHIFTNEMGGNPMMYVNLFWAWGHPEVYILILPAFGVFSEVISTFSGKRLFGHKSMIFASGAICILGFMVWLHHFFTMGAGANVNAFFGLATMLIAIPTGVKLFNWLFTMYQGRLRFTAPVLWTLGFMVTFSIGGMTGVLLAIPGADFVLHNSLFVIAHFHNVIIGGAVFGYIAGFAFWFPKAFGFTLNEKWGKAAFWFWIVGFFVAFMPLYALGFLGMTRRLNATDMPEWNIYLDVALFGAVLIAMGIASQLIQLFVSIRDRDSNRDLTGDPWNGHTLEWSTSSPPPFYNFAELPKADDIDPFTDAKRAGTAYNVPARYSAIHMPNNTATGLYMGMLLTVFGFAFIWHIWWLVGVSLVATIAVFVAHAVRDDQGYMVPAEDVARIEGEHHKVLAANGAYTPVKSSLEQV

SEQ ID NO: 69772 - protein, 313 aa, Pseudomonas syringae
MSKKRYPRFFGFLALFCMLLLSGCEGVPLLDPKGQVGIEQRNLIIIATLLMLIVVIPVILMTLIFAWKYRASNKAAKYTPDWSHSTKIEIAVWGVPMLLLVFLGYITYVSTHSLDPYRPLDSNVKPITIQAISVDWKWVFVYPDYGIATVNKIVFPAKTPINFQVTSDSVMNSFFIPGLGGQIYAMAGMHTKLHLIANENHEFNGISANYSGAGFTGMKFKAIATSQEDFDAWVSEVKNSPKKLGTAEYAELIKPSERNPVELFSSVTPNLFQIVIDKYEGMNPGKKIVAGEEKEVAGDAAEKGKNSAAGAEE

SEQ ID NO: 69773 - protein, 311 aa, Pseudomonas syringae
MTASIGIALYPEDGEDARELVRHAYTAMNSAKKIGPDTYRFYTAQMNADVSARLDLEAALRDAVEKQAFEIVYQPKLSLVTGRICGLEALLRWPRPGQQGVSPAVFVPVLESLGLIGEVGNWVVDRVCAQIAHWQRTGLGLFQVAVNVSGQQISNSSLVADIRQALTNHRVAPQWLEVELTESSLMENTSHTIATLETLKANGVSISIDDFGTGYSSLAYLRRFPIDKLKIDIAFIREVTSNPQDAAIARAIIELAHSLGLKVIAEGVETPEQLAFLRDNQCDQIQGYLISKPLPLAELETFLSTPERQFG

SEQ ID NO: 69774 - protein, 954 aa, Pseudomonas syringae
MTDRIELTTANEFIARHIGPRAADELAMLHTLGFDSIEALSDSVIPESIKGTSVLNLPAGQSEADALASIKAIASKNQLFKTYIGQGYYNTHTPAPILRNLLENPAWYTAYTPYQPEISQGRLESLLNFQTLISDLTGLPIANASLLDEATAAAEAMTFCKRLSKNKGSQQFFASSHCHPQTLDVLRTRAEPLGITVVVADETELGDVSDYFGALLQYPASNGDVFDYRELAERFHGANALVAVAADLLALTLLTPPGEFGADVAIGSAQRFGVPLGFGGPHAAYFSTRDAFKRDMPGRLVGVSVDRHGKQALRLAMQTREQHIRREKATSNICTAQVLLANIASMYAVYHGPRGLTQIANRVHHLTAILAEGLSQLGLNAEQAYFFDSLTLHTGGRTAALHAAARARHINLREIDDQRLGLSLDETTSQSAVEVLWDIFASTGQTLPDFTALAASVKSRLPAALLRQSAILSHPVFNRYHSETELMRYLRKLADKDLALDRTMIPLGSCTMKLNAASEMIPVTWAEFGNLHPFAPAEQSAGYQQLTDELEAMLCAATGYDAISLQPNAGSQGEYAGLLAIRAYHQSRGDEHRDICLIPSSAHGTNPATANMAGMRVVVTACDARGNVDIEDLRAKALQHREQLAAIMITYPSTHGVFEEGIREICGIVHDNGGQVYIDGANMNAMVGLCAPGKFGGDVSHLNLHKTFCIPHGGGGPGVGPIGVKSHLAPFMPGHARMQRKEGAVCAAPFGSASILPITWMYIRMMGGEGLKRASQLAILNANYISRRLEEHYPVLYTGTNGLVAHECILDLRPIKDSSGISVDDVAKRLIDFGFHAPTMSFPVAGTLMIEPTESESREELDRFCDAMIKIREEIRAVEDGTLDKDDNPLKNAPHTAAEIVGQWSHPYSREQAVYPVDSLIENKYWPPVGRVDNVFGDRNLVCACPSIESYQEA

SEQ ID NO: 69775 - protein, 470 aa, Pseudomonas syringae
MLIGAAQLVDIKSGGAISAVLERGDLAGKSGQTLLLTNLQNIKAERVLLVGIGKDGELSDRQLKKIAGSVLSSLKGLGGSDAVIALDDLSVKNRDTYGKARLFVEALADGEYVFDRFKTQKAEVRPLKKITLLTDKVSVADVERAANHAQAIATGMALTRDLGNLPPNICHPTYLGEEAKALGKAHKNLKVEIHDEKKLAELGMGSFLAVAQGSAQPPRLIVMNYQGGKKGDKPFVLVGKGITFDTGGISIKPAAGMDEMKFDMCGAASVFGTLRAVLELKLPINVVCILACAENMPSGTATRPGDIVTTMSGQTVEILNTDAEGRLVLCDALTYAERFKPQAVIDIATLTGACVVALGGHTSGLLGNNDALINQLLDAGKLADDRAWQLPLFDEYQEQLDSPFADIANIGGPKGGTITAACFLSRFTKAYEWAHLDIAGTAWLSGGKDKGATGRPVPLLTQYLLDRAGV

SEQ ID NO: 69776 - protein, 608 aa, Pseudomonas syringae
MLGYFAKSGNLFQSFLKSQFTVGETFTDSQVFDSVRFQGAALASDDGMLSDSERAYAPVIRGIAETNATVEVRQNGFLLYSGSVSPGPFEITDIYPSGSNGDLSVSVIEADGRVRSFTQAYASLPIMVPSGSLRYSLAIGQVDSNDALQASPGFTSAALIYGLSERITGFGGVQLAEDYQAANMGAGVNTGLGAVSLDVTHSVSQPDQQSRSGQSLRMRYANTLDVTDTTLAVAGYRYSTEEYRTLSQHVSDTDPQRRVTSTGLARDRLELSVTQILPAQAASLSLTASEQRYWNLPGKTRQLYLSYNAAWHTVNYSLSIERNEDFGRDGDASTDHRIALSVTVPLGSSPGSSRLSFNAVRDSSGDYNAQAGLNGQVLGDRDTFYSVQAGNDSNSGSFGAGKINTTTGFGRFEAGYSQGQDYDALTLSAAGSLVAHAGGVNLGQTLGETFALVQVPDVSGARLKSYTNVATAANGYAVLPYAQAYRTNWVSLDTRQLGADVDLDNAITQVVPRRGAMPVVRFKAAVGRRVQFELVRADGSNVPLGASVEDEQGRALAVVDPGSQALVLSDRDSGSLSVRWSDQRCQAAFVLPPRDPARAYERITVVCQ

SEQ ID NO: 69777 - protein, 142 aa, Pseudomonas syringae
MTQVDFYILPSADPAARLDFACKLTEKAWRLGHKVYLHCSDAAQREDLDARLWRFRGEVFLPHGDAESDHDAPVVLGLGDDSGTHQDLLVNLDLSIPAFFKRFARVAEVVVEDPAIRLAARESFRSYREQGYPPQDHRLQRL

SEQ ID NO: 69778 - protein, 454 aa, Pseudomonas syringae
MRVDSIALRLSGLFALVALVVFLLIGWALYLQVDKSLDLLPRAEVDARYSVLESAIGRFGNPEHWSKIKAKLELLSEEDKRLRFWVVSDNPLYEFGNPDPNIRRFAQGAPGMHDLKLADHPFAFKVLVSEFPAKEQRPALRFLTAIDTETFWHTQHSLLVALISLATLGVLLASALGYWVARIGLRPLASLSQEVQKLAPPRLSGRLQLSPLPPELEQFVASFNSTLERVEQAYSRLESFNADVAHELRSPLTNLIGQTQVALTRGRSAEHYFEVLQSNLEELERLRSIINDMLFLASADQGTKVKALTCASLAEEVATTLDYLDFILEDAQVQVRVQGDASAPIEKPHLRRALINLLHNAVQHTEAGQVIEVCIESREAHVSIGVTNPGAQIAQEHLPRLFERFYRVDASRSNSGANHGLGLAIVKAIALMHGGSVFVNSAHGANTFGIQLPR

SEQ ID NO: 69779 - protein, 948 aa, Pseudomonas syringae
MDKTYQPHAIETSWYQTWESENYFAPQGAGDSYTIMIPPPNVTGSLHMGHGFNNAIMDALIRFRRMQGRNTLWQPGTDHAGIATQMLVERRLEAQGVSRHELGREKFLDKIWEWKAESGGNISRQIRRLGSSVDWSRERFTMDDGLSDAVKEAFVRLHEDGLIYRGKRLVNWDTKLHTAISDLEVENHDEKGHLWNLRYPLADGAKTAEGLDYLIVATTRPETMLGDAAVAVNPQDERYKALIGKFVELPLVGRRIPIIADDYCDPEFGTGCVKITPAHDFNDYEVGKRHNLPLLNIFDKNANVLPAAQVFNLDGKLNESVDGTLPAAYAGLDRFEARKQIVAAFDAAGLLVSIDDHALKVPKGDRSGTIIEPWLTDQWYVSTKPLAEPAIAAVEDGRIAFVPKQYENMYFSWMRDIQDWCISRQLWWGHRIPAWYDESGKVYVGRDEAEVRAKNNLGPEIALQQDNDVLDTWFSSGLWTFSTLGWPEKTKALETFHSTDVLVTGFDIIFFWVARMIMLTLHLVKNEDGTPQVPFKTVYVHGLVRDGQGQKMSKSKGNVLDPLDIVDGIDLETLVEKRTSGLMQPQLAKKIEKQTRQEFADGIASYGTDALRFTFCSLASTGRDIKFDMGRVEGYRNFCNKIWNAARYVLDKGEDCGQNGEAVELSLADRWIISQLQRTEAEVTRQLDQFRFDLAAQALYEFIWNQYCDWYLELSKPVLWDETASIERQRGTRRTLVRVLEVALRLAHPFMPFITEEIWQRLAPLAGVEGKTIMLQPWPVANEARIDQAAEDDIEWLKGLMLAVRNIRGEMNIGPGKPLQLFLKNVSADDQRRLSENDYLLRKLAKLESMTVLTDGAEAPLSATALVGDMEVLVPMAGLIDKGAELARLDKEIQRLQGEVQRVGGKLSNAAFVDKAPPDVIAKERAKLTEAEQALGKLAEQHARIASL

SEQ ID NO: 69780 - protein, 157 aa, Pseudomonas syringae
MRIGHGYDVHRFAEGDFITLGGVRIAHGFGLLAHSDGDVLLHALSDALLGAAALGDIGKHFPDTDPQFKGADSRVLLRHVLKQIHGKGWKVGNVDATIVAQAPKMAPHIDAMRALIAEDLLVELDQVNVKATTTEKLGFTGREEGIAVHAVALLLRA

SEQ ID NO: 69781 - protein, 239 aa, Pseudomonas syringae
MGAMTDFLPAFWAVIPAAGIGARMAADRPKQYLQLGGLTILEHSLLCFLDHPRLKGLVISLAVDDPYWAALPCAHDSRIQRVDGGRERSGSVLNALLHLHAQGASDDDWVLVHDAARPNLARSDLDNLLGQLADDPVGGLLAVPARDTLKRADSDGRVVETVDRSLIWQAFTPQMFRLGTLHRALADSLVSNVSITDEASAIEWAGQSPRLIEGRSDNIKVTRPEDLEWLRQRRSEFGR

SEQ ID NO: 69782 - protein, 468 aa, Pseudomonas syringae
MRSPSFVTGLSHSGLPFSAPDCEHCFPSCVVFVNLGVFTTMAKIVDIKGREVLDSRGNPTVEADVLLDNGIIGSACAPSGASTGSREALELRDGDKSRYMGKGVLKAVANINGPIRDLLLGKDPVDQKALDHAMIALDATENKASLGANAILAVSLAAAKAAAQDQDLPLYAHIANLNGTPGVYSMPVPMMNIINGGEHADNNIDIQEFMIQPVGAKSFAEALRWGTEIFHHLKAVLKARGLNTAVGDEGGFAPNLASNKEALEAIAEAVANAGYTLGTDVTLALDCAASEFYKNGKYTLSEEGEYSSAEFAEYLAELTRKHPIISIEDGLDESDWDGWKVLTEKIGEKVQLVGDDLFVTNTKILKEGIDKNIANSILIKFNQIGTLTETLEAIQMAKAAGYTAIISHRSGETEDSTIADLAVGTSAGQIKTGSLCRSDRVSKYNQLLRIEEQLGSKAVYRGRAEFRG

SEQ ID NO: 69783 - protein, 281 aa, Pseudomonas syringae
MAQKIIRTGSIEIANDKPMVVFGGMNVLESRDMAMQVCEEYVRVTEKLGIPYVFKASFDKANRSSVNSYRGPGLEEGMRIFEEIKRTFNVPLITDVHEPHQAAVVAEVCDIIQLPAFLSRQTDLVVAMAKTGAIINIKKAQFLAPQEMKHILTKCEEAGNDQLILCERGSSFGYNNLVVDMLGFGIMKQFEYPVLFDVTHALQMPGGRSDSAGGRRAQVLDLAKAGISQNLAGLFLEAHPDPDNAKCDGPCALRLDKLEPFLAQLKSLDELVKSFPIVETA

SEQ ID NO: 69784 - protein, 169 aa, Pseudomonas syringae
MRHWLAPLTRLPDSDHWAGWEALRDAAQDARPLWRLADGALHRAQGCIWWLPAGWEQACSEAVNWADPRAPLDLPENGQVSLEGEAPLGDLSVRYRQGAEVMHLSGRGRRDLKRLLNEQAVPAFLRGRWPLLYRDDELLAVANLPGLDGSPNERWRLRWVAPTGDQSLS

SEQ ID NO: 69785 - protein, 1173 aa, Pseudomonas syringae
MPASFVHLRLHTEYSLVDGLVRVKPLIKSLTSMNMPAVAVTDQNNMCSLVKFYKAAQGSGIKPICGVDLWLAGRDEDAALSRISLLAMNAQGYRNLTELISRGFIEGQRNGQIVIQRQWVAQASEGVIALSAAKEGEIGMALLGGNPGEADELLREWLTVFPDRFYIEVQRTNRANDEEHLHAAVALAERHGAPLVATNDVRFINQADFEAHETRVCIGEGRALDDPRRSHNYSDQQYLKSPEEMAELFSDLPEALENSVEIAKRCNIDVKLGTHFLPNFPIPDGMTIDEYFRKVSFDGLEERLAVLMPRDTTEDYETKRQVYVDRLNFELDIIIQMGFPGYFLIVMDFIQWAKSNGVPVGPGRGSGAGSLVAYVQKITDLDPLEYDLLFERFLNPERVSMPDFDVDFCMDGRDRVIEYVAEKYGRNAVSQIITFGSMAAKAVVRDVARVQGKSYGLADRLSKMIPFEVGMTLEKAYEQEEILRDFLKVDEEAAEIWEMARKLEGIVRNVGKHAGGVVIAPTKLTDFSPIYCDEAGDGLVTQFDKDDVEAAGLVKFDFLGLRTLTIIDWALKTINRDRAKVDEAPLDIAFIPLDDLPTYQLLQRAETTAVFQLESRGMKELIKKLKPDCLEDLIALVALFRPGPLQSGMVDDFINRKHGRAELSYPHVDYQYEGLKPVLAPTYGIILYQEQVMQIAQVMAGYTLGGADMLRRAMGKKKPEEMAKQRGGFIDGCKSNNIEPDLAGNIFDLVEKFAGYGFNKSHSAAYGLVSYQTAWLKTHYPAPFMAAVLSADMHNTDKVVTLIEEVRTMKLRLDAPDVNTSEFKFTVSDDGRILYGLGAIKGVGEGPVEAITDARQKGPFKDLFDFCARVDLKRINKRTLDGLIRSGALDRLGPYFELEPKAYQASIDRNRSVLLAALEEAIQAAEQTARSHDSGHSDLFGGLFVEADADVYANHRKTRELSLKDRLRGEKETLGLYLTGHPIDEYEGEIRRFARQRIIDLKPARDTQTVAGLIIALRVMKNKKGDKMGFITLDDRSARIEASLFAEAFHSAQSLLQTDAMVVVEGEVSNDDFSGGLRLRAKRVMSIEDARTNLAESLRVTVHADALKGERLRWLGDLCKRHRGACPITVDYTGQDARALLQLGEAWRIDPADSLIQALRDQFGRENVFLQYR

SEQ ID NO: 69786 - protein, 380 aa, Pseudomonas syringae
MTSPLRIALVAGEASGDILGSGLMRALKARHPDVRFIGVGGPLMEAEGMQSYFPMERLSVMGLVEVLGRLRELLARRKLLVQTLIDEKPDVFIGIDAPDFTLNIELQLRRAGIKTVHYVSPSVWAWRQKRVLKIREGCDLMLTLLPFEARFYEEKGVPVRFVGHPLADTIPLESDRGATRAELGLSVDGPVVALMPGSRGGEVGRLGALFFDAAERLLVERPGLRFVLPCASPQRRAQVEQLLQGRDLPITLLDGRSHVALAACDAVLIASGTATLEALLYKRPMVVAYRMAPLTFWVLKRLVKSPYVSLPNLLAQRLLVPELLQDDATPEALARTLLPLIEDGHAQTEGFDAIHRILRRDASNQAADAVLSLLGLPLSL

SEQ ID NO: 69787 - protein, 146 aa, Pseudomonas syringae
MMDINEIREYLPHRYPFLLVDRVTELDIENKNIRAYKNVSVNEPFFNGHFPQHPIMPGVLIIEAMAQAAGILAFKMLDSKPSDGTLYYFVGSDKLRFRQPVFPGDKLVLEATFLSSKRQIWKFECKATVDGKAVCSAEIICAERKL

SEQ ID NO: 69788 - protein, 351 aa, Pseudomonas syringae
MSITIKLGQLAEFLGATLRGDKDKDITGLATLEEAGPGQISFLAKPQYRKYLVDTQAAAVLLKPADADGYTGDALLVPDPYLAYARISHFFDPKPKSSAGVHPTAVIAEDAQVDPAASIGAFAVIESGARIAANVTIGAHCFIGARSEIGEGGWLAPRVTLYHDVRIGKRVVIQSGAVLGGEGFGFVNDKGVWQKFAQIGGVTLGDDVEIGVNTAIDRGALSDTRIGNGVKLDNQIHIAHNVQIGDHTAMAACVGISGSAKIGKHCMLAGGVGLVGHIDICDGVYITGMTMVTHSITEPGSYSSGTAMQPSAEWRKSAARLRKIDDMARRLQKLEKAVETVTCADNRSSDG

SEQ ID NO: 69789 - protein, 593 aa, Pseudomonas syringae
  MISC_FEATURE (539)..(539): X=any amino acid
  MISC_FEATURE (592)..(592): X=any amino acid
MCGLAGELRFDHQPADLAAVERITHELAPRGPDAWGFHSQGPIALGHRRLKIMDLSDGSAQPMIDSNLGLSMAFNGAIYNFPELRAELESLGYQFHSGGDTEVLLKGYHAWGAEMLPKLNGMFAFAIWERDSKQLFIARDRLGVKPLYLSKTDKRLRFASSLPALLKGGDISGMLDPVALNHYLNFHAVVPAPRTLLAGVEKLPPASWMRIDASGKVEQKVWWTLPYGPHEDEKNLTLEDWRDRVLDSTREAVAIRQRAAVDVGVLLSGGVDSSMLVGLLREVGVEDLSTFSIGFPGCWRRTWREFQYSDLIAKHYGTRHHQLRIQESEIIEQLPAAFRAMSEPMVSHDCIAFYLLSREVAKHCKVVQSGQGADELFAGYHWYPQVDGASDPVAAYRYAFVDRSYAEYADTVQPKWRTANDAAGDFVRDHFAQPGASAAVDKALRLDSTVMLVDDPVKRVDNMTMAWGLEARTPFLDYRLVELSARIPGKFKLPDGGKQVLKEAARLVIPSEVIDRKKGYFPVPGLKAFAGRYTQLGTXTADRSEPGPRPVQPDHGRQAADQSRRPSSRRCAAPSCGSWPRLNLWLSEQGLXL

SEQ ID NO: 69790 - protein, 378 aa, Pseudomonas syringae
MLAIPSPTGFTDTIVRYVAERLEELGIPFELTRRGTIRATLKGKQNSPDRAVSAHLDTIGASVREVKDNGRLALAAVGCWSSRFAEGSRVSVFTDTGVIRGSVLPLMASGHAFNTAVDEMPISWDHIELRLDAYCTTRADCESLGIGIGDFVAFDPLPEFTESGHISARHLDDKAGVAALLAALKSIVESGAEPLIDCHPLFTITEETGTGAAGVLPWDVSEFVGIDIAPVAPGQHSSEHAVSVAMQDSGGPYDYHLSRHLLRLGVENELPVRRDLFRYYYSDAHSAVTSGHDIRTALLAFGCDATHGYERTHIDSLAALSKLLGAYILSPPVFASDAKPAQSSLERFSHQIEHDAQMESDTRVPPVDSLIGLNREES

SEQ ID NO: 69791 - protein, 63 aa, Pseudomonas syringae
MSSTSDKVKGMANEAVGNVKQAVGKATDNTKLQAEGKAQELKGEGQQAKGEVKDAVKKGVDKV

SEQ ID NO: 69792 - protein, 271 aa, Pseudomonas syringae
MLKQRIITALILLPIALCGFFLLTGMYFALFIGVVVVLGAWEWARLAGFAAQSMRVGYAALVAVLLFFMYLLPGLEPWVLVAAVIWWSVATFLVLTYPDSSSHWASAACKLVIGLLILLPAWQGLVLIKQWPLGNWLILSVMVLVWAADIGAYFSGKAFGRRKLAPKVSPGKSWEGVYGGLVVSLGITAAVGVWRDWTVVQFIAALLGAAVIVFISVIGDLTESMFKRQSGVKDSSNLLPGHGGVLDRIDSLTAAIPVFAVLLWAADWGVM

SEQ ID NO: 69793 - protein, 251 aa, Pseudomonas syringae
  MISC_FEATURE (77)..(77): X=any amino acid
MEKIKSAGPSSVPRHVAIIMDGNNRWARKRLLPGVAGHKAGVDAVRAVIEVCAEAKVEVLTLFAFSSENWQRPAEEXGALMELFFTALRRETKRLNENDISLRIIGDRSRFHPELQAAMREAEVRTSGNSRFVLQIAANYGGQWDIAQAAQRLAREVQAGHLQPEDITPQLLQTCLATGDLPLPDLCIRTGGEHRISNFLLWQLAYAELYFSDLFWPDFKHDAMRAALADFASRQRRFGKTSEQVEAGARA

SEQ ID NO: 69794 - protein, 247 aa, Pseudomonas syringae
MAQQGSGYQARYKRILLKLSGEALMGSEEFGIDPKVLDRMALEVGQLVGIGVQVGLVIGGGNLFRGAALSAAGMDRVTGDHMGMLATVMNALAMRDALERANITAIVMSAISMLGVTDHYDRRKAMRHLSAKEVVIFAAGTGNPFFTTDSAACLRAIEIDADVVLKATKVDGVYTADPFKDPNAEKFDHLTYDEVLDRKLGVMDLTAICLCRDHKMPLRVFNMNKPGALLNIVHGGAEGTLIEEAQQ

SEQ ID NO: 69795 - protein, 287 aa, Pseudomonas syringae
MAEITAALVKELRERTGEGMMDCKKALTKAGGDIEKAIDDMRASGAIKAAKKAGNVAAEGAIAIKDDGKAAVIIEVNSQTDFLALQDDFKNFVAASVEKAFADKLTDVAPLIEAQETARLVLVGKVGENVNIRRLKRIEGDVVGSYLHGNKIGVVVTLKGGNVELAKDIAMHVAASNPEFLFPSEVSAEAIEREKSVFLQLNEDKIKGKPAEIVEKMVGGRITKFLAEASLVEQAFVKNPEIKVGDLAKKAGAEIVSFTYFKVGEGIEKPVDNFADEVAAQLAAAKQ

SEQ ID NO: 69796 - protein, 287 aa, Pseudomonas syringae
MPSLLKAFITLLMTVSLLAGCNQVGLAYRNLDVIIPWTLSDYLDMNSEQKSWLDVRLKQHLSWHCSTQLPEYLAWLDKLEDMVKNDRVTYEGLEARTSEAKDAIAKISREITPSAVELLSRFDDKQVQEMQESFAKDQRKRENKYLDQPLERQIAERADRMQKRLTPWIGKLNQVQKDRIQAWSASLGEQNKAWIDNRTRWQNLFLATVQQRQASDFPQRIAALLQDRETFWTPEYRKAYDQTEKAAISLLVDITAQSTPEQRTRLLSRIADMRKDFTDLDCLKSQQ

SEQ ID NO: 69797 - protein, 898 aa, Pseudomonas syringae
MPQVDPDLFDRGQFQAELALKASPIAAFKKAIRRARDVLDNRFRSGRDIRRLIEDRAWFVDNILQQAWDQFEWSEDADIALLAVGGYGRGELHPYSDIDLLILLESDDHEVFREPIERFLTLLWDIGLEVGQSVRSVDECAQEGRADLTVITNLMESRTIAGPEHLRQRMLEVTSTQHMWPSKEFFLAKHAEQKKRHHKYNDTEYNLEPNVKGSPGGLRDIQTILWVARRQYGTLNLHALAGEGFLLGSENALLASSQEFLWKVRYALHMLAGRSEDRLLFDYQVRIAGLLGYEDNDAKLAIERFMQKYYRVVMSIAELSDLIIQHFEEVILSDDDGTPQPINSRFQLHDGYIEATNPNVFRRTPFAMLEIFVLMAQHPEIKGVRADTIRLLREHRHLINDDFRNDIRNTSLFIELFKCEIGIHRNLRRMNRYGILGLYLPEFGHIVGQMQHDLFHIYTVDAHTLNLIKHLRKLQYTEVSEKFPLASKIMARLPKPELIYLAGLYHDIGKGRGGDHSELGAVDAQAFGTRHHLPAWDNRLIVWLVSNHLVMSTTAQRKDLSDPQVIHDFAQFVGDEVHLDYLYVLTVADINATNPTLWNSWRASLLRQLYTETKRALRRGLENPVDREEQIRRTQTAALDILVRSGTDPDDVEQLWSALGDDYFLRHTAGDVAWHSDAILQQPADGGPLVLIKETTQREFEGGTQIFIYAPDQHDFFAVTVAAMDQLNLNIHDARIITSSSQFTLDTYIVLDHEGGSIGNNPERIQDIRDGLTEALRNPDDYPTIIKRRVPRQLKHFAFAPQVTIHNDAQRPVTVLELLAPDRPGLLARIGKIFLEFDLSLQNAKIATLGERVEDVFFITDANNQPLSDPQLCSQLQEAIVKQLSVNSEPGGDLRISI

SEQ ID NO: 69798 - protein, 342 aa, Pseudomonas syringae
MKKFLLMLGLLISSYSAIGADMSHGADNFYTSDTVTAQKVLFTNQYKMKVGGSLFIPKGSDPNTKAPAIIVGHPMGAVKEQSANLYAQKLAEQGFVTLSLDLSFWGESEGLPRNAVSPDIYAEDFSAAVDFLGTQTFVDKNRIGVLGICGSGSFVISAAKIDPRMKAIATVSMYDMGAANRNGLKHAQTLAQRKKTIEQAALQRDVEFSGGDTAYTSGTVHKLTEKSGPIEREFYDFYRTPRGEFTPEGQSPELTTHPTLTSNVKFMNFYPFNDIATISPRPMLFIAGSAAHSLEFSEEAYKLAGQPKQLIIVPGAGHVDLYDRVDLIPFDTLGEFFKKNLK

SEQ ID NO: 69799 - protein, 1222 aa, Pseudomonas syringae
MALTSRLAIEVDSRSAEQKVQDLRRSLEALNNAGVRTGPVMSGAGGAINDTGRSSRSAATQVQGLDRTVRSLASAAAGLAGPLLAAFATKSLYDASEAYSTLTNRMKLVTSNATELAAAQKAVFSIAQSAYQPLTATAELYQRIATNQKELKLTGEGVAGVVGTISKTLAISGASAASANAALIQLGQAFASGVLRGEELNSVMEQAPALAQAIAAGMGKTVGELRSLGAAGLLTADAVVKALQAQRGAVDALFARTSATIGNSLTALGNSTTSFIGQLDQATGSSASLAKSILSLSSAIDGGLPAAIKLATDNSEELGQVLTTGLYVALARVAGGFAQQAAQAGYAAVANQKALTVSAATATQDLAAAKSKQVDAKAAVDRANAQVASAQRQVAADKEVMASELNRTRAVQAAMVAEREIEVQRLKAQISDQGRAASLNRLAELSRAHVVVTNQVAAAEKALAATTVSASATITAAYGTRTAAVAAYGEATAVVNALTVASNNAAAAASLTSRALGALTAAGTGLLGMLGGPLGLLFIAGAVAVSFMDFRSSSDKVNEGLQNLKGPLDDVIARFKQLTKDQQAAALVKWGETQAEAAKAANEEFQNLNKSLQAGLVGPRSSAAGTKIFSDYSAQIASAREAGESLTPIFEKLRSEPGVPESLINSLVKSAGAYSGLSASAKEAKDRIAALKTESANAATTAALSTGATNVMTGAGKKYNEELQKQLGKLQDNNDAVKEANRYIAEHKDLTEADKVAILSTANALKSQEAANKAAAKATREAGKAYTESAGTKALDDARKQYAVLGEQSAIIKAQRGDTEKLGAAATELIKWEQQLANIKSKQTLTADQKSLVANQDLVTAQLRRNAALEKENQLSITRLENESKLKAFRENLDSQLGLAKDGLDSDLAGAGLGDQARQRLQDDLKIRQSYQKDLDKLSRDYNKITNPTSADTSLYQNETNALNAALQTRLAMQRQYYTDVDRAQSDWALGANSALENYLEQSRDVAGQTKQLFTNAFSSMEDAVVNFVKTGKLSFKDFANGVIEDLIRIQVRQAAAGFLSTAFSFLSGGSAALGQGTMTGSSQTISKTGFSGGGFTGIGGKYEEKGVVHGGEFVVKKEVVSQPGAREFLERMNANTKGYADGGYVGSAASTSRVSSSSASVSLPTIEQNFYFQGSADENTAQQLKQAADDGASRGMRGGYEMMLRDLQRNGPAMQIIRGKR

SEQ ID NO: 69800 - protein, 413 aa, Pseudomonas syringae
MEGYEVVATYEDADVVVVNTCGFIDTAKAESLEVIGEAIKENGKVIVTGCMGVDASVIRAVHPSVLSVTGPQQYEQVVNAVHDVVPPRKDHNPLIDLVPPQGVKLTPRHYAYLKISEGCNHSCSFCIIPSMRGKLVSRPVGDVLDEAKRLVKSGVKELLVISQDTSAYGVDVKYRTGFWDGQPVKTRMTELCQALGSMGVWVRLHYVYPYPHVDELIPLMAAGKILPYLDIPFQHASPKILKLMKRPAFEDKTLARIKNWREQCPDLIIRSTFIVGFPGETEEDFQYLLDWLTEAQLDRVGCFQYSPVEGAPANLLDAAIVPDDVKQDRWDRFMAHQQAISAARLQMKIGKEIEVLIDEVDDRGAVGRCFFDAPEIDGNVFIGLEDGSTVQPGDKIMCRVTDADEYDLWAEML

SEQ ID NO: 69801 - protein, 169 aa, Pseudomonas syringae
MTGLYARVGGVLLILLAVAGALYGAYRHGVSVTDSQWQAKWSEQVSAQSQAVATTTAEYRTEEQRRQKAANQVANDARQEQTAALTDAAVADAAGGRLRIEAGKLAATAGCVPGDTGATERGKAATRAAMVLSDLLGRADARAGELAKAYDGARIAGKACEAASYTLTR

SEQ ID NO: 69802 - protein, 369 aa, Pseudomonas syringae
MAIKALIEFDYVRTSMDDNKKKALAAALGQIERQFGKGAVMRMGDHDRQAIPAISTGSLGLDIALGIGGLPKGRIVEIYGPESSGKTTLTLSVIAQAQKMGATCAFVDAEHALDPEYAGKLGVNVDDLLVSQPDTGEQALEITDMLVRSNAIDVIVVDSVAALVPKAEIEGEMGDMHVGLQARLMSQALRKITGNIKNANCLVIFINQIRMKIGVMFGSPETTTGGNALKFYASVRLDIRRTGAVKEGDEVVGSETRVKVVKNKVAPPFRQAEFQILYGKGIYLNGEIVDLAVLHGFVEKSGAWYSYQGSKIGQGKANSAKFLADNPEICKALEKQIRDKLLTPGVDTKAVGSREAVVADDVAEADADS

SEQ ID NO: 69803 - protein, 329 aa, Pseudomonas syringae
MLTVLRMAQDNRNRWDVKITLQTLRELDKAFRVLERFKGRRKVTVFGSARTPMEHPLYAQARELGEKLAQSDMMVITGAGGGIMAAAHAGAGLKHSLGFNITLPFEQHANPTVEGTENLLPFHFFFTRKLFFVKEADALVLCPGGFGTLDEALEVLTLIQTGKSPLVPVVLLDTPGGSFWQGALDFIKNQLQDNHYILPADMKLMRLVYSPDEAVEEINQFYRNFHSSRWLKNKFVIRMHHALSEQALEHMQAAFADLCINENFHQHGYQGEEHDEAQFSHLTRLAFTFTGRNQGRLRELVDYINVQEHWADASAVRDAAQEQAPQQTL

SEQ ID NO: 69804 - protein, 121 aa, Pseudomonas syringae
MSPFKGQTGLKRILNAAGYSLDGLSAAFKGEAAFRQLVLLNVVLIPLSFFLHVSKAEHALLVAVCLLALIVELLNSAVEAAIDRISLDLHPLSKNAKDMGSAAQFIALSMIGLVWAIVLLG

SEQ ID NO: 69805 - protein, 308 aa, Pseudomonas syringae
MRFTLRQLQVFVAVARQESVSKAAVLLSLSQSAASTSITELERQSSCQLFDRAGKRLSLNATGRQLLPQAVALLDQAKEIEDLLNGKSGFGSLAVGATLTIGNYLATLLIGGYMQRHPESQVKLHVQNTAHIVQQVAHYEIDLGLIEGDCSHPDIEVQSWVEDELVVFCAPQHPLAKRAQVTLEELTREAWILREQGSGTRLTFDQAMRHHRNGLNVRLELEHTEAIKRAVESGLGIGCISRLALRDAFRRGNLVELATPELDLSRQFYFIWHKQKYQTSAMREFLELCRAFTAGVQRSDEIVLPSLY

SEQ ID NO: 69806 - protein, 230 aa, Pseudomonas syringae
MSYNVSPVGFVRSCFKEKFAIPRQPQLAPAARGVLELVAPFDQGEAVQGLEQVSHVWLLFLFHLALEDKPRLKVRPPRLGGNQSMGVFATRATHRPNGIGQSVVKLDKVEAGRLWLSGIDLLDGTPVLDIKPYVPYADVIAEATNQIASSAPALIPVQWQDAALLQAREHALRLSEPLVELIEQCLAQDPRPAYQLPAPERRYGARFWDVDVRWHYPQAGVICVLEVLRA

SEQ ID NO: 69807 - protein, 855 aa, Pseudomonas syringae
MTDLSQHTPMMQQYWKLKNQHLDQLMFYRMGDFYEIFYEDAKKAAKLLDITLTARGQSAGQSIPMCGIPYHAAEGYLAKLVKLGESVVICEQIGDPATSKGPVDRQVVRIITPGTISDEALLDERRDNLIAAVLGDERLFGLAVLDITSGNFSVLEIKGWENLLAELERINPVELLIPDDWPQGLPAEKRRGARRRAPWDFERDSAHKSLCQQFSTQDLKGFGCETLTLAIGAAGCLLGYAKETQRTALPHLRSLRHERLDDTVILDAASRRNLELDTNLSGGRDNTLQSVMDRCQTAMGTRLLTRWLNRPLRDLSILQARQTSITCFLERYRFENLQPQLKEIGDIERILARIGLRNARPRDLARLRDALSALPELQQAMTDLDAPHLQQLAQTASTYPELADLLQRAINDNPPAVIRDGGVLKTGYDAELDELQSLSENAGQFLIDLEAREKARTGLSHLKVGYNRVHGYFIELPSKQAEQAPADYIRRQTLKGAERFITPELKEFEDKALSAKSRALAREKMLYETLLEDLIGHLAPLQDTAAALAELDVLSNLAERALNLDLNCPRFVAEPCMRIEQGRHPVVEQVLSTPFVANDLALDDSTRMLIITGPNMGGKSTYMRQTALIVLLAHIGSFVPAASCELSLVDRIFTRIGSSDDLAGGRSTFMVEMSETANILHNATDKSLVLMDEVGRGTSTFDGLSLAWAAAECLAQLRAYTLFATHYFELTVLPESEPLVNNVHLNATEHNERIVFLHRVLPGPASQSYGLAVAQLAGVPGKVITRAKEHLQRLETTSLPHEQPRAKPGKPAIPQQSDMFASLPHPVLDELSKIKVDDMTPRQALDLLYTLQTRL

SEQ ID NO: 69808 - protein, 667 aa, Pseudomonas syringae
MGIPHNPALGYRPEIDGLRALAVIPVILFHAGLPLFSGGFVGVDIFFVISGYLITSIILAEKINGKFSLINFYERRARRILPALFVVMLVCVPVAWLTLDPPDLKYFAKSLVAVPMFSSNVLFWLESGYFDATAELKPLLHTWTLAVEEQYYLFFPLLLMLGWRMGRTRLVILLTLIALGSLTLSQLGARNDASSSFYLLHARAWELLTGSFIALYCVWRTRHAPSVSLLDQAAAALGVLLIGYAVVQFDGSTPFPGLNALVPVLGAALIIVFAQGKTWVGRALSSPALVLIGMISYSAYLWHQPLFAFARQRSLNEPGLPLMLSLTLLSLIVAWLSWRYVEQPFRKQGAFNRQQVFTSAGVASALFIALGLTGYLNNGFSQRFNVDPAIYEEFADPQIRDKCTQTTVDFCLFGAANPDATPALAVFGDSHSEALLSTFDSVARQQGKTIVHIGLGGCLPLLGVDVASGNYGPGVCEALASREFEYVKKHRIAKVVLVARWTLYTDGDYGKKPMSKYFLISADSQERSRAASRAVFKQALEATVRAYRDIGSEVVIIAQVPQQLINPENLYYRLARDTSDSQTQKLQRISELSVPVATHEHLQRFTREVFGQASESKQIGLITPDAAFCKDSQCLIGDMNSYYKDFNHLNAKGAGLLAGQISQIVAQ

SEQ ID NO: 69809 - protein, 407 aa, Pseudomonas syringae
MITSPPNEQTGEHTGSWLGVFALALAAFIFNTTEFVPIGLLSNIGQSFDMTPAQVGLMLTIYAWVVSLMSLPMMLATRNIERRKLLMFVFGLFVVSHVISAMASSFAILLVSRVGIAFAHAVFWSVTASLAVRIAPPGKQVQALGLLATGTSLAMVLGIPLGRVLGEALGWRTTFLGIAGVAALVVFLLARALPLLPSQNSGSLRSLPILFKRPRLMAIYLLTAIVVTAHFTAYSYIEPFTQTVSRLSGEMTTILLLVFGGAGIMGSIVFSLFSDRFPNGLLITAIGTLAVCLLMLLPLSGDATMLGTLTVVWGMAIMCFGLLLQARVLSLAPDATDVAMALFSGIFNIGIGGGALLGSVVSSHLGVANVGIVGGLLALGGLGLICYTTFLFGKTQPHAEMQADAKH

SEQ ID NO: 69810 - protein, 748 aa, Pseudomonas syringae
MKLGIVGLVLLGGLAIYLDAIVQEKFSGKRWTIPAKVYARPLELFVGQKLSRDDFLIELDALGYRRESVANGPGAAAVNGNTVDLNTRGFQFYEGTDAAQQVRVRFAGDSVADLSSGNGAKLAVARLEPLLIGGLYPKNLEDRILIKLDQAPPYLLDGLVAVEDRDFYHHFGVSPKSIARAIWVNTSQGQMRQGGSTLTQQLVKNFYLTNERSLSRKLTEAMMAVLLEIHYSKQEILEAYLNEVFVGQDGQRAVHGFGLASQYFFSQPLSELKIHQVAMLVGLVKGPSFYNPRRNPERAMERRNLVLDLFEQQGVATPEVVAAAKKLPLGVTKTGTLADSSFPAFLDLVKRQLREDYRDEDLTEEGLRIFTSFDPILQMKSQAAMDDTFKKLAGRKGVDEVEAGMVVTNPETGEVQALIGGREAGFSGFNRAIDAVRPIGSLVKPAIYLTALERPSQYTLTSWIADELFQVKGADGQIWKPQNYDHKSHGNIFLYQGLAHSYNLSTAKLGLELGIPTVFKTLAKLGVTREWPAYPSMLLGAGGLSPMEVATMYQTIASGGFNTPMRGIRSVLTAEGEPLKRYPFKIEQRFDPGAIYLVQNAMQRVMREGTGKSVYSVLPSSLNLAGKTGTSNDSRDSWFAGFSQDLLAVVWMGRDDNGKTPFTGATGALQVWTSFMRKANPLPLDMAMPDNVVQAWVDAQTGQGSDASCPNAVQMPYIRGSEPQPGATCGGAPAPATEVMDWVKGWLN

SEQ ID NO: 69811 - protein, 518 aa, Pseudomonas syringae
MADGYARATGKAGVVLVTSGPGATNAITGIATAYMDSIPMVVLSGQVASTLVGTDAFQETDMIGISRPIVKHSFMIKHPSEIPEILKKAFYLAQSGRPGPVVVDIPKDMTNPAEKFEYVFPKKAKLRSYSPAVRGHSGQIRKAVEMLLAAKRPIIYAGGGVIMGNASAQLTELAQLLNAPVTNTLMGLGCYPGTDRQFVGMLGMHGSYTANLAMHHTDVILAVGARFDDRVINGASKFCPNAKIIHIDIDPASISKTIKADVPIVGPVESVLTEMVATLKEIGETPDKASVAAWWKQIDEWRGSGDLFPYNRGDGTVIKPQAVIETLCEVTKGDAYVTSDVGQHQMFAAQYYRFNKPNRWINSGGLGTMGFGFPAAMGVKLSFPDEHVACVTGEGSIQMNIQELSTCLQYGLPVKIILLNNGVLGMVRQWQDMSYGARHSHSYMESLPDFVKLVEAYGHVGMRITDLKDLKPKMEEAFAMTDRLVFLDIQVDVSEHVYPMQIKDGSMRDMWLSKTERT

SEQ ID NO: 69812 - protein, 163 aa, Pseudomonas syringae
MRHIISLLLENEPGALSRVVGLFSQRNYNIESLTVAPTEDPTLSRLTLTTVGHDEVIEQITKNLNKLIEVVKLVDLSESAHIERELMLVKVKATGAQRAEIKRTTDIFRGQIVDVTASVYTVQLSGTSDKLDSFIQAIGTAAILETVRSGVTGIARGDKVLSI

SEQ ID NO: 69813 - protein, 338 aa, Pseudomonas syringae
MKVFYDKDCDLSIIQGKKVAIIGYGSQGHAQACNLKDSGVDVTVGLRKGSATVAKAEAHGLKVTDVASAVAAADLVMILTPDEFQSQLYKNEVEPNLKKGATLAFSHGFAIHYNQVVPRADLDVIMIAPKAPGHTVRTEFVKGGGIPDLIAVYQDASGNAKNVALSYASGVGGGRTGIIETTFKDETETDLFGEQAVLCGGTVELVKAGFETLVEAGYAPEMAYFECLHELKLIVDLMYEGGIANMNYSISNNAEYGEYVTGPEVINAESRQAMRNALKRIQDGEYAKMFITEGATGYPSMTAKRRNNAEHGIEVIGEKLRSMMPWIAANKIVDKDKN

SEQ ID NO: 69814 - protein, 415 aa, Pseudomonas syringae
MLSWDEFDKEDGEVVAKATNAGHANEANMDRLDSAGGLAAQEARAVTAADSAALIRAKKALDALDVAEGLAELEGASARVAVDEKMMINCRADLNQLVPFKYDWAWQKYLDGCANHWMPQEVNMTADIALWKDPEGLTDDERRIVMRNLGFFSTADSLVANNLVLAVYRLITNPECRQYILRQAFEEAIHTHAYQYCIESLAMDEGEIFNMYHEIPSVAKKAAWGLKYTRSISDPKFETGTVDTDKELLRNLIAYYCVLEGIFFYCGFTQILSMGRRNKMTGVAEQFQYILRDESMHLNFGIDVINQIKIENPHLWDAEMKEEATQMILQGTQLEIEYARDTMPRGVLGMNAAMMEDYLKFIANRRLSQIGLKEEYPGTTNPFPWMSEIMDLKKEKNFFETRVIEYQTGGALSWD

SEQ ID NO: 69815 - protein, 486 aa, Pseudomonas syringae
MTTLMVQGTTSDAGKSTLVTALCRWLTRQGVKVVPFKPQNMALNSAVTADGGEIGRAQAVQAQACFLAPHTDMNPVLLKPNSDTGAQVIIHGRAVTTMNAVAYHGYKEIAMQAVLESHRRLSESYPVIMVEGAGSPAEINLRANDIANMGFAEAVDCPVLLIADINRGGVFAHLVGTLELLSPSEQARVKGFIINRFRGDIALLQPGLDWLEARTGKPVVGVLPYVMDLHLEAEDGLDQRQTDKVEQVLNVVVPVLPRISNHTDFDPLRLHPQVNLQFIGPGQPIPPADLIILPGSKSVRSDLNYLRANGWETAIDRHLRYGGKLMGICGGLQMLGEHLHDPLGLEGAAGSSAGLGLLAMSTVLETEKQLRNVRGRLTLEDAEVSGYEIHAGVTTGAALEQAAVQLDDGRCDGAQSADGQILGTYLHGLFESPAACSALLRWAGLENVQSVDYHALRERDIERLADLVEKHLDGTLLRELCGLEAT

SEQ ID NO: 69816 - protein, 711 aa, Pseudomonas syringae
MKQACEFARQAEQNDKAHKNHWAEGTSSFQTGLEIAEILADLKLDQDSLVAAVMYRGVREGVIPLPDVEQRFGATVAKLIDGVLRMAAISASLSPRQSLVLGSQAQVENLRKMLVAMVDDVRVALIKLAERTCAIRAVKNADDEKRNRVAREVFDIYAPLAHRLGIGHIKWELEDLSFRYLEPDQYKQIAKLLHERRLDRERFISDVMSQLDNELQATGVTADISGRAKHIYSIWRKMQRKGLAFSQIYDVRALRVLVPEMRDCYTALGIVHTLWRHIPKEFDDYIANPKENGYRSLHTAVIGPEGKVLEVQIRTHAMHEEAELGVCAHWRYKGTDVKSSSNHYEEKISWLRQVLEWHEELGDIGGLAEQLRVDIEPDRVYVFTPDGHAIDLPKNATPLDFAYRVHTEIGHNCRGAKINGRIVPLNYSLQTGEQVEIITSKHGTPSRDWLNSNLGYITTSRARAKIVHWFKLQARDQNVAAGKTLIERELARLALPQVDFDKLADKANHKTADDMFAALGAGDLRLAQLVNLAQQQVEPDRVNEQLELIPRKATGYKPGKRGDIQIQGVGNLMTQMAGCCQPLPGDAIVGYITQGRGVSIHRQDCASVLQLGGREPERIIQVSWGPVPVLTYPVDIIIRAYDRSGLLRDVTQVLLNERINVLAVNTRSNKEDNTALMSLTIEIPGLDALGRLLGRISQLPNIIETRRNRTP

SEQ ID NO: 69817 - protein, 277 aa, Pseudomonas syringae
MYTVQDLLHLMTRLRDPQFGCPWDLKQTYASIVPHTLEEAYEVADAIEQGDLDHLKGELGDLLFQVVFYAQLAKEEGRFEFDGVVDGITRKLLRRHPHVFPTGELYATPETPRLTDEQVNLRWDEIKAEERAEKSGVPEQLSLLDDVPAALPALSRASKLQKRASQVGFDWPAALPVIDKVREELDEILEAMADNDAEGIAEEVGDLLFSVVNLARHLKVDPETALRSANSKFDRRFRFIEQALRHLQRPIEECTLEEMDALWGEAKRQEKSTPGCG

SEQ ID NO: 69818 - protein, 190 aa, Pseudomonas syringae
MSVRLDLLRHGETELGGGLRGSLDDALTDLGWQQMRSAVIDGGPWDRIVSSPLQRCARFSEELAQRLSLPLQLEPGLQELHFGDWEGHSPAQLMDTDAEGLGLFWADPYTFTPPNGEPVIDFSARVRNAVQRLHQAYDGERVLVVSHGGVMRLLLAQARGLPREQLLQVVVGHGALLSIQVAAGGLLTEV

SEQ ID NO: 69819 - protein, 974 aa, Pseudomonas syringae
MESHMQTDTTRENSPTGAPQASQAQQDLSATAPGQLRVIKRNGTVVPYTDDKITVAITKAFLAVEGGNAAASSRIHDTVARLTEQVSATFKRRMPSGGTIHIEEIQDQVELALMRAGEQKVARDYVIYRDSRAKERAGRAPEDQVQAHPSIRITLADGSFAPLDMGRLNTIVTEACEGLAEVDADLIQTETLKNLYDGVALKDVNTALVMTARTLVEREPNYSFVTARLLMDTLRAEGLGFLGVADSATHHEMADLYAKALPAYVATGIKFELLNPVLAEFDLEKLGKAINHERDQQFTYLGLQTLYDRYFIHKDGVRFELPQIFFMRVAMGLAIEEKAREDRAIEFYNLLSSFDYMSSTPTLFNAGTLRPQLSSCYLTTVPDDLSGIYHAIHDNAMLSKFAGGLGNDWTPVRALGSYIKGTNGKSQGVVPFLKVVNDTAVAVNQGGKRKGAVCAYLETWHMDIEEFIELRKNTGDDRRRTHDMNTANWIPDLFMKRVFDDGPWTLFSPSEVPDLHDLTGKAFQERYEYYEALTEYPGKVKLFKTIQAKDLWRKMLSMLFETGHPWLTFKDPCNLRSPQQHVGVVHSSNLCTEITLNTNKDEIAVCNLGSINLPNHIVNGKLDTDKLKRTIDVAVRMLDNVIDINYYSVPQARNSNLRHRPVGLGIMGFQDALYLQHIPYGSDAAVQFADSSMEAVSYYAIQASCDLADERGAYETFQGSLWSQGILPLDSQQILIEQRGQKYIDVDLKESLDWAPVRARVQKGIRNSNIMAIAPTATIANITGVSQSIEPTYQNLYVKSNLSGEFTVINPYLVRDLKARDLWDSVMINDLKYYDGSVQQIERIPQELKELYATAFEVDTKWIVDAASRRQKWIDQAQSLNLYIAGASGKKLDVTYRMAWYRGLKTTYYLRALAATSTEKSTVNTGKLNAVSSGGHGPDDSAITAPRPTEAAPAGPAPVPKACAIDEPDCEACQ

SEQ ID NO: 69820 - protein, 448 aa, Pseudomonas syringae
MIRSLRLRLMLGAATLAVIFMLLMLPALQGAFSLALRGAIEQRLASDVTTMISAARVEDDHLLMPSVLPGEQFNLPGSRLLGYIYNRQGQMVWRSLSTESENIDYHPHYDGQGSEFTKIKEINGDEFFVYDVEIRLLGGRNAAYSIVAVQPLRGYQETIDGLRRKLYLGFGAALAVLLGLLWMGLTWGLRALRGLSQELDQVESGVRDSLSEEHPSELLRLTDSLNRLLRSEREQRIRYRDSLDDLAHSLKTPLAVLQGVSENIAKRPEDVEQAWVLQSQIERMSQQIGYQLQRASLRKSGLVRHHVMLRPVVESLCNTLDKVYRDKQVKATLDLPELCQVHMEEGALLEMLGNLLENAYRLCLSEVRVSFTRSADGDELCIEDDGPGVPHSQRARILERGERLDRQNPGQGIGLAVVKDIIESYGAQLTLGDSPLGGAAFRIHFLAQ

SEQ ID NO: 69821 - protein, 424 aa, Pseudomonas syringae
MKIMTKALNRTTLGLALGLASSQLLAAGFALNEQSISGMGTGFAGRSSSADDASTVFGNPAGMSRIKREQISVGAAAVIAKTDIDNGRGTFGGSNDGDMVPVVGVPMGYYVKPIDDHWAFGLGVYVPFGLVTDYEKGFAGRYWGDKSHVQIVTFQPTVSYAFNDKVSIGFGPTINRIDGELTSAVPNRASLGTNDGKVKIKGDDTAIGFNAGILVQATDTTRLGLTYHSKVDYKLEGKTKVEGSGFGPFGGQKYDASLDISTPESVDFSITQQLDENWTVYAGSTWTRWSRLKDITVENSGVPTALASSIGTITEEQDWHDTWAHAIGASYKVNKEWTLRTGFSVDQSPTNNVNRSPRIPTGDRKIISFGAGWSPTDDLTIDVAYSYLREDETKIRDSSATKGSYSADYRNTAHGLGTSVTYRF

SEQ ID NO: 69822 - protein, 450 aa, Pseudomonas syringae
MTTRQPIYKSLYFQVIVAIVIGILIGHFYPETGKALKPLGDGFIKLIKMVIAPIIFCTVVSGIAGMQNMKSVGKTGGYALLYFEIVSTIALLIGLIVVNVVQPGAGMNIDVSTLDASKIAAYVTAGKDQSIVGFILNVIPNTIVGAFANGDILQVLMFSVIFGFALHRLGSYGKPVLDFIDRFAHVMFNIINMIMKLAPIGAFGAMAFTIGAYGVSSLVQLGQLMICFYITCVLFVVLVLGSICRAHGFSIFKLVRYIREELLIVLGTSSSESALPRMLIKMERLGAQKSVVGLVIPTGYSFNLDGTSIYLTMAAVFIAQATNTHMDITHQITLLLVLLLSSKGAAGVTGSGFIVLAATLSAVGHLPVAGLALILGIDRFMSEARALTNLVGNAVATVVVAKWVGELDTDKLQSELASGGSAILETRPEDDLGVAEGPTPANAVNTTKTV

SEQ ID NO: 69823 - protein, 274 aa, Pseudomonas syringae
MGTLSVNQNKLQKRLRRLAGEAVADFNMIEEGDKVMVCLSGGKDSYTLLDVLMHFQKVAPIRFDIVAVNMDQKQPGFPEHVLPAYLKELGVEYHIVEKDTHSVVKELIPEGKTTCSLCSRLRRGTLYTFADQIGATKMALGHHRDDIIETFFLNMFFNGALKAMPPKLRADDGRNVVIRPLAYCHEKDIQAYSDLKQFPIIPCNLCGSQENLQRQVVKDMLLDWERKTPGRTESIFRALQNVQPSQLADRKLFDFSQLRIDETAASRFVNVVNI

SEQ ID NO: 69824 - protein, 673 aa, Pseudomonas syringae
MLMPTGGGKSLCFQVPGLLRDGLCVVVSPLIALMDDQVATLDELGVSAAALNSTLNAEQQRELANRIRLGEVKMLYLAPERLVQPRMLSFLQNLKIALFAIDEAHCVSQWGHDFRPEYLQLGQLAELFPDVPRIALTATADKRTREEIVTRLHLQNAERFLSSFDRPNIFYRIVPKEQPRKQLLAFLSERRSDAGIVYCLSRKKVDEVAVFLSENGYPALPYHAGLPSETRAANQKRFLNEEGLIMVATIAFGMGIDKPNVRFVAHMDLPKSLEAYYQETGRAGRDGLPADAWMAYGLQDVLMLKQMLQNSEGDERHKRLEQHKLDAMLALCEETRCRRQTLLAYFDEDMPNPCGHCDNCVDGVQTWDATEPARQALSAIYRTGQRYGVGHLVDVLLGKSNDKVQSFGHQHLSVFGVGKARTEAEWRSLFRQLVARGLADIDLEGYGGLRLSDTCRPLLRGEVSLELRRDLKPQTTSRSSSGSPASQLVRGEEREQWEALRALRRKLAEEHGVPPYVIFPDSTLLEMLRSKPGSMAEMAKVSGVGARKLERYGEAFLEVLSGKTEAPQVVADIRHELISLARAGMTPTQIAGQLQCSEKNVYTLLAEAIGKQQLSIEQALDLPEDLLGEVQDAFLDGEGELPPVSAIAEQFAGRVPEGVLYCVRAALQSEFEV

SEQ ID NO: 69825 - protein, 189 aa, Pseudomonas syringae
MLVTQMKNQNPLDPQDNTQFVAQLAQFSSLESMQNLTKTVDTIASSYQSSQALQASSLVGRSVIIDSSSTTVDTTKGMTGSIVLPSATSATSVKVYDAQSNLVDTVELGAQKAGTISFAWDGTDGDGAAVASGNYTFKAEGSVDGKNTQLSTYLPATVNSVTLGVNGAETMLNLASGSVALSKVQTIGL

SEQ ID NO: 69826 - protein, 227 aa, Pseudomonas syringae
MFELAPVLLSALVLGLLGGGHCLGMCGGLMGALTLAIPKEQRNRRFRLLLAYNLGRILSYAVAGFCSGLVGWAVAQSPLATGLRVMAAVLLIVMGLYLAGWWSGLTHIERLGRGLWRYVQPLASRLLPVSSLPRALLLGALWGWLPCGLVYSALLWAASQGNPVDSALLMLAFGLGTWPVLLATGLAAERTTALLRKRGVRVAGGLLVIVFGVWTLPGPHQHWLMGH

SEQ ID NO: 69827 - protein, 213 aa, Pseudomonas syringae
MNVNRLLIVGAGAFGREVHAWLLDWVKLNPGWVIAGFINDGPGSIARFDHYPAVVSSVEGYEPGPEDYLVCAIAKPADKRLVVEKLLGKGARFFTLIHPSVIMGENVVIGQGAVICPSTVLSVDLRIGAFVTLNIGCLVGHDADIGDFSTLSGHCDITGGVVLEEEVFMGTHASVLPNVKVGKQAVVGAGSVAIRNVAAGITVFGVPAKRISG

SEQ ID NO: 69828 - protein, 159 aa, Pseudomonas syringae
MNKSSAQGSEDPILQWVTFRLDNESYGINVMQVQEVLRYTEIAPVPGAPSYVLGIINLRGNVVTVIDTRQRFGLAPVEVSDNTRIVIIEADKQVVGILVDSVAEVVYLRQSEVETAPNVGNDESAKFIQGVCNKNGELLILVELDKMMSEEEWSELESI

SEQ ID NO: 69829 - protein, 262 aa, Pseudomonas syringae
MRVWAVANQKGGVGKTTTTIALAGLLADAGKRVVVVDLDPHGSMTSYFGHNPDELEHSAFDLFLHKGAVPDGLPGQLLLPTSDKRISLIPSSTALATLERQSPGQSGLGLVIAKSLAQLWQDFDYALIDSPPLLGVLMVNALAASQQLAIPVQTEFLAVKGLERMVNTLTMINRSRKVPLPYTIVPTLFDRRTQASMGTLKLLRDSFPEHVWQAYVPVDTRLRDASRLGLTPSQNDSKSRGVIAYRALLKHMLAEQLNAQVA

SEQ ID NO: 69830 - protein, 261 aa, Pseudomonas syringae
MDNNDSMADFESTLKRHAQELVTSLEKGRFGEAVQLIHELNQTRDRGLYQEVGKLTRELHSAIVNFHIDPHMPQAEEVSQITDATERLSYVVRLTENAANRTMDLVEESTPIMNGLSSDAKALSEDWGRFMRREIGAEEFRELAKRVDGFLTRTEKESHTVSAHLNDILLAQDYQDLTGQVIKRVTQLVTEVEGNLLKLVLMASHVDRFAGIEHDEESILAEKDPKKHLDKGEGPQIHADKREDVVSGQDDVDDLLSSLGF

SEQ ID NO: 69831 - protein, 378 aa, Pseudomonas syringae
MAENENGQDKTEDPTEKKVKDSRAEGQIARSKELTTLVVMLMGAGGLLMFGAGIAQMMSDLMRDNFTISRETIMDQSYMGKALLSSGLHALVVMLPFLIAMLAAALVGPILLGGWLFSTKSLMPKFSRMNPAAGLKRMFSPHALVELLKSFGKFLIILAVALVVLSKERNDLVAIAHEPLEQAMIHSLLVVGWSSFWMACGLMFIAAADVPFVLYEAHKKLLMTKQEVRDEHKNSEGSPEVKQRIRQLQREMSQRRMMASIPEADVIITNPTHFAVALKYDPEQGGAPMLLAKGTDLVALKIREIGAHNQILILESAALARSIYYSTELDQEIPAGLYLAVAQVLAYVYQIRQFHSGQGKRPDPLGDVKIPPDLQRDA

SEQ ID NO: 69832 - protein, 695 aa, Pseudomonas syringae
MAKTDAQLHRQARLQNPTVKSHLAYILLSGFALMVMYTLLRIGLLVYNREMIGDTPASTFLEALFNGTRFDLRLTVYLLIPLVLSLFSARAMAARGFFRFWLTLVGSITLFFGLMEMDFYREFHQRLNGLVFQYVKEDPKTVLSMLWYGFPVVRYLLAWAIVTWLLSLVFKGIDRLTRPRHVTTTGTHHVSSVAPWYLRIGVFVLVLLVMVVCIRGTLRQGPPLRWGDAYTTDSNFANQLGLNGTLTLITAAKSRMSEDRDNIWKATLPQADAQQTVRDMLLTPHDKLVESDIAAVRRDFTPPVENTLPIRNVVVILMESFAGHSVGALGNDANITPYFDKLSKEGLLFDHFFSNGTHTHQGMFATMACFPNLPGFEYLMQTPEGSHKLSGLPQLLSTGRNYDDVYVYNGNFAWDNQSGFFSNQGMTNFVGREDFVNPVFSDPTWGVSDQDMFDRGAQELKARQDGKPFYALLQTLSNHTPYALPDPLPVERVTGHGSLDEHLTAMRYADWALGQFFEKAKKEPYFKNTLFVVLGDHGFGNNKQLTEMDLGRFNVPLLLIGPGVQEKFGQRSSIVGTQVDVVPTIMGRLGGLNRNQCWGRDLLNLPEGDKGFGVIKPSGSEQVVAIISGNRILIEPTEMPAKLLTYTLGAKPSAEEVPDAPDTQELKRKLESFLQTATKSLLDNTAGVEASKNRN

SEQ ID NO: 69833 - protein, 338 aa, Pseudomonas syringae
MNDRAMVAKLSKVEKAAVLLLSLGETDAAQVLRHMGPKEVQKVGVAMAQMRNVHREQVEEVMSEFVDIVGDQTSLGVGSDGYIRKMLTQALGEDKANGLIDRILLGGNTSGLDSLKWMEPRAVADVIRFEHPQIQAIVVAYLDADQAGEVLGHFDHKVRLDIILRVSSLNTVQPAALKELNQILEKQFSGNANTSRTTLGGIKRAADIMNFLDSSIEGALMDSIREVDEDLSVQIEDLMFVFNNLSDVDDRGIQALLREVSSDVLVLALKGSDEAIKEKIFKNMSKRAAELLRDDLEAKGPVRVSDVETAQKEILTIARRMAEAGEIVLGGKGGEEMI

SEQ ID NO: 69834 - protein, 442 aa, Pseudomonas syringae
MQNSHAAASGDNQAVSSMVKLYVWAAVILIIAEMIGAISIPLGPGKVVLLPMVWALLIGAMVGIASRRLPGSIGIDHGIQLRAASILQPALLIFIAKLGLVVGGSLPVVFASGWALVFQEFGHFVGTVVLGLPVALMLGIKREAIGATFSVGREPSLAIIGERYGMDSPEGRGVLAEYLTGTLFGALFIAIVAGYIASLGIFHPNSLAMGSGIGSGSMMAAAAGAIAAQQTPEVAKEVMTLAAASNLITTTIGTYFTLFISLPLAVWGYRVLEPLIGRTTKASMSEEGIRHSDVSLDVPELGWSGKISAWLAAGALALIANYVGYKTLSADAFTGMGIMIFCAFVGEALCSLIGRKIPAVCMVSLVAMFLTSPACPWAAEIARLTSSINMLAVITPMLTFAGLSIAKDLPAFRRLGWRIVLVSFLANFGTFIGAVLIAEMFH

SEQ ID NO: 69835 - protein, 458 aa, Pseudomonas syringae
MAISVFDMFKIGIGPSSSHTVGPMRAGALFVTELRNQNRLHSVERIEVRLYGSLSATGIGHGSDRATVMGLMGEWPDQIDPSQVNQRIDALRADNQLMLAGEQAITFVWERDMCLLDESLPYHPNGMTLCAYGKTGEVHEQTYYSVGGGFVIDAEQAASGVLDNDTTVLPYDFFSGAQLLKLCKTHGMSISELMMANEKVWRSEAEIREKIMVIWTAMRACVDKGLLETGILPGGLNVRRRAYRLHQSLQNLDNPNVIGSTLSAMEWVNLFALAVNEENAAGGRMVTAPTNGAAGIVPAVLHYFMKFKPTANDDDVVRFFLSAAAVGILCKKNASISGAEVGCQGEVGSACAMAAAGLAEILGATPEQVENAAEIGLEHNLGLTCDPVGGLVQIPCIERNAIAAVKAINAAQMALRGDGEHHISLDHAIRTMRDTGADMHDKYKETSRGGLAVNLIEC

SEQ ID NO: 69836 - protein, 204 aa, Pseudomonas syringae
MSREQLSQEIIEAGRFLYGRGWSPATSSNYSVRLSASEALLTVSGKHKGQLGPDDVLATDLAGNSLEPGKKPSAETLLHTQLYLCRPQVGAVLHTHSVNATVLSRLTASDHLVFEDYELQKAFNGVLTHESQVVVPIFDNDQDIARLAANVQPWLDAHPECAGYLIRGHGLYTWGARMSDALRQIEAFEFLFECELKMRTVMNR

SEQ ID NO: 69837 - protein, 363 aa, Pseudomonas syringae
MSGNTFGKLFTVTTAGESHGPALVAIVDGCPPGLELDLQDLQRDLDRRKPGTSRHTTQRQEADEVEILSGVFEGKTTGASIGLLIRNTDQKSKDYSAIKDLFRPAHADYTYHHKYGIRDYRGGGRSSARETAMRVAAGAIAKKYLATQGIVIRGYMSQLGPIQIPFKTWDSVEDNAFFCPDPDKVPELEAYMDQLRRDQDSVGAKITVVAEGVMPGLGEPIFDRLDAELAHALMSINAVKGVEIGAGFDCVAQRGTEHRDEMTPQGFLSNQAGGILGGISSGQPIIAHLALKPTSSITTPGRSIDVDGNAADVITKGRHDPCVGIRATPIAEAMMAIVLLDHLLRHRGQNADVSVATPVLAQL

SEQ ID NO: 69838 - protein, 280 aa, Pseudomonas syringae
MNDGKSYIPAVQLGEVMRALGVGEVLESKNPKFAAGDHVQGALGTQDYFAGEPKGFYKVDTSLAPLPLYLSALGMTGMTAYLALLDVGQPKSGDTVLISGAAGAVGSIAGQIAKLKGCRVVGIAGGKDKCSLLTSELGFDAAIDYKSEDVMDAIKRHCPDGVNVYFDNVGGDILDAALSQLAVGARVVICGAISQYNNTTAIKGPANYMSLLVNRARMEGFIVLDHADRFAEAGQVMAGWIKEGKLKSKEHIVEGLETFPETFQMLFNGENQGKLILKVE

SEQ ID NO: 69839 - protein, 380 aa, Pseudomonas syringae
MRIVADENIPLLDAFFAGFGEIRRLPGRSIDRAAVADADVLLVRSVTPVTREMLEGSPVRFVGTCTIGTDHLDLAYFQDAAIQWSSAPGCNARGVVDYVLGSLLTLAEIEGVDLRQRTYGVVGAGQVGGRLIAVLKALGWKVLVCDPPRQSAEGGDFVSLDEILQRCDVISLHTPLDKSGQSPTWHLLDEARLRQLRQGAWLINASRGAVVDNRALHDVMLEREDLQAVLDVWEGEPQVNVALADLCVIGTPHIAGYSLDGRQRGTAQIYQALCTFLDQPAAISLADLLPTPWLAQVSLDAATDPQWALNMLCRGVYDPRRDDADFRRSLTGDTASQRLAFDALRKHYPPRREIEGLKVHLEGESDTLTQLIRALGAVRV

SEQ ID NO: 69840 - protein, 1073 aa, Pseudomonas syringae
MPKRTDIKSILILGAGPIVIGQACEFDYSGAQACKALREEGYRVILVNSNPATIMTDPAMADATYIEPIKWQTVAKIIEKERPDALLPTMGGQTALNCALDLEREGVLEKFGVEMIGANADTIDKAEDRSRFDKAMKSIGLACPRSGIAHSMEEANAVLEKLGFPCIIRPSFTMGGTGGGIAYNREEFEEICARGLDLSPTKELLIDESLIGWKEYEMEVVRDKKDNCIIVCSIENFDPMGVHTGDSITVAPAQTLTDKEYQILRNASLAVLREIGVETGGSNVQFGICPDTGRMVVIEMNPRVSRSSALASKATGFPIARVAAKLAVGYTLDELSNEITGGKTPASFEPSIDYVVTKLPRFAFEKFAKADARLTTQMKSVGEVMAIGRTFQESLQKALRGLEVGVCGLDPKLDLSHPESMSTLKRELTVPGAERIWYVADAFRAGMTVEEIFAMNMIDPWFLVQIEDLVKDEEKIKTLGLSAIDRDLMYRLKRKGFSDARLAKLVGVTEKNLRTHRHKLDVFPVYKRVDTCAAEFATDTAYLYSTYEEECEANPSTRDKIMILGGGPNRIGQGIEFDYCCVHAALALREDGYETIMVNCNPETVSTDYDTSDRLYFEPVTLEDVLEIVRVEKPKGVIVQYGGQTPLKLARALEAAGVPIIGTSPDAIDRAEDRERFQQMVERLNLRQPPNATVRSEDEAIRAAAKIGYPLVVRPSYVLGGRAMEIVYQEDELKRYLREAVQVSNDSPVLLDHFLNCAIEMDVDAVCDGTDVVIGAIMQHIEQAGVHSGDSACSLPPYSLPAHIQDEMREQVKKMALELGVVGLMNVQLALQGEDIYVIEVNPRASRTVPFVSKCIGVSLAMIAARVMAGKTLKELNFTKEIIPNFYSVKEAVFPFAKFPGVDPILGPEMKSTGEVMGVGDTFGEAFAKAQMGASEVLPTGGTAFISVRDDDKPLVEAVARDLINLGFEIVATAGTAKLIEAAGLKVRRVNKVTEGRPHVVDMIKNDEVTLIINTTEGRQSIADSYSIRRNALQHKIYCTTTIAAGEAICEALKFGPEKTVRRLQDLHAGLKA

SEQ ID NO: 69841 - protein, 255 aa, Pseudomonas syringae
MGKTLIEAVQQAPGAGLTAAVDRPDSTLVGADAGELAALGRIGVPLSDDLAKVMDEFDVLIDFTHPSVTLKNLAFCRKAGKAMIIGTTGFSAEEKQRLVEAGKDIPIVFAANFSIGVNLCLKLLDTAARVLGDEVDIEITEAHHRHKVDAPSGTALRMGEVVANALGRDLEKVAVYGREGQTGARDRQTIGFATIRAGDVVGDHTVLFAADGERVEITHKASSRMTFAKGAVRAAMWLDGKAPGLYDMQDVLGLH

SEQ ID NO: 69842 - protein, 285 aa, Pseudomonas syringae
MRMIIVSGRSGSGKSTALDVLEDNGFYCVDNLPAGLLPELAERALINTELAEPLLAVSIDARNLPSHLTRFPQMLDEVRSRNIQCDVLYLDADEATLLKRFSETRRRHPLSTADRSLAEAIRDETTLLGPIIDLADLKINTTHLNLYQLRDALKLRLLNKPEPGTAFLIESFGFKRGMPVDADLVFDVRCLPNPYWKPELRDHSGLEQPVIDYLSAQADVEEMFQDIFSYLNKWLPRFAASNRSYVTIAIGCTGGHHRSVYLTERLGQVLQQSLKNVQVRHRDLS

SEQ ID NO: 69843 - protein, 90 aa, Pseudomonas syringae
MPVRQITIINKLGLHARAAAKFVGVAGKFPCKIRVGRTPDSMVDGKSIMAVMMLAAGKGTDIHLHTEGEFEQEALDGLVELIDNKFDEGE

SEQ ID NO: 69844 - protein, 638 aa, Pseudomonas syringae
MGRIIGIDLGTTNSCVSILENGNVKVIDNAEGTRTTPSIIAYANDGEILVGQSAKRQAVTNPHNTLYAVKRLIGRKFDEQVVQKDIQMVPYKIVKADNGDAWVEVNGQKMAPPQISAEILKKMKKTAEDYLGEAVTEAVITVPAYFNDSQRQATKDAGRIAGLDVKRIINEPTAAALAYGMDKAKGDHTVIVYDLGGGTFDVSVIEIAEVDGEHQFEVLATNGDTFLGGEDFDIRLIDYFVDEFKKESGMSLKGDPLAMQRLKEAAEKAKIELSSSTQTEVNLPYITADATGPKHLVVKISRSKLESLVEDLVQRTIEPCRIALKDAGIDIGKINDVILVGGQTRMPLVQKLVTEFFGKEARKDVNPDEAVAMGAAIQGAVLAGDVKDVLLLDVSPLTLGIETMGGVMTALIEKNTTIPTKKSQVFSTADDNQNAVTIHVLQGERKQAGQNKSLGKFDLAEIPPAPRGVPQIEVTFDIDANGILHVGAKDKATGKQQSIVIKANSGLSEEEIQQMVRDAEVNSEEDRKFEELASARNQGDALVHSTRKMIADAGDKVTAEEKTAVEAALVALEAAIKGDDKAVIEAKVEELSKVSAPIAQKMYAEQAENPEAAAKPAEETAKADDVVDAEFEEVKDHK

SEQ ID NO: 69845 - protein, 537 aa, Pseudomonas syringae
MLVSVIALSLFSVQVSVLFNSWYRDFYNALQNKDLAAFTHLILYFSGIAAIAILAAVYRLYLTQLLTIRWRRWLTEQHFARWLEHKNYYHLEQGGYTDNPDQRLSEDLNEFTTSTLSLGLGLMSSVVSLVSFSVILWGVSGSIELFGITIPGYMFWAAMLYAIVGSLLTHWIGKRLIPLNNQQERYEADLRFALVRVRENAESIALCEGERNENQRLSGRFSMIWNNFRASMKVQKRLTFFTSGYSQIALIFPFIVAAPRYFAGKIELGDLMQINSAFGNVQENFSWFISAYSTLASWRATCDRLLSFRQALTDHEAQQPAIERVHADDALDLRNLGLSIAGGRQLLSEADLHIAAGERVMLSGRSGSGKSSLLRALGGLWPHGSGQIRLPAEPALFLPQRPYLPIGTLREAMSYPQSADHYSPERFADALKKCRLEHLIPRLDESNHWQRFLSPGEQQRMAFARALLVAPRWLYMDEATSAMDEEDEAAMHRVIIDGLPGLTLFSIGHRSSLKRFHSRHVRVEDGKLIEQAASGAV

SEQ ID NO: 69846 - protein, 547 aa, Pseudomonas syringae
MTTTEATMLKHAVIPFLVGASLLASAPFAHAASNLVFCSEGSPAGFDPGQYTTGTDFDASAETIFNRLSQFERGGTAVVPGLATKWDISEDGLTYTFHLREGVKFHTTSYFKPTREFNADDVLFTFNRMIDKDMPYRKAYPTEFPYFTDMAMDTNITKIEKVDDHTVKFVLGKVDAAFIQNMAMSFASIQSAEYAAKLLKEGKPELINQQPIGTGPFVFKSYQKDSNIRYTGNKDYWKPEDVKVDNLIFAITTDASVRMQKLKKNECQITAYPRPADLAPLKADKNLKMPDQAGFNLGYIAYNVMPQIKGEDHPNPLAQLKVRQALDMAVNKQQIIDSVYQGAGQLAVNAMPPTQWSYDTTIKDAKYDPEKARQLLKEAGIKEGTEITLWAMPVQRPYNPNAKLMAEMLQADWKKIGISAKIVSYEWGEYIKRAKNGENGAMLIGWSGDNGDPDNWLGTLFGCDALNGNNFAKWCDKPFDTLIHQAKQTPDQAKRTELYKQAQHLLKDAVPMTPIAHSTVYQPMRTSVQDFKISPFGLNSFYGVSVK

SEQ ID NO: 69847 - protein, 1271 aa, Pseudomonas syringae
MGRLSRAVATLTRWSLSLCALILVLAALYVSLGRQLAPLVAEYRVDVETRASSALGIPLSIGSLEGSWSRFAPVLLAHDVMVGEGANALRLDRVRVVPDLWASLLARQVRIAHLEVDGLQFTIKQDQEGGWAVQGLPLRNDTPLDPGQLLNQMQMVSHLSLLDSQVTVQPLDAAPLTLTYVNLSLTTGSYHQRLDARLTLPDGQPFALNVRSRIQASQWKDGEADFYASLPQSDWAKWLPKSATREWTLSRLQAGGDLWMSWGKGTVQSATARLNAPQIKGVYADRKPSTIDNLALNAWFARTATGFDLNLDSLAMNLGSDRWESRLQLTQTAATPDSEELWHVQADRLDLTPLTPLIDSLAPLPEKAMAVVDGLKVTGGLRNVLLDYRPQATGDKRLGFAANLDKVGFNAYRGAPAAGNVSGAISGDLGQGELRLATDDFMLHLDPIFAKPWRYQKANARLTWKLDDQAFTLIAPYIKVLGDEGKIAADFLIRIHLSHDQEDYMDLRVGMVDGDGRYTSKYLPAALSPELDHWLRTAVVSGAVKQGFFQYQGSLNKNSPDTAHVISLFFDVSNATLAFQPGWPSLTGVDGKVYVENSGVRVKASKGQLFDTKVSNVLVNIPHVPSGQDSHLLVDGNFSGSLVDGLKILQQAPIGTGSTFAGWQGEGPLDGKLKLDIPLAKGVEPKVVVDFSTDNARLKLADPVLELTRLKGDFRFDSNSGLSGKGIKAQAFDRPVTAEIAAEGKPGANVTRITANGQITVKKLTDWLSVTQPVPASGDLPYQLQLILDSKDSPLLINSTLKGVAIDLPAPFGKAADQERPSEFRMTLQGPERRLGVAYDNLANFAFAAPGGKFADGRGELYLGRGGAVVPDAKGLRIRGELSELDIAPWQALAGRYSSNDPGDSAKQLLNSVDLQIGKLTAMGTTLNEVRVQLQRSAAAWALSLDSALAKGTATLPDAKAAPIGINMAYVRLPAPDPNAAVVENAPDPLADVDPRKIPALDIKISQLFQGDQLLGAWALKIRPTPTGMRMSDLSLGLKGILLEGDGAWEGAPGASSSWFKGRLAGKNLEDVLKAWNFAPTVTSESFEMNVDGRWPGSPAWVGLKRYSGSLDATLNRGQFVEVEGGAQALRVFGLLNFNSIGRRLRLDFSDLLGKGLSYDRVKGLLVASDGVYVTRNPITLTGPSSNLELNGTLDMVRDRVDAKLLVTLPVTNNLPIAALIVGAPAIGGALFLVDKLLGDRVARFASVQYKVEGPWKEPKITFDKPFEKPQ

SEQ ID NO: 69848 - protein, 160 aa, Pseudomonas syringae
MAKLKKHPTGTIAQNKKARHDYFIEHKFEAGLVLSGWEVKSLRATKVQLVDSYVLLKDGEAWLMGCHITPLKTASTHVIADPTRTRKLLLNQRELEKLTSSVQQKGYACVALSIYWKQHLIKCEIALGKGKKEYDKRHTERERDSDRELQRAVRTKGKDD

SEQ ID NO: 69849 - protein, 3432 aa, Pseudomonas syringae
MRCIKNRTSWTENQKRFRVMSADQFSTSFAQQRLWFLEQYEPGTGLYNIPAACRINGVLRLDILERSLNAIIERHEALRTSFSVDKDLPVQVIMREAPVLIRPVKLAALLERNLTLQQFMDDEAASPFDLTQAPLIRATAIEVRADEHVLLLTLHHIVADGWSMSVLLDELSRLYNAELNGVAADLQALEIHYADYAVWQREWLQEEVVQPQLDYWETQLKDAPSVLELPTDRPRPARLDYAGNRVHFTLPAELGAQLQELSQRHHVTLFTTLICAFNTLLLRLSNQPDICIGYPVANRGRAEIQPLIGFFVNTLVLRSQMSTQQTFAAYLQQTQSTLLDSDLNQDIPFERLVEALRPARELNHSPLFQVLFSFFNQDLAGGLTLSGTTSGTLEQNCRFSKFDLSLEMNTRQNTLGGFFEYRTALYDQATIERMSGYYRVLLESIVVDTTARIGDLEILPLQERLSRLATAPTPAHTLSADQCVHDLVLTQARATPDATAILCAGQEVSYRQLEQQATAIADRLIALGAGPETCVAICLDRSVTMVAALLGTWMAGAHYVPMDPGYPHARLLHMLQDSKARILLSERPHVQAFSAAAVQIVLLDEVQSNPRPSDIRHPVAALNTAYVIYTSGSTGLPKGVQVPHRAVVNFLLSMTNQPGINAGDRLLAVTSISFDISVLELFLPLISGASLVLADSEAAADGQALIKLAMHQDVTFIQATPSNYWLMLEAGWPSTLKLKVLCGGEALPPVLAQKLLQRSDSVWNMYGPTETTIWSAISRVTGSASTLGRPIANTVLRVLDENARLCATGSPGELHIGGEGVARGYLDRADLTAQKFVPDPYASGSGARIYKTGDLVRWLPNGEIEFLGRIDHQVKVRGFRIELGEIETRLVSFPSVRQGAVIVREDQPGDQQIVAYLLVGEQYAAEPEQLRHHLAQTLPGYMIPNHFVVLEQFPLTPNGKLDRKRLPAPNTTPPGANRVLPGTPMEKAVADIWQHVLNLEGVGITDNFFELGGHSILATQVVSRLRNTLQIELSVRTLFEAPTIAQLIASLGSPTVRQAQSIIPRSPSQHRQPLSYAQERLYFLDQFEPASAAYTIALALELNGPLEASLLHRCLNELIRRHEPLRTTFVLDADGKPQAQVHPEALSQLVYRDLRHHSTPYLLAQTQANAEAQHLFSLEKGPLFRASLLQTGEQQHILLLTLHHIVSDGWSVAVLAREVMALYQAFAQGQPSPLAPLDIQYGDYAAWQREWQAPIEFASKTDYWSCHLAQAPTTLELPTDRPRPAIQTYRGRVISRSLGKTLSARIDALSQAQEGTPFMTLLALFNVLLNRYSGQQDIVIGTPIANRTRPEIEPLIGLFVNTLAMRIRLEGNPTFSELLGQVRDTTLNAYAHQELPFEKVVESLAIPRDMSRSPLFQVLFVLQNTALEAMNLPGLEIGNFALESTTAKFDLTLELTPSSEGYQMRWEYNSDLFDADTIERMTRHFETLARSAISDPSQPAQRLSMITAQEKQHILHEWNATQQVYRPLAVHQLFTEMSEPCADLPAVMFGTASMSYRQLEARSNQFAHYLQRSGVLPGTLVGICLERSMHVPVAILAVLKAGAVCVPMDPSYPTERLRFMAQDARADLIITLTTLRPRVEGCSHTIICMDQCADAWHEPSSNPARPQNLLDLCYVIYTSGSTGLPKGAALTHEMLTNLVQWQLTESRLSRGDNTLQFSPLSFDVSFDEFFSTWASGGTLVMVSEDTRRDPVLLLELIQRQNIARLFIPFVALQGIADAARDVDKLACLKEVVCGGEQLQVTQEVVDLFQKLPDALLHNQYGPTESHFVTGYRLSGDATQWPALPPIGKPLFNSQMYVLDASLEPVPVGVRGDLYIAGVHLARCYWERPDITAERFVPNPHSLSPGARMYKTGDVARYLPDGNIEYLGRSDHQVKIRGFRIELAEVEQALMAQETVASAAAMVREDRPGLKKLVGYLVAKSDCTLNIVDIKEHLRRTLPDYMVPTTFVILPTLPLTPSGKVDKRSLPQPENDNHENQYVAPRSDAERQLAAIWASVLNLSQVGITDDFFELGGHSLLATQVVSRIRKQLNVDMALRTLFEAPTIEQLLPRLSTSPVVTLSAITATNTGSGMKVASYAQERLFFLNRLDRSSTAYNIALALELNGPLKKPVLQQCLDELIRRHEPLRTTFALQEDGQVVSLVHPPQLDTLISLDLRHTAQPLSVAEKQVRDHASQLFSLETGPLLRVLLLQVADEHHILLFTVHHIIADGWSIAVLTREIMALYQAFSTDQASPLPPLEIQYSDYAFWQRSLQAPSVFAAQVGYWRQQLDQAPARLELPTDRPRPAIQTYRGQAVTHTWPPTLSKKIDTLSQSLGVTPFMTLLTLFSLLLSRHSGQRDIVVGTPIANRTRTEVEPLIGLFVNTLALRTRIEGNPTFRQLLQQVRNTTLGAYAHQDLPFEKVVEALDTPRNMSHSPLFQVMFVLQNTAPEPLKIPDVEVRIFDIGTTTAKFDLSLELTPTVQGYQVRWEYNCDLFDATTIERLAAQFQTLAESAVLDAQKTVASLDLLSASEKNRMLEQWNATKVSHRPVAALHHLFEQQVEQTPDAIAVSFEGQHLSYGALNEAANQLAHYLISRGTRADDLIAICMERSVEMVVSLLGVLKAGGAYVPIDPHYPEERIAYMLADAAPILTMTQRSLLKLTALQRTDSLCLDEHATSLAHLPKTNPQRLIDPACLAYCIYTSGSTGAPKGSLNSHEAIINRILWMQDTYLLDATDRVLQKTPFSFDVSVWEFFWPLSVGARMLLAKPEGHKDPRYLETLIEREGVTTAHFVPSMLSAYMALTQASHTRALRRVFSSGEALSTSVQNEFFKRYPATQLHNLYGPTEAAIDVTHWHCQAGDVGHAVPIGRPVANTRTYILDETLQPVPIGVTGNLYLAGVQLSRGYLKRVDLTAERFIPDPHGTPGSRMYMTGDTARYRAHGEIEYLGRNDQQIKLRGFRIELGEIEMQLCAHPQVSQAVVSVNTSDADNPTLTAYLVCNADTQPSVDELRECLARTLPDYMADVCFQFLDHLPLTSNGKVDRRALPQPVSAVRDQAIQLLAPRTALEKSVAAVWKNTLNLEFISLNDNFFHEGGHSLLAMKMIDQVNRELGLAARVRDIFESATLGAFIEKISQGIGERGSNRIRLKQGTRRHLFLVHAVGGVVSPYIKLSQLMPDDVSVHAFQAGGLEHGTDVVDTLEKMAAIYIEQMLEIQPEGPYWLGGWSMGGVIAFEMARQLEALDREVRQLLLIDAPAPGHAAQEQTWPLGAYLMDMARSLSVDLPLSASEMNQLIEHPDRDVLAIATMRRIGVIPDSMDDQQVSRRLQIFCTHQQALEAYRPKTGINSNLTLLHTEESAELRDKWRPLCGQSFNATGFTADHYSILEAATPCISKLFN

SEQ ID NO: 69850 - protein, 427 aa, Pseudomonas syringae
MSAPNRVSEKVPVSDDRATLLLLLIAFVDAAGRGLFLAGATFFYTQVVGLSNVEVGIGLALAGLCGLVCAVPIGRLADRLGAARVLAFLQVWRMAGFLIYPFVDEFYSFLLIACFIGCVEQAVWPIIQTLVGSAVTADAYVKTMSKVAIVRNVAYMLAAGIFSIVVSFTTGPGGVIGMLIANAMAFLVSAILLVSVKLPHVVTKASDQSQPVTPPAQPLKNLNFLSLSLCNGILSLHQAVMTIAIPLWLLTKTQAPKSLIGIILVINGIMAITLQLSFSKRGNEVLFAARKHLYAGITLALSCALVAFTTAEQPSYLVAGILLFACVVMTFGELWQCAGAWGISYYLSPVENRAYYLSIYALGANLMTVIFPGILPIAVVEAGSTGWIGLAVVFALAGVATPLLVRSANRKAIAVRSEDISVHSTQA

SEQ ID NO: 69851 - protein, 211 aa, Pseudomonas syringae
MLTIALSKGRILDDTLPLLAEAGIVPTENPDKSRKLIIPTTQADVRLLIVRATDVPTYVEHGAADLGVAGKDVLMEYTGQGLYEPLDLQIAKCRLMTAGAIGAVEPKGRLRVATKFVNVAKRYYAEQGRQVDIIKLYGSMELAPLIGLADKIIDVVDTGNTLRANGLEPQELIATISSRLVVNKASMKMQHARIQALIDTLRKAVESRHRC

SEQ ID NO: 69852 - protein, 389 aa, Pseudomonas syringae
MLADGPVTVQNLPHLHDITTMIELFGRMGIEPVIDEKLSVEIDPRTIKTLIAPYELVKTMRASILVLGPMVARFGEAEVALPGGCAIGSRPVDLHIRGLEAMGAIIDVEGGYIKAKAPEGGLRGAHFFFDTVSVTGTENIMMAASLANGRSVLENAAREPEVVDLANFLIAMGAKIHGAGTDTITIDGVKRLGSATYKVMPDRIETGTYLVAAAVTGGRVKVKDTDPTILEAVLLKLQEAGAEVTTGEDWIELNMHGKRPKAVNVRTAPYPAFPTDMQAQFISLNAIAEGTGAVIETIFENRFMHVYEMHRMGAQIQVEGNTAIVTGTEVLKGAPVMATDLRASASLVISALVAQGDTLIDRIYHIDRGYECIEEKLQMLGAKIRRVPG

SEQ ID NO: 69853 - protein, 210 aa, Pseudomonas syringae
MFLIEEPMAAAIGAGLPVEEARGSMVVDIGGGTTEIALISLNGVVYAESVRVGGDRFDEAIITYVRRNYGSLIGESTAERIKQEIGTAYPGGEVREVDVRGRNLAEGVPRAFTLNSNEVLEALQESLATIVQAVKSALEQSPPELASDIAERGLVLTGGGALLRDLDKLLAQETGLPVIVAEDPLTCVARGGGRALEMMDKHTMDLLSSE

SEQ ID NO: 69854 - protein, 505 aa, Pseudomonas syringae
MWRISISKSLTGTLAHLKASEEKHMQWEVVIGLEIHTQLSTQSKIFSGSATTFGSEPNTQACLVDLGMPGVLPVLNKEAVRMAVKFGLAVDAEIGQHNVFARKNYFYPDLPKGYQISQMELPIVGKGHLDIPLEDGTVKRVGITRAHLEEDAGKSLHEDFQGMTGIDLNRAGTPLLEIVSEPDMRSAKEAVAYVKAIHAIVRYLGICDGNMAEGSLRCDCNVSIRPKGQVEFGTRCEIKNVNSFRFIEKAINSEIQRQIDLIEDGGKVIQQTRLYDPNTNETRAMRSKEEANDYRYFPDPDLLPVIIEDSFIEETRATLPELPPQKRERFQSQFGLSTYDASVLASSREQADYFEKVVSISGDAKLAANWVMVELGSLLNKQGVEIDQSPVSAEQLGGMLKRITDNTISGKIAKMVFEAMANGEGSADEVIEKRGLKQVTDSGAIESMLDEVLAANAEQVEQYRAADEAKRGKMFGFFVGQAMKASKGKANPQQVNELLKAKLEG

SEQ ID NO: 69855 - protein, 756 aa, Pseudomonas syringae
MSTESKCPFNHAAGGGTTNRDWWPKQLNLKILHQHSSLSDPMGEDFDYAKEFKSLDFEAVKQDLRDVMTRSQDWWPADFGHYGPLFIRMAWHSAGTYRTGDGRGGAGAGQQRFAPLNSWPDNVSLDKARRLIWPVKQKYGRKISWADLIVLTGNVALESMGFKTFGFSGGRPDVWEPEEDVYWGSETTWLGGEERYGAQKKMQQPGDGTLVAEPENHANEESRTASGERNLENPLAAVQMGLIYVNPEGPEGVPDPVASARDIRETFGRMAMNDEETVALIAGGHAFGKTHGAGPADNVGPEPEAAGLEQQGFGWSNKFGTGKGGDTITSGLEVTWTSTPTQWSNEYLENLFAFDWELTKSPAGAHQWTPKNGAGAGKIPDAHDPSKRHAPSMLTSDLALRFDPAYEQISRRFLANPEQLADAFARAWFKLTHRDMGPLARYLGPETPTEELLWQDPIPDVTHPLVDDQDVAALKGKILDSGLSVSQLVSTAWAAASTFRGSDKRGGANGGRLRLAPQKDWAVNQPAQLANVLSTLESIQSEFNAAQSNGKKVSIADLIVLAGSAGVEQAAKNAGQQVTVPFTAGRADASQEQTDVESFSFLEPIADGFRNYQKGRYKVSAESLLVDKAQLLTLTAPEMTVLLGGLRVLNINVGQSKHGVFTDKPETLTNDFFKNLLDMAVEWKATSGANDTFEARDRKTGEVKWTGSRVDLVFGSHAQLRAISEVYGSADAQERFVKDFVAVWTKVMNLDRFDLA

SEQ ID NO: 69856 - protein, 336 aa, Pseudomonas syringae
MFSFIARRVGLLIPTFFGITLLTFALIRLIPGDPVEVMMGERRVDPEMHAQAMERLGLNKPLYAQYIDYIGKLAQGDLGESLRTRTSVWSEFTSLFPATLELSLAALIFAGILGLLAGVIAALKRGSLFDHGVMGISLAGYSMPIFWWGLILIMFFSVTLGWTPVSGRIDLLYDIPPVTGFMLIDTLLSDEQGAFLDALHHLILPAIVLGTIPLAVIARMTRSSMLEVLREDYVRTARAKGLSPARVVFVHGLRNALIPVLTVFGLQVGALLAGAVLTETIFSWPGIGKWLIEAIGARDYPVVQNGILLIACLVILVNFVVDILYGFANPRIRHQR

SEQ ID NO: 69857 - protein, 594 aa, Pseudomonas syringae
MNEVQVVCTVVSTSKKIDPDIAAMIGTSAALAISGIPFDGPVGAARVAFHESTGYLLNPTYEQLQASSLDMVVAGTSEAVLMVESEAKELTEDQMLGAVLFAHDEFQVVINAIKELAAEAAKPTWDWQPKPEATALLGAIRAEFGDAISQAYTITVKADRYARLGELKDQVVAKLAVEEGSPSAGEVKAAFGEIEYRTVRENIVNGKPRIDGRDTRTVRPLNIEVGVLPKTHGSALFTRGETQALVVATLGTARDAQLLDTLEGEKKDPFMLHYNFPPFSVGECGRMGGAGRREIGHGRLARRSVQAMLPGADVFPYTIRVVSEITESNGSSSMASVCGASLALMDAGVPMKAPVAGIAMGLVKEGEKFAILTDILGDEDHLGDMDFKVAGTSKGVTALQMDIKIKGITEEIMEIALGQALEARLNILGQMNQIIGQSRNELSANAPTMIAMKIDTDKIRDVIGKGGATIRAICEETKASIDIEDDGSIKIFGESKEAAEAARQRVLGITAEAEIGKIYLGKVERIVDFGAFVNILPGKDGLVHISMLSDARVEKVTDILKEGEEVEVLVLDVDNRGRIKLSIKDVAAAKASGV

SEQ ID NO: 69858 - protein, 63 aa, Pseudomonas syringae
MQVALLTANINKLQGHFKANGKDHHSRRGLIRMVNQRRKLLDYLKGKDVSRYSALIGRLGLRR

SEQ ID NO: 69859 - protein, 305 aa, Pseudomonas syringae
MAQVKRIRRNVSGIILLDKPLGFTSNAALQKVRWLLNAEKAGHTGSLDPLATGVLPLCFGEATKFSQYLLDSDKSYETLAQLGKTTTTGDSEGDVLLTRPVTVGRDDIEAVLPDFRGKISQIPPMYSALKRDGQPLYKLARAGEVVEREPRSVTIARLELLACEGETARLSVDCSKGTYIRTLVEDIGEKLGCGAYVAELRRTQAGPFTLAQTVTLEELEQVHADGGNEAVDRFLMPSDSGLLDWPLLKFSEHSSFYWLHGQPVRAPDAPKFGMVRVQDHEGRFIGIGEVSEDGRIAPRRLIRSE

SEQ ID NO: 69860 - protein, 554 aa, Pseudomonas syringae
MFKMGTPVTINQVLDQETAQLIAEELGHKVTLVSDNALEDSLAESLKFEGESFSRAPVVTVMGHVDHGKTSLLDYIRRAKVAAGEAGGITQHIGAYHVETERGMVTFLDTPGHAAFTAMRARGAKATDIVILVVAADDGVMPQTIEAVQHAVAAGVPLVVAVNKIDKPGADLDRIRSELSVHGVTSEEWGGDTPFVSVSAKMGTGVDELLEAVLLQAEVLELKATPSAPGRGVVVESRLDKGRGPVATVLVQDGTLRQGDMVLVGSNFGRIRAMLDENGKPVKEAGPSIPVEILGLDGTPDAGDEMSVLSDEKKAREVALFRQGKFREVKLARAHAGKLENIFENMGQAEKKTLNIVLKSDVRGSLEALNGALNGLGNDEVQVRVVGGGVGGITESDANLALASNAVLFGFNVRADAGARKIVEQEGLDMRYYNVIYDIIEDVKKALTGMLGSDVRENILGIAEVRDVFRSPKFGAIAGCMVLEGTVYRNRPIRVLREDIVIFEGELESLRRFKDDAADVRAGMECGIGVKSYNDVKVGDKIEVFEKVQVARSL

SEQ ID NO: 69861 - protein, 493 aa, Pseudomonas syringae
MSKEVLLVVESVSNEKGVPASVIFEALELALATATKKRFEDEVELRVEINRQTGNYETFRRWTVVEDEDLDDPAYELAVDQAQAKKPGAVAGDLIEEKIDSIEFGRIAAQTAKQVIVQKVREAERAQVVDAYRERLGEIISGTVKKVTRDNVIVDLGNNAEALLAREDIISRETFRVGVRVRALLKEIRTENRGPQLILSRTAPEMLIELFRIEVPEIAEGLIEVMAASRDPGSRAKIAVRSKDKRIDPQGACIGMRGSRVQAVSGELGGERVDIVLWDDNPAQFVINAMSPAEVAAIIVDEDAHAMDIAVGADNLAQAIGRGGQNVRLASQLTGWTLNVMTESDIQAKQQAETGDILRNFIEELEVDEELAQVLVDEGFTSLEEIAYVPLEEMLNIDGFDEDIVNELRARAKDRLLTKAIATEEKLADAHPAEDLLSLEGMDKDLAMELAVRGVVTREDLAEQSIDDLLDIDGIDDDRAGKLIMAARAHWFE

SEQ ID NO: 69862 - protein, 447 aa, Pseudomonas syringae
MTTRKYFGTDGIRGRVGQFPITPEFMLKLGWAAGMAFRKMGACRILVGKDTRISGYMFESALEAGLSAAGADVLLLGPMPTPAIAYLTRTFHAEAGIVISASHNPHYDNGIKFFSGQGTKLPDEIEMMIEELLDAPMTVAESENLGKVSRINDAAGRYIEFCKSSVPTSTDFAGLKVVIDCAHGATYKVAPNVFRELGAQVVVLSAQPDGLNINKDCGSTHMEALQAAVVAEHADMGIGFDGDGDRVLMVDHTGTIVDGDELLYIIARDLHERGRLQGGVVGTLMSNLGLELALAEQNIPFVRANVGDRYVIAELLERNWQIGGENSGHIVCFQHATTGDAIIASLQVILALRRSGISLAEARLKLRKCPQILINVRFEGSSVDPVTHPSVQEACARVTEQMAGRGRVLLRKSGTEPLVRVMVEGEDEAQVRAYAEELAKLVAEVCA

SEQ ID NO: 69863 - protein, 637 aa, Pseudomonas syringae
MNDMAKNLILWLIIAAVLVTVMNNFSSPNEPQNFNYSEFIQQVKDGKVEKVSVDGYVITGKRSDGDTFKTIRPNIPDNGLIGDLVSNNVVVEGKQPEQQSIWTQLLVASFPILVIIAVFMFFMRQMQGGAGGKGGPMSFGKSKARLLSEDQVKTTLADVAGCDEAKEEVGELVEFLRDPGKFQRLGGRIPRGVLMVGPPGTGKTLIAKAIAGEAKVPFFTISGSDFVEMFVGVGASRVRDMFEQAKKHAPCIIFIDEIDAVGRHRGAGMGGGHDEREQTLNQLLVEMDGFEMNDGIIVIAATNRPDVLDPALLRPGRFDRQVVVGLPDIRGREQILKVHMRKVPMGEDVNPGVIARGTPGFSGADLANLVNEASLFAARSGKRVVEMKEFELAKDKIMMGAERKSMVMSDKEKRNTAYHEAGHAIVGRLVPEHDPVYKVSIIPRGRALGVTMFLPEEDRYSLSKRALISQICSLYGGRIAEEMTLGFDGVTTGASNDIMRASQIARNMVTKWGLSEKLGPLMYSEDEDGGYLGRGGSQNSSVSGDTAKLIDSEVRSIIDHCYGTAKQLLTDNRDKLEAMADALMKYETIDADQIDDIMTGRPPREPRDWDGGSGTNGTPITPDPRPETPIGGPAAEH

SEQ ID NO: 69864 - protein, 382 aa, Pseudomonas syringae
MKITKLTTFIVPPRWCFLKVETDEGVVGWGEPVVEGRAHTVAAAVEELSDYLIGKDPRNIEDIWTVLYRGGFYRGGAIHMSALAGIDQALWDIKGKALGVSVSDLLGGQVRDKIRVYSWIGGDRPADTARAAKEAVERGFTAVKMNGTEELQFLDTFDKVDLALANVAAVRDAVGPNVGIGVDFHGRVHKPMAKVLMKELDAYKLMFIEEPVLSENYEALKELAPLTSTPIALGERLFSRWDFKRVLSEGYVDIIQPDASHAGGITETRKIANMAEAYDVALALHCPLGPIALAACLQLDAVCYNAFIQEQSLGIHYNESNDLLDYVKHPEVFDYDKGMVKIPNGPGLGIEINEEYVIERAAIGHRWRNPIWRHADGSFAEW

SEQ ID NO: 69865 - protein, 848 aa, Pseudomonas syringae
MLRLIQAYRMRGHQAAQLDPLGLWQRPAPADLSINHYGLTNADLDTTFRAGDLFIGKEEASLREIHEALQQTYCRTIGSEFTHIVDSEQRNWFMQRLESVRGRPAFSADIQSHLLERVTAAEGLEKYLGTKYPGTKRFGLEGGESLIPMLDELIQRSGSYGTKEVVIGMAHRGRLNVLVNTFGKNPRDLFDEFEGKKKVELGSGDVKYHQGFSSNVMTAGGEVHLAMAFNPSHLEIVSPVVEGSVRARQDRRNDPNGDKVLPISLHGDAAFAGQGVVMETFQMSQTRGFKTGGTIHIVINNQVGFTISNPLDSRSTEYATDVAKMIQAPILHVNGDDPEAVMFVTQLAIDYRMQFKRDIVIDLVCYRRRGHNEADEPSGTQPLMYQQITKQRTTRELYAEHLIKTGVLDEARVQAKVDDYRSALDNGLHVVKSLVKEPNKELFVDWRPYLGHAWTARHDTRFDLKTLQELSAKLMELPEGFVVQRQVQKIYEDRQKMQAGGLPINWGYAETMAYATLAFEGHPIRMTGQDIGRGTFSHRHAVLHNQKDAGTYIPLQNLYAGQPRFDLYDSFLSEEAVLAFEYGYSTTQPDALVIWEAQFGDFANGAQVVVDQFITSGEHKWGRLCGLTMLLPHGYEGQGPEHSSARLERYLQLCAEHNIQVCVPTTPAQIYHLLRRQVIRPLRKPLIVLTPKSLLRHKLAVSTLEDLAEGSFQTVIPEIDTLDPAKVTRLVLCSGKVYYDLLEKRRAEGREDIAIVRLEQLYPFPEDDLMETIAPYTNLQHVVWCQEEPMNQGAWYSSQHHLRRSMGNHKRELVLEYAGRDASAAPACGYASMHAEQQEKLLRDAFTV

SEQ ID NO: 69866 - protein, 478 aa, Pseudomonas syringae
MSQKFDVVVIGAGPGGYVAAIKAAQLGLKTACIEKYQDKEGKLALGGTCLNVGCIPSKALLDSSWKFYEAKNGFAVHGISTSEVAIDVPAMIGRKSTIVKGLTGGVASLFKANGVTTLQGHGKLLAGKKVELTAADGTVEIIEADHVILASGSRPIDIPPAPVDQKVIVDSTGALEFQQVPQRLGVIGAGVIGLELGSVWARLGAQVTVLEALDKFIPAADEAVSKEALKTFTKQGLDIKLGARVTGSKVNGEEVVVSYTDAAGEQSITFDRLIVAVGRRPVTTDLLASDSGVDLDERGFIYVDDYCTTSVPGVYAIGDVVRGLMLAHKASEEGIMVVERIKGHKAQMNYNLIPSVIYTHPEIAWVGKTEQTLKAEGVEVNVGTFPFAASGRAMAANDTGGFVKIIADAKTDRVLGVHVIGPSAAELVQQGAIAMEFGSSAEDIGMMVFSHPTLSEALHEAALAVNGGAIHIQNRKKR

SEQ ID NO: 69867 - protein, 354 aa, Pseudomonas syringae
MRSTMYTAIGYAAQSATAPLAPMTFERRAPRADDVAIEILFCGVCHSDIHQARNEWGIAVYPLMPGHEIVGRVTATGANATKYKVGDLVGVGCMVDSCRECSACKSDLEQYCLEGPTMTYATPDRVDGSNTMGGYSNSIVVAEHFVVRVPEKLDPAAAAPILCAGITTYSPLKHYGVKAGDKVGILGMGGLGHMGIKFAKAMGAEVTLFTRSAAKAQEARRQGADHVIVSTDAEQMKAAAGHFDFLLDTIPVQHDLNPYLETLRFDGVHILVGLIEPIEPPVHAAHLVMSRRVLAGSLIGGIAETQEVLDFCAENGITCDIEMLDIRNINEAYERMLAGDVKYRFVIDMATLQA

SEQ ID NO: 69868 - protein, 293 aa, Pseudomonas syringae
MSVLINKDTKVICQGFTGSQGTFHSEQAIAYGTKMVGGVTPGKGGTTHLNLPVFNTVKEAVDTTGATASVIYVPAPFCKDSILEAAFGGIKLIVCITEGIPTIDMLEAKVKCDELGVILIGPNCPGVITPGECKIGIMPGHIHLPGKVGIVSRSGTLTYEAVKQTTDAGFGQSTCVGIGGDPIPGSNFIDILKLFQEDPQTEAIVMIGEIGGSAEEEAAAYIKAHVTKPVVSYIAGVTAPPGKRMGHAGAIISGGKGTADEKFAALQDAGVKTVRSLADIGKALAELTGWPTK

SEQ ID NO: 69869 - protein, 551 aa, Pseudomonas syringae
MEREYMEFDVVIVGAGPSGLSAACRLKQKAAEAGQEISVCVVEKGSEVGAHILSGAVFEPRALNELFPNWQELGAPLNTPVKRDDIYVLRDAEKAQKIPDFFVPKTMHNHGNYIISLGNLCRWLAQQAENLGVEIYPGFAAQEALFDENGVVRGIVTGDLGVDREGNPKEGLYTPGMELRAKYTLFAEGCRGHIGKQLLKRFDLDNEADVQHYAIGLKEIWEVDPAKHEQGLVVHTAGWPLDDANPGGSFLYHLENNQVVVGLIVDLSYTNPYLSPFDEFQRYKHHPVIKQYLEGGKRISYGARAIAKGGLNSLPKMVFPGGALIGCDLGTLNFAKIKGSHTAMKSGMLAAESVADALFAGKEGGDVLTAYVDAFKASWLHAELFASRNFGVAIHKYGAIKGGAFNFIDQNIFGGKLPFTLHDTKPDYACLKLAADSKKIDYPKPDGKLSFDKLSSVFLSSTNHEEEQPCHLKLTDPSIPISKNLPLYDEPAQRYCPAGVYEVITREDGEKRFQINAQNCVHCKTCDIKDPSQNITWVAPEGSGGPTYPNM

SEQ ID NO: 69870 - protein, 570 aa, Pseudomonas syringae
MRAALQLAQGGHKTAVVTKVFPTRSHTVSAQGGITCAIASADPNDDWRWHMYDTVKGSDYIGDQDAIEYMCSVGPEAVFELEHMGLPFSRTEQGRIYQRPFGGQSKDFGKGGQAARTCAAADRTGHALLHTLYQANLKAGTVFLNEYYGVDLVKNQDGAFVGIIAICIETGETSYIRANATVLATGGAGRIYSSTTNALINTGDGIGMALRAGVPVQDIEMWQFHPTGIAGAGVLVTEGCRGEGGYLINKHGERFMERYAPNAKDLAGRDVVARSMVKEIIAGNGCGPDGDHVMLKLDHLGEEVLHSRLPGIMELSKTFAHVDPATAPIPVVPTCHYMMGGVATNIHGQAITQDADGVDHIIPGLFAVGEVACVSVHGANRLGGNSLLDLVVFGRAAGIHLEKALSEGIDYTRASESDIDAALARLAGLNERTTGEDVATLRKELQSCMQNYFGVFRTGEYMQKGIAQLADLRVRIANVKINDKSQAFNTARIEALELQNLLEVAEATAIAAEHRKESRGAHAREDFEDRDDENWLCHTLYFPGDKRVTKRAVNFSPKTVPTFEPKIRTY

SEQ ID NO: 69871 - protein, 475 aa, Pseudomonas syringae
MAGKTLYDKLWDSHLVKQRDDGSALIYIDRHIIHEVTSPQAFEGLRLARRKPWRIDSIIATPDHNVPTTSERKGGIEAIEDQVSRLQVQTLDDNCDEYGITEFKMNDPRQGIVHVIGPEQGATLPGMSVVCGDSHTSTHGAFGALAHGIGTSEVEHVLATQCLVAKKMKNMLVSVEGQLPFGVTAKDIVLAVIGKIGTAGGNGYAIEFAGSAIRDLSIEGRMTICNMSIEAGARVGMVATDEKTIEYVKGRPFAPKGAEWDLAVEAWQDLVSDADAVFDTVVKLDAAQIKPQVSWGTSPEMVLAVDQNVPDPAQEPDLVKRGSIERALKYMGLKANQPITDIQLDRVFIGSCTNSRIEDLRAAADVAKGRKVAATIKQAIVVPGSGLIKAQAEKEGLDKVFIDAGFEWREPGCSMCLAMNPDRLGSGEHCASTSNRNFEGRQGAGGRTHLVSPAMAAAAAVTGRFIDVRELRNPA

SEQ ID NO: 69872 - protein, 217 aa, Pseudomonas syringae
MSFLSAFSHLDWAQVLQLTWQHITLVGIAVTLAIVVGVPLGVLMTRFPALAGPLQASATVLLTVPSIALFGLLLPFYSKFGQGLGPMPAITAVFLYSLLPIMRNTYLALTGVEPGIREAAKGIGMTFGQRLRMVELPIAVPVILAGVRTAVVMNIGVMTIAATIGAGGLGVLILASISRSDMSMLIVGAVLVSILAIIADLLLQWLQRTLTPKGLLK

SEQ ID NO: 69873 - protein, 747 aa, Pseudomonas syringae
MGEPGTGRFSFVKRYLKAEGKRMQAPSDWVYVNNFDEPREPKALELPPGTAHEFMADIGGLIDNLLVTFPAVFEHPSYQQKKSSIDRAFNQRYDRALDVIERLSLEKDIALYRDNSNIAFTPMADGKALDEAEFSQLPEADRDRFHEDISSLEERLNEELASLPQWKRESNNQLRQLNEETITLTLQPLLAPLSEKYAENAAVCAYLQAMQVYLLKTLVEQLVDDAKTDAQARKLLEEQYSPSLVVGNTRDGGAPVVFEQHPTYDNLFGRIEYSTDQGALYTTYRQLRPGALHRANGGFLILEAEKMLSEPFVWDALKRTLQSRKLKMESPLGELGRVATVTLTPQVIPWNVKIIIIGSRSLYYTLQDLDPDFQEMFRVLVDFDEEIPMVDETLEQFAQLLKTRTSEEGMAPLTADAVARLATYSARLAEHQGRLSARIGDLFQLVSEADFIRQLANDDKTDAGHIERALKAKATRTGRVSARILDDMMAGVILIDTDGAAVGKCNGLTVLEVGDSAFGVPARISATVYPGGSGIVDIEREVNLGQPIHSKGVMILTGYLGSRYAQEFPLAISASIALEQSYGYVDGDSASLGEACTLISALSRTPLKQCFAITGSINQFGEVQAVGGVNEKIEGFFRLCEARGLTGEQGAIIPHANVTTLMLDERVVQAVRDGQFHIYAVRQADEALSLLVGEPAGAPDENGEFPQGSVNARVVERLRDIAEMLSDEDLKEELEKEPAQLQPELKI

SEQ ID NO: 69874 - protein, 189 aa, Pseudomonas syringae
MMAQVGLRPEHYQRYPHMFSGGQRQRIALARAMMLQPKVLVADEPTSALDVSIQAQVLNLFMDLQQEFNTAYVFISHNLSVVRHVADTVLVMYLGRPAEMGPKEEIYNRPLHPYTQALLSATPTIHPDPLKPKIKIVGELPNPLNPPSGCAFHKRCPYATERCATDVPELRLVDNRQVACHYAEQFVAA

SEQ ID NO: 69875 - protein, 333 aa, Pseudomonas syringae
KIAIVNDMPMAIEALRRALAFEPAHQVIWVAANGADAVQRSIEQTPDLILMDLIMPVMDGVEATRRIMAETPCAIVIVTVDREQNMRRVFEAMGHGALDVVDTPAIGGPNPREAAAPLLRKILNIDWLMGQRVGRERVVTTSRSEVSRRDRLVAIGSSAGGPAALEILLKGLPENFPAAIVLVQHVDQVFAAGMAEWLCSASGMPVRLAKEGETPQVGVVLLAGTNHHIRLLKDGTLAYTAEPVNEVYRPSIDVFFESVTRYWTGEAVGVLLTGMGRDGAQGLKAMRERGFLTIAQDQASSAVYGMPKAAAAIDAAVEIRPLHTIAPRLMEVF

SEQ ID NO: 69876 - protein, 182 aa, Pseudomonas syringae
MLRAAVKAGTELGLKAKSVMDAGNLVSDDLIIGLIKDRLAEPDCANGVLFDGFPRTIPQAEALLKAGLEIDHVLEIAVDDEEIVKRMSGRRVHEGSGRIYHTIFNPPKVEGVDDVTGESLVQRKDDVEETVRLRLKVYHDQTKPLVEFYSKLEAQNGKPKCSHIPGVGSVEEITAKVLVALS

SEQ ID NO: 69877 - protein, 569 aa, Pseudomonas syringae
MRIEPRPLPDTLPFLGDLPPLLTRLYAARGVACEAELDKSLARLIPYQQLKGIDAAVDLLVTALREGQRMLIVCDFDADGATACTVGVLGLRLLGAAHVDYLVPNRFEYGYGLTPEIVEVALQREPQLLITVDNGISSVEGVAAAKAAGLQVLVTDHHLPGHELPAADAIVNPNQPGCTFPSKSLAGVGVIFYVLMALRARLRDTGWFDQRAQPNLGELLDLVALGSVADVVPLDANNRILVHQGLMRIRAGRARPGLRAILEVARREPARITSTDLGFILGPRLNAAGRLDDMSLGIECLLCDDPTRAREMAVQLDELNQDRKSIEQGMQREALAQLKDLPMESMPFGLCLFDAEWHQGVIGILASRLKERYHRPTIAFASAGEGVLKGSARSVPGFHIRDALDAVAAGHPHLISKFGGHAMAAGLSLPEDNFPAFAEAFDLEVRRQLDEQDLTGRLLSDGSLAVEEFHLELARALRNAGPWGQHFPEPLFHGVFQLVEQRVVGERHLKMVLKTECGSVRLDGIAFSVDRDIWPNPNIRWVELAYKLDLNEFRGNETVQLMVVHIAPR

SEQ ID NO: 69878 - protein, 212 aa, Pseudomonas syringae
MRVIVADDHPIFLIGLRAVLEQDDLAHVVAEAGNPDALLQALASLACDVLVTDFMMPVERQNDGLRLLQRVRRDFPVLPVIVVTTLSNAGLFQSMLDLGVRGLLSKASLAGELPAAVRGALRGEVFVADSVRRVLREAQQYGPDALLAAERLSPRELEVLRLFSAGHTVGQIAAQLNRSKQTVSAQKVGAMRKLGLANDAALFIYLQESGMS

SEQ ID NO: 69879 - protein, 500 aa, Pseudomonas syringae
MSDQQLDPQALQQEENTLIALRKEKLAAGRAKGQAFPNDFRRDSYCNDLQKQYVDKTKEELAEAAIPVKVAGRIMLNRGSFMVIQDMTGRIQVYVNRKTLPEETLAEVKTWDLGDIIAAEGTLARSGKGDLYVEMTSVRLLTKSLRPLPDKHHGLTDTEQRYRQRYVDLIVNEDVRETFRVRSQVIAHIRSFLMQRDFLEVETPMLQTIPGGAAAKPFETHHNALDLEMFLRIAPELYLKRLVVGGFEKVFEINRNFRNEGVSTRHNPEFTMLEFYQAYADYEDNMDLTEELFRELAQLVLGSTDVPYGDKVFHFGEPFVRLSVFDSILKYNPELTAADLQDVDKARAIAKKAGAKVLGFEGLGKLQVMIFEELVEHKLEQPHFITQYPFEVSPLARRNDDNPNVTDRFELFIGGREIANAYSELNDAEDQAERFQAQVADKDAGDDEAMHYDADFVRALEYGMPPTAGEGIGIDRLVMLLTDSPSIRDVILFPHMRPQA

SEQ ID NO: 69880 - protein, 176 aa, Pseudomonas syringae
MGSNLKVSGLREQWLRGDVVVMIRHAERCDRSTNPCMADADGITSNGREAALAVGAGLQKMGMQHVQMIASPKTRTQQTAQLLAGHAVTGQEWINDCDGDFMKVVQAHKVSGENLVLVTHSGCIDQFERKLGVPGGERSSEYAQAFFVQMDGSHRPKVLGSLNAGQWVNLSREQFN

SEQ ID NO: 69881 - protein, 259 aa, Pseudomonas syringae
MNNLSLANEKTKIQVRGLEFFYNNQKSLKSIDMTIPEKRITAIIGPSGCGKSTLLRVFNRIYAMYPKQEARGEVLLNGENILAPGYSMNRLRSHVGMVFQKPVPFPMSIYDNISYAIKHHEKLSRREMEDRVEQALRGAALWDEVKDKLKQSATGLSGGQQQRLCIARTIALRPQVLLLDEPTSALDPISTGRIEQLITELKEQFTVIIVTHNMQQAARCSDYTAFMFMGELIEHGDTDTIFTKPSKTQTEDYITGRFG

SEQ ID NO: 69882 - protein, 290 aa, Pseudomonas syringae
MLVLALLGCIALSTLWGGSLAFQTFGFEFLTSTEWDVNAGKFGALVPIYGTLVTSFLALLIAVPVSFGIAIFLTEVAPPWLRMPIASAIELLAGIPSIIYGMWGLFVFGPFMAEHLSPWITENLGALPLIGPMFQGPPLGIGMLTAGIVLAIMITPFITSVMQEVFRTVPVALKESAYALGGTTWEVVWDIVLPYTRSAVVGGIFLGLGRALGETMAVTFVLGNAHQFSASLMMPSSSIASVIANEFNEAYTDLHRSALIALGFLLFIVTFIVLALARLMLSRLSRKEGL

SEQ ID NO: 69883 - protein, 668 aa, Pseudomonas syringae
MSLPKHHLELLSPARDVTIAREAILHGADAVYIGGPSFGARHNACNEVSDIAELVKFAHRYHARIFTTINTILHDDELEPARKLIHQLYDAGVDALIVQDLGVMELDIPPIELHASTQTDIRTLGRAKFLDQAGFSQLVLARELNLQEIRDIARETDAAIEFFIHGALCVAFSGQCNISHAQNGRSANRGDCSQACRLPYTLKDDQGRVVAFEKHLLSMKDNNQSANLGDLVDAGVRSFKIEGRYKDAGYVKNITAYYRQRLDEILEDRPDLARASSGRTAHFFVPDPEKTFHRGSTDYFVSDRKIDIGAFDTPTFTGLAVGTVEKLGKRDLIAVTHEPLSNGDGLNVQIKREVVGFRANICELKGEFEEEGEKRWRYRVEPNEMPAALSRLRPNHPLNRNLDHNWQQALLKTSAERRIGIQWQVALREDHLSLNATSEEGVSVMVGLDGPFGAANKPEQALDQLRDLLIQLGTTIYHAQDVELDAPQAFFVPNSQLKALRRDAIEALTEARIQAHPRGGRKAETTPPPVYPDSHLSFLANVYNQKARDFYHRHGVQLIDAAYEAHEETGEVPVMITKHCLRFSFNLCPKQAKGVTGVRTKVAPMQLVQGDEVLTLKFDCKPCEMHVIGKMKGHILDLPLPGSAAAKSVVGHITPEDLLKTARQRHPR

SEQ ID NO: 69884 - protein, 957 aa, Pseudomonas syringae
  MISC_FEATURE (860)..(860): X=any amino acid
  MISC_FEATURE (861)..(861): X=any amino acid
PWPGLAMNTTVFPRTDVKTLIVVGNGMVGHHCVEQLIEGGALEHYRIHVFGEESQRAYDRVHLSEYFTGRDAESLAMSEMALYEQAGLTLHLGVPVLEIDRGRHEIITAEGCFCYDKLILATGSYPFVPPIEGAQGNSRLVYRTLEDLDTIRYAASKAKRGVVVGGGLLGLEAANALKSLGLEAHVVEFAPRLMPVQLDEHGGAALKARIEALGVGVHLSRATQSISDGKQYRYRMNFANDEFLETDLIVFSAGIRPQDSLARQCALELGPRGGVAIDEHCRTSDADIYAIGECAAWNGSVFGLVAPGYQMARGVAAQLCGKETDAFFGADMSTKLKLLGVDVGSIGDAHGALAGAVSYRFIDEASGSYRRLVVSADGKQVLGAVLVGDNSYYDTLLQYAQNGITLPADPSSLILPRGEGAPTLGADALPATATICSCHNVSKGSICSAIDNGCTDLAGIKACTKAATGCGGCTALLKQVFEHELIARGVAVDKSLCEHFAYTRQELYSIVRVEGIESFDELLDRHGKGAHGCDICKPAVGSILASCWNRPITEPSLVPLQDTNDTFMANMQKNGTYSVVPRIPGGEITPDGLIAIGAVAKKYDLYTKITGGQRIDLFGAQLHELPDIWSELIAAGFETGHAYGKSTRTVKSCVGSTWCRYGVQDSVAMALRIEDRYKGLRSPHKLKFAVSGCTRECAEAQSKDVGVIATENGWNLYLCGNGGMRPRHAELFATDLDDETLIRYIDRFLMLYIRTADKLQRTSVWRKTLEGGLDYLKAVILDDSLGLAAELESQMQLVVDRYECEWANALKDPEKLKRFRTFVNDGRSDPDVHFVKERAQRRPAKPEELALIPLFKEVVXXIRLKQRGLKKTALARCICTGMALCERKDLVANSGVVAWLDGKQLALFYLPDTAQGEQLFAIDNRDPKSGANVIGRGLTGQIAGELVIASPLYKQHF

SEQ ID NO: 69885 - protein, 469 aa, Pseudomonas syringae
MKRYEKFAADISEMIRSGVLPAGEKVPSVRVASRTYSVSPATVFKAYYLLEDKGLIQARARSGYYVREHAANALTEPELVRHSSEGTELGVSDLIFSVLGSLKNPDTVPFGSAFPSPHLYPLPSLAKSMASAVRTMTPADIVSDMTTGNSELRRQIALRYMIGGTRLPAHELVITNGAMEALNLCLQCVTEPGDLVAIESPAFYACLQVLERLKLKAVEIPVHPRDGVDLDSLQDSLQRLPIKACWFMSSFQNPLGASMTEENKARLYDVLEQQQIPLIEDDVYAELYYGAKAPQPIKSLDRSGLVMHCSSFSKTLAPGYRVGWVAGGRFTEQIDRLKLMTTISPSVPAQAAIADYLKHGGYDRHLRKLRDTLELQQGAMLAAAARYFPTGTRVTKPVGGYFLWFEFPEQVDSLQLFQLALAQGISLAPGPIFSASQRFKHCARLNYGTPWDERSEQAMAMLGRIIASF

SEQ ID NO: 69886 - protein, 188 aa, Pseudomonas syringae
MPMNIPNLITVLRVLLIPIFILLFYMPYHWSYMAASAVFAFAAATDWLDGYLARRLEQSTPFGAFLDPVADKLMVAVALVLLVQAHANLWLTLPAAVIIGREIVISALREWMAEIGARAQVAVSNMGKWKTAAQMLALVILLGNPPAVTFWVIFGYALLLVAAGLTLWSMVQYLRAAWPHLKTTAEKK

SEQ ID NO: 69887 - protein, 620 aa, Pseudomonas syringae
MLETAPPDAYDARYKRWVLEDLPIVPEKWKMLVKPRTASQFKAVKRLLGEANELVIATDADREGEMIARELVEHCRYRGPIQRLWLSALDDASIRKALAALKPGADTFSLYHSALGRSRADWLIGMNMSRLFTLLGRQSGYQGVLPVGRVQTPTLRLVVDRDRSIADFVPAPFWAIDVKLLHENQAFIAQWRAPSDACDDQDRCLNQPLAQQAADAMRHAASARLVKLRTERMREAAPLPFDLGTLQEICSKKLGLGAQETLDIAQSLYETHKVITYPRSDCGYLPNSQHGEAAGIITALGKTDPALAGLLPHLDPQRRSRAWNDAKVTAHHGIIPTAAVRGVERLIGKPRAVYTLIRARYLAQFLPNHEYDRTQADFDCAGQALRAVGKQIVEPGWKRAMPEALAPAKGREAPAPQPLPALFQGCECAVADVILKDLWTQPPKPFTEGDLIKAMKNVAKLVEDPLLKQKLKDTTGIGTEATRAGIIQGLLDRGYLTKQGKALCATPAAFSLIDAVPRAIADPGTTAIWEQALDMVQSGEMSLEEFVAKQAAWMSKQVSRCVGMRMTISGPASPAGVAPPWKKKRKTAKRGAATSTKAANAATGTAAKKPRRAAKPTVKG

SEQ ID NO: 69888 - protein, 273 aa, Pseudomonas syringae
MGNVQTAASAHDVLWRQTPGGDLVDLGRPFRGPLALSRLHSTPKPILGRREAILLGALALVFHGAVVYWLSQNPTPALPVVPPEIPPMTIEFSQPAPPVVETPPPPPEPVVQPVVEPPPPVEDELAVKPPPPKPIPKPKPQPPKPVVKPVAKPVEQPPAPPVPAPPVAAPAPPAPPAPKPVTPASASAGYLRNPAPEYPSLAMRRGWEGTVLLRVHVLASGKPGEIQIQKSSGRDQLDDAALAAVKRWSFVPAKQGDVAQDGWVSVPIDFKIK

SEQ ID NO: 69889 - protein, 391 aa, Pseudomonas syringae
MGPYLAIYLLAVHQWDPASIGVVMTIAGIAGLLTQTPAGALIDRTPYKRGIIGVAALLVTLSCLILPFTSSFTLVAITQALSSVAASVFAPAIAAISLGITGPKAFTRRTGRNETFNHAGNACAALLAGGFAYLFGPIAVFYLMAAMALASVVAISFVSADAIDHDVARGFDASHTSHGSQPSGLSALLNNRTLLLFGICCALFHLANAAMLPLVSQKLSQINMQMATPLTSACIVAAQLVMVPAALLVGMKADVWGRKPLLLAGFLILPIRGVLYTLSDDPYWLVAVQMLDGIGAGLFGALFPLMVKDLTQGSGRFNVSLGALSTLFGLGAALSNSLAGFVVHAAGYSAAFLTLAAVAAVAFCLLLVAVPETLSRSDHAPELKPDHAVNT

SEQ ID NO: 69890 - protein, 773 aa, Pseudomonas syringae
MMLRPPCALHLLPVAIKCLALVPALLISNQVFAATVPVKDEVMDIDQSSPVNNYVLSSDATLNVNGGSQHGRVDSTGSMLNISAGSALVAATLRGGSELTMNGAAISNGLSITNSLGTVSNSTIANASGIGLSVNRLRDLTTGSSVNLTNSSSSGALAGTVVTHFSQLGLTGSQLAGTGVDGVGLRLNAGAAQASASSIVGTVNGVAISSEEVYTEASLKLDSTQVVGQTGAAIRIAPLISRLPGSVVALDVSNGSSLTGGNGNMLEVTGGSSAVMNVSASSLSGNVQVESASAVTLNLDNSSMTGDVLAESGALADVLLDNNSVLTGHLENTRSVAINNGAQWAMIGNGNLAELTLNGGSVRFGDAAGFYTLSVANLSGNGTFIMDVDFAAGRTDFLDITGSATGSHSLLIGSTGTEPSADTSLHVVRAAAGDADFSLVGGAVDLGAWSYDLVKQGANDWYLDAQTRKVSPAAATVVALFNTAPTVWYGELTSLRTRMGELRHNGGQSGAWMRTYGNKFNVSDASGFGYQQTQQGFSLGADGKVPMGDGQWLAGVMAGQSSSDLSLDRGASGKVDSYYVGAYSTWLDSDTGYYFDGVLKFNRFNNKARVNLSDGTRTKGDYSNSGVGASLEFGRHIKLDNGYFVEPYSQLAGVVVEGKDYELDNGMRAENDLTRSLVGKLGATTGRNFDLGQGRTVQPYVRTAWVHEFAKNNEVQVNDNVFNNDLSGSRGELGIGIAASLSERFQVHADFEHSNGDKVEQPWGASVGIRYSW

SEQ ID NO: 69891 - protein, 821 aa, Pseudomonas syringae
MQLLIVCGSGALPLELIQAADLVNFQSGFLRQGQGYDIDAANKALNNLAEVEDLAPGNHWVEIHINTRYFGQRELRFDADPQGNGLLPCLSKELLEQMGVRIESLAEQTLLQASCVDLSRLIPQATTKLDGGRLQLSISIPQIAMRLDAIGRVDPALWDYGINAAFVSYQASAQQTTRTDTGTGNSANLYLNSGINLGAWRLRSNQSVRHDEEGRREWTRAYAYAQRDLPGTHANLTIGETSTDSNVFRSVPIKGALIKTDQEMLPDTAQGYAPVIRGVAQSRAKLEVLQNGYPIYSTYVSAGPYEIDDLAATGSGELEVVLTEADGQVRRFSQPYATIGNLLREGVWKYSTALGRYNGASAIEQPWIWQSTLAIGTGWNATLYGGLMASDMYRATALGISRDLGALGAVALDATQSDADIDRAGTTSVQGMSYALKYGKMFTTNTNLRFAGYRYSTQGYRDFDETMRQRDNNRPFTGSRRSRLEASVHQKVGSRSSVSLTMSRQNYWGSAAEQQQYQFNFNTQHAGVTYNLYASQSLTDTRNQKNDRQLGLSISLPLDIGHSSSAAFDLQNSGDHYSQRASLSGSLDDNRLNYRTSLSNDDGRQQSAGLAVGYQAPFASFGAGLTQGNDYRSTSINVSGALLMHAGGIEPGPSLGDTIALIEVPDTPGVGVQNAIGVETNSRGYALVPYLRPYRYNHIELQTDQLGPEIEIDNGSARVVPARGAVVKTTFAARTVTRLVITALTDSGKPLPFGAQVSDAEGNIMGIAGQGGLILLSTGMQAQTLDVSWGEQTESRCRLHIDPTNMPLTKGYRIQSLTCSQ

SEQ ID NO: 69892 - protein, 269 aa, Pseudomonas syringae
MSTHPGPFTGLDVQGKTTMIGTICQQAVAKSALGLGMALAVLSIHIPVAEAALTVNATRVVFASEKRSTSVVISNPSDRPFAVQTWVNTTVDDTVTAVPFAPSPPLFRLNPGKQQQVQINGLPNDLPADRESLFFFNVQEIPQAESSQGNVLNIALRTRLKLFYRPAGLTDNPIARLKDLQWSIEQSNGKTRLVGINPTPFHVSFIRLEVTANGKTEKIAQAAMLAPFASQAYELGETKAEPGVQVVFSAINDYGGYSVPLTVPVTLAH

SEQ ID NO: 69893 - protein, 349 aa, Pseudomonas syringae
MFNNDRLLVQILLLALFGACLWVMAPFWSALVWGAVLAFASWPLMRLLTRWFKGRESLAALVMCLCWMLLVAAPLVWLGFNLADHVRDATALIKDIQVDGLPDPPQWLAGIPLVGERLVGLWTTIDQQGAAFMTTVKPYLGEVGNWLLARSAQIGGGILELTLSIVFAFFFYRDGPRLAAFVLSLLERLIGDRAQYYLDLVAGTVQRVVNGVIGTAAAQALLALIGFLIAGIPGALVLGILTFLFSLIPMGPPLVWLPATAWLVWQGEYGMAIFLGIWGMFVISGVDNVLKPYLISRGGNLPLVIVLLGVFGGLLAFGFIGLFIGPTLLAVAYSLLTDWVGSERARNPR

SEQ ID NO: 69894 - protein, 442 aa, Pseudomonas syringae
MWSLVMKVLKGQDILALGFMTFALFVGAGNIIFPPIVGLQAGPHVWMAALGFLVTAVGLPVITVIALAKVGGAMDALSSPIGKIAGGALAAVCYLAVGPLFATPRTATVSFEVGLAPLTGDSPMALLLYSLVYFLVVFWVSLYPGRLLDTVGRFLAPLKIFALAVLGVAAFALPAGGIGEAEPAYAIAPFSQGFINGYLTMDTLGALVFGIVIVNAIRSRGVESPRLITRYAIIAGLIAGVGLALVYVSLFRLGSGSHAVAAGASNGAAVLHAYVQHTFGSLGSGFLAVLISLACLVTAVGLTCACAEYFAKVLPLSYRTLVIILAVFSLLVSNLGLTRLIQFSIPVLTAIYPPCIVLVALSFCKGLWQSQGRVVAPVMLVSFVFGLVDALKGAGFGEYLPGALTSMPLSDQGLAWLVPSVITLAGAVVIDRVMGKRSEALA

SEQ ID NO: 69895 - protein, 633 aa, Pseudomonas syringae
  MISC_FEATURE (88)..(88): X=any amino acid
METQKETLGFQTEVKQLLHLMIHSLYSNKEIFLRELISNASDAVDKLRFEALSRPELLEGGAELKIRVSFDKDAKTVTLEDNGIGMSXEDVITHLGTIAKSGTADFMKNLSGDQKKDSHLIGQFGVGFYSAFIVADQVEVFSRRAGSPSSEGVHWSSKGEGEFEVANVDKAERGTRIVLHLKNGEEEFADGYRLRNIIKKYSDHIALPIELPKEQAPAAEGEEAPAQEWETVNRASALWTRPRTEVKDEEYQEFYKHVAHDYENPLSWSHNKVEGKLEYTSLLYVPARAPFDLYQREAPRGLKLYVQRVFVMDQAESFLPLYMRFVKGVVDSNDLSLNVSREILQKDPIIDSMKSALTKRVLDMLEKLAKNEPEQYKGFWKNFGQVLKEGPAEDFANKEKIAGLLRFASTSDDSGEQSVSLADYLARGKEGQDKIYYLTGESYAQVRNSPHLEVFRKKGIEVLLLTDRIDEWLMSYLSDFDGKNFVDVARGDLDLGNLDSEEDKKAQEEIAKDKEGLIERLKAALGESVSEVRVSHRLTDSPAILAIGEQDMGLQMRQILEASGQKVPDSKPIFEFNPAHPLIGKLDAEQSEERFGDLSHILFDQAALAAGDSLKDPAAYVRRLNKLLVELSV

SEQ ID NO: 69896 - protein, 483 aa, Pseudomonas syringae
MTVRRTKIVATLGPASNSPEVIEQLILSGLDVARLNFSHGTPDEHKARAKLIREIAARHGRFVALLGDLQGPKIRIAKFTDKRIELKVGDKFTFSTAHPLTSGNQQIVGIDYPDLVKDCGVGDELLLDDGRVVMRVDTQTAHELHCTVLIGGPLSDHKGINRRGGGLTAPALTEKDKQDIKLAAEMDLDYLAVSFPRDAADMEYARQLRDESGGTAWLVAKIERAEAVANDEVLDALIRASDAVMVARGDLGVEIGDAELVGVQKRIILHARRHNKAVIVATQMMESMISSPMPTRAEVSDVANAVLDYTDAVMLSAESAAGSYPVEAVQAMARICVGAEKHPTGKTSSHRIGHSFTRCDESIALAAMYTANHFPGVKAIIALTESGYTPLIMSRIRSSVPIYAFSPHRGTQARAAMFRGVYTVPFDPGALPPGQVSQAAVDELLKRGLVEQGDWVILTKGDSYHTIGGTNGMKILHVGDPLV

SEQ ID NO: 69897 - protein, 507 aa, Pseudomonas syringae
MTVIKQDDLIQSVADALQFISYYHPVDFIQAMHEAYLREESPAARDSIAQILINSRMCATGHRPICQDTGIVTVFVRVGMDVRWDGATMGLDDMINEGVRRAYNLPENVLRASILADPAGARKNTKDNTPAVIHYSIVPGNTVEVDVAAKGGGSENKSKMAMLNPSDSIVDWVLKTVPTMGAGWCPPGMLGIGIGGTAEKAAVMAKEVLMESIDIHELKARGPQSRIEEMRLELFEKVNQLGIGAQGLGGLTTVLDVKIMDYPTHAASLPVCMIPNCAATRHAHFVLDGSGPASLEAPSLDAYPEIVWEAGPSARRVNLDTLTPEEVQSWKPGETVLLNGKMLTGRDAAHKRMVEMLNRGETLPVDLKGRFIYYVGPVDPVREEVVGPAGPTTATRMDKFTRQILDQTGLLGMIGKSERGPTAIEAIRDHKAVYLMAVGGAAYLVAQAIKKSRVVAFAELGMEAIYEFEVKDMPVTVAVDSTGESVHITGPQIWQKKISDSLAVEVQ

SEQ ID NO: 69898 - protein, 301 aa, Pseudomonas syringae
MIRDGEVVYERYAGVTNAQTPHLTWSISKSIMATVLGVAFTEGRFQLSDPVAKFYAPFQSHPDITLTDLMHWASGLDWQEDYEYAPLNSSVVAMLYTRGRNDMARFTAEHAAAGPPGKAYLYSSGDSTVLAAALKNMVGPQAYPDYPWTALFDPLGIRSAVWETDASGTFVGSSYAYMTARDLARIGLLMQRGGEWQGRQLLNKEWIDFVLRPFAGEQVDAGVEVPGGQWWLNRSADGGKGPWPDAPPDTFAALGHWGQALYVIPSQKLVIVRYADDRDGTYNHNQMLKLTHAAFGKEAGQ

SEQ ID NO: 69899 - protein, 421 aa, Pseudomonas syringae
MTESVLDYMTRLGRAAREASRVIGRASTAQKNRALQATAAALDEARDELSAANALDLAYGQANGLEPAMLERLALTPARIDSMIVGLRQVASLADPVGAIRDMSYRPSGIQVGKMRVPLGVVGIIYESRPNVTIDAASLCLKSGNATILRGGSEAIHSNRAIAACIARGLAEAGLPAAVVQVVETTDRAAVGALITMPEYVDVIVPRGGKGLIERVSRDARVPVIKHLDGICHVYVSAHADLPKAQKIAFNAKTYRYGICGAMETLLVDQTIAADFLPAMAAQFREKGVELRGCERTRELIDVMPATEDDWHTEYLAAILSIRVVSGLDEAIEHINHYGSHHSDAIVSDHQSQIRRFMAEVDSSSVMVNAPTSFADGFEYGLGAEIGISTDKLHARGPVGLEGLTCEKYIVIGDGQLRGHA

SEQ ID NO: 69900 - protein, 438 aa, Pseudomonas syringae
MGDLLNGMTGWLTANPSWVAVAIFLVAFTECVAIVGIVVPGTVIMFAIAALAGSGILPLSEVLLLGFLGGLLGDAVSYFIGRRFHQNIRQLPGLRTHPEWMAGAESYFHRYGIASLLVGRFIGPLRPMLPMIAGMCDMPLPRFIAVSVLAAAGWSIAYLMPGWAAGAAIRLPLPEGFWPEAAVVGTGLAVLFGLSIQSSVRQKRYATKLISVLSLTLVAALFIGWPYLADFDNGLMTLIQEHRSEAAQNIVLFVTSIGDFKAQLLAASLLIIVLAVARQWRHATFALAATLGTAVANGLLKTFFARARPDVLVDPLTTYSMPSGHSSAAFALFMTLAVLAGRGQPVRLRLSWMLLCGIPALAIALSRVYLGVHWPTDVLAGMLLAFCVCAASLAFIQRKEPLPAMSVRVWWLIVPAMTALLGIFAVRALSHAVLRYQY

SEQ ID NO: 69901 - protein, 280 aa, Pseudomonas syringae
MSEDRSSNGQKSWLGKLTQAFVHEPKNRQELLELLREAHQNKLLDSEALAIVEGAIQVADLQVRDIMVPRSQMISIKATQTPREFLPAVIDAAHSRYPVIGESHDDVLGVLLAKDLLPLILKADGDSDDVKKLLRPATFVPESKRLNVLLREFRANHNHMAIVIDEYGGVAGLVTIEDVLEQIVGDIEDEHDVEEDSYIKPLPSGDFLVKALTPIENFNEFFDSVFSDDEFDTVGGLVMNAFGHLPKRNEITEIGAYRFRILSADSRRIHLLRVSPISRP

SEQ ID NO: 69902 - protein, 506 aa, Pseudomonas syringae
MRWITRPGWPGNLLALAAGGLTTLALAPFDFWPLVLVSVAMFYLGLRELSPRQALARGWCYGFGLYGAGTSWIYVSIHTYGGASALLAGLLMLLFIAAIALFFALPAWVWARWLRRNEAPLADSLAFAALWLWQEAFRGWFLTGFPWLYSGYSQLDAPLAGLAPVGGVWLISFALGLTAALLCNLHRLRARKSFLAMGVLLLLAPWVAGLALKDHAWTSPSGPPLKVAAMQGNIEQSMKWDPQKLNDQLALYRDMTFRSQQADLIVWPETAVPVLKESAEGYLSMMGKFAADRGAALITGVPVREPTGRGEYSYYNGITVTGQGDGTYFKQKLVPFGEYVPLQDLLRGLISFFDLPMSDFARGPNDQALLQAKGYHIAPFICYEVVYPEFAAGLSAQSDLLLTVSNDTWFGTSIGPLQHLQMAQMRALEAGRWMIRATNNGVTALIDPFGRITVQIPQFERGVLYGEVVPMHELTPYLHWRSWPLAIVCLLLFGWALLAARISKTV

SEQ ID NO: 69903 - protein, 868 aa, Pseudomonas syringae
MHELYQPREIEAAAQTFWDEQKSFEVSEQPGKETFYCLSMFPYPSGKLHMGHVRNYTIGDVISRYQRMLGKNVLQPLGWDAFGMPAENAAIDNNVAPAKWTYENIAYMKNQLKSLGLAVDWSREVTTCKPDYYRWEQWLFTRLFEKGVIYRKNGTVNWDPIDQTVLANEQVIDGRGWRSGALIEKREIPMYYFKITAYADELLESLDELPGWPEQVKTMQRNWIGRSRGMEVQFPYDQASIGEAGALKVFTTRPDTLMGATYVAVAAEHPLATLAAQGNPALQAFIDECKGGSVAEADVATQEKKGQPTSLFVEHPLTGEKLPVWVANYVLMHYGDGAVMAVPAHDERDFEFASKYDLPIKPVVRTSAGDETPAPWQAEYNEQGPLINSGEFTGLHFQDAFDAIEAALVKKALGQSRTQFRLRDWGISRQRYWGCPIPIVHCDTCGDVPVPEDQLPVILPEDVVPDGAGSPLARMPQFYECSCPKCGAPAKRETDTMDTFVESSWYYARYASPHYEGGLVEPNAANHWLPVDQYIGGIEHAILHLLYARFFHKLMRDEGLVTSNEPFKNLLTQGMVNAETYFRMETSGKKTWINPADVTLERDAKAKVISATLTSDGLPVEIGGTEKMSKSKKNGIDPQTMIDQYGADTCRLFMMFASPPDMSLEWSDSGVEGSHRFLRRVWRLAQAHVGQGASGSLDIAALTDEQKAVRRSIHQAIKQASQDIGQNQKFNTAVAQVMTLMNVLEKAPQATPQDRALLQEGLETVTLLLAPITPHISHELWTQLGHNEPVIDAGWPVFDAHALVQDSLQLVIQVNGKLRGHIEMPASASREEVEAAARINENVLRFTDGLTIRKVIVVPGKLVNIVAS

SEQ ID NO: 69904 - protein, 264 aa, Pseudomonas syringae
MESHVNNYPVPKILVVDDQPLIVEELGEFLEGCGYACVRCHSSLEAIEHFANDSAIGIVLCDLEMPGMNGIEMVEAMKMAGGKTHLFEAIMLTGQAEKKDVIKALRAGIADYYQKPVNLDELLEGVQSQVEALAERQKNRQQLGLLNEKLQFLAASIDDLYQNLDSAQNTPQAGRKPRLNAENDSQMPVALAKLSRRQLDVARLVSTGLTNYQIACELGITENTVKLYVSQVLRLTHMHNRTQLALAFSPGKSGERQRLIESQG

SEQ ID NO: 69905 - protein, 335 aa, Pseudomonas syringae
MTDTVQTLIPTLDVSERVARPKVEAGVKLRGAEKVARIPVKIIPTVDLPKKPDWIRVRIPVSPEVDRIKQLLRKHKLHSVCEEASCPNLGECFSGGTATFMIMGDICTRRCPFCDVGHGRPKALDADEPKSLAIAIADLRLKYVVITSVDRDDLRDGGAQHFADCIREIRLLSPGIQLETLVPDYRGRMDVALEITAAEPPDVFNHNLETVPRLYKAARPGSDYQWSLTLLQRFKQMVPHVPTKSGLMLGLGETDEEVIEVMKRMREHDIDMLTLGQYLQPSRNHLAVQRFVHPDTFAWFAEEGYKMGFKNVASGPLVRSSYHADEQAKIAKAML

SEQ ID NO: 69906 - protein, 323 aa, Pseudomonas syringae
MVGLVGILGSVQEALAGDYEGSPQVAEFVGELTRDYGFAGEQLMGLFREVERKQAILDAISRPAERVKQWKEYRPMFITDTRIARGVDFWRQHEAALARAEQEYGVPAQIIVSIIGVETFFGRNTGNYRVIDALSTLGFDYPPRAPFFRKELREFLLLAREQQVDPLTLKGSYAGAMGLPQFMPSSFRAYAVDFDGDGHINIWTDPDDAIGSVASYFKRHGWVAGQQVVSRATARGDRVDEGLSPALDPVMSVGELRQLGWASHDALRDDMPVTAFRLEGDNGPEYWLGLNNFYAITRYNRSVMYAMAVYQLSESLVQARGVK

SEQ ID NO: 69907 - protein, 155 aa, Pseudomonas syringae
MRLRLIAVGSRMPKWVEEGWHEYAKRMPSELALELVEIPLNTRGKNADVARFIRQEGEAMLAKVQPGERIVTLEVQGKPWSTEQLAVELDRWRLDARTVNLMVGGPEGLAPEVCARSEQRWSLSPLTLPHPLVRILIGEQMYRAWTVLSGHPYHK

SEQ ID NO: 69908 - protein, 487 aa, Pseudomonas syringae
MTQAFVVVDTAEQAVERLAELHERATSALSQALKRYLKDRVEPTAEERAQFSYPQLRLVYKCHGEVPLTTRAYAKVQLPGTYSVTVTQPKAFKKYLLEQLVPLMSDFTVTVEVGMSEQSIPYPYVVEQGDELAGTGVTAAALARVFPSTDLSAATDGIADGLYDWANVDPLPLALFDAARVDFSLRRLVHYTGSDWRHVQPWILLTNYHRYVDQFILHGLEKLREDPRFVRMVLPGNVVVDKSMGVDEAQAIVASVVWHRYQMPAYHLIAEDGHGVTLVNIGVGPSNAKNITDHLAVLRPHCWLMIGHCGGLRQSQTIGDYVLAHAYMRRDGILDRVLPPHIPIPALAEVQLALQESAAQITGERGEELKKRLRTGTVLTYDDRNWELRWAQERPLINLSRAVAVDMESGTIAAQGYRLRVPYGTLLCVSDKPLHSEIKLPGSANAFYERAVSQHLKIGIAALDLMRTQLNSLHSRKLRSFDEPPFR

SEQ ID NO: 69909 - protein, 205 aa, Pseudomonas syringae
MKLRGLYAITDSQLLTGKFLSYVEAALDGGVTLLQYRDKTGDDSRRLREATELLKLCERYKTRLIINDDAELAARLGVGVHLGQTDGSLPDARALLGHKAIVGATCHGQLELAEQAKADGATYVAFGRFFNSQTKPGAPAVPLDLIAQVRARVHLPIAVIGGITLENAPQLVEHGADLLAVVHGLFGAETPQEVTRRAKAFMALL

SEQ ID NO: 69910 - protein, 240 aa, Pseudomonas syringae
MLKFFAALLFAVATMAQAQDNTLHTDLPLDYLAQANVETPDRPLVIFIHGYGSNAADLFGLKEHLPAGFNYLSVQAPVELQADSYKWFTQKKGGTDYDGVTEDLKSSGKRLTDFITQATEKFRTQPGKVFLVGFSQGAMMSYEVALRQPTLVGGFAALSGRLLPVVKSEVNASDDLKALKVFIGHGVQDRQVAYASGPQAEATLKSLGLTPQFHGYEGLGHSINEAEVVDLANWLQQSSR

SEQ ID NO: 69911 - protein, 363 aa, Pseudomonas syringae
MFALDRALAQDIVDRAMAILPYNVNVMDYLGIIIGSGDPERLCIRHEGAQRVLANGQVVEIDSLAAMRLGGVKPGVNLPLMLDHQLVGVLGITGEPDEVRVYGELVKMTAEMLMEQRRQQADLQWRAQRSEDLLARLLLADCPESLVDEARQLGLQPHLPRQAVLIQLDAPGAFASQIATWLGSRYADSWCVLREPTLLYWCRAVGKERDDGVLLKQLDEHGWPVLRMATVGQSPDLPTLRNACAAARDLLDYATQARPGQRILRLEAHRLPVLFWRYRHDWLAEEVAEPIGRLHNHVQLLDTLCKWFEYSGESQACAEALGIHRNSLRYRLEKIAELTGCDPYKTDDLLRLYLGAQMMARHE

SEQ ID NO: 69912 - protein, 955 aa, Pseudomonas syringae
MLELTLGQISMAQSAVDKTAALKLLADHLVADGLVAEGYLTGLMNREQQGSTFLGQGIAIPHGTPETRDLVFTTGVRLMQFPEGVDWGDGQMVYLAIGIAAKSDEHLRLLQLLTRALGEEDLGQALREAKSPEDLLKLLQGAPQELALDAQMISLGVSADDFEELVWRGARLLRKADCVSNGFAAVLQQVEALSLGDGLWWLHSEQTVKRPGLAFVTPDKPIRYLGQPLTGLFCLASLGEAHQALLERLCLLLIEGRGHELGHATNSRVVLEALGGEVPAEWPTQQIQLANAHGLHARPAKILAQLAKEFEGEVRVRVLETGESAVSAKSLSKLLSLGVRRGQTLEFIAEPSIAADALPALIAAVEQGLGEEVEPLPAASEPEAAPTPVAVAKPINAPAAGSVLSAVPASPGIAIGPAHVQVLQTFDYPQKGESVAAERERLQTAIGEVRRDIENLIQRSKSKAIREIFITHQEMLDDPELIREVEQRLNDNESAAAAWATVIEAAAVQQEQLKDALLAERAADLRDVGRRVLAQICGVETVAAPDEPYILVMDEVGPSDVARLDPAQVAGILTARGGATAHSAIVARALGIPALVGAGDEVLLLKPGTVLLLDSQRGRLTVAPDQATLQRAVEDRDAREQRLKAAAAARMEPAVTRDGHAVEVFANIGDSTGTPAAVEQGAEGVGLLRTELLFMAHSQAPDEATQEAEYRRVLTDLGGRPLVVRTLDVGGDKPLPYWPIAKEENPFLGVRGIRLTLQRPDVMESQLRALLRAADSGPLRIMFPMIGTLEEWREARAMTERLRAEIPVSDLQLGIMIEVPSAALIAPVLAREVDFFSIGTNDLTQYTMAIDRGHPTLSAQADGLHPSVLQLIDMTVRAAHANGKWVGVCGELAADPLAVPVLVGLGVDELSVSARSIGEVKACVRELTLSSAQQLAQKALTAGSAAEVRALVEAV

SEQ ID NO: 69913 - protein, 584 aa, Pseudomonas syringae
MKLAIVTACPNGKVSSVLSARLLEAAALRQGWETSVEIIDPNKADQQLSPEDIQAADLVLVVNTGPVDLSRFVGKRLFQDSPAHALQDVDGFLQRVAKEAQVYVASQAAAPQATGTSVGNAGAKPRIVAITACPTGVAHTFMAAEAIQQAAKRLDYDLQVETQGSVGARNPLSAQAIADADVVLLAADIEVNTDRFAGKKIYRCGTGIALKQSEATLKKSLAEGQVESDEATAKSPAKQEKTGVYKHLLTGVSFMLPMVVAGGLLIALSFVFGITAFKEQGTLAAALMQIGGEAAFKLMVPLLAGYIAYSIADRPGLAPGMIGGLLATTLGAGFIGGIIAGFLAGYSAAAINRYARLPASVEALKPILIIPLLSSLFTGLVMIYVVGKPVAGMLEALTHFLDSMGTTNAILLGVLLGAMMCVDLGGPINKASYAFSVGLLASQSYAPMAAAMAAGMVPPIGMGIATLLARRKFAQSEREAGKAAFVLGLCFISEGAIPFAAKDPLRVIPASVVGGALTGALSMYFGCKLMAPHGGLFVMLIPNAINHALLYLLAIVAGSVLTGVVYALIKRPEPVELEAAPAGA

SEQ ID NO: 69914 - protein, 392 aa, Pseudomonas syringae
MQDVVIVAATRTAVGSFQGSLAAVPAVDLGAAVIRQLLAQTGVDGALVDEVIMGQVLTAGAGQNPARQAAIKAGLPFSVPAMTLNKVCGSGLKTLHLATQAIRCGDADIVIAGGQENMSLSNYVLPGARTGLRMGHASMIDTMITDGLWDAFNDYHMGITAENLAQKYEISREAQDAFAALSQQKAIAAIEAGRFVDEITPILIPQRKGEPLSFATDEQPRAGTTAETLGKLKPAFKKDGTVTAGNASSLNDGAAAVMLMSATKAEQLGLPVLAHIAGYANAGVDPAIMGIGPVSATRRCLDKAGWSLDELDLIEANEAFAAQSLSVGKELGLDPQKLNVNGGAIAIGHPIGASGCRVLVTLLHEMIRRDAKKGLATLCIGGGQGVALALAR

SEQ ID NO: 69915 - protein, 260 aa, Pseudomonas syringae
MGGQWLLRMEDLDPPREVAGAQVAILETLERYGFEWDGEMVRQSERHDAYADILQRWFNHGLAYACTCSRKQLEAFEGVYPGFCRDAGHAAENAAIRIRVPELEYRFEDRVQGTFHMHLGRESGDFVIRRRDGLYAYQLAVVIDDAWQGVTDIVRGADLLDSTPRHLYLQELLGLPQPRYLHVPLITQPDGHKLGKSYRSPPLPADQATPLLLRALRALGQPVDAHMADGTAQEVLAWGIRHWNASLIPRQRTIEEARIA

SEQ ID NO: 69916 - protein, 266 aa, Pseudomonas syringae
MPNITVTSLLAMKHKGEKITMLTCYDATFAHTACQAGVEVLLIGDSLGMVLQGHDSTLPVTTAETAYHVACVKRGNQGALILADLPFMANATLEQTFINSTTLMQAGAHMIKVEGAAWLGESIRLLAERGIPVCAHMGLTPQSVNVLGGYKVQGRLEAQARQMRADAIALEQAGAAMILLECVPSELAEEITHAVKIPVIGIGAGSATDGQVLVLHDMLGLSITGRVPKFVKNFMIGQPDIQSAIQAYVSAVKDVSFPAIEHGFSA

SEQ ID NO: 69917 - protein, 163 aa, Pseudomonas syringae
MTTERVYIGLGSNLADPAEQLRSALKALAQLPDSTLIGVSSFYVSDSLLPGQPRFTNAVAALDTTLPPLALLDALQAIELDQGRERHERWGPRTLDLDILLFGERVMDEPRLKVPHYHMQARAFVLYPLAELAPELTLADGRELTHLLSECPFTGLERLPASV

SEQ ID NO: 69918 - protein, 467 aa, Pseudomonas syringae
MLKKLFQSFRSPLRKPQQHTRTTPEVLNSSQHSLQRSQFSRYAVNIVERLQNAGYQAYLVGGCVRDMMLNITPKDFDVATSATPEQVRAEFRNARIIGRRFKLVHIHFGREIIEVATFRANHPQDDEEEDSNQSSRNESGRILRDNVYGTLEEDAQRRDFTINALYYDPVSERVLDYANGVHDIRNRLIRLIGDPEQRYKEDPVRMLRAVRFAAKLDFGIEKHSAQPIRALAPMLRDIPSARLFEEVLKLFLSGYAAPTFEMLVDLELFEPLFPASSKALEYNPTYTHTLISNALINTDLRIKQNKPVTPAFLFAALLWPALPAKVLRAQERGMPPIAAMQDAAHELIIEQCQRIAIPKRFTLPIREIWDMQERLPRRSGKRADLLLDNSRFRAGYDFLLLRESAGEQTDGLGQWWTDYQDCNDSERRDMIRDLSNKPEAAGAAPRKRRRNSGAKRKRSSGEAQSGE

SEQ ID NO: 69919 - protein, 316 aa, Pseudomonas syringae
MALFSPYALGATLYMPATRDDIVDVVFGEKIPELRSLVVCLEDAVALIDVDTALLNLRQVLTRIHDRGGRPANGPLLFVRPRDAAMARILNDWPLMAHVDGFVVPKLSLKSLTSWEEAVTNPALALMPTLETPEVFNPTAMVELGQALKASLHERIIALRIGGNDLMGCLGLRRNPAMTLYSTPMGYVIPMLAGVMGAQGFALTAPVFEQLATPDILEQELALDITNGLVGKTAIHPSQVNIIQNALRVSLEDMNSARMILNSVAPAVFKYNDAMCEPATHYKWATHIMERAKWHGVLPTPASIMDASIRLAEAVS

SEQ ID NO: 69920 - protein, 344 aa, Pseudomonas syringae
MESTSLGFPPLTMAVFVGLAITAMAIDMFSHRGNKPITLAQASAWSIFWVAISLAFAGFLYVQHGSEVATLFVTGYALEKVLSVDNLFVFMALFSWFKIPDGLRHRVLYWGIIGAIVFRGIFVAIGTGLLALGPWVEVVFAVIVAWTAIMMLRAGDDDDEEVDYSQHMAYRFAKKLFPVWPKLHGSNFFVRRSVLEEEVKKPENAGITLAAKGALFATPLFLCLVVAEISDVLFAFDSVPAIIAVSREPLIVFSAMLFAILGLRTLYFVLEALKRYLVHLEKAVIALLFFIAIKLGLNATNHLFHHGYEISANASLLVVVVVLIIGIVASLLFPGKEEPAEEKA

SEQ ID NO: 69921 - protein, 442 aa, Pseudomonas syringae
MSINSELTVLIVEDDPHVLLGCQQALALEDIASEGVSSAEDALKRIGDNFAGIVISDIRLPGIDGLELLSRLKARDSSLPVVLITGHGDITMAVNAMRDGAYDFMEKPFSPERLVEVTRRALEQRGLAREVWSLRKQLAERDSLEGRIIGRSPVMQNLRALIANVADTSANVLIEGETGTGKELVARCLHDFSRRKDSQFVALNCGGLAESLFESEIFGHEANAFTGAGKRRIGKIEHAHEGTLFLDEVESMPINLQIKLLRVLQERTLERLGSNQSVAVDCRVIAATKSDLNALGKTNQFRSDLYYRLNVVTLELPPLRERREDILQLFEHFLQLSSLRFDREPPALDRQTSSSLLSHDWPGNVRELRNVAERFALGLPAFKQAGTVSENQSLGFAEAVEAFERSLLSEALQRSGGNLSQASQELGMAKTTLFDKVKKYGL

SEQ ID NO: 69922 - protein, 285 aa, Pseudomonas syringae
MTIALKQPTLTGQCVAEFLGTALMIFFGTGCVAALKVAGATFGLWEICIIWGMAVSMGIYLSAGISGAHLNPAVSIALSLFAGFEKRKLPFYISAQIAGAFCGAGLVYLLYISLFFDFEHAHHIIRGSEQSLELASVFSTYPNPAISVGQAFLVEVVITTILMGVIMALGDDNNGLPRGALAPLLIGLLVAVIGSAMGPLTGFAMNPARDFGPKLMTFFAGWGEIAFTGGRDIPYFLVPIFAPILGACLGAAGYRALIARHLPSTVTVENEKEAPVVRGKVQASS

SEQ ID NO: 69923 - protein, 501 aa, Pseudomonas syringae
MTDTQNKNYIIALDQGTTSSRAIIFDRDANVVSTAQSEFVQHYPQAGWVEHDPMEIFATQTACMTKALAQADLHHDQIAAIGITNQRETTVIWERDTGRPIYNAIVWQCRRSTEICQQLKRDGLEEYIKDTTGLVLDPYFSGSKVKWILDHVEGSRERARKGELMFGTIDTWLIWKFTGGKVHVTDYTNASRTMLFNIHTLEWDQRMLDVLDIPREILPEVKSSSEVYGHSKSGIPIAGIAGDQQAALFGQMCVEPGQAKNTYGTGCFLLMNTGKKAVKSAHGMLTTIGCGPRGEVAYALEGAVFNGGSTVQWLRDELKLINDALDTEYFAGKVKDSNGVYLVPAFTGLGAPYWDPYARGALFGLTRGVKVDHIIRAALESIAYQTRDVLDAMQQDSGERLKSLRVDGGAVANNFLMQFQADILGTHVERPQMRETTALGAAFLAGLAIGFWSSLDELRNKAVIERVFEPACEEAHREKLYAGWQKAVARTRDWEPHENEE

SEQ ID NO: 69924 - protein, 308 aa, Pseudomonas syringae
MRIVPHLLGAAIAAALISTPVFAAELTGTLKKIKESGTITLGHRDASIPFSYIADASGIPMGYSHDIQLKIVEAIKKELDMPDLKVKYNLVTSQTRIPLVQNGTVDVECGSTTNNVERQQQVDFSIGIFEVGTRLLSKKDSSYKDFDDLKGKNVVTTAGTTSERIIKTMNADKQMGMNVISAKDHGESFQMLESGRAVAFMMDDALLAGEMAKAKKPDDWAVTGTAQSYEIYGCMVRKGDAPFKKAVDDAIVATYKSGDINAIYSKWFMSPVPPKGLNLNFPMSAELKKLIENPTDKAADDKAEDKKA

SEQ ID NO: 69925 - protein, 116 aa, Pseudomonas syringae
MRKRDTQAFMQPGGKIEPGEPAPLALARELEEELGLVIDPQQATFLGEFAAPAANEPGFEVRCQLYEVRTDADVLPAAEIEEVIWVSADGHADLHLAPLTRDLILPLYRQRQAAAN

SEQ ID NO: 69926 - protein, 327 aa, Pseudomonas syringae
MTLIGVDKLGRWLRFDEADYLLNANDPARIKLSGSGKQLSLLPGSVGGQFVEVESGKPLAAIDVVFPLIHGAFGEDGALQGLLRMLAVPFVGADVLASAACMDKDVTKRLLRDAGIAVAPFMVLNRGESLSFAQAAAQLSLPMFVKPANQGSSVGVSKVSDEAGFAAALALGFEFDHKLLIEQGIVGREVECAVLGNDEAQVSVCGEVVANDEFYAYDTKYLNGDQARIAIPAELPADLSDQVRDVALQAYKVLGCAGLSRVDFFVTEAREIIINEVNTLPGFTSISMYPKLWQATGLSYAELIHRLIVLALERADEARLLKRDIFA

SEQ ID NO: 69927 - protein, 347 aa, Pseudomonas syringae
MSDRLTLLRPDDWHIHLRDGAVLPHTVADVARTFGRAIIMPNLVPPVRNAQQADAYRQRILAARPAGSRFEPLMVLYLTDQTTPEDIRTAKASGFVHAAKLYPAGATTNSDSGVTSIDKIFPALEAMAEVGMLLLVHGEVTRGEIDVFDREKVFIDEHLRRVVERFPTLKVVFEHITTGDAVQFVNEASANVAATITAHHLLYNRNHMLVGGIRPHFYCLPILKRNTHQVALLDAATSGSGKFFLGTDSAPHAQHAKENACGCAGCYTAYAAIELYAEAFEQRNALDKLEGFASLHGPAFYGLPANQDTITLVRDEWTAPTSLPFGELTVIPLRAGETLRWRLEEHA

SEQ ID NO: 69928 - protein, 157 aa, Pseudomonas syringae
MSSAICPCGSGDLLLACCGHYHAGQPAPCAEKLMRSRYSAYVLGLTDYLVQTTLPVQQAALDREAIAQWSAQSTWLGLEVESAEVLGGKPEHAFVTFTARWHDGNGEHSHKERSSFVQNQGHWYFIDSTVPLKAGRNDGCPCGSEQKFKKCCSAYVI

SEQ ID NO: 69929 - protein, 249 aa, Pseudomonas syringae
MTVYFIGAGPGDPELITVKGQRLIRTCPVIIYAGSLVPLAVLEGHQAVQVTNSAELHLEQIIDRIKTAHAQGQDVARVHSGDPSLYGAIGEQIRHLRELNIPFEIIPGVTATAACAALLGVELTLPDISQSVILTRYADKTSMPSGEELASLASHRATMAIHLGVNNLHRIVEELTPHYGTDCPIAVVHRASWPDQEWAIGTLADIEEKVRAKGFRRTALILVGRVLAADTFGESSLYRAGHAHLFRPK

SEQ ID NO: 69930 - protein, 259 aa, Pseudomonas syringae
MKHFFLPALTVVAFPALSLPFAHAEPGDFSLGLGAAISESPYAGVGTQVNPIPLIKYEGERFYVNGVTAGYHLINTESFSLDAIVALQMDGIDRDDFGRRELARNGIDRDLLEDRDNGIDAGLAAKLRGAAGQLEGVAKNDISGASDGYSLNLEYAYPFTWGKTRFKPNIGATHMSGNLVNYYYGTLKEEEQRGIARYRPGSATVSYAGLGFSRSIGKQWEVSGNLRYSALPDELSDSPLVERDTDSSTSMFIGISRKF

SEQ ID NO: 69931 - protein, 290 aa, Pseudomonas syringae
MPDSPTTTSTLDLELLRTFVAVVDQHSFAQAGAHLARTQSSVTQHMQRLEQQTGVSLFQKKGRHKQLTESGRQLLRHARQMLSLNDDALNSLRDSSLSGVLRIGSPHDIADTILPPLLSHIARSAPRLRLEIDVGRSPFLMDDLHRGKVDMVISTREDPTLEGFALRTSPVWWICSAQYIHVPGEPLPLILVDEPSIYRRYALHALEAANIPWRQAYLASNLIGIKAATRAGLGVTPRSMEMLGPDMRVLGESEGLPRLPDVTYHLWIRPNTLNPLARKAYELIRASQSL

SEQ ID NO: 69932 - protein, 400 aa, Pseudomonas syringae
MTTACLMSTYQPLALSFTRGLGTRLWDQSGREYLDAVAGVAVTNVGHSHPMLVDAIRDQAGLLLHTSNLYSIDWQQRLAQKLTRLAGMDRVFFNNSGAEANETALKLARLHGWHKYIEQPLVVVMENAFHGRTLGTLAASDGPAVRLSYSDLPGDYIKVPFGDLLAFDKVCVTHGHRIAAVLVEPIQGEGGAQVAPAGYLKALRERCTRRDWLLMLDEIQTGMGRTGKWFAFQHEGIVPDVMTLAKGLGNGVPIGACLARGKAAELFTPGSHGSTFGGNPLACRVGCTVIDIIEQQALVENAGVRGQHLLGRLQEVLGGHPQVMQVRGRGLMIGIELREAIPELTRIAAEQHGLLINVTRGKVIRLLPPLVLEAAEVEQIVQGLAASLDSASYRALERSA

SEQ ID NO: 69933 - protein, 507 aa, Pseudomonas syringae
MQQAIEQTATGGALRFNGICKVFPGVKALSDISFEARPGSVHALMGENGAGKSTLLKILGGSYQPNSGTLQIGEHSYQFKSTAESIAAGVAVIHQELHLVPEMTVAENLLLGHMPNRFGLINRGAMYRRAGELLKGLADEIDPRTRLGDLSLGQRQLVEIAKAMSRNAHVIAFDEPTSSLSAREIDRLMAIIVRLRDEGRVILYVSHRMEEIFRVCDAVTVFKDGRFVKTFEQMADLDHDRLVTCMVGRDIQDIYNYRPRQHQGPSLRVTGLLGLGLQEPVSFAVQKGEVLGFFGLVGAGRTELFRILSGLTRSTAGSLQLDGQPLTLKSPRDAIAAGVLLCPEDRKKEGIVPLSSVAENINIGARPRHVNLGCLIQGGWERDNARAQIKSMNVKTPSPEQQIMFLSGGNQQKAILGRWLSMPMKVLLLDEPTRGIDVGAKSEIYEIIHTLAADGIAVIVVSSDLMEVMGISDRILVMSEGAITGELNRDEADESRLLQLALPRTRG

SEQ ID NO: 69934 - protein, 522 aa, Pseudomonas syringae
MHTEHTSHDPLHPFADQTLPQRLRRWANQYGAHTALVAGDVRLSYAQLDQRVDRLAGGLAALGITAGDRVMLQLPNGVGFVCALFAVMRIGAVPVLAMPTQRAVDIAALCRLAEPVAYLIPDRLRDFDYRGMAAGIVEQQPSLAHVIVDGEPGPFIALSALDAPCPTDPLADPRGLALLLLSGGTTGTPKLIPRSHADYAYNFSHSARLCELDSDSVYLAVLPTAHNFTLACPGVLGSLAAGATVVMGDSASCDAAMPLIEREGVTHVALVPPLAQLWAQGRDWEDSDLTSLKLLQVGGSRLDPALAAHLLEALDCQIQQVFGMAEGLLCYTRPDDPLEVVLNTQGRPLSPFDQVRLVDTDLNDVAHGQTGELLTRGPYTITGYYRAADHTARSFTADGYYRSGDLARWTPQGNLIVEGRIKEQIQRSGEKISAAHIENHLTALPDIESAVVVAVPDPLLGERICAFILGDPPTGAGQCIRDQLRRQGLGEDKLPDQFEWVAAWPLTAVGKIDKRQLAALAQ

SEQ ID NO: 69935 - protein, 417 aa, Pseudomonas syringae
MFSRDLTIAKYDADLFAAMEQEALRQEEHIELIASENYTSPAVMEAQGSVLTNKYAEGYPGKRYYGGCEYVDVVEQLAIDRAKELFGADYANVQPHAGSQANSAVYLALLQGGDTILGMSLAHGGHLTHGASVSSSGKLYNAVQYGIDGNGMIDYDEVERLAVEHKPKMIVAGFSAYSQILDFPRFRAIADKVGAYLFVDMAHVAGLVAAGVYPNPVPFADVVTTTTHKTLRGPRGGLILARANADIEKKLNSAVFPGSQGGPLEHVIAAKAICFKEALQPEFKTYQQQVVKNAKAMAGVFIERGFDVVSGGTENHLFLLSLIKQDISGKDADAALGRAFITVNKNSVPNDPRSPFVTSGLRFGTPAVTTRGFKETECKELAGWICDILADLNNEAVIDAVREKVKAICAKLPVYGA

SEQ ID NO: 69936 - protein, 1254 aa, Pseudomonas syringae
MKGVLAALVLVMLAMLLWQLIEQFHQTQERQRQRSLEYSIQLSDRMSLNMALKAQIAMNLLDEAQSSGERLEQPVMLAGLRTALPALRSVARLNPAGDIVSDSAEVPRDGDFLRHAMRQALGRPYFYTSTDDGNQLYVLIRQGGGITGDYWALRMAPDALKDLASQPAQDFQHVWRLEQRKTQRVILREPLPSNDADSGLSETILLQPLSNSDWQLRGLFDTYKARSELLTPLIGKCVIGLLLSILPLIALISLRRRQRQMLQSRRRYRDIFEGAGVAICVMDMSGLQEQLDALQISTGEEFDRLLKSQPASLKRLLQQLRINELNEVALGLLEIECNEQAWQQLIEGESRTRPGIGIQVIHAVLARQTRLELEICLTRASGQDQHLWLVMRLPEARSDFDAVILSIGDITSRKQTELSLLDRESFWSDVIRTVPDHLYVQDVLSQRMIYSNHHFGHTLGYNKFELRAMGEFFWEILLHPDDAKSYQDMRLRQRHHGHNELLQCVLRFRDHENNWRCFDVREQALAWDTEHLVTRIIGIAKDITEQVASSQSLRDSEQRYRMLAESISDVIFSTDAHLTVNYVSPSVERALGYSADWITRNGWSAAIANPQQLTGFDALISRISKVLHKPQELARLRDEVTTRMFLFDCLRADGRKIPVELRVVLVWDEHGNFEGIFGVGRDISQQRRAEKDLRMAATVFEHSASAILITDPAGYIVQANEAFTRVSGYEVAQVLDQLPGMLTVESEQEAHLRYILRQLNGQGTWEGEIRLKRRNGEHYPAWVGITAVVDDEGDLASYVCFFSDISERKASEDRIHRLAYYDALTHLPNRTLFQDRLHSALQQAERQQAWVVLMFLDLDRFKPINDSLGHAAGDRMLQEMATRLLACVSADDTVARMGGDEFTLLLQPDITREAALTRAIHVAERILTSLVTPFVLEGREFFVTASIGIALSPQDGSELSKLMKNADTAMYHAKERGKNNFQFYQTDMNATALERLELESDLRHALEQQEFTLYYQPQFSGDGKRLTGAEALLRWRHPRRGLVPPNDFIPVLEELGLVVEVGDWVLTEACRQLKHWHQAKVRVPKVSVNISARQFSDGQLGKRIAHILEQTGLSPACLELELTESILMREVNEAMQILDGLKNLGLSIAVDDFGTGYSSLNYLKQFPIDVLKIDRTFVDGLPSGEQDAQIARAIIAMAHSLNLSVIAEGVETHEQLEFLREHGCDEVQGYLFGRPMPPSQFEAQFSNDALFMLD

SEQ ID NO: 69937 - protein, 419 aa, Pseudomonas syringae
MIESGAAAPPSGRTGWTGSQAQIRTLAQVSVEEIPRFSTNSAELDRVLGGGLVDGSVVLIGGDPGIGKSTILLQTLCNIAQRMPALYVTGEESQQQVAMRARRLGLPQDKLRVMTETCIETIIATAKVEKPKVMVIDSIQTIFTEQLQSAPGGVSQVRESAALLVRYAKQSGTAIFLVGHVTKEGALAGPRVLEHMVDTVLYFEGESDGRLRLLRAVKNRFGAVNELGVFGMTDKGLKEVSNPSAIFLTRAQEEVPGSVVMATWEGTRPMLVEVQALVDDSHMSNPRRVTLGLDQNRLAMLLAVLHRHGGIPTHDQDVFLNVVGGVKVLETASDLALMAAVMSSLRNRPLPHDLLVFGEVGLSGEVRPVPSGQERLKEAAKHGFKRAIVPKGNAPKEAPPGLQIIAVTRLEQALDALFE

SEQ ID NO: 69938 - protein, 628 aa, Pseudomonas syringae
MQLDPLRATPAVVNNDGLDYVPTNKHILFGHHFAAIAGAGPLVGPVLAAQMGYLPGTLWLIAGVVLAGAVQDFMILFLSTRRDGRSLGDMVREEMGRIPGTIALFGCFLIMIIILAVLALIVVKALAESPWGMFTVMATIPIAMFMGIYMRYIRPGRIGEISLVGVLLLLGSIWVGGMVAADPTWGPMFTFTGIQITWMLVGYGFVAAMLPVWLLLAPRDYLSTFLKIGTILALAIGILILAPELKMPALTQFTDGTGPVWKGALFPFLFITIACGAVSGFHALISSGTTPKLLDNEKNARYIGYGGMLMESFVAIMAMVAASVIEPGVYFAMNSPAAVVGSDVVTVAQTVSSWGFAITPEQLTAVAKDIGENTILARAGGAPTLAVGIAQILHQVLPGENTMAFWYHFAILFEALFILTAVDAGTRAGRFMLQDLLGSFVPALKRTESWTANAIGTGGCVALWGYLLYQGVIDPLGGINTLWPLFGISNQMLAGIALMLASVVLIKMKRQRYVWVTMLPAVWLLICTVTAGLIKLFDANPAVGFLALAKKYSAAADAGQILAPAKTMDQMQHVIFNAYTNSGLTILFLFVVFSILFYAIKVGRAAWTTEARTDKEAPYQAMPPASQV

SEQ ID NO: 69939 - protein, 65 aa, Pseudomonas syringae
MFNDLSRLGKYLGQAARLMVGMPDYDTYVEHMQNTHPDKPMMIYEQFFRERQEARYGGKGGPKCC

SEQ ID NO: 69940 - protein, 325 aa, Pseudomonas syringae
MTELQPIPVTVLTGFLGAGKTTLLRHLLKAEHGLKIAVIENEFSDAGIDSQLLGTDPVQIMTLSNGCVCCTIHTDLTKALYLLLERLDSGEIAFDRLVIECTGLADPAPVAQTFFIDEELRERYILDGIITLVDAAHADTHLTQTIAQAQIGFADRLLVSKRDLVDDAAFDALSARLTRINRRAPIRIVEHGKIDLAELLDVRGFNLNADLGGSMTLRPLAPAGKSSDRITSLVLRSDKPLNLDRLSEFMNELLEDHGKQLLRYKGVLNIEDEPRKMVFQGVLKLYGFDWDTEWAEGELRESVIVFIADELPEEKIRAGFAAVVG

SEQ ID NO: 69941 - protein, 352 aa, Pseudomonas syringae
MTYPEFTVSTDLALPGAGITALFGPSGSGKTTCLRCIAGLEKAEQGFIRVHDEVWQDSENGVFLAPHKRAIGYVFQEASLFDHLSVRANLEFGLKRIPRPQRRIELQQATELLGIDHLLERRPDKLSGGERQRVGIARALLTSPRLMLLDEPLAALDTKRKGEILPYLERLHRELDIPMLYVSHAQDEVARLADHLVLLEAGKVLASGPIRETLARLDLPLAMGDDAGVVIEGTVSAYDRHYQLLTVTLPGSNLCMRVAHAELQIGTLLRVKVQARDVSLNLQSDDHSSILNRLPVTVLEEALADNLAHVLVKLNAGGTPLLARITRYSSDQLNLHRGQTLWAQIKAVAVLA

SEQ ID NO: 69942 - protein, 255 aa, Pseudomonas syringae
MRTITLRAALKFSTLALAMSGAAYASADEVQVAVAANFTAPIQAIATDFEKDTGHKLVAAFGATGQFYTQIKNGAPFEVFLSADDTTPAKLEQEGDTVKGSRFTYAIGTLALWSAKEGYVDSKGEVLKANQYQHLSIANPKAAPYGLAATQVLSKLGLTDTTKAKIVEGQSITQAYQFVSTGNAQLGFVALSQIYKDGKLTSGSAWIVPDSLHDPIKQDAVILTKGKDNVAAKALVEYLKGPKAAAIIKSFGYQL

SEQ ID NO: 69943 - protein, 180 aa, Pseudomonas syringae
MGYEAGGHRGLFLSDQLHTQVGTFALVPQIADAVKIPVIAAGGIADGRGVAAAFVLGASAVQVGTAYLFCPQASVSALHRQALLDATDSQTALTNLFTGRPARGIVNRIMREAGPISALAPAFPLAGGALMPLRAIAEKQHSSDFTSLWAGQAVGIKHQLDATGLTRQLAENALKILSPL

SEQ ID NO: 69944 - protein, 235 aa, Pseudomonas syringae
MGIDLGRESAPDATTLLRFRRLLETHQLTRLLFETINQHLASRGLLLKEGTIVDATLIAAPPSVKNREGKRDPEMHQARKGNQWHFGMKAHIGVDATSGLVHSVVGTAANVADVTQVGQLLHGDETYVSGDAGYTGAAKRPEHAERDVIWSIAARPSSYKQHGEGSVLYRVKRKIEYAKAQLRAKVEHPFQVIKVRFNHRKVRYRGLEKNTAQLFSLFGLANLMLAKRYLQQAAG

SEQ ID NO: 69945 - protein, 162 aa, Pseudomonas syringae
MFEQLEIVGKVVGHGFHALDYTESGHESRRQNLMGTVTPEVKTVEQPVQFLNGQDNRLVGGIGRCFESLRFQAFEPKAEAVALPVQDFHSVARLVEENEKYRVEHGNLDIQFDQRSQSVDGFSKVHRFGVEVHFFDFGVGSHHGRWAPEKIGSPASGISSVL

SEQ ID NO: 69946 - protein, 381 aa, Pseudomonas syringae
MLNEQIFSNARVVTAEQVFIGTVVVRDGLIAEVQTGRSQLSQAQDLEGDFLLPGLVELHTDNLEKHLSPRPGVDWPSMSAVISHDAQIVAAGITTVFDALSIGDINPKGKRMQQLPAMLQAIADANEAGLTRADHLLHLRCEVSHPDTLNVFRDLVGQPLVQLVSVMEHAPGQRQFALESKYREYYMGKYHMSHEEMDHFIVEQVANSTEYADRYRRAIVELCLARGLSIASHDDATMAHVEESAGFGMNIAEFPTTLEAAQGCRQLGMSVLMGAPNIVRGGSHSGNVAAASLARHGLLDILSSDYYPASLLQAAFMLAEQDNDCELPHAINMVSRTPAIAAGLADRGEIRVGLRADLIQARNHAGLPVIDKVWRQGKRVF

SEQ ID NO: 69947 - protein, 144 aa, Pseudomonas syringae
MAMLRIHLMQNWFGYSDPAMEEALYETTILRQFAGLSLDRIADETTILNFRRLLEKHELAGGILQVINGYLGDRGLMLRQGTVVDATIIHAPSSTKNKDGKRDPEMHQTKKGNQYFFGMKAHIGVDAESGLVHSLVGTAANVAD

SEQ ID NO: 69948 - protein, 709 aa, Pseudomonas syringae
  MISC_FEATURE (339)..(339): X=any amino acid
  MISC_FEATURE (340)..(340): X=any amino acid
  MISC_FEATURE (358)..(358): X=any amino acid
MDVNLMHKALGYQSLGDIVHDQTFLEVTGVGPDFFLKMESLNPAGSIKLKTAVGLVNDVQARGLLGPQTTLIESSSGNLGVALAMICAERGIPFTCVVDPNSSSHNIRMMRSYGAQVIQVEIPDANGGFLGTRIALIREKVASDPRYVWLNQYENAANPRAHARTTAHSISRHFGHVDYLFVGAGTTGTLMGCLQHFQRHHPTTKIIAVDSVGSVTFGTPASRRFIPGLGTSQRPPIFNGDGIHALEMVPEANAVAMCRILARSKGMLVGGSTATVIAAVHAWRERIEPGSVVVALSPDWGERYLDTLYDDQWVEQRFGREVLSMTLTDLSNSKNTPLXXARDCSRKRWFIGDAFASXSRPQGVCSTCEVAAGRLAQAAFHVVDGEVTARLLAADPLACIDDVQAAYLAHEAGRTVNPDSYFLRFPEVPANRIIALPASLSGDQPVSGIKWISSFPGNVDTGLQRASAVLILNDPVTGYAFACLEASRISAMRTAASAVLGARWMNRQQRYVRRMAFIGAGFIARTILDMFVSDGWAMDSVSVFDQHEDSALALISHAAGRHRLNGEQTDLHACLQADVVVFATTAPRPYVLEPVFRPGQVVLNISLRDLGPEVIAQADNILDDVEHCLKAQTSPDLAVRHYQHRSFITGTLAQLMTGQVELSPDRASIFSPFGLGVLDLAVGQRVYRQALAEGSALPVPRFFFESNRW

SEQ ID NO: 69949 - protein, 228 aa, Pseudomonas syringae
FDLSAILQGEYAELIVKGIETTVQLAFVAWCMAMAVALLLVSIRLTGNMYAERLVAGYVSYHRNVPTLVQLMLWYFGIPTLLSESTQIWLSGYSTEYLFSVIALGLCQAAYFSEDIRSGLRAIPAGQVEASRALGLGYVRSMRYVILPQGVRNCLPSLINHTVLLFKNTSLVMAIGVVELTYATREVENYTFRTFEAYLVATVVYLAISLMLMGLGALLARHFSKAWR

SEQ ID NO: 69950 - protein, 439 aa, Pseudomonas syringae
MTYKLPTTATAPFCPSATTDSVAIPPNASLLRKMMLFVGPGLLVSIGYMDPGNWATAIEAGSRFGYSLLFVVVLASLSGMVLQNLCSRLGIATGRDLAQLSAARYSRNVAKGQWLLAELSIIATDLAEVLGAALAFHLLLGVSITTGVALTAFDTLIVLALQGANFRRLEAIVLGLIVTIASCFAVELILIKPFWPDVVAGLRPSWDVLSSQEPLYIAIGILGATVMPHNLYLHSSVVQTRVNGMDVASKASAIRYARLDTIGSLSLALLINAAILILAAAAFHKTGHTDVVEIQDAYHLLDPLVGGAIASVLFGVALLAAGQSSTFSGTIAGQVVLEGFLQAKIPCWQRRFITRALALIPALIGVIWLGDSSVGKMLVLSQVVLSLQLPFALWPLIRFTSDPQLMGPFVNSRLVKTAAWCLFGLISAANLTLLWFWVS

SEQ ID NO: 69951 - protein, 97 aa, Pseudomonas syringae
MIACMTLLGCFCAVTLPVHAAEAPEPKVTESKDNVHELEVGSRVPEKYRRSDLEVKDWKSKGLEAPAKESEWVKINDKYVRFQKVNGQIMDIVPVKK

SEQ ID NO: 69952 - protein, 572 aa, Pseudomonas syringae
MSKTIADHLAQTLAAAGVSHIWGVSGDSLNGLTDSLERIDSINWMHTRHEEVAAFAAGAQAASSGKLAVCAGSCGPGNLHLINGLYDCHRNRVPVLAIAAHIPSSEIGLDYFQETHPQELFKECSHFVELVSNPEQFPRVLERAMRAAISQKGVAVIVLPGDVALSESPDVPAKWVEATPPVVVPADTDLQSMANMLNDSKAVTLLCGAGCAGAHEQILALADTLGAPIVHALRGKQHVEYDNPFDVGMTGLIGFSSGYHAMLSCDTLVILGSSFPYRNFYPEKANIIQIDLDPTQLGRRTPVALGLVGGVRETLDALQPKLKPHTDRRFLDKALKHYAKAREDLDELATPTPNGTPIHPQYLTRLVDEQADADAIFTVDVGTPTLWAARYLHMNGKRSLLGSFNHGSMANALPQALGAKAEHPDRQVVALCGDGGLSMLLGDLLSIRQLNLPIKMVVFNNSSLGFVDMEMKASGYVPHGTDLHETNFAGIALGAGILGLRVENAEELPAALRKAFDHPGPVLIDVVTAKQELGIPPKIKLAQAKGFSLYMMRAIMSGRGSEVLELAKTNLR

SEQ ID NO: 69953 - protein, 326 aa, Pseudomonas syringae
MDRFARKVDYLRMSVTDRCDFRCVYCMAEEMTFLPRQQILSLEEIHQVAERFVALGTRKIRLTGGEPLVRAGVVGLCEKIAALPGLRELCMTTNGSQLDKLAAPLFKAGVTRLNISLDSLDPQRFRELTRTGDLHKVIAGIDAANAAGFVHTKLNCVVMHGRNDHEINDLLAFAIDRNLDVSFIEEMPLGIISEHSRAESFYSSDQVRERIAERYTLIPSTDSTQGPSRYWRLAQAPGIRIGFISPHSHNFCGTCNRVRLTVEGRLLLCLGNEHSVDLKAVLRATPGQPEKLEKAIIDAMQLKPWSHNFTHDDGVQVVRFMNMTGG

SEQ ID NO: 69954 - protein, 319 aa, Pseudomonas syringae
MYLGMNGGTMERLYADQVLPAFEKANNVKVVIVPGTSADILAKVQASKDNPQMHVIFLDDGIMYRAISMGLCDTLQPSDSLADLPAKAKIKEQAAAVSLGVTGLAYNTRMFKEKGWSAPTSWMDLADKRFKDKVVFQSLASSTFGLHGFLMFNRIQGGSEKDVEPGFKAWPKTVGPNVLEYIASSAKISEMVQTDEAALFPLTPTQVTALKIKGVPVEYASPKEGGVVLNVAECAIAKNNQPELAQKLAAYLLTPQAQAPALEFGDQIPSNPKTPTTDKTRPQVEAMEKYLETAVTIDWDQVNQIRPEWNARWSRSIER

SEQ ID NO: 69955 - protein, 266 aa, Pseudomonas syringae
MHISLKQQVAIVTGASSGLGAGAARALADAGAAVVINYNSKAEPAEKLAEEIRAAGGRALAVGADVSKEEDVERLFAQTVEHFGALDILVANSGLQKDAAIVDMSLEDWNTVINVNLTGQFLCARAALRQFIKQGMRPEVSRAMGKIIHMSSVHQLIPWAGHVNYAASKGGVDLLMRSIAQEVGELKIRVNSVAPGAIRTPINADARKGDAEKEMLKLIPYGRIGEPEDVANAVLWLASDASDYVHGTTLYIDGGMTLYPEFRGNG

SEQ ID NO: 69956 - protein, 510 aa, Pseudomonas syringae
MGLSRGSAEQKAEVAPPTTLFLFGAHGDLVKRLLMPALYNLSRDGLVDEGLHIVGVDHNAISDADFAKKLENFIRDEAAGKIAGGGKDPLDPALWGTLAERISYVQGDFLDDSTYQDIASKIESTGAKNAVFYLATAPRFFSEVAQRLGSSGLLQETDDGFRRVIIEKPFGSDLASAVALNGCLLKVMSEKQIYRIDHYLGKETVQNILVSRFSNGLFESFWNNHYIDHVQITAAETVGVETRGSFYEHTGALRDMVPNHLFQLLAMVAMEPPAAFGADAVRGEKAKVVGAIRPWNKEEALANSVRGQYAQGTMGDKEVVGYRQEDRVEPDSTTETYVALKVMVDNWRWVGVPFYLRTGKRMSARSTEIAICFKPAPYAQFRDTEVDRLKPNYLRIQIQPNEGMWFDLFAKRPGPTLDMEDIALGFAYKDFFEMQPSTGYETLIYDCLTGDQTLFQRADNIENGWRALQPFLDAWASQPEVQPYEAGKNGPDAGDELLSRDGREWRDLNV

SEQ ID NO: 69957 - protein, 279 aa, Pseudomonas syringae
MIKKCLFPAAGYGTRFLPATKAMPKEMLPVVNKPLIQYGVEEALAAGLTEISIVTGRGKRSLEDHFDISYELEHQIKGTDKEKYLVGIRKLIDECSFSYTRQTEMKGLGHAILSGRPLIGNEAFAVVLADDLCVNLEGDGVLAQMVKLHKHYGCSIIAIQEVDPSETNKYGVIAGEEIKPGLFRVTDMVEKPKPEDAPSNLAIIGRYILTPDIFEKIEQTEPGKGGEIQITDALMKQAAEGNVLAYKFKGTRFDCGGAEGYIEATNFCFEHFYKAGKAH

SEQ ID NO: 69958 - protein, 399 aa, Pseudomonas syringae
MYGAHFSEDFDHAKGFGWSLGEASFDWSTLIANKDREINRLNDIYRKLLVDSGVTLLEGHAKIVGPQQVEINGQTHSAERILIATGGWPQVPDVPGREHAITSNEAFYLKALPKRVVVVGGGYIAVEFASIFNGLGADTTLVYRGELFLRGFDGSVRSHLHEELLKRHMTIRFNSDIERIDKQSDGSLLLSMKGGGTLETDCVFYATGRRPMLDNLGLDSVDVKLDEHGYIKVDEHYQTSEPSILALGDVIGGVQLTPVALAEGMAVARRLFKPEQYRPVDYNHIPTAVFSLPNIGTVGLTEEDAIKAGHDVQVFESRFRSMKLTLTDDQERTLMKLVVDAKTDRVLGCHMVGPDAGEIVQSLAIAIKAGATKQVFDDTIGVHPTAAEEFVTMRTPAKR

SEQ ID NO: 69959 - protein, 259 aa, Pseudomonas syringae
MLPAGAPTEDTIQTLSQLLEADDVIIDGGNTFYKDDIRRAQELSEKGLHYVDVGTSGGVWGLERGYCMMIGGDVAAVERLDPLFASLAPGLGSIERTRGRTSTDDRAERGYIHSGPAGSGHFVKMIHNGIEYGMMQAFAEGFDLLKQKNSEHLPAEQRFDLNTADIAEVWRRGSVVSSWLLDLTADALATDPQLDAFSGSVADSGEGRWTIEAAIEQAVPVPVLSSALFARFRSRQTSSYADKMLSAMRFGFGGHKEPK

SEQ ID NO: 69960 - protein, 111 aa, Pseudomonas syringae
MIKAKDFDKASQAFTAFLRKYPNSSYAGNAQYWLGEVNLAKGDLQGAGQAFAKVSQQYPKHAKVPDSLYKLADVERRLGHTDKVKGILQQVVAQYPGTSAAQLAQRDLQRL

SEQ ID NO: 69961 - protein, 124 aa, Pseudomonas syringae
MSTANPPSHTAKLDRILADAQRDREMGYRDKALRMYPHVCGRCAREFAGKRLSELTVHHRDHNHDNNPQDGSNWELLCLYCHDNEHSRYTDQQYFADGSLSTPKTAKATHNPFAALAGLMKKDE

SEQ ID NO: 69962 - protein, 336 aa, Pseudomonas syringae
MALHILIFGMLFVSFAMTPDLPEAKPIVQATLYQLKSKSQATTQTNQKIAGEAKKTAARQTEVEQLEQKKIEQLKQEAVKAAEQKKEESAQKAEEQKAADEAKKAEQKAEEAKKADDAKKADEAKKVADAKKVEEKQLADIAKKKAEDEAKKKAEEDAKKAAAEEAKKQAADEAKKKAAEDAKKKAAEDAKKKAAADSAKKAQEAARKSAEDKKAQALADLLSDKPERQQALADERGDETAGSFDDLIRVRASEGWSRPPSARNNMSVTLQIGMLPDGTIASVSIAKSSGDGPFDSSAVAAVKNIGRLTEMQGLKPADFAPYRSFKMTFTPGDLAL

SEQ ID NO: 69963 - protein, 82 aa, Pseudomonas syringae
MYLYVLKSDVLKRVPPELLVAFGKPVHAFDLVLSPERALSREDINAVLKNLDSQGYHLQMPPAEDEYIEHLPEELLRRNDPM

SEQ ID NO: 69964 - protein, 571 aa, Pseudomonas syringae
MRTSQFLLATQKETPSDAVVVSHQLMLRAGMIRKLASGLYTWLPMGLRVLRKVEAIVREEMNAVGALEILMPGIQPAELWQESGRWEQYGPELMRLVDRHNREFCLGPTHEEVITDLARNELNSYKQLPINMYQIQTKFRDEIRPRFGLMRGREFVMKDAYSFHADNASLQVTYDRMHLAYSNVFSRLGLKFRPVEADNGSIGGAGSHEFHVLAESGEDDIVFSNGSDYAANIEKAEAVPREKARAAATEELRLVDTPNAKTIAQLVEGFGLPIEKTVKTLVVHAAEEGKLIALIIRGDHELNEIKASQQELVASPLVMASEAELRDAIGAGAGSLGPLNLPLPCIIDRSVELMSDFAVGANIDDKHYFGVNWERDLPVPTVADLRNVVAGDPSPDGQGTLEIKRGIEVGHIFQLGTKYSEAMKCQVLGENGKPVNLAMGCYGIGVSRVVAAAIEQNSDENGIIWNDTLAPFQIALIPLRYETDAVREATDKLYAELTAAGFEVLLDDRDKKTSPGIKFADMELIGIPHRIVVSDRGLAEGNLEYKSRTESQPQAIAVADVLSFIQGRVKR

SEQ ID NO: 69965 - protein, 324 aa, Pseudomonas syringae
MSRIYADNAHSIGNTPLVQINRIAPRGVTILAKIEGRNPGYSVKCRIGANMIWDAEASGRLKPGMTIVEPTSGNTGIGLAFVAAARGYKLMLTMPASMSIERRKVLKALGAELVLTEPAKGMKGAIAKAEELLAGDPETFFMPAQFDNPANPAIHEKTTGPEIWADTDGTIDVLVAGVGTGGTITGISRYIKHTAGKPILSVAVEPDSSPIITQAMAGEEITPAPHKIQGIGAGFIPKNLDLSIVDRVERVTDDESKAMARRLMQEEGILCGISCGAAMAAAVRLAEKPEMQGKTIVVILPDSGERYLSSMLFSDLFTDQELSQ

SEQ ID NO: 69966 - protein, 631 aa, Pseudomonas syringae
MSQTNSHAQAGGTAKPIGLLIAAVGVVYGDIGTSPLYTLKEVFQGGYGVEVTHDAILGVLSLIFWSLIWVVSFKYMAFVLRADNQGEGGIMALMALARRASAKHPKLQMMMVVFGLFGAALFYGDSMITPAVSVLSAMEGLELAFDGLDHWIVPMALVVLVGLFLIQRHGTARIGVLFGPVMVVWFLVLGALGVYGIMQSPEVLKAVNPAWGLNFFIIHPGIGVAILGAVVLALTGAEALYADMGHFGRKPISRAWFILVLPALLLNYFGQGALVLGNPETVRNPFYLLAPSWALLPLIGLSTMATIIASQAVISGAFSMTLQAIQLGYIPRMHIQHTSSDAQGQIYIGAVNWALMVGVIMLVIGFESSGALASAYGVAVTGTMLCTTILVSTVMLMLWKWPPLLAVPLLICLLLVDGLFFAANVPKIFQGGAFPVLAGAVLFILMTTWKRGKHLLAERIDEGGLPLPIFIGSIRVQPPHRVQGTAVFLTARSDAVPHALLHNMLHNQVLHEQVVLLTVVYEDTPRVPSAQRFEVESYGEGFYRVILHFGFIDEPDVPAALALCHLAELDFSPMRTTYFLSRETVIPSKMDGMARWREALFAFMLKNANGNLRFFKLPFNRVIELGTQVEM

SEQ ID NO: 69967 - protein, 224 aa, Pseudomonas syringae
  MISC_FEATURE (151)..(151): X=any amino acid
QMSFSDVEYAGKRKQTRRERFLAEMDQVVPWKGLPGLIEPFYLKAGGGRKPYPLETMLRIHLLQNWFSLSDPCMEEAHIGTDVESGLVHHVYGTAANVADVTQVAELLHGEENAIYADAGYTGAEKRKEHENSKIVWQIAARHSTYSTLVXDSVFYKIKRKIEYCKAKTRAKVEHPFRVIKRQFGYVKVRFRGLMKKTAQLTTLFALSNLWMVRKQLMGTGELR

SEQ ID NO: 69968 - protein, 353 aa, Pseudomonas syringae
MKTLVSAAHLAGSQDNASALLIQVDSLGTDDLGDTLLQLQQWPLPPTLKVGQTFEGWNVGDIVAQSRQSILYRVKDAHGQPWLLKTLPTSRHDEAGAGQGLLLEEWFLRRVAGRFFPEVHSLAQRQHLYYVMREYPGSTLAEVFRRNGPLPLVQWQDLATRVLRATGLLHRRNIIHRDIKPENLLLGNDGELRLLDFGLAFCPGLSATNAEDLPGTPSYIAPEAFNGAEAHPRQDLYAVGVTLYYLLTGHYPYGEIEAFQHRRFGTPIPASRYRPDLPQWLSQSLDKALQADPDQRYETPEQWLLELEQAEHRSLVTRPRPLLEREPLKVWRTLALVSLLCNLLAVIWFMGRH

SEQ ID NO: 69969 - protein, 224 aa, Pseudomonas syringae
MVQQINNAADKDDVRPIIFDTIVNQDIREILATSNGFMIDIFSTFLAPLEQELSSHSSYSVGKSHSIGHNSNYMERIEAVNFALDNDDGARTHYYDKADIILVGVSRCGKTPTCLYMAMQFGIRAANYPLTEDDMERLQLPPALKQHREKLFGLTIDPDRLTAIRHERKPNSRYSSYAQCEFEVREVESLFRRENIPNINSTHFSVEEISAKVLVEKGVERRFK

SEQ ID NO: 69970 - protein, 906 aa, Pseudomonas syringae
  MISC_FEATURE (774)..(774): X=any amino acid
  MISC_FEATURE (873)..(873): X=any amino acid
  MISC_FEATURE (875)..(875): X=any amino acid
MTSMAIQTTQVTASTCCYCGVGCGVLIEHDGQRILGVSGDPQHPANFGKLCSKGSSLHLTGDIEARALYPELRLSKGLARSVTDWDTALEHAATVFAESIREHGPDSVAFYISGQLLTEDYYAFNKLARALVGTNNIDSNSRLCMSSAVAGYKRSLGADAPPCSYEDLELSDCVMIVGSNMAYAHPILFRRLEEAKSRRPAMKLIVIDPRRTDTCELADLHLAIQPGTDVALFHGILHVLMSENLIDPQFIAAHTLGYDELAALVCDYPPERVANICGISQQHLHTCARWLGKSAGFLSLWCMGLNQSTAGSAKNSALINLHLATGQIGRPGAGPFSLTGQPNAMGGRETGSLSNLLPGHRDAANPEHRAEVAEYWGIDSLPATPGLSAIELFEQLQNGTIKALWIACTNPAQSLPDQNRIRQALETCPFVVLQEAFKTTETARFADLLLPAASWGEKEGTVTNSERRISNVRKAIQAPGEARSDWAITVDFAQRLQKRLQPEAPALFDFQTPKSLFDEFKGLTVGRDLDMSGIDRELIDRQGPQQWPFPTGASVGTPRLYLDGIFPTASGRAQFLAEPYIAARELRDAEYPLTLNTGRLRDQWHGMSRTGTAARLFGHVSEALLSLNPKQMLGHDLQNGDLVKLISRRGELLLPVSSDDSVVAGQAFLPMHWGERFLKGGVNVLTQPAFDPLSKQPELKHSGVRIEKARLPWQFFALIEGNVQQHMERLRPLCEAFTYLSMGLIGRERPALVVRAASTEAPDSTLLQRIDSLXNLDEGPVMAYDDPKRSIGKRVRIDNGRITAIRLAGETLAQHWLQTLWLQERADPALRRWLLAPLSSEPGKDSTLSRDKTLCNCMNVSQSTVMSGIERGXNXNQLKTQLGCGTQCGSCVPEIKRLINAVAVTE

SEQ ID NO: 69971 - protein, 379 aa, Pseudomonas syringae
MENTMAEAKVLSGAGLRGQVAGQTALSTVGMAGAGLTYRGYDVRELAAEAQFEEVAYLLLYGELPTQSQLAAYLGKLKGLRDLPQALKEVLERIPADTHPMDVMRTGASMLGTLEPELSFDQQRDATDRLLAAFPAIMCYWYRFSHDGQRIDCTTDESSIGGHFLHLLLDKTPSELHRKVMDVSLILYAEHEFNASTFTARVCASTLSDLYSCVTAAIGTLRGPLHGGANEAAMEMIQRFASADEATQGTLGMLERKEKIMGFGHAIYKESDPRNEVIKGWSKKLADEAGDSVLFPVSEAIDKVMWEQKKLFPNADFYHASAYHFMGIPTKLFTPIFVCSRLTGWAAHVFEQRANNRIIRPSAEYIGVEQRSFVPIEQR

SEQ ID NO: 69972 - protein, 242 aa, Pseudomonas syringae
MSTMSVGAERLLTTEDDPETLSENVFRRIQSAIVKGEIAPGSKISEPELARTYGISRGPLREAIHRLEGQRLVVRVPHVGARVVALSHAELIELYEIRESLEGMACRLAAERMSQAEIDELRSVLDTHERDAAFQAGIGYYQQEGDFDFHYRIIQGSGNRTLSQMLCGELYQLVRMYRIQFSTTPNRPRQAFAEHHRILDAIAERDGELAELLMRRHIGASRRNIERHYQAASQATSDRGQP

SEQ ID NO: 69973 - protein, 472 aa, Pseudomonas syringae
MIGMLELALKRADQGELDRSAIEVAYSSANDLLDLIGDILDIARIESGRLALNPERANLRQLVESVLRVFDGLARQKDLDLVLELDSRINTDVLIDPLRFKQILSNLVSNAIKFTPMGRVKIALQAVDNPDPQLLHLHITVQDSGIGISVEDQKRLFEPFAQADNTGQMARTGAGLGLVICRSLCMMMGGNLSLDSEPGNGTRISMNLLLTTLEPMTRQPVATKPPAAAHQVLRILIVDDHPANRLLLCQQLGFLGHHCEMAENGAQGLERWKADAFDLVVADCNMPIMNGYDMTLALRTHESVTEQPRCPVWGFTANAQPDEIERCRAAGMDDCLFKPISLSMLSERLTAISPLARAHPPFSLDSISSLTGNRPEMVERLITQLQHSNHEDRLVLARLMPDNDRIETRELAHRIKGAARIISAASVVRACDALELACEPDVPDEHFHTCKQVVELAMIELEDALMLQQAKT

SEQ ID NO: 69974 - protein, 488 aa, Pseudomonas syringae
MIKSLRPLLLASMLLPLALPSYAAVINTTLPPKVQQALKASKLGDDALSLVMLPLNGPGTPTVFNADVSVNPASTMKLITTYAALEMLGPTHQWKTEFFTDGTLSNGVLRGNLYLKGGGDPKLNMEKLWLLMRDLRANGVQQVTGDLVLDRSHFVQPQLPEFNDDGNDENKPFLVKPDALMVNLKALRFVTRNDDGRILVSVEPPIATIRVDNQVKAIASKQCTGDVRYNPVTQADGSVIVTVTGQLGNGCNSQTYLSLLDHPTYAAGAVRAIWQELGGTILGKDRVGVVPTNTKLLAKAFSPDLVEVIRDINKFSNNTMAQQLFLSLGEEFRNEADGDDGKAAQRVIRQWLAKKGITAPHLVMENGSGLSRAERVSAREMAIILQAAWRSPYAAEFMSSMPLAGLDGTMRKRLKRTPLLGEAHIKTGTLNTVRAIAGFSRDSNGNTWAVVAILNDPRPFGASSILDEVLIDLYRQPKLANTTVSIQQ

SEQ ID NO: 69975 - protein, 403 aa, Pseudomonas syringae
MNERTGNALDWVAGSDAPEMNSLDVGFMALTDCAPLVVAATQGFAQPYGLSLNLKRQTSWAGLRDRLVSGQLQAAHSLYGLIYAVELGISGGPATDMAILMGLNQNGQCINLSRELQDAGVITPEALDKRAHQSGSKLTFAQTFPTGNHAMWLYYWLASQGIHPLDDVTSVVVPPTQMAQHLQAGRIDGFCVGEPWGASAVQQQLGFTMATSQAIWPDHPGKVLGCTREFVEQNPNTARALIMAVLEASRFIEQSDHNRRSTAQLLSGVDYLDASLDCIEPRLLGQYSDGLGNQWQDPHAVSFHDQGQVNYPWLSDGMWFMTQFRRWGLLREDPDYLAVASRVQQLDLYRQAANALGIDAPSATLRSSQLIDGKVWDGSDPAGYARSFKLHSLADTAPAVASR

SEQ ID NO: 69976 - protein, 301 aa, Pseudomonas syringae
MNSPLPDVALTEVSSALIALDWVGMQGVEVPLTLGEQGATHPVHAYADLQVDLTDPSVKGIHMSRLYRLLDGFAEHQVLTPETLSALLEAMVESHVDCHSSGARITLTFNLLCRRPALVTEGLSGWKSYPVKLEAVWRAGRLCLDVSADITYSSTCPCSAALSRQLLEEAFVARFGRQSFVDPMQVAAWLRENASYATPHSQRSVATVQVRVAEQATEMGLMALIDTVEQALGTPVQTAVKRADEQAFARLNGQNLMYVEDAARKIQQALEGRYPASSVSVRHFESLHPHDAAAQTSSYLS

SEQ ID NO: 69977 - protein, 302 aa, Pseudomonas syringae
MQLYGVQSTALRYFLEVARCGSISEASVRLNVASSAVSRQISKLERELDALLFERQARGMMLSEAGIRLAAYARKSQLEAEQVVLEITELQGLQRGHVRIACSEGFALDFLPQCIARFRRLYQGIHFSMEVCAPAQATERVRSGDADLCLTFSLTPQNEIKVEHIHSGAICAVVSHNHPLASRKEVALAELQPYAIALTNTDTTLRQLFDICCGVQGLMFDPVLTSNYIGSLLRFVSEEGGISLSSEMTLDKRVHEKQLKSLPISDEGMKARRIELQSMAGRNLPAAVAAFRDFLIEELAKT

SEQ ID NO: 69978 - protein, 341 aa, Pseudomonas syringae
MDFKRKLLIAALPLAFCMSGLAQADVKIKFAEVHPAGYAPVVAEQNMGKKLEEQSKGEISFKMYAGGVLGSEKEVVEQVQSGAVQMTRVSLGIVGPVVPDVNVFNLPFVFRDQAHMRTIIDGEIGQEILDKITNSQFNMVALAWMDGGTRNLYTKKPVRQIADLKGMKIRVQGNPVFIETINDMGGNGIAMATGEIFSALQTGVIDGAENNPPTYFQHNHYQNAKFFTMTEHLILPEPIVMSKATWEKLKPEQQALVKKLAREAQMEERVLWDKSSADAEVKLKAAGVEFITLTPEQKKAFYDATQPVRDKFGAPYKDLISRIEAVQTNPALAAASSQAAQ

SEQ ID NO: 69979 - protein, 525 aa, Pseudomonas syringae
MAENLIEIRDLSVAFNGQQVVSHLSLDVRRGECLALVGESGSGKSVTAHSILQLLPRSGTATTGSITYRGQQLVGADERTLRELRGNRIAMIFQEPMTSLNPLHSVSRQIGETLLLHRGISGREAQKRIIELLELVGIQQPEKRLKAYPHELSGGQRQRVMIAMALACEPELLIADEPTTALDVTVQRKILLLLKELQQRLNMSLLLISHDLNLVHSVAQRVCVMRAGEIVEQADCKSLFKSPQHPYSRLLLDAEPAGEPLPRDTRETVLQVDNLKVWFSLTGGVLRRHKEYLKAVDDISLSIQRGKTLGIVGESGSGKSTLGQAILRLLESQGSIRFRGQALDGLSQKQMRPWRKEMQVVFQDPYGSLSPRMSVAQIISEGLEVHSQFNPTQCDAEVIRALEEVGIDPQCRHRYPHEFSGGQRQRIAIARALVLKPALILLDEPTSALDRTVQKQVVALLRDLQQKHGLTYLFISHDLAVVQALAHDVIVVKDGKVVERGASHDVFESPQHPYTQELLAAAHPE

SEQ ID NO: 69980 - protein, 548 aa, Pseudomonas syringae
MSLSPFAGKLAPAQLLVDIPRLVTAYYTGQPDASVPTQRVAFGTSGHRGTSFELGFNEWHVLAISQAICLYRKANGIDGPLFLGADTHALSTPAAATALEVLAANGVQVMISEGDEYTPTPAVSHAIICYNRGRTSGLADGIVITPSHNPPQSGGFKYNPPNGGPADSDITKWIENKANELLADKVVGVSRISHEKALRADTTHRHDYVNSYVADLKNVIDLDAIRDSGLRLGVDPLGGAGVNYWSAIGEHYGLNLDVVNKFVDPTFRFMTVDWDGQIRMDPSSSHAMQSLIGLKDRYQVAFACDPDHDRHGIVTPTGGLMTPNSYLAVSIDYLFQNRPDWRADAAVGKTVVSSGMIDRVAARLGRRLYEVPVGFKYFAQGLFEGSLGFGGEESAGASFLRRDGSVWTTDKDGLIPALLAAEMTARTGRDPSQIYKTMIDELGEPFSTRVDAKANPQQKALLSKLSPEQVTSTELAGEPIQQVLSNAPGNDQAFGGVKVMTENGWFAARPSGTEDIYKIYAESFVSEDHLKRLVAEAQVLVDGAISPK

SEQ ID NO: 69981 - protein, 506 aa, Pseudomonas syringae
MRYAHPGTEGAIVNFKERYGNYIGGEFVAPVKGQYFTNTSPVNGKPIAEFPRSTAEDIDKALDAAHAAAAAWGSTSVQARSLVLLKIADRIEANLEVLAITETWDNGKAIRETLNADIPLAADHFRYFAGVLRAQEGSAAEIDGNTVAYHIHEPLGVVGQIIPWNFPILMAAWKLAPALAAGNCIVLKPAEQTPLGISVLIELIGDLLPAGVLNIVQGYGREAGEALASSKRIAKIAFTGSTPVGSHIMKLAADNIIPSTVELGGKSPNIFFEDIMSAEPEFIDKAAEGLVLAFFNQGEVCTCPSRALVQESIYPQFMEAVLRKVEKIKRGDPLDTDTMVGAQASEQQFDKILSYLEIAKGEGAELLTGGKVEKLEGDLSTGYYIQPTLLKGNNKMRVFQEEIFGPVVSVTTFKDEAQAVAIANDTEFGLGAGLWTRDINRAYRVGRAIKAGRVWTNCYHLYPAHAAFGGYKKSGVGRETHKIALEHYQQTKNLLVSYDTNPLGFF

SEQ ID NO: 69982 - protein, 173 aa, Pseudomonas syringae
MTTEHSNTPDLLDHLLGIEPGNPLHTVRHARDKVASATQGSQALFFDPALADNLPLSERLWVAYYATQLSAQPTLTAYYLQQLREVGVADSVLADVDANRIDLLEDPRLAAILRFTRTLIESPVHGDQSALQALQLQGLSTAEIVVLAQLIAFLSYQVRLAAGLTAIQSAGAA

SEQ ID NO: 69983 - protein, 419 aa, Pseudomonas syringae
MSTADTTRLILRNGRLLDLQQGRLIPGQEVVIEGERIVAVRAEGEAAPADAQVIDLGGRTLMPGLIDCHVHVLASNANLGMNALQPNAIIMYRALPILAAMLNRGFTTVRDAGGADWALARSIQMGLIPGPRIFASGKALSQTGGHGDMRARGELLLNEPCSCCFRAGAIARVVDGVDNVRLAVREELQQGANQIKIMASGGVSSPTDPIANTQYSEAEIRAIVDEAAAANTYVMAHAYTARAIRRAIECGVRTIEHGNLVDADTARLMAEKGAFAVPTQVTYEMLAEYGERFGLPADSVAKIEDVRQAGRNALLLFAEAGVPMGYGSDLLGEMHEYQTHELKIRAELLGNLAALRSATSVAAQILQREGELGCIAAGAIADLLVVDGDPLSDISCLVGQGEQLAMIVQGGHVHKNTLA

SEQ ID NO: 69984 - protein, 493 aa, Pseudomonas syringae
MTTVRTRIAPSPTGDPHVGTAYIALFNYCFAKQHGGEFILRIEDTDQLRSTRESEQQIFDALRWLGIEWSEGPDVGGPHGPYRQSERGDIYQKYAQQLVELGHAFPCFCTAEELDEMRAEQQAKGETPRYDGRALLLSKEEVQRRLDAGEPHVIRMKVPTEGVCVVPDMLRGEVEIPWDRMDMQVLMKTDGLPTYFLANVVDDHLMGITHVLRGEEWLPSAPKLILLYEYFGWDKPQLCYMPLLRNPDKSKLSKRKNPTSVTFYERMGFMPEAMLNYLGRMGWSMPDEREKFSLQEMVDHFDLSRVSLGGPIFDIEKLSWLNGQWLRELPVEEFASRLQTWALNPEYMMKIAPHVQGRVETFSQVAPLAGFFFAGGVTPDVKLFEHKKLSPDQVRQVMQLILWKLESLRQWEKERIMGSIQAVVEHLELKLRDAMPLMFAAITGQANSVSVTDAMEILGPDLTRFRLRQALDLLGGVSKKENKEWEKLLGAIA

SEQ ID NO: 69985 - protein, 692 aa, Pseudomonas syringae
MSTTEVSRNAAAKAADPQAVNESAKTGIAALWRPALVQAFVKLDPRQLKRSPVMLVVELTAILTTVLCVIPDPQVPTSVCVQIALWLWFTVLFANFAEALAEGRGKARADSLKAGSEGLKARIRDENGSLRTINASELRKGDVVRVEIGEMIPGDGEVIEGIAAVNEAAITGESAPVIRESGGDRSAVTGNTRLVSDWLLIRISSNPGESTLDRMIALVEGAKRQKTPNEVALDILLIGLTLIFLLVVITLQPFAHFAGGSLPLVFLVALLVTLIPTTIGGLLSAIGIAGMDRLVRLNVIAKSGRAVEAAGDVHVLLLDKTGTITFGNRRCAAVYAAPGVTPKELGEGALLASLADDTAEGKSIVEFLREQHPMNEPTLGSVTAVPFSADTRLSGVDYQGHVYRKGAVDSLLAFINMQRSELPPALAREVDKIAKTGGTPLLVCANGRLLGAIHLKDVVKPGIRERFEELRKLGIRTVMVTGDNPLTAAAIAAEAGVDDVLAEATPEKKLERIRQEQGEGRLVAMCGDGANDAPALAQADVGMAMNDGTQAAREAANMVDLDSDPTKLLDVVQIGKQLLVTRGALTTFSIANDVAKYFAVLPALFASIYPQLGVLNVMQLASPQSAILSAIVFNALIIVVLIPLALRGVRVQAASAAHLLRRNLLIYGLGGIVVPFIGIKLIDMLLVGLGLV

SEQ ID NO: 69986 - protein, 891 aa, Pseudomonas syringae
MVTNLSDSGRADALLAQLPREGRGRLKVFLGAAPGVGKTYAMLQAAHAQLRQGVRVMAGVVETHGRAETEALLNGLPQQPLLRTEYRGMTLEEMDLDALLKAAPSLVLVDELAHTNAPGSRHTKRWQDIQELLAAGIDVYTTVNVQHLESLNDQVRGITGVQVRETLPDWVLQEAFDLVLIDLPPRELLERLRDGKVYVPEQARAAIDAFFTQTNLTALREMAMQTAAAQVDNDLAQGYRQLGQSAPAVRGRMLVGIDGDMHAERLVRHASRVAQRRHLPWSAVHVDDGQTLDEQSRARLQNAQQLAERLGGEAVSLRAGEVARTLVQHAIERRASVVLVGQSRRHWRRRVFGGGVAARLLREGHGLEISVLDDSEELPDQPPRARPAREVVWFDYGLAFVATLIASLVAWGVAGVLALPNISLIFLAAVLLVAVRSSMGPALACAGLSFLAYDFLFIPPSFSLNIQREEDVLTLLFFLLMSALTGKLAARQRRQLQALRDTQEQTSELLDLSRKMTAATDRKAVLNAAEQHFSGWKELYLCLVDRDTQGGLVVETGGPLTFSEAERAAADWAWQHDQPAGSGTGTLPSGRWWWWPITAEEGPLALLGVCAREGQSFTDQHRRLLAALTQPLAQALARAQLAQELEAARLHGETEQLRSALLASVSHDLRTPLTSMRGSIDSLLALGEAIALEDRRELLEGTRDEAERLDRYIQNLLDMTRLGHGALKLARDWVSPADIVGSALNRLRAVLTPLQVSTQVTGDLPLLYVHAALIEQALVNVLENAARFSPLGGRLQVTAGVVDSELFFSVSDEGPGIPEDERAKIFDMFYTAARGDRGGQGTGLGLAICQGMIGAHGGRLTVEEGIDGLGTRITLFLPLQAQPDAEMEEPA

SEQ ID NO: 69987 - protein, 189 aa, Pseudomonas syringae
MARGVNKVILVGTCGQDPEVRYLPNGNAVTNLSLATSEQWTDKQSGQKVEKTEWHRVSMFGKVAEIAGEYLRKGSQVYIEGKLQTREWEKDGIKRYTTEIVVDMQGTMQLLGGRPQGDAQQGQGGGGNYNQSAPRPQQSRPQQSAPQQSAPQQNYNQQPPQQRDSRPAPQQQAPQPAADFDSFDDDIPF

SEQ ID NO: 69988 - protein, 253 aa, Pseudomonas syringae
MPKSAPLVRSSLIAHRGAKAYVPENTLLALEKAAECGAKWVEIDVKLTRDGQPVVIHDDMLDRTTNGRGAVVLHDLSAIRTLDAGGWFAAEFTGLQVPTFEEIVACALRLELGLQVELKPTIGDDVETAEVVMPILKSLWPADNDQLFVSSFSVRSLTAARRLWADVPLAIASVVAPADPVALLAEYDCRILHVLDDMLDDHHLVRLKSSGVEFAVATINSPKRARYLLEHGAQSILSDYPDLLNLPNGGCLQ

SEQ ID NO: 69989 - protein, 336 aa, Pseudomonas syringae
MDLAQQSVHRLIEELISRGLLRSGERVKNGRGQPSPRIELVNEAVYAIGVSINTDSAVVCVADLGCNVLEQVTLRTPPLSRNSTLDSLAKTIERMLQRNGIETDRVIGMGFAIAGFFLENRQINAPEPLRDWSLIDLQPVLEERFGMPVWLENNATTAAIGESLVGVGAWASNFIYLSFNFGFGAGVVINGKPYFGSHGNAGEITLYNDEESINRPALRYLLEELHQKGVQVDSIEDLRLRFDPNWPGVDTWLKRIQPTLDRLVNALAGLFDPQAVVFGGQLPAELGKRLIAATTFWGTHRYNSPPPRPRLLLSETNGDAAAIGAALVPLKERFFV

SEQ ID NO: 69990 - protein, 98 aa, Pseudomonas syringae
MHELEVVRLCVHRSSQHIYAQVISADGSKVLASASTLDKELRDGATGNIDAATKVGKLVAERAKAAGVSQVAFDRSGFKYHGRVKALADAAREGGLEF

SEQ ID NO: 69991 - protein, 76 aa, Pseudomonas syringae
MKIKDLSDEQIEQLRGEVAKFTTEGDLRREINMKIKRLMDLGCYRGLRHRRGLPVRGQRTKTNARTRKGPRKPIRK

SEQ ID NO: 69992 - protein, 128 aa, Pseudomonas syringae
MRHRKSGRHLSRTSSHRKAMFQNMAVSLFEHELIKTTLPKAKELRRVAEPLITLAKEDSVANRRLAFDRTRSKEIVGKLFNDLGKRYATRQGGYLRILKCGFRTGDNAPMAYVELVDRPVGGSVEAAE

SEQ ID NO: 69993 - protein, 878 aa, Pseudomonas syringae
MMEKPDVDTIEGLSPAISIEQKSTSHNPRSTVGTITEIYDYLRLLYARVGQPRCPDHDIPLEAQTVSQMVDLVLTQPEGSKLMLLAPVIRERKGEHLSVFEELRAQGFVRARVNGRLCELDELPKLDKQKKHSIDVVVDRFKVRADLQQRLAESFETALKLADGIALVAPMDDEPGEEVIFSARFACPICGHAISELEPKLFSFNNPAGACPTCDGLGVKQFFDIKRLVNAELTLAEGAIRGWDRRNVYYFQMLGSLSKHYGFSLEVPFKEIPADMQKVLLNGSGSQSVDFRYLNDRGDIVKRAHPFEGIVPNLERRYRETESATVREELAKFLGTQPCPDCRGTRLRREARHVWVGEKTLPAVTNLPIGDATHYFETLKLTGRRGEIADKILKEIRERLQFLVNVGLDYLTLDRSADTLSGGEAQRIRLASQIGAGLVGVMYILDEPSIGLHQRDNDRLLGTLKHLRDIGNTVIVVEHDEDAIRLADYVVDIGPGAGVHGGHIVAEGTPDEVMAHPDSLTGKYLSGRVKIAVPAKRTPRNKKLSLTLKGARGNNLQNVNLDIPIGLLTCVTGVSGSGKSTLINNTLFPLSATALNGATTLEAAAHDSINGLQHLDKVVDIDQSPIGRTPRSNPATYTGLFTPIRELFAGVPESRSRGYGPGRFSFNVKGGRCEACQGDGLIKVEMHFLPDIYVPCDVCKSKRYNRETLEIKYKGKNVHEVLEMTIEEAREFFDAVPALARKLQTLMDVGLSYIKLGQSATTLSGGEAQRVKLSRELSKRDTGKTLYILDEPTTGLHFADIQQLLDVLHRLRDHGNTVVVIEHNLDVIKTADWLVDLGPEGGSRGGQIIATGTPEQVAEMEQSYTGHYLKPLLIRDRA

SEQ ID NO: 69994 - protein, 223 aa, Pseudomonas syringae
MLYGEGPLKAAPFYYQLDHLGTPQELTDYSGEIMWSAKYRAYGNLATLDVSEIDNPLRFQGQYFDAETGLHYNRHRYYNPGTGRFLTPDPIKLAGGLNNYQYVPNPTGWVDPLGLNSECPGTKSVGDVGSPPEKAKTNEGEPAVPAPVARGENTTRVRHYTNRKGSAGIENDGIIQAQDNNRVYAELANKKPMSPADAEEKYQIGRGRGRDYIETDVPKEGLK

SEQ ID NO: 69995 - protein, 361 aa, Pseudomonas syringae
MTISDALHRLLLDNLTTATILLNADLRLEYMNPAAEMLLAISGQRSHGQFISELFTESAEALSSLRQAVEQAHPFTKREAMLTALTGQTLTVDYAVTPILSKGDTLLLLEVHPRDRLLRITKEEAQLSKQETTKMLVRGLAHEIKNPLGGIRGAAQLLARELPEESLKDYTNVIIEEADRLRNLVDRMLGSNKLPSLAMTNVHEVLERVCSLVEAESRGCITLVRDYDPSIPDVLIDREQMIQAVLNIVRNAMQAISGQNELRLGRITMRTRAMRQFTIGHVRHRLVSKIEIIDNGPGIPAELQETIFYPMVSGRPDGTGLGLAITQNIISQHQGLIECDSHPGHTTFSIFLPLEQGAAST

SEQ ID NO: 69996 - protein, 166 aa, Pseudomonas syringae
MSNHDQKRDEGYIEKLVQVNRVAKTVKGGRIFTFTALTVVGDGKGRVGFGRGKSREVPAAIQKAMEAARRNMIQVDLNGTTLQYAMKSAHGASKVYMQPASEGTGIIAGGAMRAVLEVAGVQNVLAKCYGSTNPVNVVHATFKGLKGMQSPESIAAKRGKRVEEII

SEQ ID NO: 69997 - protein, 483 aa, Pseudomonas syringae
MHQMTLAEIARGLAEKKFSSEELTRVLLSRIAQLDPQLNSFISLTEDLAITQAQAADARRAAGENGPLLGAPLAHKDLFCTQGIRTSCGSRMLDNFKAPYDATVVSKLASAGTVTLGKTNMDEFAMGSANESSHYGAVKNPWNLECVPGGSSGGSAAAVAARLLPAATGTDTGGSIRQPAALTNLTGLKPTYGRVSRWGMIAYASSLDQAGPMARTAEDCALLLQGMAGFDPQDSTSIDEPVPDYSASLNTSLKGLRIGVPKEYFSAGLDPRIAQLVHESVKELEKLGAIVKQVSLPNLQHAIPAYYVIAPAEASSNLSRFDGVRFGYRCEDPKDLTDLYKRSRAEGFGPEVQRRIMVGAYALSAGYYDAYYLQAQKIRRLIKNDFMSAFAEVDVILGPTTPNPAWKIGAKTHDPIAQYLEDFYTITANLAGLPGLSMPAGFVDGLPVGVQLLAPYFQEGRLLNVAHQYQQVTDWHTRAPEGF

SEQ ID NO: 69998 - protein, 141 aa, Pseudomonas syringae
MLLGIDYGTKQIGVAVGQAITGQARELCTLKAQNGVPDWDKVQALINEWKPDAIVVGLPLNMDGTPSEMSARAEKFSRKLNGRFGVTVYTHDERLTTFEAKGERMARGGQKGSYRDNPVDAIAAALLLQGWLDEHPELLNV

SEQ ID NO: 69999 - protein, 325 aa, Pseudomonas syringae; identical to SEQ ID NO: 69226

SEQ ID NO: 70000 - protein, 157 aa, Pseudomonas syringae
MAIDIGISEEDRKSIVDGLSHLLSDTYVLYLKTHNFHWNVSGPMFRTLHLMFEEQYNELALAVDSIAERIRALGFPAPGTYSTYARLSSIKEEEGVPSAEDMIKSLVQGQEAVVRTARSIFPLLDKVSDEPTADLLTQRMQVHEKTAWMLRSMLESK

SEQ ID NO: 70001 - protein, 228 aa, Pseudomonas syringae
MSHTFIHDQGEPKTSFGSLHLVNWRTLFAVFSLMLTTTLIWFSTTAQVSDLASGKNLVTSGLVEQWRHGDVVVMIRHAERCDRSANSCLGSPDGITVNGSHAASDVGEGLRRLGLDRTQLIASPLTRTQQTANYIAGQAVVPQGWAGDCNNHFKDAVVAHKIKGENLVLITHSGCIDHFERTMGVPAGERSSEYAEAFFVKMDGKSTPRILGSLNAVQWKSLANDQLK

SEQ ID NO: 70002 - protein, 171 aa, Pseudomonas syringae
MAKYSEQFKLTVVKAYLAGNIGFRKVSSQFSIDSSLLRRWVANYKSHGHTGHRKPGLRYSEAFKRSVLEHKREHGLSLRQTAAHFGIGDPGQIVIWEQQHYSNDLAPYVPKRRKSVAMPKKPYPTAPVIDDDTQKTRDQLMAELEYLRMENAYLKKLEELKEQQRRQKKKP

SEQ ID NO: 70003 - protein, 107 aa, Pseudomonas syringae
MTFVVTDNCIKCKYTDCVEVCPVDCFYEGPNFLVIHPDECIDCALCEPECPAVAIFSEDEIPAGMENFIELNAELAEVWPNITEKKDGMPDAADWDGKKGKIEHLER

SEQ ID NO: 70004 - protein, 283 aa, Pseudomonas syringae
MRTFRLVIACPDRVGIVAKVSNFLASHNGWITEASHHSDNLSGWFFMRHEIRADTLPFDLDGFREAFTPIAEEFSMDWRITDSAQKKRVVLMASRESHCLADLLHRWHSDELDCDIACVISNHQDLRSMVEWHDIPYYHVPVDPKDKEPAFAEVSRLVGHHQADVVVLARYMQILPPQLCREYAHQVINIHHSFLPSFVGAKPYHQASLRGVKLIGATCHYVTEELDAGPIIEQDVVRVSHRDSIENMVRFGRDVEKMVLARGLRAHLEDRVLVHDNKTVVFD

SEQ ID NO: 70005 - protein, 325 aa, Pseudomonas syringae; identical to SEQ ID NO: 69226

SEQ ID NO: 70006 - protein, 283 aa, Pseudomonas syringae
MTSALYPTRLPCGNRVLDLAHTHVMGILNATPDSFSDGGRYSQLDAALRHAEAMVLAGATLIDVGGESTRPGARPVSPAQEVERVAPVVEIIARELDVIISVDTSTPEVMLATAGLGAGMINDVRSLQRPGALEAAASTGLPVCLMHMQGEPGTMQNDPHYEDLLGEVSAFLLERMNQCVAAGIDRQQLILDPGFGFAKTLEHNLSLFRRMEALHALGRPLLVGVSRKSMIGAVLGRPVDQRLSGGLALAALAMTKGARILRVHDVAETADVVRMIAAVQAAE

SEQ ID NO: 70007 - protein, 482 aa, Pseudomonas syringae
MSAPMPFISRIFSVLALLPLATQALAAPAEFWYSHSGAAASAIADVCRSFNAQREEGDRLHCIRQGTYEQTLQKTAAAYRAGIGPALVEIYDVATPDMLLGGATHAVDTVMADHQRAYSDDAFLPALRRYYSDDHGTLAAQPFAASTAVFYTHRKALAAAGISEPPATWEAFDTALRALKRSGHTCPVVTEFSPWIWLEQTSAAQGTHVAIRAAGTDHYQFDKGTHVRLMTDLARWTAEGLVRHQDSTRSGQQGLAFATGDCAMLLDSTGSWNLMHGDLESDIEVSALPIYAQTQRRANVPGGSSLWVMRGHSVHDYRVVSEFLAFVLQPDNQLMFSARTGYLPVTQAAAARLQSSTKKPSAVAVGLAALNDIDGEPSAPLRCGFITLMRLIWSQEMENALAGRQSVDNALRQTTMRANDLLSLFQQMHQAQASNSALDTHPATLRLLAKRPVQPSEIGRADDRFGEQALSDKNLHSSEVTP

SEQ ID NO: 70008 - protein, 136 aa, Pseudomonas syringae
MQFLSPLILFTSCTLLATSLLAAEQAPPPSECLIKSQQISSQIQDAKTEGNKAEQSGLEKALAEVNANCTETSLLKQREQKVLDAKREVSRRQTDLNKAMDKGDPEKINKRKDKLAESRKELQEAQTDLEKVQSDD

SEQ ID NO: 70009 - protein, 236 aa, Pseudomonas syringae
MLQIILRRLMKALLWFAAGSALVVLVLRWVPPPGTALMVERKVESWFDGEPIDLQRDWEPWDKISNNLKIAVIAGEDQKFAEHWGFDVDAIQAAILHNEQGGSIRGASTLSQQVSKNLFLWSGRSYLRKGLEAWFTMLIELLWSKERILEVYLNSVEWDEGIFGAQAAAQHHFRTNASALSEQQASYLAAVLPNPRQWSASHPSGYVSRRAGWIRQQMRQLGGDEYLQGLNSSRRW

SEQ ID NO: 70010 - protein, 540 aa, Pseudomonas syringae
MPGSALPGNKRLNAELLGEAVQASGQRRQLGGGDGGLVRTLGRLTGQVTDADQASVHLTRHLSLFFSGGGDHQVALVDLTDGFSDFEQCLACAVGHFQRLVRLHAGLLHRGDSVAGAGLNRTDHLFDFTGRLLRTVRQCTNFVGDHRKTASGFASAGCFNGGVECQQVGLLGDGADHIQYLADVRCHDRQTLYLGGRELHFGHHQVDGRDRFIDLCAPGHGRCARLRCHFGGRCGVAGHFLDRSAHLIDSGSGHLDFVALALNGPRSIFSHRMHFFRRCGQLSGGITNQRQRATQIGLHGGEGGNQPGRFIAAAVWNVFAQIIGGDALRDVQRLIDRAGQAAGIQPGEQQRSDYADSDKNTHHPQGLLVGVVGLISRSFCFAIIDADEFLERVFNLVRRVFHLAIGDGDCLLEISCGNGSQVMILGSLIIADGFVELVECLTPLRGHDQLAECIRKACNQRARLLNVAECFGLAILRLKRVAQAGVVAPDADKFPVQRTQQLHAGQNVFFNEFFCGVEKCCLTQSQYTQCNDHQTENTET

SEQ ID NO: 70011 - protein, 263 aa, Pseudomonas syringae
MGSRSGGTASGPVRWGGRRMTASNKKQQGVALLVVLWVLALLSLLLGGLAGWVQLESRQALWLRQNTQALLAAEAGMNMAVQGLLDPAQRKRWIADGRLVSLRMDDAQLVVSIRSERGKLDLNSAPVADISRLLQACGATRNQASGIAQVLEAQRNGGQSPLRVVEEVRQLPGMNQALYARLLPEITLWSGLDRPDPAFASALLRRALNLPNQSAVGADPGEVLAIDSRAEQPGGVIALLQTTVLLSPSEGSAQPYRVLRWQE

SEQ ID NO: 70012 - protein, 222 aa, Pseudomonas syringae
MKAPYTHEVYNMTIGVVGRKCGMTRIFTEEGVSIPVTVIEIEPNRVTQFKTEETDGYRAVQVTVGERRASRVTAAQAGHFAKANVAAGRTVMEFRLEEGEYQAGDQINAEIFAAGQLVDVTGQSKGKGFQGTIKRWNFRGQDNTHGNSVSHRVPGSIGQCQTPGRVFKGKKMSGHMGAERVTVQSLEVVRVDAERNLLLVKGAVPGATGGNLVVRPAAKARG

SEQ ID NO: 70013 - protein, 124 aa, Pseudomonas syringae
MRLLLTGVLRSVGTAIWSLNPMQNQQIRIRLKAFDHRLIDQSTQEIVETAKRTGAQVRGPIPLPTRKERFTVLVSPHVNKDARDQYEIRTHKRVLDIVQPTEKTVDALMKLDLAAGVEVQISLG

SEQ ID NO: 70014 - protein, 325 aa, Pseudomonas syringae; identical to SEQ ID NO: 69226

SEQ ID NO: 70015 - protein, 97 aa, Pseudomonas syringae
MSEHEHLHDHTHQSHEAVIKRLKRADGHLRSIIAMIEDGRECVDIAQQLHAVEKAVCQAKRTLIQDHIDHCLENTMGALANGDRAPLEAFKQITKYL

SEQ ID NO: 70016 - protein, 191 aa, Pseudomonas syringae
MAFGLPPRSWTPIRPNGGVQMAKYSEQFKLTVVKAYLAGNIGFRKVSSQFSIDSSLLRRWVANYKSHGHTGHRKPGLRYSEAFKRSVLEHKREHGLSLRQTAAHFGIGDPGQIVIWEQQHYSNDLAPYVPKRRKSVAMPKKPYPTAPVIDDDTQKTRDQLMAELEYLRMENAYLKKLEELKEQQRRQKKKP

SEQ ID NO: 70017 - protein, 2044 aa, Pseudomonas syringae
VIYMDVHQLALLARQPSAVLTERRSFWGMPKRGLALILANAMFWQPLLVQAEGIVVSGPNTSLSQAGNGVPIVNIATPNASGLSHNQYQQFNVESQGVILNNSTNQTQSTQLGGIIVGNSNLRGTAATTILNEVVGANASQLKGYTEVAGQAARVIVANPYGISCNGCGFINTPQVTLTTGKPVLDANGQLQRFNVQGGSISIDGVGLNADNVDQFDIITRSAKINAELHARRLNIIAGRNDVDAQTLNATALADDGGAKPELAIDSSALGGMYAGTIRLVGTEAGVGVRLAGNLAASGGDIQIDANGHLNVMQTAASAAVTVKANSAEVNGPVYAGASLAVTTAGDLVTRQNVAARDALTLSAGGQLNNSAVIEAGVNADNSRNGSGDVTLSANGLSNSGSITASRALQATVTQVLNNQGATLNGQASTRIAAAAIDNRQSGRILSQSGSVDINASQVLNSQSGLISSSGSLTITAGSLDNSQQGKLSSSSALSARISGQFLNQLGLVSANGYLLLNAATLDNRSAEISSLGNLTSTVGQFNNSEKGRLLANGSLQLTSDTLNNQNGSLAGQQNVQLTLGQLTNTGNGSVYGKNNLNLTLNGALNNDQGALRSDGTLDVRAASLSNNSGSTTSAGAASVTTSGAVVSRGGQILSDAGLTLISGSLDNSQSGRIAGNGVVLSTGAFDNQRSGNLSSTGTLQLTAAQVNNSDAGRIASAMALTAVVTGLNQTNDGRVYSNTDVSLDLSNGLLTNQGGLINAPGQLVLKNLNVVNNQSGKISSANGFTLAATSLDNTDGSLLSDKALVVRVNQLLTNLRGLVSATGLDLTAGSLNNRNGEISSLGGLTANIGQFDNREKGRLLANGALLLTADGLNNLNGIVSGQQGVQLNLGQLDNTGSGSLYAKSSLGLNVSGTLNNDQGVVRSDGTMDLKAAGLANTNGSVTSAGTGVLNFNGAAVNQGGQIVSDAQLTLTSGSLDNSQRGRIAGNGVLLSTGTFNNQQGGSLSSTGALRLTAGQVDNSAAGRIASAMALTAVVTGLNQTNDGRLYSNSDVSLDLSNGLLTNQGGLINAPGQLVLKNLSVVNNQSGKISSANGFTLAATSLDNTDGSILSDKALVVRVNQLLTNLRGLVSATGLDLTAGSLNNRNGEISSLGNLTANIGQFDNREKGRLLANGALLLTADGLNNLNGVVSGQQAVQLNLGQLNNTGAGSLYAKNALNLTLGGVLANDQGVVRSDGTMDLKAAGLANTNGSVTSAGTGVLNFNGAAVNQGGQIVSDAQLTLTSGSLDNSQRGRIAGNGVLLSTGTFNNQQGGSLSSTGALRLTAGQVDNSAAGRIASAMALTAVVIGLNQTNDGRLYSNTDVSLDMSNGLLNNQSGQISAPGQLLLKNLNVVNNQSGKISSANGFTLAATSLDNTDGSLISDKALIVRINQLLNNVRGQISASGVTLSAATLDNRNAELSSLGNLTANIGQFDNREKGRLLANGALLLTADGLNNLNGIVSGQQGVQLNLGQLTNTTGGSIYAKSSLGLTVIGAVNNDQGVLRSDGSLTLRAASLTNNAGSISSAGVASINVDGDVVNRGGQVLSDATLTLTSASLDNSQSGRIASKGLVLTTGVFDNHQDGRLTSTGELQLNAGLVNNSDAGRIASAMALTAVVTGLNQTRDGRLYSNSDVSLDLSNGVLTNQGGLINAPGQLLLKNLTSVSNRKGEISSANGFTLAATSLDNTEGSLLSDKALVVRINQWLTNLRGKISANGVNLSAATLDNRNAELSSLSTLTATLGGFDNTDKGRLLANGALLLTADTLNNQNGIVSGQQDMQLNLGQLSNTGAGSVYAKNRLGLTLTGALNNDQGVLRSDGALDLKAGSLANTGGSVTSAGVSGLATDAAVVNQGGQILSDATLTLTSASLDNSQSGRIASKGLVLTTGAFDNHQDGRLISTGTLQLNAGQVNNSEAGRIASAMALTAVVTGLDQTSDGRLYGNGDVSLDLSNGVLTNQGGQLSAPGQLLLKNLSSVNNRSGKISSANGFTLAATTLDNTAGSVISDKA

SEQ ID NO: 70018 - protein, 129 aa, Pseudomonas syringae
MAKPAARPRKKVKKTVVDGIAHIHASFNNTIVTITDRQGNALSWATSGGSGFRGSRKSTPFAAQVAAERAGQAALEYGLKNLDVNVKGPGPGRESAVRALNGCGYKIASITDVTPIPHNGCRPPKKRRV

SEQ ID NO: 70019 - protein, 41 aa, Pseudomonas syringae
MALRLAGELMDAAEGKGAAVKKREDVHRMAEANKAFSHYRF

SEQ ID NO: 70020 - protein, 325 aa, Pseudomonas syringae
  MISC_FEATURE (50)..(50): X=any amino acid
MKQMTFADAEYAGKRKHTRRERFLIEMDQVVPWKGLIALIEPHYPKGEGXRPAYPLMAMLRIHLMQNWFGYSDPAMEEALYETTILRQFAGLSLDRIADETTILNFRRLLEKHELAGGILQVINGYLGDRGLMLRQGTVVDATIIHAPSSTKNKDGKRDPEMHQTKKGNQYFFGMKAHIGVDAESGLVHSLVGTAANVADVTQVDQLLHGEETYVSGDAGYTGVDKRAEHQDRQMIWSIAARPSRYKKHGEKSLIARVYRKIEFTKAQLRAKVEHPFRVIKRQFGYTKVRFRGLAKNTAQQATLFALSNLWMVRKRLLAMGEVRL

SEQ ID NO: 70021 - protein, 325 aa, Pseudomonas syringae; identical to SEQ ID NO: 69226

SEQ ID NO: 70022 - protein, 62 aa, Pseudomonas syringae
MLILTRRCAESLIIGDGEITVTVLGVKGNQVRIGVNAPKEVAVHREEIYLRIKKEKDEEPSH

SEQ ID NO: 70023 - protein, 325 aa, Pseudomonas syringae; identical to SEQ ID NO: 69226

SEQ ID NO: 70024 - protein, 275 aa, Pseudomonas syringae
MPDIPVSQPVNPGCDAPVGVFDSGVGGLSVLNEIRQTLPNESLLYLADCGHIPYGEKTPEFIIERCLIIADFFHGQGAKALVVACNTATAAGVAHIRQRYPDWPIVGMEPAVKPAAEATRSGVVGVLATTGTLQSARFAALLDRFASDVSVVTQPCPGLVELIETGDLVSPQIRQLLQRYVEPLLAARCDTIILGCTHYPFLKPLLREMLPASVTLIDTGAAVARQLQRLLSRSGLLASGPARDTLYWSSDIPDNFGKILPFLSQMSGNVRSFRL

SEQ ID NO: 70025 - protein, 210 aa, Pseudomonas syringae
MGGTLAEHLAGEANDITVVDTDGDRLRDLGDRLDIRTVQGKGSYPAVLRQAGADDADMLVAVTSSDEANMIACQVAHTLFHTPTKIARIREAAYLTRAGLFDKNAIPVDVLISPEQVVTNYIKRLIEYPGALQVIDFAEGKAQLVAVKAYYGGALVGQQLRQLRAHMPNVDTRIAAIYRRDRAILPKGDTVIEADDEVFFIAARADIRAV

SEQ ID NO: 70026 - protein, 147 aa, Pseudomonas syringae
MECLMAKKITAYIKLQVKAAQANPSPPVGPALGQHGVNIMEFCKAFNARTQGIEPGLPTPVIITVYSDRSFTFETKSTPASVLLKKAAGLTSGSARPNTVKVGTVTRAQLEDIAKAKNADLTAADMEAAVRTIAGSARSMGLNVEGV

SEQ ID NO: 70027 - protein, 78 aa, Pseudomonas syringae
MSTIEERVKKIVAEQLGVKSEEVVNTASFVEDLGADSLDTVELVMALEEEFETEIPDEEAEKITTVQAAIDYVNSHQA

SEQ ID NO: 70028 - protein, 325 aa, Pseudomonas syringae; identical to SEQ ID NO: 69226

SEQ ID NO: 70029 - protein, 173 aa, Pseudomonas syringae
MVDSYDDSLDGEKSKTQVKRELHALVDLGERLTTLKADVLAKLPLTDALRKALAEAPKHTANIARKRHILFIGKLMRDQDQEAILVLLDQLDASTRQYNERFHNLERWRDRLIAGDDADLEKFVIEYPDADRQQLRSLIRQAQHEVARNKPPATSRKIFKYIRELDELQRGLR

SEQ ID NO: 70030 - protein, 2094 aa, Pseudomonas syringae
YELSSVQQGIWLGQIADSNIPLYNIGMRLEINGDLDIPMFEKAINLVAKHNDALRLALFHEGDIARQRVLPSVDIRLALVDFSDYVDSVERALEYLQQSFSRPFNPLEGILWEVQLVRCSASHHYWLGRCHHLVMDGAGVTLFCHAVEKAYNNLLAGIDELEEAPSYSDFLIKDKAYLSSSRLERDRAFWRERYTQLPPPLLQWSGDHAVGSMCKSGHIRSTIKRDLFNALVAVATEHDLSPVAIFFAAVGAYFSRVGDAEEVIIGMPLHNRTTACQKKTIGMFSSVIPIGVRVDPNRSLLELMGNVAAELRRCYRHEHFPIAELNRALNIGHSRRKQIFDITLSFEKFDADFIFGGSPAQAIRMYSGFDQTPLSIAICDYYSDDDIVVDFNFNLTCFGQDEIERIRDRITLLLKLVAAHDSTPISQLALMGETERRQVLVEFNATHQALQQDLLVHQLFEQQAQQQPQALALVCGDECVTYADLNRRSSQVAHVLLSLGIVADDRVAICVERSVEMVVGLLGILKAGGAYVPLDPGYPLERLRYMLEDSAPVAVLVQPETRELLGALAMPVLDLQSANWAVKAELDRVSPTVTPQHLAYVIYTSGSTGQPKGVMIEHRNLVNLVAWHCDAFDLTHHNRVSSVAGVGFDACAWEIWPALCVGASLSLLPGQALGNDVDALLWWWRRQDLDVSFLPTPVAEWHSPKRSNRPRCQTLLIGGDRLRRFPNPDSQVALINNYGPTETTVVATSGLIDATQSVLHIGRPIANTQVYLLDAHGQPVPIGVSGEIHIGGAGVGRGYLNLPELTAERFVEDPFSAEPAARMYRSGDLGRWLADGNIEYLGRNDDQVKIRGLRIELGEIETQLKQIANIREAVVVAREDTPGEKRLTAYYTQQEAKQAITAQTLRTALQARLPEYMVPAAYVKLSEWPLTPNGKLDRRALPTPGDDAYASGDYEAPAGKVERALADIWQELLGIDRAGRHDHFFELGGHSLLAMRLISLVRQRLNVELRLAELFAHPQLEALACVVEQAQSNALPQIAPVSREMPLPLSFAQQRQWFLAQMEGASVAYHIPAGLRILGALDEPALQRSLNRIVARHEVLRTTFVQQTADQSVVLRIHPEETGCPLRKYDLTTHADGSRELARLVDEEAIRRFDLQQGPLIRGSLVRLSDEEHVLLLTMHHIVSDGWSMGILTRELGALYASGCQDEAAPLPPLLIQYADYAMWQRSWLSGEVLHKQSTYWQTALLDAPALLMLPADRVRPAQQDYTGASVAVVLDATLSNELKTLSRRHGTTLFMTLLAGWATVLSRLSGQDEVVIGSPVANRMSAEVEGLIGFFANTLALRVDVSDDPTVEALLSRVKACTLAAYEHQDLPFEQVVELLKPVRSLSHSPLFQAMLSWQNMPTAELAIDGLELTLLDSVVRTTKYDVSLDLAEVEGRIVGSLEYATALFDRDTAQSYVAYLERVLRAMVENERQVVGAIKLLGETERRQVLVEFNATHQALRQDLLLHQLFEQQAQQQPQALALVCGDERVTYADLNKRSNQVAHVLLSLGIVADDRVAICVERSVEMVVGLLGILKAGGAYVPLDPGYPLERLCYMLEDSAPVAVLVQPETRELLGALGALAMPVLDLQSANWAAEAEHDRVLSTVTPQHLAYVIYTSGSTGQPKGVMIEHCAIVNRLLWAQDHYRLSREDRFLQKTPFGFDVSVWEFFLPLLAGAQLVIARPAGHQDPEYLAELIAGSGVTILHFVPSMLQSFLNQVGPLACSTLRQVFCSGEALPYSLQKHFEQRFAHVQLHNLYGPTEAAVDVTYWHCVPDLHTGIVPIGRPVANTRLYLLDPHMQPVPVGVRGEIYIAGIQLARGYLNRDALTAERFVKDRFSNDPTARMYRSGDLGRWLADGNIEYLGRNDDQVKLRGFRIELGDIEAHLAGCAGVGEAVVVAQEDTPGEKRLIAYYTTREAKEIIAVQTLRAALQASLPEYMVPAAYVKLSGWPLTPNGKLDRRALPAPEGDAYVSRGYEAPRGKVEMALAEIWQELLDVERVGRHDHFFELGGHSLLAVSLMGRMRQAGLSADVRMLFAQPTLSAFAEVLGNGHE

SEQ ID NO: 70031 - protein, 235 aa, Pseudomonas syringae
MSWVPLFHQGECLVEKNVFSLCVHNPEWMIMENSQGGQSLVWQPSQVSSKDREQHLRQTPKTVWLTGLSGSGKSTIAFALERALMDLGKLAYTLDGDNIRQGLCRDLGFSAEHRSENIRRIAEVARLMNDAGLIVISSFISPYEADREAARSIIGNERFMEVFISTPLETCIQRDPKGLYRRAVAGELKDFTGISAPYESPLYPVLQLDTRHVPIEECVARILDILQITKNHFRA

SEQ ID NO: 70032 - protein, 82 aa, Pseudomonas syringae
  MISC_FEATURE (19)..(19): X=any amino acid
MLSAVIFSEHSYPAMPLAXQPEHQRFVHSGPLVLGAAPLKSQTSTADRDRTVSRRSKPSSRTTLNGEQPYPWDRLQPQDVMS

SEQ ID NO: 70033 - protein, 325 aa, Pseudomonas syringae; identical to SEQ ID NO: 69226

SEQ ID NO: 70034 - protein, 322 aa, Pseudomonas syringae
MTFADAEYAGKRKHTRRERFLIEMDQVVPWKGLIALIEPHYPKGEGGRPAYPLMAMLRIHLMQNWFGYSDPAMEEALYETTILRQFAGLSLDRIADETTILNFRRLLEKHELAGGILQVINGYLGDRGLMLRQGTVVDATIIHAPSSTKNKDGKRDPEMHQTKKGNQYFFGMKAHIGVDAESGLVHSLVGTAANVADVTQVDQLLHGEETYVSGDAGYTGVDKRAEHQDRQMIWSIAARPSRYKKHGEKSLIARVYRKIEFTKAQLRAKVEHPFRVIKRQFGYTKVRFRGLAKNTAQQATLFALSNLWMVRKRLLAMGEVRL

SEQ ID NO: 70035 - protein, 222 aa, Pseudomonas syringae
MSSPNMQTGLDFTLVEDLVAGVDEVGRGPLCGAVVTAAVILDPAKPILGLNDSKKLTEAKREKLFVEIQEKALCWFIARAEVEEIDQLNILHATMLAMKRAVEGLSITPKLALIDGNRCPQLSVPSAPVVKGDSKVPAIAAASILAKVSRDREMAALELIYPGYGIAGHKGYPTPVHLEALARLGPTPIHRRSFGPVRTAHEARAAIMLGGSIPLPVGLLQD

SEQ ID NO: 70036 - protein, 527 aa, Pseudomonas syringae
MTQQAAEVAKRRTFAIISHPDAGKTTITEKLLLMGKAISVAGTVKSRKSDRHATSDWMEMEKQRGISITTSVMQFPYRDHMINLLDTPGHEDFSEDTYRTLTAVDSALMVLDGGKGVEPRTIALMDVCRLRDTPIVSFINKLDRDIRDPIELLDEIEAVLKIKAAPITWPIGCYRDFKGVYHLADDYIIVYTAGHGHERTDTKIIQNLDSDEARAHLGDEYDRFVEQLELVQGACHEFNQQEFIDGQLTPVFFGTALGNFGVDHVLDAVVNWAPMPLARVANERTVEPEEEKFAGFVFKIQANMDPKHRDRIAFMRICSGRYEKGMKMRHVRLGKDVRIGDALTFFSSEREQLEEAYAGDIIGLHNHGTIQIGDTFTEGEALGFTGIPHFAPELFRRVRLKDPLKSKQLRQGLQQLAEEGATQVFFPQRSNDIILGAVGVLQFDVVASRLKEEYKVECAYEPITVWSARWIDCADKKKLEEFENKAVENLAVDGGGHLTYLAPTRVNLALMEERWPDVKFSATREHH

SEQ ID NO: 70037 - protein, 149 aa, Pseudomonas syringae
MVPVIALVGRPNVGKSTMFNRLTRTRDAIVGDLSGLTRDRQYGEAKWQGRSYILIDTGGISGDEHGMDEKMAEQSLLAIEEADVVLFLVDARAGYTAADQMIGEHLRKRNKRSYVVANKIDNIDENLARAEFSPMGLGDAIPVAGAHGR

SEQ ID NO: 70038 - protein, 345 aa, Pseudomonas syringae
MIEESAMPALLDASSLNQRFRQLIHGHGVHHTAVITGDCIKIVQTQPVFGTIVAFKTECRHRHVVAQRIMTCPTQLSQLPDRHYRIKCRAQAFINPVATRRCAADDLLAGHPAMTLEIAGHAADGVVRVGPDVDVTVAVKVHCISAEAARHELRQAHCAGIRAFQGQRIDLLLAGQQQELTQFLAEERGARRVIETERRQGVDHPVITGVAAEKGFDADDRNDDLRRYAIFLLGAGQCGLVLTPEIDTAGYARVSDEHRPILFPLLDPFSRARNGIQNGLLALDLTKQAHQLLAGKTVVAGQFTDELGHLGRTFVITGQCLLHRPKDAHQADHRSISSPVTHCLH

SEQ ID NO: 70039 - protein, 325 aa, Pseudomonas syringae; identical to SEQ ID NO: 69226

SEQ ID NO: 70040 - protein, 419 aa, Pseudomonas syringae
MLLDSGRPVAERGRYDLLSAWPRQELTIADGESGTAYLQRLRDSLASLGTATLPAGCELPFAGGLIGYLSYTFGRRLEPLPDQAIDDLQLPEARLGLYAWALISDHQAQTSQLMFHPDLADTERERLVDLFTGSISEAPSHFRLSQPFQASISADDYQDAFERIQAYIQAGDCYQVNFAQRFQAQCTGDPWAAYCALRAACPTPFSGYLGLSGADAVLSLSPERFVKISARQVETRPIKGTRPRSQDAVQDAAFAQELLNSEKDRAENLMIVDLLRNDLGRSCTTGSVKVPELFSLESYPNVHHLVSSVTGELAAGNDALDLIAGSFPGGSITGAPKIRAMQIIDELEPTRRSLYCGSLLYVDVRGEMDSSIAIRSLLVKDGRISCWGGGGIVADSHCEAEYQETFTKVRVLLETLEAL

SEQ ID NO: 70041 - protein, 466 aa, Pseudomonas syringae
MYGEMIEFPGGVYGMALNLEQDSVGAVVLGAYTTLAEGMSAKCTGRILEVPVGKELLGRVVDALGNPVDGKGPLNNTETDAVEKVAPGVIWRKSVDQPVQTGYKAVDAMIPVGRGQRELIIGDRQIGKTALAIDAIINQKNSGIFCVYVAIGQKQSTIANVVRKLEENGALANTIVVAASASESAALQFLAPYSGCTMGEFFRDRGEDALIVYDDLSKQAVAYRQISLLLRRPPGREAYPGDVFYLHSRLLERASRVSEEYVEKFTNGAVTGKTGSLTALPIIETQAGDVSAFVPTNVISITDGQIFLESAMFNSGIRPAVNAGVSVSRVGGAAQTKIIKKLSGGIRTALAQYRELAAFAQFASDLDEATRKQLEHGQRVTELMKQKQYAPMSIADMALSLYAAERGFLTDVEIAKIGSFEQALIAYFNRDHADLMAKINVKGDFNDEIDAGMKAGIEKFKATQTW

SEQ ID NO: 70042 - protein, 543 aa, Pseudomonas syringae
MFDPDRADSFAAADRVRSEYVVKVVGKVRARPAGAVNANMASGAIEVLGYELEVLNESETPPFPLNEYSDVGEETRLRYRFIDLRRPEMAEKLRLRSRITTSIRRYLDENGFLDVETPILTRATPEGARDYLVPSRTHPGSFFALPQSPQLFKQLLMVAGFDRYYQIAKCFRDEDLRADRQPEFTQIDIETSFLNEEDIIGLTEKMVRQLFKEVLNVEFGDFPHMTFEEAMRRYGSDKPDLRNPLELVDVADQLNAVEFKVFSGPANDPKGRVAALRVPGAASMARSQIDDYTKFVSIYGAKGLAYIKVNERAKGPEGLQSPIVKFIPEENLNVILDRVGAVDGDIVFFGADKFKVVSEALGALRIKIGNDLKLHTCEWAPMWVVDFPMFEENDDGSFSALHHPFTAPKCTPEELEANPATALSRAYDMVLNGTELGGGSIRIHRKEMQQAVFRLLGIAEDEQQEKFGFLLDALKYGAPPHGGLAFGLDRLVMLMTGAQSIREVIAFPKTQSAADVMTQAPGVVDAKALRELHIRLREQPKAE

SEQ ID NO: 70043 - protein, 205 aa, Pseudomonas syringae
MNSQPLRVGIGGPVGSGKTALTLALCLALRERYNLAVVTNDIYTREDADFLVRNEALAPERIIGVETGGCPHTAIREDASINLEAVDQLNRRFEGLDMIIVESGGDNLSATFSPELSDLTIYVIDVSAGDKLPRKGGPGICKSDLLVINKIDLAPLVGASLEMMDSDTRKMRGEKPFVFSNQKTGQGLEQIIAFIERQGLLTTAA

SEQ ID NO: 70044 - protein, 139 aa, Pseudomonas syringae
  MISC_FEATURE (51)..(51): X=any amino acid
  MISC_FEATURE (96)..(96): X=any amino acid
  MISC_FEATURE (115)..(115): X=any amino acid
ISLSLGWRQRRHRYAIRAGRNLPDKEFRYLRTVIVTAAVYRGFDQELRLRXPHQLTFRHRAGVTPYTSTFVFAECCVFNKQSQRPGIFDRRGLTQXMLHPHRAHLLPKLRCHFAXFLHPSSLKRLGILYPTTCVGLGYG

SEQ ID NO: 70045 - protein, 341 aa, Pseudomonas syringae
MTTQQPVAVLGGGSFGTAIANLLAENGHQVRQWMRDPEQAEAIRVNRENPRYLKGIKVRPEVEPVTDLTAALEVSELIFVALPSSALRSVLSPHIERLSGKMLVSLTKGIEAQSFKLMSQILEEIVPQARIGVLSGPNLAREIAEHALTATVVASEDEDLCQQVQAALHGRTFRVYASNDRFGVELGGALKNVYAIIAGMAVALDMGENTKSMLITRALAEMTRFAVSQGANPMTFLGLAGVGDLIVTCSSPKSRNYQVGFALGQGLSLEEAVTRLGEVAEGVNTLKVLKVKAQEVQVYMPLVAGLHAILFEGRTLSQVIEALMRAEPKTDVDFISITGFN

SEQ ID NO: 70046 - protein, 325 aa, Pseudomonas syringae; identical to SEQ ID NO: 69226

SEQ ID NO: 70047 - protein, 157 aa, Pseudomonas syringae
MMKLFFLLVWFAICAEQDARRKEILNGLTLGAAALAAGYLAVTGLTWLGSPPLEGALALVLALALTLPGYTLGRLGAADVKLMTALALASNTAYLLCTFIGAGVAMLAWALIGKRVWPLIHQQVTQRYKHMNPGTPDKYPFSPFLLIGLLLTVCVIH

SEQ ID NO: 70048 - protein, 328 aa, Pseudomonas syringae
MAEAYPWQESLWQQMAGRAQHAHAYLLHGPAGIGKRALAERLMASLLCRAPEGLEACGHCKSCLLLVAGSHPDNYVLEPEEADKPIKVDQVRDLVSFVVQTAQMGGRKVVLVEPVEAMNVNAANALLKSLEEPSGNTVLLLVSHQPSRLLPTVKSRCVQQACPLPGEQMSLDWLSGALPDCTAEERFELLTLAAGSPLLAVSLHAQGVREQRALVVEGVKKLLKQQQSATQLAEGWKDIPLLLLFDWFCDWSHLILRYQMTQDEEGLGLGDMRKVVQYLAQKSTRGKVLDIQDWVLAQRQKVMSKANLNRVLLLEALLVQWAGLPGQA

SEQ ID NO: 70049 - protein, 122 aa, Pseudomonas syringae; identical to SEQ ID NO: 66131
  MISC_FEATURE (19)..(19): X=any amino acid

SEQ ID NO: 70050 - protein, 211 aa, Pseudomonas syringae
MMRYPFWRLAVFLAACVAPVWWLYQAWIFALGPDPGKVLVENFGLATLVMLLITLAMTPLQRLTGWPGWIVVRRQLGLWCFAYVVLHMTMYALFILGLDWGQLGVELVKRPYIIVGALAFLGLLALAVTSNRYSQRRLGSRWKKLHRLVYVILGLGLLHMFWIVRADLKEWALYAGIGAILLLLRVPMIARRIPRLGGAAKAGSIKVQNNG

SEQ ID NO: 70051 - protein, 325 aa, Pseudomonas syringae; identical to SEQ ID NO: 69226

SEQ ID NO: 70052 - protein, 325 aa, Pseudomonas syringae
  MISC_FEATURE (78)..(78): X=any amino acid
MKQMTFADAEYAGKRKHTRRERFLIEMDQVVPWKGLIALIEPHYPKGEGGRPAYPLMAMLRIHLMQNWFGYSDPAMEXALYETTILRQFAGLSLDRIADETTILNFRRLLEKHELAGGILQVINGYLGDRGLMLRQGTVVDATIIHAPSSTKNKDGKRDPEMHQTKKGNQYFFGMKAHIGVDAESGLVHSLVGTAANVADVTQVDQLLHGEETYVSGDAGYTGVDKRAEHQDRQMIWSIAARPSRYKKHGEKSLIARVYRKIEFTKAQLRAKVEHPFRVIKRQFGYTKVRFRGLAKNTAQQATLFALSNLWMVRKRLLAMGEVRL

SEQ ID NO: 70053 - protein, 171 aa, Pseudomonas syringae; identical to SEQ ID NO: 70002

SEQ ID NO: 70054 - protein, 152 aa, Pseudomonas syringae
MLDTPVAIRRTAMDLLARREHGRVELTRKLRQRGAPPELIEAALDRLVEEGLLSESRYLESFVSYRARSGYGPARIREELNQRGLQRADVERALKECGVNWQEKLQEVWQRKFAGELPVDARERARQGRFLSYRGYPLDMIGRLLSGRGGDD

SEQ ID NO: 70055 - protein, 937 aa, Pseudomonas syringae
LGPALTAGLRQLGQRHGATLFMTLLAGWSSLLSRFSGQDDVVIGTPVANRPRSELESLIGFFVNTLALRIRPEGSLSVAALLEQVKAVMLAAHAHQDLPFEQVVEALQPPRSLGHSPIFQVMLALNNTPGGGELSLPELSLEPLQTPHTTAQFDLSLSLVEAKGGLLGSLEYASDLFERATIDRMAGHLQVLLEGMVADDQQPVGKLPLLSCAQRRQVLETFNDTAAAYPADKLLHQLFEERVAQHPDALAVVDEAGSLTYGELNVRANRLAHYLIGLGVQPDDRVAICVQRSLEMVVGLLGILKAGGAYVPLDPGYPPERLRYMLEDSAPVGLLLQGETRMLLGELAVPMLDLQEGDWEVEADHNPVVPTIKPQHLAYVMYTSGSTGKPKGVANQHNGVVNRLWWAQSEYQLGADDCVLQKTPFGFDVSVWEIFLPLLAGAQLVMARPGGHQDPHYLMEVIERRSISMLHFVPSMLQAFVNQTPAGRCSTLKRVICSGETLPHTLQLQSQAHFPKSELHNLYGPTEAAIDVTAWHYVAEQEIGIVPIGRPIANTRIYLLDMHGQPVPIGISAEIYIGGVGVARGYLNRPELTAERFLEDPFSAGPAARMYRSGDLGRWLADGNIEYLGRNDDQVKLRGYRIELGEIESQLAACLGVREAVVLAREHSPGDKRLVAYLTAHEGAVLSATQLREQLSQGLAEYMIPSTFVTLESFPLTPNGKLDRRALPAPEDDAYASRGYEAPVGEIEHALAEIWKALLGLERMGRHDHFFELGGHSLLAVQLVSSLRERFEVEVALGDLFLHPTICELAASCLSGLNKSLHPNLTTIRKEGTQYPLFLIHEGSGDIGYAQQLAKQISSDIPVYGFSASGLQIGEEHLTTIEAMASRYIQGIRHIQPDGPYRVAGWSAGGTIAYEIAHQLIGAGATVEFLGLIDTTS

SEQ ID NO: 70056 - protein, 274 aa, Pseudomonas syringae
MAIVKCKPTSPGRRFVVKVVNQELHKGAPHAPLLEKKSKTGGRNNNGRITTRHIGGGHKQHYRLVDFRRNDKDGITATVERIEYDPNRTAHIALLLYADGERRYIIAPKGVSAGDQLIAGALAPIKPGNALQLRNIPVGSTVHGIELKPGKGAQIARSAGASAQLIAREGVYVTLRLRSGEMRKVLSECRATLGEVSNSEHSLRSLGKAGAKRWRGVRPTVRGVAMNPVDHPHGGGEGRTSGGRHPVSPWGFPTKGAKTRGNKRTDKMIVRRRK

SEQ ID NO: 70057 - protein, 325 aa, Pseudomonas syringae; identical to SEQ ID NO: 69226

SEQ ID NO: 70058 - protein, 99 aa, Pseudomonas syringae
MNQERVFKVLLGPHVSEKATVLADKKGQFVFKVATDATKLEIKKAVESLFSVKVERVTTLNVLGKSKRTARGLGKRNDWKKAVISLQPGQDLDFSSSAE

SEQ ID NO: 70059 - protein, 249 aa, Pseudomonas syringae
MPTPPAASSLAAQMGESPAPLYARVKHMIALQIQNGTWPPHHRVPSESELVTQLGFSRMTINRALRELTVEGLLVRMQGVGTFVAEPKSQSALFEVHNIADEIAARGHRHTCKVMVLKEEAAGSERALALDMREGQRVFHSLIVHFENDIPVQIEDRFVNAQVAPDYLKQDFTLQTPYAYLSQVAPLTEGEHVVEAILAEADECKLLQIDAGEPCLLIRRRTWSGRQPVTAARLIHPGSRHRLEGRFTK

SEQ ID NO: 70060 - protein, 325 aa, Pseudomonas syringae; identical to SEQ ID NO: 69226

SEQ ID NO: 70061 - protein, 325 aa, Pseudomonas syringae; identical to SEQ ID NO: 69226

SEQ ID NO: 70062 - protein, 325 aa, Pseudomonas syringae; identical to SEQ ID NO: 69226

SEQ ID NO: 70063 - protein, 93 aa, Pseudomonas syringae
MKPDIHPAYRTVLFHDTAADAYFLIGSTVDTDRTQQHTDGTTYPYVALDVSSASHPMYTGQQRKTTTEGRIAGFNKRFASFGSGSNKETAATQ

SEQ ID NO: 70064 - protein, 397 aa, Pseudomonas syringae
  MISC_FEATURE (93)..(93): X=any amino acid
  MISC_FEATURE (195)..(195): X=any amino acid
MAKEKFDRSLPHCNVGTIGHVDHGKTTLTAALTRVCSEVFGSARVDFDKIDSAPEEKARGITINTAHVEYNSATRHYAHVDCPGHADYVKNMXTGAAQMDGAILVCSAADGPMPQTREHILLSRQVGVPYIVVFLNKADLVDDAELLELVEMEVRDLLSTYDFPGDDTPIIIGSARMALEGKDDNEMGTTAVKKXVETLDSYIPQPERAVDKPFLMPIEDVFSISGRGTVVTGRVERGIVKVQDPLEIVGLRDTTVTTCTGVEMFRKLLDEGRAGENCGVLLRGTKRDDVERGQVLVKPGTVKPHTQFEAEIYVLSKEEGGRHTPFFKGYRPQFYFRTTDVTGSCELPEGVEMVMPGDNVKVSVTLIKPIAMEDGLRFAIREGGRTVGAGVVAKIIA

SEQ ID NO: 70065 - protein, 487 aa, Pseudomonas syringae
MAFNLSKIFAHTDRDPLIRELTLDSRNVRPGDLFLAVPGIKVDGRAHIADALKRGAAAVAYEVEGATVLPITDVPLIPVKGLAAQLSDVAGRFYGDPSRSLNLVGVTGTNGKTSVTQLVAQALDALGQRCGIVGTLGTGFYGALQSGRHTTPDPIAVQAALTDLRKAGARAVAMEVSSHGLDQGRATALAFDVAVLTNLSRDHLDYHGTMEAYAAAKAKLFAWPNLNCRVINLDDDFGRELAGLKQESRLITYSQLDSSAYLYCRDAKFDDDGVRATLVTPQGEHFLRSSLLGRFNLSNVLAAVGALLGLDYALDEILKVLPKLEGPVGRMQRLGGADKPLVVVDYAHTPDALEKVLEALRPHAKGRLLCLFGCGGDRDRGKRPLMAEVVERLADGVWVTDDNPRSEAPTNIFDDIRPGFVTADKVRFIEGRGQAIAELIASATVDDVVVLAGKGHEDYQEIDGKRQPFSDLEEAATALAAWGPEND

SEQ ID NO: 70066 - protein, 220 aa, Pseudomonas syringae; identical to SEQ ID NO: 69406

SEQ ID NO: 70067 - protein, 144 aa, Pseudomonas syringae
MKLNDLSPAPGSRREKHRPGRGIGSGLGKTGGRGHKGQSSRSGGTIAPGFEGGQQPLHRRLPKFGFVSLKAMDRAEVRLSELAKVEGDIVTVQSLKDANVINQNVQRVKIMLSGEVTRAVTIKGIAATKGARAAIEAAGGKFEE

SEQ ID NO: 70068 - protein, 207 aa, Pseudomonas syringae
MKTRKVRRQLRKMDKLERHAEKIRLKYPRAVVGVGTYGIPDIVDFGDNSILRVGSYTSIAEGVKILLGGEHRTDWITTYPFPAMVEQVSDIQDYAPSKGDVVIGSDCWICANAVIVSGVTIGHGAIVGAGAMVVRDVAPYSVVGGNPCKFIRWRFEEDVRDLLLRAAWWDWPMEEVKSVARTLCSSDMDAFLAYIRQRQASVKQPAN

SEQ ID NO: 70069 - protein, 198 aa, Pseudomonas syringae
MKQFIDFIPLLLFFIVYKTEPRAVDILGNSYTFGGIFSATAMLIISSVVVYGILYIKQRKLEKSQWLTLVACLVFGSLTLAFHSETFLKWKAPVVNWLFAVAFAGSHFIGDRPLIQRIMGHALTLPAAIWTRLNIAWIIFFLFCGAANLYVAFTYQEFWVDFKVFGSLGMTLIFLVGQGIYLSRHLHDTTPNTPKSED

SEQ ID NO: 70070 - protein, 741 aa, Pseudomonas syringae
MKAFGKILGLFILGLLLIIVALGFALTHLFDPNDYKDEIRQLARDKANVELTLDGDIGWSLFPWLGLELHEAHVATLTAPDQPFADVQMLGLSVRVLPLLRRQVQMSDIRVEGLNLTLHRDENGHGNWEDIGKPAVATTGTPGEATPAPAPDAAKPDRPSQPIRLDIDSLTVNNARVDYSDARKGRTFTAESIQLSTGPIREASDIPIKLTAFLSTNQPVVRTKTELVGQLRMDRVLKRYQFEDMRLSGEVAGEPLQGKLVTFSAQGQLLVDLTANIAEWNSLKISANQLRALGELRARDLDKTPQISGGLSIASLDLRAFFENIGQPLPAMAEGALSKVEMVTRLSGTPTSLALENLNLKVDDSTFTGRIAVDDFARQALRVQLKADTFDADRYRPAESEESKGAKAARKSEVQSGEAAAVAGDSPLPEQPTKAAWSSAKLLPLERLRTLDVAADLSFGKLTLNKLPIGNAALRTQASGGVIKLDTLSGDLYNGNFEVKGDLDARPDVPVASVQTRVAKVPIERVLESQGQTPPVRGLLTLDSSMTGKGNSEKALIDSLNGTASFALNNGVLVNANLEQQLCRGISILNRKTLSGEPRAKDTPFQQLNGTLVMRNGVASNPDLKMRIPGMTVNGNGDVDLRVLGMNYRVGIIVEGDKSDMPDPACEINPRFVGIEWPVQCRGPLELGAKACRLDKEGVGQIAAKLAGDRISEKLEGKLDEKLGDKVSPELKDALKGLFKR

SEQ ID NO: 70071 - protein, 325 aa, Pseudomonas syringae; identical to SEQ ID NO: 69226

SEQ ID NO: 70072 - protein, 64 aa, Pseudomonas syringae
MPKMKTKSGAAKRFLKTANGIKHKHAFKSHILTKMSTKRKRQLRGSSLLHPSDVAKVERMLRLR

SEQ ID NO: 70073 - protein, 58 aa, Pseudomonas syringae
MATVKVTLIKSMTGRIPNHRLCIKGLGLRRIGHTVEVLDTPENRGMINKAYYMLRVEG

SEQ ID NO: 70074 - protein, 246 aa, Pseudomonas syringae
MAGDNISEEAAIAAARGFPGLKGMDLAKEVSTKDTYEWRHSVWNLQTDSHPEIAASELPYHVVAYDYGVKVNILRMLVERGCRVTVVPAQTPASEVLAYKPDGVFLSNGPGDPEPCDYAIKAIKQVLETEVPVFGICLGHQLLALAAGAKTVKMGHGHHGANHPVQDLDTGVVMITSQNHGFAVDESTLPGNVRAIHKSLFDGTLQGIELTDKSAFSFQGHPEASPGPNDVAPLFDRFIDAMAKRR

SEQ ID NO: 70075 - protein, 48 aa, Pseudomonas syringae
MITLNDGREIQAVDTPKYDEDSGFYEFKQLDGKQTRINKDQVRTVKDL

SEQ ID NO: 70076 - protein, 480 aa, Pseudomonas syringae; identical to SEQ ID NO: 69547

SEQ ID NO: 70077 - protein, 221 aa, Pseudomonas syringae
MSYQHKYVDGTSIHFPLGKVVCIGRNYAEHAKELGNPVPTEPLLFMKPGSAVVALEGGFTIPADRGSVHYEAEIVVLIGKPLSKNPSREEVLDAISGFAPGLDLTLRDVQSRLREKGLPWELAKCFDGAAVIPPFVPAGTFTDLTDIGIRLTINGKVVQDGNSSLMLNPIVPMIQHMAANFSLQAGDLIMTGTPAGVGPFEAGDEIVLELTGQTPFTSVVR

SEQ ID NO: 70078 - protein, 684 aa, Pseudomonas syringae
MSAQDFLVELGTEELPPKTLVSLADAFLAGIEKGLAGAGLTYSAKQVYAAPRRLAVLITALATQQPDRSVNLDGPPRQAAFDADGNPTQAALGFAKKCGVDLSEIDQSGPKLRYSQTILGKPTTSLLPTIVEDSLNDLPIAKRMRWGARKEEFVRPTQWLVMLFGDQVVDCTILAQSAGRHSRGHRFHHPEDVRISSPAGYLSDLRAANVLADFNERRQIISKRVEELASQQEGTAIVPPSLLDEVAGLVEWPVPLVCSFEERFLDVPQEALITTMQDNQKYFCLLDADGKLLPRFITVANIESKDPAQIIAGNEKVVRPRLTDAEFFFKQDKKQKLETFNDRLKNVVFQAQLGSVFDKAERVSKLAAYIAPRIGGDAQRAARAGLLSKCDLSSEMVGEFPEMQGIAGYYYAKADGEAEDVALALNEQYMPRGAGAELPTTLTGAAVAIADKLDTLVGIFGIGMLPTGSKDPYALRRAALGILRILIEKKLDLNLVETVKFAVTQFGAKVKPAGLAEQVLEFIFDRLRARYEDEGVEVAVYLSVRALQPASALDFDQRVQAVQAFRKLPQAAALAAVNKRVSNLLSKAEGSIAQTVEPKYFDNANEFSLYSAIQQADHAVQPMAAERQYSESLARLAMLREPVDAFFEAVMVNAEDANVRANRYALLARLRGLFLGVADISLLG

SEQ ID NO: 70079 - protein, 278 aa, Pseudomonas syringae
MGYGLVMIGTLKGEVVAMDASTGEEKWRARVTSEVLAPPATNGSVVVVQTQDDRVVGFDASTGSQLWIYESTPAVLTLRGTGAPLATNRLAVAGLSTGKVVALDISNGVPIWEQRVAIPKGRSELDRVVDIDGGLLLSGGTLYVATYQGRVAGLELESGRVLWQRDASSYSGVAQGFGSVYATLASGTVEGIDERSSSALWSNESLARRQLGAPEVYSSYVAVGDMEGYLHLLSQVDGRFVGRERIDSDGLRARPLVVGDMIYVYGNSGKLEALSIKQ

SEQ ID NO: 70080 - protein, 165 aa, Pseudomonas syringae
MHVWPPKTAAPSFRVVVPKAVSVWQFDKSAQEVSRDFSREKRLLTPRHFKAVFDSPTGKVPGKNLLLLARNNDLDHPRLGLVIGKKSVKLSVERNRLKRLMRESFRQHQDSLVGWDIVIVARKGLGDVENPELIQHFGKLWKRLARSRPTPEEKSEPAGVDSTDA

SEQ ID NO: 70081 - protein, 65 aa, Pseudomonas syringae
MQLFTVQGMTCGHCVRAVTEAIKNADPAAELQVELASKQVKVQSSLSPEQIIGLIGEEGYQAQLA

SEQ ID NO: 70082 - protein, 88 aa, Pseudomonas syringae
MAEAEKTVRTLTGRVVSDKMDKTITVLIERRVKHPIYGKYVKRSTKLHAHDETNQCHIGDKVTIRETRPVAKTKSWALVDILERAVEV

SEQ ID NO: 70083 - protein, 421 aa, Pseudomonas syringae
MSKSFKQALFSAALVWAVAYPVFGLKLAFSGVTLQVQNASPLTLTIIAVCSVLLFLRVLFAEQISSLRRGSEKPLIPQKTSDFLTQPKTQRWGLAALIVLAFIWPFFGSRGAVDIATLILIYVMLGLGLNIVVGLAGLLDLGYVGFYAVGAYSYALLSHYYGLGFWICLPIAGMMAAVFGFLLGFPVLRLRGDYLAIVTLGFGEIIRIFLRNLTELTGGPNGISNIDKPTFFGLTFERKAAEGMQTFHEYFGLPYNSINKVVFLYLIALLLALAALFVINRLLRMPIGRAWEALREDEIACRALGLNPTVIKLSAFTLGAAFAGFAGSFFAARQGLVTPESFTFIESAIILAIVVLGGMGSQLGVILAAIVMILLPELMREFSDYRMLMFGALMVLMMIWRPQGFLPMQRPEMKLKAELPK

SEQ ID NO: 70084 - protein, 122 aa, Pseudomonas syringae; identical to SEQ ID NO: 66131
  MISC_FEATURE (19)..(19): X=any amino acid

SEQ ID NO: 70085 - protein, 139 aa, Pseudomonas syringae; identical to SEQ ID NO: 70044
  MISC_FEATURE (51)..(51): X=any amino acid
  MISC_FEATURE (96)..(96): X=any amino acid
  MISC_FEATURE (115)..(115): X=any amino acid

SEQ ID NO: 70086 - protein, 92 aa, Pseudomonas syringae
MVADQIRGKKVGEALNLLAFSSKKAAEILKKVLESAVANAEHNEGADVDDLKVSTVFVNEGRSLKRIMPRAKGRADRIVKRSCHITVKVADK

SEQ ID NO: 70087 - protein, 443 aa, Pseudomonas syringae
MLEGLWLKTREDVYCDLYHFWSKIFAVNFGMGVVSGLVMAYQFGTNWSRFSDFAGAVTGPLLTYEVLTAFFLEAGFLGVMLFGWNRVGRNLHFFSTVMVAIGTLISTFWILSSNSWMQTPQGFEIIDGRVIPTDWFAVVFNPSFPYRLTHMAIAAFVATAFFVGSSAAWHLLRGRDTPAVRKMLSMAMWMALLVAPVQAVVGDFHGLNTLKHQPAKIAAIEGHWENIGDEPTPLILFGIPDMKEERTKYKVEIPYLGSLILTHSLDKQVPALKEFKPEDRPNSLIVFWSFRVMVALGMLMIFTGLWSLWLRKRGTLYSSRPFLYLALWMGPSGLVAILAGWFTTEIGRQPWVVYGLMRTADASSGHSVAQMSITLVLFVVVYFVLFGAGLGYMMRLVRKGPKAYVEHVPHGGPGQQRTPARPLSAAVESEDDGDSPDRLGKGN

SEQ ID NO: 70088 - protein, 103 aa, Pseudomonas syringae
LQGEVYYLPRIALPTGCELTVTLSDISLADALAIEIDTCKKTITHQVPLPFELGYAFDRYPVPGHSYALSARIEHEGRLIWINDTVHPIELTNENQSDLKIKV

SEQ ID NO: 70089 - protein, 69 aa, Pseudomonas syringae
MWGSWIGYIEYAKAQLRAKVEHPFQVIKVRFNHRKVRYRGLEKNTAQLFSLFGLANLMLAKRYLQQAAG

SEQ ID NO: 70090 - protein, 207 aa, Pseudomonas syringae
MSTIKKGIDLSHFQGDIDFKKVFEAGIEYAFIKTTEGATVQDNKYTTYRTDARAVGIKTGAYHYFRALSSSPEAQRDNIVSTLTAAGFDASTEFFAIDAELEGNEKATPDEMADNLHKLLTLLDNEKILKSQKSFIYCDNNFWMNHILGEKYAFSEYPLWIANWDVSEPKVPASWEVAGKSWSIWQHSNKGRIAGIEVDVDLNWVRT

SEQ ID NO: 70091 - protein, 78 aa, Pseudomonas syringae
MNEPAEFRRPEAFTVRIDQEEYRVPSNCPHREGWLEHGVVNEQRRSITCPLHFSVFSLETGEQLSGPPCGRLQVQRLK

SEQ ID NO: 70092 - protein, 427 aa, Pseudomonas syringae
MTDTRNGEDNGKLLYCSFCGKSQHEVRKLIAGPSVFICDECVDLCNDIIREEVQEAQAESSAHKLPSPKEISGILDQYVIGQERAKKVLAVAVYNHYKRLNQRDKKNDDVELGKSNILLIGPTGSGKTLLAETLARLLNVPFTIADATTLTEAGYVGEDVENIIQKLLQKCDYDVEKAQMGIVYIDEIDKISRKSDNPSITRDVSGEGVQQALLKLIEGTVASVPPQGGRKHPQQEFLQVDTRNILFICGGAFSGLEKVIQNRSTRGGIGFNAEVRSKEEGKKVGESLREVEPDDLVKFGLIPEFVGRLPVLATLDELDEAALIQILTEPKNALTKQYAKLFEMEGVDLEFRTDALKSVARRALERKTGARGLRSILEGVLLDTMYEIPSQSDVSKVVIDESVIDGTSKPLLIYENSEPPAKAAPDA

SEQ ID NO: 70093 - protein, 206 aa, Pseudomonas syringae
MARYIGPKCKLARREGTDLFLKSGVRAIESKCNIEAAPGIHGQRRGRQSDYGTQLREKQKVRRIYGVLERQFSGYYKEAAGKKGATGENLLQLLECRLDNVVYRMGFGSTRAESRQLVSHKSVSVNGKTVNVPSYQVRAGDVVAIREKAKNQLRIVQALDLCAQRGRVEWVEVDTEKKSGVFKNVPARSDLSADINESLIVELYSK

SEQ ID NO: 70094 - protein, 51 aa, Pseudomonas syringae
MRELIRLVSSAGTGHFYTTDKNKRTTPDKIEIKKFDPVVRKHVIYKEGKIK

SEQ ID NO: 70095 - protein, 177 aa, Pseudomonas syringae
MAAESTSFVLNRWITMPSALWSFTLDFYARPGVEQACLTLQANGGNVCMVLCGVWLGAREVACTAQRLAQIRQLATPWHDDVVRPLRNLRSEWRNAALEDVALGGLRAKVKALELEAEQSLMARLEGLSADWPAGEARDAEEWLIGLVDERAEGCVEGHRDALHVLRIAVGRSDDQL

SEQ ID NO: 70096 - protein, 1265 aa, Pseudomonas syringae
  MISC_FEATURE (88)..(88): X=any amino acid
NVQDIYALAPLQEGVLFHHLASLEGDPYLLNTRFALPSEDHLKAFVRALQGVIARHDILRTAVLWEGLDEPVQIVWREAPLPWKHWNXRRLTETSNQQLQERFDPRHCRLDLTKAPLMKMAYAYDDANSRWVAILLFHHMVLDHMALEVVQHEVQADLLGQAARLPTPVPYRNHVAQARLGVSQAAHEAFFQEMLGQVTEPTLPFGLHDVQGDGRDIRQARQAVPAELAGRIRRQARSLGVSAASLHHLAWAHVLGRTSGREEVVFGTVLLGRMQGGDGADRSLGMFINTLPVCLNVGEQSVSEGVKATHARLTALLGHEHASLPLAQRCSAIAPSLPLFSALLNYRHSAQPEISDQADRPWGEIEVLGWNEWTNYPLTLAVDDLGEGFALTVQSTAGVDPQRVCAYMETALESLVEALEHYPESLLRRLDVLPRAERQLLQEWNATAVDYPQDTCVHQLFETQVEKTPEAIALVFEARKFTYAQLNARANQLAHYLIGLGIGPDDRVAICVERSPEMVVGLLGVLKAGAAYVPLDPTYPEQRLRYMLEDSAPAAVLVQRMTRALPGKLAVPLLDLEGGGWESEADYDPVARAVKPHHLAYVIYTSGSSGRPKGVLIEQKGFRNLMHWYLDELKLASDDAVLLVSSYSFDLTQKNILGPLLVGGTLHLAREAFIPDVLLKQIQRERITHINLSPSAFNALINANDSRQLDSIRRVVLGGEPVQFARLEMLPEPRPEFINSYGPTECSDVVAWHRLVEDIDCYRSSVFPIGRPIANTRIYLLDVHGQPVPIGVSGEIYIGGAGVARGYLNLPELTAERFLDDPFSAEPAVRMYRSGDLGRWLADGNIEYLGRNDDQVKIRGFRVELGEIESQLAVCPGVREAVVLAREYSPGDKRLVAYLTAQEGAVLSAAQLREQLSQGLTEHMIPSAFVTLASFPLTPNGKLDRRALPAPEDDAYASRDYEAPVGEVEPALAEIWQALLGIDRAGRQDHFFELGGHSLLAVQLVSRLRRQFGVDVALRDVFAEPTLQGLARQVTNARLTAQPPLTPVDRNLPLPLSWAQQRLWFLDQLDRAAGAAYHIAAGLRLRGQLNRDALQATLDRIVARHEILRTHFVLHKGQAIQLIAPAAQGFALATHDLRSLGSTAQHEAVERLAREESVAPFDLSSGPLIRGRLVQLSETEHVLLVTQHHIVSDGWSTGVLLQEIGTLYRAFSQGLADPLPALAFQYADYAASQRQWLQGETLQTQVDFWRQHLSGAPALLELPTD

SEQ ID NO: 70097 - protein, 202 aa, Pseudomonas syringae
MPGEIARSYQAGGATCLSVLTDVDFFQGSDAYLQEARAACNLPVIRKDFMIDPYQVVEARALGADCILLIVSALDDVQMAELAAVAKGVGLDVLVEVHDGDELERALKTLDTKLVGVNNRNLHTFEVSLETTLDLLPRIPRDRTVITESGIFNRADVELMEINDVYSFLVGEAFMRAEQPGAELQRLFFPERKPAAGGPAVD

SEQ ID NO: 70098 - protein, 96 aa, Pseudomonas syringae
MLFADFFMPATSILSGDLSTKFRSLSLMCCRKIEFTKTQVRAKVEYPFRAIERQFGYTKVRFRGLVKNTTQQAKLFALSNLWMVRKRLLAIGEVRL

SEQ ID NO: 70099 - protein, 543 aa, Pseudomonas syringae
MTRYIFVTGGVVSSLGKGIASASLAAILEARGLKVTMLKLDPYINVDPGTMSPFQHGEVFVTHDGAETDLDLGHYERFIRTTMTQNNNFTTGRVYEHVLRKERRGDYLGATIQVIPHITDEIKRRIIKGAGDADVALVEIGGTVGDIESQPFLEAIRQLRFEVGARRAMLMHLTLVPYIATAGETKTKPTQHSVKELRSIGLQPDVLVCRSDHPIDISSRRKIAQFTNVEERAVIALEDADTIYKIPGILHSQGLDDFVVERFGLQCGGADLSEWDKVVDAKLNPEHEVTIAMVGKYMELLDAYKSLIEAMSHAGITNRTKVNLRYIDSEDIENQGTGLLEGVDAILVPGGFGLRGVEGKITAVQFARENKVPYLGICLGMQVAVIEFARNVLGWKDANSTEFDRTSAHAVVGLITEWEDATGAVETRTESSDLGGTMRLGAQDCQLEAGSLVHDCYRKDVIVERHRHRYEVNNNLLPQLIEAGLKISGRSGDGALVEVVEAPDHPWFVACQFHPEFTSTPRDGHPLFSGFVKAALAQHQKNS

SEQ ID NO: 70100 - protein, 325 aa, Pseudomonas syringae; identical to SEQ ID NO: 69226

SEQ ID NO: 70101 - protein, 130 aa, Pseudomonas syringae
MSATQNYGTGRRKTATARVFLRPGTGNISINNRSLDNFFGRETARMVVRQPLELTETVEKFDIYVTVIGGGVSGQAGAIRHGITRALMQYDETLRGALRKAGFVTRDAREVERKKVGLRKARKRPQYSKR

SEQ ID NO: 70102 - protein, 461 aa, Pseudomonas syringae
MLASESKPRSSLHEQREQRMKVTVFGTGYVGLTQAACLAKVGHTVCCVDVDEKRIQALREGACPIFEPGLADLLQSGLACQRLQFTTNAAHASRFAELIFIAVGTPPLADGRADLSQVLAVMHTVLEHADGARIIVNKSTSPVGTVDRLLAEIAASPRCDDGFEVISNPEFFKEGSAVGDCLRPDRIIVGGASQSALELLRELYQPFSRNREKFVVMDARSAELTKYAANCLLATKISFINEMANLAEQVDADIEQVRLGIGSDPRIGYDFIYPGCGFGGSCFPKDLQALIGTAAEHGVETSLLSAVEQVNRRQKHRLFEKIRTHYQGELAGKVFAVWGLAFKPNTDDIREASSHALLEALWASGARIQAHDPQAMQAIRLHYGERDDLKLVDCKEHALEGADALVVVTEWQDYRVLNLDRLGTTLRDRVIFDGRNLFDPVQLREAGFVYHGIGRGQRINV

SEQ ID NO: 70103 - protein, 152 aa, Pseudomonas syringae
MSDKPHTLASALFPLGLLIIAMISIQSGASLAKSLFPVVGAQGTTTLRLVFASLILLVILRPWRARLTARSLRTVVIYGIALGSMNFLFYMSLQTVPLGIAVALEFTGPLAVALLSSRKPIDFLWVTMAVIGLLLLIPLRHSDAAIDLAGAG

SEQ ID NO: 70104 - protein, 64 aa, Pseudomonas syringae
MSNRQTGTVKWFNDEKGFGFITPQGGGDDLFVHFKAIESDGFKSLKEGQTVSFVAAKGQKGMQA

SEQ ID NO: 70105 - protein, 363 aa, Pseudomonas syringae
EINPILNSIKDLSERSETIRGYLDYDHKHDRLTEVNRELEDPNVWNNPAYAQELGRERSLLAQIVETLDEMSSGLVDAKDLLLMSAEEEDQAAVDDVAAEVERLRASLEKLEFRRMFSGEMDPNNAYLDIQAGSGGTEAQDWANILLRMYLRWADKRGFDATIMELSAGEVAGIKGATVHIKGEYAFGWLRTEIGVHRLVRKSPFDSGNRRHTSFSAVFVSPEIDDNIEIDINPSDLRIDTYRSSGAGGQHVNTTDSAVRITHVPTNTVVSCQNERSQHANKDTAMKMLRARLYEQEVQKRNAASQALEDTKSDIGWGHQIRSYVLDASRIKDLRTNIERSDCDKVLDGDIDEYLIASLKQGL

SEQ ID NO: 70106 - protein, 292 aa, Pseudomonas syringae
MPDFASLLQQGGSHAWLFFPSAILLGALHGLEPGHSKTMMAAFIVAIRGSVKQAVMLGLAATLSHTAVVWLIAIGGMYLGQGLDAETTEPYFQLASSALIIAIALWMLWRTWRGEQLFKFEEENSAHHGHDETHHHSHNHDHDLEHHHGHSHDHSNPGGLALTAEGYQDAHEKAHADDIRKRFTNREVSNGQILMFGLTGGLIPCPAAITVLLLCLQVKQVTLGAAMVLCFSIGLAITLVTVGAAAAIGARKASNRFPWLNAAARRAPYLSSVLIICVGIYVGIHGWNGLYS

SEQ ID NO: 70107 - protein, 203 aa, Pseudomonas syringae
  MISC_FEATURE (25)..(25): X=any amino acid
MYVVQQCFGFSDEGCEDAVYDSQAXRGFMGIDLGRESAPDATTLLRFRRLLETHQLTRLLFETINQHLASRGLLLKEGTIVDATLIAAPPSVKNREGKRDPEMHQARKGNQWHFGMKAHIGVDATSGLVHSVVGTAANVADVTQVGQLLHGDETYVSGDAGYTRAAKRPEHAERDVIWSIAARASSYKQHGESSVLYRVKRKM

SEQ ID NO: 70108 - protein, 64 aa, Pseudomonas syringae
MLLEAGEKKVNVIKAVRELTGLGLKEAKAVVDGAPGIVLEAVAKDAADKAKATLEEAGAKVELK

SEQ ID NO: 70109 - protein, 447 aa, Pseudomonas syringae
MLEKVLIANRGEIALRILRACKELGIKTVAVHSTADRELMHLGLADETVCIGPAPANLSYLNIPAIISAAEVTGATAIHPGYGFLAENADFAEQVEKSGFAFIGPKADTIRLMGDKVSAKDAMKLANVPTVPGSDGPLPEDEAIALRIGREVGYPVIIKAAGGGGGRGMRVVHREEDLIEAAAQTRAEAAAWFSNPMVYLEKYLTNPRHVEVQVISDGQGQAIHLGDRDCSLQRRHQKVLEEAPAPFIDEQARADVLAACVKACIDIGYRGAGTFEFLYENGRFYFIEMNTRVQVEHPVSEMVTGIDIVKEMLSIAAGNKLSYTQDDVVITGHALECRINAEDPKTFVPSPGLVKHFHAPGGNGVRVDSHLYSGYKVPSNYDSLIGKVITWGATREEAMARMRNALDEIVVDGIKTNIPLHRDLTRDEGFCEGGVNIHYLEHKLANQ

SEQ ID NO: 70110 - protein, 325 aa, Pseudomonas syringae; identical to SEQ ID NO: 69226

SEQ ID NO: 70111 - protein, 1242 aa, Pseudomonas syringae
LSSAQQRIWFMAQMEDANSAYNISLGLKLTGPLDSRALKRALERIVARHDSLRSRFSQEDDIAWVQAAPITSVPDICWQDLRGHGADALRAVAQEEAAQPFDLRHDLPVRGRLLCLAEERHVLLLTVHHIVADGWSLGVLTRELTALYQAFSQGLADPLPPLTLQYGDYAVWQRTWLDAERLSHQADYWQQALTGAPVLLTLPTDRPRPAHQDYSGASVALTLDARLSTDIRTFCQAQSVTPFMLFMGAWAVLLSRLSGQEEVVVGMPVANRRRAEIEGLIGLFVNTLAVRVDTSGEPDAVTLLARIKARVVAAQDHQDLPFEQVVERLRPPRSLAHSPLFQASLTWDGSQGLDLQLGDLQLEPLDEQAAFAKFDLALSVGDSAEHFRCIVEYATALFDRSTVERYLGYLEAILRGMVADGQTVVNHIALLSEAERRQLTEGFNAPDVVYPQGQTLHSQFEAQVQRTPDAIAVSFADQSWSYATLNAQANKIAHRLIGLGIGEDDRVAICTHRGLEMIAGLLGILKAGAAYVPLDPAYPLERIAYTLGDSAPVALLSQRSVQAALPVSQVPVISLDEAGLQDESERNPQVSVKPTSLAYVIYTSGSTGLPKGVMIEHRNVARLFSATEDWFGFNEQDVWSLFHSFAFDFSVWEIWGALLHGGRLLIVPQLVSRSPEDFYALLCSAGVTVLNQTPSAFRQLIAAQGENPQAHSLRQVIFGGEALETAMLKPWYARNVNAATQLVNMYGITETTVHVTYYPVQPEDAQRVGASPIGKRIADLQLYVLDTCGEPVPLGVVGELYVGGAGVARGYLNREALTAERFLDNPFSHAADARIYRTGDLARWMADGSLEYLGRNDEQVKIRGFRIELGEIASRLNDHPQVLDAVVVAREDVPGDKRLVGYYTCAEDQTGLDIEQLRAWLSGLLPDYMVPAAFVRLAGLPITANGKLDRKSLPAPDRDSLASRAYEAPHGAVEIALASLWGELLQVEQVGRQDNFFELGGHSLLAVTLIARMRRLDMRADIRVLFVQPTLAALAEAVGRDSEIQVPANLIDAHCQHITPELLPLVALDQAAIDRIVAQVPGGAANVQDIYPLGPLQTGILYHHLTAGDRDPYLLQPQFAFADTSRLDAFCQALQRVIERNDILRTALCWEGLQAPVQVVWRQAPLRIQETPLPELFNAPRMELTQAPLLHLVYAHDPDNQRITAVLRYHHVIMDHIALDVLSHELQAILLGNEAGLAAPVP

SEQ ID NO: 70112 - protein, 385 aa, Pseudomonas syringae
MIELQNLSKTFQSNGKEVKAVDSVSLTVNEGEICVFLGPSGCGKSTTLKMINRLIMPTSGKVLINGEDTTDLDEVTLRRNIGYVIQQIGLFPNMTIEENIVVVPKLLGWDKQRCHDRARELMSMIKLEPKQYLHRYPRELSGGQQQRIGVIRALAADAPLLLMDEPFGAVDPINREMIQNEFFEMQRALNKTVIMVSHDIDEAIKLGDKIAIFRGGKLLQIDHPDTLLAHPADDFVSSFVGQDSTLKRLLLVKAEDAADNAPSVSPETPVADALEVMDENDRRYIVVTDSENKAMGYVRRRDLHRQQGTCAQFLREFNATAAYDEHLRILLSRMYEFNRAWLPVLDAENVFLGEVTQESIAAYLSSGRSRGMKTSIVSPAEQVAS

SEQ ID NO: 70113 - protein, 464 aa, Pseudomonas syringae
MGDFHCVPRAAHPVSAVRERGLWKRAVVWLVLLAPFFFASYGFATWYTAQRTDVGSLVFDWEAHMPFWAWTILPYWSIDLLYGFSLLACLTRRQLDTHALRLFSAQLIAVTCFLLWPLRFTFERPELDGIFGWLFAVLAGFDKPFNQAPSLHIALLVVLWVCYDRYARHFHVAWRWLLHSWFALIGLSVLTTWQHHFVDLPTGALAGWFCVWLWPDEGRSPLLAARLTRHPKRLRLALYYSMGAALLAIPAFALAGGGLWLAWPALSLLLVALNYLLFDAAGFQKRADGRLSAAAYWLLGPYVLGAWINSRLWTKKRPDPDQVVDNVWLGRLPSEQQMQPFQAIVDMCAELPINPGTRSYQQVAAIDLIPPDIDNCLRAAKAIENLRQHGPLLVCCALGYSRSATAVAAWLLYSGRATSVDNAAALIRAARPGVVLREGHLQVLADVLRNRDVIHTSTLPIGAR

SEQ ID NO: 70114 - protein, 273 aa, Pseudomonas syringae
PAIGVSRMLRMYVVQQCFGFSDEGCEDAVYDSQAIRGFMGIDLGRESAPDATTLLRFRRLLETHQLTRLLFETINQHLASRGLLLKEGTIVDATLIAAPPSVKNREGKRDPEMHQARKGNQWHFGMKAHIGVDATSGLVHSVVGTAANVADVTQVGQLLHGDETYVSGDAGYTGAAKRPEHAERDVIWSIAARPSSYKQHGEGSVLYRVKRKIEYAKAQLRAKVEHPFQVIKVRFNHRKVRYRGLEKNTAQLFSLFGLANLMLAKRYLQQAAG

SEQ ID NO: 70115 - protein, 247 aa, Pseudomonas syringae
MSLQGKVALVTGASRGIGQAIALELGRNGAVVVGTATSESGAERISATFKESGIEGFGLMLDVCDAESVSSVLSTIQERVGAPLILVNNAGITRDNLVMRMKDDEWYDVVNTNLNSLFRLSKGVLRGMTKARWGRIISIGSVVGAMGNAGQVNYASAKAGLEGFSRALAREVGSRAVTVNSVAPGFIDTDMTRELPEAQRESLITQIPLGRLGQAEEIAHVVAFLASEGAGYVTGATIPVNGGMYMS

SEQ ID NO: 70116 - protein, 267 aa, Pseudomonas syringae
MPLVGHWDTWRPNPTYQGTIMSQVNMRDMLKAGVHFGHQTRYWNPKMGKYIFGARNKIHIINLEKTLPMFNEALTFVERLASGKNKILFVGTKRSAGKIVAEEAARCGSPYVDHRWLGGMLTNFKTIRQSIKRLRELEVQAEDGTFAKLTKKEALMRTRDLEKLDRSLGGIKDMGGLPDALFVIDVDHERIAITEANKLGIPVIGVVDTNSSPEGVDYIIPGNDDAIRAIQLYMGSMADAVIRGRNNVAGGTDVFVEEAPAAAAVEG

SEQ ID NO: 70117 - protein, 235 aa, Pseudomonas syringae; identical to SEQ ID NO: 70031

SEQ ID NO: 70118 - protein, 429 aa, Pseudomonas syringae
MADKKAQLIIEGAAPVELPILTGTVGPDVIDVRGLTATGRFTFDPGFMSTASCESKITYIDGDNGILLHRGYPIEQLAEQSDYLETCYLLLNGELPTAEQKAQFVAVVKNHTMVHEQLKTFFNGFRRDAHPMAVMCGVVGALSAFYHDSLDINNPQHREISAVRLVAKMPTLAAMVYKYSMGQPMMYPRNDLSYAENFLHMMFNTPCEIKPISPVLAKAMDKIFILHADHEQNASTSTVRMAGSSGANPFACIAAGIAALWGPAHGGANEAVLTMLDEIGDVSNIDTFIAKAKDKNDPFKLMGFGHRVYKNRDPRATVMKQTCDEVLKELGIKNDPQLELAMRLEEIALTDPYFIERSLYPNVDFYSGIILKAIGIPTSMFTVIFALARTVGWISHWKEMLSSPYKIGRPRQLYTGNVQRDIIALKDRK

SEQ ID NO: 70119 - protein, 189 aa, Pseudomonas syringae
MRYALDHKAQTHQRIVKEASMRFRRDGIGATGLQPLMKALGLTHGGFYAHFKSKDDLVEQALSHALDNVKGITSEVFARQDSLSEFIDLYLSTTSRDAQDGGCPLPTMCLELGQRDQPSETTDKIVLHLLELFENSLAGTGLEPRSVPILSALVGGLVLARSAADDKLSERILNTTRDYLKQEIKKSTN

SEQ ID NO: 70120 - protein, 130 aa, Pseudomonas syringae
MSMQDPLADMLTRIRNAQMAEKPVVSMPSSTLKVAVAKVLKDEGYIAGYQISSEVKSSLSIELKYFEGRPVIEEVKRVSRPGLRQYKSSDDLPKVRGGLGVSIVSTSKGVMTDRAARAAGVGGEVLCTVF

SEQ ID NO: 70121 - protein, 95 aa, Pseudomonas syringae
MALERSDVEKIAHLARLGLNDADIPRTTEALNSILGLVDQMQAVDTTGIEPLAHPLEATQRLREDAVTERNRRDTYQAIAPAVQDGLYLVPKVIE

SEQ ID NO: 70122 - protein, 159 aa, Pseudomonas syringae
AASCNTPIPCVQSRTLTFLGSTCLTQCKRAVPAHAAMPANTLSYKELGEQDFRRNTMYAVIVTGGKQYKVAPGEYLKIEKLEIATGESVTFDRVLLVGNGDDVNIGAPVVAGATVVAEVISQGRHDKVRIIKFRRRKHHMKRMGHRQWYTEIKITGIQA

SEQ ID NO: 70123 - protein, 122 aa, Pseudomonas syringae
MNPKAEASDSRFDLLKWLLVVILVVVGVVGNQYYSAEPILYRVLALLVIAAAAAFVALQTGKGKAFFVLAKEARAEIRKVVWPTRQETTQTTLIVVAVVLVMALLLWGLDSLLGWLVSSIVG

SEQ ID NO: 70124 - protein, 325 aa, Pseudomonas syringae; identical to SEQ ID NO: 69226

SEQ ID NO: 70125 - protein, 325 aa, Pseudomonas syringae; identical to SEQ ID NO: 69226

SEQ ID NO: 70126 - protein, 246 aa, Pseudomonas syringae
MRLHQIFAAAAVMLASTFSMFAVADAAPDQAIRKTLDSLQLELPVESISPSPLNGLYEVKLKGGRVLYASADGQFVVQGYLFQVQNGKPVNLTEKTERLAISKTINAIPLSDMVVYPAVGETKSHITVFTDTTCPYCHKLHEEVGQLNKMGVEVRYMAFPRQGLGSPGDEQLQAVWCSKDRKSAMDRMVDGKDIKAAKCDNPVSKQYEIGQSIGVNGTPAIVLADGQVIPGYQPAAQVAKLAMGAK

SEQ ID NO: 70127 - protein, 181 aa, Pseudomonas syringae
MSSLSVYHVSSPDIPNKVLTHLEDIASTLAEHGVAFDRWEAATPITPGASQEEVINAYRTQIDTLMTRHGYVTVDVISLNSDHPQKAELRARFLEEHRHGEDEVRFFVAGRGLFTLHIDDYVYAVLCEKNDLISVPAGTRHWFDMGENPHFVAIRLFNNPDGWVANFTGEDIAGRFPRLED

SEQ ID NO: 70128 - protein, 135 aa, Pseudomonas syringae
MAQKMEEDDKVRLDKWLWAARFFKTRALAKAAIESGKVHCRGERCKPGKEPRLGDEFQIRMGFDERTVVVEALSIVRRGAPQAQTLYRETPESIAKRENAALQRKAGNLGVTTDGKPTKKQRRQLFDFRGARDSE

SEQ ID NO: 70129 - protein, 72 aa, Pseudomonas syringae
MSKEDSFEMEGTVADTLPNTMFRVELENGHVVTAHISGKMRKNYIRILTGDKVRVELTPYDLSKGRITYRAR

SEQ ID NO: 70130 - protein, 153 aa, Pseudomonas syringae
MIGVDNSMPWHLPGDFKYFKATTLGKPIIMGRKTWDSLGRPLPGRLNLVVSRQTDLQLEGAEVFPSLDAAVVRAEQWAQEQGVDEVMLIGGAQLYAQGLAQADRLYLTRVALSPEGDAWFPEFDTAQWALVSNAENAAVDEKPAYSFEVWERV

SEQ ID NO: 70131 - protein, 61 aa, Pseudomonas syringae
VKWFNTSKGFGFISRDSGDDIFVHFRAIRGEGHRVLVEGQRVEFSVMNRDKGLQAEDVIAA

SEQ ID NO: 70132 - protein, 325 aa, Pseudomonas syringae; identical to SEQ ID NO: 69226

SEQ ID NO: 70133 - protein, 459 aa, Pseudomonas syringae
  MISC_FEATURE (192)..(192): X=any amino acid
MDASEKILNARAWLNSEPKVIGLRDEGLWSDLHDRIIEGASYFRTAEHSAQQPKAKLKSYETQFRSGHINLLSCSTTMEMGIDISGITAVAMNNVPPQTANYLQRAGRAGRRGEGRAVALTICRKTPHDQHVFAKPRWPFDTNMIIPAVSLRSPDLVARHVNSYLLSYWLKTVLGREELKSMTIGPFCIEEXGDSLAGRFEAWCTNTAGILPAVIKGIEKLVHRSPLVDMNSETLTRHTAAAMRDVAQSWREDYNNASQELGYFKGCSEKKSAALRALNAQLERITGEYLLSELATRRFLPGYGFPTDIVSFNNIIRQPPDKAREYSREDNRGRYLDLATRDRVTGLREYAPGAEVVMDGWVYESRGISLNWRLPASEEILREAQLFKYAWRCSHCGASGSTFAQQPGDCGQCGSPLDEQEDVLRYLVPSGFAVDFYGKDPHTDISKPTYIPVQRPWLR

SEQ ID NO: 70134 - protein, 319 aa, Pseudomonas syringae
MQSAKPLFDYPKYWAECFGPAPFLPMSREEMDLLGWDSCDIIIVTGDAYVDHPSFGMAIIGRLLESQGFRVGIIAQPNWQSKDDFMKLGEPNLFFGVAAGNMDSMINRYTADKKIRSDDAYTPGGMAGKRPDRASLVYSQRCKEAYKHVPIVLGGIEASLRRIAHYDYWQDKVRNSILIDACADILLYGNAERAIVEVAQRLSYGHKIEDITDVRGTAFIRRDTPQGWYEVDSTRIDRPGKVDKIINPYVNTQDTQACAIEQEKGNVEDPNEAKVVQILASPRMTRDKTVIRLPSVEKVRNDAVLYAHANRVLHLETNP

SEQ ID NO: 70135 - protein, 317 aa, Pseudomonas syringae
MPMNPNFLDFEQPIADLQAKIEELRLVGNDNSLNIGDEISRLQDKSKTLTESIFGNLTSWQIARMARHPRRPYTLDYIENIFTEFDELHGDRHFSDDAAIVGGIARLDNQPVMIIGHQKGREVREKVRRNFGMPRPEGYRKACRLMEMAERFKMPILTFIDTPGAYPGIDAEERNQSEAIAWNLRVMARLKTPIIATVIGEGGSGGALAIGVCDQLNMLQYSTYAVISPEGCASILWKTAEKAPDAAEAMGITADRLKGLGIVDKVIAEPLGGAHRDPVAAAALIREELSSQLAMLKAFDNDALLARRYDRLMSYGL

SEQ ID NO: 70136 - protein, 303 aa, Pseudomonas syringae
MAGRWPQAIGFSGSGIRTKSNRFLTVVHRPAGVVSDLHGERLEASKCRLNAMSIFFDTNNIAARERAEFWQEVVCNTFVPLSCAFSDRNNFQGRLRSHSIATLSLVDVQACRQTVVRDAARISRSDDEFVLVSLALEGRAQVSQEGREAVLEVGDFAIYDTRRPYRLHFDSAFRQTVVQIPRKSLQQRLCNLEYLTALSMSRDNPLNGLVFDFFTGLAALENRVGETQQVRITEQGLDLLAMALSERVKGQTQRSALLLGIKDHIQSNLTDTTLNLPCVSARFGISTRYLNSLFHDEETSFGR

SEQ ID NO: 70137 - protein, 325 aa, Pseudomonas syringae; identical to SEQ ID NO: 69226

SEQ ID NO: 70138 - protein, 134 aa, Pseudomonas syringae
YNQDSFGRTAFDTHPDGSRHTLGWNGLGQLLEERLPDGGQRKYRYDALGRQITRQEETGAITHYQWDAANRLAQITLPGGATRAFSYNAYGKVTAERDELGRITRYEYADNLHLVSRRINPDGSQLRYRYDVSD

SEQ ID NO: 70139 - protein, 163 aa, Pseudomonas syringae
MRLTTKGRYAVTAMLDLALHAQNGPVSLADISERQGISLSYLEQLFAKLRRGNLVSSVRGPGGGYQLSRDMKGIQVAQVVDAVNESVDATRCQGLGDCHAGDTCLTHHLWCDLSQQIHEFLSGISLADLVTRREVQEVAQRQDMRRGHNHTSQLGKIETSAVE

SEQ ID NO: 70140 - protein, 1017 aa, Pseudomonas syringae
  MISC_FEATURE (290)..(290): X=any amino acid
  MISC_FEATURE (298)..(298): X=any amino acid
  MISC_FEATURE (311)..(311): X=any amino acid
  MISC_FEATURE (322)..(322): X=any amino acid
  MISC_FEATURE (881)..(881): X=any amino acid
  MISC_FEATURE (883)..(883): X=any amino acid
  MISC_FEATURE (887)..(887): X=any amino acid
  MISC_FEATURE (894)..(894): X=any amino acid
  MISC_FEATURE (900)..(900): X=any amino acid
LANGALLLTADNLNNQGAGAVSGQQEVQLTLGQLTNIGSGSVYAKNTLGLTVSGALNNNQGVVRSDGTLDVSGASLANTAGSITSTGVSVLKVDGAVVNRGGQILSDSTLSLSSASVDNSQNGRIAGKGVTLATGAFDNQQGGRLTSTGTLKIDAGQVNNSDAGRIASAMALTAVVTGLDQSNDGRLYGNGDVSLDLSKGVLNNQGGLITAPGQLLLKNLTSVNNQNGEISSAKGFTLAATSLDNTAGSVLSDSALIVRVDQLLTNLRGLVSGNGIDLTANELNNQAAAXAAMLICCXPSPAHFPTRRASXPAPVTPPSTRXAWPMPTARVMADRFLKLVITDAIDNQAGTLGAGKGADIRAVSLDNRQAGALVTDGQLDLTLTDALDNRASGSLQAKGLMNLTSQTLDNRGGRITAQNMLMVRSASVDNRGGAIRAEKGLQLFVDALDNSQSGLSTAQKGLINSNAGLELVGTRLDNQNGLLNAAGLMQLQADSVLNGSGRIASQADLVAHIGGLTQQGGELVAQGNLTLTGNILDNQSGGLVGSTKALKIDVADIDNKAGELSSQIGVEIIAQTLDTSNGGKVLAGTALGLTVARLINLNKGLLFGNTLRLEGTRLDNAGGTLASQQDLNIGLSGALDNTGGLLSSESAMTVSAASLQNAAGSLSSADALSVTTTGALSNQAGSITTDAALTLTSASLDNSKAGKLSGKGATQVTTGTFDNSQNGRLTSSDTLRLTAGKVINQSAGRIASALALTASVTSLDQQAGELFSNTSLSLDLNNGQLNNQGGLINASGVLLLKNLNGIANQNGEISSAQAFSLNASSFDNSGGKLLSSQALTLVVNKALSNLKGNISGASLNINSDSLDNTQGMISSRQAWTXRXTPPXPTPKARXLATAMXILSAATADNRQGQMASKQNLDAQIGNLQQQNGQMLAQGTLTLRGDTLDNRQNGFIGATQALAINVTNIDNRGGELSSQDTMTLTGQQLNNSDKGQVLAQKALTLNIAQTTNRANGLL

SEQ ID NO: 70141 - protein, 128 aa, Pseudomonas syringae
MDKNMKILIVDDFSTMRRIIKNLLRDLGFTNTSEADDGLTALPMLQSGAFDFLVTDWNMPGMTGIDLLRQVRADDRLKSLPVLMVTAEAKREQIIEAAQAGVNGYVVKPFTAQALKEKIEKIFERVNS

SEQ ID NO: 70142 - protein, 119 aa, Pseudomonas syringae
MVYIWSCDFQFRPNRAESSGELGTIFSVPLRRRYQLMRVETISYLKRNAADLPLDEPLIVTQNGVPAYVVESYADRKRRDESIALVKLLAISSREYSQGKHCSADELKARLSRRFAHKE

SEQ ID NO: 70143 - protein, 200 aa, Pseudomonas syringae
MQLNVNDAQAIEVSELTFGGEFNETLVHQAVVAYMAGGRQGSKQQKTRSDVRGGGKRPWRQKGTGRARAGTIRSPIWRGGGTTFAARPQDHTQKLNKKMYRAALRSILAELVRTDRLVVVQDFAVEAPKTKDLLNKLTGMGLTDVLIVSDAVDQNLYLAARNLPHVDVRDVQGSDPVSLIAYDKVLITVSAVKKFEELLG

SEQ ID NO: 70144 - protein, 304 aa, Pseudomonas syringae
MQLSRTNLADIVYFLAIARHQSFRKAGLEVGISASALSHAMKGLETRLGVRLLNRTTRSVTLTAADEELQGLISAPVNDIGQALETLNRLRDEPAGRIRLNVLSDGAKLLLGPVLPVFIDRYPDIEVDLTVTNKMVDIIGDGHDAGIRFGGTVPEDMIAQRLSPDVAWAVVGAPAYLERFGTPKHPEDLHQHRCLRVRLGNAHIYHWQFSKDGQRMEIDAPGAITIDEARVGVAMAMRGAGLMYVLASVVERQITEGSLQRVLEDWTHYDPGFHIYYSSFRQVPVGLRLLIDLIRELEPLGPLP

SEQ ID NO: 70145 - protein, 238 aa, Pseudomonas syringae
MAQSETVERILDAAEQLFAEKGFAETSLRLITSKASVNLAAVNYHFGSKKALIQAVFSRFLGPFCISLERELERRQGKPEHKPSLEELLEILVEQALVVQPRSGNDLSIFMRLLGLAFSQSQGHLRRYLEDMYGKVFRRYMTLVNEAAPRIPPIELFWRVHFMLGAAAFSMSGIKALRAIAETDFGVNTSIEQVMRLMVPFLAAGMRADTGVSDPAMIAAQLRPRTKSGTSTPAVAKA

SEQ ID NO: 70146 - protein, 158 aa, Pseudomonas syringae
MTLKTIEGTFIAPQGRYALVVGRFNSFVVESLVSGAVDALVRHGVSESDITIIRAPGAFEIPLVVQKVAQRSEFAAIVALGAVIRGGTPHFEYVAGECVKGLSQVSMEFGVPVAFGVLTVDSIEQAIERSGTKAGNKGAEAALSAIEMVSLLSQLEAK

SEQ ID NO: 70147 - protein, 325 aa, Pseudomonas syringae; identical to SEQ ID NO: 69226

SEQ ID NO: 70148 - protein, 187 aa, Pseudomonas syringae
MPIINSQVKPFKATAFKNGSFVDVSDADFKGKWSVVFFYPADFTFVCPTELEDLADNYDTFQKLGVEIYSVSTDTHFAHAAWHNTSPAIGKIQYTMIGDPTLAISRNFDVLIEEAGLADRGTFVINPEGQIKIVELNDGGVGRDASELLRKIKAAQYVAAHPGEVCPAKWKEGEATLAPSLDLVGKI

SEQ ID NO: 70149 - protein, 863 aa, Pseudomonas syringae
MVGVVGGSLTIHRVYYSLDLGAPMISLPIDLVLPDLREALVNRNEVILEAPPGAGKTTRVPLALLNESWLGDQKILMLEPRRLAARAAAERLASELGEKVGEIVGYRIRLESKVGPRTKIEVVTEGILARRLQDDPALDGVGVVIFDEYHLRNLHSDLALALCLSGRDLLRDDPPLKLLLMSATLEGARLSKVLNNAPVITSEGRMYPVSTIWGSPYQPGERIDARVTDTCLAAINEQQGSILVFLPGQAEIRRVADFLEEQLSNRSDVTVCPLYGDLDLNAQRAAINPAPTGSRKIVLATNIAETSLTIEGVRVVVDSGLERVPKFDPRSGMTRLDTQRISKASATQRMGRAGRLEPGVCYRLWSETQHEQIAGYSTPEILQADLSALALQLARWGMKPEEMTWLDQPPSAPFAQARDLLKRLGALDAAGQLTSHGSAMSELPAHPRIAHLLIKGNAMGLDDLACNIAALLGEKDILRGAGADLHTRLSALSGEHYSRRGGGSFQRVKQSARQYRSLLRGRAASPVSEPDHLRWVGCLLAFAYPDRIGLQRRANASDYRLSNGRAAVFSEPDALTKHEWLVVADLGSRQGQREERVYLASDLDPALFDGELADLVGSVDEVDWDEREGVLKAERQLKVGQLVLSATPLPSLDEQARSLALVNLVRRKGIELLPWNPELRQWQARVDMLRQLDIQNGQAESKWPDLSDTSLLETLEKWLAPYLGKVTRLSHFSHLDLSSIVINLLSWPLPQELETQAPLTIQVPSGSNIRIDYSQHPPILAVRLQELFGLSDTPRIAQGKQLLTLHLLSPARRPVQVTQDLANFWRSTYVEVKKDLKGRYPRHYWPEDPLVAEATANAKPRKS

SEQ ID NO: 70150 - protein, 139 aa, Pseudomonas syringae; identical to SEQ ID NO: 70044
  MISC_FEATURE (51)..(51): X=any amino acid
  MISC_FEATURE (96)..(96): X=any amino acid
  MISC_FEATURE (115)..(115): X=any amino acid

SEQ ID NO: 70151 - protein, 1389 aa, Pseudomonas syringae
MKIETAPRTSEYPVWLAVPPDDREKARLSAGRLSDGRAAIAWNKEEKLWFARPGCDLDRITAWLPDPSRRAGGGDAESEFLDVLTQAGLVVKGMPVMDGSRQRVATVDDKHGKKSGVYCGFLDRRPAGWFINYHRADSPKDVTNWAATGGESDPITRLHIRAGAKQAQEDAARDRAVTYAKQTLAAKRLYDRLPAADPAHPYLVRKGIPPTPDIRQTRNGALVVPFFNASGTFKTLQYIPPEGEKFLFKDAPKQEHFLVVGGSLDPVNPILYAEGYATARSLNLATGLPVVMTIDAGNMVAVAKVLHQQYPDSRHLFMADFDHAKDVNKGLIMANEAAIAVGGQVLYPTFNDAEIARGFTDFNDLHQSRGLDAVREQTAPLIRPYEEVTTMPTDSNTQSPDNTAQKVATPAQETLELDAAPAASIQVPDQSAPPQTRSAQPVASEASSVESQSPETAQVTEAPVGIDDAQVSTQPPLALSPAEQLASVEADPDASAIVDEQPKATMSVATDRNTPSDAPELTQPTSAEVVPEQSNETAQPDARSAQQQAPGEADPGSSANVDDQKRAAPPAATDQEMSSDAPVLNQPPLAAAEPEQSNETAQQQAPGEADPGSSANLDDQKRAAPPAATDQEMSSDAPVLNQPPLAAAEPEQSNETAQQQAPGEADPGSSANVDDQKRAAPPAATDQEMSSDAPVLNRPPLAAAEPEQSNETAQPAAPPAKQQASVEADPDTSPVAEDQPIIAPAGPAQNEDNESLSDVEVPVSGALPRRFTTARKTGPAVVPDAIFVGAPIGADEPQLQASNIDKDALLARISREVQGDNSVLYKLDAEPAFVDRGSRLEMVQGAGQEDEKVIAALLTAAQFYRGRIELTGSDEFKAKAIELIAQHQINVEMKNPAQQMLLDDARNALKQPPVTLDAIHGDTPPPYGGPQPSQAKPSAPQPQQAAPAPVHSSAPAPASTAYQPLEVEGLQRRPAQSAPQAQAPQAGVAPQPQQAAPVHSSAPASASTAYQPLDVEGLQRPLVQPAPPAQPDAPVINPPSAAPASDQPATSANQQVSPAIHQPFQAAKDGVTGKILKFGQKPFRFEPDKPESTFITLRTVNGVQTFWGKELAGLLRQTRVQPGKMVTLQWLGNHPVTVKVPRKNEQGVTVGYDDKDVHRNQWALKVEGNPAVRSGQDEGVKLGAYDAGRFAVVQQAWLAQLGVEAPLPTPPTDGLYWLTPNGEGSAKTGDELSAPRPPIDPNNTAGQPVISSWSRDGHLDMYLVRGDGPYLQGVVRQGDQMQHVLVSLPGRDDGPSMVFNAITPEGLLPIGTGNGINRSGGEPVSREHIAFKLEGDSAVRIGKLDAPGEVPPTLHNLLGFDQRWKEENTLPKSAPTAAPSVQPSDPRPV

SEQ ID NO: 70152 - protein, 112 aa, Pseudomonas syringae
  MISC_FEATURE (10)..(10): X=any amino acid
  MISC_FEATURE (45)..(45): X=any amino acid
TAVLRTKHEXAGGISGNAGYTAVDKCQEHQDCQISWPMAVRPSRXKRGETSWIVEVSRKVEHSFCVIKCQFAYTKLRLRGWAKTTGQQAALFTQSNIWMVRKSLLRMGNLHL

SEQ ID NO: 70153 - protein, 325 aa, Pseudomonas syringae; identical to SEQ ID NO: 69226

SEQ ID NO: 70154 - protein, 104 aa, Pseudomonas syringae
MARQTAQNAQEILRADFQVLVADTEKLLAHTASLAGDQADELRAQIRESLLRAKETLKTTEDSLRERGEAAVVATEDYVQNNPWQSVGIAAGVGFLIGLLATRR

SEQ ID NO: 70155 - protein, 171 aa, Pseudomonas syringae
MTGLYARVGGVLLILLAVAGALYGAYRHGVSVTDSQWQAKWSEQVSAQSQAVATTTAEYRTEEQRRQKAANQVANDARQEQTAALTDAAVADAAGGRLRIEAGKLAATAGCVPGDTGASERGKAATRAAMVLSDLLGRADSRAGELAKAYDQSRVAGLACERSYQSLITSE

SEQ ID NO: 70156 - protein, 266 aa, Pseudomonas syringae
MLRMYVVQQCFGFSDEGCEDAVYDSQAIRGFMGIDLGRESAPDATTLLRFRRLLETHQLTRLLFETINQHLASRGLLLKEGTIVDATLIAAPPSVKNREGKRDPEMHQARKGNQWHFGMKAHIGVDATSGLVHSVVGTAANVADVTQVGQLLHGDETYVSGDAGYTGAAKRPEHAERDVIWSIAARPSSYKQHGEGSVLYRVKRKIEYAKAQLRAKVEHPFQVIKVRFNHRKVRYRGLEKNTAQLFSLFGLANLMLAKRYLQQAAG

SEQ ID NO: 70157 - protein, 400 aa, Pseudomonas syringae
  MISC_FEATURE (97)..(97): X=any amino acid
  MISC_FEATURE (104)..(104): X=any amino acid
  MISC_FEATURE (110)..(110): X=any amino acid
  MISC_FEATURE (135)..(135): X=any amino acid
  MISC_FEATURE (145)..(145): X=any amino acid
WQLEHLSKLVDFAYNYVPFYHALYHEAGFRTGDIVTWSDFEKLPIVDKKMLVDNRSALCASIGFAPDNHHVARTSGSSGINFTIVQDDTSVDTRSYXTYDKQKXWLGTRXVQTIGDTVSISLQSDLPHWQAAIPXSLSDKTVLRXTCLNHIQKIKPKILYAFPSYLKRLQVCAGDLTEWGVECICTNSEPSTQEERQVFARHFGVPVLDEYSSEEFSLIATECRYGRYHIVEDNLKAEVCNIDPEGWGTLVGTSFANTYMPFIRYSQGDIVKLDARQILCECGTHFRYLDTFHGRADQFLESKNNGKIPPDKLMGLYDSTLILETSGVKEFQIVQTHLDKIEIRIVLMDKEGAYNYALMSNFVSGIKQLFSGDPLTVSVHVLESIPAAKSYKRRLIVNMI

SEQ ID NO: 70158 - protein, 90 aa, Pseudomonas syringae
MNKSELIDAIAASADIPKAAAGRALDAVIESVTGALKAGDSVVLVGFGTFSVTDRPARIGRNPQTGKTLEIAAAKKPGFKAGKALKEAVN

SEQ ID NO: 70159 - protein, 393 aa, Pseudomonas syringae
MAKDKPYYPHASIGSVAMLAKTLGVHPKLLNDLAGRATDSYTHFVIRTKGDKERNVYEPKYELKKLQKRINSRLFEKVHYPFYLQGGVRDEDHPRDYIENSRIHAGSKSLISLDIRNFYDNIPYESVVSIFKYFFNFPDEVSDLLSKIVTRDGKVPQGACTSSYVANLIFHNSEYNFVSRLRNQGVTYSRLLDDVTLSSSRLLSQDEVSGYIKYVAGLFSEHKLRIKKSKTKIERSDDLSAEYTVTGVWVGHGVPKIRRAERDLIRHSVYICEREYQKDRFRDEYHELWNKVSGQVAKLTRLEHSQALKLRARMRDILPLYDGKATAAIIREADLLLKRPRTSHVKVSVVNAYRRLINRLGILTRTNKTLARGLRRQLKTKFSDVPSKVLMWE

SEQ ID NO: 70160 - protein, 430 aa, Pseudomonas syringae
MEHPRYSGFSYQELPMSSSTERPALPLNECDPHWLRNLWVCVFGVFTTIVAMTLLLPFLPLYVEQLGVDNHAAVVLWSGATYGATFLSAAITAPLWGRLGDRYGRKLMLIRASLGMAVAMSLIGLAQTVWQLLLLRLLAGLLGGYASGATILVATQTPKARSGWALGVLSSGIMAGSLAGPLMGGVLPPLIGIRNTFFLAGGVIFITFLATLLLLREMPRKAPSRATDSALPAVVKLSGEQRRMITCMFVVASLVMFSTMSVEPIITVYLRQLKTDNVTMMAGVVMSATALGSILAASRLGRLADRIGYLPVLTSCLAMTALTLIPQAWVSNVWQLAALRFFMGLALGGLLPCVAAIIRHTVPNEVAGRMLGYSTSSQYLGQVLGPLAGGLLGGYLGIGSVFLGTAMVLAACSIMVGRMDMIRTPASSKL

SEQ ID NO: 70161 - protein, 374 aa, Pseudomonas syringae
MPLLISRFAELDLIRQPEQQDEPLQAFDAADEYLLSHVAETGLSLDSRVLVLNDSFGALAASLARHANVVSSTDSFLAAQGLEKNLARNGMAYDAVPLIPASEPLSGPFDWVLIRIPKTLALLEEQLIRLQGQLAPGARVVAAAMVKHLPRSAGDLLEEYVGPVQASLAVKKARLLFATPRPQEVRTSPYPTRYTLDEPAIELLNHANVFCRDGLDIGTRALLPCLPKNLGAARVADLGCGNGVLAIASALENPDAHYTLVDESYMAVQSATENWRAHLGERDVVLRAADGLDTQQPDSLDVVLCNPPFHQQQVVGDFLAWRMFLQARAALVTGGALYIVGNRHLGYHTKLSRLFRGVEQVAATPKFVILKARK

SEQ ID NO: 70162 - protein, 230 aa, Pseudomonas syringae
MLKSCVGMLISTIVRRSASSCRSGRSASSSRLRASRAAFPRGGLPPRSWTPIRPNGGVQMAKYSEQFKLTVVKAYLAGNIGFRKVSSQFSIDSSLLRRWVANYKSHGHTGHRKPGLRYSEAFKRSVLEHKREHGLSLRQTAAHFGIGDPGQIVIWEQQHYSNDLAPYVPKRRKSVAMPKKPYPTAPVIDDDTQKTRDQLMAELEYLRMENAYLKKLEELKEQQRRQKKKP

SEQ ID NO: 70163 - protein, 185 aa, Pseudomonas syringae
MINEIKKDAQTRMQKSLESLTHAFTRIRTGKAHPSILGGVMVPYYGADTPLSQVANVTVKDSRTLQVVAFERNMLAAVDKAIQSSGLGFNPTNLGELLLISMPALTEETRKGFTKQARDAAEDARVAVRNIRRDALSQLKDLVKDKEISEDEERRAADDVQKLTDKFVADIEVAVKQKEADLMAV

SEQ ID NO: 70164 - protein, 457 aa, Pseudomonas syringae
MSQCEADSLRETAIGDVASDWEMGVIGDFVTALQAGVSVNAFETDSGCTEGELGVLKTSAVLRGRFFAEQYKVVVAEDMGRVATSVVGDRIIISRMNTPALVGESGYVTKDEPNLFLPDRLWQTEPSDRPHSQRWLSYWLQHPGVRRLIAASATGTSNSMKNISKETVLSLPVPRTPLPEQQKIAAILTAVDDKLDVIFRQIKATQALKQGLMQALFSRGVGTQDTTGRWIQHTEFKDSELGTIPALWDVGVIADYVSALRSGVSVNAEDRMHGDDEIGVLKVSCVLRGGFYPNCHKTVVPEERERVAEPVLQGRIIVSRANTPALVGESAYVNSAWPNLFLPDKLWQIEPSESPHSIKWLSFYLQSPFVRQEISKAATGTSGSMKNISKPAFLSIRMPLVPLAEQEHIAAILSDVTSKIEALNSKQNHFQTLKRGLMQKLLTGEWRVKIDSPTGTV

SEQ ID NO: 70165 - protein, 179 aa, Pseudomonas syringae
MKAKADTPFVPLNIAVLTVSDTRTRETDTSGQMFVDRLTDAGHGLIERVLLKDDLYKIRAQVATWIADDQVQVVLITGGTGFTGRDSTPEAVACLLDKQVDGFGELFRQISVPDIGTSTIQSRALAGLSNGTLVCCLPGSTNAVRTAWDGILAEQLDSRFRPCNFVPHLKQAEPCATRG

SEQ ID NO: 70166 - protein, 118 aa, Pseudomonas syringae
MARVKRGVIARKRHKKILKLAKGYYGARSRVFRVAKQAVIKAGQYAYRDRRQKKRQFRALWIARINAGARVNGLSYSRFIAGLKKASIEIDRKVLADLAVNEKAAFAAIVEKAKATLA

SEQ ID NO: 70167 - protein, 222 aa, Staphylococcus aureus
MIDQQTIYQYIQNGKIEEALQALFGNIEEDPTIIENYINAGIVLADANEIEKAERFFQKALTIDPKNGVVFYNLANVYYNQQRYQEAIKLYQQALQTEIEQVDCNYMIGMAFNQLESFKLALPYLMTAAELDKDKDAEVQFQYGLVLCQLEMFNEAITQLKRVLTIDKNHVDARYNLGLALFMKNEDIDEAITHFKEAVTIDPKHLLSQHALKTFTKMKEEE

SEQ ID NO: 70168 - protein, 429 aa, Staphylococcus aureus
MAFEFRLPDIGEGIHEGEIVKWFVKAGDTIEEDDVLAEVQNDKSVVEIPSPVSGTVEEVMVEEGTVAVVGDVIVKIDAPDAEDMQFKGHDDSSSKEEPAKEEAPAEQAPVATQTEEVDENRTVKAMPSVRKYAREKGVNIKAVSGSGKNGRITKEDVDAYLNGGAPTASNESAASATNEEVAETPAAPAAVSLEGDFPETTEKIPAMRRAIAKAMVNSKHTAPHVTLMDEIDVQALWDHRKKFKEIAAEQGTKLTFLPYVVKALVSALKKYPALNTSFNEEAGEIVHKHYWNIGIAADTDRGLLVPVVKHADRKSIFQISDEINELAVKARDGKLTADEMKGATCTISNIGSAGGQWFTPVINHPEVAILGIGRIAQKPIVKDGEIVAAPVLALSLSFDHRQIDGATGQNAMNHIKHLLNNPELLLMEG

SEQ ID NO: 70169 - protein, 34 aa, Staphylococcus aureus
MVEHLTVNQRVRGSNPLWLTTSTFHFWKVLFFMK

SEQ ID NO: 70170 - protein, 284 aa, Staphylococcus aureus
MKCLIELDILPELDVLIESESLTEVELCVEPDILNDSDVLIEVEPLVDPEILCDIEILAELDSLIDVESDTLVEPDVLKELDVLDESDTLVEPEPDVLNDSDTLVEPELDVLNDSDVLVEVELLVEPDVLNDSESLIEVESLVDSDSTALCEPLILIEVESLILSDVDNDVDTDVLCDVNVPALADIDNDIDVLNEPDALVLVDWLCAIESLSDSDVLVELESLTLIEPDIESLKLVDVETDTLPLIESDVESDVLVEFDPLMLDESLVDIESLSDALMLIESN

SEQ ID NO: 70171 - protein, 478 aa, Staphylococcus aureus
MMKQKKQFDQIFDLLAIRVIVNSINDCYAILGLVHTLWKPMPGRFKDYIAMPKQNLYQSLHTTVVGPNGDPLEIQIRTFDMHEIAEHGVAAHWAYKEGKKVSEKDQTYQNKLNWLKELAEADHTSSDAQEFMETLKYDLQSDKVYAFTPASDVIELPYGAVPIDFAYAIHSEVGNKMIGAKVNGKIVPIDYILQTGDIVEIRTSKHSYGPSRDWLKIVKSSSAKGKIKSFFKKQDRSSNIEKGRMMVEAEIKEQGFRVEDILTEKNIQVVNEKYNFANEDDLFAAVGFGGVTSLQIVNKLTERQRILDKQRALNEAQEVTKSLPIKDNIITDSGVYVEGLENVLIKLSKCCNPIPGDDIVGYITKGHGIKVHRTDCPNIKNETERLINVEWVKSKDATQKYQVDLEVTAYDRNGLLNEVLQAVSSTAGNLIKVSGRSDIDKNAIINISVMVKNVNDVYRVVEKIKQLGDVYTVTRVWN

SEQ ID NO: 70172 - protein, 514 aa, Staphylococcus aureus
MISFFTKTTDMMTSKKRWTALVVLAVSLFVVTMDMTILIMALPELVRELEPSGTQQLWIVDIYSLVLAGFIIPLSAFADKWGRKKALLTGFALFGLVSLAIFFAESAEFVIAIRFLLGIAGALIMPTTLSMIRVIFENPKERATALAVWSIASSIGAVFGPIIGGALLEQFSWHSAFLINVPFAIIAVVAGLFLLPESKLSKEKSHSWDIPSTILSIAGMIGLVWSIKEFSKEGLADIIPWVVIVLAITMIVIFVKRNLSSSDPMLDVRLFKKRSFSAGTIAAFMTMFAMASVLLLASQWLQVVEELSPFKAGLYLLPMAIGDMVFAPIAPGLAARFGPKIVLPSGIGIAAIGMFIMYFFGHPLSYSTMALALILVGAGMASLAVASALIMLETPTSKAGNAAAVEESMYDLGNVFGVAVLGSLSSMLYRVFLDISSFSSKGIVGDLAHVAEESVVGAVEVAKATGIKQLANEAVTSFNDAFVATALVGGIIMIIISIVVYLLIPKSLDITKQK

SEQ ID NO: 70173 - protein, 129 aa, Staphylococcus aureus; identical to SEQ ID NO: 44331
  MISC_FEATURE (17)..(17): X=any amino acid
  MISC_FEATURE (102)..(102): X=any amino acid
  MISC_FEATURE (122)..(122): X=any amino acid

SEQ ID NO: 70174 - protein, 209 aa, Staphylococcus aureus
  MISC_FEATURE (62)..(62): X=any amino acid
  MISC_FEATURE (67)..(67): X=any amino acid
  MISC_FEATURE (110)..(110): X=any amino acid
  MISC_FEATURE (112)..(112): X=any amino acid
  MISC_FEATURE (156)..(156): X=any amino acid
  MISC_FEATURE (163)..(163): X=any amino acid
  MISC_FEATURE (187)..(187): X=any amino acid
GSFRPVAGNLHLHRTMISPSLSLRQCPNRYAFRAGRNLPDKEFRYLRTVIVTAAVYWGFDSXLRRSXPLLLTFQHRAGVSPYTSPYGLAETCVFDKQSLGPIHCGSSGRXPXRAPLLPKLRGHFAEFLNESSLAHLRILILTTCVGLRYGHLFSIXRLFSAVXNQRLEDSMSSPHHSSALTSTGFAXYSALLLRRAIQSHASPILLRPP

SEQ ID NO: 70175 - protein, 188 aa, Staphylococcus aureus
MNTKFLGKTLVASALVLTTLGTGLHSSYLGLDTNKVVKTAKAEEKMTDGQLWKKVKDSLHDSDIILSNEYETINVTYLLSNGYSSSVSAPGNDDGGHLTQSIDFKGLKQIDLTKENVYDDFNKKLDAKNTWNSLTEKLKGLGLLQNGQKVSIYSSDSSSPVSGKVGEGVTSGGENTLTKRFINKITID

SEQ ID NO: 70176 - protein, 2398 aa, Staphylococcus aureus
  MISC_FEATURE (311)..(311): X=any amino acid
  MISC_FEATURE (313)..(313): X=any amino acid
  MISC_FEATURE (327)..(327): X=any amino acid
  MISC_FEATURE (328)..(328): X=any amino acid
  MISC_FEATURE (336)..(336): X=any amino acid
  MISC_FEATURE (350)..(350): X=any amino acid
  MISC_FEATURE (362)..(362): X=any amino acid
NERLTQAINQLVPLADNSALKTAKTKLDEEINKSVTTDGMTQSSIQAYENAKRAGQTESTNAQNVINNGDATDQQIAAEKTKVEEKYNSLKQAIAGLTPDLAPLQTAKTQLQNDIDQPTSTTGMTSASIAAFNEKLSAARTKIQEIDRVLASHPDVATIRQNVTAANAAKSALDQARNGLTVDKAPLENAKNQLQHSIDTQTSTTGMTQDSINAYNAKLTAARNKIQQINQVLAGSPTVEQINTNTSTANQAKSDLDHARQALTPDKAPLQTAKTQLEQSINQPTDTNRYDDRFVKCVQPKITSSASKVNXNXSSVEWQPNCPKYQXXSDRGKPSXGSIKYSTSRFNIRXTASVNNITWCIXLNQAQQNNFTQQINAAQNHAALETIKSNITALNTAMTKLKDSVADNNTIKSDQNYTDATPANKQAYDNAVNAAKGVIGETTNPTMDVNTVNQKAASVKSTKDALDGQQNLQRAKTEATNAITHASDLNQAQKNALTQQVNSAQNVQAVNDIKQTTQSLNTAMTGLKRGVANHNQVVQSDNYVNADTNKKNDYNNAYNHANDIINGNAQHPVITPSDVNNALSNVTSKEHALNGEAKLNAAKQEANTALGHLNNLNNAQRQNLQSQINGAHQIDAVNTIKQNATNLNSAMGNLRQAVADKDQVKRTEDYADADTAKQNAYNSAVSSAETIINQTTNPTMSVDDVNRATSAVTSNKNALNGYEKLAQSKTDAARAIDALPHLNNAQKADVKSKINAASNIAGVNTVKQQGTDLNTAMGNLQGAINDEQTTLNSQNYQDATPSKKTAYTNAVQAAKDILNKSNGQNKTKDQVTEAMNQVNSAKNNLDGTRLLDQAKQTAKQQLNNMTHLTTAQKTNLTNQINSGTTVAGVQTVQSNANTLDQAMNTLRQSIANKDATKASEDYVDANNDKQTAYNNAVAAAETIINANSNPEMNPSTITQKAEQVNSSKTALNGDENLAAAKQNAKTYLNTLTSITDAQKNNLISQITSATRVSGVDTVKQNAQHLDQAMASLQNGINNESQVKSSEKYRDADTNKQQEYDNAITAAKAILNKSTGPNTAQNAVEAALQRVNNAKDALNGDAKLIAAQNAAKQHLGTLTHITTAQRNDLTNQISQATNLAGVESVKQNANSLDGAMGNLQTAINDKSGTLASQNFLDADEQKRNAYNQAVSAAETILNKQTGPNTAKTAVEQALNNVNNAKHALNGTQNLNNAKQAAITAINGASDLNQKQKDALKAQANGAQRVSNAQDVQHNATELNTAMGTLKHAIADKTNTLASSKYVNADSTKQNAYTTKVTNAEHIISGTPTVVTTPSEVTAAANQVNSAKQELNGDERLREAKQNANTAIDALTQLNTPQKAKLKEQVGQANRLEDVQTVQTNGQALNNAMKGLRDSIANETTVKTSQNYTDASPNNQSTYNSAVSNAKGIINQTNNPTMDTSAITQATTQVNNAKNGLNGAENLRNAQNTAKQNLNTLSHLTNNQKSAISSQIDRAGHVSEVTATKNAATELNTQMGNLEQAIHDQNTVKQSVKFTDADKAKRDAYTNAVSRAEAILNKTQGANTSKQDVEAAIQNVSSAKNALNGDQNVTNAKNAAKNALNNLTSINNAQKRDLTTKIDQATTVAGVEAVSNTSTQLNTAMANLQNGINDKTNTLASENYHDADSDKKTAYTQAVTNAENILNKNSGSNLDKTAVENALSQVANAKGALNGNHNLEQAKSNANTTINGLQHLTTAQKDKLKQQVQQAQNVAGVDTVKSSANTLNGAMGTLRNSIQDNTATKNGQNYLDATERNKTNYNNAVDSANGVINATSNPNMDANAINQIATQVTSTKNALDGTHNLTQAKQTATNAIDGATNLNKAQKDALKAQVTSAQRVANVTSIQQTANELNTAMGQLQHGIDDENATKQTQKYRDAEQSKKTAYDQAVAAAKAILNKQTGSNSDKAAVDRALQQVTSTKDALNGDAKLAEAKAAAKQNLGTLNHITNAQRTDLEGQINQATTVDGVNTVKTNANTLDGAMNSLQGSINDKDATLRNQNYLDADESKRNAYTQAVTAAEGILNKQTGGNTSKADVDNALNAVTRAKAALNGADNLRNAKTSATNTIDGLPNLTQLQKDNLKHQVEQAQNVAGVNGVKDKGNTLNTAMGALRTSIQNDNTTKTSQNYLDASDSNKNNYNTAVNNANGVINATNNPNMDANAINGMANQVNTTKAALNGAQNLAQAKTNATNTINNAHDLNQKQKDALKTQVNNAQRVSDANNVQHTATELNSAMTALKAAIADKERTKASGNYVNADQEKRQAYDSKVTNAENIISGTPNATLTVNDVNSAASQVNAAKTALNGDNNLRVAKEHANNTIDGLAQLNNAQKAKLKEQVQSATTL

SEQ ID NO: 70177 - protein, 3533 aa, Staphylococcus aureus
MDKLRQSIADNATTKQNQNYTDASQNKKDAYNNAVTTAQGIIDQTTSPTLDPTVINQAAGQVSTTKNALNGNENLEAAKQQASQSLGSLDNLNNAQKQTVTDQINGAHTVDEANQIKQNAQNLNTAMGNLKQAIADKDATKATVNFTDADQAKQQAYNTAVTNAENIISKANGGNATQAEVEQAIKQVNAAKQALNGNANVQHAKDEATALINSSNDLNQAQKDALKQQVQNATTVAGVNNVKQTAQELNNAMTQLKQGIADKEQTKADGNFVNADPDKQNAYNQAVAKAEALISATPDVVVTPSEITAALNKVTQAKNDLNGNTNLATAKQNVQHAIDQLPNLNQAQRDEYSKQITQATLVPNVNAIQQAATTLNDAMTQLKQGIANKAQIKGSENYHDADTDKQTAYDNAVTKAEELLKQTTNPTMDPNTIQQALTKVNDTNQALNGNQKLADAKQDAKTTLGTLDHLNDAQKQALTTQVEQAPDIATVNNVKQNAQNLNNAMTNLNNALQDKTETLNSINFTDADQAKKDAYTNAVSHAEGILSKANGSNASQTEVEQAMQRVNEAKQALNGNDNVQRAKDAAKQVITNANDLNQAMTQLKQGIADKDQTKANGNFVNADTDKQNAYNNAVAHAEQIISGTPNANVDPQQVAQALQQVNQAKGDLNGNHNLQVAKDNANTAIDQLPNLNQPQKTALKDQVSHAELVTGVNAIKQNADALNNAMGTLKQQIQANSQVPQSVDFTQADQDKQQAYNNAANQAQQIANGIPTPVLTPDTVTQAVTTMNQAKDALNGDEKLAQAKQEALANLDTLRDLNQPQRDALRNQINQAQALATVEQTKQNAQNVNTAMSNLKQGIANKDTVKASENYHDADADKQTAYTNAVSQAEGIINQTTNPTLNPDEITRALTQVTDAKNGLNGEAKLATEKQNAKDAVSGMTHLNDAQKQALKGQIDQSPEIATVNQVKQTATSLDQAMDQLSQAINDKAQTLADGNYLNADPDKQNAYKQAVAKAEALLNKQSGTNEVQAQVESITNEVNAAKQALNGNDNLANAKQQAKQQLANLTHLNDAQKQSFESQITQAPLVTDVTTINQKAQTLDHAMELLRNSVADNQTTLASEDYHDATAQRQNDYNQAVTAANNIINQTTSPTMNPDDVNGATTQVNNTKVALDGDENLAAAKQQANNRLDQLDHLNNAQKQQLQSQITQSSDIAAVNGHKQTAESLNTAMGNLINAIADHQAVEQRGNFINADTDKQTAYNTAVNEAAAMINKQTGQNANQTEVEQAITKVQTTLQALNGDHNLQVAKTNATQAIDALTSLNDPQKTALKDQVTAATLVTAVHQIEQNANTLNQAMHGLRQSIQDNAATKANSKYINEDQPEQQNYDQAVQAANNIINEQTATLDNNAINQAATTVNTTKAALHGDVKLQNDKDHAKQTVSQLAHLNNAQKHMEDTLIDSETTRTAVKQDLTEAQALDQLMDALQQSIADKDATRASSAYVNAEPNKKQSYDEAVQNAESIIAGLNNPTINKGNVSSATQAVISSKNALDGVERLAQDKQTAGNSLNHLDQLTPAQQQALENQINNATTRDKVAEIIAQAQALNEAMKALKESIKDQPQTEASSKFINEDQAQKDAYTQAVQHAKDLINKTTDPTLAKSIIDQATQAVTDAKNNLHGDQKLAQDKQRATETLNNLSNLNTPQRQALENQINNAATRGEVAQKLTEAQALNQAMEALRNSIQDQQQTEAGSKFINEDKPQKDAYQAAVQNAKDLINQTNNPTLDKAQVEQLTQAVNQAKDNLHGDQKLADDKQHAVTDLNQLNGLNNPQRQALESQINNAATRGEVAQKLAEAKALDQAMQALRNSIQDQQQTESGSKFINEDKPQKDAYQAAVQNAKDLINQTGNPTLDKSQVEQLTQAVTTAKDNLHGDQKLARDQQQAVTTVNALPNLNHAQQQALTDAINAAPTRTEVAQHVQTATELDHAMETLKNKVDQVNTDKAQPNYTEASTDKKEAVDQALQAAESITDPTNGSNANKDAVDQVLTKLQEKENELNGNERVAEAKTQAKQTIDQLTHLNADQIATAKQNIDQATKLQPIAELVDQATQLNQSMDQLQQAVNEHANVEQTVDYTQADSDKQNAYKQAIADAENVLKQNANKQQVDQALQNILNAKQALNGDERVALAKTNGKHDIDQLNALNNAQQDGFKGRIDQSNDLNQIQQIVDEAKALNRAMDQLSQEITDNEGRTKGSTNYVNADTQVKQVYDETVDKAKQALDKSTGQNLTAKQVIKLNDAVTAAKKALNGEERLNNRKAEALQRLDQLTHLNNAQRQLAIQQINNAETLNKASRAINRATKLDNAMGSVQQYIDEQHLGVISSTNYINADDNLKANYDNAIANAAHELDKVQGNAIAKAEAEQLKQNIIDAQNALNGDQNLANAKDKANAFVNSLNGLNQQQQDLAHKAINNADTVSDVTDIVNNQIDLNDAMETLKHLVDNEIPNAEQTVNYQNADDNAKTNFDDAKRLANTLLNSDNTNVNDINGAIQAVNDAIHNLNGDQRLQDAKDKAIQSINQALANKLKEIEASNATDQDKLIAKNKAEELANSIINNINKATSNQAVSQVQTAGNHAIEQVHANEIPKAKIDANKDVDKQVQALIDEIDRNPNLTDKEKQALKDRINQILQQGHNGINNAMTKEEIEQAKAQLAQALQDIKDLVKAKEDAKQDVDKQVQALIDEIDQNPNLTDKEKQALKDRINQILQQGHNDINNAMTKEAIEQAKERLAQALQDIKDLVKAKEDAKNDIDKRVQALIDEIDQNPNLTDKEKQALKDRINQILQQGHNDINNALTKEEIEQAKAQLAQALQDIKDLVKAKEDAKNAIKALANAKRDQINSNPDLTPEQKAKALKEIDEAEKRALQNVENAQTIDQLNRGLNLGLDDIRNTHVWEVDEQPAVNEIFEATPEQILVNGELIVHRDDIITEQDILAHINLIDQLSAEVIDTPSTATISDSLTAKVEVTLLDGSKVIVNVPVKVVEKELSVVKQQAIESIENAAQQKINEINNSVTLTLEQKEAAIAEVNKLKQQAIDHVNNAPDVHSVEEIQQQEQAHIEQFNPEQFTIEQAKSNAIKSIEDAIQHMIDEIKARTDLTDKEKQEAIAKLNQLKEQAIQAIQRAQSIDEISEQLEQFKAQMKAANPTAKELAKRKQEAISRIKDFSNEKINSIRNSEIGTADEKQAAMNQINEIVLETIRDINNAHTLQQVEAALNNGIARISAVQIVTSDRAKQSSSTGNESNSHLTIGYGTANHPFNSSTIGHKKKLDEDDDIDPLHMRHFSNNFGNVIKNAIGVVGISGLLASFWFFIAKRRRKEDEEEELEIRDNNKDSIKETLDDTKHLPLLFAKRRRKEDEEDVTVEEKDSLNNGESLDKVKHTPFFLPKRRRKEDEEDVEVTNENTDEKVLKDNEHSPLLFAKRRKDKEEDVETTTSIESKDEDVPLLLAKKKNQKDNQSKDKKSASKNTSKKVAAKKKKKKAKKNKK

SEQ ID NO: 70178 - protein, 191 aa, Staphylococcus aureus
MQSFVKIIDGYKEEVITDFNQLIFLDARAESPNTNDNSVTINGVDGILPGAISFAPFSLVLRFGYDGIDVIDLNLFEHWFRSVFNRRHPYYVITSQMPGVKYAVNTANVTSNLKDGSSTEIEVSLNVYKGYSESVNWTDSEFLFDSNWMFENGIPLDFTPKYTHTSNQFTIWNGSTDTDKSTIQARFENIN

SEQ ID NO: 70179 - protein, 122 aa, Staphylococcus aureus
  MISC_FEATURE (106)..(106): X=any amino acid
MLSALIPSTHSYPAMPLARQLVHQRYVHPGPLVLRTAPLKFPTPTTDRDRTVSRRSEPSSRTALMGEQPNPWDRLQPQDAMSRHRGAKPPRRCELLGEISLLSPGXLLSVERWPFHAEPPDH

SEQ ID NO: 70180 - protein, 209 aa, Staphylococcus aureus; identical to SEQ ID NO: 44017
  MISC_FEATURE (62)..(62): X=any amino acid
  MISC_FEATURE (67)..(67): X=any amino acid
  MISC_FEATURE (110)..(110): X=any amino acid
  MISC_FEATURE (112)..(112): X=any amino acid
  MISC_FEATURE (156)..(156): X=any amino acid
  MISC_FEATURE (163)..(163): X=any amino acid
  MISC_FEATURE (187)..(187): X=any amino acid

SEQ ID NO: 70181 - protein, 338 aa, Staphylococcus aureus; identical to SEQ ID NO: 43054

SEQ ID NO: 70182 - protein, 129 aa, Staphylococcus aureus; identical to SEQ ID NO: 44331
  MISC_FEATURE (17)..(17): X=any amino acid
  MISC_FEATURE (102)..(102): X=any amino acid
  MISC_FEATURE (122)..(122): X=any amino acid

SEQ ID NO: 70183 - protein, 122 aa, Staphylococcus aureus; identical to SEQ ID NO: 70179
  MISC_FEATURE (106)..(106): X=any amino acid

SEQ ID NO: 70184 - protein, 117 aa, Staphylococcus aureus
  MISC_FEATURE (79)..(79): X=any amino acid
  MISC_FEATURE (95)..(95): X=any amino acid
MLSALIPSTHSYPAMPLARQLVHQRYVHPGPLVLRTAPLKFPTPTTDRDRTVSRRSEPSSRTALMGEQPNPWETFLDLXQSLASFLSFGSRLLIXLTKLVALFSRFVRFKRFHFAKP

SEQ ID NO: 70185 - protein, 122 aa, Staphylococcus aureus; identical to SEQ ID NO: 70179
  MISC_FEATURE (106)..(106): X=any amino acid

SEQ ID NO: 70186 - protein, 122 aa, Staphylococcus aureus; identical to SEQ ID NO: 70179
  MISC_FEATURE (106)..(106): X=any amino acid

SEQ ID NO: 70187 - protein, 209 aa, Staphylococcus aureus; identical to SEQ ID NO: 70174
  MISC_FEATURE (62)..(62): X=any amino acid
  MISC_FEATURE (67)..(67): X=any amino acid
  MISC_FEATURE (110)..(110): X=any amino acid
  MISC_FEATURE (112)..(112): X=any amino acid
  MISC_FEATURE (156)..(156): X=any amino acid
  MISC_FEATURE (163)..(163): X=any amino acid
  MISC_FEATURE (187)..(187): X=any amino acid

SEQ ID NO: 70188 - protein, 129 aa, Staphylococcus aureus; identical to SEQ ID NO: 44331
  MISC_FEATURE (17)..(17): X=any amino acid
  MISC_FEATURE (102)..(102): X=any amino acid
  MISC_FEATURE (122)..(122): X=any amino acid

SEQ ID NO: 70189 - protein, 122 aa, Staphylococcus aureus; identical to SEQ ID NO: 70179
  MISC_FEATURE (106)..(106): X=any amino acid

SEQ ID NO: 70190 - protein, 611 aa, Staphylococcus aureus
LTDTTFRDAHQSLLATRVRTKDMINIASKTADVFKDGFSLEMWGGATFDVAYNFLKENPWERLERLRKAIPNVLFQMLLRASNAVGYKNYPDNVIHKFVQESAKAGIDVFRIFDSLNWVDQMKVANEAVQEAGKISEGTICYTGDILNPERSNIYTLEYYVKLAKELEREGFHILAIKDMAGLLKPKAAYELIGELKSAVDLPIHLHTHDTSGNGLLTYKQAIDAGVDIIDTAVASMSGLTSQPSANSLYYALNGFPRHLRTDIEGMESLSHYWSTVRTYYSDFESDIKSPNTEIYQHEMPGGQYSNLSQQAKSLGLGERFDEVKDMYRRVNFLFGDIVKVTPSSKVVGDMALYMVQNDLDEQSVITDGYKLDFPESVVSFFKGEIGQPVNGFNKDLQAVILKGQEALTARPGEYLEPVDFEKVRELLEEEQQGPVTEQDIISYVLYPKVYEQYIQTRNQYGNLSLLDTPTFFFGMRNGETVEIEIDKGKRLIIKLETISEPDENGNRTIYYAMNGQARRIYIKDENVHTNANVKPKADKSNPSHIGAQMPGSVTEVKVSVGETVKANQPLLITEAMKMETTIQAPFDGVIKQVTVNNGDTIATGDLLIEI

SEQ ID NO: 70191 - protein, 447 aa, Staphylococcus aureus
MEFLSLVIVVLAAFLTPIIVNRLNINFLPVVVAEILMGIVIGNSFLNIVERDSILNILSTLGFIFLMFLSGLEIDFKAFKKDKRARQGQNDDESSIPGHLNLALTVFAFIMIISILLAYVFKWLGLVDDVLLMVIIISTISLGVVVPTLKEMNIMRTTIGQFILLVAVLADLVTMILLTVYGAINGQGGSTIWLIGILVVFTAISYILGVQFKRMSFLQKLMDGTTQIGIRAVFALIILLVALAEGVGAENILGAFLAGVVVSLLNPDEEMVEKLDSFGYGFFIPIFFIMVGVDLNIPSLIKEPKLLIIIPILIVAFIISKLIPVMFIRRWFDMKTTIASAFLLTSTLSLVIAAAKISERLNAISAETSGILILSAVITCVFVPIIFKKLFPVPDEFNRKIEVSLIGKNQLTIPIAQNLTSQLYDVTLYYRKDLSDRRQLSDDITMI

SEQ ID NO: 70192 - protein, 866 aa, Staphylococcus aureus
TTLPNGWTSNLTKADKNNGSLSITGRVSMNQAFNSDITFKVSATDNVNNTTNDSQSKHVSIHVGKISEDAHPIVLGNTEKVVVVNPTAVSNDEKQSIITAFMNKNQNIRGYLASTDPVTVDNNGNVTLHYRDGSSTTLDATNVMTYEPVVKPEYQTVNAAKTATVTIAKGQSFSIGDIKQYFTLSNGQPIPSGTFTNITSDRTIPTAQEVSQMNAGTQLYHITATNAYHKDSEDFYISLKIIDVKQPEGDQRVYRTSTYDLTTDEISKVKQAFINANRDVITLAEGDISVTNTPNGANVSTITVNINKGRLTKSFASNLANMNFLRWVNFPQDYTVTWTNAKIANRPTDGGLSWSDDHKSLIYRYDATLGTQITTNDILTMLKATTTVPGLRNNITGNEKSQAEAGGRPNFRTTGYSQSNATTDGQRQFTLNGQVIQVLDIINPSNGYGGQPVTNSNTRANHSNSTVVNVNEPAANGAGAFTIDHVVKSNSTHNASDAVYKAQLYLTPYGPKQYVEHLNQNTGNTTDAINIYFVPSDLVNPTISVGNYTNHQVFSGETFTNTITANDNFGVQSVTVPNTSQITGTVDNNHQHVSATAPNVTSATNKTINLLATDTSGNTATTSFNVTVKPLRDKYRVGTSSTAANPVRIANISNNATVSQADQTTIINSLTFTETVPNRSYARASANEITSKTVSNVSRTGNNANVTVTVTYQDGTTSTVTVPVKHVIPEIVAHSHYTVQGQDFPAGNGSSASDYFKLSNGSDIADATITWVSGQAPNKDNTRIGEDITVTAHILIDGETTPITKTATYKVVRTVPKHVFETARGVLYPGVSDMYDAKQYVKPVNNSWSTNAQHMNFQFVGTYGPN

SEQ ID NO: 70193 - protein, 251 aa, Staphylococcus aureus
MKTLKGALFMSIKPKVDIDVLLYMFQEYEKGVSFQYLIDTLQLDINVNTLYPKYKYYKTHGIETLLTQKQYNHYSKELKLKVVNEYLNSNQSTQDIAIKYNIRSSTQVKNWIKMYTVGKEIKNQSPKTGVYIMKARKTTFEERVTIVEYYLNHKQSYREVAEHFNISYGQIYQWVHKYQAHGKNGLVDGRGKGKPKSMMTPEEQKEAEIQALKAQNRLLEMENDVLKKFQALEREMIQRENKSRHTKRSKR

SEQ ID NO: 70194 - protein, 242 aa, Staphylococcus aureus
MSIKPKVDIDVLLYMFQEYEKGVSFQYLIDTLQLDINVNTLYPKYKYYKTHGIETLLTQKQYNHYSKELKLKVVNEYLNSNQSTQDIAIKYNIRSSTQVKNWIKMYTVGKEIKNQSPKTGVYIMKARKTTFEERVTIVEYYLNHKQSYREVAEHFNISYGQIYQWVHKYQAHGKNGLVDGRGKGKPKSMMTPEEQKEAEIQALKAQNRLLEMENDVLKKFQALEREMIQRENKSRHTKRSKR

SEQ ID NO: 70195 - protein, 242 aa, Staphylococcus aureus
MSIKPKVDIDVLLYMFQEYEKGVSFQYLIDTLQLDINVNTLYPKYKYYKTHGIETLLTQKQYNHYSKELKLKVVNEYLNSNQSTQDIAIKYNIRSSTQVKNWIKMYTVGKEIKNQSPKTGVYIMKARKTTFEERVTIVEYYLNHKQSYREVAEHFNISYGQIYQWVHKYQAHGKNGLVDGRGKGKPKSMMTPEEQKAAEIQALKAQNRLLEMENDVLKKFQALEREMIQRENKSRHTKRSKR

SEQ ID NO: 70196 - protein, 426 aa, Staphylococcus aureus
MQSLDKNFRHLSRQQKLQQLVDKQWLSEEQFNILLNHPLIDEEVANSLIENVIAQGALPVGLLPNIIVDDKAYVVPMMVEEPSVVAAASYGAKLVNQTGGFKTVSSERIMIGQIVFDGVDDTEKLSADIKALEKQIHQIADEAYPSIKARGGGYQRIAIDTFPEQQLLSLKVFVDTKDAMGANMLNTILEAITAFLKNEFPQSDILMSILSNHATASVVKVQGEIDVKDLARGERTGEEVAKRMERASVLAQVDIHRAATHNKGVMNGIHAVVLATGNDTRGAEASAHAYASKDGQYRGIATWRYDQERQRLIGTIEVPMTLAIVGGGTKVLPIAKASLELLNVESAQELGHVVAAVGLAQNFAACRALVSEGIQQGHMSLQYKSLAIVVGAKGDEIAQVAEALKQEPRANTQVAERILQDLRSQQ

SEQ ID NO: 70197 - protein, 130 aa, Staphylococcus aureus; identical to SEQ ID NO: 44082

SEQ ID NO: 70198 - protein, 521 aa, Staphylococcus aureus
MKNFQVVPYLNMNNFSDNILRYIDDNSLKKIKNSLMKNNKSALLIIDDVERMSDKVSFEEFLGFIRNDLIDYLDCKVLFIGNLDELNKKADFHKNSEKIISRILKFPNNREVAMDIVKSNLPKLFVKNISTKELFNGFFDISDEKKEIIFEKSKQNNLNYKYYHLNMRTLNLVVSNFKLIINKMQDEIKYKSKDFKITLYISLFISLFILYNEFRSGNLGESEIKDLQFTYNDFNNLNTKTSIALFKYLYKNNELANYVFFDIELKNLLLYGIFDESIFLKNITNNFKEEDAKADLLNVLKEFFKLSESELLEKEIQAIEIIKDKNNENFNYKVKAYLSLLNLKGKNLYLIDGIKISELEDELVDNYDLHQNNLIVGDTINRLDLVSFSNEQLYEEIKSLKDRLINKRTTLMTSIYNQYLETILNGDFTNRTKLKEAYIGMKDIDTIEIIYNNLNKVSNELKSSNEKIINLSAFIKDNHCNNDDNIQLEYIIGEMKKLKDGTKDRVTQMCFSMLIDTLKDI

SEQ ID NO: 70199 - protein, 251 aa, Staphylococcus aureus; identical to SEQ ID NO: 70193

SEQ ID NO: 70200 - protein, 206 aa, Staphylococcus aureus
MQLPDNEVAQISDYYPRNSIDTKEYMSTLTYGFNGNVTGDDSGKIGGLIGANVSIGHTLKYVQPDFKTILESPTDKKVGWKVIFNNMVNQNWGPYDRDSWNPVYGNQLFMKTRNGSMKAAENFLDPNKASSLLSSGFSPDFATVITMDRKATKQQTNIDVIYERVRDDYQLHWTSTNWKGTNTKDKWTDRSSERYKIDWEKEEMTN

SEQ ID NO: 70201 - protein, 283 aa, Staphylococcus aureus
MDISLNFNHYIDLKKSIKNLCLMKKFEPYVTNENYDFIEMPLVVDGNYVLLKIYQEKDALIKLHYQEVLNSNRKSVIQESDIVRISRSILNEALDINSNIKYKSDTFGLTIISDADNYTTLIRTILAQQVSIEQSNKLFLLFINTYGEIFELNNKEYTFLNWDKIFSRIYKEQKVLVGTTNNRKQAIITLAELHIKNGLRENVLQVISSIKGIGSWTVQMFMLFQFPHVAFENIPVADIGLHRAIEKNHDLPHKSIDKSKGESYFQNMKSIDVFKYWYIYMVE

SEQ ID NO: 70202 - protein, 176 aa, Staphylococcus aureus
MSIKPKVDIDVLLYMFQEYEKGVSFQYLIDTLQLDINVNTLYPKYKYYKTHGIETLLTQKQYNHYSKELKLKVVNEYLNSNQSTQDIAIKYNIRSSTQVKNWIKMYTVGKEIKNQSPKTGVYIMKARKTTFEERVTIVEYYLNHKQSYREVAEHFNISYGQFTSGFISIKHMVKMD

SEQ ID NO: 70203 - protein, 633 aa, Staphylococcus aureus
MALIMSFNEIIFKNFRQNLSHYAIYLFSLITSVVLFFSFVALKYTHSINITETYPIIKEGSQVGSYFLFFIIVAFLLYANVLFLKRRSSELALYQTLGLSKFNIIYILMFEQLLIFSITAILGITIGIFGSKILLMIVFTLLGIKEKVPIIFSFRAVFETLLLIGVAYFLTAAQNLILVLKQSISELSKHNQAKQMNHNKITFEEVILGILGIILIISGYYYSLRIVHYYDAIGVLMFILFATVIGAYLFFKSSVSLVFKIIKSFKKGVISVNDVMFSSSIMYRIQKNAFSLTVMAIISAITLSVLCFAAISRATLLSEIKYTSPHDVTIKDQQKANQLASELNNRKIPHFYNYKEVIHTKLYKDDLFDIKAKEPYNVTITSDKYIPNTDLKRGQADLFVAEGAIKDLVKHKKHGKAVIGTKKHHVDIKLRKDINKIYFMTDVDLGGPTFVLNDQDYQEIRKYTKPKHIVSQFGFDLKHKKEMLALEKATNKVDKSIETRSEAISSISSLTGILLFVTSFLGISFLIAVCCIIYIKQIDETEDELENYSILRKLGFTQKDMAKGLKFKIAFNFGLPLVIALSHAYFTSLAYMKLMGTTNQIPIFIVMGLYICMYAIFAMTAYNHSKRTIRHSI

SEQ ID NO: 70204 - protein, 412 aa, Staphylococcus aureus
MRLNKFIGDSFLMILSSGIAQVILIITTPIITRLYSPTEFGEFTIFSNIAMILIPIINARYDLLIVNTKNDRSANILSQISFLISLLILLILIPIFAISAWLYPNFILDFIFIIIMLFLVSLTNIFTNYLNKERKYKVLSLINVFRAGSMALLQIIFGLLALGSLGLIIGFSLSYIAGITLGYKTFKKHFNIVRDKEETKALFLENKNQLVYSTPSILLNSLSFSVVVFFIGILYTNTEVGIYGMAIRVLGIPVTIISLGLSKIFMQQANDYYIEYGNFRNLLLKFSSILVIVSIILYVPLYLFSEELVNILLGHSWVDAITVIKIVIPLFVIRLIVSTVSLSVIVLQKQQLELILQALFLIGTTATFVISKMLNLTFLNFVSINTVVLIVSYMIFFIALYYFAKNKQFKNS

SEQ ID NO: 70205 - protein, 556 aa, Staphylococcus aureus
MGYKVDMSEVHNMQKSIDSSLSAINTKVSTLSSSINNLINTEGFEGQTASSVKNYSKTFHLQSIKKIETINKDFKSDIAKSIRKFQSEVDNNASAILDEDEIKKYKKDIDDALKDVFKSSKDANGAISDVSDLTTAKKIKTENLANKMGDFNKDIDQTVERLTTFDANNSIDGDKTDNLITELSGVNSYVKNMKPNRARISSTSGKIEGAIARHKTSEELVRWQTYMETLSENLYKTPGLSKAASDIITQAGREYYAIKAVGNGSALRGYKEYLKTRDINKLINKMNKNQLKRMSLVLNTDRGNIKIKNAVKMASEFARNNPFKKGNLVNWMSKVQGYQSVSAQILKKGLQDKNFKYTFGDAKKFFDTADMKKAAVTEFKNTFVPQNIRETFFKKENLTSKTALKKNMSKFWNEDIKGGIKEFKLDFANKNIIGKLGKLLKLGGKALKPLGFITAITDNIGKKSWQEKLVGMGVDLSAIGASAAAGAAVGTAIPLPVVGTVAGALAGAAVGIALDYKIPYLDKSATELAKDGINSGINKVKSGFGKVTSGFKTVFG

SEQ ID NO: 70206 - protein, 435 aa, Staphylococcus aureus
MYHKAFYKFVLSVLSLPLFLYAVIKFFFSAKRKNFYANNSEISEIEQALHQKYKYLSQQKSSTQIHKEALKIFKTQSSNTNSKNIEQAHFSTYFENVLFHKFIIIKVILALPMFILLTIYLQPLVRYIFERIVMAVIVIIGVIVSVFSILYFSPLDAAYSILGQNATKAQIHQFNVLHHLNEPYFIQLWDTIKGVFTFDLGTTYKGNDVVTKAVGERIPITIIVAVLALIVALIIAIPIGIISAMKRNSWLDITLMIIALIGLSIPSFWQGLLFILAFSLKLDILPPSYMPEHPISLILPVLVIGTSIAASITRMTRSSVLEVMRSDYVLTAYAKGLSTTQVVIKHILKNAIIPIVTLVGLLVAELLGGSAVTEQVFNINGIGRYIVQKQLIPDIPAVMGGVVYISIVISLANLIIDIFYALIDPKLRSEINERK

SEQ ID NO: 70207 - protein, 203 aa, Staphylococcus aureus
MNDMLISLVIPVFALLVIGGIIWMIIEGIVHISKKNKAIDNFFNQVNKVSETYKFATTFLFLILATAGISQFYLYYIVSALLFWLVILTFGIAGIIFLMPYGLCFLPFYKQKKKKQTFKKYMVYTTIGLSICLGLSLVLVHTTKIYMDEGGVRYYYGSFVMKQAGGYAYLALAVLSTLLIVAKKATNKNKEIETVDNTNIMER

SEQ ID NO: 70208 - protein, 571 aa, Staphylococcus aureus
MGKLIKYISILLIVVLVLSACGKSSNKDEGVKDATKTEASKHKGGTLNVALTAPPSGVYSSLLNSTHADAVVEGYFNENLLTIDKKIRPKSYIASWKDIEPAKKIEFKIKKGIKWHDGNELKIDDWIYSIEVLANKDYEGAYYPSVENIQGAKDYHEGKADHISGLKKIDDYTMQVTFDKKQENYLTGFITGPLLSKKYLSDVPIKDLAKSDKIRKYPIGIGPYKVKKIVPGEAVQLVKFDDYWQGKPALDKINLKVIDQAQIIKAMEKGDIDVTNDATGAMAKDAKSSNAGLKVLSAPSLDYGLIGFVSHDYDKKANKTGKVRPKYEDKELRKAMLYAIDREKWIKAFFNGYASEINSFVPSMHWIAADPKELNDYKYDPEKAKKILDKLGYKDRDGDGFREDPKGNKFEINFKHYSGSNPTFEPRTAAIKDFWEKVGLKTNVKLVEFGKYNEDLANASKDMEVYFRSWAGGTDPDPSDLYHTDRPQNEMRTVLPKSDQYLDDALDFDKVGIDEKKRKDIYVKWQKYMNDELPGLPMFQGKSITIVNDKVRNLDIEIGTDQSLYNLTKEA

SEQ ID NO: 70209 - protein, 379 aa, Staphylococcus aureus
AQKGNPVQRLIKLLGDIFIPILPAIVTAGLLMGINNLLTMKGLFGPKALIEMYPQIADISNIINVIASTAFIFLPALIGWSSMRVFGGSPILGIVLGLILMHPQLVSQYDLAKGNIPTWNLFGLEIKQLNYQGQVLPVLIAAYVLAKIEKGLNKVVHDSIKMLVVGPVALLVTGFLAFIIIGPVALLIGTGITSGVTFIFQHAGWLGGAIYGLLYAPLVITGLHHMFLAVDFQLMGSSLGGTYLWPIVAISNICQGSAAFGAWFVYKRRKMVKEEGLALTSCISGMLGVTEPAMFGVNLPLKYPFIAAISTSCVLGAIVGMNNVLGKVGVGGVPAFISIQKEFWPVYLIATAIAIAVPCLLTIVMSHFSKQKAKVIGED

SEQ ID NO: 70210 - protein, 260 aa, Staphylococcus aureus
MKMKRFIAIVMALFLVLAGCSNSNDNNESKKDDADNGKKQEIQVAAAASLTDVTKKLASEFKKEHKNADIKFNYGGSGALRKQIESGAPVDVFMSANTKDVDALKDKNKAHDTYKYAKNSLVLIGDKDSNYTSVKDLKDNDKLALGEVKTVPAGKYAKQYLDNNNLFKEVESKIVYAKDVKQVLNYVEKGNAKQGFVYKTDLYKQNKKIDTVKVIKEVELKKPITYEAGATSDSKLAKEWMEFLKSDKAKEILKEYHFAA

SEQ ID NO: 70211 - protein, 428 aa, Staphylococcus aureus
MLDIRLFRNEPDTVKSKIELRGDDPKVVDEILELDEQRRKLISATEEMKARRNKVSEEIALKKRNKENADDVIAEMRTLGDDIKEKDSQLNEIDNKMTGILCRIPNLISDDVPQGESDEDNVEVKKWGTPREFSFEPKAHWDIVEELKMADFDRAAKVSGARFVYLTNEGAQLERALMNYMITKHTTQHGYTEMMVPQLVNADTMYGTGQLPKFEEDLFKVEKEGLYTIPTAEVPLTNFYRNEIIQPGVLPEKFTGQSACFRSEAGSAGRDTRGLIRLHQFDKVEMVRFEQPEDSWNALEEMTTNAEAILEELGLPYRRVILCTGDIGFSASKTYDIEVWLPSYNDYKEISSCSNCTDFQARRANIRFKRDKAAKPELAHTLNGSGLAVGRTFAAIVENYQNEDGTVTIPEALVPFMGGKTQISKPVK

SEQ ID NO: 70212 - protein, 247 aa, Staphylococcus aureus
MLTVYGHRGLPSKAPENTIASFKAASEVEGINWLELDVAITKDEQLIIIHDDYLERTTNMSGEITELNYDEIKDASAGSWFGEKFKDEHLPTFDDVVKIANEYNMNLNVELKGITGPNGLALSKSMVKQVEEQLTNLNQNQEVLISSFNVVLVKLAEEIMPQYNRAVIFHTTSFREDWRTLLDYCNAKIVNTEDAKLTKAKVKMVKEAGYELNVWTVNKPARANQLANWGVDGIFTDNADKMVHLSQ

SEQ ID NO: 70213 - protein, 673 aa, Staphylococcus aureus
MAETTKIFESHLVKQALKDSVLKLYPVYMIKNPIMFVVEVGMLLALGLTIYPDLFHQESVSRLYVFSIFIILLLTLVFANFSEALAEGRGKAQANALRQTQTEMKARRIKQDGSYEMIDASDLKKGHIVRVATGEQIPNDGKVIKGLATVDESAITGESAPVIKESGGDFDNVIGGTSVASDWLEVEITSEPGHSFLDKMIGLVEGATRKKTPNEIALFTLLMTLTIIFLVVILTMYPLAKFLNFNLSIAMLIALAVCLIPTTIGGLLSAIGIAGMDRVTQFNILAKSGRSVETCGDVNVLILDKTGTITYGNRMADAFIPVKSSSFERLVKAAYESSIADDTPEGRSIVKLAYKQHIDLPQEVGEYIPFTAETRMSGVKFTTREVYKGAPNSMVKRVKEAGGHIPVDLDALVKGVSKKGGTPLVVLEDNEILGVIYLKDVIKDGLVERFRELREMGIETVMCTGDNELTAATIAKEAGVDRFVAECKPEDKINVIREEQAKGHIVAMTGDGTNDAPALAEANVGLAMNSGTMSAKEAANLIDLDSNPTKLMEVVLIGKQLLMTRGSLTTFSIANDIAKYFAILPAMFMAAMPAMNHLNIMHLHSPESAVLSALIFNALIIVLLIPIAMKGVKFKGASTQTILMKNMLVYGLGGMIVPFIGIKLIDLIIQLFV

SEQ ID NO: 70214 - protein, 256 aa, Staphylococcus aureus
MIKRVNKLVLGISFLFLIISIFAGCGTGKEAEIKKSFEKTLSMYPIKNLEDLYDKEGYRDDQFDKNDKGTWIVRSSMSIQSNGKDMNIKGMVLYMNRNTRTTNGYYYVDVIEREDKGIHRDNEKRYPVKMVDNKIIPTKEIKDEKIKKEIENFKFFVQYGDFKDLSKYKDGDISYNPEVPSYSAKYQLTNDDYNVKQLRKRYNIPTNKAPKLLLKGTGNLKGSSIGYKKIEFTFVEKKGENIYFSDGLHFNPSEDK

SEQ ID NO: 70215 - protein, 256 aa, Staphylococcus aureus
MMKRLNKLVLGISFLFLVISITAGCGMGKEAEIKKSFEKTMSMYPIKNLEDLYDKEGYRDDQFDKNDKGTWIVNSQMAIQNKGEPMKSKGMVLYMNRNTRTTNGYYYVNVIKGEDKGKHQDNEKRYPVKMVDNKIILTKEIKDENIKIEIENFKFFVQYGNFKDLENYKDGDISYNPEVPSYSAKYQLTNDDYNVKQLRKRYDIPTNKAPKLLLKGTGNLKGSSVGYKDIEFTFVEKKEENIYFSDGLIFKPSEDK

SEQ ID NO: 70216 - protein, 255 aa, Staphylococcus aureus
MKRLNKLVLYISFLILVISFTAGCGMGKEAEIKKSFEKTLSMYPIKNLEDLYDKEGYRDDQFDKNDKGTWIINSEMVVQPKGERMKSKGMVLYMNRNTKTTTGKYIVSETLHDEDGRPKSKDKEYPVKMVDNKIIPTKGIKDENIKKEIENFKFFAQYGSFKDLSKYKDGDISYNPEVPSYSAKYQLTNDDYNVKQLRKRYKIPTNKAPKLLLKGSGDLKGSSVGYKDIEFTFVEKKGENTFFTDSLHLEPSEDK

SEQ ID NO: 70217 - protein, 555 aa, Staphylococcus aureus
MEMSVTEVIFSFLGGLGIFLYGLKIMGDGLQASAGDRLRDILNKFTSNPVLGVIAGIVVTILIQSSSGTTVITIGLVTAGFMTLKQAIGVIMGANIGTTVTAFIIGIDLGEYAMPILALGAFLIFFFKRSKINNIGRILFGFGSLFFGLEFMGDAVKPLASLDGFKQLMLDMSSNPILAVIVGAGLTALVQSSSATIGILQEFYQQDLISLNAAIPVLLGDNIGTTITAILASLAGSIAAKRAALVHVIFNLIGVIIFTIFLPVVIHLISLLQDVWHLKPAMTIAVSHGIFNITNTLIQLPFVAGLAWIVTKLVPGKDIADDYKPQHLNKDLVYHAPGVALQETQKELQNVGQIVLSMFEDIREITKDDKKLIKKLEQKHQAVETINDSIRNYLVRISTKAITKADVERLAVMFDVNRSILKVAELTEEYVAQLKRQHDEDIRITEDAQRGMDKLFNHVAESFDKAIDMLDVYDKTKKDEIVERSRESFNIEHKLRKGHIKRLNRGECTTKGGLLYIDMIGVLERIGYHSRNVSEALVGLNDDVPTDEEIATTEI

SEQ ID NO: 70218 - protein, 290 aa, Staphylococcus aureus
MNKLRDTTFLSYLFTIILWGSAFPMIKIALNDFSAESLSAFRLILATIILLPFVIIKKLPTPELRDIPVIFILGFCGFVIYHTALNFGETLISAGISGILVSTTPIFSSALAYIFLKEHFSKWNWLSSLVAFIGISIISISKDDYTTINVLGVFIILLASFSESLYFTFQKKYIEKYGFIAFTLYTIMASSPFMLIFIPEIINDIHGATFTSIVSVLYLAIFPTIIPYVLLAYIVKSVGVSDATMSLYLTPIVSLLLSYLLLDELPTTLAIIGGIITLLGVSLSNFFQNT

SEQ ID NO: 70219 - protein, 442 aa, Staphylococcus aureus
MKIPPQRQLAIQYNVNRVTIIKSIELLEAEGFIYTKVGSGTYVNDYLNEAHITNKWSEMMLWSSQQRSQYTVQLINKIETDDSYIHISKGELGISLMPHIQLKKAMSNTASHIEDLSFGYNNGYGYIKLRDIIVERMSKQGINVGRENVMITSGALHAIQLLSIGFLGQDAIIISNTPSYIHSTNVFEQLNFRHIDVPYNQINEINTIIDRFINFKNKAIYIEPRFNNPTGRSLTNEQKKNIITYSERHNIPIIEDDIFRDIFFSDPTPAIKTYDKLGKVIHISSFSKTIAPAIRIGWIVASEKIIEQLADVRMQIDYGSSILSQMVVYEMLKNKSYDKHLVKLRYVLKDKRDFMLNILNNLFKDIAHWEVPSGGYFVWLVFKIDIDIKYLFYELLSKEKILINPGYIYGSKEKSIRLSFAFESNENIKHALYKIYTYVKKV

SEQ ID NO: 70220 - protein, 418 aa, Staphylococcus aureus
MINQSIWRSNFRILWLSQFIAIAGLTVLVPLLPIYMASLQNLSVVEIQLWSGIAIAAPAVTTMIASPIWGKLGDKISRKWMVLRALLGLAVCLFLMALCTTPLQFVLVRLLQGLFGGVVDASSAFASAEAPAEDRGKVLGRLQSSVSAGSLVGPLIGGVTASILGFSALLMSIAVITFIVCIFGALKLIETTHMPKSQTPNINKGIRRSFQCLLCTQQTCRFIIVGVLANFAMYGMLTALSPLASSVNHTAIDDRSVIGFLQSAFWTASILSAPLWGRFNDKSYVKSVYIFATIACGCSAILQGLATNIEFLMAARILQGLTYSALIQSVMFVVVNACHQQLKGTFVGTTNSMLVVGQIIGSLSGAAITSYTTPATTFIVMGVVFAVSSLFLICSTITNQINDHTLMKLWELKQKSAK

SEQ ID NO: 70221 - protein, 476 aa, Staphylococcus aureus
MKSDSLKENIIYQGLYQLIRTMTPLITIPIISRAFGPSGVGIVSFSFNIVQYFLMIASVGVQLYFNRVIAKSVNDKRQLSQQFWDIFVSKLFLALTVFAMYMVVITIFIDDYYLIFLLQGIYIIGAALDISWFYAGTEKFKIPSLSNIVASGIVLSVVVIFVKDQSDLSLYVFTIAIVTVLNQLPLFIYLKRYISFVSVNWIHVWQLFRSSLAYLLPNGQLNLYTSISCVVLGLVGTYQQVGIFSNAFNILTVAIIMINTFDLVMIPRITKMSIQQSHSLTKTLANNMNIQLILTIPMVFGLIAIMPSFYLWFFGEEFASTVPLMTILAILVLIIPLNMLISRQYLLIVNKIRLYNASITIGAVMNLVLCLVLIYFYGIYGAAIARLITEFILLIWRFVDITKINVKLNIVSTIQCVIAAVMMFIVLGVVNHYLPPTMYATLLLIAIGIVVYLLLMMTMKNQYVWQILRHLRHKTI

SEQ ID NO: 70222 - protein, 401 aa, Staphylococcus aureus
MVKKVFIMDSVKTIIGTLLIALGLQFLAYPIINQRVGNEAFGSILTIYTIITITSVVLGNTLNNIRLINMNLYKSNHYYWKFVSILLISILIESIALIIVFLYFFNLNTIDIIFLILLNILMCLRIYLNVFFRMTLKYNQILYIALIQFLGLLIGLFLYYLIQNWIVCFITSELFATIYTLVKLRGLTIGEYQSEDNNVVKDYVMLLSTNSLNNLNLYLDRLILLPIIGGTAVTISFLSTFIGKMLATFLYPINNVVLSYISVNESDNIKKQYLKTNLFAIAALCLVMIICYPITLIIVSLLYNIDSSLYSKFIILGNIGVLFNAVSIMIQTLNTKHASITLQANYMTLHTITFIFITILMTIAFGLNGFFWTTLFSNIIKYVILNIIGLKSKFINKKDVD

SEQ ID NO: 70223 - protein, 495 aa, Staphylococcus aureus
MAVNVRDYIAENYGLFINGEFVKGSSDETIEVTNPATGETLSHITRAKDKDVDHAVKVAQEAFESWSLTSKSERAQMLRDIGDKLMAQKDKIAMIETLNNGKPIRETTAIDIPFAARHFHYFASVIETEEGTVNDIDKDTMSIVRHEPIGVVGAVVAWNFPMLLAAWKIAPAIAAGNTIVIQPSSSTPLSLLEVAKIFQEVLPKGVVNILTGKGSESGNAIFNHDGVDKLSFTGSTDVGYQVAEAAAKHLVPATLELGGKSANIILDDANLDLAVEGIQLGILFNQGEVCSAGSRLLVHEKIYDQLVPRLQEAFSNIKVGDPQDEATQMGSQTGKDQLDKIQSYIDAAKESDAQILAGGHRLTENGLDKGFFFEPTLIAVPDNHHKLAQEEIFGPVLTVIKVKDDQEAIDIANDSEYGLAGGVFSQNITRALNIAKAVRTGRIWINTYNQVPEGAPFGGYKKSGIGRETYKGALSNYQQVKNIYIDTSNALKGLY

SEQ ID NO: 70224 - protein, 416 aa, Staphylococcus aureus
MKRLSTTLKVRLISNFLQLIITTAFIPFIALYLTDMLSQSIVGIYLVGLVVLKFPLSIISGYLIEIFPKKLLVLIYQATMVIMLVFMGVFGSHQLWQIIGFCVAYAIFTIVWGLQFPVMDTLIMDAITEDVEHYIYKISYWMTNLSVAIGALLGGLMYGYSMLLLFLIAACIFLIVLFILYIWLPQDRNQVKQSDDKRHASRYQKLQIMNIFRSYKLVLKDRNYMLLISGFSIIMMGEFSISSYIAIRLKDQFETISIGSYDITGAKMLAILLMINTVVVILLTYSISKVVLKIDFKKALITGLLIYIVGYSGLTYLNQFGLLVVFMIIATVGEIIYSPIVSEQRFKIIPKAKRGTYSAVNALGIHFSETLARLGIVLGVFLTSLQMGLYMFIVLTIGASMLVAGVFGGQKQVNTN

SEQ ID NO: 70225 - protein, 370 aa, Staphylococcus aureus
MRRKRKWLIVICVLLVLITISQILKHFNYGTESKEAYNTYTVEKERQLDLQGKAYPREVKTYYKNNQVGTYLGVQVADGQTVKKGDMLINYKINSNKRQQLVDKINDTQHIITEVYLNITKGLNNREIQKKLIEYKQTLYEAQQQLYQYDSQNRDSMYASFDGKIMIKNIDNDSDNQPILYLISKESHIKTSVTEFDLNKVKKGDKVNLSITSTGKTGAGIIKQISELPISYEENLSLHENDALHLPESNNDGELANSKSISASPIFKSNNNSELSKYGVIIDDLSLPIRAGYSLEIKVPLNAIKIPKSVLTKGNNVFIVNKNSIVEKRNIRIKRINGDIIVEKGLKPGDKLIKQPKSTMNDGDKVEISS

SEQ ID NO: 70226 - protein, 387 aa, Staphylococcus aureus
MVKLTTKIASLKLFASYAIATYILVMLTSALNLFKGYVADTFYIAETLLIILTIILIIILTTEQTWKHHDLWRRIVEVLLLLMALTGNVFTLLMFVSIRRYQRTSQIHSYNGWESFIRKTTRHRIAIIGLLILVYMLTLSIVSQFTFDTTLATKNQFNALLHGPSLAYPFGTDDFGRDLFTRVVVGTKLTFSISIISVVIAVIFGVLLGTIAGYFNHIDNLIMRILDVVFAIPSLLLAVAIIASFGASIPNLIIALSIGNIPSFARTMRASVLEIKRMEYVDAARITGENTWNIIWRYILPNAIAPMIVRFSLNIGVVVLTTSSLSFLGLGVAPDVAEWGNILRTGSNYLETHSNLAIVPGVCIMFVVLAFNFIGDAVRDALDPRIH

SEQ ID NO: 70227 - protein, 192 aa, Staphylococcus aureus
MTKRPKRILATIIIFLSLLFTIIYIDDIQKWFNQYTDKLTQNHKGQGHSKWEDFFRGSRITETFGKYQHSPFDGKHYGIDFALPKGTPIKAPTNGKVTRIFNNELGGKVLQIAEDNGEYHQWYLHLDKYNVKVGDRVKAGDIIAYSGNTGKQTTGAHLHFQRMKGGVGNAYAEDPKPFIEQLPDGERSLYDL

SEQ ID NO: 70228 - protein, 423 aa, Staphylococcus aureus
MSKILKCITLAVVMLLIVTACGPNRSKEDIDKALNKDNSKDKPNQLTMWVDGDKQMAFYKKITDQYTKKTGIKVKLVNIGQNDQLENISLDAPAGKGPDIFFLAHDNTGSAYLQGLAAEIKLSKDELKGFNKQALKAMNYDNKQLALPAIVETTALFYNKKLVKNAPQTLEEVEANAAKLTDSKKKQYGMLFDAKNFYFNYPFLFGNDDYIFKKNGSEYDIHQLGLNSKHVVKNAERLQKWYDKGYLPKAATHDVMIGLFKEGKVGQFVTGPWNINEYQETFGKDLGVTTLPTDGGKPMKPFLGVRGWYLSEYSKHKYWAKDLMLYITSKDTLQKYTDEMSEITGRVDVKSSNPNLKVFEKQARHAEPMPNIPEMRQVWEPMGNASIFISNGKNPKQALDEATNDITQNIKILHPSQNDKKGD

SEQ ID NO: 70229 - protein, 251 aa, Staphylococcus aureus
MLKGHLHSVESLGTVDGPGLRYILFTQGCLLRCLYCHNPDTWKISEPSREVTVDEMVNEILPYKPYFDASGGGVTVSGGEPLLQMPFLEKLFAELKENGVHTCLDTSAGCANDTKAFQRHFEELQKHTDLILLDIKHIDNDKHIRLTGKPNTHILNFARKLSDMKQPVWIRHVLVPGYSDDKDDLIKLGEFINSLDNVEKFEILPYHQLGVHKWKTLGIAYELEDVEAPDDEAVKAAYRYVNFKGKIPVEL

SEQ ID NO: 70230 - protein, 509 aa, Staphylococcus aureus
MKSLFEKAQQFGKSFMLPIAILPAAGLLLGIGGALSNPNTVKAYPILDITLLQNIFTLMSAAGSIVFQNLPVIFAIGVAIGLSRSDKGTAGLAALLGFLIMNATMNGLLTITGTLAKDQLAQNGQGMVLGIQTVETGVFGGIITGIMTAILHNKYHKVVLPPYLGFFGGSRFVPIVTAFAAIFLGVLMFFIWPSIQAGIYHVGGFVTKTGAIGTFVYGFILRLLGPLGLHHIFYLPFWQTALGGTLEVKGHLVQGTQNIFFAQLGDPDVTKYYSGVSRFMSGRFITMMFGLCGAALAIYHTAKPEHKKVVGGLMLSAALTSFLTGITEPLEFSFLFVAPILYVIHAFFDGLAFMMADIFNITIGQTFSGGFIDFLLFGVLQGNSKTNYLYVIPIGIVWFCLYYIVFRFLITKFNFKTPGREDKAAAQQVEATERAQTIVAGLGGKDNIEIVDCCATRLRVTLNQNDKVDKVLLESTGAKGVIQQGTGVQVIYGPHVTVIKNEIEELLGD

SEQ ID NO: 70231 - protein, 311 aa, Staphylococcus aureus
MKRKIIMDCDPGHDDAIALILAGAIDSPLEILAVTTVAGNQSVDKNTTNALNVLDIMGRQDIAVAKGADRPLIKPAAFASEIHGESGLDGPKLPSTPSRQAVAMPASDVIINKVMTSDTPVTIVATGPLTNVATALIREPRIAEHIESITLMGGGTFGNWTPTAEFNIWVDAEAAKRVFESGITINVFGLDVTHQVLADNHVIERFESINNPVAQFVVELLQFFKKTYKTHFNMDGGPIHDACTILYLLQPELFTMVPVNIDIEHQSPLTYGTMAVDLNHVTGKPANAYFATAVDVEEVWNLIDHKLRTYE

SEQ ID NO: 70232 - protein, 419 aa, Staphylococcus aureus
MSYFTDFVRGFLDLGATVILPVVIFLLGLFFRQKIGAAFRSGLTIGVAFVGIFLVIDLLVKNLGPAAQAMVKNLGVSLNVIDVGWPATSSIAWASSVAAFIIPLGIIVNVVLLVTKVTKTMNVDIWNFWHYTFTAAMVYAVSGSIWQALLAAVIFQVICLKVADWTAPMMSEFFDLPGVSIATGSTISYAPGIYLVKLLQKVPGLNKLDADPETIQKRFGAFGESIFVGLILGLGIGVLAGYKPGDIINLGMSMAAVMVLMPRMVKILMEGLMPVSESARTWLNKRFGEREIYIGLDAAVALGHPAVISTALILVPITVLLAVILPGNQVLPFGDLATIPFVVAFIVGAARGNIIHSVIVGTIMIAISLYIATDVAPIFTDMAKGTNVQMPKGSSEISSIDQGGNIVNYLIFKLFSLFN

SEQ ID NO: 70233 - protein, 134 aa, Staphylococcus aureus
MKKSAVLNEHISKAIATIGHFDLLTINDAGMPIPNDHRRIDLAVTKNLPRFIDVLATVLEEMEIQKIYLAEEIKEHNPTQLQQIKQLISSEIEIIFIPHEEMKSNLAHPLNKGNIRTGETTPYSNIALESNVTF

SEQ ID NO: 70234 - protein, 129 aa, Staphylococcus aureus
MAFTLSAIQQAHQQFTGVDFPKLFKAFKDMGMTYNIVNIQDGTATYVHQSEDDIVTSSVKSNHPVAQKSNKTIVQDVLTRHQQGQTDFETFCDEMAEAGIYKWHIDIQAGTCTYIDLKEQAIISELIPQ

SEQ ID NO: 70235 - protein, 98 aa, Staphylococcus aureus
MRTYEVMYIVRPNIEEDAKKALVERFNGILATEGAEVLEAKDWGKRRLAYEINDFKDGFYNIVRVKSDNNKATDEFQRLAKISDDIIRYMVIREDEDK

SEQ ID NO: 70236 - protein, 83 aa, Staphylococcus aureus
MFGFIGMLIVGGLIGWAAGAIMGKDIPGGILGNIIAGIIGSWVGGKLFGQWGPELGSIYILPALIGSIILIAIVTLILRAMRK

SEQ ID NO: 70237 - protein, 675 aa, Staphylococcus aureus
MTQKQKKFLHYSWITLLCVGVILLLLGTLGNAVQATGLVDETIDTSNEYSKYGLNQYQLDYYVDNSWGWLPWNWSDGIGQSVMYGLYAITNFIWTISLYLSNATGYLVKEAYALDFISQTSQAIGENMQTIAGITPNGFSSSGFYVGFLLLFILIVGIYVAYTGLVKRETTKVIRAVLNFVVVFILSASFIAYAPDYIAKINDFSKDVSTASLNIGTKIVLPNTDSQGKDSVDMIRDSLFSVQVKQPWLLLQYGSTDVEALGEERVESLLSTSPDTNNGEDRENVVIEEIEDHDNTYLTLPKTISRLGTVFFLFVFNIGISIFVFLLTGIMIFSQVLFIIFAMFLPISFLLSMLPSFDGMGRHAITKLFNVIMTRAGITLIITVAFSISTMLYSLSASSPFFMIMFLQIVTFAGIYFKLGDLMSLFTLQSNDSQNMGRQVFRRPRQMMNRQTRRFQRSMSKIFRGKAGSTKQKTMTTKQNQTNKANHTRQNERTTPKKETALSNVKKQQGGIGQRLGEKTAHVLDTKNRLVNKRKQAKQQIQATPTHVKYALHQGKENVTHNVTDFKQSMADTKAQRKQQRMNQQEQKRKNIAQKRLELDKAKEKRRKENPSSPVQNNQQHVRKRQQTVTPVLSQNTKRENHQRPLKKEQKQKTPPKQFNQRKLNKRTDKRGQQT

SEQ ID NO: 70238 - protein, 231 aa, Staphylococcus aureus
MKMKNIAKISLLLGILATGVNTTTEKPVHAEKKPIVISENSKKLKAYYTQPSIEYKNVTGYISFIQPSIKFMNIIDGNSVNNLALIGKDKQHYHTGVHRNLNIFYVNEDKRFEGAKYSIGGITSANDKAVDLIAEARVIKADHIGEYDYDFFPFKIVKEAMSLKEIDFKLRKYLIDNYGLYGEMSTGKITVKKKYYGKYTFELDKKLQEDRMSDVINVTDIDRIEIKVRKA

SEQ ID NO: 70239 - protein, 234 aa, Staphylococcus aureus
MKMAAIAKASLALGILATGTITSLHQTVNASEHEAKYENVTKDIFDLRDYYSGASKELKNVTGYRYSKGGKHYLIFDKNRKFTRVQIFGKDIERFKARKNPGLDIFVVKEAENRNGTVFSYGGVTKKNQDAYYDYINAPRFQIKRDEGDGIATYGRVHYIYKEEISLKELDFKLRQYLIQNFDLYKKFPKDSKIKVIMKDGGYYTFELNKKLQTNRMSDVIDGRNIEKIEANIR

SEQ ID NO: 70240 - protein, 231 aa, Staphylococcus aureus
MKLKTLAKATLALGLLTTGVITSEGQAVHAKEKQERVQHLYDIKDLYRYYSSESFEFSNISGKVENYNGSNVVRFNQEKQNHQLFLLGKDKDKYKKGLEGQNVFVVKELIDPNGRLSTVGGVTKKNNKSSETNTHLFVNKVYGGNLDASIDSFLINKEEVSLKELDFKIRKQLVEKYGLYKGTTKYGKITINLKDEKKEVIDLGDKLQFERMGDVLNSKDIQNIAVTINQI

SEQ ID NO: 70241 - protein, 232 aa, Staphylococcus aureus
MKFTAIAKAIFVLGILTTSVMITENQSVNAKGKYEKMNRLYDTNKLHQYYSGPSYELTNVSGQSQGYYDSNVLLFNQQNQKFQVFLLGKDENKYKEKTHGLDVFAVPELVDLDGRIFSVSGVTKKNVKSIFESLRTPNLLVKKIDDKDGFSIDEFFFIQKEEVSLKELDFKIRKLLIKKYKLYEGSADKGRIVINMKDENKYEIDLSDKLDFERMADVINSEQIKNIEVNLK

SEQ ID NO: 70242 - protein, 232 aa, Staphylococcus aureus
MKLTALAKATLALGILTTGVFTAESKAVHAKVELDETQRKYYINMLHQYYSEESFESTNISVKSEDYYGSNVLNFNQRNKTFKVFLLGDDKNKYKEKTHGLDVFAVPELIDIKGGIYSVGGITKKNVRSVFGFVSNPSLQVKKVDAKHGFSINELFFIQKEEVSLKELDFKIRKMLVEKYRLYKGASDKGRIVINMKDEKKYVIDLSEKLSFDRMFDVMDSKQIKNIEVNLN

SEQ ID NO: 70243 - protein, 227 aa, Staphylococcus aureus
MKFTALAKATLALGILTTGTLTTEVHSGHAKQNQKSVNKHDKEALYRYYTGKTMEMKNISALKHGKNNLRFKFRGIKIQVLLPGNDKSKFQQRSYEGLDVFFVQEKRDKHDIFYTVGGVIQNNKTSGVVSAPILNISKEKGEDAFVKGYPYYIKKEKITLKELDYKLRKHLIEKYGLYKTISKDGRVKISLKDGSFYNLDLRSKLKFKYMGEVIESKQIKDIEVNLK

SEQ ID NO: 70244 - protein, 227 aa, Staphylococcus aureus
MKLKNIAKASLALGILTTGMITTTAQPVKASTLEVRSQATQDLSEYYKGRGFELTNVTGYKYGNKVTFIDNSQQIDVTLTGNEKLTVKDDDEVSNVDVFVVREGSDKSAITTSIGGITKTNGTQHKDTVQNVNLSVSKSTGQHTTSVTSEYYSIYKEEISLKELDFKLRKHLIDKHDLYKTEPKDSKIRITMKNGGYYTFELNKKLQPHRMGDTIDSRNIEKIEVNL

SEQ ID NO: 70245 - protein, 400 aa, Staphylococcus aureus
MAKIPVTVLSGYLGSGKTTLLNHILQNREGRRIAVIVNDMSEVNIDKDLVADGGGLSRTDEKLVELSNGCICCTLRDDLLKEVERLVKKGGIDQIVIESTGISEPVPVAQTFSYIDDELGIDLTAICRLDTMVTVVDANRFVHDINSEDLLMDRDQSVDETDERSIADLLIDQVEFCDVLIINKIDLISEEELAKLEKVLSALQPIAKIIKTTNSEVDLKEVLNTQRFDFEKASESAGWIKELESGGHASHTPETEEYGISSFVYKRRLPFHAKRFNDWLESMSNNVVRSKGIVWLAQYNHVACLLSQAGSSCNIHPVTYWVASMSEAQQTQILAERQDVAAEWDPEYGDRHTQFVIIGTELDEEKLTKELDACLVNAQEIDADWQQFEDPYQWQIRPAR

SEQ ID NO: 70246 - protein, 308 aa, Staphylococcus aureus
MDEQQQLTNAYHSNKLSHAYLFEGDDAQTMKQVAINFAKLILCQTDSQCETKVSTYNHPDFMYISTTENAIKKEQVEQLVRHMNQLPIESTNKVYIIEDFEKLTVQGENSILKFLEEPPDNTIAILLSTKPEQILDTIHSRCQHVYFKPIDKEKFINRLVEQNMSKPVAEMISTYTTQIDNAIALNEEFDLLALRKSVIRWCELLLTNKPMALIGIIDLLKQAKNKKLQSLTIAAVNGFFEDIIHTKVNVEDKQIYSDLKNDIDQYAQKLSFNQLILMFDQLTEAHKKLNQNVNPTLVFEQIVIKGVS

SEQ ID NO: 70247 - protein, 321 aa, Staphylococcus aureus
MLNNEYKNSSLKIFSLKGNEALAQEVADQVGIELGKCSVKRFSDGEIQINIEESIRGCDVFIIQPTSYPVNLHLMELLIMIDACKRASAATINIVVPYYGYARQDRKARSREPITAKLVANLIETAGATRMIALDLHAPQIQGFFDIPIDHLMGVPILAKHFKDDPNINPEECVVVSPDHGGVTRARKLADILKTPIAIIDKRRPRPNVAEVMNIVGEIEGRTAIIIDDIIDTAGTITLAAQALKDKGAKEVYACCTHPVLSGPAKERIENSAIKELIVTNSIHLDEDRKPSNTKELSVAGLIAQAIIRVYERESVSVLFD

SEQ ID NO: 70248 - protein, 217 aa, Staphylococcus aureus
MASLKSIIRQGKQTRSDLKQLRKSGKVPAVVYGYGTKNVSVKVDEVEFIKVIREVGRNGVIELGVGSKTIKVMVADYQFDPLKNQITHIDFLAINMSEERTVEVPVQLVGEAVGAKEGGVVEQPLFNLEVTATPDNIPEAIEVDITELNINDSLTVADVKVTGDFKIENDSAESVVTVVAPTEEPTEEEIEAMEGEQQTEEPEVVGESKEDEEKTEE

SEQ ID NO: 70249 - protein, 158 aa, Staphylococcus aureus
MIQAYLGLGSNIGDRESQLNDAIKILNEYDGISVSNISPIYETAPVGYTEQPNFLNLCVEIQTTLTVLQLLECCLKTEECLHRIRKERWGPRTLDVDILLYGEEMIDLPKLSVPHPRMNERAFVLIPLNDIAANVVEPRSKLKVKDLVFVDDSVKRYK

SEQ ID NO: 70250 - protein, 358 aa, Staphylococcus aureus
MSQAVKVERRETLKQKPNTSQLGFGKYFTDYMLSYDYDADKGWHDLKIVPYGPIEISPAAQGVHYGQSVFEGLKAYKRDGEVALFRPEENFKRLNNSLARLEMPQVDEAELLEGLKQLVDIERDWIPEGEGQSLYIRPFVFATEGALGVGASHQYKLLIILSPSGAYYGGETLKPTKIYVEDEYVRAVRGGVGFAKVAGNYAASLLAQTNANKLGYDQVLWLDGVEQKYIEEVGSMNIFFVENGKVITPELNGSILPGITRKSIIELAKNLGYEVEERRVSIDELFESYDKGELTEVFGSGTAAVISPVGTLRYEDREIVINNNETGEITQKLYDVYTGIQNGTLEDKNGWRVVVPKY

SEQ ID NO: 70251 - protein, 1141 aa, Staphylococcus aureus
MINRDNKKAITKKGMISNRLNKFSIRKYTVGTASILVGTTLIFGLGNQEAKAAENTSTENAKQDDATTSDNKEVVSETENNSTTENDSTNPIKKETNTDSQPEAKEESTTSSTQQQQNNVTATTETKPQNIEKENVKPSTDKTATEDTSVILEEKKAPNYTNNDVTTKPSTSEIQTKPTTPQESTNIENSQPQPTPSKVDNQVTDATNPKEPVNVSKEELKNNPEKLKELVRNDNNTDRSTKPVATAPTSVAPKRLNAKMRFAVAQPAAVASNNVNDLITVTKQTIKVGDGKDNVAAAHDGKDIEYDTEFTIDNKVKKGDTMTINYDKNVIPSDLTDKNDPIDITDPSGEVIAKGTFDKATKQITYTFTDYVDKYEDIKARLTLYSYIDKQAVPNETSLNLTFATAGKETSQNVSVDYQDPMVHGDSNIQSIFTKLDENKQTIEQQIYVNPLKKTATNTKVDIAGSQVDDYGNIKLGNGSTIIDQNTEIKVYKVNPNQQLPQSNRIYDFSQYEDVTSQFDNKKSFSNNVATLDFGDINSAYIIKVVSKYTPTSDGELDIAQGTSMRTTDKYGYYNYAGYSNFIVTSNDTGGGDGTVKPEEKLYKIGDYVWEDVDKDGVQGTDSKEKPMANVLVTLTYPDGTTKSVRTDANGHYEFGGLKDGETYTVKFETPAGYLPTKVNGTTDGEKDSNGSSITVKINGKDDMSLDTGFYKEPKYNLGDYVWEDTNKDGIQDANEPGIKDVKVTLKDSTGKVIGTTTTDASGKYKFTDLDNGNYTVEFETPAGYTPTVKNTTAEDKDSNGLTTTGVIKDADNMTLDSGFYKTPKYSLGDYVWYDSNKDGKQDSTEKGIKDVKVTLLNEKGEVIGTTKTDENGKYRFDNLDSGKYKVIFEKPAGLTQTVTNTTEDDKDADGGEVDVTITDHDDFILDNGYFEEDTSDSDSDSDSDSDSDSDSDSDSDSDSDSDSDSDSDSDSDSDSDSDSDSDSDSDSDSDSDSDSDSDSDSDSDSDSDSDSDSDSDSDSDSDSDSDSDSDSDSDSDSDSDSDSDSDSDSDSDSDSDSDSDSDSDSDSDSDSDSDSDSDSDAGKHTPVKPMSTTKDHHNKAKALPETGSENNGSNNATLFGGLFAALGSLLLFGRRKKQNK

SEQ ID NO: 70252 - protein, 252 aa, Staphylococcus aureus
MKVLNLGSKKQASFYVACELYKEMAFNQHCKLGLATGGTMTDLYEQLVKLLNKNQLNVDNVSTFNLDEYVGLTASHPQSYHYYMDDMLFKQYPYFNRKNIHIPNGDADDMNAEASKYNDVLEQQGQRDIQILGIGENGHIGFNEPGTPFDSVTHIVDLTESTIKANSRYFKNEDDVPKQAISMGLANILQAKRIILLAFGEKKRAAITHLLNQEISVDVPATLLHKHPNVEIYLDDEACPKNVAKIHVDEMD

SEQ ID NO: 70253 - protein, 206 aa, Staphylococcus aureus
MLCESKIINKNPKYRIIKYNDEYLMIDIISTWISLFFPFINWFIPKRYVKISREEFENLNIVKPAKKNVFWPVASISTLFAVTLRKYTLLLDTQLDKKLVIAICCTTFIGILIFYVRLIKKSSLNIYNTKNKRSKIILIPTLKNFCFTLFGYVFLIFWTVIFSYALLSMSYQNIIVYFAWITAIIGFFLVNIALIIDKNIHVILKN

SEQ ID NO: 70254 - protein, 295 aa, Staphylococcus aureus
MKKSLIAFILIFMLVLSGCGMKDNDKQGSDDNGSSKSPYHRIVSLMPSNTEILYELGLGKYIVGVSTVDDYPKDVKEGKKQFDALNLNKEELLKAKPDLILAHESQKATANKVLSSLEKQGIKVVYVKDAQSIDETYNTFKQIGKLTHHDKQAEQLVEETKDNIDKVIDSIPAHHKKSKVFIEVSSKPEIYTAGKHTFFNDMLEKLEAQNVYSDINGWNPVTKESIIKKNPDILISTEAKTRSDYMDIIKKRGGFNKINAVKNTRIEVVNGDEVSRPGPRIDEGLKELRDAIYRK

SEQ ID NO: 70255 - protein, 262 aa, Staphylococcus aureus
MNKVTINPQIQLTYQIEGKGDPIILLHGLDGNLAGFEDLQHQLASSYKVLTYDLRGHGKSSKSESYDLNDHVEDLKILMEKLNIHEAHILGHDLGGVVAKLFTDKYAYRVKSLTTIASKKDDLIHSFTQLLIQYQDDIAGFNKSEAYILLFSKLFRNQEKTMKWYQKQRIYSIKSEDDSAVAIRSLILHKDEPMYLKKRTCVPTLLINGEHDPLIKDKNHFKLEAHFLNVTKKIFEHSGHAPHIEEPEAFMNYYLNFLKSVS

SEQ ID NO: 70256 - protein, 680 aa, Staphylococcus aureus
MEIFETILIFIAVVILSSFVHTFIPKVPLAFIQIFLGMLLFITPIPVQFNFDSELFMVTMIAPLLFVEGVNVSRVHLRKYIKPVMMMALGLVITTVIGVGLFIHWIWPDLPIGAAFAIAAILCPTDAVAVQAITKGKVLPKGAMTILEGESLLNDAAGIISFKIAVGVLVTGAFSLVDAVQLFLIASIGGAVVGLLIGMALVRFRLTLMRRGYENINMFTIIQLLTPFVTYLIAELFHASGIIAAVVAGLVHGFERDRIMQVRTQLQMSYNHTWNILGYVLNGFVFSILGFLVPEVIIKIIKTEPHNLIFLIGITIVVALAVYLFRFVWVYVLYPYFYLAISPFQKMMTKNDDDNPTTEKPPKRSLYALIMTLCGVHGTISLAIALTLPYFLAGHHAFTYRNDLLFIASGMVIISLVVAQVLLPLLTKPAPKTVIGNMSFKVARIYILEQVIDYLNQKSTFETSFKYGNVIKEYHDKLAFLKTVEKDDENSKELERLQKIAFNVETKTLESLVDEGQITNSVLENYMRYAERTQVYRQASLIRRMIVLLRGALLKRRVQTRVNSASSLSVTDNLMELNKINKLVHYNVVSRLSKETTKDNTLEIGMVCDGYLMRIENLTPSNFFNSASEDTITKIKLNALREQRRILRELIDTDEVSEGTALKLREAINYDEMVIVDSMT

SEQ ID NO: 70257 - protein, 254 aa, Staphylococcus aureus
MTVEERSNTAKVDILGVDFDNTTMLQMVENIKTFFANQSTNNLFIVTANPEIVNYATTHQAYLELINQASYIVADGTGVVKASHRLKQPLAHRIPGIELMDECLKIAHVNHQKVFLLGATNEVVEAAQYALQQRYPNISFAHHHGYIDLEDETVVKRIKLFKPDYIFVGMGFPKQEEWIMTHENQFESTVMMGVGGSLEVFAGAKKRAPYIFRKLNIEWIYRALIDWKRIGRLKSIPIFMYKIAKAKRKIKKAK

SEQ ID NO: 70258 - protein, 265 aa, Staphylococcus aureus
MNRLHGQQVKIGYGDNTIINKLDVEIPDGKVTSIIGPNGCGKSTLLKALSRLLAVKEGEVFLDGENIHTQSTKEIAKKIAILPQSPEVADGLTVGELVSYGRFPHQKGFGRLTAEDKKEIDWAMEVTGTDTFRHRSINDLSGGQRQRVWIAMALAQRTDIIFLDEPTTYLDICHQLEILELVQKLNQEQGCTIVMVLHDINQAIRFSDHLIAMKEGDIIATGSTEDVLTQEILEKVFNIDVVLSKDPKTGKPLLVTYDLCRRAYS

SEQ ID NO: 70259 - protein, 335 aa, Staphylococcus aureus
MSYIIIVTIAVVIFSLIFDFINGFHDTANAVATAVSTRALTPKTAILMAAVMNFIGALTFTGVAGTITKDIVDPFKLENGLVVVLAAILAAIIWNLATWFYGIPSSSSHALIGSIAGAAIASEGSFGVLHYQGFTKIIIVLIVSPIIAFCVGFLMYSIFKVIFKNANLTRANRNFRFFQIFTAALQSFSHGTNDAQKSMGIITLALIVANVQNDGSVEPQLWVKFACATAMGLGTAIGGWKIIKTVGGNIMKIRPANGAAADLSSALTIFVASSLHFPLSTTHVVSSSILGVGASNRAKGVKWSTAQRMIITWVITLLISALLAGLLFYILNLFF

SEQ ID NO: 70260 - protein, 146 aa, Staphylococcus aureus
MLIVDALTNNVNRTASDVRAAFGKNGGNMGVSGSVAYMFDHVATFGIEGKSVDEILETLMEQDVDVNDVIDDNGLTIVYAEPDQFAVVQDALRAAGVEEFKVAEFEMLPQTDIELSEADQVTFEKLIDALEDLEDVQNVFHNVDLK

SEQ ID NO: 70261 - protein, 404 aa, Staphylococcus aureus
MFAALLQIKNYKLFVANMFLLGMGIAVTVPYLVLFATKDLGMTTNQYGLLLASAAISQFTVNSIIARFSDTHHFNRKIIIILALLMGALGFSIYFFVDTIWLFILLYAIFQGLFAPAMPQLYASARESINVSSSKDRAQFANTVLRSMFSLGFLFGPFIGAQLIGLKGYAGLFGGTISIILFTLVLQVFFYKDLNIKHPISTQQHVEKIAPNMFKDKTLLLPFIAFILLHIGQWMYTMNMPLFVTDYLKENEQHVGYLASLCAGLEVPFMIILGVLSSRLHTRTLLIYGAIFGGLFYFSIGVFKNFYMMLAGQVFLAIFLAVLLGIGISYFQDILPDFPGYASTLFSNAMVIGQLGGNLLGGAMSHWVGLENVFFVSAASIMLGMILIFFTKNQKITKEDMIST

SEQ ID NO: 70262 - protein, 449 aa, Staphylococcus aureus
METSTIISLIIFILLIALTTVFVGSEFALVKIRATRIEQLADEGNKPAKIVKKMIANLDYYLSACQLGITVTSLGLGWLGEPTFEKLLHPIFEAINLPTALTTTISFAVSFIIVTYLHVVLGELAPKSIAIQHTEKLALVYARPLFYFGNIMKPLIWLMNGSARVIIRMFGVNPDAQTDAMSEEEIKIIINNSYNGGEINQTELAYMQNIFSFDERHAKDIMVPRTQMITLNEPFNVDELLETIKEHQFTRYPITDDGDKDHIKGFINVKEFLTEYASGKTIKIANYIHELPMISETTRISDALIRMQREHVHMSLIIDEYGGTAGILTMEDILEEIVGEIRDEFDDDEVNDIVKIDNKTFQVNGRVLLDDLTEEFGIEFDDSEDIDTIGGWLQSRNTNLQKDDYVDTTYDRWVVSEIDNHQIIWVILNYEFNEARPTIGQSDEDEKSE

SEQ ID NO: 70263 - protein, 139 aa, Staphylococcus aureus
MLQQIYPSTTHPYQFELNKDFNFSAAHHIPCEEAGICQNVHGHTYFVNLTIVGDKLDDTGFLVNFSHLKKMIHGKFDHQLLNNLPAFKNKIPSTEIVAETIYQIVKENLASLEHQPKCIQVFVRETPTSYVVFRPKEQV

SEQ ID NO: 70264 - protein, 593 aa, Staphylococcus aureus
MMQQTLSHYFGYETFRPGQEEIISKVLDHRNVLGVLPTGGGKSICYQVPGLLLGGTTIVISPLISLMKDQVDQLKAMGIQAAFLNSSLTQKEQQRIEKALSNGEIQFLYVAPERFENRYFLNMLQRIKIHLVAFDEAHCISKWGHDFRPSYQNVISKVFTLPQDFTIIALTATATVEVQQDIREKLNIAQTDQIKTSTKRRNLIFKVNPTYQRQKFILDYIKTHDEDAGIIYCSTRKQVEELQEALESQKIESVIYHAGLSNKEREEAQNDFLFDRVKVVVATNAFGMGIDKSNVRFVIHYNMPGDLESYYQEAGRAGRDGLKSECILLFSERDINLHEYFITVSQADDDYKDKMGEKLTKMIQYTKTKKCLEATIVHYFEPNEKLEECEQCSNCVQQDKSYNMTQEAKMIISCIARMKQQESYSVIIQVLRGESTDYIKYKGYDQISTHGLMKGYTTSELSHLIDELRFKGFLNENDEILMCDTSIKKLLSNEVEVFTTPFKQKATEKVFINTVEGVDRVLFSQLVEVRKKLSDKLTIAPVSIFSDYTLEEFAKRKPASKQDMINIDGVGSYKLKHYCPAFLETIQNYKAKV

SEQ ID NO: 70265 - protein, 504 aa, Staphylococcus aureus
MTNFFDILSERKGQLFSTMIEHIQISFIALLIATAIAVPLGILLTKTKTISEIVMNIAAILQTIPSLALLGLMIPLFGIGRVPAIIALVVYALLPILRNTYTGIKEVDPSLIEAAKGIGMKPFRRLTKVELPIAMPVIMAGVRTAMVLIIGTATLAALIGAGGLGDLILLGIDRNNASLILLGAIPAALLAIIFDLILRFMAKLSYKKLLMTLGVIVMIIILAIAIPMFAQKGDKITLAGKLGSEPSIITNMYKILIEEETKNTVEVKDGMGKTAFLFNALKSDDIDGYLEFTGTVLGELTKEPLKSKEEKKVYEQAKQSLEKKYQMTMLKPMKYNNTYALAVKRDFAKQHNIRTIGDLNKVKDQLKPGFTLEFNDRPDGYKAVQKAYNLNLDNIRTMEPKLRYQAINKGNINLIDAYSTDAELKQYDMVVLKDDKHVFPPYQGAPLFKESFLKKHPEIKKPLNKLENKISDEDMQMMNYKVTVKNEDPYTVAKDYLKAKGLIK

SEQ ID NO: 70266 - protein, 132 aa, Staphylococcus aureus
MKIIYFSFTGNVRRFIKRTELENTLEITAENCMEPVHEPFIIVTGTIGFGEVPEPVQSFLEVNHQYIRGVAASGNRNWGLNFAKAGRTISEEYNVPLLMKFELHGKNKDVIEFKNKVGNFNENHGREKVQSY

SEQ ID NO: 70267 - protein, 718 aa, Staphylococcus aureus
MEKTKTLLNLRTRWVILMKTMEEKKYNHIELNNEVTKRREDGFFSLEKDQEALVAYLEEVKDKTIFFDTEIERLRYLVDNDFYFNVFDIYSEADLIEITDYAKSISFNFASYMSASKFFKDYALKTNDKSQYLEDYNQHVAIVALYLANGNKAQAKQFISAMVEQRYQPATPTFLNAGRARRGELVSCFLLEVDDSLNSINFIDSTAKQLSKIGGGVAINLSKLRARGEAIKGIKGVAKGVLPIAKSLEGGFSYADQLGQRPGAGAVYLNIFHYDVEEFLDTKKVNADEDLRLSTISTGLIVPSKFFDLAKEGKDFYMFAPHTVKEEYGVTLDDIDLEKYYDDMVANPNVEKKKKNAREMLNLIAQTQLQSGYPYLMFKDNANRVHPNSNIGQIKMSNLCTEIFQLQETSIINDYGIEDEIKRDISCNLGSLNIVNVMESGKFRDSVHSGMDALTVVSDVANIQNAPGVRKANSELHSVGLGVMNLHGYLAKNKIGYESEEAKDFANIFFMMMNFYSIERSMEIAKERGIKYQDFEKSDYANGKYFEFYTTQEFEPQFEKVRELFDGMAIPTSEDWKKLQQDVEQYGLYHAYRLAIAPTQSISYVQNATSSVMPIVDQIERRTYGNAETFYPMPFLSPQTMWYYKSAFNTDQMKLIDLIATIQTHIDQGISTILYVNSEISTRELARLYVYAHYKGLKSLYYTRNKLLSVEECTSCSI

SEQ ID NO: 70268 - protein, 351 aa, Staphylococcus aureus
MVTLLLVAVTMIVSLTITPIVIAISKRLNLVDKPNFRKVHTKPISVMGGTVILFSFLIGIWIGHPIETEIKPLIIGAIIMYVLGLVDDIYDLKPYIKLAGQIAAALVVAFYGVTIDFISLPMGTTIHFGFLSIPITVIWIVAITNAINLIDGLDGLASGVSAIGLITIGFIAILQANIFITMICCVLLGSLIGFLFYNFHPAKIFLGDSGALMIGFIIGFLSLLGFKNITIIALFFPIVILAVPFIDTLFAMIRRVKKGQHIMQADKSHLHHKLLALGYTHRQTVLLIYSISILFSLSSIILYVSPPLGVVLMFVLIIFSIELIVEFTGLIDNNYRPILNLISRKSSHKED

SEQ ID NO: 70269 - protein, 330 aa, Staphylococcus aureus
MAEPNFWDNQTKAQDIIDKNNALKAIVNGYKTLQAEVDDMDATWDLLQEEFDEEMKEDLEQEVINFKAKVDEYELQLLLDGPHDANNAILELHPGAGGTESQDWANMLFRMYQRYCEKKGFKVETVDYLPGDEAGIKSVTLLIKGHNAYGYLKAEKGVHRLVRISPFDSSGRRHTSFASCDVIPDFNNDEIEIEINPDDITVDTFRASGAGGQHINKTESAIRITHHPSGIVVNNQNERSQIKNREAAMKMLKSKLYQLKLEEQAREMAEIRGEQKEIGWGSQIRSYVFHPYSMVKDHRTNEETGKVDAVMDGDIGPFIESYLRQTMSHD

SEQ ID NO: 70270 - protein, 300 aa, Staphylococcus aureus
MKQYLITGGTGMVGSQLVNEIKKSDSHITILTRHDQISNDKKISYVNWAKSGWEHKVPQNIDVVINLAGATLNKRWTPEYKQTLMLSRIQSTQALYELFKSRNKAPKVLFNASATGYYPPDLFMSYTEVYKTLPFDFLSDIVYQWERFAQQFEQLGTRVVIGRFGMILSNEGGALQTMKLPYKYYIGGKLGSGQQWYSWIHINDLIQAILFLINNESASGPFNLTAPIPERQNLFGYTLARAMHKPHETWAPSLAMRLILGQMSTVVLDTQKVLPNKIQALGFQFKYSNLKMALEDLIKE

SEQ ID NO: 70271 - protein, 396 aa, Staphylococcus aureus
MAKKIVSDLDLKGKTVLVRADFNVPLKDGEITNDNRIVQALPTIQYIIEQGGKIVLFSHLGKVKEESDKAKLTLRPVAEDLSKKLDKEVVFVPETRGEKLEAAIKDLKEGDVLLVENTRYEDLDGKKESKNDPELGKYWASLGDVFVNDAFGTAHREHASNVGISTHLETAAGFLMDKEIKFIGGVVNDPHKPVVAILGGAKVSDKINVIKNLVNIADKIIIGGGMAYTFLKAQGKEIGISLLEEDKIDFAKDLLEKHGDKIVLPVDTKVAKEFSNDAKITVVPSDSIPADQEGMDIGPNTVKLFADELEGAHTVVWNGPMGVFEFSNFAQGTIGVCKAIANLKDAITIIGGGDSAAAAISLGFENDFTHISTGGGASLEYLEGKELPGIKAINNK

SEQ ID NO: 70272 - protein, 500 aa, Staphylococcus aureus
MKNKLLVLSLGALCVSQIWESNHASAVVSGEKNPYVSKALELKDKSNKSNSYENYRDSLESLISSLSFADYEKYEEPEYEKAVKKYQQKFMAEDDALKNFLNEEKKIKNADISRKSNNLLGLTHERYSYIFDTLKKNKQEFLKDIEEIQLKNSDLKDFNNTEQHNADVEINNLENKVLMVGYTFYNTNKDEVEELYSELDLIVGEVQDKSDKKRAVNQRMLNRKKEDLEFIIDKFFKKIQQERPESIPALTSEKNHNQTMALKLKADTEAAKNDVSKRSKRSLNTQNNKSTTQEISEEQKAEYQRKSEALKERFINRQKSKNESVVSLIDDEDDNENDRQLVVSAPSKKPTTPTTYTETTTQVPMPTVERQTQQQIVYKTPKPLAGLNGESHDFTTTHQSPTTSNHTHNNVVEFEETSALPGRKSGSLVGISQIDSSHLTEREKRVIKREHVREAQKLVDNYKDTHSYKDRLNAQQKVNTLSEGHQKRFNKQINKVYNGK

SEQ ID NO: 70273 - protein, 66 aa, Staphylococcus aureus
MNNGTVKWFNAEKGFGFIEREDGSDVFVHFSAIAEDGYKSLEEGQKVEFDIVEGDRGEQAANVVKM

SEQ ID NO: 70274 - protein, 64 aa, Staphylococcus aureus
MADESKFEQAKGNVKETVGNVTDNKNLENEGKEDKASGKAKEFVENAKEKATDFIDKVKGNKGE

SEQ ID NO: 70275 - protein, 141 aa, Staphylococcus aureus
MLNRTVLVGRLTKDPELRSTPNGVNVGTFTLAVNRTFTNAQGEREADFINVVVFKKQAENVKNYLSKGSLAGVDGRLQTRNYENKDGQRVFVTEVVADSVQFLEPKNNNQQQNNNYQQQRQTQTGNNPFDNNADSIEDLPF

SEQ ID NO: 70276 - protein, 193 aa, Staphylococcus aureus
MANMKNSNDRIILFRKAGEKVDATKMLFLTEYGLSHEADTDTEDTMDGSYNTGGSVESTMSGTAKMFYGDDFADEIEDAVVDRVLYEAWEVESRIPGKNGDATKFKAKYFQGFHNKFELKAEANGIDEYEYEYGVNGRFQRGFATLPEAVTKKLKATGYRFHDTTKADALTGEDLTAIPQPKVDSSTVTPGEV

SEQ ID NO: 70277 - protein, 439 aa, Staphylococcus aureus
MRLTIYHTNDIHSHLHEYERIKVYMAEQRPRLNHPSLYVDLGDHVDLSAPITEATLGKKNVALLNEAKCDVATIGNNEGMTISHEALNHLYDEAKFIVTCSNVIDESGHLPNNIVSSYIKDMDGVKILFVAATAPFTPFYRALDWIVTDPLESIKEEIKHQRGKFDVIIVLSHCGIFFDETLCQELPEIDVIFGSHTHHYFEHGEINNGVLMAAAGKYGNYLGEVNLTFEAHKVVHKTAKIIPLETLPEVETSFEEEGKTLMSNSVIQHPVVLKRSMNHITEAAYLLAQSVCEYTHAQCAIINAGLLVKDIVKDEVTEYDIHQMLPHPINMVRVRLSGVKLKEIITKSNKQEYMYEHAQGLGFRGNIFGGYILYNLGYIHSTGRYYLNGEEIEDDKEYVLGTIDMYTFGRYFPTLKELPKEYLMPEFLRDIFKEKLLEY

SEQ ID NO: 70278 - protein, 402 aa, Staphylococcus aureus
MAQDRKKVLVLGAGYAGLQTVTKLQKAISTEEAEITLINKNEYHYEATWLHEASAGTLNYEDVLYPVESVLKKDKVNFVQAEVTKIDRDAKKVETNQGIYDFDILVVALGFVSETFGIEGMKDHAFQIENVITARELSRHIEDKFANYAASKEKDDNDLSILVGGAGFTGVEFLGELTDRIPELCSKYGVDQNKVKITCVEAAPKMLPMFSEELVNHAVSYLEDRGVEFKIATPIVACNEKGFVVEVDGEKQQLNAGTSVWAAGVRGSKLMEESFEGVKRGRIVTKQDLTINGYDNIFVIGDCSAFIPAGEERPLPTTAQIAMQQGESVAKNIKRILNGESTEEFEYVDRGTVCSLGSHDGVGMVFGKPIAGKKAAFMKKVIDTRAVFKIGGIGLAFKKGKF

SEQ ID NO: 70279 - protein, 396 aa, Staphylococcus aureus
MTKSEKIIELTNHYGAHNYLPLPIVISEAEGVWVKDPEGNKYMDMLSAYSAVNQGHRHPKIIQALKDQADKVTLVSRAFHSDNLGEWYEKICKLAGKDKALPMNTGAEAVETALKAARRWAYDVKGIEPNKAEIIAFNGNFHGRTMAPVSLSSEAEYQRGYGPLLDGFRKVDFGDVDALKAAINENTAAVLVEPIQGEAGINIPPEGYLKAIRELCDEHNVLFIADEIQAGLGRSGKLFATDWDNVKPDVYILGKALGGGVFPISVVLADKEVLDVFTPGSHGSTFGGNPLACAASIAALDVIVDEDLPGRSLELGDYFKEQLKQIDHPSIKEVRGRGLFIGVELNESARPYCEALKEEGLLCKETHDTVIRFAPPLIITKEELDLALEKIRHVFQ

SEQ ID NO: 70280 - protein, 414 aa, Staphylococcus aureus
MTENNNLVTSTQGIIKEALHKLGFDEGMYDLIKEPLRMLQVRIPVRMDDGTVKTFTGYRAQHNDAVGPTKGGVRFHPDVDEEEVKALSMWMTLKCGIVNLPYGGGKGGIVCDPRQMSIHEVERLSRGYVRAISQFVGPNKDIPAPDVFTNSQIMAWMMDEYSALDKFNSPGFITGKPIVLGGSHGRDRSTALGVVIAIEQAAKRRNMQIEGAKVVIQGFGNAGSFLAKFLYDLGAKIVGISDAYGALHDPNGLDIDYLLDRRDSFGTVTNLFEETISNKELFELDCDILVPAAISNQITEDNAHDIKASIVVEAANGPTTPEATRILTERGILLVPDVLASAGGVTVSYFEWVQNNQGYYWSEEEVNEKLREKLEAAFDTIYELSQNRKIDMRLAAYIIGIKRTAEAARYRGWA

SEQ ID NO: 70281 - protein, 309 aa, Staphylococcus aureus
MTNSSKSFTKFMAASAVFTMGFLSVPTAGAEQTNQIANKPQAIQWHTNLTNERFTTIAHRGASGYAPEHTFQAYDKSHNELKASYIEIDLQRTKDGHLVAMHDETVNRTTNGHGKVEDYTLDELKQLDAGSWFNKKYPKYARASYKNAKVPTLDEILERYGPNANYYIETKSPDVYPGMEEQLLASLKKHHLLNNNKLKNGHVMIQSFSDESLKKIHRQNKHVPLVKLVDKGELQQFNDQRLKEIRSYAIGLGPDYTDLTEQNTHHLKDLGFIVHPYTVNEKADMLRLNKYGVDGVFTNFADKYKEVIK

SEQ ID NO: 70282 - protein, 459 aa, Staphylococcus aureus
MSNKAWGGRFEVQPEEWVDDFNASITFDQTLIDQDIEGSIAHATMLANQGIISQQDSEQIIQGLKSIQHDYHQDQIQFSASLEDIHLNIEHELIKRIGDAGGKLHTGRSRNDQVATDMHLYTKKQVQDIIALIKSLQSVIVDIASNNVDTIMPGYTHLQRAQPISFAHHIMTYFWMLQRDQQRFEDSLKRIDINPLGAAALSGTTYPIDRHETTALLNFGSLYENSLDAVSDRDYIIETLHNISLTMVHLSRFAEEIIFWSTDEAKFITLSDAFSTGSSIMPQKKNPDMAELIRGKVGRTTGHLMSMLMTLKGLPLAYNKDMQEDKEGLFDAVHTIKGSLRIFEGMIQTMTINKERLNQTVKEDFSNATELADYLVTKNIPFRTAHEIVGKIVLECIQQGHYLLDVPLATYQQHHSSIDADIYDYLQPENCLKRRQSYGSTGQSSVKQQLDVAKQLLSQ

SEQ ID NO: 70283 - protein, 313 aa, Staphylococcus aureus
MNVGIKGFGAYAPEKIIDNAYFEQFLDTSDEWISKMTGIKERHWADDDQDTSDLAYEASVKAIADAGIQPEDIDMIIVATATGDMPFPTVANMLQERLGTGKVASMDQLAACSGFMYSMITAKQYVQSGDYHNILVVGADKLSKITDLTDRSTAVLFGDGAGAVIIGEVSEGRGIISYEMGSDGTGGKHLYLDKDTGKLKMNGREVFKFAVRIMGDASTRVVEKANLTSDDIDLFIPHQANIRIMESARERLGISKDKMSVSVNKYGNTSAASIPLSIDQELKNGKLKDDDTIVLVGFGGGLTWGAMTIKWGK

SEQ ID NO: 70284 - protein, 360 aa, Staphylococcus aureus
MTERILEVNDLHVSFDITAGEVQAVRGVDFYLNKGETLAIVGESGSGKSVTTKAITKLFQGDTGRIKKGEILFLGEDLAKKPENELIKLRGKDISMIFQDPMTSLNPTMQIGKQVMEPLIKHKNYSKAQAKKRALEILNLVGLPNAEKRFKAYPHQFSGGQRQRIVIATALACEPKVLIADEPTTALDVTMQAQILDLMKELQQKIDTAIIFITHDLGVVANIADRVAVMYGGQMVETGDVNEIFYDPKHPYTWGLLSSMPDLSTTNDTPLLAIPGAPPDLLHPPKGDAFARRSQYALDIDFKVEPPWFKVSPTHFVKSWLLDARAPKVELPELVKQRMKPMPNNYEKPLKVERVSFNEK

SEQ ID NO: 70285 - protein, 326 aa, Staphylococcus aureus
MENILEVNQIKKYYKIKTGLLQKTQYVKAVDDVSFSIKKGQTFGLVGESGCGKSTLGKVIIRLEDATSGSIIVNGEDITRLQGKKLRKSRQQYQMIFQDPYASLNPMQMVGDIISEPILNYKKLPKEEIKKEVLYLLKCVGLSEDAYYKYAHEFSGGQRQRVGIARALALRPSLIVADEPVSALDVSVQSQVLNLLKDLQEQFKLSYLFIAHDLSVVKHISDVIGVMYLGHIVEIASDKEIYENPKHPYTKALISSIPQIDKHNNNRIILKGELPSPSNPPQGCPFHTRCPIAKDKCKENIPQLKDIGNEHQVACFYVDKVGDLNA

SEQ ID NO: 70286 - protein, 211 aa, Staphylococcus aureus
MNQWDQFLTPYKQAVDELKVKLKGMRKQYEVGEQASPIEFVTGRVKPIASIIDKANKRQIPFDRLREEMYDIAGLRMMCQFVEDIDVVVNILRQRKDFKVIEERDYIRNTKESGYRSYHVIIEYPIETLQGQKFILAEIQIRTLAMNFWATIEHTLRYKYDGAYPDEIQHRLERAAEAAYLLDEEMSEIKNEIQEAQKYYTQKRSKKHEND

SEQ ID NO: 70287 - protein, 461 aa, Staphylococcus aureus
MSMNTDEKERVQEELYDETLLDQYLENDDIDQFRDEFLALHTYEQSEYFEDTTDENRQKIFQYLSPEEVANFFDQLDIDDDEYELLFDKMNATYASHILEEMSYDNAVDILNELTKPKVASLLTLMNKDDANEIKALLHYDEDTAGGIMTTEYLSLKAHTPVKEALLLVKAQAPDAETIYVIFVVDDDGKLVGVLSLRDLIVAENDAYIEDIMNERVISVNVADDQEDVAQVMRDYDFMAVPVIDYQEHLLGIITIDDILDVMDEEASEDYSRLAGVSDIDSTNDSIIKTALKRLPWLIILTFLGMITATILGRFEKTLENVALLAAFIPIISGMSGNSGTQSLAVSVRNITTGEINEQSKFRIALREAGSGVLSGVVCSTILFTIIVAIYHQPLLALIVAGSLTCAMTVGTFVGSMIPLLMNKLNIDPAVASGPFITTINDIISMLIYFGLATSFMAYLI

SEQ ID NO: 70288 - protein, 452 aa, Staphylococcus aureus
MSIFSQFLKRSSPQQGIVLYYIVAIVIAFLLLNLPYVHKPGVEVNPIDTLFVAVSGISVTGLSPISIVDTYSTFGQLIILVILNIGGIGVMAIGTMLWVVLGKHIGIRERQLIMLDNNKNTMSGTVKLIIDIVKSIFVIELVGAMLLAFYFYRDNPDLKYAIMQGVFVSISATTNGGLDITGKSLIPYAHDYFVQAIVIFLIILGSIGFPVLLEVKAYIQNRVTNFRFSLFTKITTSTYLFLFIVGVLAILLFEHNHAFKGLSWHQSLFYSLFQSATTRSAGLQTIDVTTLSDPTNIIMGILMFIGSSPSSVGGGIRTTTFAILILFLINFSNNADKTSIKVYNREVHIMDIQRSFAVFTMATILTFLGMLIISATENGKLTFLQVFFEVMSAFGTCGLSLGVTSDISDISKVVLMVLMFIGRVGLISFIIMIAGRREPDKFHYPKERIQIG

SEQ ID NO: 70289 - protein, 397 aa, Staphylococcus aureus
MKFNKVKLVIHACVLLFIIISIALIFHRLQTKTHSIDPIHKETKLSDNEKYLVDRNKEKVAPSKLKEVYNSKDPKYKKIDKYLQSSLFNGSVAIYENGKLKMSKGYGYQDFEKGIKNTPNTMFLIGSAQKFSTGLLLKQLEEEHKININDPVSKYLPWFKTSKPIPLKDLMLHQSGLYKYKSSKDYKNLDQAVKAIQKRGIDPKKYKKHMYNDGNYLVLAKVIEEVTGKSYAENYYTKIGDPLKLQHTAFYDEQPFKKYLAKGYAYNSTGLSFLRPNILDQYYGAGNLYMTPTDMGKLITQIQQYKLFSPKITNPLLHEFGTKQYPDEYRYGFYAKPTLNRLNGGFFGQVFTVYYNDKYVVVLALNVKGNNEVRIKHIYNDILKQNKPYNTKGVIVQ

SEQ ID NO: 70290 - protein, 729 aa, Staphylococcus aureus
MSKFIEPSVEEIKLEKVYQDMGLSDQEYEKVCDILGRQPNFTETGIFSVMWSEHCSYKHSKPFLKQFPTSGEHVLMGPGEGAGVVDIGDNQAVVFKVESHNHPSAIEPYQGAATGVGGIIRDIVSIGARPINLLNSLRFGELDNKQNQRLLKGVVKGIGGYGNCIGIPTTAGEIEFDERYDGNPLVNAMCVGVINHDMIQKGTAKGVGNSVIYVGLKTGRDGIHGATFASEELTEESESKRPSVQIGDPFVGKKLMEATLEAITFDELVGIQDMGAAGLTSSSSEMAAKGGSGLHLRLEQVPTREPGISPYEMMLSETQERMLLVVEKGNEQKFLDLFDKHELDSAVIGEVTDTNRFVLTYDDEVYADIPVEPLADEAPVYILEGEEKDYNTSKNDYTHIDVKDTFFKLLKHPTIASKHYLYDQYDQQVGANTIIKPGLQASVVRVEGTNKAIASTIDGEARYVYNNPYEGGKMVVAEAYRNLIAVGATPLAMTDCLNYGSPEKKEIYQQLIDSTKGMAEACDILKTPVVSGNVSLYNETKGTSIFPTPVVGMVGLIENVNYLNDFEPQVGDKLYLIGDTKDDFGGSQLEKLIYGKVNHEFESLDLSSEVEKGESIKTAIREGLLSHVQTVGKGGLLITLAKLSAHYGLGLKSSIDITNAQLFSETQGRYVVSVKSGKTLNIDNAIEIGLLTDSDNFKVTTPYTEISENVSDIKQIWEGAIAQCLTTQD

SEQ ID NO: 70291 - protein, 453 aa, Staphylococcus aureus
MDTVEISRFLTAMTLAVHIIFATIGVGMPLMFAIAEFLGIRKNDLQYIAMAKRWAKAYTITVAVGVVTGTIIGLQLSLIWPTFMEMGGHVIALPLFMETFAFFFEAIFLSIYLYTWDRFKNKWTHFLISIPVIIGGSFSAFFITSVNSFMNTPAGFELKNGKMVNVQPIEAMFNPSFIVRSFHVITTAGMTMAFVIASIAAFKLLRNRQPKDTVYHKKALKMSMIVGFFSTLLSMLAGDLSAKFLHKFQPEKLAAYEWHFDTSSHAKLLLFGVLDEKTQQVKGAIELPGLLSFLADNSVKTKVQGLNDFPKSLHPPMIVHYFFDLMVTMGILCFVISGVYVLTLMFKKLRKFSTHKWMLYGILLTGPASMLAIEFGWFLTEMGRQPWIVRGYMRVAEAATQAGGITFVTILFGILYIILMYTCAYVLIRMFKNKPAYEDVNRLAKKQGGEIEK

SEQ ID NO: 70292 - protein, 357 aa, Staphylococcus aureus
MKRFLQLIIGALVVGMLCLTLSHWFKSKEQVHTNQKIYVYNWGEYIDPELIKKFEKETGIQVVYETFDSNEAMEAKIRNGGTHYDVAFPSEYTVQKLKRDHLLLPIDHNKVPNIKNLDSDYMNMSFDKGNKYSLPYFFGTVGILYNKEKYPNESFDSWKSLYNPKFKNQILLVDGAREIIGMSLNKLGYNLNDRNSHHLKEAERDLTKLAPQVRGVVGDEITMMLQQNEGNIAVVWSGVAAPLVQEGDKYNYVIPKEGSNLWFDNMVIPKTAQNKEGAYKFMNFLLDAKNNKQNTEFVGYATPNKAARQLLPKEIKDDHRFYPTKKEQERLEVYKDLGPEVLSEYNENFLNFKMSLK

SEQ ID NO: 70293 - protein, 91 aa, Staphylococcus aureus
MAKQATMKNAALKQLTKDADEILHLIKVQLDNLTLPSCPLYEEVLDTQMFGLQKEVDFAVKLGLVDREDGKQIMLRLEKELSKLHEAFTLV

SEQ ID NO: 70294 - protein, 645 aa, Staphylococcus aureus
MNKQQKEFKSFYSIRKSSLGVASVAISTLLLLMSNGEAQAAAEETGGTNTEAQPKTEAVASPTTTSEKAPETKPVANAVSVSNKEVEAPTSETKEAKEVKEVKAPKETKAVKPAAKATNNTYPILNQELREAIKNPAIKDKDHSAPNSRPIDFEMKKENGEQQFYHYASSVKPARVIFTDSKPEIELGLQSGQFWRKFEVYEGDKKLPIKLVSYDTVKDYAYIRFSVSNGTKAVKIVSSTHFNNKEEKYDYTLMEFAQPIYNSADKFKTEEDYKAEKLLAPYKKAKTLERQVYELNKIQDKLPEKLKAEYKKKLEDTKKALDEQVKSAITEFQNVQPTNEKMTDLQDTKYVVYESVENNESMMDTFVKHPIKTGMLNGKKYMVMETTNDDYWKDFMVEGQRVRTISKDAKNNTRTIIFPYVEGKTLYDAIVKVHVKTIDYDGQYHVRIVDKEAFTKANTDKSNKKEQQDNSAKKEATPATPSKPTPSPVEKESQKQDSQKDDNKQLPSVEKENDASSESGKDKTPATKPTKGEVESSSTTPTKVVSTTQNVAKPTTASSKTTKDVVQTSAGSSEAKDSAPLQKANIKNTNDGHTQSQNNKNTQENKAKSLPQTGEESNKDMTLPLMALLALSSIVAFVLPRKRKN

SEQ ID NO: 70295 - protein, 246 aa, Staphylococcus aureus
MEQITSAQNNRIKQANKLKKKRERDKTGLALIEGVHLIEEAYQSGIVITQLFAIEPARLDQQIIAYAQEVFEINMKVAESLSGTVTPQGFFAIIEKPHYDISKAQQVLLIDRVQDPGNLGTLIRTADAAGMDAVIMEKGTTDPYQDKVLRASQGSVFHLPVMTQDLDTFITQFNGPVYGTALENAVAYKEVTSSDSFALLLGNEGEGVNPELLAHTTQNLIIPIYGKAESLNVAIAGSILLYHLKG

SEQ ID NO: 70296 - protein, 101 aa, Staphylococcus aureus
MKNTPQHETQSKPKQKTVKLIIKRQDTSDSKPYEETFEIPYRENLNVIACLMEIRRNPVNIKGEKTTPVVWDMNCLEEVCGACSMVINGRARQSCLRLLIN

SEQ ID NO: 70297 - protein, 319 aa, Staphylococcus aureus
MKTRIVSSVTTTLLLGSILMNPVANAADSDINIKTGTTDIGSNTTVKTGDLVTYDKENGMHKKVFYSFIDDKNHNKKLLVIRTKGTIAGQYRVYSEEGANKSGLAWPSAFKVQLQLPDNEVAQISDYYPRNSIDTKEYMSTLTYGFNGNVTGDDTGKIGGLIGANVSIGHTLKYVQPDFKTILESPTDKKVGWKVIFNNMVNQNWGPYDRDSWNPVYGNQLFMKTRNGSMKAAENFLDPNKASSLLSSGFSPDFATVITMDRKASKQQTNIDVIYERVRDDYQLHWTSTNWKGTNTKDKWTDRSSERYKIDWEKEEMTN

SEQ ID NO: 70298 - protein, 238 aa, Staphylococcus aureus
MSKNITKNIILTTTLLLLGTVLPQNQKPVFSFYSEAKAYSIGQDETNINELIKYYTQPHFSFSNKWLYQYDNGNIYVELKRYSWSAHISLWGAESWGNINQLKDRYVDVFGLKDKDTDQLWWSYRETFTGGVTPAAKPSDKTYNLFVQYKDKLQTIIGAHKIYQGNKPVLTLKEIDFRAREALIKNKILYTENRNKGKLKITGGGNNYTIDLSKRLHSDLANVYVKNPNKITVDVLFD

SEQ ID NO: 70299 - protein, 241 aa, Staphylococcus aureus
MNNNITKKIILSTTLLLLGTAFTQFPNTPINSSSEAKAYYINQNETNVNELTKYYSQKYLTFSNSTLWQKDNGTIHATSLQFSWYSHIQVYGPESWGNINQLRNKSVDIFGIKDQETIDSFALSQETFTGGVTPAATSNDKHYKLNVTYKDKAETFTGGFPVYEGNKPVLTLKELDFRIRQTLIKSKKLYNNSYNKGQIKITGTDNNYTIDLSKRLPSTDANRYVKKPQNAKIEVILEKSN

SEQ ID NO: 70300 - protein, 241 aa, Staphylococcus aureus
MKKNIMNKLVLSTALLLLGTTSTQLPKTPISFSSEAKAYNISENETNINELIKYYTQPHFSLSGKWLWQKPNGSIHATLQTWVWYSHIQVFGSESWGNINQLRNKYVDIFGTKDEDTVEGYWTYDETFTGGVTPAATSSDKPYRLFLKYSDKQQTIIGGHEFYKGNKPVLTLKELDFRIRQTLIKNKKLYNGEFNKGQIKITADGNNYTIDLSKKLKLTDTNRYVKNPKNAQIEVILEKSN

SEQ ID NO: 70301 - protein, 333 aa, Staphylococcus aureus
MKNLRNRSFLTLLDFSRQEVEFLLTLSEDLKRAKYIGTEKPMLKNKNIALLFEKDSTRTRCAFEVAAHDQGANVTYLGPTGSQMGKKETTKDTARVLGGMYDGIEYRGFSQRTVETLAEYSGVPVWNGLTDEDHPTQVLADFLTAKEVLKKDYADINFTYVGDGRNNVANALMQGAAIMGMNFHLVCPKELNPTDELLNRCKNIAAENGGNILITDDIDQGVKGSDVIYTDVWVSMGEPDEVWKERLELLKPYQVNKEMMDKTGNPNVIFEHCLPSFHNADTKIGQQIFEKYGIREMEVTDEVFESKASVVFQEAENRMHTIKAVMVATLGEF

SEQ ID NO: 70302 - protein, 518 aa, Staphylococcus aureus
MENTINESEKKKRFKLKMPGAFMILFILTVVAVIATWVIPAGAYSKLSYEPSSQELKIVNPHNQVKKVPGTQQELDKMGVKIKIEQFKSGAINKPVSIPNTYERLKQHPAGPEQITSSMVEGTIEAVDIMVFILVLGGLIGVVQASGSFESGLLALTKKTKGHEFMLIVFVSILMIIGGTLCGIEEEAVAFYPILVPIFIALGYDSIVSVGAIFLASSVGSTFSTINPFSVVIASNAAGTTFTDGLYWRIGACIVGAIFVISYLYWYCKTIKNDPKASYSYEDKDAFEQQWSVLKDDDSAHFTLRKKIILTLFVLPFPIMVWGVMTQGWWFPVMASAFLIFTIIIMFIAGTGKSGLGEKGTVDAFVNGASSLVGVSLIIGLARGINLVLNEGMISDTILHFSSSLVQHMSGPLFIIVLLFIFFCLGFIVPSSSGLAVLSMPIFAPLADTVGIPRFVIVTTYQFGQYAMLFLAPTGLVMATLQMLNMRYSHWFRFVWPVVAFVLIFGGGVLITQVLIYS

SEQ ID NO: 70303 - protein, 143 aa, Staphylococcus aureus
MFMGEYDHQLDTKGRMIIPSKFRYDLNERFIITRGLDKCLFGYTLDEWQQIEEKMKTLPMTKKDARKFMRMFFSGAVEVELDKQGRINIPQNLRKYANLTKECTVIGVSNRIEIWDRETWNDFYEESEESFEDIAEDLIDFDF

SEQ ID NO: 70304 - protein, 366 aa, Staphylococcus aureus
MQSKRYLVLEDGSFYEGYRLGSDNLTVGEIVFNTAMTGYQETISDPSYTGQIITFTYPLIGNYGINRDDFESLVPTLNGIVVKEASAHPSNFRQQKTLHDVLELHQIPGIAGVDTRSITRKIRQHGVLKAGFTDRKEDIDQLVKHLQQVELPKNEVEIVSTKTPYVSTGKDLSVVLVDFGKKQNIVRELNVRGCNVTVVPYTTTAEEILAMAPDGVMLSNGPGNPEVVECAIPMIQGILGKIPFFGICLGHQLFALSQGASSFKMKFGHRGANHPVKNLETGKVDITSQNHGYAIDIDSLKSTDLEVTHLALNDGTVEGLKHKTLPAFSVQYHPEANPGPSDSNYLFDDFVAMMTNFKEKERHINA

SEQ ID NO: 70305 - protein, 1057 aa, Staphylococcus aureus
MPKRNDIKTILVIGSGPIIIGQAAEFDYAGTQACLALKEEGYRVILVNSNPATIMTDKEIADKVYIEPLTHDFIARIIRKEQPDALLPTLGGQTGLNMAIQLHESGVLQDNNVQLLGTELTSIQQAEDREMFRTLMNDLNVPVPESDIVNTVEQAFKFKEQVGYPLIVRPAFTMGGTGGGICHNDEELHEIVSNGLHYSPATQCLLEKSIAGFKEIEYEVMRDKNDNAIVVCNMENIDPVGIHTGDSIVVAPSQTLSDVEYQMLRDVSLKVIRALGIEGGCNVQLALDPHSFDYYIIEVNPRVSRSSALASKATGYPIAKLAAKIAVGLTLDEMLNPITGTSYAAFEPTLDYVISKIPRFPFDKFEKGERELGTQMKATGEVMAIGRTYEESLLKAIRSLEYGVHHLGLPNGESFDLDYIKERISHQDDERLFFIGEAIRRGTTLEEIHNMTQIDYFFLHKFQNIIDIEHQLKEHQGDLEYLKYAKDYGFSDKTIAHRFNMTEEEVYQLRMENDIKPVYKMVDTCAAEFESSTPYYYGTYETENESIVTDKEKILVLGSGPIRIGQGVEFDYATVHAVWAIQKAGYEAIIVNNNPETVSTDFSISDKLYFEPLTEEDVMNIINLEKPKGVVVQFGGQTAINLADKLAKHGVKILGTSLENLNRAEDRKEFEALLRKINVPQPQGKSATSPEEALANAAEIGYPVVVRPSYVLGGRAMEIVDNDKELENYMTQAVKASPEHPVLVDRYLTGKEIEVDAICDGETVIIPGIMEHIERAGVHSGDSIAVYPPQTLTEDELATLEDYTIKLAKGLNIIGLINIQFVIAHDGVYVLEVNPRSSRTVPFLSKITDIPMAQLAMRAIIGEKLTDMGYQEGVQPYAEGVFVKAPVFSFNKLKNVDITLGPEMKSTGEVMGKDTTLEKALFKGLTGSGVEVKDHGTVLMTVSDKDKEEVVKLAQRLNEVGYKILATSGTANKLAEYDIPAEVVGKIGGENDLLTRIQNGDVQIVINTMTKGKEVERDGFQIRRTTVENGIPCLTSLDTANALTNVIESMTFTMRQM

SEQ ID NO: 70306 - protein, 133 aa, Staphylococcus aureus
MDIPKITTFLMFNNKAEEAVKLYTSLFEDSEIITMAKYGENGPGDHGTVQHSIFTLNGQVFMAIDANSGTELPMNPAISLFVTVKDTIEMERLFNGLKDEGAILMPKTNMPPYREFAWVQDKFGVSFQLALPE

SEQ ID NO: 70307 - protein, 461 aa, Staphylococcus aureus
MSWEKENVSCQLFKWCAKHTSREETYMIENVRSLAFDTIQDILNEGAYSNLRINEVLSENELNAMDKALFTEIVYGTVKRKYTLDFYLKPFVKTKIKAWVRQLLWMSIYQYVYLDKVPNHAIINEAVEIAKERGGYHNGNVVNGILRTMMRSDLPDFNEIADPKKRMAIEYSMPKWIIDHWATHYGLEETETILQSFLETTSTTVRANLTRASLDDIIEKLQDEGYDVEKDHDLPYCLHIGGQPIIHSRSFKDGFVSIQDKSSMFVAHIMNVDRHDHVLDACSAPGGKACHIAEVLMPEGQVDASDIHDHKIDLINFNIKKLRLTNIKAFQHDATKPYDKTYDKILVDAPCSGLGVMRHKPEIKYTQSKQHIESLVELQLEILENVKNNVKIGGEIIYSTCTIEQLENENVIYTFLKNNKNFEFEPFQHPITGELVKTLQIMPQDFNSDGFFITKIKRKDN

SEQ ID NO: 70308 - protein, 62 aa, Staphylococcus aureus
MGKQCFVTGRKASTGNRRSHALNSTKRRWNANLQKVRILVDGKPKKVWVSARALKSGKVTRV

SEQ ID NO: 70309 - protein, 167 aa, Staphylococcus aureus
MRVEVGQIVNTHGIKGEIKVKSNSDFTDVRFQPGQVLTVVHNNNDLEYTVKSHRVHKGLHMLTFEGINNINDIEHLKGSSIYQERDHEDIVLEENEFYYSDIIGCTVFDDQETPIGRVINIFETGANDVWVIKGSKEYLIPYIADVVKEVDVENKKIIITPMEGLLD

SEQ ID NO: 70310 - protein, 255 aa, Staphylococcus aureus
MTLTIKEVTQLINAVNTIEELENHECFLDERKGVQNAIARRRKALEKEQALKEKYVEMTYFENEILKEHPNAIICGIDEVGRGPLAGPVVACATILNSNHNYLGLDDSKKVPITKRLELNEALKNEVTAFAYGIATAEEIDEFNIYKATQIAMQRAIDGLSVQPTHLLIDAMTLDNALPQVSLIKGDARSVSIAAASIMAKVFRDDYMTQLSKDYPEYGFEKNAGYGTKQHLLAIDDIGIMKEHRKSFEPIKSLL

SEQ ID NO: 70311 - protein, 689 aa, Staphylococcus aureus
MADNLVIVESPAKAKTIEKYLGKKYKVIASMGHVRDLPRSQMGVDTEDNYEPKYITIRGKGPVVKELKKHAKKAKNVFLASDPDREGEAIAWHLSKILELEDSKENRVVFNEITKDAVKESFKNPREIEMNLVDAQQARRILDRLVGYNISPVLWKKVKKGLSAGRVQSVALRLVIDRENEIRNFKPEEYWTIEGEFRYKKSKFNAKFLHYKNKPFKLKTKKDVEKITAALDGDQFEITNVTKKEKTRNPANPFTTSTLQQEAARKLNFKARKTMMVAQQLYEGIDLKKQGTIGLITYMRTDSTRISDTAKAEAKQYITDKYGESYTSKRKASGKQGDQDAHEAIRPSSTMRTPDDMKSFLTKDQYRLYKLIWERFVASQMAPAILDTVSLDITQGDIKFRANGQTIKFKGFMTLYVETKDDSDSEKENKLPKLEQGDKVTATQIEPAQHYTQPPPRYTEARLVKTLEELKIGRPSTYAPTIDTIQKRNYVKLESKRFVPTELGEIVHEQVKEYFPEIIDVEFTVNMETLLDKIAEGDITWRKVIDGFFSSFKQDVERAEEEMEKIEIKDEPAGEDCEVCGSPMVIKMGRYGKFMACSNFPDCRNTKAIVKSIGVKCPKCNDGDVVERKSKKNRVFYGCSKYPECDFISWDKPIGRDCPKCNQYLVENKKGKTTQVICSNCDYKEAAQK

SEQ ID NO: 70312 - protein, 240 aa, Staphylococcus aureus
MAQISKYKRVVLKLSGEALAGEKGFGINPVIIKSVAEQVAEVAKMDCEIAVIVGGGNIWRGKTGSDLGMDRGTADYMGMLATVMNALALQDSLEQLDCDTRVLTSIEMKQVAEPYIRRRAIRHLEKKRVVIFAAGIGNPYFSTDTTAALRAAEVEADVILMGKNNVDGVYSADPKVNKDAVKYEHLTHIQMLQEGLQVMDSTASSFCMDNNIPLTVFSIMEEGNIKRAVMGEKIGTLITK

SEQ ID NO: 70313 - protein, 391 aa, Staphylococcus aureus
MSSNELLLATEYLEKEKKIPRAVLIDAIEAALITAYKKNYDSARNVRVELNMDQGTFKVIARKDVVEEVFDDRDEVDLSTALVKNPAYEIGDIYEEDVTPKDFGRVGAQAAKQAVMQRLRDAEREILFEEFIDKEEDILTGIIDRVDHRYVYVNLGRIEAVLSEAERSPNEKYIPNERIKVYVNKVEQTTKGPQIYVSRSHPGLLKRLFEQEVPEIYDGTVIVKSVAREAGDRSKISVFSENNDIDAVGACVGAKGARVEAVVEELGGEKIDIVQWNEDPKVFVKNALSPSQVLEVIVDETNQSTVVVVPDYQLSLAIGKRGQNARLAAKLTGWKIDIKSETDAREAGIYPVVEAEKVTEEDIALEDADTTESTEEVNDVSVETNVEKESE

SEQ ID NO: 70314 - protein, 305 aa, Staphylococcus aureus
MYNGILPVYKERGLTSHDVVFKLRKILKTKKIGHTGTLDPEVAGVLPVCIGNATRVSDYVMDMGKAYEATVSIGRSTTTEDQTGDTLETKGVHSADFNKDDIDRLLENFKGVIEQIPPMYSSVKVNGKKLYEYARNNETVERPKRKVNIKDIGRISELDFKENECHFKIRVICGKGTYIRTLATDIGVKLGFPAHMSKLTRIESGGFVLKDSLTLEQIKELHEQDSLQNKLFPLEYGLKGLPSIKIKDSHIKKRILNGQKFNKNEFDNKIKDQIVFIDDDSEKVLAIYMVHPTKESEIKPKKVFN

SEQ ID NO: 70315 - protein, 323 aa, Staphylococcus aureus
MKVIEVTHPIQSKQYITEDVAMAFGFFDGMHKGHDKVFDILNEIAEARSLKKAVMTFDPHPSVVLNPKRKRTTYLTPLSDKIEKISQHDIDYCIVVNFSSRFANVSVEDFVENYIIKNNVKEVIAGFDFTFGKFGKGNMTVLQEYDAFNTTIVSKQEIENEKISTTSIRQDLINGELQKANDALGYIYSIKGTVVQGEKRGRTIGFPTANIQPSDDYLLPRKGVYAVSIEIGTENKLYRGVANIGVKPTFHDPNKAEVVIEVNIFDFEDNIYGERVTVNWHHFLRPEIKFDGIDPLVKQMNDDKSRAKYLLAVDFGDEVAYNI

SEQ ID NO: 70316 - protein, 788 aa, Staphylococcus aureus
MAQAKKKSTAKKKTASKKRTNSRKKKNDNPIRYVIAILVVVLMVLGVFQLGIIGRLIDSFFNYLFGYSRYLTYILVLLATGFITYSKRIPKTRRTAGSIVLQIALLFVSQLVFHFNSGIKAEREPVLSYVYQSYQHSHFPNFGGGVLGFYLLELSVPLISLFGVCIITILLLCSSVILLTNHQHRDVAKVALENIKAWFGSFNEKMSERNQEKQLKREEKARLKEEQKARQNEQPQIKDVSDFTEVPQERDIPIYGHTENESKSQCQPSRKKRVFDAENSSNNIVNHQADQQEQLTEQTHNSVESENTIEEAGEVTNVSYVVPPLTLLNQPAKQKATSKAEVQRKGQVLENTLKDFGVNAKVTQIKIGPAVTQYEIQPAQGVKVSKIVNLHNDIALALAAKDVRIEAPIPGRSAVGIEVPNEKISLVSLKEVLDEKFPSNNKLEVGLGRDISGDPITVPLNEMPHLLVAGSTGSGKSVCINGIITSILLNAKPHEVKLMLIDPKMVELNVYNGIPHLLIPVVTNPHKAAQALEKIVAEMERRYDLFQHSSTRNIKGYNELIRKQNQELDEKQPELPYIVVIVDELADLMMVAGKEVENAIQRITQMARAAGIHLIVATQRPSVDVITGIIKNNIPSRIAFAVSSQTDSRTIIGTGGAEKLLGKGDMLYVGNGDSSQTRIQGAFLSDQEVQDVVNYVVEQQQANYVKEMEPDAPVDKSEMKSEDALYDEAYLFVVEQQKASTSLLQRQFRIGYNRASRLMDDLERNQVIGPQKGSKPRQVLIDLNNDEV

SEQ ID NO: 70317 - protein, 192 aa, Staphylococcus aureus [sequence omitted]

SEQ ID NO: 70318 - protein, 347 aa, Staphylococcus aureus
MDNDRQKALDTVIKNMEKSFGKGAVMKLGDNIGRRVSTTSTGSVTLDNALGVGGYPKGRIIEIYGPESSGKTTVALHAIAEVQSNGGVAAFIDAEHALDPEYAQALGVDIDNLYLSQPDHGEQGLEIAEAFVRSGAVDIVVVDSVAALTPKAEIEGEMGDTHVGLQARLMSQALRKLSGAISKSNTTAIFINQIREKVGVMFGNPETTPGGRALKFYSSVRLEVRRAEQLKQGQEIVGNRTKIKVVKNKVAPPFRVAEVDIMYGQGISKEGELIDLGVENDIVDKSGAWYSYNGERMGQGKENVKMYLKENPQIKEEIDRKLREKLGISDGDVEETEDAPKSLFDEE

SEQ ID NO: 70319 - protein, 265 aa, Staphylococcus aureus
MRIMFIGDIVGKIGRDAIETYIPQLKQKYKPTVTIVNAENAAHGKGLTEKIYKQLLRNGVDFMTMGNHTYGQREIYDFIDEAKRLVRPANFPDEAPGIGMRFIQINDIKLAVINLQGRAFMPDIDDPFKKADQLVKEAQEQTPFIFVDFHAETTSEKYAMGWHLDGRASAVVGTHTHIQTADERILPKGTGYITDVGMTGFYDGILGINKTEVIERFITSLPQRHVVPNEGRSVLSGVVIDLDKEGKTKHIERILINDDHPFSTF

SEQ ID NO: 70320 - protein, 272 aa, Staphylococcus aureus
MNVYLAEFLGTAILILFGGGVCANVNLKRSAANGADWIVITAGWGLAVTMGVFAVGQFSGAHLNPAVSLALALDGSFDWSLVPGYIVAQMLGAIVGATIVWLMYLPHWKATEEAGAKLGVFSTAPAIKNYFANFLSEIIGTMALTLGILFIGVNKIADGLNPLIVGALIVAIGLSLGGATGYAINPARDLGPRIAHAILPIAGKGGSNWSYAIVPILGPIAGGLLGAVVYAVFYKHTFNIGCAIAIVVVIITLILGYILNKSSKKGDIESIY

SEQ ID NO: 70321 - protein, 460 aa, Staphylococcus aureus
MKVSKFGGSSVSNATQIKKVLNIVNSDPERKIVIVSAPGKRHDNDIKTTDLLIRLYEKVINHLDYHDKKREIIQRYDDIVKELQMDESILRTIDVTLEHYINQLKNEPKRLLDALLSCGEDFNAQLIALYNNSQGIPTKYISPKEAGIFVTDVPQEAQILDSAYSEIKKLRDYDEKLIIPGFFGVSHEGYIVTFPRGGSDITGAIISSGVRATIYENFTDVSGIYKANPNIIKDPELIEEITYREMRELSYAGFSVFHDEALQPLYKDRIPVVIKNTNRPQDKGTFIVHDREINAKNVISGISCDKDFTVINIKKYLMNRQVGFTRKILGVLEDNNISFDHMPSGIDTISIVMRSKQIQNKETKVLNEIRQKCDVDELSIEHDLAILMIVGEGMNKVIGTANKITHALAESKINLKMINQGASEISMMFGIHVDDAEKAVLSTYEFCYHGVALKNLCDKN

SEQ ID NO: 70322 - protein, 507 aa, Staphylococcus aureus
MTMSQQDKKLTGVFGHPVSDRENSMTAGPRGPLLMQDIYFLEQMSQFDREVIPERRMHAKGSGAFGTFTVTKDITKYTNAKIFSEIGKQTEMFARFSTVAGERGAADAERDIRGFALKFYTEEGNWDLVGNNTPVFFFRDPKLFVSLNRAVKRDPRTNMRDAQNNWDFWTGLPEALHQVTILMSDRGIPKDLRHMHGFGSHTYSMYNDSGERVWVKFHFRTQQGIENLTDEEAAEIIATDRDSSQRDLFEAIEKGDYPKWTMYIQVMTEEQAKNHKDNPFDLTKVWYHDEYPLIEVGEFELNRNPDNYFMDVEQAAFAPTNIIPGLDFSPDKMLQGRLFSYGDAQRYRLGVNHWQIPVNQPKGVGIENICPFSRDGQMRVVDNNQGGGTHYYPNNHGKFDSQPEYKKPPFPTDGYGYEYNQRQDDDNYFEQPGKLFRLQSEDAKERIFTNTANAMEGVTDDVKRRHIRHCYKADPEYGKGVAKALGIDINSIDLETENDETYENFEK

SEQ ID NO: 70323 - protein, 49 aa, Staphylococcus aureus
MRVNVTLACTECGDRNYITTKNKRNNPERIEMKKYCPRLNKYTLHRETK

SEQ ID NO: 70324 - protein, 89 aa, Staphylococcus aureus
MAKKSKIAKERKREELVNKYYELRKELKAKGDYEALRKLPRDSSPTRLTRRCKVTGRPRGVLRKFEMSRIAFREHAHKGQIPGVKKSSW

SEQ ID NO: 70325 - protein, 325 aa, Staphylococcus aureus
MKIFDYEDIQLIPNKCIVESRSECDTTIQFGPKKFKLPVVPANMQTVMNEKLAKWFAENDYFYIMHRFDEEARIPFIKHMQNSGLFASISVGVKKAEFDFIEKLAQEKLIPEYITIDIAHGHSDSVINMIKHIKNHIPDSFVIAGNVGTPEGVRELENAGADATKVGIGPGRVCITKIKTGFGTGGWQLAALNICSKAARKPLIADGGIRTHGDIAKSIRFGASMVMIGSLFAAHEESPGETVELDGKQYKEYFGSASEFQKGEHKNVEGKKMFVEHKGSLMDTLKEMQQDLQSSISYAGGKDLKSLRTVDYVIVRNSIFNGDRD

SEQ ID NO: 70326 - protein, 373 aa, Staphylococcus aureus
MKIIHTADWHLGKILNGKQLLEDQAYILDMFVEKMKEEEPDIIVIAGDLYDTTYPSKDAIMLLEQAIGKLNLELRIPIIMISGNHDGKERLNYGASWFEHNQLFIRTDFTSINSPIEINGVNFYTLPYATVSEMKHYFEDDTIETHQQGITRCIETIAPEIDEDAVNILISHLTVQGGKTSDSERPLTIGTVESVQKGVFDIFDYVMLGHLHHPFSIEDDKIKYSGSLLQYSFSEAGQAKGYRRLTINDGIINDVFIPLKPLRQLEIISGEYNDVINEKVHVKNKDNYLHFKLKNMSHITDPMMSLKQIYPNTLALTNETFNYNEENNAIEISEKDDMSIIEMFYKHITDKELSDIQSKKIKNILENELRKED

SEQ ID NO: 70327 - protein, 332 aa, Staphylococcus aureus
MTLLTRIKTETILLESDIKELIDILISPSIGTDIKYELLSSYSEREIQQQELTYIVRSLINTMYPHQPCYEGAMCVCGTGGDKSNSFNISTTVAFVVASAGVKVIKHGNKSITSNSGSTDLLNQMNIQTTTVDDTPNQLNEKDLVFIGATESYPIMKYMQPVRKMIGKPTILNLVGPLINPYHLTYQMVGVFDPTKLKLVAKTIKDLGRKRAIVLHGANGMDEATLSGDNLIYELTEDGEIKNYTLNATDYGLKHAPNSDFKGGSPEENLAISLNILNGKDQSSRRDVVLLNAGLSLYVAEKVDTIAEGIELATTLIDNGEALKKYHQMRGE

SEQ ID NO: 70328 - protein, 260 aa, Staphylococcus aureus
MTILAEIVKYKQSLLQNGYYQDKLNTLKSVKIQNKKSFINAIEKEPKLAIIAEIKSKSPTVNDLPERDLSQQISDYEKYGANAVSILTDEKYFGGSFERLQALTTKTTLPVLCKDFIIDPLQIDVAKQAGASMILLIVNILSDKQLKDLYNYAISQNLEVLIEVHDRHELERAYKVNAKLIGVNNRDLKRFVTNVEHTNTILENKKPNHHYISESGIHDASDVRKILHSGIDGLLIGEALMRCDNLSEFLPQLKMQKVKS

SEQ ID NO: 70329 - protein, 404 aa, Staphylococcus aureus
MNKQIQTEADELGFFGEYGGQYVPETLMPAIIELKKAYKEAKADPEFQRELEYYLSEYVGRATPLTYAASYTESLGGAKIYLKREDLNHTGAHKINNALGQALLAKRMGKKKLVAETGAGQHGVASATVAALFDMELVVFMGSEDIKRQQLNVFRMELLGAKVVAVEEGQGTLSDAVNKALQYWVSHVDDTHYLLGSALGPDPFPTIVRDFQSVIGKEIKSQILKKEGRLPDAIVACIGGGSNAIGTFYPFIKDDVALYGVEAAGQGEDTDKHALAIGKGSPGVLHGTKMYLIQDEGGQVQLAHSISAGLDYPGIGPEHSYYHDIGRVTFENASDTQAMNALINFTKHEGIIPAIESAHALSYVERLAPTMSKEDIIVVTISGRGDKDMETIRQYMAERGLAND

SEQ ID NO: 70330 - protein, 283 aa, Staphylococcus aureus
MAQTLAQTKQISQSHTFDVSQSHHKTPDDTNSHSVIYSTQNLDLWYGENHALQNINLDIYENQITAIIGPSGCGKSTYIKTLNRMVELVPSVKTAGKILYRDQDIFDQKYSKEQLRTNVGMVFQQPNPFPKSIYDNITYGPKIHGIKNKKVLDEIVEKSLRGAAIWDELKDRLHTNAYSLSGGQQQRVCIARCLAIEPEVILMDEPTSALDPISTLRVEELVQELKEKYTIIMVTHNMQQAARVSDKTAFFLNGYVNEYDDTDKIFSNPSNKKTEDYISGRFG

SEQ ID NO: 70331 - protein, 239 aa, Staphylococcus aureus
MVQHLTAEEIIQYISDAKKSTPIKVYLNGNFEGITYPESFKVFGSEQSKVIFCEADDWKPFYEAYGSQFEDIEIEMDRRNSAIPLKDLTNTNARIEPGAFIREQAIIEDGAVVMMGATINIGAVVGEGTMIDMNATLGGRATTGKNVHVGAGAVLAGVIEPPSASPVIIEDDVLIGANAVILEGVRVGKGAIVAAGAIVTQDVPAGAVVAGTPAKVIKQASEVQDTKKEIVAALRKLND

SEQ ID NO: 70332 - protein, 451 aa, Staphylococcus aureus
MTKRKLRNNWIIVTTMITFVTIFLFCLIIIFFLKDTLHNSELDDAERSSSDINNLFHSKPVKDISALDLNASLGNFQEIIIYDEHNNKLFETSNDNTVRVEPGYEHRYFDRVIKKRYKGIEYLIIKEPITTQDFKGYSLLIHSLENYDNIVKSLYIIALAFGVIATIITATISYVFSTQITKPLVSLSNKMIEIRRDGFQNKLQLNTNYEEIDNLANTFNEMMSQIEESFNQQRQFVEDASHELRTPLQIIQGHLNLIQRWGKKDPAVLEESLNISIEEMNRIIKLVEELLELTKGDVNDISSEAQTVHINDEIRSRIHSLKQLHPDYQFDTDLTSKNLEIKMKPHQFEQLFLIFIDNAIKYDVKNKKIKVKTRLKNKQKIIEITDHGIGIPEEDQDFIFDRFYRVDKSRSRSQGGNGLGLSIAQKIIQLNGGSIKIKSEINKGTTFKIIF

SEQ ID NO: 70333 - protein, 204 aa, Staphylococcus aureus
MSQWKRISLLIVFALVFGIIAFFHESRLGKWIDNEVYEFIYSSESFITTSIMLGATKVGEVWAMLCISLLLVAYLMLKRHKIEALFFALTMALSGILNPALKNIFDRERPTLLRLIDITGFSFPSGHAMGSTAYFGSGIYLLNRLNQGNSKGILIGLCAAMILLISISRVYLGVHYPTDIIAGIIGGVFCIILSTLLLRNKLIN

SEQ ID NO: 70334 - protein, 356 aa, Staphylococcus aureus
MTKIAFTGGGTVGHVSVNLSLIPTALSQGYEALYIGSKNGIEREMIESQLPEIKYYPISSGKLRRYISLENAKDVFKVLKGILDARKVLKKEKPDLLFSKGGFVSVPVVIAAKSLNIPTIIHESDLTPGLANKIALKFAKKIYTTFEETLNYLPKEKADFIGATIREDLKNGNAHNGYQLTGFNENKKVLLVMGGSLGSKKLNSIIRENLDALLQQYQVIHLTGKGLKDAQVKKSGYIQYEFVKEDLTDLLAITDTVISRAGSNAIYEFLTLRIPMLLVPLGLDQSRGDQIDNANHFADKGYAKTIDEEQLTAQILLQELNEMEQERTRIINNMKSYEQSYTKEALFDKMIKDALN

SEQ ID NO: 70335 - protein, 318 aa, Staphylococcus aureus
MLNSFDAAYHSLCEEVLEIGNTRNDRTNTGTISKFGHQLRFDLSKGFPLLTTKKVSFKLVATELLWFIKGDTNIQYLLKYNNNIWNEWAFENYIKSDEYNGPDMTDFGHRALSDPEFNEQYKEQMKQFKQRILEDDTFAKQFGDLGNVYGKQWRDWVDKDGNHFDQLKTVIEQIKHNPDSRRHIVSAWNPTEIDTMALPPCHTMFQFYVQDGKLSCQLYQRSADIFLGVPFNIASYALLTHLIAKECGLEVGEFVHTFGDAHIYSNHIDAIQTQLARESFNPPTLKINSDKSIFDINYEDLEIVDYESHPAIKAPIAV

SEQ ID NO: 70336 - protein, 61 aa, Staphylococcus aureus
MLTFSEQNTLAKIDDLMNTYCNQCPIKTRLRKLEGKTKAHHFCINECSIGKEIKQLGNELQ

SEQ ID NO: 70337 - protein, 234 aa, Staphylococcus aureus
MYNEILGLVTFIATFVLMVLMYRFFGKQGLIAWVAIGTIIANIQVIKTVEIFGISATLGNVMFASIYLATDILNDIYGRRVAKRAVWLGFSSTLIMIIVMQLSLHFIPAPEDMAQKALHAIFDVVPRIALGSIVAYIIGQHIDVFIFSLIKKVFSSDKTFFIRAYGSTFLSSIIDTALFVAIAFIGSLPGTVVFEIFITTYVLKLASTVFNVPFGYIAKSFYRKGKIDKLDQGY

SEQ ID NO: 70338 - protein, 440 aa, Staphylococcus aureus
MSNGKELQKNIGFFSAFAIVMGTVIGSGVFFKISNVTEVTGTAGMALFVWFLGGIITICAGLTAAELAAAIPETGGLTKYIEYTYGDFWGFLSGWAQSFIYFPANVAALSIVFATQLINLFHLSIGSLIPIAIASALSIVLINFLGSKAGGILQSVTLVIKLIPIIVIVIFGIFQSGDITFSLIPTTGNSGNGFFTAIGSGLLATMFAYDGWIHVGNVAGELKNPKRDLPLAISVGIGCIMAVYLLINATFLLTLPIELLAGNLNAASDTSKILFGENGGKIITIGILISVYGTINGYTMTGMRVPYAMAERKLLPFSHLFAKLTKSGAPWFGAIIQLIIAIIMMSMGAFDTITNMLIFVIWLFYCMSFVAVIILRKREPNMERPYKVPLYPIIPLIAILAGSFVLINTLFTQFILAIIGILITALGIPVYYYKKKQKAA

SEQ ID NO: 70339 - protein, 446 aa, Staphylococcus aureus
MKNTFNPLQRLHFYAAIFIAPLLITLTISGIGYLFFPEVENNIYKNEFFGDSDVKTHQTLNDAVHQVEQQYEGFFVSKVSILDEPYNKRITLSDMAGNQRYVFLDHNNQFVADQNAKHTYSNVMRSIHSSLFTENTIINYLVELTACWTIFMILSGTYLLIKKHLISNKSKALRWQKWHAMIGVIIAIPVFVLVLTGLPWSGFMGSKIAGMMDTNGDLGQGELAINPPKSDLNELPWATRKNKQPASSEKGSSGHHGNAAMPQTKLDYQISIDKVVVQAQKAGIKKPFSIVYPSDKNGTFIVSNTSNSGVTGLDVSPYKEQTLYFDQYSGKKLGTIKYDDYGIIAKWFTWGIPLHEGHLFGILNKIINLFVCITLLVAIGMGFVSWIKRTKNTAVKVPHRVKKPASISLIICLIVLGLLMPLFGLSLILVFIIELILYIKDRRAKQ

SEQ ID NO: 70340 - protein, 114 aa, Staphylococcus aureus
MSDVSLKLSAKDIYEKDFEKTMARGYRREEVDAFLDDIIADYQKMADMNNEVVKLSEENHKLKKELEELRLRVATSRPQDNKSFSSNNTTTNTSSNNVDILKRISNLEKAVFGK

SEQ ID NO: 70341 - protein, 430 aa, Staphylococcus aureus
MKTTIKQAKDHLNQDVTIGAWLTNKRSSGKIAFLQLRDGTGFMQGVVVKSEVDEEVFKLAKEIAQESSLYVTGTITEDNRSDLGYEMQVKSIEVISEAHDYPITPKNHGTEFLMDHRHLWLRSKKQHAVMKIRNEVIRATYEFFNKDGFTKVDPPILTASAPEGTSELFHTKYFDQDAFLSQSGQLYLEAAAMAHGKVFSFGPTFRAEKSKTRRHLIEFWMIEGEMAFTNHAESLEIQEQYVTHVVKSVLENCKLELKILERDTSKLEKVATPFPRISYDDAIEFLKAEGFDDIEWGEDFGAPHETAIANHYDLPVFITNYPTKIKPFYMQPNPENEETVLCADLIAPEGYGEIIGGSERVDDLELLEQRVKEHGLDEEAYSYYLDLRRYGSVPHCGFGLGLERTVAWISGVEHVRETAPFPRLLNRLYP

SEQ ID NO: 70342 - protein, 332 aa, Staphylococcus aureus
MTKITVFGMGSFGTALANVLAENGHDVLMWGKNQDAVDELNTCHTNKKYLKYAKLDVNIIATSDMTKAIQFADIYLMALPTKAMREVATQINDKLTSKKTFIHVAKGIENGTFKRVSEMIEDSISPEYNAGIGVLSGPSHAEEVVVKQPTTVAASSKDKSVSKLTQDLFMNDYLRVYTNDDLIGVELGGALKNIIAVASGIVAGIGYGDNAKAALMTRGLAEISRLGEKLGADPMTFLGLGGIGDLIVTCISTHSRNFTLGYKLGQGESMDQALSEMNMVVEGIYTTKSVYHLAKEKNVDMPITNALYRVLFENISVKECVKDLMERDKKSE

SEQ ID NO: 70343 - protein, 219 aa, Staphylococcus aureus
MKAINIALDGPAAAGKSTIAKRVASELSMIYVDTGAMYRALTYKYLKLNKTEDFAKLVDQTTLDLTYKADKGQCVILDNEDVTDFLRNNDVTQHVSYVASKEPVRSFAVKKQKELAAEKGIVMDGRDIGTVVLPDADLKVYMIASVEERAERRYKDNQLRGIESNFEDLKRDIEARDQYDMNREISPLRKADDAVTLDTTGKSIEEVTDEILAMVSQIK

SEQ ID NO: 70344 - protein, 318 aa, Staphylococcus aureus
MLKKAKLILIAVLVLSGCSTIENESKKDRNTETNTETKSVPEEMEASKYVGQGFQPPAEKDAIEFSKKHKDKIAKRGEQFFMDNFGLKVKATNVVGSGDGVEVFVHCDDHDIVFNASIPFDKSIIESDSSLRSEDKGDDMSTLVGTVLSGFEYRAHKEELDNLTEVLKEYKSKYKYTGYTENAIMKTQNSGFRNEYYYLTAIPYTLDEYKRYFQPLIKEDDKSFRDGMRNSKKQLKDKSRPYVVTTLFSTKDNFTKDNTIDEMIDFSEVLKKKKNIPHDLNVSLQISNKYINTKRPNYSKKEVIEVGVFNHEKANTND

SEQ ID NO: 70345 - protein, 301 aa, Staphylococcus aureus
MFKRTKLILIATILLSGCSTTNNESNNETKSVPEEMEASKYVGQGFQPPAEKDAIEFSKKHKDKIAKRGEQFFMDNFGLKVKATNVVGSGDGVEVFVHCDDHDIVFNASIPFDKSIIESDSSLRSEDKGDDMSTLVGTVLSGFEYRAQKEKYDNLYKFLKENEKKYQYTGFTKEAINKTQNSGYENEYFYIVANIPTLQEYRKYYEPLIKKNNLNFKKGMKQARKGVGYKAAIEVHTTLFSRSSNFSKDKKLDDVLDLSESTKKLHLNFENTKIFLQLAKSTISTNRVNYSDNESIRIEVE

SEQ ID NO: 70346 - protein, 295 aa, Staphylococcus aureus
METIIEEYLRFIQIEKGLSSNTIGAYRRDLKKYQDYMTEHHISHIDFIDRQLIQECLGHLIDQGQSAKSIARFISTIRSFHQFAIREKYAAKDPTVLLDSPKYDKKLPDVLNVDEVLALLETPDLNKINGYRDRTMLELLYATGMRVSELIHLELENVNLIMGFVRVFGKGDKERIVPLGDAVIEYLTTYIETIRPQLLKKTVTEVLFLNMHGKPLSRQAIWKMIKQNGVKANIKKTLTPHTLRHSFATHLLENGADLRAVQEMLGHSDISTTQLYTHVSKSQIRKMYNQFHPRA

SEQ ID NO: 70347 - protein, 129 aa, Staphylococcus aureus
MSRKESRVQAFQTLFQLEMKDSDLTINEAISFIKDDNPDLDFEFIHWLVSGVKDHEPVLDETISPYLKDWTIARLLKTDRIILRMATYEILHSDTPAKVVMNEAVELTKQFSDDDHYKFINGVLSNIKK

SEQ ID NO: 70348 - protein, 154 aa, Staphylococcus aureus
MNFKEIKELIEILDKSTLTEINIEDTKGKVTLKKEKETEIITPQISQMPVEAAAMPMPQAQSTDSNKTEAPKPTSDNHKTINAPMVGTFYKSPSPDEEAYVQVGDTVSNETTVCILEAMKLFNEIQAEISGEIVEILVEDGQMVEYGQPLFKVK

SEQ ID NO: 70349 - protein, 193 aa, Staphylococcus aureus
MKKLVSIVGATLLLAGCGSQNLAPLEEKTTDLREDNHQLKLDIQELNQQISDSKSKIKGLEKDKENSKKTASNNTKIKLMNVTSTYYDKVAKALKSYNDIEKDVSKNKGDKNVQSKLNQISNDIQSAHTSYKDAIDGLSLSDDDKKTSKNIDKLNSDLNHAFDDIKNGYQNKDKKQLTKGQQALSKLNLNAKS

SEQ ID NO: 70350 - protein, 128 aa, Staphylococcus aureus
MSASLYIAIILVIAIIAYMIVQQILNKRAVKELDQNEFHNGIRKAQVIDVREKVDYDYGHINGSRNIPMTMFRQRFQGLRKDQPVYLCDANGIASYRAARILKKNGYTDIYMLKGGYKKWTGKIKSKK

SEQ ID NO: 70351 - protein, 490 aa, Staphylococcus aureus
MTSKSSPLIFERSREGRYAYSLPKSDIKTNSVESLLDDKFIRKNKAEFPEVAELDLVRHYTELSNKNFGVDNGFYPLGSCTMKYNPKINEKVARIPGFSESHPLQDEDQVQGSLEIIYSLQEELKEITGMDEVTLQPAAGAHGEWTALMIFKAYHENNGEGHRDEVIVPDSAHGTNPASASFAGFKSVTVKSNERGEVDIDDLKRVVNENTAAIMLTNPNTLGIFEKNIMEIREIVHNAGGLLYYDGANLNAIMDKVRPGDMGFDAVHLNLHKTFTGPHGGGGPGSGPVGVVKELASYLPKPMVIKDGDKFKYDNDIKNSIGRVKPFYGNFGIYLRAYTYIRTMGATGLKEVSEAAVLNANYIKARLSEHFEIPYKQYCKHEFVLSGVRQKEFGVRTLDMAKRLLDFGVHPPTIYFPLNVEEGMMIEPTETESKETLDYFIDTLISIAEEAKNDPDKVLEAPHTTVIDRLDEATAARKPILKFENLKQEK

SEQ ID NO: 70352 - protein, 179 aa, Staphylococcus aureus
MTKNEIRKYILHKMKNFNKAEKRKADTWLRNQFFATEEYKEANAIALVLSFNHEVDTFSIIEQALMDHKRIFVPKMDYLNHQMTFKEIFNLKDIDVDNKGIYYPTSKGETTNNLDLIVVPGVGFQDDGYRIGYGGGYYDRFLANYQTKTISLLYDFQITSFEPESFDQPVDKLIIYQSA

SEQ ID NO: 70353 - protein, 368 aa, Staphylococcus aureus
MSDNTVKIKKQTIDPTLTLEDVKKQLIEKGKKEGHLSHEEIAEKLQNFDIDSDQMDDFFDQLNDNDISLVNEKDSSDTDEKLNPSDLSAPPGVKINDPVRMYLKEIGRVNLLSAQEEIELAKRIEQGDEVAKSRLAEANLRLVVSIAKRYVGRGMLFLDLIQEGNMGLIKAVEKFDFNKGFKFSTYATWWIRQAITRAIADQARTIRIPVHMVETINKLIRVQRQLLQDLGRDPAPEEIGEEMDLPAEKVREILKIAQEPVSLETPIGEEDDSHLGDFIEDQEAQSPSDHAAYELLKEQLEDVLDTLTDREENVLRLRFGLDDGRTRTLEEVGKVFGVTRERIRQIEAKALRKLRHPSRSKRLKDFMD

SEQ ID NO: 70354 - protein, 605 aa, Staphylococcus aureus
MRIDQSIINEIKDKTDILDLVSEYVKLEKRGRNYIGLCPFHDEKTPSFTVSEDKQICHCFGCKKGGNVFQFTQEIKDISFVEAVKELGDRVNVAVDIEATQSNSNVQIASDDLQMIEMHELIQEFYYYALTKTVEGEQALTYLQERGFTDALIKERGIGFAPDSSHFCHDFLQKKGYDIELAYEAGLLSRNEENFSYYDRFRNRIMFPLKNAQGRIVGYSGRTYTGQEPKYLNSPETPIFQKRKLLYNLDKARKSIRKLDEIVLLEGFMDVIKSDTAGLKNVVATMGTQLSDEHITFIRKLTSNITLMFDGDFAGSEATLKTGQHLLQQGLNVFVIQLPSGMDPDEYIGKYGNDAFTTFVKNDKKSFAHYKVSILKDEIAHNDLSYERYLKELSHDISLMKSSILQQKAINDVAPFFNVSPEQLANEIQFNQAPANYYPEDEYGGYDEYGGYIEPEPIGMAQFDNLSRQEKAERAFLKHLMRDKDTFLNYYESVDKDNFTNQHFKYVFEVLHDFYAENDQYNISDAVQYVNSNELRETLISLEQYNLNDEPYENEIDDYVNVINEKGQETIESLNHKLREATRIGDVELQKYYLQQIVAKNKERM

SEQ ID NO: 70355 - protein, 272 aa, Staphylococcus aureus
MEKIKIIVASDSIGETAELVARAGISQFNPKQCKNELLRYPYIESFEDVDEVIQVAKDTNAIIVYTLIKPEMKQYMSEKVAEFQLKSVDIMGPLMDLLSASVEEKPYNEPGIVHRLDDAYFKKIDAIEFAVKYDDGKDPKGLPKADIVLLGISRTSKTPLSQYLAHKSYKVMNVPIVPEVTPPDGLYDIDPKKCIALKISEEKLNRIRKERLKQLGLGDTARYATEARIQEELNYFEEIVSEIGCPVIDVSQKAIEETANDIIHYIEQNKSK

SEQ ID NO: 70356 - protein, 114 aa, Staphylococcus aureus
MKRFKYALDGLKILIQKDYKFLLHVFAMIVAIVFGLVLNINRIEWIFILIAIALVLTVEALNTAIEYVVDLVTVEYHDLAKYAKDIAAFSVLIVSILAFIIGLIVFLPHFIALF

SEQ ID NO: 70357 - protein, 58 aa, Staphylococcus aureus
MSKTVVRKNESLEDALRRFKRSVSKSGTIQEVRKREFYEKPSVKRKKKSEAARKRKFK

SEQ ID NO: 70358 - protein, 250 aa, Staphylococcus aureus
MQRYFIDQNADVSQRFFITKKEDIHHITNVMRYDVGSKIILTFNDQTVYLCEIADITSDKIAVDLKEKQNINTELPVDVTICSGLIKADKYEWLLQKATELGASSFIAVSMERSIVKLNEAKVVKKIERWQKIIKEAAEQSYRLVIPSIQFESNLKLICDTIDNYDYILIAYEEEAKDGELSNFKQTLQQFKAQDKVLMIFGPEGGLSENEISLFSNTSTVVGLGPRILRAETAPLYALSAISYEKELMG

SEQ ID NO: 70359 - protein, 83 aa, Staphylococcus aureus
MANIKSAIKRVKTTEKAEARNISQKSAMRTAVKNAKTAVSNNADNKNELVSLAVKLVDKAAQSNLIHSNKADRIKSQLMTANK

SEQ ID NO: 70360 - protein, 422 aa, Staphylococcus aureus
MKTIEEIKSTPKTVMKKPELLAPAGNLEKLKIAVHYGADAVFLGGQEYGLRSNADNFTMEEIAEGVEFANRYGAKIYVTTNIIAHDENIEGLESYLRNLEKTGATGIIVADPLIIETCKEVAPKLEIHLSTQQSLSNYKAVEYWKEEGLDRVVLARETGAMEMREMKEKVDIEIEAFIHGAMCIAYSGRCTLSNHMTARDSNRGGCCQSCRWDYELLEVDDNGELDVFYNQGEVTPFAMSPKDLKLIESIPQMMDIGVDSLKIEGRMKSIHYIATVVSVYRKVIDAYAADPDNFKINPEWLIELDKCANRDTAPAFFEGTPGYEEQMFGQQQSKKSPFDFCGLVLDYNEDTKIATIQQRNNFKPGQEIEFFGPEIETFTQVVEAIYDEEGNSLDAARHPLQIVQIKVDRPIYPNNMMRKEIG

SEQ ID NO: 70361 - protein, 424 aa, Staphylococcus aureus
MSTEPLASRMRPKNIDEIISQQHLVGPKGIIRRMVDTKKLTSMIFYGPPGIGKTSIAKAISGSTQYKFRQLNAVTNTKKDMQLVVEEAKMSGQVILLLDEIHRLDKAKQDFLLPHLENGKIVLIGATTSNPYHAINPAIRSRAQIFELYPLNDEDVRQALTRAIEDDENGLKTYQPKIDEDAMTYFSTQSQGDVRSALNALELAVLSADNDKDGYRHVTLQDAKDCLQKGAFVSDKDGDMHYDVMSAFQKSIRGSDVNAALHYLARLIEAGDLPTIVRRLLVISYEDIGLASPNAGQRTLAAIESAERLGLPEARIPLSQAVIELCLSPKSNSAMSAIDSALSDIRNGHVGQIPNHLKDGHYQGAKDLGRSIGYKYPHQYVNGYVSQQYLPDKLKNKIYYEPKTTSKSEQQLKEIYNNLLKQRP

SEQ ID NO: 70362 - protein, 729 aa, Staphylococcus aureus
MNNEYPYSADEVLHKAKSYLSADEYEYVLKSYHIAYEAHKGQFRKNGLPYIMHPIQVAGILTEMRLDGPTIVAGFLHDVIEDTPYTFEDVKEMFNEEVARIVDGVTKLKKVKYRSKEEQQAENHRKLFIAIAKDVRVILVKLADRLHNMRTLKAMPREKQIRISRETLEIYAPLAHHLGINTIKWELEDTALRYIDNVQYFRIVNLMKKKRSEREAYIETAIDRIRTEMDRMNIEGDINGRPKHIYSIYRKMMKQKKQFDQIFDLLAIRVIVNSINDCYAILGLVHTLWKPMPGRFKDYIAMPKQNLYQSLHTTVVGPNGDPLEIQIRTFDMHEIAEHGVAAHWAYKEGKKVSEKDQTYQNKLNWLKELAEADHTSSDAQEFMETLKYDLQSDKVYAFTPASDVIELPYGAVPIDFAYAIHSEVGNKMIGAKVNGKIVPIDYILQTGDIVEIRTSKHSYGPSRDWLKIVKSSSAKGKIKSFFKKQDRSSNIEKGRMMVEVEIKEQGFRVEDILTEKNIQVVNEKYNFANEDDLFAAVGFGGVTSLQIVNKLTERQRILDKQRALNEEQEVTKSLPIKDNIITDSGVYVEGLENVLIKLSKCCNPIPGDDIVGYITKGHGIKVHRTDCPNIKNETERLINVEWVKSKDATQKYQVDLEVTAYDRNGLLNEVLQAVSSTAGNLIKVSGRSDIDKNAIINISVMVKNVNDVYRVVEKIKQLGDVYTVTRVWN

SEQ ID NO: 70363 - protein, 379 aa, Staphylococcus aureus
MPAVTYEHIKTCKQSGARLGIVHTPHGSFETPMFMPVGTKATVKTMSPEELRQIEAKIILGNTYHLWLQPGNDIIKHAGGLHKFMNWDGPILTDSGGFQVFSLSNLRKITEEGVEFRHHTNGSKLFLSPEKSMQIQNDLGSDIMMAFDECPPMPAEYDYVKKSIERTTRWAKRCLDAHQRPEDQALFGIIQGGEYEDLREQSAKDLVELDFPGYAIGGLSVGEPKPVMYKMVEHTEQFMPKDKPRYLMGVGSPDALIECSIRGMDMFDCVLPTRIARNGTCMTSQGRLVIKNAKFADDLRPLDENCDCYTCQNYSRAYIRHLIKAEETFGIRLTTIHNLHFLLKLMEDIRQAIREDRLLDFKEEFFEQYGLNVENPKNF

SEQ ID NO: 70364 - protein, 341 aa, Staphylococcus aureus
MNIEEFDYDLPESLIAQTPLKDRDHSRLLVMDRETGEMKHLHFKDIIEYFRPGDTLVLNDTRVMPARLFGLKEETGAKVEMLMLTQIEGNDWEVLLKPAKRIKVGNKLNFGNGKIIAECIKEMDQGGRIMRLHYEGILQERLDELGEMPLPPYIKERLDDPDRYQTVYAKESGSAAAPTAGLHFTDELLTEIKNKGVNIAFVTLHVGLGTFRPVSVDDVNDHEMHSEYYQMTQETADLLNDTKSKGHRIISVGTTSTRTLETIRRDHDKFVETSGWTNIFIYPGFDFKAIDGQITNFHLPKSTLVMLVSAFSTRENVLNAYKTAVNLEYRFFSFGDAMLII

SEQ ID NO: 70365 - protein, 184 aa, Staphylococcus aureus
MKIKEMVTSEMPRERLLSHGAKSLSNTELLAILINTGRKGFSSIDISNELLKSASNLNELKKSSINDLIKVKGIGLQKAITLKAAFELGERMGRRAENNRIKITQPSDVADYMIPTMKDLTQEHFVILLLNSKNVVIKETCVFKGTLNSSIVHPREIFSIAVRENANAIIAVHNHPSGDVLTIV

SEQ ID NO: 70366 - protein, 448 aa, Staphylococcus aureus
MHFIAISINHRTADVALREQVAFRDDALRIAHEDLYETKSILENVILSTCNRTEVYAVVDQIHTGRYYIQRFLARAFGFEVDDIKAMSEVKVGDEAVEHLLRVTSGLDSIVLGETQILGQIRDAFFLAQSTGTTGTIFNHLFKQAITFAKRAHNETDIADNAVSVSYAAVELAKKVFGKLKSKQAIIIGAGEMSELSLLNLLGSGITDITVVNRTIENAMKLAAKHQVKYDELSSLPNLLESADIVISSTSAQSYIITNEMIERIAENRKQDSLVLIDIAVPRDIEPGISAITNIFNYDVDDLKGLVDANLRERQLAAATISEQIPAEIHAHNEWISMLGVVPVIRALREKAMAIQAETMDSIDRKLPGLSERERKIISKHTKSIINQMLKDPIKQAKELSSDKKSNEKLELFQNIFDIEAECPHEQAKQQKESKVKEISARRIFSFE

SEQ ID NO: 70367 - protein, 420 aa, Staphylococcus aureus
MFKFNEDEENLKCSFCGKDQDQVKKLVAGSGVYICNECIELCSEIVEEELAQNTSEAMTELPTPKEIMDHLNEYVIGQEKAKKSLAVAVYNHYKRIQQLGPKEDDVELQKSNIALIGPTGSGKTLLAQTLAKTLNVPFAIADATSLTEAGYVGDDVENILLRLIQAADFDIDKAEKGIIYVDEIDKIARKSENTSITRDVSGEGVQQALLKILEGTTASVPPQGGRKHPNQEMIQIDTTNILFILGGAFDGIEEVIKRRLGEKVIGFSSNEADKYDEQALLAQIRPEDLQAYGLIPEFIGRVPIVANLETLDVTALKNILTQPKNALVKQYTKMLELDDVDLEFTEEALSAISEKAIERKTGARGLRSIIEESLIDIMFDVPSNENVTKVVITAQTINEETEPELYDAEGNLINNSKTSA

SEQ ID NO: 70368 - protein, 290 aa, Staphylococcus aureus
MPELPEVEHVKRGIEPYVINQKIEHVIFSDKVIEGKAQGKETIIKGIELDTFKTLSEGYTITNVERRSKYIVFQLDNKREQRTLISHLGMAGGFFIVDELEDIMIPNYRKHWHVIFELSNDKKLIYSDIRRFGEIRNVASVASYPSFLEIAPEPFTNEALTYYLNRIHQQSNKNKPIKQVILDHKVIAGCGNIYACEALFRAGVLPDKKVKDLTHQQQEMVFYYVREVLEEGIKHGGTSISDYRHADGKTGEMQLHLNVYKQPVCKVCGSQIETKIIATRNSHYCPVCQK

SEQ ID NO: 70369 - protein, 876 aa, Staphylococcus aureus
MNKLVLIDGNSLSFRAFYALPLLSNKAGIHTNAVYGFAMLLEKILKEEKPNHFLVAFDAGKTTFRHEKYSEYKGGRQKTPPELSEQFPYIRQLLDAYHIKRYELDNYEADDIIGTLSKEADKAGFQTIIITGDRDLTQLATDNVTIYYTKKGVTDVDHYTPDFIAEKYNGLTPNQIIDMKGLMGDTSDNIPGVAGVGEKTAIKLLNQFDTVEGVYEHLDEISGKKLKEKLQNSKEDALMSKELATINVDSPIEVKLEDTLMTHQDEQQEKIELFKKLEFKQLLSDIDQSASVEDAIEKTFEIETSFDNIDFTSLKEAAIHFELDGGNYLRNNILKFSLFTGEKHIVINADDINNYAELVSWLENPNTKKVVYDAKKTYVASHRLGIDIQNISFDIMLASYIIDPSRTISDVQSVVSLYGQSFVKDDVSIYGKGKKFKVPEDDVLNPYVASITDAIYFAKPNMDKQLEEYNQVELLADLELPLAKILSEMEEIGIFTDVHDLEEMEKEIQEKLDVLIRNIHDAAGEDFNINSPKQLGVVLFETLQLPVIKKTKTGYSTAVDVLEQLQGEHPIIDYILEYRQLSKLQSTYVEGLQKVISDDQRIHTRFNQTLAQTGRLSSVDPNLQNIPVRLEEGRKIRKAFKPTSKDSVILSADYSQIELRVLAHITQDESMKEAFINGDDIHTATAMKVFGVEADQVDSLMRRQAKAVNFGIVYGISDYGLSQSLGITRKKAKAFIDDYLASFPGVKQYMSDIVKDAKALGYVETLLHRRRYIPDITSRNFNLRGFAERTAMNTPIQGSAADIIKLAMVKFAQKMKETTYQAKLLLQVHDELIFEVPKSEVDSFSEFVEEIMENALQLDVPLKVDSSYGATWYDAK

SEQ ID NO: 70370 - protein, 372 aa, Staphylococcus aureus
MKIGIPREIKNNENRVGLSPSGVHALVESGHTVLVETNAGSGSFFEDVDYKEAGAEIVAEQAKVWDVDMVIKVKEPLESEYTYFKEGLVLFTYLHLANEEKLTQALIDRKVISIAYETVQLPDRSSPLLSPMSEVAGRMSAQVGAEFLQKLNGGMGILLGGVPGVPKGKVTIIGGGQAGTNAAKIALGLGADVTILDVNPKRLQQLDDLFGGRVHTIMSNPLNIELYVKQSDLVIGAVLIPGAKAPRLVTEDMIKQMKNGSVIIDIAIDQGGIFETTDKITTHDDPTYIKHGVVHYAVANMPGAVPRTSTLALNNATLPYALMLANKGYREAFKSNQPLSLGLNTYKGHVTNKGVAEAFEMEYKSVEEALQL

SEQ ID NO: 70371 - protein, 424 aa, Staphylococcus aureus
MSDFNHTDHSTTNHSQTPRYRRPKFPWFKTVIVALIAGIIGALLVLGIGKVLNSTILNKDGSTVQTTNNKGGNQLDGQSKKFGTVHEMIKSVSPTIVGVINMQKASSVDDLLKGKSSKPSEAGVGSGVIYQINNNSAYIVTNNHVIDGANEIRVQLHNKKQVKAKLVGKDAVTDIAVLKIENTKGIKAIQFANSSKVQTGDSVFAMGNPLGLQFANSVTSGIISASERTIDAETTGGNTKVSVLQTDAAINPGNSGGALVDINGNLVGINSMKIAATQVEGIGFAIPSNEVKVTIEQLVKHGKIDRPSIGIGLINLKDIPEEEREQLHTDREDGIYVAKADSDIDLKKGDIITEIDGKKIKDDVDLRSYLYENKKPGESVTVTVIRDGKTKEVKVKLKQQKEQPKRQSRSERQSPGQGDRDFFR

SEQ ID NO: 70372 - protein, 363 aa, Staphylococcus aureus
MSNKLESYRSEIVSLNHQILDLLSKRGELAQKIGEEKLKQGTRIYDPQREKEMLNDLIDSNKGPFNDNTIKQLFKEIFKASTDLQKSENEKHLYVSRKLKPEDTIVTFDNGGIIGDGNKSFVFGPCSVESFEQVEAVAKNLHAKGEKFIRGGAFKPRTSPYDFQGLGVEGLKILKQIKDKYDLNVVSEIVNPNDFEVADEYLDVFQIGARNMQNFELLKEAGRTKKPILLKRGLSATIEEFVYAAEYIASQGNQNIILCERGIRTYEKATRNTLDISAVPILKQGTHLPVMVDVTHSTGRKDIMLPTAKAALAVGADGVMAEVHPDPSVALSDAGQQMDLDEFQAFYDELKPLADLYNAKKLK

SEQ ID NO: 70373 - protein, 133 aa, Staphylococcus aureus
MILSLEDLLEGAKDTLIRHDVNEDNIDVAFVPGAFEIPLVAKKLASSGNYDAIITLGCVIRGATSHYDYVCNEVAKGVSKVNDQTNVPVIFGILTTESIEQAVERAGTKAGNKGAEAAVSAIEMANLLKSIKA

SEQ ID NO: 70374 - protein, 104 aa, Staphylococcus aureus
MTYKELATFLKVLSDSSRLEILDLLSCGELCACDLLAHFQFSQPTLSYHLKALVKTNLVTTRKIGNKHLYQLNHNIFESVINNLSKVHTSNQRCFCHNLKTGEC

SEQ ID NO: 70375 - protein, 189 aa, Staphylococcus aureus
MKAKYKNHQIETNEKRIKNHLNRAFNREQPMETLVSDLTYVKVGGTWHYICLFIDLFNREIVGYSAGKNKDANLVSKAISRINHNLEQIKLFHTDRDKEFDNHLIDEVLETFKIKRSLSTKGCPYDNAVAEATMKAMKTEFVKQMQFENLEQLETELFDYVNWYNNFRPHSSLQYLTPVAFKNIHMKTV

SEQ ID NO: 70376 - protein, 409 aa, Staphylococcus aureus
MSNTQTKNVPELRFPGFEGEWEEKKLGNLTTKIGSGKTPKGGSENYTNKGIPFLRSQNIRNGKLNLNDLVYISKDIDDEMKNSRTYYGDVLLNITGASIGRTAINSIVETHANLNQHVCIIRLKKEYYYNFFGQYLLSRKGKRKIFLAQSGGSREGLNFKEIANLKIFTPTIFEEQQKIGQFFSKLDQQIELEEQKLELLQQQKKCYIQKIFSQELRFKDEEGNYYKGWNKKQLKDVLEFSNKRTINENEYPVLISSRQGLILQSDYYKDRKTFAESNIGYFILPKNHITYRSRSDDGIFKFNLNLMIDVGIISKYYPVFKGIDANQYYLTLHLNYQLKKEYIKYATGTSQLVLSQKDLQNIKTKLPSYEEQQKIGDFFSEIDRLVEKQSSKVGRLKVRKKELLQKMFV

SEQ ID NO: 70377 - protein, 518 aa, Staphylococcus aureus
MSITEKQRQQQAELHKKLWSIANDLRGNMDASEFRNYILGLIFYRFLSEKAEQEYADALSGEDITYQEAWADEEYREDLKAELIDQVGYFIEPQDLFSAMIREIETQDFDIEHLATAIRKVETSTLGEESENDFIGLFSDMDLSSTRLGNNVKERTALISKVMVNLDDLPFVHSDMEIDMLGDAYEFLIGRFAATAGKKAGEFYTPQQVSKILAKIVTDGKDKLRHVYDPTCGSGSLLLRVGKETQVYRYFGQERNNTTYNLARMNMLLHDVRYENFEIRNDDTLENPAFLGNTFDAVIANPPYSAKWTADSKFENDERFSGYGKLAPKSKADFAFIQHMVHYLDDEGTMAVVLPHGVLFRGAAEGVIRRYLIEEKNYLEAVIGLPANIFYGTSIPTCILVFKKCRQQDDNVLFIDASNDFEKGKNQNHLSDAQVERIIDTYKRKATIDKYSYSATLQEIADNDYNLNIPRYVDTFEEEAPIDLDQVQQDLKNIDKEIAEIEQEINAYLKELGVLKDE

SEQ ID NO: 70378 - protein, 239 aa, Staphylococcus aureus
MNKNIIIKSIAALTILTSVTGVGTTMVEGIQQTAKAENTVKQITNTNVAPYSGVTWMGAGTGFVVGNHTIITNKHVTYHMKVGDEIKAHPNGFYNNGGGLYKVTKIVDYPGKEDIAVVQVEEKSTQPKGRKFKDFTSKFNIASEAKENEPISVIGYPNPNGNKLQMYESTGKVLSVNGNIVSSDAIIQPGSSGSPILNSKHEAIGVIYAGNKPSGESTRGFAVYFSPEIKKFIADNLDK

SEQ ID NO: 70379 - protein, 239 aa, Staphylococcus aureus
MNKNIIIKSIAALTILTSITGVGTTVVDGIQQTAKAENSVKLITNTNVAPYSGVTWMGAGTGFVVGNHTIITNKHVTYHMKVGDEIKAHPNGFYNNGGGLYKVTKIVDYPGKEDIAVVQVEEKSTQPKGRKFKDFTSKFNIASEAKENEPISVIGYPNPNGNKLQMYESTGKVLSVNGNIVTSDAVVQPGSSGSPILNSKREAIGVMYASDKPTGESTRSFAVYFSPEIKKFIADNLDK

SEQ ID NO: 70380 - protein, 239 aa, Staphylococcus aureus
MNKNIVIKSMAALAILTSVTGINAAVVEETQQIANAEKNVTQVKDTNNFPYNGVVSFKDATGFVIGKNTIITNKHVSKDYKVGDRITAHPNGDKGNGGIYKIKSISDYPGDEDISVMNIEEQAVERGPKGFNFNENVQAFNFAKDAKVDDKIKVIGYPLPAQNSFKQFESTGTIKRIKDNILNFDAYIEPGNSGSPVLNSNNEVIGVVYGGIGKIGSEYNGAVYFTPQIKDFIQKHIEQ

SEQ ID NO: 70381 - protein, 235 aa, Staphylococcus aureus
MNKNVMVKGLTALTILTSLGFAENISNQPHSIAKAEKNVKEITDATKAPYNSVVAFAGGTGVVVGKNTIVTNKHIAKSNDIFKNRVAAHYSSKGKGGGNYDVKDIVEYPGKEDLAIVHVHETSTEGLNFNKNVSYTKFAEGAKAKDRISVIGYPKGAQTKYKMFESTGTINHISGTFIEFDAYAQPGNSGSPVLNSKHELIGILYAGSGKDESEKNFGVYFTPQLKEFIQNNIEK

SEQ ID NO: 70382 - protein, 311 aa, Staphylococcus aureus
MFKKKMLAATLSVGLIAPLASPIQESRANTNIENIGDGAEVIKRTEDVSSKKWGVTQNVQFDFVKDKKYNKDALIVKMQGFINSRTSFSDVKGSGYELTKRMIWPFQYNIGLTTKDPNVSLINYLPKNKIETTDVGQTLGYNIGGNFQSAPSIGGNGSFNYSKTISYTQKSYVSEVDKQNSKSVKWGVKANEFVTPDGKKSAHDRYLFVQSPNGPTGSAREYFAPDNQLPPLVQSGFNPSFITTLSHEKGSSDTSEFEISYGRNLDITYATLFPRTGIYAERKHNAFVNRNFVVRYEVNWKTHEIKVKGHN

SEQ ID NO: 70383 - protein, 156 aa, Staphylococcus aureus
MTNHIVLYQPEIPANTGNIARTCAGTNTHLHLIKPLGFRTDDKMLKRAGLDYWEFVNITYHDSIEAFFEATNGEYYLLTKFGKKTYSDFDFSNHDKDFYFIFGKETTGLPDWVKEKYQDTALRIPMSEHIRSLNLSNTAALLIYEALRQQDFPGLN

SEQ ID NO: 70384 - protein, 242 aa, Staphylococcus aureus
MPVIKINNLNKVFGDNEVLKDINLEINQGEVVAIIGPSGSGKSTLLRCMNLLEVPTKGQVIFEGNDLTEKGTQVDKLRQKMGMVFQNFNLFPHKKVVDNIILAPKLLKKDNNDELHKEALSLLDKVGLKEKADVYPNQLSGGQKQRVAIARALAMHPDVILFDEPTSALDPEVVGDVLKVMKDLAKEGMTMVVVTHEMGFAKDVSDKVIFMADGVVVESGTPVEIFEQPQHERTQNFLARVL

SEQ ID NO: 70385 - protein, 578 aa, Staphylococcus aureus
MIKRYLQFVKPYKYRIFATIIVGIIKFGIPMLIPLLIKYAIDGVINNHALTTDEKVHHLTIAIGIALFIFVIVRPPIEFIRQYLAQWTSNKILYDIRKKLYNHLQALSARFYANNQVGQVISRVINDVEQTKDFILTGLMNIWLDCITIIIALSIMFFLDVKLTLAALFIFPFYILTVYVFFGRLRKLTRERSQALAEVQGFLHERVQGISVVKSFAIEDNEAKNFDKKNTNFLTRALKHTRWNAYSFAAINTVTDIGPIIVIGVGAYLAISGSITVGTLAAFVGYLELLFGPLRRLVASFTTLTQSFASMDRVFQLIDEDYDIKNGVGAQPIEIKQGRIDIDHVSFQYNDNEAPILKDINLSIEKGETVAFVGMSGGGKSTLINLIPRFYDVTSGQILIDGHNIKDFLTGSLRNQIGLVQQDNILFSDTVKENILLGRPTATDEEVVEAAKMANAHDFIMNLPQGYDTEVGERGVKLSGGQKQRLSIARIFLNNPPILILDEATSALDLESESIIQEALDVLSKDRTTLIVAHRLSTITHADKIVVIENGHIVETGTHRELIAKQGAYEHLYSIQNL

SEQ ID NO: 70386 - protein, 176 aa, Staphylococcus aureus
MTNQDRPMKSMSESKCYKNRQVFPQDTNHHHTMFGGTLMANIDEIAAITAMKHAGAQVVTASTDSVDFLKPIKTGDILQYVAMVSYAGTSSMEVVVQIRIDDVFNNKHDLAALSYLTFVALDDEGKPKHVPGVYPEDDVEKWFYDTAPQRVERRKARRIESKQTIEYLAQAQHIRD

SEQ ID NO: 70387 - protein, 154 aa, Staphylococcus aureus
MVDVAFVCLGNICRSPMAEAIMRQRLKDRNIHDIKVHSRGTGSWNLGEPPHEGTQKILNKHNIPFDGMISELFEATDDFDYIVAMDQSNVDNIKSINPNLKGQLFKLLEFSNMEESDVPDPYYTNNFEGVYDMVLSSCDNLIDYIVKDANLKEG

SEQ ID NO: 70388 - protein, 156 aa, Staphylococcus aureus
MLNRTILVGRLTRDPELRTTQSGVNVASFTLAVNRTFTNAQGEREADFINIIVFKKQAENVNKYLSKGSLAGVDGRLQTRNYENKEGQRVYVTEVIADSIQFLEPKNSNDTQQDLYQQQVQQTRGQSQYSNNKPVKDNPFANANGPIELNDDDLPF

SEQ ID NO: 70389 - protein, 351 aa, Staphylococcus aureus
MKNKKRVLIASSLSCAILLLSAATTQANSAHKDSQDQNKKEHVDKSQQKDKRNVTNKDKNSTVPDDIGKNGKITKRTETVYDEKTNILQNLQFDFIDDPTYDKNVLLVKKQGSIHSNLKFESHKEEKNSNWLKYPSEYHVDFQVKRNRKTEILDQLPKNKISTAKVDSTFSYSSGGKFDSTKGIGRTSSNSYSKTISYNQQNYDTIASGKNNNWHVHWSVIANDLKYGGEVKNRNDELLFYRNTRIATVENPELSFASKYRYPALVRSGFNPEFLTYLSNEKSNEKTQFEVTYTRNQDILKNRPGIHYAPSILEKNKDGQRLIVTYEVDWKNKTVKVVDKYSDDNKPYKEG

SEQ ID NO: 70390 - protein, 234 aa, Staphylococcus aureus
MNKKLLMNFFIVSPLLLATIATDFTPVPLSSNQIIKTAKASTNDNIKDLLDWYSSGSDTFTNSEVLDNSLGSMRIKNTDGSISLIIFPSPYYSPAFTKGEKVDLNTKRTKKSQHTSEGTYIHFQISGVTNTEKLPTPIELPLKVKVHGKDSPLKYWPKFDKKQLAISTLDFEIRHQLTQIHGLYRSSDKTGGYWKITMNDGSTYQSDLSKKFEYNTEKPPINIDEIKTIEAEIN

SEQ ID NO: 70391 - protein, 538 aa, Staphylococcus aureus
MVKQLKFSEDARQAMLRGVDQLANAVKVTIGPKGRNVVLDKEFTAPLITNDGVTIAKEIELEDPYENMGAKLVQEVANKTNEIAGDGTTTATVLAQAMIQEGLKNVTSGANPVGLRQGIDKAVKVAVEALHENSQKVENKNEIAQVGAISAADEEIGRYISEAMEKVGNDGVITIEESNGLNTELEVVEGMQFDRGYQSPYMVTDSDKMVAELERPYILVTDKKISSFQDILPLLEQVVQSNRPILIVADEVEGDALTNIVLNRMRGTFTAVAVKAPGFGDRRKAMLEDLAILTGAQVITDDLGLDLKDASIDMLGTASKVEVTKDNTTVVDGDGDENSIDARVSQLKSQIEETESDFDREKLQERLAKLAGGVAVIKVGAASETELKERKLRIEDALNSTRAAVEEGIVAGGGTALVNVYQKVSEIEAEGDIETGVNIVLKALTAPVRQIAENAGLEGSVIVERLKNAEPGVGFNAATNEWVNMLEAGIVDPTKVTRSALQHAASVAAMFLTTEAVVASIPEKNNDQPNMGGMPGMM

SEQ ID NO: 70392 - protein, 316 aa, Staphylococcus aureus
MKNISDIAKLAGVSKSTVSRFLNNGSVSKKTSEKLTRIIAEHDYQPNQFAQSLRARQTHLIGAIIPRMNSYAVDETIKGLAKQCQKYESQLILNYTGLNIEAEIQALETLARSKVDGIVLMATDITERHIEVINKMNVPIVIVGQQHEQLHSIVHDDYKAGQIIGEWIGQQGYQQVEVFSVSEKDIAVGIHRKRGLLDQLAKYQIKPNIHETNFTYVEAQKDVANVLENVEQVDAVVGATDTIALAAYKYYSDKNDVMKPHQIYGFGGDPMTQLVSPSIKTIHYNYFEAGQCAMEEIQQMLKKQDMPYSVTVDVNI

SEQ ID NO: 70393 - protein, 562 aa, Staphylococcus aureus
MRSDMIKKGDHQAPARSLLHATGALKSPTDMNKPFVAICNSYIDIVPGHVHLRELADIAKEAIREAGAIPFEFNTIGVDDGIAMGHIGMRYSLPSREIIADAAETVINAHWFDGVFYIPNCDKITPGMILAAMRTNVPAIFCSGGPMKAGLSAHGKALTLSSMFEAVGAFKEGSISKEEFLDMEQNACPTCGSCAGMFTANSMNCLMEVLGLALPYNGTALAVSDQRREMIRQAAFKLVENIKNDLKPRDIVTREAIDDAFALDMAMGGSTNTVLHTLAIANEAGIDYDLERINAIAKRTPYLSKIAPSSSYSMHDVHEAGGVPAIINELMKKDGTLHPDRITVTGKTLRENNEGKEIKNFDVIHPLDAPYDAQGGLSILFGNIAPKGAVIKVGGVDPSIKTFTGKAICFNSHDEAVEAIDNRTVRAGHVVVIRYEGPKGGPGMPEMLAPTSSIVGRGLGKDVALITDGRFSGATRGIAVGHISPEAASGGPIALIEDGDEITIDLTNRTLNVNQPEDVLARRRESLTPFKAKVKTGYLARYTALVTSANTGGVMQVPENLI

SEQ ID NO: 70394 - protein, 120 aa, Staphylococcus aureus
MIRRGDVYLADLSPVQGSEQGGVRPVVIIQNDTGNKYSPTVIVAAITGRINKAKIPTHVEIEKKKYKLDKDSVILLEQIRTLDKKRLKEKLTYLSDDKMKEVDNALMISLGLNAVAHQKN

SEQ ID NO: 70395 - protein, 527 aa, Staphylococcus aureus
MSEPQKLHPISYFNGIINAIKQNIVVFFIFIIFQLKDFDYTNPESYLWIGIVFVFFLISYISQIVGIMNTRYWIEDNYFILTTGIFNKKRKELNIKRIQSVDMTQGVVNQIIGGVDLQIKTPSDGIVLSVISKKQGEYLERYIDQLQTELKTEVAQKSSAEKNDNCNHDIEGNVEDIAEGRLDEVQNTDSMLNQKNKRIPIYQMNFKESLFMAMTSGAIGVTLAALVPIYGAVRELIPWSKLNHEISQWVQIVSISVLIIILLVLIVAYIIGTIITMIRFYGFSVMLENEQLKIEYGLFNKKKVTVPTKRLQAVVERQSYIRRLFGYTAIHFIITSDFENKKIEDDDNDSGSVPILPFIKRDKAYQIIQNLVPDLSYQQVNEGMPLSGFHRHFLIPSIIVIAMAGIGCYFWNQLLLLFTIITIVIIGLFVIKGYLYVKHAGFKMTEEQITIQNFELLKRNIYYFKAHHIIGFDTWQHTLLKRNNLNNFSFIVAKGVGAQSINLKYARSEDANKLKSWYLRGENDEGL

SEQ ID NO: 70396 - protein, 885 aa, Staphylococcus aureus
MSNTESLNIGKKRGSLTIYIGYSPGVGKTFEMLSNAIELFQSNVDIKIGYIEPHQRDETNALAEQLPKITTNFTKHGSHHFQYLDVDRIIEESPTIVLIDELAHTNISRDRHEKRYMDIEEILNHGIDVHTTLNIQHIESLSSQIELMTGVHVKERVPDYFIMSADVLEVVDISPEQLIKRLKAGKVYKKDRLDVAFSNFFTYAHLSELRTLTLRTVADLMSDKEKVRHNHKTSLKPHIAVAISGSIYNEAVIKEAFHIAQKEHAKFTAIYIDVFEKNRQYKDSQKQVHQHLMLAKSLGAKVKVVYSQTVALGLDEWCKNQDVTKLIIGQHIRNKWRDFFNTPLIDHLMSFEHSYKIEIVPIKQIPVELKMNKSPYRPKGKRFAIDMLKMILIQIICVMMGLWIYQLDKHESSTIILMIFLIGIILLSIWTRSFIIGFLAAIINVFVFNYFFTEPRYTFEVYRFDYPITFIVSILTSILTSALLKQIKFQYSITKKQLYRTDLLFQFNDSIKQTYTVENLLINAGYQINQLLQQSITIYVINQSKVIKTIPLQNHIDNTTQQHEQALSWVIKNERQAGATTDTFPGINKWLIPIGTSPIKGILAIDYQSSQVINPYDASILESMLNELSLAVENVTLLKQTRESMLQAERQLTHSNFLRSISHDIRTPLTTIMGNLDILVSHSKDMSIIEKEQLLVHSFQESQYLYLLVTNILSLTKLQSSNVQIKLQPYLVSELVEEIDMILERRHLKKRITVSSSVNLQFIHIDSKLILQALFNLIENAVKHTSTDTKINLSIRYASYEQIEFAVIDEGPGISLEEQQKIFEPFYTGSNKYFKDNQKESMGLGLYLVQTILHKHQSNLQYKPNQPHGSIFYFNIYTDFNEGDV

SEQ ID NO: 70397 - protein, 70 aa, Staphylococcus aureus
MNLIAAAIAIGLSALGAGIGNGLIVSRTVEGVARQPEARGQLMGIMFIGVGLVEALPIIGVVIAFMTFAG

SEQ ID NO: 70398 - protein, 278 aa, Staphylococcus aureus
MVNYKEKLDEAIHLTQQKGFEQTRAEWLMLDVFQWTRTDFVVHMHDDMPKAMIMKFDLALQRMLLGEPIQYIVGFASFYGRTFDVNSNCLIPRPETEEVMLHFLQQLEDDATIVDIGTGSGVLAITLKCEKPDLNVIATDISLEAMNMARNNAEKHQSQIQFLTGDALKPLIKEGIKLNGLISNPPYIDEKDMVTMSPTVTRFEPHQALFADNHGYAIYESIIGDLPHVMEKGSPVVFEIGYNQGEALKSIILNKFPDKKIDIIKDINGHDRIVSFKW

SEQ ID NO: 70399 - protein, 536 aa, Staphylococcus aureus
MTKFIFVTGGVVSSLGKGITASSLGRLLKDRGLNVTIQKFDPYLNVDPGTMSPYQHGEVFVTDDGAETDLDLGHYERFIDINLNKFSNVTAGKVYSHVLKKERRGDYLGGTVQVIPHITNEIKERLLLAGESTNADVVITEIGGTTGDIESLPFIEAIRQIRSDLGRENVMYVHCTLLPYIKAAGEMKTKPTQHSVKELRGLGIQPDLIVVRTEYEMTQDLKDKIALFCDINKESVIECRDADSLYEIPLQLSQQNMDDIVIKRLQLNAKYETQLDEWKQLLDIVNNLDGKITIGLVGKYVSLQDAYLSVVESLKHAGYPFAKDIDIRWIDSSEVTDENAAEYLADVDGILVPGGFGFRASEGKISAIKYARENNVPFFGICLGMQLATVEFSRNVLGLEGAHSAELDPATPYPIIDLLPEQKDIEDLGGTLRLGLYPCSIKEGTLAQDVYGKAEIEERHRHRYEFNNDYREQLEANGMVISGTSPDGRLVEMVEIPTNDFFIACQFHPEFLSRPNRPHPIFKSFIEASLKYQQNK

SEQ ID NO: 70400 - protein, 312 aa, Staphylococcus aureus
MPLFLQPILKTKLWGGQRLSEFGYQLDNDTTGECWCVSAHPNGTSEIINGPYQGQTLDRIWSEHRELFGDFPSKDFPLLTKIVDARESLSIHVHPDNSYAYEHENGQYGKSECWYIIDAEEDAEIVIGTLAESREEVANHVQHGTIESILRYIKVKPGEFYFIPAGTVHTISSGILAYETMQSSDITYRLYDFNRQDNQYNDRPLNIEKALDVIQYNAPLPNILPESEIIENHKCTHIVSNDFFTLVKWEISGTLNYMKPREFCLVTVLEGEGQMIVDGEIFKLTTGTNFILTSKDLDSVFEGDFTLMISYV

SEQ ID NO: 70401 - protein, 302 aa, Staphylococcus aureus
MTKTKAIDIIGAPSTFGQRKLGVDLGPTAIRYAGLISRLKQLDLDVYDKGDIKVPAVNIEKFHSEQKGLRNYDEIIDVNQKLNKEVSASIENNRFPLVLGGDHSIAVGSVSAISKHYNNLGVIWYDAHGDLNIPEESPSGNIHGMPLRILTGEGPKELLELNSNVIKPENIVLIGMRDLDKGERQFIKDHNIKTFTMSDIDKLGIKEVIENTIEYLKSRNVDGVHLSLDVDALDPLETPGTGTRVLGGLSYRESHFALELLHQSHLISSMDLVEVNPLIDSNNHTAEQAVSLVGTFFGETLL

SEQ ID NO: 70402 - protein, 322 aa, Staphylococcus aureus
MMTTKIIRRYSLITILLIVSIFISLCVGSVMIHPIDAIKGIFTQDDFILNEYRIPRTLLGIIIGSSLAISGAIIQAVIRNPLASPDVIGISKGASLAAVIIIMIFPTAPLFVLPIGSFLGAFAVSLFLSFLISKYDVKGSKLALIGLAIGAICTAIVQFLLIRNPLEANKALVWLTGSLYGHDMSNIYTILPWFLITIPIIILLSYQLDVLNLGDAVATALGLKVKTIKMLLLILAVILAGSAISVVGGISFLGLIAPHIARQLIGNKTLHVIIMSGLIGAILLTFGDGLARGIHPPLDIPVGVIIAIIGAPYFLILLRRMK

SEQ ID NO: 70403 - protein, 338 aa, Staphylococcus aureus
MEKIENEIVNKTYLAINSLEELRNMIGIKSDYFYKCLYVNDHFYNVIKIPKRKKDEYRELMIPNMALKNIQRWILDNVLYRRQVHKCATGFVPRKSIVNNAIPHVGQKYILKMDIENFFPSITFKQVRKIFSEMGYKFELATALANLCTVNNQLPQGAPTSPYIANIIFYNIDKRIFSYCQKNNLRYTRYADDITISGSNKVSFSKEIIREIVNQYNFRINESKTIMFKPGDRKKVTGIIVNEKISVPKTLIREVRKQIYFVNKFGLEEHLIRNNYSLDYEQQFIMSIYGKISFIKMIDFKKGVSLQKKFNEVLGNIESSNMYRDNIDFDDIELHWIN

SEQ ID NO: 70404 - protein, 267 aa, Staphylococcus aureus
MRILVEIAYQGNNFLGFQIQQNGRTVQQQFEKLLQRMHKRHVRIHPSSRTDRGVHAIQQYFHFDTELNIPMSQWQYAMNRTLPDDIYVNNVVTVDDDFHCRYDCVGKRYRYKVYQAQHRDPFQSGLKTFIPETLDLDKMNRAAQQFIGTHDFTGFCSQKTEVESKVRTLYQSEIVKTDDGFDYIVTGSGFLYNMVRVLVAFLIEVGKGRHEISDVPKLLESKNRKNVPFTAPAEGLYLEKIYLDENELLKDFGNDIKIHRKKSLQND

SEQ ID NO: 70405 - protein, 268 aa, Staphylococcus aureus
MKNKLIIGRYLPINSFVHHLDPRAKLMFVFLFIILIFFCHSPLTYLWVFALILFIMRLAKIQLWFLIKGLTPIFFFLIFTLMMHIFLTKGGYVLVEWHGITIETNGILEGLYISLRLIGIVMIATIMTLSTSPIDLTDAFERLLAPLKMFKLPVHQLSMIMSIALRFIPTLMDELDKIILAQKSRGSEISSGNIATRIKSFIPLLVPLFISAFQRAEELAVAMEVRGYDANVKRTSYRQLKWQLRDTISLTMIIPIAIILFVLKYSGV

SEQ ID NO: 70406 - protein, 69 aa, Staphylococcus aureus
MKAKEIRDLTTSEIEEQIKSSKEELFNLRFQLATGQLEETARIRTVRKTIARLKTVAREREIEQSKANQ

SEQ ID NO: 70407 - protein, 340 aa, Staphylococcus aureus
MVEQIKDKLGRPIRDLRLSVTDRCNFRCDYCMPKEVFGDDFVFLPKNELLTFDEMARIAKVYAELGVKKIRITGGEPLMRRDLDVLIAKLNQIDGIEDIGLTTNGLLLKKHGQELYDAGLRRINVSLDAIDDTLFQSINNRNIKATTILEQIDYATSIGLNVKVNVVIQKGINDDQIIPMLEYFKDKHIEIRFIEFMDVGNDNGWDFSKVVTKDEMLTMIEQHFEIDPVEPKYFGEVAKYYRHKDNGVQFGLITSVSQSFCSTCTRARLSSDGKFYGCLFATVDGFNVKAFIRSGVTDEELKEQFKALWQIRDDRYSDERTAQTVANRQRKKINMNYIGG

SEQ ID NO: 70408 - protein, 201 aa, Staphylococcus aureus
MLKINVKYQLKNTLIRINIDDTEPKIYAVRGPSGIGKTTVLNMIAGLRKADEAIIEVNGQLLTDTTKNVNVKIQQRRIGYLFQDYQLFPNMTVYKNITFMAEPSKHIDQLIQTLNINHLMKQYPMTLSGGEAQRVALARALSTKPDLILLDEPFSSLDDTTKDESITLVKRIFNEWQIPIIFVTHSNYEAEQMAHEIITIG

SEQ ID NO: 70409 - protein, 534 aa, Staphylococcus aureus
MNAIKRFGSAMIVPVLMFAFFGIVLGFATLFKNPTIMGSLADQHTFWFKFWSVIESGGWVIFTHMEVVFVVGLPLSLAKKAPGHAALAALMGYLMFNTFINAILTQWPHTFGANLEKGVENVPGLKSIAGIATLDTNILGGIIISAIITWIHNRYYSKRLPEMVGVFQGLTFVVTISFFVMLPLAAITCVIWPTVQHGIGSMQHFIIASGYIGVWLYHFLERVLIPTGLHHFIYAPIEVGPVVVNHGLKAEWLQHLNEFAKSTKPLKEQFPYGFMLQGNGKVFGCLGIALAMYATTPKENRKKVAALLIPATLTAVVVGITEPLEFTFLFIAPYLFVLHAVLAASMDTLMYAFGVVGNMGGGLLDFISTNWLPLGKEHWGTYVAQVIIGLIFVAIYFFLFRFLILKFDIPLPGRKKTEEEVKLFSKQDYKNKKGDSVDSKRASTGNEYEDKAAYYLDGLGGKENIKDVTNCTTRLRLTVYDESKVADTEYFTHQQMAHGLVKSGKSIQVVVGMTVPQVREAFEQMVEDQSSEDK

SEQ ID NO: 70410 - protein, 643 aa, Staphylococcus aureus
MTTTFIISYIILALIIVGVINLFLIRSRKKGKRQQKEQQFTTRQSNQSKFKASDLDKTTDQSTQRMTHEELRVDNQDDHSQVSLNGYTKGSEKDQEAFTNNNGEEAVAAKNPESEEYKVNEKIKKEHKNFIFGEGVSRGKILAALLFGMFIAILNQTLLNVALPKINTEFNISASTGQWLMTGFMLVNGILIPITAYLFNKYSYRKLFLVALVLFTIGSLICAISMNFPIMMVGRVLQAIGAGVLMPLGSIVIITIYPPEKRGAAMGTMGIAMILAPAIGPTLSGYIVQNYHWNVMFYGMFIIGIIAILVGFVWFKLYQYTTNPKADIPGIIFSTIGFGALLYGFSEAGNKGWGSVEIETMFAIGIIFIILFVIRELRMKSPMLNLEVLKFPTFTLTTIINMVVMLSLYGGMILLPIYLQNLRGFSALDSGLLLLPGSLIMGLLGPFAGKLLDTIGLKPLAIFGIAVMTYATWELTKLNMDTPYMTIMGIYVLRSFGMAFIMMPMVTAAINALPGRLASHGNAFLNTMRQLAGSIGTAILVTVMTTQTTQHLSAFGEELDKTNPVVQDHMRELASQYGGQEGAMKVLLQFVNKLATVEGINDAFIVATIFSIIALILCLFLQSNKKAKATAQKLEASSNNNHE

SEQ ID NO: 70411 - protein, 215 aa, Staphylococcus aureus
MKKMILINVITVVVLLAIGIAGFYFWNKTTSYVTTDNAKVNGDQIKIASPASGQIKSLNVKQGDKLDKGDKVATVTVQGQDGETKDMDLKMPQKGTIAKLDGMEGSMVQAGNPIAYAYNLDDLYVTANIDEKDIKDVEVGKDVDVTIDGQKASIKGKVDSIGKATAASFSLMPSSNSDGNYTKVSQVIPVKITLESEPSKQVVPGMNAEVKIHKN

SEQ ID NO: 70412 - protein, 402 aa, Staphylococcus aureus
MNDLTHFNKRSPIFIIILGSLTAIGALSIDMFLPGLPDIRHDFQTTTSNAQLTLSMFMIGLAFGNLFAGPISDSTGRRKPLIIAMIIFTLASLGIVFVHNIWLMVALRFLQGVTGGAAAVISRAIASDMYSGNELTKFMALLMLVNGIAPVVAPTIGGIILNYSVWRMVFVILTIFGFVMVIGSLLKVPESLTVTNRESSSGLKTMFKNFKILLKTPRFVLPMLIQGMTFVILFTYISASPFIIQKIYGMTAIQFSWMFAGIGITLIISSQLTGYLVDFIDSQKLMRGMTMIQIIGVILVTIVLLNHWNFWILAIGFIILIAPVTGVATLGFTIAMDESSSGRGSSSSLLGLVQFLFGGVASPLVGVKGEDNPIPYIIIIIATAVILIILQIYNMKVFKTNR

SEQ ID NO: 70413 - protein, 140 aa, Staphylococcus aureus
MNFNQFENQNFFNGNPSDTFKDLGKQVFNYFSTPSFVTNIYETDELYYLEAELAGVNKEDISIDFNNNTLTIQATRSAKYKSEQLILDERNFESLMRQFDFEAVDKQHITASFENGLLTITLPKIKPSNETTSSTSIPIS

SEQ ID NO: 70414 - protein, 389 aa, Staphylococcus aureus
MYKTKGGFQLTLQTLSLVVGFMAWSIIAPLMPFIKQDVNVTEGQISIILAIPVILGSVLRVPFGYLTNIVGAKWVFFTSFIVLLFPIFFLSQAQTPGMLMASGFFLGVGGAIFSVGVTSVPKYFPKEKVGLANGIYGMGNIGTAVSSFLAPPIAGIIGWQTTVRSYLIIIALFALIMFIFGDTQERKIKVPLMAQMKTLSKNYKLYYLSYWYFITFGAFVAFGIFLPNYLVNHFGIDKVDAGIRSGVFIALATFLRPIGGILGDKFNAVKVLMIDFVIMIIGAVILGISDHIALFTVGCLTISICAGIGNGLIFKLVPSYFSNEAGSANGIVSMMGGLGGFFPPLVITYVANLTGSSHLAFIFLAVFGCIALFTMRHLYQKEYGSLKHS

SEQ ID NO: 70415 - protein, 344 aa, Staphylococcus aureus
MINEDSIQLDTLLKKYYEHSIEKIVFADDNGKIIAMNDAAKDILSEEDNYSAVANAICHRCEGYTNAYDVQSCKDCFLESMQVQATNFQVFMKTKDQKVMPFTATYQLIDQDRGIHAFTLQNVSSQIEQQEKLHQQHMMRKTISAQENERKRISRELHDSVIQEMLNVDVQLRLLKYQEDTTKLLEDAENIEYIVAKLIDDIRNMSVELRPASLDDLGLEAAFKSYFKQFEENYGIKIIYTSNIKNTRFDSDIETVVYRVVQEAILNALKYADVNEINVGIRQTGRHLVAEVIDAGNGFDPSSKPKGSGLGLYGMNERAELVSGSVNIETKIGEGTNVTLNIPI

SEQ ID NO: 70416 - protein, 225 aa, Staphylococcus aureus
MLNQFLWVIFPYLCLVVFVAGHIARYRYDKFSWTAKSSELIERKRLMWGSLLFHLGIIPVFFGHVVGLLIPKSWMDAVGVSEHLYHIGAVYIGSIFGIITLIGMFLLTARRVTTKSIRRLSSASDIFVNFLLLLIVFMGCYATLVTNIQHPDFNYRTSLSIWFRQLFMLKPDASLMSGVPIAFKMHILLGFTIMACWPFTRLVHVWSVPLTYINRRYIIYRKNKV

SEQ ID NO: 70417 - protein, 315 aa, Staphylococcus aureus
MLKNKILATTLSVSLLAPLANPLLENAKAANDTEDIGKGSDIEIIKRTEDKTSNKWGVTQNIQFDFVKDKKYNKDALILKMQGFISSRTTYYNYKKTNHVKAMRWPFQYNIGLKTNDKYVSLINYLPKNKIESTNVSQTLGYNIGGNFQSAPSLGGNGSFNYSKSISYTQQNYVSEVEQQNSKSVLWGVKANSFATESGQKSAFDSDLFVGYKPHSKDPRDYFVPDSELPPLVQSGFNPSFIATVSHEKGSSDTSEFEITYGRNMDVTHAIKRSTHYGNSYLDGHRVHNAFVNRNYTVKYEVNWKTHEIKVKGQN

SEQ ID NO: 70418 - protein, 325 aa, Staphylococcus aureus
MKMNKLVKSSVATSMALLLLSGTANAEGKITPVSVKKVDDKVTLYKTTATADSDKFKISQILTFNFIKDKSYDKDTLVLKATGNINSGFVKPNPNDYDFSKLYWGAKYNVSISSQSNDSVNVVDYAPKNQNEEFQVQNTLGYTFGGDISISNGLSGGLNGNTAFSETINYKQESYRTTLSRNTNYKNVGWGVEAHKIMNNGWGPYGRDSFHPTYGNELFLAGRQSSAYAGQNFIAQHQMPLLSRSNFNPEFLSVLSHRQDGAKKSKITVTYQREMDLYQICWNGFYWAGANYKNFKTRTFKSTYEIDWENHKVKLLDTKETENNK

SEQ ID NO: 70419 - protein, 257 aa, Staphylococcus aureus
MMHSKKLMLGICLVLLIILIVGYVIMTKINSRSAQIKDTFNQTLKLYPTKNLEDFYDKEGFRDQEFEKGDKGNWIVDSEMVIELKDKKMESRSMVLYINRNTRTTKGNFIVRELWEDSKGYAQSKDTKYPVKMEHNRIIPTKPIADDKLRKEIENFKFFVQYGDFKDINDYKDGDISYNPNVPSYSAKYQLKNDDYNVKQLRKRYNIPTNKAPKLLLKGDGDLKGSSIGSKNLEFTFVENKEENIYFSDSINFKPTE

SEQ ID NO: 70420 - protein, 288 aa, Staphylococcus aureus
MKKIKKAIIPAAGLGTRFLPATKAMPKEMLPILDKPTIQYIVEEAARAGIEDIIIVTGRHKRAIEDHFDSQKELEMVLKEKGKSELLEKVQYSTELANIFYVRQKEQKGLGHAISSARQFIGNEPFAVLLGDDIVESEVPAVKQLIDVYEETGHSVIGVQEVPEADTHRYGIIDPLTKNGRQYEVKKFVEKPAQGTAPSNLAIMGRYVLTPEIFDYLKTQKEGAGNEIQLTDAIERMNNDNQVYAYDFEGERYDVGEKLGFVKTTIEYALKDDSMREELTRFIKALGL

SEQ ID NO: 70421 - protein, 425 aa, Staphylococcus aureus
MKEKRTNVRWMFALAFFFIGVIAYMDRANISYIAKQMMDDLGMTKPQFGLLASFFSLGYALMQVPSGMLAEKFGPRKMITIALVWWSAFTILTGMIKNHGLIYLVRFLFGVGEAPMYPSNAVFNSFWFSKNEKGRASSALLAGSYFGPVLAPIVTIAIVNAFNWQAVFYIFGAVGILMAVLWAIIAKDLPEQHRMVNEAEKRFIMENRDIVATEKSSPPWNNFFKRFSFYAIAIQYFVVQFIITLFLIWLPTYLTEVFHVNFKEMSISSLPWLLMFFLILSAGAISDRVLGLGRSKFVARGVIAIAGFIVFAVSIIFAVRTGNLYVSIFWLSLGLGGIGISMGMSWAAATDLGRNFSGTVSGWMNLWGNIGALISPLLAGLFVEHLGWTMTFQLLIVPAVIAVIMWFYVKPDQPLIVSDDKAIEK

SEQ ID NO: 70422 - protein, 266 aa, Staphylococcus aureus
MVKAIAVDMDGTFLDSKKTYDKPRFEAIFTELRNRDITFIAASGNQYAKLKSIFGDRDMYFISENGAVIYKGNELYNYKSFNRQVFQQVVDYLNMNQSIDQLVICGLKSAYILKHTSEAFKEDTRFYYHQLKEIDSLQQLPEDDYVKIAFNINRETHPNVDEEVATQFSNDIKLVSSGHDSIDIIMPNMTKGQALKRLLDKWEMSPSELMAFGDANNDKDMLAFAKHSYVMENSHDEELFNIASAVAPSNDKQGVLTIIEQEVLNK

SEQ ID NO: 70423 - protein, 299 aa, Staphylococcus aureus
MFDSIRETIDYAVENNMSFADIMVKEEMELSGKSRDEVRAQMKQNLDVMRDAVIKGTTGDGVESVTGYTGHDAAKLRDYNETHHALSGYEMIDAVKGAIATNEVNAAMGIICATPTAGSSGTIPGALFKLEKTHDLTEEQMIDFLFTSALFGRVVANNASVAGATGGCQAEVGSASAMAAAAAVAIFGGSPEASGHAMALAISNLLGLVCDPVAGLVEIPCVMRNAIGSGNALISADLALAGIESRIPVDEVIEAMDKVGRNLPASLRETGLGGLAGTPTGEAIKRKIFGTAEDMVKNN

SEQ ID NO: 70424 - protein, 308 aa, Staphylococcus aureus
MANNHSALRLKGIILAIVGACLWGLGGTVSDFLFKYKNINVDWYVTARLVVSGVFLLIMYKMMQPKRSIFSVFQDRRMLGKLLIFSILGMLVVQYAYMASINTGNAAIATLLQYIAPVYIIIWFVIRGVAKLTLFDVLAIIMTLLGTFLLLTNGSFSNLVVNPASLFWGILAGVALAFYTIYPSDLLNRFGSILIVGWAMLISGVAMNLRHPIWHIDITKWDISIILFLIFGIIGGTALAFYFFIDSLQYISAKETTLFGTVEPVVAVIASSLWLHVAFKPFQIVGIILIMILILLLSLKRQPEALDE

SEQ ID NO: 70425 - protein, 384 aa, Staphylococcus aureus
MISNKLANIPDSYFGKTMGRKIEHGPLPLINMAVGIPDGPTPQGIIDHFQKALTIPENQKYGAFHGKEAFKQAIVDFYQRQYNVTLDKEDEVCILYGTKNGLVAVPTCVINPGDYVLLPDPGYTDYLAGVLLADGKPVPLNLEPPHYLPDWSTVDSQIIDKTKLIYLTYPNNPTGSTATKEVFDEAIAKFKGTDTKIVHDFAYGAFGFDAKNPSILASENGKDVAIEIYSLSKGYNMSGFRVGFAVGNKDMIQALKKYQTHTNAGMFGALQDAAIYALNHYDDFLEEQSNVFKTRRDRFEAMLAKADLPFVHAKGGIYVWLETPPGYDSEQFEQFLVQEKSILVAPGKPFGENGNRYVRISLALDDQKLDEAAIRLTELAYLYE

SEQ ID NO: 70426 - protein, 482 aa, Staphylococcus aureus
MGSFFNKIARKEDPAIYQNKDGHLKRTLRVRDFLALGVGTIVSTSIFTLPGIVAAEHAGPAVALSFLLAAIVAGLVAFTYAEMAAAMPFAGSAYSWVNVLFGEFFGWVAGWALLAEYFIAVAFVASGFSANLRGLVKPIGIELPAALSNPFGTNGGFIDIIAAIVILLTALLLSRGMSEAARMENILVILKVLAIILFVIVGLTAINVSNYVPFIPEHKVTATGDFGGWQGIYAGVSMIFLAYIGFDSIAANSAEALDPQKTMPRGILGSLSVAIVLFIAVALVLVGMFHYSQYANNAEPVGWALRQSGHGVVAAIVQAISVIGMFTALIGMMLAGSRLLYSFGRDGLLPSWLSHLNDKHLPNRALVILTIIGVLIGSMFPFAFLAQLISAGTLVAFMFVSLAMYRLRKREGKDLPIPAFKLPLYPVLPAITFVLVLLVFWGLGFEAKLYTLIWFIVGIILYLSYGLRHSKKNDVAEYHPPK

SEQ ID NO: 70427 - protein, 70 aa, Staphylococcus aureus
MSFYEYIQTFKDDKTPLGELAIWIKEDDSFPKQEKLTENILSYFHQMSNIDHEFLEIVKRSLSLYDQLKS

SEQ ID NO: 70428 - protein, 877 aa, Staphylococcus aureus
MKKRIDYLSNKQNKYSIRRFTVGTTSVIVGATILFGIGNHQAQASEQSNDTTQSSKNNASADSEKNNMIETPQLNTTANDTSDISANTNSANVDSTTKPMSTQTSNTTTTEPASTNETPQPTAIKNQATAAKMQDQTVPQEANSQVDNKTTNDANSIATNSELKNSQTLDLPQSSPQTISNAQGTSKPSVRTRAVRSLAVAEPVVNAADAKGTNVNDKVTASNFKLEKTTFDPNQSGNTFMAANFTVTDKVKSGDYFTAKLPDSLTGNGDVDYSNSNNTMPIADIKSTNGDVVAKATYDILTKTYTFVFTDYVNNKENINGQFSLPLFTDRAKAPKSGTYDANINIADEMFNNKITYNYSSPIAGIDKPNGANISSQIIGVDTASGQNTYKQTVFVNPKQRVLGNTWVYIKGYQDKIEESSGKVSATDTKLRIFEVNDTSKLSDSYYADPNDSNLKEVTDQFKNRIYYEHPNVASIKFGDITKTYVVLVEGHYDNTGKNLKTQVIQENVDPVTNRDYSIFGWNNENVVRYGGGSADGDSAVNPKDPTPGPPVDPEPSPDPEPEPTPDPEPSPDPEPEPSPDPDPDSDSDSDSGSDSDSGSDSDSESDSDSDSDSDSDSDSDSESDSDSESDSDSDSDSDSDSDSDSESDSDSDSDSDSDSDSDSESDSDSESDSESDSDSDSDSDSDSDSDSDSDSDSDSDSDSDSDSDSDSESDSDSDSDSDSDSDSDSDSDSDSDSDSDSDSDSDSDSDSDSDSDSDSDSDSDSDSDSDSDSDSDSDSDSDSDSDSDSDSDSDSDSDSDSDSRVTPPNNEQKAPSNPKGEVNHSNKVSKQHKTDALPETGDKSENTNATLFGAMMALLGSLLLFRKRKQDHKEKA

SEQ ID NO: 70429 - protein, 476 aa, Staphylococcus aureus
MNESGDNKLSKSSLIGLVIGSMIGGGAFNIMSDMGGKAGGLAIIIGWIITAIGMISLAFVFQNLTNERPELDGGIYSYAQAGFGDFVGFISAWGYWFSAFLGNVAYATLLMSAVGNFFPIFKGGNTLPSIIVASLLLWGVHFLILKGVETAAFINSIVTVAKLIPILLVIICMIIAFNFDTFKTGFFGMTSEGVLPFSWASTMSQVKSTMLVTVWVFIGIEGAVIFSSRAKNKKDVGSATVIGLISVLIIYFLLTVLAQGVILQNHISQLDSPSMAQVLATIVGGWGSTLVNIGLIISVLGAWLGWTLLAGELPFIVAKDGLFPKWFAKENKNGAPVNALLITNILVQLFLISMLFTQSAYQFAFSLASSAILYPYMFSAFYQVKYTLEHRQQATTKQWTIGIIASIYAIWLIYAAGINYLLLTMLLYIPALLVYSIVQKNNQTRLIKSDYILFMIIIVLAVIGLIKLLMGTINVF

SEQ ID NO: 70430 - protein, 452 aa, Staphylococcus aureus
MIKLFDYFNDHSRKLYESFKASKLEEDLTIVLNDNGFLPDDVISPYQFFADNHNTENMKPRFFNQVTVPAFWEIKGNNNSATINDMGRLRGKIFYQSGERPRIVSRVEWFDDQQRVRFVDYYSKNGIKFAQTVYDLNRKAILKKYMTAEGKEVIYENFVTSDVILDWQGKSYFFPSKLAFVLFFIKQLEITEHHFVINSLALPFSVLYNLPSKGSDVLVWQEHCNGNVPGNMQLMCKGDMKRHCNIIIPDKNEYETMLNIADAKVQSRILQGGYLYNYRSRNRYTKEIVILTNSDQLRNIKVLVETLPDFNFHIAAITEMSDKLMQLDQYANVHLYPSINIDRVNELYQLCDIYLDINEGNEILNAVEQAFDYELLILGYRQTAHHAKVTLSEHLFEHNDEITMESKDQLIQMLESLKDQQQFRDALLAQKAHAHEISREQFEQVFKQALES

SEQ ID NO: 70431 - protein, 412 aa, Staphylococcus aureus
MQFFNFLLFYPVFMSIYWIVGSIYFYFTREIRYSLNKKPDINVDELEGITFLLACYNESETIEDTLSNVLALKYEKKEIIIINDGSSDNTAELIYKIKENNDFIFVDLQENRGKANALNQGIKQASYDYVMCLDADTIVDQDAPYYMIENFKHDPKLGAVTGNPRIRNKSSILGKIQTIEYASLIGCIKRSQTLAGAVNTISGVFTLFKKSAVVDVGYWDTDMITEDIAVSWKLHLRGYRIKYEPLAMCWMLVPETLGGLWKQRVRWAQGGHEVLLRDFFSTMKTKRFPLYILMFEQIISILWVYIVLLYLGYLFITANFLDYTFMTYSFSIFLLSSFTMTFINVIQFTVALFIDSRYEKKNMAGLIFVSWYPTVYWIINAAVVLVAFPKALKRKKGGYATWSSPDRGNTQR

SEQ ID NO: 70432 - protein, 204 aa, Staphylococcus aureus
MLRIAIAKGRLMDSLINYLDVIEYTTLSETLKNRERQLLLSVDNIECILVKGSDVPIYVEQGMADIGIVGSDILDERQYNVNNLLNMPFGACHFAVAAKPETTNYRKIATSYVHTAETYFKSKGIDVELIKLNGSVELACVVDMVDGIVDIVQTGTTLKANGLVEKQHISDINARLITNKAAYFKKSQLIEQFIRSLEVSIANA

SEQ ID NO: 70433 - protein, 171 aa, Staphylococcus aureus
MTNFTFDGAHSSLEFQIKHLMVSKVKGSFDQFDVAVEGDINDFSTLKATATIIPSSINTKNEARDNHLKSGDFFGTDEFDKITFETKSVTENKVVGDLTIKGITNEETFDVEFNGVSKNPMDGSQVTGVIVTGTINRENYGINFNQALETGGVMLGKDVKFEASAEFSISE

SEQ ID NO: 70434 - protein, 459 aa, Staphylococcus aureus
MDLDTITSISTPMGEGAIGIVRLSGPQAVEIADKLYKGKHLLNDVPSHTINYGHIIDPESKEVVEEVMVSVLRAPKTFTREDIIEINCHGGILTINRVLELTMTYGARMAEPGEFTKRAFLNGRIDLSQAEAVMDFIRSKTDRASKVAMNQIEGRLSDLIKKQRQSILEILAQVEVNIDYPEYDDVEDATTEFLLEQSKEIKQEINRLLDTGAQGKIMREGLSTVIVGKPNVGKSSMLNNLIQDNKAIVTEVAGTTRDVLEEYVNVRSVPLRLVDTAGIRETEDIVEKIGVERSRKALSQADLILFVLNNNEALTQEDYTLYEVVKNEDVIVIVNKMDLEQNIDINEVKDMIGDTPLIQTSMLKQEGIDELEIQIRDLFFGGEVQNQDMTYVSNSRHISLLKQARQTIQDAIDAAESGVPMDMVQIDLTRTWEILGEIIGETASDELIDQLFSQFCLGK

SEQ ID NO: 70435 - protein, 275 aa, Staphylococcus epidermidis
MKCLFKMLSIIIIMLSTFTLFISPSTYANEDENWTKIKNRGELRVGLSADYAPLEFEKTIHGKTEYAGVDIELAKKIAKDNHLKLKIVNMQFDSLLGALKTGKIDIIISGMTTTPERKKEVDFTKPYMITNNVMMIKKDDAKRYQNIKDFEGKKIAAQKGTDQEKIAQTEIEDSKISSLNRLPEAILSLKSGKVAGVVVEKPVGEAYLKQNSELTFSKIRFNEEEKQTCIAVPKNSPVLLDKLNQTIDNVQRQNLIDQYMTKAAEDMQDDGNFIS

SEQ ID NO: 70436 - protein, 284 aa, Staphylococcus epidermidis
MGLNKEAIKIGFAYVGIVVGAGFSTGQEVMQFFTPFGLWSYIGVIISGFILGFIGRQVAKIGTAFEAKNHESTLQYVFGKKFSKVFDYILVFFLFGIAVTMIAGSGSTFEQSFGIPTWLGALIMTVLIYLTLLLDFNKIVRALGLVTPFLIIMVILIAVFYLFTGSISLGEVNSAMPDTSAWKGIFWGLVYGGLAFAVGFSTIVAIGGDASKRRVSGAGAMFGGVLYAILLALINFSLQTEYSKIKDVAIPTLNLAKGIHPWLGLVLTVIMLAVMYNTILGLCY

SEQ ID NO: 70437 - protein, 1633 aa, Staphylococcus epidermidis
MKKRRQGPINKRVDFLSNKVNKYSIRKFTVGTASILVGATLMFGAADNEAKAAEDNQLESASKEEQKGSRDNENSKLNQVDLDNGSHSSEKTTNVNNATEVKKVEAPTTSDVSKPKANEAVVTNESTKPKTTEAPTVNEESIAETPKTSTTQQDSTEKNNPSLKDNLNSSSTTSKESKTDEHSTKQAQMSTNKSNLDTNDSPTQSEKTSSQANNDSTDNQSAPSKQLDSKPSEQKVYKTKFNDEPTQDVEYTTTKLKTPSISTDSSVNDKQDYTRSAVASLGVDSNETEAITNAVRDNLDLKTASREQINEAIIAEALKKDFSNPDYGVDTPLALNTSQSKTSPHKSASPRMNLMSLAAEPNSGKNVNDKVKITNPTLSLNKSNNHANNVIWPTSNEQFNLKANYELDDSIKEGDTFTIKYGQYIRPGGLELPAIKTQLRSKDGSIVANGVYDKTTNTTTYTFTNYVDQYQNITGSFDLIATPKRETAIKDNQNYPMEVTIANEVVKKDFIVDYGNKKDNTTTAAVANVDNVNNKHNEVVYLNQNNQNPKYAKYFSTVKNGKFIPGEVKVYEVTDTNAMVDSFNPDLNSSNVKDVTSQFAPKVSADGTRVDINFARSMANGKKYIVTQAVRPTGTGNVYTEYWLTRDGTTNTNDFYRGTKSTTVTYLNGSSTAQGDNPTYSLGDYVWLDKNKNGVQDDDEKGLAGVYVTLKDSNNRELQRVTTDQSGHYQFDNLQNGTYTVEFAIPDNYTPSPANNSTNDAIDSDGERDGTRKVVVAKGTINNADNMTVDTGFYLTPKYNVGDYVWEDTNKDGIQDDNEKGISNVKVTLKNKNGDTIGTTTTDSNGKYEFTGLENGDYTIEFETPEGYTPTKQNSGSDEGKDSNGTKTTVTVKDADNKTIDSGFYKPIYNLGDYVWEDTNKDGIQDDSEKGISGVKVTLKDKNGNAIGTTTTDASGHYQFKGLENGSYTVEFETPSGYTPTKANSGQDITVDSNGITTTGIINGADNLTIDSGFYKTPKYSVGDYVWEDTNKDGIQDDNEKGISGVKVTLKDEKGNIISTTTTDENGKYQFDNLDSGNYIIHFEKPEGMTQTTANSGNDDEKDADGEDVRVTITDHDDFSIDNGYFDDDSDSDSDADSDSDSDSDSDADSDSDADSNSDSDSDSDSDSDSDSDSDSDSDSDSDSDADSDSDADSDSDSDSDSDSDSDSDSDSDSDSDSDSDSDADSDSDADSDSDADSDSDADSDSDSDSDSDADSDSDSDSDSDADSDSDSDSDSDADSDSDSDSDSDADSDSDSDSDSDADSDSDSDSDSDSDSDSDSDSDSDSDSDSDSDSDSDSDSDSDSDADSDSDSDSDSDADSDSDADSDSDSYSDSDSDSDSDADSDSDSDSDSDSDSDSDADSDSDSDSDSDAESDSDSDSDSDSDSDSDSDSDSDSDSDSDSDSDSDADSDSDSDSDSDSDSDSDSDSDSDSDSDSDADSDSYSDSDSDSDSDSDSDSDSDSDSDSDSDSDSDSDSDSDSDSDSDSDSDSDSDSDSDSDSDSDSDSDSDSDSDSDSDSDSDSDSDSDSDSDSDSDSDSDSDSDSDSDKNAKDKLPDTGANEDHDSKGTLLGTLFAGLGALLLGRRRKKDNKEK

SEQ ID NO: 70438 - protein, 111 aa, Staphylococcus epidermidis
EQIKQQIKENVLKGYVSPGEHLPSMRELAKDLKVSLITTKRAYEDLEKDGFVTTIRGKGTFVKEQDNSILKEKQFFVIENLAHSMSKEAKTIGMPLEELIEILTMIYEEDD

SEQ ID NO: 70439 - protein, 356 aa, Staphylococcus epidermidis
MNLTTQITKMLGIKYPIIQAGMAGSTTPELVSTVSKQGGLGMIGAGYFDSHQLSKEILEVQKLTQAPFAVNLFTPNDIKYDKKQIEQMNTKLKPYREALGLSTPKNSTVKEKEKFEDAIEVIESLKVPIIAFTFGIPNQNIIKRLHNAGKILIGTATSVEEAVENENAGMDIVVAQGYEAGGHRGSFTTINGEFPLVGTLSLVPQIVDNVSIPVIAAGGIMDGRGLVASLALGAGAAQLGTAYLTTNESGADDKIKNEIIESSETDTILTNVFSGKLARGIMNEFVHNMNLYSKQVPPYPLQNQLTTQIRKSALEKGYTEWTHIWSGQSTRLADTVDAAQLTKNIINDAVKIINNK

SEQ ID NO: 70440 - protein, 355 aa, Staphylococcus epidermidis
MKKNKLELVYLRAFICVIIIVTHLLTQITLENEQMSDSSLILQYYIRNIFIFGTPSFIILSQLLTTLNYESVTINYLFSRFKYIFIPYLLIGLFYSYSESLITASSFKKQFIENVVLGQWYGYFIIIIMQFFVLSYIIYKINFRLFNSKILLLLAFIVQQSYLHYFLNNDTFHQFMTHYYPLSENTMILGWIFYFFLGGYIGYNYEKILSFLEKYLIIVIMLTLGAYVLFIAVSGSDYWNVTSFTYTLTLYNSVMFFLLLGVCMHFKTMLLNTIKAISAFSFFIYLLHPIILDSLFAYTNIFEDNTIVFLAISLLMILGICIGVGMMLREFYIFRFVIGKQPYKLQFDQYQPNWN

SEQ ID NO: 70441 - protein, 90 aa, Staphylococcus epidermidis
MKINIFGYNIFAKGGTSRSNINLVKSLLEIGHEVHYFNYQDYNKSDITKLIIYEGLSTKHLHIHQFNSGKELAHGDLLIITRETFLIMHI

SEQ ID NO: 70442 - protein, 415 aa, Staphylococcus epidermidis
MRSFMLKEVFKMTRCRSPTYITIKQIKNERNQNMKNKRTLLKVITSTSVALLLSNLVMNSVVRAESNTSVSSYQTTIQKYIVNKNKLVKEIKINKGDKVQFLIKSKVLNNEPITSIKFSDDFENVFDIDKNVEVFIPKDETTVHDSLNFKEDFNNVTKQGVLKVNEDNESFEWIANNPNEFSGKTLYLVVKGTTKKDADYKKYISDKLTSISDVAKEQINSQELTSNSVDVIIKPDSNKNLVFIQNALAHQHISLDLLNDKKNKKATNINQIQQTSSKSKDIQNSNNKVSNSNNKITLNITSDEYEKEKKNSKQVQDSNKLVDKEQKNTQNTKDLKKENTKDSSKNNLDSKDKENIKKDNNIKKATDKPTKEKLLPNTGMTDNITYVMVGLIISLGSSILLLKVASKHYKNRKKC

SEQ ID NO: 70443 - protein, 581 aa, Staphylococcus epidermidis
MEDAVVEMDAVKYLNKLNLDNIELTKYLFFTGKGGVGKTTISSFIALNLAENGKKVALVSTDPASNLQDVFQMELSNKLTKYQPIPNLSIANFDPIVAADDYKAQSIEPYEGILPEDVLSEMKEQLSGSCTVEVAAFNEFTNFLSDKTLEQEFDFIIFDTAPTGHTLRMLELPSAWTDYLNTTSNDASCLGQLSGLNENRVKYNSALEKLRNQDDTTMMLVARPTHSSIYEIQRAQQELQQLSISKFKVIINNYIEESHGLISSQMKSEQDKNINHFTEWLNNNHAYYVPYKNQKEEGIESLTNLLNDDNLIENDDFIVEDHPQFNKLIDEIENSKVQYLFTMGKGGVGKTTVATQLATTLSNKGYRVLLATTDPTKEINVETTSNLNTAYIDEEQALEKYKKEVLATVNDDTPQDDIDYIMEDLKSPCTEEIAFFKAFSDIMENQDDMDYVIVDTAPTGHTLLLLDSSENHHRELKKKSTQTTSNVETLLPKIQNKNLTQMIIVTLAEKTPYLESKRLVEDLNRANIGHNWWVVNQSLVTLNQRDDLFSNKKEDESFWINKIKNESLDNYFVIPYRVLEY

SEQ ID NO: 70444 - protein, 670 aa, Staphylococcus epidermidis
MFTNIDTKNHTVEQTIYINPLRYSAKETNVNISGNGDEGSTIIDDSTIIKVYKVGDNQNLPDSNRIYDYSEYEDVTNDDYAQLGNNNDVNINFGNIDSPYIIKVISKYDPNKDDYTTIQQTVTMQTTINEYTFEASYDNTIAFSTSSGQGQGDLPPEKTYKIGDYVWEDVDKDGIQNTNDNEKPLSNVLVTLTYPDGTSKSVRTDEDGKYQFDGLKNGLTYKITFETPEGYTPTLKHSGTNPALDSEGNSVWVTINGQDDMTIDSGFYQTPKYSLGNYVWYDTNKDGIQGDDEKGISGVKVTLKDENGNIISTTTTDENGKYQFDNLNSGNYIVHFDKPSGMTQTTTDSGDDDEQDADGEEVHVTITDHDDFSIDNGYYDDESDSDSDSDSDSDSDSDSDSDSDSDSDSDSDSDSDSDSDSDSDSDSDSDSDSDSDSDSDSDSDSDSDSDSDSDSDSDSDSDSDSDSDSDSDSDSDSDSDSDSDSDSDSDSDSDSDSDSDSDSDSDSDSDSDSDSDSDSDSDSDSDSDSDSDSDSDSDSDSDSDSDSDSDSDSDSDSDSDSDSDSDSDSDSDSDSDSDSDSDSDSDSDSDSDSDSDSDSDSGSDSDSDSDSDSDNDSDLGNSSDKSTKDKLPDTGANEDYGSKGTLLGTLFAGLGALLLGKRRKNRKNKN

SEQ ID NO: 70445 - protein, 100 aa, Staphylococcus epidermidis
MSEEMNDQMQVRRQKLQELIDLGIDPFGHRFNRSSTSSELKEQWDQFSKEELHDKEDESHVSIAGRLMTKRGKGKAGFAHILDLKGQIHIYVRRDQVGDD

SEQ ID NO: 70446 - protein, 246 aa, Staphylococcus epidermidis
MTVKVEHLTGGYGKKPVIKDLNFELEKGEIVGLIGLNGAGKSTTIKHMLGLINPMEGKLSISNIKINEDIENYRRKLSYIPESPVIYDELTLEEHIEMTAMAYQLSREEAMRRAKPLLKVFRLENELKVFPSHFSKGMKQKVMIICAFIVDPELYIIDEPFLGLDPLGIQSMLDLMVEKRNENRTVLMSTHILATAERYCDRFIILDKGEIVAFGNLDELREQTGLKDKTLDDIYIHVTQGSSAYE

SEQ ID NO: 70447 - protein, 207 aa, Staphylococcus epidermidis
  MISC_FEATURE (101)..(101): X=any amino acid
LHFTQREQDKLMIVVAAEVARRRKARGLKLNHPEALALISDELLEGARDGKTVAELMSYGKTILNEEDVMDGVANMITELEIEATFPDGTKLITVHHPIVXGAISMIPGEIIVKNTEIEVNKHHPETVIEVKNTGDRPIQVGSHFHFFEANKALEFDREKAYGKHLDIPAGAAVRFEPGDEKKVQLVEYSGRRKIYGFRGLVDGDID

SEQ ID NO: 70448 - protein, 259 aa, Staphylococcus epidermidis
MIQIRNLDKTIDNKPILKDISVDIKKGKLTSLIGPNGAGKSTLLSAISRLFSYENGSILIEDKEISEYKTDDLAKKLSILKQSNHTDMNITIEQLVKFGRFPYSKGRMKQEDYDKVEYALDLLQLNEIKHRNIKTLSGGQRQRAYIAMTIAQDTDYILLDEPLNNLDMKHSVQIMQTLRDLCRQLNKTIIIVLHDINFASCYSDDIIALKQGELVKADDKDNVIQSDILKSLYEMEVRIEEIRGQRICLYYDETTFDSV

SEQ ID NO: 70449 - protein, 366 aa, Staphylococcus epidermidis
MLEKRYLVLEDGSYYEGYRLGSDDLSIGEIVFNTAMTGYQETISDPSYTGQIITFTYPLIGNYGINRDDFESLTPKLNGVVVKEASTHPSNFRHQKTLHETLAQYHIPGISGVDTRSITRKIRNYGVLRAGFTDNKDNIQELVEQLKTAELPRDEVQTVSTKTPYVSTGSDLSVVLLDFGKKQNIVRELNLRGCNVTVVPYDTSAEEILGMSPDGVMLSNGPGDPDEVDVALDMIRGILGKIPFFGICLGHQLFALSQGATSFKMKFGHRGANHPVKDLRTGKIDITSQNHGYSIDCDSLKNTDLEVTHIALNDGTVEGLRHKELPAFSVQYHPEARPGPSDSNYLFDEFIAMMKDFKEKERQINA

SEQ ID NO: 70450 - protein, 998 aa, Staphylococcus epidermidis
  MISC_FEATURE (993)..(993): X=any amino acid
QLTQSTLKLNDKMKLLRDKLKTLVNPVKASLNYRNADYNLKRQFNKALKEAKGILNKNSGPNVNINDIQHLLTQIDNAKDQLNGERRLKEHQQKSEVFIIKELDILNNAQKAAIINQIRASKDIKIINQIVDNAIELNDAMQGLKEHVAQLTATTKDNIEYLNADEDLKLQYDYAINLANNVLDKENGTNKDANIIIGMIQNMDDARALLNGIERLKDAQTKAHNDIKDTLKRQLDEIEHANATSNSKAQAKQMVNEEARKAFSNINHATSNDLVNQAKDEGQSAIEHIHADELPKAKLDANQMIDQKVEDINHLISQNPNLSHDEKNKLISQINKLVNGIKDEIQQAINKQQIENATTKLDEVIETTKKLIIAKAEAKQVIKELSQKKRDAINNNTDLTPSQKAHALADIDKTEKDALQHIENSNSIDDINNNKKHAFNTLAHIIIWDTDQQPLVFELPELSLQNALVTSEVVVHRDETISLESIIGAMTLTDELKVNIVSLPNTDKVADHLTAKVKVILADGSYVTVNVPVKVVEKELQIAKKDAIKTIDVLVKQKIKDIDSNNELTSTQREDAKAEIERLKKQAIDKVNHSKSIKDIETVKRTDFEEIDQFDPKRFTLNKAKKDIITDVNTQIQNGFKEIETIKGLTSNEKTQFDKQLTELQKEFLEKVEHAHNLVELNQLQQEFNNRYKHILNQAHLLGEKHIAEHKLGYVVVNKTQQILNNQSASYFIKQWALDRIKQIQLETMNSIRGAHTVQDVHKALLQGIEQILKVNVSIINQSFNDSLHNFNYLHSKFDARLREKDVANHIVQTETFKEVLKGTGVEPGKINKETQQPKLHKNDNDSLFKHLVDNFGKTVGVITLTGLLSSFWLVLAKRRKKEEEEKQSIKNHHKDIRLSDTDKIDPIVITKRKIDKEEQIQNDDKHSIPVAKHKKSKEKQLSEEDIHSIPVVKRKQNSDNKDTKQKKVTSKKKKTPQSTKKVVKTKKRSKKXNISLT

SEQ ID NO: 70451 - protein, 240 aa, Staphylococcus epidermidis
MDTPSQIGTNTITIESTDASGNKTTTKINYEVTRNSASDSTSTSIVNSVSTSISNSTSLSDSVKASQSLSTSKSLSESLSASTSNSTSIQASESASTSKQLSESASTSTSDSASESARKSESTSKSTSLSESTSTSVSDSASVSTSESASTSTSVSGSTSTSISDSTSTSTSDSASIKASESASTSKLLSESVSTSTSDSASTSTSVSDSNSASTSLSKSTSTSVSDSTSTSTSDSASTS

SEQ ID NO: 70452 - protein, 295 aa, Staphylococcus epidermidis
MSASESESHSTSTSLSESTSTSLSGSTSASTSDSASTSTSESESDSTSTSLSESTSTSLSGSTSASTSDSASTSTSESDSTSESTSLSESLSTSVSDSTSASTSESASTSTSESESNSASTSLSGSLSTSISDSTSTSTSDSASTSTSESESDSTSTSLSESTSTSLSDSTSTSTSESASTSTSESDSTSESTSLSESTSTSVSDSTSASTSDSASTSTSVSDSESASTSISESLSTSVSDSTSTSTSDSASTSTSESDSTSASTSLSESISTSVSDSTSASTSDSASTSTSESE

SEQ ID NO: 70453 - protein, 469 aa, Staphylococcus epidermidis
MSDSNSASTSLSGSLSTSVSDSTSTSTSDSASASTSESDSERASTSLSGSTSTSISDSTSTSTSDSASTSTSVSESNSTSTSISESLSTSVSDSTSTSTSDSASTSTSVSDSDSASTSSSESVSTSDSESTSTSTSDSASTSTSVSESNSTSTSLSGSTSTSVSDSTSTSTSDSASASTSESDSDSASTSSSESVSTSVSDSTSASTSESASTSTSVSDSNSASTSLSESTSTSLSDSTSMSTSDSASTSTSESDSDSASTSLSDSTSTSVSESTSTSTSDSASTSTSVSESTSTSTSSSESVSTSDSDSTSTSTSESASTSTSESDSNRASTSLSGSTSTSVSDSTSTSTSDSASTSTSESDSNSASTSLSGSTSTSLSESTSTSTSTSVSASNSTSTSLSDSTSTSLSDSTSTSTSESGSTSTSESDSDSASTSLSESTSTSISDSTSTSTSDSASTSMSVSELKQS

SEQ ID NO: 70454 - protein, 483 aa, Staphylococcus epidermidis
MVEKLKNEWLNQPGKNILAGIVVALALIPEAIAFSIIAGVDPMVGLYTSFIIAVVTAIVGGRAAMISGATGAIALLIVPLVKDYGVEYLLAATILMGLIQLILGLLKVGRLMKFIPRSVMIGFVNALGIMIFMSQIEHIFGISISTYIYVIVTLLIVYIIPRFFKAIPAPLIAIIVLTALYMYTGSDVRTVGDLGNIKQAFPHFLIPNVPFNLETLQIIFPYSLSMAIVGLVESLLTAKIVDDATDTYSSKNRESCGQGIANMITGLFGGMGGCAMIGQSVINVKSGANSRLSTFTAGIVLIFMIIVLGGLVVQVPMPILAGIMVMVSVGTFDWNSFKYIKKAPKTDAVVMLITVIIVLMTHNLALGVVAGVVFSALFFATKISKVEVISEEFGKINRLSFKGQIFFVSIDSMMEQINFEIENSTIELNFNNAHLWDDSAVDAIDTIVRKFEEKNNIVRVEKLNSDSRKVVSELSQLNENHLN

SEQ ID NO: 70455 - protein, 180 aa, Staphylococcus epidermidis
MVEKLKNEWLNQPGKNILAGIVVALALIPEAIAFSIIAGVDPMVGLYTSFIIAVVTAIVGGRAAMISGATGAIALLIVPLVKDYGVEYLLAATILMGLIQLILGLLKVGRLMKFIPRSVMIGFVNALGIMIFMSQIEHIFGISISTYIYVIVTLLIVYIIPRFFKAIPAPLIAIIVLTAL

SEQ ID NO: 70456 - protein, 321 aa, Staphylococcus epidermidis
MKFAVVGTGVIGSGWITRMLAHGHEVIATDPSEGAYERMLTQVKQNWPYAEQMGLAENASIQNLTFTPHLEEAVKDADHIQENVPEVEEIKDAVLKEIDFYAKPEATIGSSTSGIMPSELQANLSHPERLVVAHPFHPVYILPLVEIVPGKQTSEETTVKAEQIYESIGMDVLHVRHEIEGHIADRLMEALWRESLHIVNDGIATTEEVDKAFTHAAGLRYAQYGPFMTFHLAGGEGGMRHMLKQFGPALKKPWTKLIAPELTDDLYHKVVSGSEASSQGYTMSELDQKRNEFLIKVKELAEQYWPSDSKAMKKSNGAELQ

SEQ ID NO: 70457 - protein, 156 aa, Staphylococcus epidermidis
MTNHIVLYQPEIPANTGNIARTCAGTLTHLHLIKPLGFSTEDKMLKRAGLDYWEHVNITYHDSIEEFFANTEGHYYLLTKFGKQTYSDFNFSNTNEDYYFIFGKETTGLPEWVKEKYAKTALRIPMSDNIRSLNLSNTAALLIYEALRQQDYPNLS

SEQ ID NO: 70458 - protein, 453 aa, Staphylococcus epidermidis
MMKNKLTLKENLFIGSMLFGLFFGAGNLIFPIHLGQTAGSNVWTANLGFLITAIGLPFLGIIAIGVSKTNGVFEISSRISKIYGYLFTIGLYLVIGPFFALPRLATTSFEIAFSPFISSGTAQALLPIFSILFFGVAWLFSRKPSKILDYIGKFLNPVFLILLGIVVVLAFIRPMGGISHAPVSADYSNSVLLKGFIDGYNTLDALASLAFGIIIVTTIKKLGITNPNTIAKETLKSGTISIIAMGVIYTLLALMGTMSLGRFKVSENGGIALAQIAQHYLGDYGIIILSLIIIVACLKTAIGLITAFSETFTELFPKSNYLWLATGVSILACIFANVGLTKIIMYSTPVLMFIYPLAITLILLALLSPLFKHSKIVYRFTTLFTMVAAFVDGVKASPEFFVNTKFAQTIIGFGENYLPFFNIGMGWIVPAFFGFIIGIIVYFMTAKKSSHVQ

SEQ ID NO: 70459 - protein, 251 aa, Staphylococcus epidermidis
MLKGHLHSVESMGTVDGPGLRYILFTQGCLLRCLYCHNPDTWKINEPSREVTVDEMVNEILPYKPYFEASGGGVTVSGGEPLLQMPFLEQLFKELKANGVHTCIDTSAGCVNDTPAFNRHFDELQKHTDLILLDIKHIDNDKHIKLTGKPNTHILKFARKLSDMKQPVWIRHVLVPGISDDKEDLIKLGEFINSLDNVEKFEILPYHQLGVHKWKNLGIPYQLENVEPPDDEAVKEAYRYVNFNGKIPVTL

SEQ ID NO: 70460 - protein, 271 aa, Staphylococcus epidermidis
MTLLKVAHLGIKDTWSDETLVDNVNFTVQCGETLGIIGESGSGKSITCKALIGLNAQRLSVSGDIFFEHQNLNTITEKQLRKIRGKDIAMIMQQGTRAFDPSTKVGKQMIETLRAHTTLSKQQIKQELIHYMTYMKLKDPQSLLKAYPYMLSGGMLQRMMIALALALKPKLIIADEPTTALDTITQYEVINAFKDIKHHFDCAMIFISHDLTVINKIADRVVVMREGRVIEEGRTNMVLQQPRHHYTAYLLSTKKTIYDYFQFVLRGDFNA

SEQ ID NO: 70461 - protein, 532 aa, Staphylococcus epidermidis
MNKLTKLSTVIFVSGIILAGCGSNKELTEKKENKVLSYTTVKDIGDMNPHVYGGSMSAESMIYEPLVRNTKDGIKPLLAKKWDISPDGKTYTFYLRDDVSFHDGTKFDADAVKKNIDAVQQNKKLHSWLKLSTLIDDVKVKDKYTVQLHLKEAYQPALAELAMPRPYVFVSPKDFKHGTTKDGVKSFDGTGPFKMGEHKKDISAEFNKNNQYWGEKAKLNKVEAKVKPAGETAFLSMKKGETNFAYTDDRGTDSLDKDSLKQLKETGSYQVKRSQAMNTKMLVVNSGKKDSAVSDKAVRQALGHMVNRDKIAQDILNKQEKPATQLFAKNVTDINFNLPTRTYDKKKAQALLDKAGWVLSKDRQVRQKEGKDLNLKLYYDKGSSSQKEQAEFLEAEFKKLGVQLDINGETSDKVAERRSSGDYDLMFNQTWGLLYDPQSTLAAFKTKTGYESATLGIKNKSQLYKDIDEAFKIQDAKERSKAYQQILKQVDDEGVFIPITHGRMTVVAPKDLQKLSFTQSQYELPFNEMQYK

SEQ ID NO: 70462 - protein, 349 aa, Staphylococcus epidermidis
MSDSQREQRKNEHVEIAMSQKDALVSDFDKVRFVHHSIPSIDVSQVDMTSHTTKFDLAYPIYINAMTGGSDWTKQINEKLAIVARETGIAMAVGSTHAALRNPNMIETFSIVRKTNPKGTIFSNVGADVPVDKALQAVELLDAQALQIHVNSPQELVMPEGNREFASWMSNIESIVKRVDVPVIIKEVGFGMSKETLQALYDIGVNYVDVSGRGGTNFVDIENERRSNKDMNYLSQWGQSTVESLLESTEFQDRLNIFASGGLRTPLDAVKCLALGAKAIGMSRPFLNQVEQSGITNTVDYVESFIQHMKKIMTMLDAPNIERLRQADIVMSPELISWINQRGLHLNRK

SEQ ID NO: 70463 - protein, 658 aa, Staphylococcus epidermidis
MTATFIIIYIVVALILIGFINFFLIKRKRKNKDKRVEQRSTIDSKRESNQSKFKASDLEQTTKSNTDPTQSNDIEDEKRKNHFDSEIDNASQSINTDSKEDRNALSHKNQEEDDASNDVLNPIDPNSTEGRVNERIKNQESNFIFGKGITRGKILAAMLFGMFIAILNQTLLNVALPKINTEFNISASTGQWLMTGFMLVNGILIPISAFLFNKYSYRKLFIIGLALFTLGSLVCAISFNFPIMMSGRVLQAIGAGILMPLGSNVIVTIFPPEKRGVAMGTMGIAMILAPAIGPTLSGYIVQNYDWNVMFYGMFFIGIIAIVIGLFWFKLYQSTTNPKADIPGIIYSTIGFGSLLYGFSEAGNKGWGSTEIVTMFIVGTVFIIFFILRELRMKAPMLSLEVLKYPTYTLTTVINMIVMMSLYGGMILLPLYLQNLRGFSALDSGLLLLPGALVMGALGPVAGKLLDTIGIKPLAIFGIGIMTYATWELSKLNMDTTYLHIMWIYIVRSFGMAFVMMPIMTAGMNALPPRLISHGNAFVNTMRQLAGSIGTAILVTVMTTQQTNHLSAFSEELDKTNPVIQDHMRELAQQYGGESAAMKLLLEHVNKLASVEGVNDAFIVATIISAIALILSLFLQGKKKAQLSAEKANAEDYPSQQDK

SEQ ID NO: 70464 - protein, 215 aa, Staphylococcus epidermidis
MKKMILINVITIIVLVVIGVLGFWFWHNTTSYVTTDNAKVDGDQIKISSPASGQIKSLNVKQGDKLDKGDKVAEVLAQGQDGQSKDMNIKMPQKGTIVKTDGIEGSMTQAGNPIAYAYNLDDLYITANVDEKDISDVEKGNDVDVDIDGQKASIKGKVEEVGQATAASFSLMPSSNSDGNYTKVSQVVPVKISLDSNPSKNVVPGMNAEVKIHKN

SEQ ID NO: 70465 - protein, 430 aa, Staphylococcus epidermidis
MSKILMVGSGPVAIQLARLCNLHGEHMVDMVSRVHASTKSKRVFDAYHRDGFFSVMTQNDAHQCFSGKFTVRHFFKDVKDITQYYDVVILACTADAYRPILQQLSKSTLKRIKQIILVSPTLGSHMLVKQILSDVHCEGEVISFSTYLGDTRIFDKAQPHCVLTTRVKSKLFVGSTHSQSITLYKLKSLFDYLNIELTTMDTPLHAEIHNSSLYVHPPLFMNQFSLKAVFEGTKVPVYVYKLFPEGPITMTLIHEMRLMWQEMMMILKKLKVPSVNLLKFMVKENYPIRDETMREVDIESFENLSAIHQEYLLYVRYTAILIDPFSNPDDQGAYFDFSAVPYKHVDTDEQGVIHIPRMPSEDYYRTLMIQAIGRALNVATPMIDTLLLRYETTVKQYCDTHLHQQLSKQFELHHFKQDLALVTNYLTFYK

SEQ ID NO: 70466 - protein, 271 aa, Staphylococcus epidermidis
MNEHTKIENQLQYYLEQFTYLHQLVLEDSRHIVDLENLIDEYSQWILQPLAEHHYLTWNDLETKISFTKKLQEVSAKCVKQVEVIRAQRLLNGRASTSGYFENIEHCINEEFGRWQIGQNDKLLLIGSGAYPMTLIQVAKETGAAVIGIDIDSEAVDLGQRVVNVLAPNEDIVISNQTVDQLEDIQSVTHIIFSSTIPIKYDILNELYTLTNDEVVVAMRYGDDMKALFNYPSQATDETQWRCEELQTRPKQIFDIALYRKVTSKVGVEHV

SEQ ID NO: 70467 - protein, 156 aa, Staphylococcus epidermidis; identical to SEQ ID NO: 43783

SEQ ID NO: 70468 - protein, 693 aa, Staphylococcus epidermidis
MARDFSLKNTRNIGIMAHIDAGKTTTTERILYYTGRIHKIGETHEGASQMDWMEQEQDRGITITSAATTAQWQGHRVNIIDTPGHVDFTVEVERSLRVLDGAVTVLDAQSGVEPQTETVWRQATTYGVPRIVFVNKMDKLGANFEYSVSTLHDRLQANAAPIQLPIGAEDEFEAIIDLVEMKCFKYTNDLGTEIDEIEIPEDHKERAEEARAQLIEAVAENNDDLMEKYLGDEEISVDELKDAIRQATTDVEFYPVLCGTAFKNKGVQLMLNAVIDYLPSPLDVKPIIGHRANNPDEEVVAKPDDSAEFAALAFKVMTDPYVGKLTFFRVYSGTLSSGSYVKNSSKDKRERVGRLLQMHANSRQEIDTVYSGEIAAAVGLKETGTGDTLCGEKNDIILESMEFPEPVIHLSVEPKSKADQDKMTQALVKLQEEDPTFHAHTDEETGQVIIGGMGELHLDILVDRMKKEFNVECNVGAPMVSYRETFKQPAQVQGKFSRQSGGRGQYGDVHIEFTPNETGGGFEFENAIVGGVVPREYIPSVEQGLKDAMENGVLAGYPLIDVKAKLFDGSYHDVDSSEMAFKIAASLALKEAAKKCDPVILEPMMKVTIEMPEEYMGDIMGDVTARRGRVDGMEPRGNAQVVNAYVPLSEMFGYATSLRSNTQGRGTYTMYFDHYAEVPKSIAEEIIKKNKGE

SEQ ID NO: 70469 - protein, 394 aa, Staphylococcus epidermidis
MAKEKFDRSKEHANIGTIGHVDHGKTTLTAAIATVLAKNGDTVAQSYDMIDNAPEEKERGITINTAHIEYQTDKRHYAHVDCPGHADYVKNMITGAAQMDGGILVVSAADGPMPQTREHILLSRNVGVPALVVFLNKVDMVDDEELLELVEMEVRDLLSEYDFPGDDVPVIAGSALKALEGDAEYEQKILDLMQAVDDYIPTPERDSDKPFMMPVEDVFSITGRGTVATGRVERGQIKVGEEVEIIGMHETSKTTVTGVEMFRKLLDYAEAGDNIGALLRGVAREDVQRGQVLAAPGSITPHTKFKAEVYVLSKDEGGRHTPFFTNYRPQFYFRTTDVTGVVNLPEGTEMVMPGDNVEMTVELIAPIAIEDGTRFSIREGGRTVGSGVVTEIFE

SEQ ID NO: 70470 - protein, 316 aa, Staphylococcus epidermidis
MKYIDEQTQAQLLDMNEVILEVEKALQAFSENKTITPLRYVLPFNEQNRYLVMPALSDELNIVGLKTVSFAPENSKKGKATITGSVILSDYETGETLSILDGGFLTKVRTGAISGVATKYLAKENAKTLSVIGAGVQAEGLIEAILAVRDIEKIHIASRTFEKAEKFAQNIRNRFNIKVSVFRSADEAIDSADIVVTATNANQPVYTHSLHPGVHLNAVGSFKPDMQEIPSETMLVANKIVVESMEAALEETGDLKIPQAEGILTKNMLHSELGDIISGEKVGRETEEEVTVFKSVGLAIVDIIVAQYFYKKLIQS

SEQ ID NO: 70471 - protein, 358 aa, Staphylococcus epidermidis
MSEKVKFEKRESLKEKPDTANLGFGQYFTDYMLSVDYDADQGWHDMKIVPYAPFEISPAAQGLHYGQAVFEGLKAYKHNGEVVLFRPDQNFKRINNSLARLEMPEVDEEALLEGLKQLVDVERDWVPEGEGQSLYIRPFVFATEGILGVRSSHQYKLLIILSPSGAYYGGDTLKSTKIYVEDEYVRAVRGGVGFAKVAGNYAASLLAQTNANKLGYDQVLWLDGVEQKYVEEVGSMNIFFVENGKVVTPALNGSILPGITRKSIIQLAEDLGYEVEERRVSIEELFNAYDKGELTEVFGSGTAAVISPVGTLRYEDREIVINNNEPGKITQKLYDTYTGIQSGKLEDKYGWRVEVPKY

SEQ ID NO: 70472 - protein, 238 aa, Staphylococcus epidermidis
MIYAGILAGGIGSRMGNVPLPKQFLLLQGKPIIIHTVEKFLMYKDFDEIIIATPQKWINYMHDLLNNYRLDDKKIKVIQGGDDRNHTIMNIIESIEQHKKLNDEDIIVTHDAVRPFLTNRIIRENVEYASQYGAVDTVVNAVDTIISSNDAQFISEIPIRSEMYQGQTPQTFKIKELKDSYLSLTQSQKEILTDACKILVELGKPVKLVKGELFNIKITTPYDLKVANSIITGAVDND

SEQ ID NO: 70473 - protein, 248 aa, Staphylococcus epidermidis
YISILILTFFIGGCGFMNKENNKEAEIKENFNKTLSMYPIKNLEDLYDKEGYRDEEFEKRDKGTWIINSVMNIQKKGQAMESRGMVLYMNRNTRKTTGHFYTSITTEDKKGRVHNKEKKYPVQLKNNKIEPTKPIDDETLKNEIKNFQFFSQYGNFKNLKDYKNGNVSYNPNVPSYSAEYQLSNEDDNVKQLRKRYDIPIKRAPKLILKGDGDLKGSSIGYKEIEFSFVDNKEQSIYFADSLEFNPSD

SEQ ID NO: 70474 - protein, 343 aa, Staphylococcus epidermidis
MINQVYQLVSPRQFEATFKTIDLHNHNSKVIVRPLYLSICAADLRYYCGNRDSKILSKKLPMSLIHESVGEIVYDSEHRLKNGTKVVMIPNTPSKSHNIIAENYLTSSHFKSSGYDGFMQDYIVMKPDRVVTLPQEIDLSVASYTELVTVSVHAIDRFKAKAIPQFESLGIWGDGNLGYITAVLLKKLYPTTKIIVFGKTLYKLSRFSFVDEIIQIDNIPQHIKIDHAFECVGGKGSQQAIEQIINIINPEGSIALLGVSELSIQVNTRMVLEKGLTIIGSSRSGLKDFEKTIELYRKYPEVLNQLALLKGKEFEINTIEDLITAFEYDISNAWGKTVLKWNI

SEQ ID NO: 70475 - protein, 627 aa, Staphylococcus epidermidis
MGVVSIITGITIFVSGQHAQAAEMTQSSSDSNEQSQQTEQVEHKEDTTHLSYELNQEGETASQSKTSQENQSDGNVQKKSNQIQQDSTQTSPLNDQKQTSMEQQSKDNHVTPNSRQDTYPKGQNQDDKGKQQFKDNQHSQTEHQPNTQNQNNDQDSSDKKQHPSDQTQDSSSKGTQPKQSQSIEDRDKTVKQPSSKVHKIGNTKTDKTVKTNQKKQTSLTSPRVVKSKQTKHINQLTAQAQYKNQYPVVFVHGFVGLVGEDAFSMYPNYWGGTKYNVKQELTKLGYRVHEANVGAFSSNYDRAVELYYYIKGGRVDYGAAHAAKYGHKRYGRTYEGIMPDWEPGKKIHLVGHSMGGQTIRLMEHFLRNGNQEEIDYQRQYGGTVSDLFKGGQDNMVSTITTLGTPHNGTPAADKLGSTKFIKDTINRIGKIGGTKALDLELGFSQWGFKQQPNESYAEYAKRIANSKVWETEDQAVNDLTTAGAEKLNQMTTLNPNIVYTSYTGAATHTGPLGNEVPNIRQFPLFDLTSRVIGGDDNKNVRVNDGIVPVSSSLHPSDEAFKKVGMMNLATDKGIWQVRPVQYDWDHLDLVGLDTTDYKRTGEELGQFYMSMINNMLKVEELDGITRK

SEQ ID NO: 70476 - protein, 564 aa, Staphylococcus epidermidis
MTKQNIFIDDIYWERVQLYVKGHFEGVKPTRNFLLRNLTETKLLNANRVNIQGSTFEARFNIAILEKGNFLSTGNYILINRQEDEYVCQINPKFLNDKKKQMTLEELRDYNSLETQSLQKSYLLKNYGKSFQRYNNKEIKSYVIVPAISQEINEFIFKVQYKSEINKISKLKHLSFILHKALRKISFNVRDKIYLSIFNISKTVYKNNKNHVLFTSDSRANMSGNFKFIYEEMLKQQLDKKLVIHSIFKPNIANRRSFIDKLKFPYFLGKSKYILVDDYHPMIYKLQFRENQEIVQVWHAVGAFKTVGFSRTGKKGGPFIDSIGHRNYSKAYVSSNNDILYYAEAFGIEEHKVIPTGVPRTDVLFDESYKTRIKQSLETKLPIIKNKKVILFAPTFRGSGHRTAHYPFFKINFARLASYCEEHQATVLFKMHPFVRNKLNIPAIYNKYFLDISNYREVNDVLFITDILISDYSSLIYEFSVFKKPMLFYAFDLEDYIYTRDFYEPYETFVPGKIVKTFDELILALENNDFEFEKVKPFLNKNFKYKDGKSSERLVKDLFNKFFQ

SEQ ID NO: 70477 - protein, 231 aa, Staphylococcus epidermidis
MEWILFDKDGTLIEFDSSWEKIGVRLVDQLLETFPVHDKEAAHRQLGIIDKKIKPDSVMGSGSLGEIIESFNGVTGKETSDWTKDTSQELIDSRVPENNWIDGVQETIQALRNEGYHIGIVTSDTKKGVDQFLEETQTRNLFDLVISTETHAEEKPHPKVLDPLFNAFDVKPEKVAIVGDTANDMKTAINAHLGLAIGVLTGVAKKEELYDADVIINSAKDVKQVIEQYGK

SEQ ID NO: 70478 - protein, 250 aa, Staphylococcus epidermidis
MKKTAIITGSSRGLGAKIAITLLEKGYNVVVNYKQNKDKAEKLIRNYNQSRAIAIQADVTDRNDVNRMIQTATQHFGKIDIVINNALVGFKFDPNQQKSFKDLTWEDYQQQLNGTLKGAFNVTQSVIPQFIEQQSGCIVSIGTNLYQNPVVPYHEYTTAKAGLIGFTRNIAAELGQYGITANVVSGGLLKTTDASAVTTPEVFDLIAQTTPLRKVTSPQDVANMVVYLASDEARGVTGQNITVDGGLTMN

SEQ ID NO: 70479 - protein, 451 aa, Staphylococcus epidermidis
MANTRELNHKDAQYVWHPFTQMGVYAKNDNIIIEKGRGSYLYDTEGNKYLDGYASLWVNVHGHQHKKLNKAIHKQLDKIAHSTLLGSSNIPSIELAEQLVKLTPDRLQKVFYSDTGSASVEIAIKMAYQYWKNIDAERYAKKNKFLTLHHGYHGDTIGSVSVGGIDSFHKIFKDLIFENIQIETPCLYKSKYRNEAEMLNSILNQIENILSERNDEIVGFILEPLIQGATGLFVHPHGFLKAVEQLCRKYDVLLICDEVAVGFGRTGEMFACNHEDVQPDIMCLGKAITGGYLPLAATLTSQKIYDAFLSQSHGKNTFFHGHTYTGNQLVCSVALENINLFKKKHLIGHIQKTSQTLKQRLEALQPHKNIGDIRGRGLMYGVELVENKSTQTPLDIPTVELIIRRCKENGLMIRNLENVITFVPILSMSNKEIKKMVKIFNKALHQTLGKK

SEQ ID NO: 70480 - protein, 292 aa, Staphylococcus epidermidis
MIKLIATDMDGTLLNAGHEITTMNQEAIKFAQANGITVVIATGRAFYEAQTPVAETDLKVPYICLNGAEVRDESFNIMSTSHLNHDLVHKITTALKNNHIYYQIYTNRGIYTEDPKRDLAIYIDIAERAGQKADVDKIRNNIQKRIDNGTLKVVDNYDSIEDIPGELIMKVLAFDADLSKIDQVGQALASSPNLAVSSSSRGNLEITHSNAQKGIALSAIAHQLGIDLTDVIAIGDNLNDISMLERVGYPVAMNNATDEVKHIAKYVTDTNENSGVGKAIMKILKEENNLEV

SEQ ID NO: 70481 - protein, 892 aa, Staphylococcus epidermidis
MFGLGHNEAKAEENTVQDVKDSNMDDELSDSNDQSSNEEKNDVINNSQSINTDDDNQIKKEETNSNDAIENRSKDITQSTTNVDENEATFLQKTPQDNTQLKEEVVKEPSSVESSNSSMDTAQQPSHTTINSEASIQTSDNEENSRVSDFANSKIIESNTESNKEENTIEQPNKVREDSITSQPSSYKNIDEKISNQDELLNLPINEYENKVRPLSTTSAQPSSKRVTVNQLAAEQGSNVNHLIKVTDQSITEGYDDSDGIIKAHDAENLIYDVTFEVDDKVKSGDTMTVNIDKNTVPSDLTDSFAIPKIKDNSGEIIATGTYDNTNKQITYTFTDYVDKYENIKAHLKLTSYIDKSKVPNNNTKLDVEYKTALSSVNKTITVEYQKPNENRTANLQSMFTNIDTKNHTVEQTIYINPLRYSAKETNVNISGNGDEGSTIIDDSTIIKVYKVGDNQNLPDSNRIYDYSEYEDVTNDDYAQLGNNNDVNINFGNIDSPYIIKVISKYDPNKDDYTTIQQTVTMQTTINEYTGEFRTASYDNTIAFSTSSGQGQGDLPPEKTYKIGDYVWEDVDKDGIQNTNDNEKPLSNVLVTLTYPDGTSKSVRTDEEGKYQFDGLKNGLTYKITFETPEGYTPTLKHSGTNPALDSEGNSVWVTINGQDDMTIDSGFYQTPKYSLGNYVWYDTNKDGIQGDDEKGISGVKVTLKDENGNIISTTTTDENGKYQFDNLNSGNYIVHFDKPSGMTQTTTDSGDDDEQDADGEEVHVTITDHDDFSIDNGYYDDDSDSDSDSDSDSDDSDSDSDSDSDSDSDSDSDSDSDSDSDSDSDSDSDSDSDSDSDSGLDNSSDKNTKDKLPDTGANEDHDSKGTLLGALFAGLGALLLGKRRKNRKNKN

SEQ ID NO: 70482 - protein, 292 aa, Staphylococcus epidermidis
MTEFDLSTREGRWKHFGSVDPVKGTKPTTKNEMTDLQSTHKNFLFEIEEVGIKNLTYPVLIDQYQTAGLFSFSTSLNKNEKGINMSRILESVEKHYDNGIELEFNTLHQLLRTLQDKMNQNAAGVDVSGKWFFDRYSPVTHIKAVGHADVTYGLAIENHTVTRKELTIQAKVTTLCPCSKEISEYSAHNQRGIVTVKAYLDKNNDVIDDYKNKILDAMEANASSILYPILKRPDEKRVTERAYENPRFVEDLIRLIAADLVEFDWIEGFDIECRNEESIHQHDAFARLKYRK

SEQ ID NO: 70483 - protein, 243 aa, Staphylococcus epidermidis
MKMINLDSKKLASFYVACELFKQIQQYPHTKLGLATGGTMTDVYHYLVNLLTKNKADVSQVETFNLDEYVGLKASHQQSYHTYMNKVLFEQYPHFAKNHIHIPDGYSENLEAEAERYNKLLDERGPIDIQILGIGENGHIGFNEPGTDFNSETHVVNLTESTIKANSRYFDNEADVPRQAVSMGLASILKAKRIILLAFGPKKKEAISKLLNEQVTEDVPATILHTHPNVEVYVDDDAAPDCL

SEQ ID NO: 70484 - protein, 326 aa, Staphylococcus epidermidis
MCTAISLYTKQRYHYLARTMDFAFEFNGIPTIVPRHYHYQFDLDSDMRLEYGFVGTNLKVGRYRFGDGINEKGLAISNHYFTGEASYSTHKRYGYFNLAPEEFIVWVLGFNKSISELKQKVKKINIMNEKNTTLNIVPPLHFMVTDETGHTVAIEPHNGLLIVKDNYVHTLTNAPKLDWHLSNLRNYAYLTPQKSTNQLIGKVLVRSMGCEAGTNGLPGGYTSTERFIRATYLRHQLRCSHNEDENLMNCFKVLESVSIPQGAVIDANKIHYTQYQLVMESKERSYYIKPYFSNQIFKIKLTEDLLSKNELTFLPINHELKITSIQ

SEQ ID NO: 70485 - protein, 329 aa, Staphylococcus epidermidis
MADLLSVLQDKLSGKNVKIVLPEGEDERVLIAATQLQKTDYVSPIVLGNEDNIKSLASKHALDLTQIEIIDPATSELKDELVDAFVERRKGKATKEQAVELLDNVNYFGTMLVYTGKAEGLVSGAAHSTGDTVRPALQIIKTKPGVSRTSGIFFMIKGDEQYIFGDCAINPELDAQGLAEIAVESAKSAQSFGMNPKVAMLSFSTKGSAKSDDVTKVQEALKLAQEKAEADQLEHVVIDGEFQFDAAIVPSVAEKKAPGAKIQGDANVFVFPSLEAGNIGYKIAQRLGGYDAVGPVLQGLNSPVNDLSRGCSTEDVYNLSIITAAQALQ

SEQ ID NO: 70486 - protein, 279 aa, Staphylococcus epidermidis
MDLATKYFNQINWRYVDHSSGLEPMQSFAFDDTFSESVGKDLSCNVVRTWIHQHTVILGIHDSRLPFLSDGIRFLTDEQGYNAIVRNSGGLGVVLDQGILNISLIFKGQTETTIDEAFTVMYLLISKMFEDEDVSIDTKEIEQSYCPGKFDLSINDKKFAGISQRRVRGGIAVQIYLCIEGSGSERALMMQQFYQRALKGQTTKFHYPDIDPSCMASLETLLNREIKVQDVMFLLLYALKDLGANLNMDPITEDEWTRYEGYYDKMLERNAKINEKLDF

SEQ ID NO: 70487 - protein, 327 aa, Staphylococcus epidermidis
MVKSGKARAHTNIALIKYWGKADETYIIPMNNSLSITLDRFYTETKVTFDPDFTEDRLILNGNEVNAKEKEKIQNYMNIVRDLAGNRLHARIESENHVPTAAGLASSASAYAALAAACNEALSLNLSDTDLSRLARRGSGSASRSIFGGFAEWEKGHDDLTSYAHGINSNGWEKDLSMIFVVINNQSKKVSSRSGMSLTRDTSRFYQYWLDHVDEDLNEAKEAVKNQDFQRLGEVIEANGLRMHATNLGAQPPFTYLVQESYDAMAIVEQCRKANLPCYFTMDAGPNVKVLVEKKNKQAVMEQFLKVFDESKIIASDIISSGVEIIK

SEQ ID NO: 70488 - protein, 358 aa, Staphylococcus epidermidis
MIQVKAPGKLYIAGEYAVTEPGYKSILIAVNRFVTATIEASNKVEGSIHSKTLHYEPVKFDRNEDRIEISDVQAAKQLKYVVTAIEVFEQYVRSCNMNLKHFHLTIDSNLADNSGQKYGLGSSAAVLVSVVKALNEFYGLELSNLYIYKLAVIANMKLQSLSSCGDIAVSVYSGWLAYSTFDHDWVKQQMEETSVNDVLEKNWPGLHIEPLQAPENMEVLIGWTGSPASSPHLVSEVKRLKSDPSFYGDFLDQSHACVESLIQAFKTNNIKGVQKMIRINRRIIQSMDNEASVEIETDKLKKLCDVGEKHGGASKTSGAGGGDCGITIINKVIDKNIIYNEWQMNDIKPLKFKIYHGQ

SEQ ID NO: 70489 - protein, 113 aa, Staphylococcus epidermidis
MKNKFLICDECQAVNLKSLKRKLEKLDPEAEIEIGCQSYCGPGRRKTFAFVNNRPLAALTEEELMEKVTKQLKKPRDPEEEERLRKRNEERKRRKEEQDRKLKEKLKKHKAEK

SEQ ID NO: 70490 - protein, 443 aa, Staphylococcus epidermidis
MKNYDLIIIGFGKAGKTLAAHAASHGQKVAVVEQSTKMYGGTCINIGCIPTKTLIHDGIEGSSFKEAITRKKEVVQALNNKNYQGLNSKDNIDVLNYKANFISNEVIELQDNNGTIQETITADKIVINTGSRANIPDIKGIDTAQNIYDSTGLLNIDYQPQELVIIGGGYIALEFASMFANFGTHVTILERGDAIMTNEDQDIANLIVKDLQDKGVTINTNTSTIAFSNNKDQTIIHTNHGEISADTVLLATGRKPNTNHLGLENTDVKIGKQGEVIVNTHLQSTVKHIYAAGDVKGGLQFTYISLDDYRIIKSHLFGDGSRTTENRGAIPYTVFIDPPLSRVGLIASEAKLQGYDILENKVFVSNIPRHKINNDSRGLFKAVINKDTKEILGASLYGKESEELISLIKLAIDQHIPYTVLRDNIYTHPTMTESFNDLFLEPL

SEQ ID NO: 70491 - protein, 312 aa, Staphylococcus epidermidis
MVKQVRLGKSDVNVFPIALGTNAVGGHNLYPNLDEEQGKEVVRQAIDNGITLLDTAYIYGPERSEELVGQVVKEYPREKVQIATKGSHVIKENEEVVQNNDPEYLKQQVENSLERLQVDYIDLYYIHFPDDDTPKDKAVAALKELKDEGKIKAIGVSNFSLEQLKEANKDGYVDVVQLEYNLLHRENEEVMAYAAENNITFVPYFPLASGILAGKYDENQTFEDHRAERPDFQPDVFKDNVRRVKALTDIAEAHDTTIANVVLAFYLTRPSLDVVIPGAKRAEQVVENIDAANIELSQGEIDKIDSLFPIKK

SEQ ID NO: 70492 - protein, 144 aa, Staphylococcus epidermidis
MTMNRQQNNLIFQYAAVIIFFMVIVFGFSLFLAGHYTPGGGFVGGLLFASALLVITIAYDVKTMRKIFPLDFKILIGIGLLFCVGTPLTSWFMSKNFFTHVTFDIPLPLLEPMHMTTAMFFDFGVLCAVVGTIMTIIISIGENE

SEQ ID NO: 70493 - protein, 801 aa, Staphylococcus epidermidis
MSLLHIAVLLPLIFALIIPFLYRFVKRIHLGWFVLPVPIVLFIYFISLISMTMSGNNVMKNLNWMPHIGMNFNLYVDGLGLLFSLLITGIGSLVVLYSIGYLSKSEQLGNFYCYLLLFMGAMLGVVLSDNFIILYLFWELTSFSSFLLISFWREKKASIYGAQKSLIITVLGGLSMLGGIILLSLATDTFSIQAMISKASDIQNSPFFILVMILFMIGAFTKSAQVPFYIWLPDAMEAPTPVSAYLHSATMVKAGLYLIARITPIFAISEGWVWTITLVGLITLFWASLNATKQHDLKGILAFSTVSQLGMIMSMLGIGAVSYHYQGANSQLYVAGFVAAIFHLINHATFKGALFMITGGIDHSTGTRDVKKLGGLLTIMPISFTLTVITTLSMAGVPPFNGFLSKEKFLESMINVTHLNLMSLNTLGILLPIIAIIGSIFTFVYSIKFILHIFFGSYKPEALPKQAHESSILMLISPIILTSLVIVFGLFPSILTQSIIEPASVAVSQTSNITAEFHLFHGITPAFLSTIGIYIIGILLLISFSYWVRLLQAHPYQLTLNHWYDTSGQRIPGYSENITNSYVTGFSRNNLVIILGILIALTFVTVISVPFSIDFKNVSHLRVFEGATVLFLLIASTFIIFAKSRLFSIIMLSAVGYAISVLFIFFKAPDLALTQFVVESISTALFLLCFYHLPNLNRYNEKPTFKLTNAVISIGVGLSVIILGLIGYGNRHFDSITKFYQEHVFDLAHGKNMVNVILVDFRGMDTLFESSVLGIAGLGVYTMIKLRLKQKNQSSEVNDHE

SEQ ID NO: 70494 - protein, 340 aa, Staphylococcus epidermidis
MKAAVVTKDHRVSIEEKRLRELKPGEALVKTEYCGVCHTDLHVKNADFGDVTGVTLGHEGIGRVIEVADNVDSLKVGDRVSIAWMYAACGNCEYCTTGRETLCRDVLNAGYTVDGAMAEEVIVDANYAVKVPENLDPAAASSITCAGVTTYKAVKVSGIEPGQWLGVFGVGGLGNLALQYAKNVMGAKVVAFDINDDKLNFAKELGADAIINSTNVDPIEEVNRLTNNKGLDATVITAVAKTPFNQAVDVVKAGARVVAVGLPVDKMDLDIPRLVLDGIEVVGSLVGTRQDLREAFQFAAENKVIPKVQLRQLSEINDIFDEMEKGTITGRMVIDMKSSH

SEQ ID NO: 70495 - protein, 396 aa, Staphylococcus epidermidis
MTQSEKIINLTNHYGAHNYVPLPIVISEAEGVWVKDPEGNTYMDMLSAYSAVNQGHRHPRIIQALKDQADKVTLVSRAFHSDNLGQWYEKICKLAGKDKALPMNTGAEAVETALKAARRWAYDVKGIEPNKAEIIAFNGNFHGRTMAPVSLSSEAEYQRGYGPLLDGFRKVEFGDVNQLKAAINKNTAAILVEPIQGEAGINVPPEGYLKTIRELCDEHQILFIADEIQAGLGRSGKLFATDWDHVKPDVYILGKALGGGVFPISVVLADNEVLDVFTPGSHGSTFGGNPLASAVSIAAIDVIIDEDLPGRSLELGEYFKSELKKIEHPSIKEVRGRGLFIGIELHESARPYCEALKEQGLLCKETHDTVIRFAPPLVITKEELDMALEKIKSVFA

SEQ ID NO: 70496 - protein, 414 aa, Staphylococcus epidermidis
MTENNNLVTSTQGIIKEALHKLGFDDGMYDLIKEPIRFLQVRIPVRMDDGTVKTFTGYRAQHNDAVGPTKGGVRFHPEVDEEEVKALSMWMTLKCGIVNLPYGGGKGGIVCDPRQMSIHEVERLSRGYVRAISQFVGPNKDIPAPDVFTNSQIMAWMMDEYSALDKFNSPGFITGKPIVLGGSQGRDRSTALGVVIAIEQAAKRRGMDIKDAKIVIQGFGNAGSFLAKFLYDLGAKVVGISDAYGALHDPNGLDIDYLLDRRDSFGTVTNLFEDTISNKELFELDCDILVPAAISNQITEDNAHDIKASIVVEAANGPTTPEATRILTERDILLVPDVLASAGGVTVSYFEWVQNNQGYYWTEEEVNDKLREKLVTAFDTIYELSQNRKIDMRLAAYIVGIKRTAEAARYRGWA

SEQ ID NO: 70497 - protein, 357 aa, Staphylococcus epidermidis
MNDLDHPQLIFESTGIYSRGMERFCCVNQINYIQMNPLEAKFKTSALRSWKTDQADAHKLACLGPTLKQTDSLPIHELIFFELRERVRFHLEIENEQNRLKFQILELLHQTFPGLERLFSSRYSIIALNIAEIFTHPDMVLDIDKEVLITHIFNSTDKGMSMDKATKYALQLRVIAQESYPNVDRHSFLVEKLRLLIQQLKQSIHHLKQLDDAMIQLAQQLDYFENIHSIPGIGKLSTAMIIGEIGDIKRFKSNKQLNAFVGIDIKRYQSGHTHCRDTINKRGNKKARKLLFWVIMNIIRGQHHYDNHVVDYYYKLRKQPNEKPHKTAIIACINRLLKTIHYLVMNHKLYDYQMSPH

SEQ ID NO: 70498 - protein, 349 aa, Staphylococcus epidermidis
MFKSKKIIISTLSTVTLGLASLSSPSIAETSNHSPAPNQSEKSIQQQTNIPSNMNQSSAKTFKRQAESDSVSGKTNDTHNHWTKNLTGEKFTTIAHRGASGYAPEHTFEAYDKSHNELGASYIEIDLQRTKDGHLVAMHDEKVNRTTNGHGRVDQLTLKELKQLDAGSWFNRKHPEYAKNKYKNAKVPTLDEILNRYGKNANYYIETKSPDVYPGMEKQLLDTLDKHDLLTQKSLKHGHVMIQSFSGSSLEKVHHMNANIPLIRLMNKFELKKATNQDLKNIKSYAIGVGPEYTDLNIKNTRHLKNLGFLVHPYTVDDENQMRNLNQYGVDGVFTNFADRYKKVSETQQ

SEQ ID NO: 70499 - protein, 463 aa, Staphylococcus epidermidis
MSNKAWGGRFETQPEEWVDDFNASIDFDKNLIKQDVQGSIAHATMLAKQHIITDDEAQSIINELKNIQSDFEEGKLKFKASLEDIHLNIEHELIQRIGEAGGKLHTGRSRNDQVATDMHLYTKEQVQYIIELIASFQETIVQLADQHVDTIMPGYTHLQRAQPISFAHHIMTYFWMLERDKGRFMDSLKRIDISPLGAAALSGTTHPIDRHLTQELLGFANLYENSLDAVSDRDYIVETLHHISLTMVHLSRFAEEIIFWSTDEAKFITLSDAFSTGSSIMPQKKNPDMAELIRGKVGRTTGHLMSMLVTLKGLPLAYNKDMQEDKEGLFDAVHTLKGSLRIFEGMVASMKVNSNRLSQTVKNDFSNATELADYLVSKSVPFRTAHEIVGKIVLNCIHKGIYLLDVPLSEYQEHHENIEEDIYDYLTPENCLKRRQSYGSTGQESVKHQLKVAKALLKDNESK

SEQ ID NO: 70500 - protein, 443 aa, Staphylococcus epidermidis
MTHIQLDYGKTLEFFDKHELDQQKDIVKTIHQTIHKGTGAGNDFLGWLDLPVDYDKEEFSRIVEASKRIKSNSDVLVVIGIGGSYLGARAAIEMLTSSFRTNTEYPEIVFVGNHLSSSYTKELLDYLQGKDFSVNVISKSGTTTEPAVAFRLFKQLVEEKYGKDEAKKRIFATTDKSKGALKQLADNEGYETFVVPDDVGGRYSVLTAVGLLPIATAGINIESIMIGAAKAREELSSDDLDQNIAYQYATIRNILYSKGYTTEMLINYEPSMQYFNEWWKQLYGESEGKDFKGIYPSSANYTTDLHSLGQYVQEGRRFLFETVVKVNHPKHDIKIEEDADDLDGLNYLAGKSIDEVNTKAFEGTLLAHTDGGVPNIVVNIPQLDEETFGYVVYFFELACAMSGYQLGVNPFNQPGVEAYKQNMFALLGKPGFEDKKKELENRL

SEQ ID NO: 70501 - protein, 553 aa, Staphylococcus epidermidis
MSIIDQVKQTLIEEIEVSIRKANLAEDIPEIKIEIPKDPKNGDYSSNIAMVLTKIAKRNPREIAQAIVDHLDTSKAHVKQVDIAGPGFINFYLDNQYLTAIIPEAITKGDRFGYATQSKNTNILLEYVSANPTGDLHIGHARNASVGDSLANILIAAGYNVTREYYINDAGNQITNLARSIEARYFEALGDTSYEMPADGYNGKDIIEIGKDLAVKHPEIKDYTDEERLKTFRQLGVDYEMEKLKKDLSDFNVHFDNWFSETSLYENGAIENTLSKMKELGYTYEADGATWLRTSDFKDDKDRVLIKKDGNYTYFTPDTAYHYNKINRGNDILIDLMGADHHGYINRLKASLETFGVDSDRLEIQIMQMVRLMQNGEEVKMSKRTGNAITLREIMDEVGIDAARYFLTMRSPDSHFDFDLELAKEQSQDNPIYYAQYAHARICSILKQAKEQGIEVSTDADFSKINNDKAIDLLKKVAEFESTIESAAEHRAPHRLTNYIQDLAAAFHKFYNAEKVLTDDTEKTKAYVAMIEAVRITLHNALALVGVTAPESM

SEQ ID NO: 70502 - protein, 251 aa, Staphylococcus epidermidis
MMKERFSPKMLSDITGVSIRTLHYYHEKGLLVPQQMSANGYRYYNVQDISKLQYILFLKELDLTLKQIQIYFEGDSDFRTKILHDNFYHIVKKRDRLNDIICTLEHHFHQDNEEIEVTTMQNFNLNEQYEKEAASKYGDTHYYQAYKDKQKSKDESEQQNHFEEINKQLNMFFDDMNQLYLNKVSILEASGKIKKLLCILKEQVPNCDNQFLEYIAQIYIEDERFVKFINKQRERGLNLYISDAIKTFIKL

SEQ ID NO: 70503 - protein, 295 aa, Staphylococcus epidermidis
MKSKLWIVICALIVVLAACSQDANHSSNNKDTEKSDKKYHRIVSLIPSNTEILYRLGIGEDIVGVSTVDDYPKDVKKGKKQFDAMNLNKEELIKAKPDLILAHESQKNSAGKVLKSLKDKGVKVVYVKDAQSIDETYDTFKSIGKLTDREKQAKELVDETKHNVDKIINSIPKHHKKQEVFMEVSSKPDIYTAGKDTFFNDMLEKLDAKNSFDDVKGWKSVSKESIIKRNPDILISTEGKSKSDYIEMIKKRGGFDKINAVKNTRIETVDGDEVSRPGPRIDEGLKDLKDEIYKK

SEQ ID NO: 70504 - protein, 191 aa, Staphylococcus epidermidis
MKKEILEWIVAIAVAIALIAIITKFVGKSYSIKGDSMDPTLKDGERVVVNIIGYKLGGVEKGNVIVFHANKKDDYVKRVIGTPGDSVEYKNDTLYVNGKKQSEPYLNYNEKRKQTEYITGSFKTKNLPNANPQSNVIPKGKYLVLGDNREVSKDSRSFGLIDKDQIVGKVSLRYWPFSEFKSNFNPNNTKN

SEQ ID NO: 70505 - protein, 1159 aa, Staphylococcus epidermidis
MEFNTYIGRAGTGKSTAMLNQIKNKMKQDPLGDPIVLIAPTQSTFQLEQAFVNDSELHGSLRTEVLHFERLSHRVFQEVGGLTEQRLSKAALEMMIFHIVQQHESDLKLYGSQAQYYGLSEKLAEQIQDFKKYNVTPEHLNQLIENHSIQTRTKHKLEDISLIYKQLESRMNGEFITTEDSLQQFIEILSQSQWIKKAEVFIDGFHNFSTLEYRIIEALVQHAKQVTVLLTTDGSHHPFSLFRKPSEVLSHLEDIANRLNINLNKTYFNTFYRYNNDDLKNLENGFDALQFTPKHHQNHVKIFESSSMREEINEVARRILKDVREADYKFRDIAILYRDESYAYLFESILPSYDIPFNIDTKKSMTHHPIMEMLRSLLEVIRSNWHINAMLRLFKTNVLTSQFKRSSYLIDLLENFVLERGIYGKRWLDEDIFSIDQFSRMGRKSHQLTEGHQALYKEVIKLKKNVINKVLYFEQAMNEAHTVKDYATSFYESLEYFELPSQLMTQRDELELAGLTEKAEEIDQVWNGLIQILDDLVTVFDDQEMTLQQFLDVFDIGLEQLEFVMIPQTLDQVSIGTMDLAKVDNKKHIYMVGMNDGILPQTVSSSSLITDEEKKYVEDNAHVELSPTSDILQMDEAFVCYIAMTRSQQSVTFSYSLMGNSGDEKEISPFLTQIKELFYDLEITNLQDLHKAQPLLMMQHSHQTKIQLFEYLRGWLDHEDIDYRWLDAYLAIRDDDQLNQGLDYLTTSLTYDNETVQLNEILSQQLYGKTINASVSRFEGYQQCPFKHYASHGLRLNERTKYELQNFDLGDIFHSVLKYISDRIYGDFKNLDTKNIQSLTKEALELILPKVQFNLLNSSAYYKYLSKKIGSIVETTLKALKYQGEYSKFVPQRFETGFRKSPKNKGELVAQPLITNQGIPINIRGQIDRIDTYTKGDHSYVNIIDYKSSESSATLDLTKVYYGLQMQMMTYMDIVLQNKERLGLTDIVKPGGLLYFHVHEPRIKFKSWADIDEDQFQKDYIKNFKMSGLLNRDQEVLDALDIRLEPKYNSDIVPIALTAKGAINQRSSKVADENIIYQLIEHNKKNFIETASHIMDGHTEVAPLKYKQVLPCQFCNYKSVCHVDGLIDSKRYRTVDESIKPLDLIQQLRNEGGERHDSN

SEQ ID NO: 70506 - protein, 1224 aa, Staphylococcus epidermidis
MKVVKDMIPTKPHDVIWTDAQWQSIYAKGQDILVAAAAGSGKTAVLVERIIQRILRDDVDVDRLLVVTFTNLSAREMKHRVDKRIQEASFKDPNNEHLKNQRIKIHQAQISTLHSFCLKLIQQHYDVLDIDPHFRTSSEAENILLLEQTIDDVLEQHYDKLDPHFIELTEQLSSDRNDDQFRSIIKQLYFFSIANPQPFEWLNQLAQPYKEENKQQQLMQLINDLAMIFMKAGYEELQKSYDLFSMMESVDKQLEVIETERMFITKAIEGKVLNTDVITQHEFMSRFPAINSKIKEANEGMEDALNEAKQHYDKYKSLVMKVKNDYFSRNAEDLQRDMQQLAPRVAYLAQIVQDVIQSFGVQKRSRNILDFSDYEHFALRILTNEDGSPSRIAETYREHFKEILVDEYQDTNRVQEKILSCIKTGEEHDGNLFMVGDVKQSIYKFRQADPSLFIEKYNRFSSSGNESGLRIDLSQNFRSRQEVLSTTNYLFKHMMDEQVGEISYDDAAQLYFGAPYDEVSHPVQLRALVEASSENSDLTGSEQEANYIVEQVKDIINHQNVYDMKTGQYRKATYKDIVILERSFGQARNLQQAFKNNDIPFHVNSKEGYFEQTEVRLVLSFLRTIDNPLQDIYLVGLMRSVIYQFTEEELAEIRVVSPHDDYFYQSIKNYMIDEKADSRLVDKLNRFIQDIQKYQNYSQSQPVYQLIDKFYNDHFVIQYFSGLIGGKGRRANLYGLFNKAVEFENSSFRGLFQFIRFIDELIDRKKDFGEENVVGPNDNVVRMMTIHSSKGLEFPFVIYSGLSKKFNKGDLNAPVILNQQYGLGMDYFDVNKDMAFPSLASVAYRAINEKELISEEMRLIYVALTRAKEQLILVGRVKDEKSLIKYEQLAVSDTHIAVNERLTATNPFVLIYGVLAKHQSPSLPNDQRFERDIDQLNSEVKPRVSIVIDHYEDVSTEEVVNDNEIRTIEELKAINTGNEDVKIKIHQQLSYDYPFKVNTMKPSKQSVSELKRQLETEESNTNYDRVRQYRIGVASYERPKFLTQTKKRKANEIGTLMHTVMQHLPFREQRLTKDELFQYIDRLIDKQLIDEDAKEDIRIDEIMHFIDGPLYMEIAQADNVYTELPFVVNQIKVDGLTSEDEDVSIIQGMIDLIYESDGQFYFVDYKTDAFNRRKGMSDEEIGNQLKEKYQIQMTYYRNTLETILKRPVKGYLYFFKFGTLEIDD

SEQ ID NO: 70507 - protein, 301 aa, Staphylococcus epidermidis
MKFLSFKHNDRTSYGVKVKREDAVWDLPMVFAEFGDKDFNPKTLIAGLQQNQTLDFQEQVRKAVVAAEESGRDEEFKLLFTDIDFLPPVTPPNNVIAFGRNYEDHASELNHEVDSLYVFTKAASSLTGDEATIPNHKDITEQLDYEGELGIVIGKSGEKIPRGLALDYIYGYTIINDITDRTAQSSHDQAFLSKSLTGACPMGPYIVTKDELPAPENVNIVTKVNNEIRQDGNTGEMILKIDELIEKISKYVALHPGDIIATGTPAGVGAGLQPPQFLQPGDEVKVTIDNIGTLTTYISKN

SEQ ID NO: 70508 - protein, 357 aa, Staphylococcus epidermidis
MNDLDHPQLIFESTGIYSRGMERFCCVNQINYIQMNPLEAKFKTSALRSWKTDQADAHKLACLGPTLKQTDNLPIHELIFFELRERVRFHLEIENEQNRLKFQILELLHQTFPGLERLFSSRYSIIALNIAEIFTHPDMVLDIDKEVLITHIFNSTDKGMSMDKATKYALQLRVIAQESYPNVDRHSFLVEKLRLLIQQLKQSIHHLKQLDDAMIQLAQQLDYFENIHSIPGIGKLSTAMIIGEIGDIKRFKSNKQLNAFVGIDIKRYQSGHTHCRDTINKRGNKKARKLLFWVIMNIIRGQHHYDNHVVDYYYKLRKQPNEKPHKTAIIACINRLLKTIHYLVMNHKLYDYQMSPH

SEQ ID NO: 70509 - protein, 258 aa, Staphylococcus epidermidis
MNKIQICNQIELNYIDEGEGIPIILIHGLDGNLAGFKDLKNELKKQYRVITYDVRGHGKSSRTESYELKDHVEDLNDLMRALNIDSAHILGHDMGGIIASEFTEKYQYKVITLTIVSAKSEDIANGFNKLMVDYQEELAGFNKSEAMIILFSKLFKEKDKAMKWYQSQKLYNRPTPEESAIAVRALLNIKDLTRVHHNVSIPTLIVNGKYDPLIQNKSHYDMDQYYDQVTKIVFDNSGHAPHIEEPEKFLKLYLDFVS

SEQ ID NO: 70510 - protein, 607 aa, Staphylococcus epidermidis
MRKKLNNEYRSAKKIRYMPGLDGLRAIAVIGIIIYHLNKQWLTGGFLGVDTFFVISGYLITSLLLKEYEDTGTINLKNFWIRRIKRLLPAVFALIVVVGIATLLLHPEHIVRVKHDMIAAIFYVSNWWYIAKDVNYFEQFSFMPLKHLWSLAIEEQFYLFFPAVLLLFMAIVKKKKNVILMFWIISLVSLLMMVVISQPHLNHSRVYFGTDTRLQTLLLGVLLAFIWPPFKLNPNPPKGLKTVINSAGIIGLTFLILLFFTVSDESDWIYNGGFYLISTMTLLIIASVVHPTTILAKLLGNPLFVYIGKRSYSLYLWHFPVISFIHSYFIDGQLPTYVYIMDIVITVLLAELSFRYVETPLRKEGLKAFTFKKTYKPQFIRTIVTLIMLLPFIFILVGAFDKFGKDTISNKAQTFNTNEADQYLIHMIPIDNISLTSDGKTKENKKDNDVYTQIKPLLIGDSVMVDIGEQFKTKVPKAKIDGKVGRQLYQAESLVKNQYRHYNKPSDQIILELGTNGDFTKEQLDNLIDKFGKAQVYLVNTRVPRSYESHVNELMAKAAKNKKNVTLIDWYSRSKGHTEYFAPDGIHLENDGVEALTDEILKNIKKK

SEQ ID NO: 70511 - protein, 869 aa, Staphylococcus epidermidis
MDINQMTYAVQGALQKAVAYSKEYELQNIEVEALLKAAMNENDSLFKSILERANIDVDQLIKAYDNQLSHYPTVQGDNVQYGQYISAKTNELLDKAEKYMKSYEDEFISMEHILRAAIDTDETTQKWVGNKVEVIKEIITKVRGGNHVTSQNPEVNYEALEKYGRDLVEEVRQGKMDPVIGRDEEIRNTIRILSRKTKNNPVLIGEPGVGKTAIVEGLAQRIVRKDVPESLLDKTIFELDLSALVAGAKYRGEFEERLKAVLKEVKESEGRIILFIDEIHMLVGAGKTDGAMDAGNMLKPMLARGELHCIGATTLNEYREYIEKDSALERRFQKVGVSEPDVEDTISILRGLKERYEVYHGVRIQDRALVAAAELSDRYITDRFLPDKAIDLVDQACATIRTEMGSNPTELDQVNRRVMQLEIEESALKNESDNPSKHRLEELQEELSNEKEKQSSLKSRVEQEKEKIAKVQEKRAELDSSRQALEDAQTEGNLEKAAELQYGTIPQLEKELQKFEEAFQDETGEDSERMIREVVSDEEIGDIVSQWTGIPVSKLVETEREKLLSLSDILHKRVVGQDKAVDLVSDAVVRARAGIKDPNRPIGSFLFLGPTGVGKTELAKSLASSLFDSEKHMIRIDMSEYMEKHAVSRLIGAPPGYVGHDEGGQLTEAVRRNPYSVILLDEVEKAHSDVFNVLLQILDEGRLTDSKGRSVDFKNTIIIMTSNIGSQVLLENVKDAGEISDDTEKAVMDSLHAYFKPEILNRMDDIVLFKPLSVNDMSMIVDKILTQLNMRLLDQHISIEVTEEAKKWLGEEAYEPQFGARPLKRFVQRQIETPIARMMIKESLPEGTIIKVDLNDNKELDFKVVKPTS

SEQ ID NO: 70512 - protein, 357 aa, Staphylococcus epidermidis
MNDLDHPQLIFESTGIYSRGMERFCCVNQINYIQMNPLEAKFKTSALRSWKTDQADAHKLACLGPTLKQTDSLPIHELIFFELRERVRFHLEIENEQNRLKFQILELLHQTFPGLERLFSSRYSIIALNIAEIFTHPDMVLDIDKEVLITHIFNSTDKGMSMDKATKYALQLRVIAQESYPSVDRHSFLVEKLRLLIQQLKQSIHHLKQLDDAMIQLAQQLDYFENIHSIPGIGKLSTAMIIGEIGDIKRFKSNKQLNAFVGIDIKRYQSGHTHCRDTINKRGNKKARKLLFWVIMNIIRGQHHYDNHVVDYYYKLRKQPNEKPHKTAIIACINRLLKTIHYLVMNHKLYDYQMSPH

SEQ ID NO: 70513 - protein, 679 aa, Staphylococcus epidermidis
MEIFETLLIFVALVIVSSFVHTFIPKVPLAFIQIFLGMILYLTPIPVEFNFDSELFMVTLIAPLLFVEGVNVSRVHLRKYIKPVMMMALGLVITTVIGVGLFIHWIWPELPIGAAFAIAAILCPTDAVAVQAITKGKVLPKGSMTILEGESLLNDAAGIISFKIAVGVLITGTFSIFDAIQQFLIASIGGAIVGLIIGMALVRFRLTLMRRGIENINMFTFIQLLTPFVTYLIAELFHASGIIAAVVAGLVHGFERDRIAQTRTQLQMSYNHTWSILGYVLNGFVFSILGFLVPEVIVKIIKTEPHNLLFLIVITLLVALAVYLFRFVWVYVLYPYFYLSVSPFQKMISKNDEDKVTESKPKRSLYALIMTLCGVHGTISLAIALTLPYLLANHETFAYRNDLLFIASGMVILSLIIAQVILPLVTPDSPEVKIGNMSFKEARIYILEHVIDYLNQKSTFETSYRYGNVIKDYHDKLTFLKTVEKEDENSKELERLQKIAFNVETKTLEKLVDDGEITESVLENYMRYAERTEVYKQASLLRRIIVGLRGMLLKRRVKTKINSASSLSVTDNLLELGKINKLVHYNVVSRLAKEATTDNKLEVGMICDGYLMRIDNLTPNNFFNSRHEDTLTKIKLNALREQRRILRELIENDEITEGTALKLRESINYDEMVIVDSMT

SEQ ID NO: 70514 - protein, 313 aa, Staphylococcus epidermidis
MNVGIKGFGAYAPKNIIDNAYFEQFLETSDEWISKMTGIKERHWADEDQDTSDLAYNASIKAIEDAGIQPVDIDMIIVATATGDMPFPSVANILQERLGTGKVATMDQLAACSGFMYSMITAKQYIQSGDYKHILVVGADKLSKITDMTDRSTAVLFGDGAGAVVMGEVAEGRGIISYEMGSDGSGGKYLYLDRETGKLKMNGREVFKFAVRIMGDASTRVVEKAGLSSEDIDLFVPHQANIRIMESARERLGIEREKMSVSVNKYGNTSAASIPLSINQELQNGKIKDDDTLVLVGFGGGLTWGAIVIKWGK

SEQ ID NO: 70515 - protein, 414 aa, Staphylococcus epidermidis
MNKNNRVVITGIGALSPIGNDAKTTWDNALKGVNGIDKITRIDTDDYNVHLAGELKDFNIEDHIDRKEARRMDRFTQYAVVAAREAVKDAQLNINEKNADRIGVWIGSGIGGMETFEVAHTTLVERGPRRVSPFFVPMLIPDMATGQVSIDLGAKGPNGSTVTACATGTNSIGEAFKIIQRGDADAMVTGGTEAPITHMAIAGFSASRALSTNNDPETACRPFQEGRDGFVMGEGAGIVVLESLDSAKERGAEIYAEVVGYGSSGDAHHITAPAPEGEGGSRAMQAALDDAGIKAQDVQYLNAHGTSTPVGDLYEVQAIKNTFGDAAKSLKVSSTKSMTGHLLGATGGIEAIFSALSIRDSKVAPTIHAITPDEECDLDIVPNVAQDLDITYAMSNSLGFGGHNAVLVFKKFED

SEQ ID NO: 70516 - protein, 359 aa, Staphylococcus epidermidis
MTETVLEVNDLHVSFDIAAGEVQAVRGVDFHLNKGETLAIVGESGSGKSVTTKAITKLFQKDTGRIKKGEILFLGEDLAQKSEKELIQLRGRDISMIFQDPMTSLNPTMQIGKQVMEPLIKHKKLSKAKAKQRALEILNLVGLPRAEKRFKAYPHQFSGGQRQRIVIAIALACEPKILIADEPTTALDVTMQAQILDLMKELQNKIETSIIFITHDLGVVANIADKVAVMYGGQMVETGDVNEIFYDPKHPYTWGLLSSMPDLTTSNDTDLIAIPGTPPDLLHPPIGDAFARRSRYALDIDFKEEPPWFKISPTHFVKSWLLDARAPKVTPPSMVQKRLRTMPSNYEQPHRVERVAFNE

SEQ ID NO: 70517 - protein, 312 aa, Staphylococcus epidermidis
MSNENVLLQVKNLKQYFNQGKHNEVKAIDNISFDVYKGETLGLVGESGCGKSTTGKAIIKLNDITDGAIEYDGKDIHQIRKRKERLKFNKKIQMIFQDPYASLNPRLKVMDIVAEGIDIHKLASSQRDRKKRVYDLLETVGLGKEHANRYPHEFSGGQRQRIGIARALAVEPEFIIADEPISALDVSIQAQVVNLLLKLQRERDITLLFIAHDLSMVKYISDRIAVMHFGKIVEIGPADDIYNYPLHDYTKSLLSAIPQPDPDVERNRQRVLYHEDATLNEERQLNEIRPQHYVFSTQNEAVKLKQKYGLSV

SEQ ID NO: 70518 - protein, 264 aa, Staphylococcus epidermidis
MHFKRVVKWGLNMYQNQRIKDKINILGVSFDNTTMLEMVENIKQFISSNTDDNLFIVTANPEIVDYATEHELYRNLINQADYVVPDGTGIVKASKRLKQPLKRRVPGIELLEECLKIAHVSHQRVYLLGSKNEIVESAEKKLQSQYPNIHFAHHHGYIHLEDETVIKRITSFNPDYIFVGMGFPKQEQWIQKHKDKFKHTVMMGVGGSFEVFSGSKKRAPQIFRKLNIEWVYRVLIDWKRIGRMISIPKFMLKVAIQKYKMKSK

SEQ ID NO: 70519 - protein, 264 aa, Staphylococcus epidermidis
MSVSVNIENLTKEYRIYRNNKDRIKDALIPKNKNKTFYALDNVSLTAHEGDVIGLVGINGSGKSTLSNMIGGSISPSSGEITRHGDVSVIAINAGLNGQLTGVENIEFKMLCMGFKRKEIKKLMPEIIEFSELGEFIYQPVKKYSSGMRAKLGFSINITVNPDILVIDEALSVGDQTFTQKCLDKIYEFKAAKKTIFFVSHNIRQVREFCTKIAWIEGGKLKEFGELEEVLPDYEAFLKTFKKKSKAEQKEFRNKLDESRFVVK

SEQ ID NO: 70520 - protein, 329 aa, Staphylococcus epidermidis
METLFSGIQPSGIPTIGNYIGALKQFVDVQDDYECFFCIVDQHAITVPQDRLKLRKQIRQLAAIYLASGIDPDKSTLFIQSEVPAHVQAGWMLTTIASIGELERMTQFKDKAQKRADGVPAGLLTYPPLMAADIVIYNTNIVPVGDDQKQHMELTRNLVDRFNSRYNDVLVKPEVRMPKVGGRVMSLQDPTKKMSKSDDNQKNFISLLDEPHVAAKKIKSAVTDSDGIIKFDRENKPGISNLLSIYSGLTNDSIKNIESKYEGEGYGKFKGDLSEIVKDFLINFQEKYASFYNSDDLDDILDKGKEKAQKASFKTLKKMEKAMGLGRKR

SEQ ID NO: 70521 - protein, 357 aa, Staphylococcus epidermidis; identical to SEQ ID NO: 70497

SEQ ID NO: 70522 - protein, 265 aa, Staphylococcus epidermidis
MAEELRIMENKSREDTNLSPVSKIEIYSFFDPFSKDCFKLSAILSKLRIEYNKYIKVRHILNPSLKVLTKCQAQSTSDFDNIALAYKAAELQGRIRAERFIHLMQNEIIPKRDIITEDMISDCINNAGIDYQVFKEDLQKDKLTDSLKVDLHIAREMEIEQAPSLVFFSENVHEEGLKVEGLYPYHIYTYIINELMGQPIEKNLPPKLEYYIQKKQLVTMEELLTIYEWPEKLLNKELKKLTLQQKVEKLQYPEGEFWKSKMPQC

SEQ ID NO: 70523 - protein, 127 aa, Staphylococcus epidermidis
MEHGDIMSKTPYELIGQKALYQMIDHFYQLVEKDSRINHLFPGDFKETSRKQKQFLTQFLGGPDLYTQEHGHPMLKRRHMEFTISEYERDAWLENMHTAIQHAELPAGVGDYLFERLRLTAHHMVNS

SEQ ID NO: 70524 - protein, 211 aa, Staphylococcus epidermidis
MNQWDQFLTPYKQAVDELKVKLKGLRKQYEVGEHNSPIEFVTGRVKPISSVIDKANKRGIPFDCLHEEMYDIAGLRIMCQFVDDIDIVVDILRQRQDFKVIEERDYIRNTKESGYRSYHVIIKYPIETLSGQKHILAEIQIRTLAMNFWATIEHTLRYKYDGAYPDEIQHRLERAAEAAYLLDEEMSEIKDEIQEAQKYYTQKRAKKHEND

SEQ ID NO: 70525 - protein, 269 aa, Staphylococcus epidermidis
MRYTILTKGDSKSNALKHKMINHMKDFQMVEDSENPEIVISVGGDGTLLQAFHQYSHMLSKVAFVGIHTGHLGFYADWLPHEVEKLIIEINNSEFQVIEYPLLELIVRYNDNGYETRYLALNEATMKTENGSTLVVDVNIRGKHFERFRGDGLCISTPSGSTAYNKALGGALIHPSLEAMQIAEIASINNRVFRTVGSPLVLPKHHTCLITPVNHDTIRTTIDHVSIKHKNVNAIQYRVANEKVRFARFRPFPFWKRVHDSFISSDDER

SEQ ID NO: 70526 - protein, 284 aa, Staphylococcus epidermidis
MILTYQIVQSEPVKTFLKNQDYSKRTLSAIKLNGALLLNGSPVTVRQVMDKGDRLEVHFPSETPSENLIPYDKELEVIYEDAYLIIVNKPQMQNCAPSREHPHGSLVEQVLAYYTKKGEKINPHIVTRLDRNTSGLVVFAKFGHVHNLFSKVKFKKEYVALAYGQTQSSGVIEVPIARLSDSIIKREVNEKGKYAKTVYQKLMQNETASLCKINLLTGRTHQIRVHFEYIGHPLIGDDLYGGNHPCVHGQALHCCSVEFIHPIYRSHYLINVDYKQLIKLFNMV

SEQ ID NO: 70527 - protein, 461 aa, Staphylococcus epidermidis
MSNETEMKDNVREDVYDKELFDRLLDQNDIDEFRKEFLELHNYEQSEYFEDTDDGNRQKIFEFLSPKEVANFFDQLDFDDDDYESLFDNMDATYASHVLEEMSYDNAVDILNELSKPKVASLLTLMNKDNANEIKALLHYEEDTAGGIMTTEFISLKSTTPVKEALIHVKEQAPDAETIYVIFAVNEDEQLVGVLSLRDLIVAENDAYIEDVMSERVISANVGDDQEDIAQLMRDYDFIAVPVVDYQNHLLGIITIDDILDVMDEEASEDYSRLAGVSDIDSTSDSVFKTASKRLPWLIVLTFLGMITATILGSFEDTLSQVALLAAFIPIISGMSGNSGTQSLAVSVRNISTGEINEQSKFKIALREAGSGLLSGIVCAVILFLIIVVIFRQPLLALIVGGSLTCAMTVGTLVGSMIPLVMNKCKIDPAVASGPFITTINDIVSMLIYFGLATSFMSYLT

SEQ ID NO: 70528 - protein, 98 aa, Staphylococcus epidermidis
VETIGSIIYLKEGSQKLMIINRGPIVDIDNQKYIFDYSACNYPVGVVEDQIYYFNEDNIDKVVFEGYSDQDEMRFQELFKEMKNNLDDDIQQGIVQKQ

SEQ ID NO: 70529 - protein, 129 aa, Staphylococcus epidermidis
MARKQVSRKRRVKKNIENGVAHIRSTFNNTIVTITDEFGNALSWSSAGALGFKGSKKSTPFAAQMASETASKTAMEHGLKTVEVTVKGPGPGRESAIRALQSAGLEVTAIRDVTPVPHNGCRPPKRRRV

SEQ ID NO: 70530 - protein, 121 aa, Staphylococcus epidermidis
MARIAGVDIPREKRIVISLTYVYGIGTSTANKIVEEANVSADTRVKDLTDDELGRIREVVDGYKVEGDLRREQNLNIKRLMEISSYRGIRHRRGLPVRGQKTKNNARTRKGPVKTVANKKK

SEQ ID NO: 70531 - protein, 72 aa, Staphylococcus epidermidis
MAKQDVIELEGTVLDTLPNAMFKVELENGHEILAHVSGKIRMNYIRILPGDKVTVEMSPYDLSRGRITYRYK

SEQ ID NO: 70532 - protein, 215 aa, Staphylococcus epidermidis
MNIILMGLPGAGKGTQASEIVKKFPIPHISTGDMFRKAIKDETDLGKEAKSYMDRGELVPDEVTVGIVKERISEDDAKKGFLLDGFPRTIDQAESLSQIMSELDREIDAVINIEVPEEELMNRLTGRRICEKCGTTYHLVFNPPKVDGICDIDGGKLYQREDDNPETVSNRLSVNVKQSKPILEYYNNKGVLKNIDGSKDIDEVTNDVIDILDHL

SEQ ID NO: 70533 - protein, 430 aa, Staphylococcus epidermidis
MFQTFVRFFTTKEVRNKIFFTLAMLVIFKIGTYIPAPGVNPEAFNHPQGSQGATELLNTFGGGALKRFSIFAMGIMPYITASIVMQLLQMDIVPKFTEWAKQGEMGRRKINNVTRYFAIILAFIQSIGMAFQFNNYLKGQLIIEKSVMSYLLIAVVLTAGTAFLIWLGDQITQFGVGNGISLIIFAGILSTLPSSLEQFAQSVFVGQDDTSLAWLKILGLIVALILLTVGAIFVLEAKRKIPIQYAKKQSAQRLGSQATYLPLKVNSAGVIPVIFAMAFFLLPRTLTLFFPKAEWAQNIADTANPSSNIGMIIYVVLIIAFAYFYAFVQVNPEKMADNLKKQGSYVPGIRPGEQTKKYITKVLYRLTFVGSIFLAAIAILPIIATKFMGLPQSIQIGGTSLLIVIGVAIETMKTLEAQVTQKEYKGFGGR

SEQ ID NO: 70534 - protein, 146 aa, Staphylococcus epidermidis
MKLHELKAAEGSRRVRNRVGRGAATGNGKTSGRGQKGQKARSGGKLRPGFEGGQLPLFRRLPKRGFTNINRKEYAIVNLDQLNKFEDGTEVTPALLVESGVVKNEKSGIKVLGNGSLDKKLTVKAHKFSASAAEAIDAKGGAHEVI

SEQ ID NO: 70535 - protein, 166 aa, Staphylococcus epidermidis
MARREEETKEFEERVVTINRVAKVVKGGRRFRFTALVVVGDKNGRVGFGTGKAQEVPEAIKKAVEAAKKDLVVVPRVEGTTPHTITGQYGSGSVFMKPAAPGTGVIAGGPVRAVLELAGITDILSKSLGSNTPINMVRATINGLQNLKNAEDVAKLRGKSVEELYN

SEQ ID NO: 70536 - protein, 120 aa, Staphylococcus epidermidis
MISKIDKNKVRLKRHARVRTKLSGTAEKPRLNVYRSNKHIYAQIIDDVKGVTLAQASSQDKDIANTSASKVDLATTVGQEIAKKANDKGIKEIVFDRGGYLYHGRVKALADAARENGLEF

SEQ ID NO: 70537 - protein, 178 aa, Staphylococcus epidermidis
MSRVGKKIIDIPSDVTVTFDGSHVTVKGPKGELERTLNERMTFKQEENTVEVVRPSDSKEDRTDHGTTRALLNNMVLGVSQGYEKTLELVGVGYRAQMQGKDLVLNVGYSHPVEIKAEEGITFAVEKNTTVKVSGVSKEQVGAIASNIRSVRPPEPYKGKGIRYQGEYVRRKEGKTGK

SEQ ID NO: 70538 - protein, 132 aa, Staphylococcus epidermidis
MTMTDPIADMLTRVRNANMVRHEKLELPASNIKKEIAEILKSEGFIKNVEYVEDDKQGVIRLFLKYGQNNERVITGLKRISKPGLRVYAKANEVPKVLNGLGIALVSTSEGVITDKEARKRNVGGEIIAYVW

SEQ ID NO: 70539 - protein, 256 aa, Staphylococcus epidermidis
MLNLENKTYVIMGIANKRSIAFGVAKVLDRLGAKLVFTYRKERSRKELEKLLEQLNQSEHHLYEIDVQNDEDIINGFSQIGKDVGQIDGVYHSIAFANMEDLRGRFSETSREGFLLAQEISSYSLTLVAHEAKKLMPEGGSIVATTYIGGEAAVQNYNVMGVAKASLEANVKYLALDLGEDNIRVNAISAGPIRTLSAKGVGGFNTILKEIEARAPLKRNVDQEEVGKTAAYLLSDLSSGVTGENIHVDGGFHAIK

SEQ ID NO: 70540 - protein, 179 aa, Staphylococcus epidermidis
MNRLKEKFNTEVTENLVKKFNYSSVMEVPKIEKIVVNMGVGDAVQNSKVLDNAVEELELITGQKPLVTKAKKSVATFRLREGMPIGAKVTLRGERMYEFLDKLIAVSLPRVRDFQGVSKTAFDGRGNYTLGVKEQLIFPEIDYDKVTKVRGMDIVIVTTANTDEEARELLTNFGMPFRK

SEQ ID NO: 70541 - protein, 105 aa, Staphylococcus epidermidis
MHIKKGDNVKVIAGKDKGKEGKVVATEPKKDRVVVEGVNVIKKHQKPTQLNPEGGILETEAAIHVSNVQLLDPKTNEPTRVGYKTVDGKKVRIAKKSGEEIKANN

SEQ ID NO: 70542 - protein, 122 aa, Staphylococcus epidermidis
MIQQETRLKVADNSGAREVLTIKVLGGSGRKTANIGDIIVCTVKNATPGGVVKKGDVVKAVVVRTKSGVRREDGSYIKFDENACVIIRDDKGPRGTRIFGPVARELREGNFMKIVSLAPEVL

SEQ ID NO: 70543 - protein, 87 aa, Staphylococcus epidermidis
MSERNDRKVYVGRVVSDKMDKTVTVLVETYKTHKLYGKRVKYSKKYKTHDENNSAKLGDIVKIQETRPLSATKRFRLVEIVEESVII

SEQ ID NO: 70544 - protein, 144 aa, Staphylococcus epidermidis
MLLPKRVKYRRQHRPKTTGRSKGGNYVTFGEYGLQATTTSWITSRQIESARIAMTRYMKRGGKVWIKIFPHTPYTKKPLEVRMGAGKGAVEGWIAVVKPGRILFEVAGVPEEVAREALRLASHKLPVKSKFVKREELGGETNES

SEQ ID NO: 70545 - protein, 217 aa, Staphylococcus epidermidis
MGQKINPIGLRVGVIRDWEAKWYAEKDFASLLHEDLKIRKFIDNELKEASVSHVDIERAANRINIAIHTGKPGMVIGKGGSEIEKLRNKLNTLTDKKVHINVIEIKKIDIDARLVAENIARQLENRASFRRVQKQAITRAMKNGAKGIKTQVSGRLGGADIARAEQYSEGTVPLHTLRADIDYAHAEADTTYGKLGVKVWIYRGEVLPTKNTSEGGK

SEQ ID NO: 70546 - protein, 117 aa, Staphylococcus epidermidis
MEAKAVARTIRIAPRKVRLVLDLIRGKNAGEAIAILKLTNKASSPVIEKVLMSALANAEHNYDMNTDELVVKEAYANEGPTLKRFRPRAQGRASAINKRTSHITIVVSDGKEEAKEA

SEQ ID NO: 70547 - protein, 494 aa, Staphylococcus epidermidis
MNASALFKKIRVKNVIGTLDIQVDDITTDSRTAKEGSLFVASKGYTVDSHKFCQNVVDQGCGIVVVNRELELKGNVTQVVVPDTLRVASLLAHELYEFPSHQLTTYGVTGTNGKTSIATMIHLIYRKLNKNSAYLGTNGFQVNETKTKGANTTPETVALTKKIKEAVDANAEAMTMEVSSHGLALGRLRGVEFDVAIFSNLTQDHLDFHGTMEAYGHAKSLLFSQLGEDLSKEKYVVLNNDDDFSDYLASVTPYEVFTYGITHEAQFMAKNIKESLQGVEFEFCTPFGSFPVKSPYVGRFNISNIMAAMIAVWSKGTNLNEIINAVTELEPVEGRLEVLDPSLPIDLIIDYAHTADGMNKLIDAVQPFVKQKLIFLVGMAGERDLTKTPEMGRVACRADYVIFTPDNPANDDPKMLTAELAKGATHNNYIEFDDRAEGIRHAIDIAEPGDTVVLASKGREPYQIMPGHVKVPHRDDLIGLKAAYQKFGGGPLED

SEQ ID NO: 70548 - protein, 92 aa, Staphylococcus epidermidis
MARSIKKGPFVDDHLMKKVEAQDGSEKKQVIKTWSRRSTIFPNFIGHTFAVYDGRKHVPVYVTEDMVGHKLGEFAPTRTFKGHAADDKKTRR

SEQ ID NO: 70549 - protein, 520 aa, Staphylococcus epidermidis
MNLKEEIESRKTFAIISHPDAGKTTLTEKLLYFSGAIREAGTVKGKKTGKFATSDWMKVEQERGISVTSSVMQFDYDDYKINILDTPGHEDFSEDTYRTLMAVDSAVMVIDCAKGIEPQTLKLFKVCKMRGIPIFTFINKLDRVGKEPFELLDEIEETLNIDTYPMNWPVGMGQNFFGIIDRHSKTIEPFRDEENLLHLNEDYELKEEHAIKNDSAFEQAIEEMMLVDEAGEAFDNEALLNGELTPVFFGSALANFGVQNFLNAYVDHAPMPNARQTKEEVDVSPFDTDFSGFIFKIQANMDPKHRDRIAFMRVVSGAFERGMDVTLQRTNKKQKITRSTSFMADDKETVNHAVAGDIIGLYDTGNYQIGDTLVGGKQKYSFQELPQFTPEIFMKVSAKNVMKQKHFHKGIEQLVQEGAIQYYKTLHTNQIILGAVGQLQFEVFEHRMNNEYNVDVVMEPVGRKIARWIENEEDIKDNMNTSRSILVKDRYDNYVFLFENEFATRWFEEKFSDIKLYSLL

SEQ ID NO: 70550 - protein, 277 aa, Staphylococcus epidermidis
MALKKYKPITNGRRNMTTLDFAEITKTTPEKSLLQPLPKRAGRNNQGKLTVRHHGGGHKRQYRVIDFKRNKDGIIAKVDSIQYDPNRSANIALLVYADGEKRYIIAPKGLQVGQTVESGAEADIKVGNALPLQNIPVGTVIHNIELKPGKGGQLARSAGASSQVLGKEGKYVLIRLRSGEVRMILSTCRATIGQVGNLQHELVNVGKAGRSRWKGVRPTVRGSVMNPNDHPHGGGEGRAPIGRPSPMSPWGKPTLGKKTRRGKKSSDKLIVRGRKKK

SEQ ID NO: 70551 - protein, 91 aa, Staphylococcus epidermidis
MEARDVLKRPVITEKSSEAMAEDKYTFDVDTRANKTQVKIAVEEIFDVKVDSVNIINYKPKKKRMGRYQGYTNKRRKAIVKLKEGSIDLFN

SEQ ID NO: 70552 - protein, 452 aa, Staphylococcus epidermidis
MSVLSQLLKKSSPQQGIILYYLFAIVVAFLLLNLPYVHKQGVEVNPIDTLFVAVSGISVTGLSPITIVDTYSTFGQIIILIILNIGGIGVMAIGTMLWVVLGKHIGIRERQLIMLDNNRDTMSGTVKLILEIVRTIFIIEFIGALLLAFYFYRDNPDLKNALMQGIFVSVSATTNGGLDITGESLVPYAKDYFVQTIVMFLIVLGSIGFPVLLELKAYIKNRVTNFRFSLFTKITTTTYLFLFLFGVIVVLILEHSNAFKGLSWHQSLFYALFQSSTTRSAGLQTIDVSHFSDATNIVMGLLMFIGSSPSSVGGGIRTTTFAILILFVINFNNTGDKTGIKIFNREVHIMDVQRSFAVFTMASLITFISMIIISATEQGKLSFLQIFFEVMSAFGTCGLSLGVTSDVNDITKAVLMILMFIGRVGLISFIIMLAGRKEPEKYSYPKERIQIG

SEQ ID NO: 70553 - protein, 516 aa, Staphylococcus epidermidis
MNGTCYTKFKERSGSMEKNENKIVDVIATSDMHSHFLNGDYGSNIYRAGTYVNEARKNNENVILLDSGGSLAGSLAAFYYAVVAPYKRHPMIKLMNAMQYDASGISPNEFKFGLSFLTRSVALSRFPWLSANIEYTVTREPYFSTPYTIKMYSDLKIAIVGLTSDGLMKNEYAEMEEDVCIEKTLVSAKRWIRYIHEVEEPDFLIVIYHGGLNKISSANKRNEKNANEAEKIMEELGVIDVIITAHQHQTVVGKDHGTIYVQAGQNAEELVHLSIKFKKRTTSYEIEHIDSKVIDLNDYHEDEQLLKETYYDRKAVKHWANSVVSNKNNGLTVQCIEDIICKPHPFTQLLHDAIRLAYNYDISCVHIPKNGEEGLKGTIRNRDIYDAYPHPDKPIDITVKGKNIKDILEYSYAHIDFNKRQLSMTMIDETLFTVWQGFDYCIDMSQSPFNRVKLNGLNEEDSYRITMTDYCYRNYKMYLQEAIVHDTYSETMGGLIRKNLKCDMYSVKLNHNFKVY

SEQ ID NO: 70554 - protein, 207 aa, Staphylococcus epidermidis
MANYDVLKVDGSKSGSVELNDAVFAIEPNNSVLFEAINLQRASLRQGTHAVKNRSAVRGGGRKPWRQKGTGRARQGTIRAPQWRGGGVVFGPTPRSYAYKMPKKMRRLALRSALSFKVQENSFTIVDTFGFEAPKTKEFKNVLTTLEQPKKVLVVTENEDVNVELSARNIPGVQVTTAQGLNVLDLTSADSVIITEAAAKKVEEVLA

SEQ ID NO: 70555 - protein, 220 aa, Staphylococcus epidermidis
MTKGILGRKIGMTQVFGENGELIPVTVVEASQNVVLQKKTEEVDGYNAIQVGFEDKQAYKKGSKSNKYANKPAEGHAKKADTAPKRFIREFRNLNVDEYEVGQEVSVDTFETGDIIDVTGVSKGKGFQGAIKRHGQGRGPMAHGSHFHRAPGSVGMASDASKVFKGQKMPGRMGGNTVTVQNLEVVQVDTENSVILVKGNVPGPKKGLVEITTSIKKGNK

SEQ ID NO: 70556 - protein, 102 aa, Staphylococcus epidermidis
MAKQKIRIRLKAYDHRVIDQSAEKIVETAKRSGADVSGPIPLPTEKSVYTIIRAVHKYKDSREQFEQRTHKRLIDIVNPTPKTVDALMGLNLPSGVDIEIKL

SEQ ID NO: 70557 - protein, 711 aa, Staphylococcus epidermidis
MKSLILAEKPSVGRDIANALNLQQKSNGYIEGKQYIVTWALGHLVTNATPEQYNPSYKEWNLEDLPIIPKKMKTVVISKTNRQFKIVKSLILDKNVKEIIIATDAGREGELVARLILDKVGNKKPIKRLWISSVTKKAIQEGFKQLKNGNAYQNLYEAALARSEADWIVGINATRALTTKYDAQLSLGRVQTPTIQIVKSRQDEINYFKPEKYYTLSINVDGYDLNLKQQKRYKDKKELELIEHKIKHQEGKILEVKGKNKKSYAQPLFNLTDLQQEAYKHYKMGPKETLNTLQHLYERHKLVTYPRTDSNYLTDDMVDTIQERLRAILATDYKSHVRDLISESFSSKMHIFNNQKVSDHHAIIPTEVRPSIEQLSQREFKIYMLIAERFLENLMNPYLYEVLTIHAQLKDYNFVLKEIIPKQLGYKALKDQTSSHTLTHSFKEGQLFKVHRIEIHEHETKAPEYFNEGSLLKAMENPQNHIDLNDKKYAKTLKHSGGIGTVATRADIIEKLFNMNALESRDGKIKVTSKGKQILELSPSELTSPILTAQWEEKLMLIEKGKYNSQKFIQEMKNFTFKVVNKIKSSEQKYKHDNLTTTECPTCGKFMIKVKTKNGQMLVCQDPKCKTKKNIQRKTNARCPYCKKKMTLFGKGKEAVYRCVCGHTETQSQMDKRMRDKTNGKVSRKEMKKYINKKEEIDNNPFKDALKNLKL

SEQ ID NO: 70558 - protein, 1051 aa, Staphylococcus epidermidis
MIKKLLQFSLGNKFAIFLMVVLIILGGVYSSAKLKLELLPDVENPVISVQTTMSGATPQSTQDEISSKIDNQVRSLAYVNSVQTESIPNASIVTVEYDNGTDMDKAEEQLKKEIDKIKFKDGVGEPELTRNSMDAFPIVAYSFTSNNQKLKDVTKKLNQQLVPKLQTIDGVQNAQLNGQTNREVSLKFKQKNLDEKGLTANDVENYIKTATRETPLGLFQFNKSNKSIVVDGQFKSVDAFKNLKIPLSISGQAAQNDSDSDSDSLMPSDNTRSTNSSTHMAQKGQMPSVPLKDLADISVGDERTSISKTNGKDAVNLQIMKSQDANTVQVAREVQKKVDEFVRNESGMKSIKTMDTAKPIEDSLYTMVEKAALGTIVAIIVILLFLRNIRTTAISIVSIPMSILIALIALKLSNVSLNILTLGALTVAIGRVIDDSIVVVENIFRRLSDPNEKLKGENLIISATREVFKPIMSSTLVTIVVFLPLVFVSGSVGEMFRPFALAITFSLLASLLVSITLVPSLGATFFKNGVKNREQKEGLGTVGRAYRSALNWSLNHKWIVLIVSIFILVGSVVIGARNLGTSYISTGDNKFLALTYTPKPGETQKSVTQHAEKVQNYLDKKDKVETVQYSIGGPTPQDPTGSTNSMAIMIKYQSDTPNFDEEPDKVLKHIETFKQPGEWKNQDLGTGAGNNSVEVTVKGPNTSAMKDTVNRVEKMMTDIKGITNVKSDLSQTYDQYEIKVDQNKAADNGISAAQLAMNLNENLPEKTISTVNEKGKSIDVKVKQNKQTDWSSQKIKNIKLNKPTGGTIKLSEIASLKKSYTPSKLTQEDGDYATTVTGKVTDKDVGGKSQQVMAKVKDLEKPSHIKINVGGATDDIDKAISQLAMAMIAAIIIVYLILVITFRGGLAPFTILFSLPFTVIGVVLALIITGETISVPSLIGMLMLIGIVVTNAIVLIDRVINNEKQGMPMKQALIEAGGTRIRPILMTAIATIGALVPLLFGHDSSILISKGMAATVIGGLISSTLLTLFVVPVIYEILFTLKNKITKKFNM

SEQ ID NO: 70559 - protein, 416 aa, Staphylococcus epidermidis
MEKMNITNQQHDAFVKSHPNGDLLQLSKWADTKKLTGWYSRRIAVGENGQIKGVGQLLFKKIPKLPYTLCYVSRGFVADYNNKEVLEALLSYAKEVAKDEKSYAIKIDPDVEVDKGAEALKNLRELGFKHKGFKEGLSKDYIQPRMTMITPIDKTDDELVQSFERRNRSKVRLALKRGTKVERSNREGLKIFANLMKITGERDGFLTRDISYFENIYDALHEDGDAELFLVKLEPKPVLDTVNQDLEAQLAEKEKLQSKKQDKKTLNKLNDIDNKIKKTNELKSDLTELEKSEPEGIYLSGALLMFAGNKSYYLYGASSNDYRDFLPNHHMQFEMMKYAREHGATTYDFGGTDNDPDKDSEHYGLWAFKRVWGTYLSEKIGEFDYVLNQPLYHLVEKVKPRLTKAKIKISRKLKGK

SEQ ID NO: 70560 - protein, 340 aa, Staphylococcus epidermidis
MKEVIQDKLGRPIRDLRISVTDRCNFRCDYCMPKEIFGDDYTFLPKNELLTFEELTRISKIYAQLGVKKIRITGGEPLLRRNLYKLVEQLNLIDGIEDIGLTTNGLLLKKHGKNLYQAGLRRINVSLDAIEDNVFQEINNRNIKASTILEQIDYAVSIGFEVKVNVVIQKGVNDNQIIPMIDYFKNKNIEVRFIEFMDVGNDNGWNFNKVVTKEEMLNMIEQHFEISPVAPKYYGEVAKYFRHKDSDAQFGLITSVSESFCSTCTRARLSSDGKFYGCLFASSEGFDVKALIRNGATDDDLKAQFKRLWSIRNDQYSDKRTMQTIENNRKKKINMNYIGG

SEQ ID NO: 70561 - protein, 629 aa, Staphylococcus epidermidis
MSDRFIKFNDEQLDAKQVMMLQDLARLLLKNEQTQVKIQKFPYYNPYSNTLIASWFWSHRPKHIEQAGLKTDVLLATYGYLNMDLSIINQVLHNNDFEHPKFFHQLFKLLEDVRIFEHIRQQRPSTTKMIDLRIETRLSFTESQINFYKTKTVYTDLLFLYLEHAFLSQNFFNIPSIHPAFDDILVHMYQYLPNIFQNHTSEDNMYLAERIMYQVDDLLKEDMLNEYYYLPQKLYEDIYADSFEDLKRTDASNTDGKDNHQTEEDVETAEAETKAADSESKGGAYLEMELHEGENSEVMADNDTAREGDSTDDMTDMMTKKGKGSENTLDHDEGGFTGQNQTFALKGINKDVSIEWNIPDITPQNVIDYQYSKNDVQFEIKDLIQIIEKTIDREHEDERHNLTKGRLQKDLINWFIDDQFKLFYKKQDLSKTFDATFTLLIDASASMHDKMDETIKGVVLFHETLKSLNIKHEILAFNEDAFEADERQQPNIIDEIINYNYSIFEKEGPRIMTLEPQDDNRDGVAIRIASERLLQRSHEQRFLIVFSDGEPSAFNYSQDGILDTYEAVERARKFGIEVFNVFLSQEPITEDIEQTIHNIYGQFAIFVEGVEHLPSHLSPLLKKLLLKSL

SEQ ID NO: 70562 - protein, 419 aa, Staphylococcus epidermidis
MSVEKRTPISVKEAIKRIMKQHVEVKNININLDESLGHILAEDIVATYDIPRFNKSPYDGFAIRSEDSQGASGENRIEFEVIDHIGAGSVSEKTIDKNQAIRIMTGAQIPSGADAVVMFEQTIESETTFTIRKSFKHLENISLQGEEIKAGDIVLHKGMRINSGVIAVLATYGYTKVRVARKPTVAVIATGSELLEVEDELEPGKIRNSNGPMIKALAKQFGIQVGMYKVQHDNLEKSIEVVKKALSEHDLVITTGGVSVGDFDYLPEIYKSIQAQILFNKVAQRPGSVTTVAFADGKYLFGLSGNPSACYTGFELYVKPAVNKLMGAKACYPQIIKATLMEDFNKANPFTRLIRAKATLTKAGMTVIPSGFNKSGAVVAIAHANAMIMLPGGTRGFKAGNIVDVILTESNSFEEELIL

SEQ ID NO: 70563 - protein, 934 aa, Staphylococcus epidermidis
MTKNKKEFTEAPVNFGANLGLMLDLYDDYLQDPSSVPEDLQVLFSTIKTGEAHIEAKPTTDGGGSQAGDSTIKRVMRLIDNIRQYGHLKADIYPVNPPERQNVPKLEIEDFDLDKETLEKISSGIVSEHFKDIYDNAYDAIVRMERRYKGPIAFEYTHINNNKERVWLKRRIETPYKASLNDNQKKELFKKLAHVEGFEKYLHKNFVGAKRFSIEGVDTLVPMLQHTITLAGNEGIKNIQIGMAHRGRLNVLTHVLEKPYEMMISEFMHTDPMKFLPEDGSLELTSGWTSDVKYHLGGVKTTNSYGIEQRISLANNPSHLEIVAPVVAGKTRAAQDNTHQVGGPSTDFHKAMPIIIHGDAAYPGQGINFETMNLGSLKGYSTGGSLHIITNNRIGFTTEPFDGRSTTYSSDVAKGYDVPILHVNADDVEATIEAIEIAMEFRKEFHKDVVIDLVGYRRYGHNEMDEPSITNPVPYQNIRKHDSVEILYGKKLVDEGIISEDEMNEVIDSVQKEMRTAHDKIDKNDKMNNPDMEKPESLQLPLQSDTKDFSFDHLKEINDAMLDYPKDFHVLKKLNKVLEKRREPFEKEGGLVDWAQAEQLAFATILQDGTSIRLTGQDSERGTFSHRHAVLHDEENGNTFTPLHHVPQQQATFDIHNSPLSEAAVVGFEYGYNVENKGNFNIWEAQYGDFSNMSQMMFDNFLSSSRAKWGERSGLTLFLPHAFEGQGPEHSSARLERFLQLAAENNSTVVNLSSASNYFHLLRAQAASLDTLEMRPLIVMSPKSLLRNKTVAKPIDEFTSGGFKPIITEDIDEQKVKKVILASGKMYIDLKEYLAKNPNDSILLIAVERLYPFPEEEIKEVLKSLPHLENVSWVQEEPKNQGAWLFVYPYLKALVANKYDLTYHGRIQRAAPAEGDGEIHKLVQTKIIESSINN

SEQ ID NO: 70564 - protein, 176 aa, Staphylococcus epidermidis
MHKHQHQNIHLNRPIHVAILTVSDTRDYDSDKGGQLIQSLINQHENHVDINHYRIVKDDIEAITHQLKLWLTSSNQLDVIITTGGTGISQRDVTIEAVRPLLTKELEGFGELFRYLSYTEDVGTRALLTRAIAGTCDSTLIFALPGSTGAIKLAIEKLIKPELSHLVFELNKDIRN

SEQ ID NO: 70565 - protein, 333 aa, Staphylococcus epidermidis
MQERYSRQVLFKEIGLKGQSLLEKKHVLIVGMGALGTHLAEGLVRAGINKLTIVDRDYIEFSNLQRQTLFIERDAEDVLPKVIAAQKVLKEIRKDVEIDAYIEHVNYNFLEQHGMHVDIILDATDNFDTRQLINDFAYKHQIPWIYGGVVQSTYVQATFIPGETPCFNCLMPQLPSINLTCDTVGVIQPAVTMTTSLQLVDALKLLTGNKVNKHFTYGDIWTGDHYTFGFSRMQNEDCKTCGNAPTYPHLNQHQQDYATLCGRDTVQYKNADISQEILLSFLERNHIQYRTNLYMTMFRFREHRIVAFSGGRFLIHGTTEPKKAIQLMHQLFG

SEQ ID NO: 70566 - protein, 206 aa, Staphylococcus epidermidis
MLTIKVNGVLNQTKININIKDQHPKIYAIQGPSGIGKTTILNIIAGLKAINYSYIKVGKRVLTDSRHHLNVKVQQRRIGYLFQDYQLFPNMNVYNNITFMTKPSEHINELIHTLKIEHLLEKYPVTLSGGEAQRVALARALSTKPDLILLDEPFSSLDDKTKNEGIKLILKIFEAWQIPIIFVTHSNYEAQQMAHEIITIEDCIQI

SEQ ID NO: 70567 - protein, 357 aa, Staphylococcus epidermidis; identical to SEQ ID NO: 70497

SEQ ID NO: 70568 - protein, 204 aa, Staphylococcus epidermidis
MNRWKRISLLIVFTLIFGIIAFFHESRLGKWIDNEVYEFIYSSESFITTSIMLGVTKIGEVWAMVALSLLLVAYLMLKRFKIETLFFVIVMSLSSTLNPLLKNIFDRERPTLLRLIDISGFSFPSGHAMGSTSFFGSAIYVINRHDSGISKGVLIGLCALFILLISTSRVYLGVHYPTDIIAGIIGGVFCLLLSTLLLPKQLIA

SEQ ID NO: 70569 - protein, 662 aa, Staphylococcus epidermidis
MNFPWDQLLVKGNWMIISAQIAAPFLVIGLIAVISYFKLWKYLYKEWFTSVDHKKIGIMYLISAVLMFVRGGIDALMLRTQLTIPDNKFLEANHYNEVFTTHGVIMIIFMAMPFIFGLWNVVIPLQLGARDVAFPVMNNVSFWLFFAGMILFNLSFIVGGSPAAGWTNYAPLAGEFSPGPGVNYYLIAIQISGIGSLMTGINFFVTILRCKTPTMKFMQMPMFSVTTFITTLIVILAFPVFTVALALMTADRIFGTQFFTVANGGMPMLWANFFWVWGHPEVYIVILPAFGMYSEIIPTFARKRLFGHQSMIWATAGIAFLSFLVWVHHFFTMGNGALINSFFSISTMLIGVPTGVKLFNWLLTLYKGRITFESPMLFSLAFIPNFLLGGVTGVMLAMASADYQYHNTYFLVAHFHYTLVTGVVFACLAGLIFWYPKMMGYKLNETLNKWCFWFFMIGFNVCFLPQFILGLDGMPRRLYTYMPSDGWWLLNFISTIGAVLMAIGFLFLVASIVYSHIKAPREATGDNWDGLGRTLEWSTASAIPPKYNFAITPDWNDYDTFVDMKEHGRHYLDNHNYKDIHMPNNTPVGFWMGIFMTIGGFFLIFESIVPALICLAGIFITMIWRSFQIDHGYHIPASEVAETEARLREARIKEREAVSHES

SEQ ID NO: 70570 - protein, 261 aa, Staphylococcus epidermidis
MKIKHIFVIILTLCVVLAGCTNEKGQNKEQNEKQPTKGDKQELQVSAAASLTEVSKALGNEFKKDHPNVEIKFNYGGSGALRQQIEAGAPADVMMSANTKDIDLLKKKNKAHDTYNYAKNQLVLIGDKNKSYTSVKDLNQNDKLALGQIKTVPAGKYAKQYLDDQHLYGDVKDKIIFAKDVKQVLNYVEKGNAQEGFVYKTDLYQQKKKANKVKVIEEIKLSKPITYKAGATSDKKLAKEWINFLKSNKAKQILKEYQFSV

SEQ ID NO: 70571 - protein, 357 aa, Staphylococcus epidermidis
MTKIAYTGGGTVGHVSVNLSLIPTSIEKGHEAFYIGSKHGIEREMIESQLPDIQYYPISSGKLRRYLSFENAKDVFKVLKGILDARKILKKQKPDLLFSKGGFVSVPVVIAARSLKIPTIIHESDLTPGLANKISLKFAKKIYTTFEDTLTYLPKDKADFVGATVREDLKQGNKERGYQLTDFDKNKKVLLVMGGSLGSKKLNNIIRQNIEALLHDYQIIHLTGKGLVDDSINKKGYVQFEFVKDDLTDLLAITDTVVSRAGSNAIYEFLSLRIPMLLIPLGLDQSRGDQIDNAKNFESKGYGRHIPEDQLTEVNLLQELNDIELHRESIIKQMETYQESYTKEDLFDKIIHDALNK

SEQ ID NO: 70572 - protein, 374 aa, Staphylococcus epidermidis
MSKFKSLLLLFGTLILLSGCSNIEVFNAKGPVASSQKFLIIYSIIFMLVIVAVVLSMFAIFIFKYSYKKNSESGKMHHNSLIETIWFVVPILIVIALAIPTVKTLYDYEKPPEKDKDPLVVYAVSAGYKWFFAYPDQHIETVNTLTIPKDRPVVFKLQSMDTMTSFWIPQLGGQKYAMTGMTMNWTLTADQLGTFRGRNSNFNGEGFSRQTFKVHSVSQNDFDKWVKEAKGKKTLSQDTFDKQLLPSTSNKELTFSGTHMAFVDPAADPEYIFYAYKRYNFEQKDPNFTAEEDLYKDVKDKPIKPARKVHITNPNYERHGMKPMILGNNEKYDNEFKKEEDHNSKEMEKISKGAKDENASKLHKKEHDDHGGGH

SEQ ID NO: 70573 - protein, 167 aa, Staphylococcus epidermidis
MIRLATKNDLLSITQLVKEAKQIMEEFNNNQWDDEYPAKEHFEEDIENKTLYVLDVDHTIYGFIVIDQNQSEWYDDIDWPVNRNGAYVIHRLAGSKQYKGAATELFQFAIDLANEHDIHVILTDTFALNKPAQGLFEKFGFTKVDEIEIDYHPFDRGAPFYAYYKNI

SEQ ID NO: 70574 - protein, 811 aa, Staphylococcus epidermidis
  MISC_FEATURE (238)..(238): X=any amino acid
LHFTQREQDKLMIVVAAEVARRRKARGLKLNHPEALALISDELLEGARDGKTVAELMSYGKTILNEEDVMDGVANMITELEIEATFPDGTKLITVHHPSFKEAISMIPGEIIVKNTEIEVNKHHPETVIEVKNTGDRPIQVGSHFHFFEANKALEFDREKAYGKHLDIPAGAAVRFEPGDEKKVQLVEYSGRRKIYGFRGLVDGDIDEERVFRPNDSNQNAAVKNDAGEDNANKKGGXISMSFKMTQSQYTSLYGPTVGDSVRLGDTNLFAQVEKDYANYGDEATFGGGKSIRDGMAQNPNVTRDDKNVADLVLTNALIIDYDKIVKADIGIKNGYIFKIGKAGNPDIMDNVDIIIGATTDIIAAEGKIVTAGGIDTHVHFINPEQAEVALESGITTHIGGGTGASEGAKATTVTPGPWHIHRMLEAAEEMPINVGFTGKGQAVNHTALIEQIHAGAIGLKVHEDWGATPSALSHALDVADEFDVQVALHADTLNEAGFMEDTMAAVKDRVLHMYHTEGAGGGHAPDLIKSAAYSNILPSSTNPTLPYTHNTVDEHLDMVMITHHLNASIPEDIAFADSRIRKETIAAEDVLQDMGVFSMVSSDSQAMGRVGEVVTRTWQVAHRMKEQRGPLDGDFEYHDNNRIKRYIAKYTINPAITHGISDYVGSVEAGKLADLVMWEPEFFGAKPDLVVKGGMINSAVNGDANGSIPTSEPLKYRKMYGQFGGNITHTAMTFVSNTAYENGIYRQLNLKRMVRPVRNIRNLTKADMKNNNATPKIDVDPQTYEVFVDGNKITSEAATELPLTQRYFLF

SEQ ID NO: 70575 - protein, 161 aa, Staphylococcus epidermidis
MTLSIIVAHDKQRVIGYQNQLPWHLPNDLKHVKQLTTGNTLVMGRKTFNSIGKPLPNRRNVVLTNQASFHHEGVDVINSLDEIKELSGHVFIFGGQTLFEAMIDQVDDMYITVIDGKFQGDTFFPPYTFENWEVESSVEGQLDEKNTIPHTFLHLVRRKGK

SEQ ID NO: 70576 - protein, 318 aa, Staphylococcus epidermidis
MYNPFDEAYHGLCEEILEIGNRRDDRTHTGTISKFGHQLRFDLTKGFPLLTTKKVSFKLVATELLWFIKGDTNIQYLLKYNNNIWNEWAFENYVQSDDYHGPDMTDFGHRSQQDPEFNEQYKEEMKKFKERILNDDAFAKKYGNLGNVYGKQWRDWEDKNGNHYDQLKSVIQQIKTNPNSRRHIVSAWNPTEIDSMALPPCHTMFQFYVQEGKLNCQLYQRSADIFLGVPFNIASYALLTHLVAKECGLEVGEFIHTFGDAHIYSNHMDAIHTQLSRDSYLPPQLKINTDKSIFDINYEDLELINYESHPAIKAPIAV

SEQ ID NO: 70577 - protein, 229 aa, Staphylococcus epidermidis
MIDHQHLRLFQFCDSQFPTGAFSHSFGLETYIQRETVHDTETFIKWLHLFINEQLTYSDGIAMRIVYHALINNDKDKILDINQKLFVQNLPKETRIGAKQMGTRMVKLALDLYDSEWIQWYYNQMKNNKIKLHPAVCFTMLGHFLGVDVESIIDYYLYQNISSLTQNAVRAIPLGQTAGQQVVTEMIAHIEKTRHHILELDEIDFGMTAPGLELNQMEHENVHVRIFIS

SEQ ID NO: 70578 - protein, 204 aa, Staphylococcus epidermidis
MSNPIKIGIGGPVGAGKTQLIEKVVKRLAKKMSIGVITNDIYTKEDEKILVNTGVLPEDRIIGVETGGCPHTAIREDASMNFAAIDELLERNDDIELIFIESGGDNLAATFSPELVDFSIYIIDVAQGEKIPRKGGQGMIKSDFFIINKTDLAPYVGASLDQMAKDTEVFRGNHPFAFTNLKTDEGLEKVIEWIEHDVLLKGLT

SEQ ID NO: 70579 - protein, 234 aa, Staphylococcus epidermidis
MYNEIFGIASFIVTFALMVLMYRCFGKQGLIAWVAIGTIIANIQVIKAVHIFGITATLGNVMFASIYLATDILNDIYGRKVAKRAVWLGFSSTLVMIIVMQMSLHFIPAPVDNAQNSLKMIFDLVPRIAIGSIIAYIIGQHIDVFIFSMIKKIFSSDKTFFIRAYGSTILSSIIDTGLFVSIAFIGTMPGTAVFEIFITTYLLKLVSTIFNVPFGYIAKSLYRKGKIEQLDNGY

SEQ ID NO: 70580 - protein, 6641 aa, Staphylococcus epidermidis
  MISC_FEATURE (6636)..(6636): X=any amino acid
KSKVEQALSELNNAKSALRADKQELQQAYNQLIQPTDLNNKKPASITAYNQRYQQFSNELNSTKTNTDRILKEQNPSVADVNNALNKVREVQQKLNEARALLQNKEDNSALVRAKEQLQQAVDQVPSTEGMTQQTKDDYNSKQQAAQQEISKAQQVIDNGDATTQQISNAKTNVERALEALNNAKTGLRADKEELQNAYNQLTQNIDTSGKTPASIRKYNEAKSRIQTQIDSAKNEANSILTNDNPQVSQVTAALNKIKAVQPELDKAIAMLKNKENNNALVQAKQQLQQIVNEVDPTQGMTTDTANNYKSKKREAEDEIQKAQQIINNGDATEQQITNETNRVNQAINAINKAKNDLRADKSQLENAYNQLIQNVDTNGKKPASIQQYQAARQAIETQYNNAKSEAHQILENSNPSVNEVAQALQKVEAVQLKVNDAIHILQNKENNSALVTAKNQLQQSVNDQPLTTGMTQDSINNYEAKRNEAQSAIRNAEAVINNGDATAKQISDEKSKVEQALAHLNDAKQQLTADTTELQTAVQQLNRRGDTNNKKPRSINAYNKAIQSLETQITSAKDNANAVIQKPIRTVQEVNNALQQVNQLNQQLTEAINQLQPLSNNDALKAARLNLENKINQTVQTDGMTQQSIEAYQNAKRVAQNESNTALALINNGDADEQQITTETDRVNQQTTNLTQAINGLTVNKEPLETAKTALQNNIDQVPSTDGMTQQSVANYNQKLQIAKNEINTINNVLANNPDVNAIKTNKAEAERISNDLTQAKNNLQVDTQPLEKIKRQLQDEIDQGTNTDGMTQDSVDNYNDSLSAAIIEKGKVNKLLKRNPTVEQVKESVANAQQVIQDLQNARTSLVPDKTQLQEAKNRLENSINQQTDTDGMTQDSLNNYNDKLAKARQNLEKISKVLGGQPTVAEIRQNTDEANAHKQALDTARSQLTLNREPYINHINNESHLNNAQKDNFKAQVNSAPNHNTLETIKNKADTLNQSMTALSESIADYENQKQQENYLDASNNKRQDYDNAVNAAKGILNQTQSPTMSADVIDQKAEDVKRTKTALDGNQRLEVAKQQALNHLNTLNDLNDAQRQTLTDTINHSPNINSVNQAKEKANTVNTAMTQLKQTIANYDDELHDGNYINADKDKKDAYNNAVNNAKQLINQSDANQAQLDPAEINKVTQRVNTTKNDLNGNDKLAEAKRDANTTIDGLTYLNEAQRNKAKENVGKASTKTNITSQLQDYNQLNIAMQALRNSVNDVNNVKANSNYINEDNGPKEAYNQAVTHAQTLINAQSNPEMSRDVVNQKTQAVNTAHQNLHGQQKLEQAQSSANTEIGNLPNLTNTQKAKEKELVNSKQTRTEVQEQLNQAKSLDSSMGTLKSLVAKQPTVQKTSVYINEDQPEQSAYNDSITMGQTIINKTADPVLDKTLVDNAISNISTKENALHGEQKLTTAKTEAINALNTLADLNTPQKEAIKTAINTAHTRTDVTAEQSKANQINSAMHTLRQNISDNESVTNESNYINAEPEKQHAFTEALNNAKEIVNEQQATLDANSINQKAQAILTTKNALDGEEQLRRAKENADQEINTLNQLTDAQRNSEKGLVNSSQTRTEVASQLAKAKELNKVMEQLNHLINGKNQMINSSKFINEDANQQQAYSNAIASAEALKNKSQNPELDKVTIEQAINNINSAINNLNGEAKLTKAKEDAVASINNLSGLTNEQKPKENQAVNGAQTRDQVANKLRDAEALDQSMQTLRDLVNNQNAIHSTSNYFNEDSTQKNTYDNAIDNGSTYITGQHNPELNKSTIDQTISRINTAKNDLHGVEKLQRDKGTANQEIGQLGYLNDPQKSGEESLVNGSNTRSEVEEHLNEAKSLNNAMKQLRDKVAEKTNVKQSSDYINDSTEHQRGYDQALQEAENIINEIGNPTLNKSEIEQKLQQLTDAQNALQGSHLLEEAKNNAITGINKLTALNDAQRQKAIENVQAQQTIPAVNQQLTLDREINTAMQALRDKVGQQNNVHQQSNYFNEDEQPKHNYDNSVQAGQTIIDKLQDPIMNKNEIEQAINQINTTQTALSGENKLHTDQESTNRQIEGLSSLNTAQINAEKDLVNQAKTRTDVAQKLAAAKEINSAMSNLRDGIQNKEDIKRSSAYINADPTKVTAYDQALQNAENIINATPNVELNKATIEQALSRVQQAQQDLDGVQQLANAKQQATQTVNGLNSLNDGQKRELNLLINSANTRTKVQEELNKATELNHAMEALRNSVQNVDQVKQSSNYVNEDQPEQHNYDNAVNEAQATINNNAQPVLDKLAIERLTQTVNTTKDALHGAQKLTQDQQAAETGIRGLTSLNEPQKNAEVAKVTAATTRDEVRNIRQEATTLDTAMLGLRKSIKDKNDTKNSSKYINEDHDQQQAYDNAVNNAQQVIDETQATLSSDTINQLANAVTQAKSNLHGDTKLQHDKDSAKQTIAQLQNLNSAQKHMEDSLIDNESTRTQVQHDLTEAQALDGLMGALKESIKDYTNIVSNGNYINAEPSKKQAYDAAVQNAQNIINGTNQPTINKGNVTTATQTVKNTKDALDGDHRLEEAKNNANQTIRNLSNLNNAQKDAEKNLVNSASTLEQVQQNLQTAQQLDNAMGELRQSIAKKDQVKADSKYLNEDPQIKQNYDDAVQRVETIINETQNPELLKANIDQATQSVQNAEQALHGAEKLNQDKQTSSTELDGLTDLTDAQREKLREQINTSNSRDDIKQKIEQAKALNDAMKKLKEQVAQKDGVHANSDYTNEDSAQKDAYNNALKQAEDIINNSSNPNLNAQDITNALNNIKQAQDNLHGAQKLQQDKNTTNQAIGNLNHLNQPQKDALIQAINGATSRDQVAEKLKEAEALDEAMKQLEDQVNQDDQISNSSPFINEDSDKQKTYNDKIQAAKEIINQTSNPTLDKQKIADTLQNIKDAVNNLHGDQKLAQSKQDANNQLNHLDDLTEEQKNHFKPLINNADTRDEVNKQLEIAKQLNGDMSTLHKVINDKDQIQHLSNYINADNDKKQNYDNAIKEAEDLIHNHPDTLDHKALQDLLNKIDQAHNELNGESRFKQALDNALNDIDSLNSLNVPQRQTVKDNINHVTTLESLAQELQKAKELNDAMKAMRDSIMNQEQIRKNSNYTNEDLAQQNAYNHAVDKINNIIGEDNATMDPQIIKQATQDINTAINGLKGDQKLQDAKTDAKQQITNFTGLTEPQKQALENIINQQTSRANVAKQLSHAKFLNGKMEELKVAVAKASLVRQNSNYINEDVSEKEAYEQAIAKGQEIINSENNPTISSTDINRTIQEINDAEQNLHGDNKLRQAQEIAKNEIQNLDGLNSAQITKLIQDIGRTTTKPAVTQKLEEAKAINQAMQQLKQSIADKDATLNSSNYLNEDSEKKLAYDNAVSQAEQLINQLNDPTMDISNIQAITQKVIQAKDSLHGANKLAQNQADSNLIINQSTNLNDKQKQALNDLINHAQTKQQVAEIIAQANKLNNEMGTLKTLVEEQSNVHQQSKYINEDPQVQNIYNDSIQKGREILNGTTDDVLNNNKIADAIQNIHLTKNDLHGDQKLQKAQQDATNELNYLTNLNNSQRQSEHDEINSAPSRTEVSNDLNHAKALNEAMRQLENEVALENSVKKLSDFINEDEAAQNEYSNALQKAKDIINGVPSSTLDKATIEDALLELQNARESLHGEQKLQEAKNQAVAEIDNLQALNPGQVLAEKTLVNQASTKPEVQEALQKAKELNEAMKALKTEINKKEQIKADSRYVNADSGLQANYNSALNYGSQIIATTQPPELNKDVINRATQTIKTAENNLNGQSKLAEAKSDGNQSIEHLQGLTQSQKDKQHDLINQAQTKQQVDDIVNNSKQLDNSMNQLQQIVNNDNTVKQNSDFINEDSSQQDAYNHAIQAAKDLITAHPTIMDKNQIDQAIENIKQALNDLHGSNKLSEDKKEASEQLQNLNSLTNGQKDTILNHIFSAPTRSQVGEKIASAKQLNNTMKALRDSIADNNEILQSSKYFNEDSEQQNAYNQAVNKAKNIINDQPTPVMANDEIQSVLNEVKQTKDNLHGDQKLANDKTDAQATLNALNYLNQAQRGNLETKVQNSNSRPEVQKVVQLANQLNDAMKKLDDALTGNDAIKQTSNYINEDTSQQVNFDEYTDRGKNIVAEQTNPNMSPTNINTIADKITEAKNDLHGVQKLKQAQQQSINTINQMTGLNQAQKEQLNQEIQQTQTRSEVHQVINKAQALNDSMNTLRQSITDEHEVKQTSNYINETVGNQTAYNNAVDRVKQIINQTSNPTMNPLEVERATSNVKISKDALHGERELNDNKNSKTFAVNHLDNLNQAQKEALTHEIEQATIVSQVNNIYNKAKALNNDMKKLKDIVAQQDNVRQSNNYINEDSTPQNMYNDTINHAQSIIDQVANPTMSHDEIENAINNIKHAINALDGEHKLQQAKENANLLINSLNDLNAPQRDAINRLVNEAQTREKVAEQLQSAQALNDAMKHLRNSIQNQSSVRQESKYINASDAKKEQYNHAVREVENIINEQHPTLDKEIIKQLTDGVNQANNDLNGVELLDADKQNAHQSIPTLMHLNQAQQNALNEKINNAVTRTEVAAIIGQAKLLDHAMENLEESIKDKEQVKQSSNYINEDSDVQETYDNAVDHVTEILNQTVNPTLSIEDIEHAINEVNQAKKQLRGKQKLYQTIDLADKELSKLDDLTSQQSSSISNQIYTAKTRTEVAQAIEKAKSLNHAMKALNKVYKNADKVLDSSRFINEDQPEKKAYQQAINHVDSIIHRQTNPEMDPTVINSITHELETAQNNLHGDQKLAHAQQDAANVINGLIHLNVAQREVMINTNTNATTREKVAKNLDNAQALDKAMETLQQVVAHKNNILNDSKYLNEDSKYQQQYDRVIADAEQLLNQTTNPTLEPYKVDIVKDNVLANEKILFGAEKLSYDKSNANDEIKHMNYLNNAQKQSIKDMISHAALRTEVKQLLQQAKILDEAMKSLEDKTQVVITDTTLPNYTEASEDKKEKVDQTVSHAQAIIDKINGSNVSLDQVRQALEQLTQASENLDGDQRVEEAKVHANQTIDQLTHLNSLQQQTAKESVKNATKLEEIATVSNNAQALNKVMGKLEQFINHADSVENSDNYRQADDDKIIAYDEALEHGQDIQKTNATQNETKQALQQLIYAETSLNGFERLNHARPRALEYIKSLEKINNAQKSALEDKVTQSHDLLELEHIVNEGTNLNDIMGELANAIVNNYAPTKASINYINADNLRKDNFTQAINNARDALNKTQGQNLDFNAIDTFKDDIFKTKDALNGIERLTAAKSKAEKLIDSLKFINKAQFTHANDEIINTNSIAQLSRIVNQAFDLNDAMKSLRDELNNQAFPVQASSNYINSDEDLKQQFDHALSNARKVLAKENGKNLDEKQIQGLKQVIEDTKDALNGIQRLSKAKAKAIQYVQSLSYINDAQRHIAENNIHNSDDLSSLANTLSKASDLDNAMKDLRDTIESNSTSVPNSVNYINADKNLQIEFDEALQQASATSSKTSENPATIEEVLGLSQAIYDTKNALNGEQRLATEKSKDLKLIKGLKDLNKAQLEDVTNKVNSANTLTELSQLTQSTLELNDKMKLLRDKLKTLVNPVKASLNYRNADYNLKRQFNKALKEAKGVLNKNSGTNVNINDIQHLLTQIDNAKDQLNGERRLKEHQQKSEVFIIKELDILNNAQKAAIINQIRASKDIKIINQIVDNAIELNDAMQGLKEHVAQLTATTKDNIEYLNADEDHKLQYDYAINLANNVLDKENGTNKDANIIIGMIQNMDDARALLNGIERLKDAQTKAHNDIKDTLKRQLDEIEHANATSNSKAQAKQMVNEEARKALSNINDATSNDLVNQAKDEGQSAIEHIHADELPKAKLDANQMIDQKVEDINHLISQNPNLSNEEKNKLISQINKLVNGIKNEIQQAINKQQIENATTKLDEVIETTKKLIIAKAEAKQMIKELSQKKRDAINNNTDLTPSQKAHALADIDKTEKDALQHIENSNSIDDINNNKEHAFNTLAHIIIWDTDQQPLVFELPELSLQNALVTSEVVVHRDETISLESIIGAMTLTDELKVNIVSLPNTDKVADHLTAKVKVILADGSYVTVNVPVKVVEKELQIAKKDAIKTIDVLVKQKIKDIDSNNELTSTQREDAKAEIERLKKQAIDKVNHSKSIKDIETVKRTDFEEIDQFDPKRFTLNKAKKDIITDVNTQIQNGFKEIETIKGLTSNEKTQFDKQLTALQKEFLEKVEHAHNLVELNQLQQEFNNRYKHILNQAHLLGEKHIAEHKLGYVVVNKTQQILNNQSASYFIKQWALDRIKQIQLETMNSIRGAHTVQDVHKALLQGIEQILKVNVSIINQSFNDSLHNFNYLHSKFDARLREKDVANHIVQTETFKEVLKGTGVEPGKINKETQQPKLHKNDNDSLFKHLVDNFGKTVGVITLTGLLSSFWLVLAKRRKKEEEEKQSIKNHHKDIRLSDTDKIDPIVITKRKIDKEEQIQNDDKHSIPVAKHKKSKEKQLSEEDIHSIPVVKRKQNSDNKDTKQKKVTSKKKKTPQSTKKVVKTKKRSKKXNISLT

SEQ ID NO: 70581 - protein, 1123 aa, Staphylococcus epidermidis
KNNNGKWTINNKPNYVEFNQDNGKVVFSANTIKPNSQITITPKAGQGNTENTNPTVIQAPAQHTLTINEIVKEQGQNVTNDDINNAVQVPNKNRVAIKQGNALPTNLAGGSTSHIPVVIYYSDGSSEEATETVRTKVNKTELINARRRLDEEISKENKTPSSIRNFDQAMNRAQSQINTAKSDADQVIGTEFATPQQVNSALSKVQAAQNKINEAKALLQNKADNSQLVRAKEQLQQSIQPAASTDGMTQDSTRNYKNKRQAAEQAIQHANSVINNGDATSQQINDAKNTVEQAQRDYVEAKSNLRADKSQLQSAYDTLNRDVLTNDKKPASVRRYNEAISNIRKELDTAKADASSTLRNTNPSVEQVRDALNKINTVQPKVNQAIALLQPKENNSELVQAKKRLQDAVNDIPQTQGMTQQTINNYNDKQREAERALTSAQRVIDNGDATTQEITSEKSKVEQAMQALTNAKSNLRADKNELQTAYNKLIENVSTNGKKPASIRQYETAKARIQNQINDAKNEAERILGNDNPQVSQVTQALNKIKAIQPKLTEAINMLQNKENNTELVNAKNRLENAVNDTDPTHGMTQETINNYNAKKREAQNEIQKANMIINNGDATAQDISSEKSKVEQVLQALQNAKNDLRADKRELQTAYNKLIQNVNTNGKKPSSIQNYKSARRNIENQYNTAKNEAHNVLENTNPTVNAVEDALRKINAIQPEVTKAINILQDKEDNSELVRAKEKLDQAINSQPSLNGMTQESINNYTTKRREAQNIASSADTIINNGDASIEQITENKIRVEEATNALNEAKQHLTADTTSLKTEVRKLSRRGDTNNKKPSSVSAYNNTIHSLQSEITQTENRANTIINKPIRSVEEVNNALHEVNQLNQRLTDTINLLQPLANKESLKEARNRLESKINETVQTDGMTQQSVENYKQAKIKAQNESSIAQTLINNGDASDQEVSTEIEKLNQKLSELTNSINHLTVNKEPLETAKNQLQANIDQKPSTDGMTQQSVQSYERKLQEAKDKINSINNVLANNPDVNAIRTNKVETEQINNELTQAKQGLTVDKQPLINAKTALQQSLDNQPSTTGMTEATIQNYNAKRQKAEQVIQNANKIIEN

SEQ ID NO: 70582 - protein, 181 aa, Staphylococcus epidermidis
RDKLQKFSIRKYAIGTFSTVIATLVFMGINTNHASADELNQNQKLIKQLNQTDDDDSNTHSQEIENNKQNSSGKTESLRSSTSQNQANARLSDQFKDTNETSQQLPTNVSDDSINQSHSEANMNNEPLKVDNSTMQAHSKIVSDSDGNASENKHHKLTENVLAESRASKNDKEKENLQEKD

SEQ ID NO: 70583 - protein, 316 aa, Staphylococcus epidermidis
MQRSDKRKMSLPMKILLWVVGILFLLAIIAVIYVSAKIFITGDKIHNPLNRNHSELRSGKVNLKNGDPFTIALFGVDSDEKRKQQGGGERSDTIMVLSINPKEKKTELVSIPRDTKAEIAGRGTEEKINHAYAYGGPNMAVKTIEKLMNVPIDHYATIDMDGLHDMIDTLGGVDVVSNSTFTMGANHFVKGEKTHVDGDAAMDFIRSRKEDGAGGDFGRQERQQLILEAMADKMTSASSITHFNTLMNQIQKNVKTDLKLGDLNTIRTKYKDANDQVNRHQLEGEGGIQNDGLYYFIPSDASKNENTQLLRDNLNL

SEQ ID NO: 70584 - protein, 112 aa, Staphylococcus epidermidis
MSDVSLKLSAKDIYEKDFEKTMARGYRREEVDAFLDDIITDYQKMADMNNEVVKLSEENHKLKKELEELRLRVATSRPQDNKNFSSNNSSSASNNVDILKRISNLEKAVFGK

SEQ ID NO: 70585 - protein, 350 aa, Staphylococcus epidermidis
MLGFSVYLGQNLDRDYILNMADLGYDVVFTSLQIPEEDKKNQMAYLGDLCQLLSAYQITYIIDVTPSLLNQTIYSYLNQLPHGDFYIRIDNQLNIDLIKDIISHGFKCCLNASTLTDSMLAHIYCTDFNNQLLYCHNYYPRPDTGLSISFIEEKNQLIRKYDAHAKICAFIPGTQKRGPLFKGLPTVEKHRFEHPLIAAQDLQLTGISDIIISDTLLSHIYAEQLSNMWLYRHFILHLDQLDSSFTSQVLKIHTSRLDSPEHVIRSQYSRTDNQQTVPMIGSAHRDQGDITIDNHLNGRYEGEIQVIKAPMPGHSHINCIGHVCDKDVPLLSLIQPGDTFKFVYTKENNK

SEQ ID NO: 70586 - protein, 743 aa, Staphylococcus epidermidis
MTENKGSSQPKKNNNGKSNGKKNRNVKRTIIKIIGFMIIAFFVLLLLGILLFAYYAWKAPAFSESKLDDPIPAKIYDKNGELVKTLDNGQRHEHVNIKDVPKDMKNAVLATEDNRFYQHGALDYKRLFGAIGKNLTGGFGSQGASTLTQQVVKDSFLTQQKSIGRKAQEAYLSYRLEQEYSKDEIFQVYMNKIYYSDGVTGIKAAAKYYFNKDMKDLNLAEEAYLAGLPQVPNLYNIYNNPKEANNRKDTVLYLMHKHNRINDKQYADAKKIDLKANLVERTKKERQVTGNEKNPEYDSYVNFVQSELMNNKYFKDKNLGSVLQSGIKIYTNMDKDVQQTLQDRINNGSFYKNEDQQVGATILDSKTGGLVAISGGRNYKNVVERNQATDPHPTGSSLKPFLAYGPAIENMKWSTNHAIQDESSYWVDGSQFKNYDTKGHGTVSIYDALRQSFNIPALKTWQQVKSQAGNDAPQKFASKLGLDYSGKIGPSEVLGGSSSEFSPTQLASAFAAIANGGTYNNAHSIQKVVTHEGDTIEYEHTSHKAMKDYTSYMLAEILKGTFKAYGSAYGHGVSGVNMGAKTGTGTYGQEIYEKYNLPDNAAKDVWINGFSPEYTMSVWMGFNKVKQYGTNSFIGHSEQDYPQYLYEDVMSSISSKDGEDFKKPNDVQGSSPDSLSVSGHSDNNTTNRSVHGSSDTSSSSNGGSNSASSGNNSNSSNGTSQGNSGNAFTRLFNLNSIFDYKVS

SEQ ID NO: 70587 - protein, 295 aa, Staphylococcus epidermidis
MNHLTTETRNIQTMHLDEMNLSDALKTMNQEDQLVPKAIEPVIPNLTKVIESAIQRFNNGGRIIYIGAGTSGRLGVLDAAECVPTFNVSPNDIIGIIAGGQKAMTVAIEGAEDDAEQGAQDLKNIHLQSKDIVVGISASGRTPYVKGALVYANKMNAETVALSCNVHSDISKNSNHVLEINVGPEVLTGSTRLKSGTAQKLVLNMISTMTMIGVGKVYDNLMVDLRPTNQKLIHRSIRIIQDVCDLNHQEAIELYEKSDHNIKIAIVMHLCSTTQQDARLRLKQNNGVIKQAINT

SEQ ID NO: 70588 - protein, 474 aa, Staphylococcus epidermidis
MSKEERLAKDITHALGGSQNISNIIHCMTRVRIKVHNDAKVNYDELKSINGVLGVVEDERIQVVVGPGIVNKVAKLMADQSGATLAEETTENQSYKSQAEKRAYEHKKQFQSQRKQSKWNKVLKSIANIFIPLIPAFIGAGLIGGIAAILSNLLTAGSISGQWIQQIVTVLNVIKDGMLFYLAIFTGINSAKVFGATPGLGGVIGGTTLLTGITDENPIKNIFTGEHLAAGQGGIIGVIFAVWLLSMVEKRLHKIIPNSIDIIVTPTITLLLIGLLTIFIIMPLAGFVSDGLVYVINWIIGVGGIFSGFIIGAFFLPLVMLGLHHIFTPIHIELINQTGSTYLLPIAAMAGAGQVGAAIALWVRCGKNKELRNTLKGALPVGFLGIGEPLIYGVTLPLGRPFFTACIGGGVGGAVIGGIGHIGATAVGPSGISLLPLIANNMYLGYIVGLLAAYAGGFIFTYFFGTTKEMRNPE

SEQ ID NO: 70589 - protein, 430 aa, Staphylococcus epidermidis
MKTTIKQAKKHLNQEVTIGAWLTNKRSSGKIAFLQLRDGTGFMQGVVVKSEVDEETFQLAKDITQESSLYITGTITEDNRSDLGYEMQVKSIEIVHEAHDYPITPKNHGTEFLMDHRHLWLRSKKQHAVMKIRNEIIRATYEFFNENGFTKIDPPILTASAPEGTSELFHTKYFDEDAFLSQSGQLYMEAAAMAHGRVFSFGPTFRAEKSKTRRHLIEFWMIEPEMAFTNHAESLEIQEQYVSHIVQSVLNHCQLELKALDRDTTKLEKVATPFPRISYDDAIEFLKKEGFDDIEWGEDFGAPHETAIANHYDLPVFITNYPTKIKPFYMQPNPDNEDTVLCADLIAPEGYGEIIGGSERINDLELLEQRINEHELDEESYSYYLDLRRYGSVPHSGFGLGLERTVAWISGVEHVRETSPFPRLLNRLYP

SEQ ID NO: 70590 - protein, 400 aa, Staphylococcus epidermidis
MSHEIFEQAKPILKKIQNKGFKAYFVGGSVRDYIMQRPIHDVDITTSATPDEIESIFDKTIPVGKEHGTINVVFQNDNYEITTFRSEDEYIDHRRPSEVYFVRDLYQDVQRRDFTMNAIAMDLNYRLYDYFNGQQDINNRVIRTVGVPSERFSEDALRIIRGLRFQSQLNFQIDSDTLHAMSSQISDIQYLSVERVVVELKKLIMGNNVKQSFEVMQNMKAFNYIPFFKSFEMSHLHIDEPITFELWIAILIVQQPKDIQLSTLKISNQEKATIKKWVTLIQTLPKIQSKQSLITLVYDYNLNDIEILLSLHHLLKQNGLTTANHLIINEISIREANEKLPIHCRKELAINGKDILNHTNKNSGPWLKDTLREIEIAVISNQIVNTKEEILEWVDAHVKI

SEQ ID NO: 70591 - protein, 380 aa, Staphylococcus epidermidis
MKIGITCYPSMGGSGIIATELGIKMAERGHEVHFITSNIPFRIRKPLPNMTFHQVEVNQYAVFQYPPYDITLSTKISDVIQEYDLDILHMHYAVPHAVCGILAKQMSGKNVKIMTTLHGTDITVLGYDHTLQNAIKFGIEQSDIVTSVSHSLAQQTYEIINTKKEIIPIYNFVRENEFPTRHNEELKDCYGISPEEKVLIHVSNFRKVKRIDTVIETFAKVHESIPSKLILLGDGPELIDMRHKARELDVETHVLFLGKQNDVSAFYQLSDLVLLLSEKESFGLTLLEAMKTGVLPIGSHAGGIKEVIRHEETGFIVDIGDSTQAAKYAIKLLSNPELYQKMQSQMLKDIEARFSSDLITDQYENYYRKMLEQGENNNES

SEQ ID NO: 70592 - protein, 529 aa, Staphylococcus epidermidis
MNAIKRFGSAMIVPVLMFAFFGIVLGFATLFKNPTIMGGLADQQTFWFKFWSVIESGGWVIFTHMEIVFVVGLPLSLAKKAPGHAALAALMGYLMFNTFINAILTQWPHTFGANLKKGVENTTGLKSIAGIETLDTNILGAIIISGIITWIHNRYYSKRLPEMLGVFQGLTFVVTISFFVMLPVAAITCVVWPTIQHGIASIQYFIVASGYIGVWLYHFLERVLIPTGLHHFIYAPIEVGPVVVNHGLKAEWLQHLNQFAESNKPLKEQFPYGFMLQGNGKVFGCLGIALAMYATTPKENRKKVAALLIPATLTAVVAGITEPLEFTFLFIAPFLFVLHALLAATMDTLMYGFGVVGNMGGGVLDFIATNWIPLGKAHWMTYVFQVVIGLIFVAIYYFLFKYLILKFDIPLPGRKKGEEEVKLFSKQDYKDKKGDSTRNHSPNSEYEEKAMYYLEGLGGKENIKDVTNCTTRLRLTVKDESKVQESAYFTHNQMSHGLVKSGKSVQVVVGMSVPQVREAFENIVNDDLS

SEQ ID NO: 70593 - protein, 357 aa, Staphylococcus epidermidis; identical to SEQ ID NO: 70512

SEQ ID NO: 70594 - protein, 388 aa, Staphylococcus epidermidis
MRYLTSGESHGPQLTVIIEGVPANLEIKAEDINKEMFKRQGGYGRGRRMKIEKDTIEIVSGVRNGFTLGSPITLVVTNDDFTHWRKIMGVAPISDEERENMKRTITKPRPGHADLIGGMKYNHRDLRNVLERSSARETAARVAVGAVSKILLEQLDIHLYSRVVEIGGIKDKGLYDVDMFKNNVDKNDVRVIDENIAQQMRDKIDEAKKDGDSIGGVVQVMAENMPIGVGSYVHYDRKLDGRIAQGVVSINAFKGVSFGEGFKAAEKPGSEIQDEIHYNQDSGYFRATNHLGGFEGGMSNGMPIIVNGVMKPIPTLYKPLNSVDINTKEDFKATIERSDSCAVPAASVVCEHVVAFELAKAVLEEFQSNHMDQLVAQIKERRQLNIEF

SEQ ID NO: 70595 - protein, 293 aa, Staphylococcus epidermidis
MSAQDPRNKFKTDNYEKQEQEVPGIQAKMSPQPDCGEDSYHGHHRLDGFKILVTGGDSAIGRAAAIAYAKEGADVAINYLPSEQQDADDVKQIIENVGQKAILIPGDIRDEQFNYDMVEKAYQQLGGLDNVTLVAGHQLYQDELSEFKTQDFTETFETNVYPVFWTVQKALEYLQPGGSITTTSSVQGYNPSPILHDYAATKAAIISLTKSFSAELGPKGIRVNCVAPGPFWSPLQIVGGQPQSAIPTFGQNTPLGRAGQPVECAGTYVLLASDDASYITGQVYGVTGGTQID

SEQ ID NO: 70596 - protein, 319 aa, Staphylococcus epidermidis
MAKLNINNEIKKVEKRLEEAIISSDQTLQEASFHLLSSGGKRVRPAFVILSGQFGSNNKPSEDTYRVAVALELIHMATLVHDDVIDKSDKRRGRLTISKKWDQSTAILTGNFLLAMGLKHLSEISDTRVHSTISKSIVDVCRGELFQFQDQFNSNQTITNYLRRINRKTALLIQLSTQVGAITSNASNDVIRKLKMIGHYIGMSFQIIDDVLDFTSSEKKLGKPVGSDLMNGHITLPVLLEMRKNKTFKDKISQLNPDSPQHAFETCITIIRQSESIEQSKQISEKYLNKAINLIDELEDGPNKELFRKLIKKMGSRNK

SEQ ID NO: 70597 - protein, 311 aa, Staphylococcus epidermidis
MYQLAQSNLWTGRLDSETDPTQFRHFQTVKFGDLSQLDFSDEHKGVGLLGYAIDKGVELNKGRVGAKEGPNAIKRAFAGLPDLNQCEEIIDYGNVEHNHELLIDTQREFADLAAKSIKRHKQTFLLGGGHDIAYAQYLATRKVYPESSIGVINIDAHFDTRDEGYSTSGTSFRQILEEDDNADYLVLGISQGGNTQALFNYAKEKDIQFVYADELLHQVSPPIKDMIERFIHNHDTVMFTICMDVVDSAFAPGVSAPAVLGIYPHTVFELAKRVIPSEKVKSISIAEMNPTYDSDQRTAKLVANLVHHCLI

SEQ ID NO: 70598 - protein, 241 aa, Staphylococcus epidermidis
MAENQAKKEQVHTVFQNISQKYDRLNNIISFEQHKVWRKHVMSTMNVQKGSKALDVCCGTADWTIALSEAVGSKGQVTGLDFSENMLEVGKQKTASLENIQLVHGDAMNLPFDDNSFDYVTIGFGLRNVPDYLSALKEMHRVLKPGGMVVCLETSQPTLPLFKQIYSLYFKFVMPIFGKMFAKSKEEYEWLQQSTFNFPDKQTLKGLFFEAGFNDIIVRSFTGGVAAMHLGYKENSSSKGD

SEQ ID NO: 70599 - protein, 382 aa, Staphylococcus epidermidis
MKNSRFSGFQWAMMVFVFFVITMALSVILRDFQATIGVKRFVFSIKDLAPFIAAIVCILVFKHRKEQLAGLKFSISLKVIERLLLALILPLIILMIGLFSFNTYADSFILLQTSDLSVSLLTILIGHILMAFVVEFGFRSYLQNILETRMNTFFASIVVGLIYSVFTANTTYGVEYAGYHFLYTFMFSMIIGELIRATNGRTIYIATAFHASMTFALVFLFSEETGDLFSMKVIALSTTIVGVSFIIISLIIRAIVYKTTKQSLDEVDPNNYLSHIQDEEPSQEDASSTSNHDVSSKDETKQQDIDNDKHQSKKPNKSDDALTTSNYKEDASSVNKETDTTHNDNIKDHSTYTEDRHSSVVNDVKDEIHEVEDHKADTDKSH

SEQ ID NO: 70600 - protein, 90 aa, Staphylococcus epidermidis; identical to SEQ ID NO: 44315

SEQ ID NO: 70601 - protein, 332 aa, Staphylococcus epidermidis
MRKITVFGMGSFGTALANVLAQNGHDVLMWGKNVENVDELNTHHMNKNYLKDAKLDSSIKATVDLNKAVQFSDIYLMALPTKAIREVSKDIDQLLTSKKTFIHVAKGIENDTFKRVSEMIEDSISSEHNGGIGVLSGPSHAEEVVIKQPTTVAASSKDNNVSKLIQDLFMNDYLRVYTNNDLVGVELGGALKNIIAIASGIVAGMGYGDNAKAALMTRGLAEISRLGEKLGADPMTFLGLGGIGDLIVTCTSTHSRNYTLGFKLGQGKTAEEALKEMKMVVEGIYTTKSVYHLAQQEGVEMPITNALYEVLFEDVPVSKSVRTLMERDKKAE

SEQ ID NO: 70602 - protein, 436 aa, Staphylococcus epidermidis
MTKPIVAIVGKPNVGKSTIFNRVVGERISIVEDTPGVTRDRIYSSGEWLTHEFNIIDTGGIEIGDAPFQTQIRAQAEIAIEEADVIIFMVNVREGLTQSDEMVAQMLYKSKKPVVLAVNKVDNLEMRNDIYDFYSLGFGDPYPISGSHGLGLGDLLDAVVENFNKESEDPYDEDTIRLSIIGRPNVGKSSLVNAILGEERVIVSNVAGTTRDAIDTEYSYDGQDYVLIDTAGMRKKGKVYESTEKYSVLRALKAIERSEVVLVVIDAEQGIIEQDKRVAGYAHEEGKAIVIVVNKWDTVEKDSKTMKKFTDDVRNEFQFLDYAQIAFVSAKEGLRLKTLFPYINQASENHKKRVQSSTLNEVVTDAISMNPTPTDKGRRLNVFYTTQVAIEPPTFVVFVNDVELMHFSYRRYLENQIRNAFGFEGTPIHIIPRKRN

SEQ ID NO: 70603 - protein, 392 aa, Staphylococcus epidermidis
MTEEFNESMINDIKEGDKVTGEVQQVEDKQVVVHINGGKFNGIIPISQLSTHHIENPSEVVKVGDEVEAYVTKIEFDEENDTGAYILSKRQLETEKSYEYLQEKLDNDEVIEAEVTEVVKGGLVVDVGQRGFVPASLISTDFIEDFSVFDGQTIRIKVEELDPENNRVILSRKAVEQLENDAKKASILDSLNEGDVIDGKVARLTNFGAFIDIGGVDGLVHVSELSHEHVQTPEEVVSVGEAVKVKVKSVEKDSERISLSIKDTLPTPFENIKGKFHEDDVIEGTVVRLANFGAFVEIAPSVQGLVHISEIDHKHIGSPNEVLEPGQQVNVKILGIDEDNERISLSIKATLPKENVIESDASTTQSYLEDDNDEDKPTLGDVFGDKFKDLKF

SEQ ID NO: 70604 - protein, 215 aa, Staphylococcus epidermidis
MSSINIALDGPAAAGKSTIAKRVASRLSMIYVDTGAMYRAITYKYLQNGKPENFDYLINNTKLELTYDEVKGQRILLDNQDVTDYLRENDVTHHVSYVASKEPVRSFAVKIQKELAAKKGIVMDGRDIGTVVLPDAELKVYMIASVAERAERRQKENEQRGIESNLEQLKEEIEARDHYDMNREISPLQKAEDAITLDTTGKSIEEVTNEILSLL

SEQ ID NO: 70605 - protein, 460 aa, Staphylococcus epidermidis
MSNNNFKDDFEKNRQSINPDEHQTELKEDDKTNENKKEADSQNSLSNNSNQQFPPRNAQRRKRRRETATNQSKQQDDKHQKNSDAKTTEGSLDDRYDEAQLQQQHDKSQQQNKTEKQSQDNRMKDGKDAAIVNGTSESPEHKSKSTQNRPGPKAQQQKRKSESTQSKPSTNKDKKAATGAGIAGAAGVAGAAETSKRHHNKKDKQDSKHSNHENDEKSVKNDDQKQSKKGKKAAVGAGAAAGVGAAGVAHHNNQNKHHNEEKNSNQNNQYNDQSEGKKKGGFMKILLPLIAAILILGAIAIFGGMALNNHNDSKSDDQKIANQSKKDSDKKDGAQSEDNKDKKSDSNKDKKSDSDKNADDDSDNSSSNPNATSTNNNDNVANNNSNYTNQNQQDNANQNSNNQQATQGQQSHTVYGQENLYRIAIQYYGEGTQANVDKIKRANGLSSNNIHNGQTLVIPQ

SEQ ID NO: 70606 - protein, 82 aa, Staphylococcus epidermidis
MAKYTIVDMDTCIACGACGAAAPDIYDYDDEGIAYVILDDNQGTAEVPEELYEDMEDALEGCPTDSIKIEDEPFDGDALKFE

SEQ ID NO: 70607 - protein, 242 aa, Staphylococcus epidermidis
MPVINIKNLNKKFGANEVLRDINLTVEKGEVVAIIGPSGSGKSTLLRCMNLLDVPSKGKVIFEDNELTQHNVHLDNLRQKMGMVFQNFNLFPHKKVIENVMLAPLLLHKDSKDQLKEKALYLLEKVGLKDKADSYPNQLSGGQKQRVAIARALAMEPDVMLFDEPTSALDPEVVGDVLKVMRQLANEGMTMVIVTHEMNFAKEISDKVVFMADGVVVESGTPQNIFENPQHSRTENFLSRVL

SEQ ID NO: 70608 - protein, 282 aa, Staphylococcus epidermidis
MKKRFLSICTMTIAALATTTMVNTSYAKTDTESHNHSSLGTENKNVLDINSSSHNIKPSQNKSYPSVILPNNNRHQIFNTTQGHYDAVSFIYIPIHGGYMSGSGVVVGENEILTNKHVVNGAKGNPRNISVHPSAKNENDYPNGKFVGQEIIPYPGNSDLAILRVSPNEHNQHIGQVVKPATISSNTDTRINENITVTGYPGDKPLATMWESVGKVVYIGGEELRYDLSTVGGNSGSPVFNGKNQVIGIHYGGVDNKYNSSVYINDFVQQFLRNNIPDINIQ

SEQ ID NO: 70609 - protein, 122 aa, Staphylococcus epidermidis
  MISC_FEATURE (106)..(106): X=any amino acid
MLSALIPSIHSYPAMPLARQLVHQRYVHPGPLVLRTAPLKFPTPTTDRDRTVSRRSEPSSRTALMGEQPNPWDRLQPQDAMSRHRGAKPPRRCELLGEISLLSPGXLLSVERWPFHAEPPDH

SEQ ID NO: 70610 - protein, 589 aa, Staphylococcus epidermidis
MMNRLNSVVIKLWLTIILIVATVLILLSVSLITFIQYYFTQETENAIKEDAKRISSLVEKSHNKTLAIQNSQTLIDGDGPGGLIIMKDMSEKPDSSYKDTKKQMFNEIKKSTKFKKVFKEGEYETQNITIKNKGNSQSYLLLGYPMKAQKGAQSHYSGVFIYKDLKSIEDTNNAITIIILITAIIFTIASTIFAFFLSNRITKPLRQLKTQAQKVSEGDYSQISTVATKDEIGDLSRAFNNMNVEIQEHIKAISSSKNIRDTLLNSMVEGVLGINNQREIILSNKMADDIMRHIDDFSKESIEQQIEATFESQQNEYLELEINTRYYVFISSYIDRIQTNGRSGIVMVIRDMTNEHNLDQMKKDFIANVSHELRTPISLLQGYTESIVDGIVTEPDEIRDSLAIVLDESKRLNRLVNELLNVARMDAEGLSVEKELQPIQHLLDKMESKYRMQSEELGLTMTFDSNNDEQLWNYDMDRMDQVLTNLIDNATRYTQAGDSIKISIDEDSDFNILTITDTGTGIAPEHLKQVFDRFYKVDAARKRGKQGTGLGLFICKMIIEEHGGRIDVESELGKGTSFIIRLPKSKQIS

SEQ ID NO: 70611 - protein, 208 aa, Staphylococcus epidermidis
  MISC_FEATURE (62)..(62): X=any amino acid
  MISC_FEATURE (67)..(67): X=any amino acid
  MISC_FEATURE (112)..(112): X=any amino acid
GSFRPVAGNLHLHRTMISPSLSLRQCPNRYAFRAGRNLPDKEFRYLRTVIVTAAVYWGFDSXLRRSXPLLLTFQHRAGVSPYTSPYGLAETCVFDKQSLGPIHCGSSGREPXRAPLLPKLRGHFAEFLNESSLAHLRILILTTCVGLRYGHLYLSRGFSRQCEINDSRKQFPLPITAQPYECRICLTLSLTAWTCTPTARFAYPTASP

SEQ ID NO: 70612 - protein, 129 aa, Staphylococcus epidermidis
  MISC_FEATURE (17)..(17): X=any amino acid
  MISC_FEATURE (102)..(102): X=any amino acid
  MISC_FEATURE (122)..(122): X=any amino acid
TCYPSPTPVGLSLGPDXPRADEPSSGNLSQSVDGILTRLFATHTGILTSKRSTCPCDHASTPLERSPTIVKGQSTASVICLAPVHFRRSVTRLVSYYALFKXWLLLSQHPSCLGNATSFSTXHIFWDLS

SEQ ID NO: 70613 - protein, 245 aa, Staphylococcus epidermidis
MSKEQERLQKRIANSGYTSRRKAEVLITEGRVKVNGQTVTELGSKVMPSDLVEVDGIKIEQEDKIYILFYKPTQVITSVSDDRGRRVVTDYFDDLESRIYPVGRLDYDTSGVLLLTNDGEFTNLMTHPRYHIKKKYVAKLKGYLMREEIKQLEKGIELEDGYTQPAQVKIKKQDKEKNTTLVEITISEGRNRQVRRMFEYFGHQVNKLTRIQFGPIDLKGLNAGEGRVLTPHEVKILRHLAENGK

SEQ ID NO: 70614 - protein, 57 aa, Staphylococcus epidermidis
MTSNHHAPYDLGYTRATMDNTKGSETARSSKSHKVVLSSDCSLQLDYMKLESLVIVD

SEQ ID NO: 70615 - protein, 295 aa, Staphylococcus epidermidis
MNTIIEEYLNFIQIEKGLSNNTIGAYRRDLKKYKDYLEDNKISHIDFIDRQIIQECLGHLIDMGQSSKSLARFISTIRSFHQFALREKYAAKDPTVLIETPKYEKKLPDVLEIDEVIALLETPDLTKNNGYRDRTMLELLYATGMRVTEIIQLDVEDVNLMMGFVRVFGKGNKERIVPLGDTVIEYLTTYIETVRPQLLKQTTTQALFLNMHGKSLSRQGIWKIIKQYGLKANINKTLTPHTLRHSFATHLLENGADLRAVQEMLGHSDISTTQLYTHVSKSQIRKMYTQFHPRA

SEQ ID NO: 70616 - protein, 429 aa, Staphylococcus epidermidis
MKFTESERLQQLSNEYILGGVNSPSRSYKAVGGGAPVVMKEGHGAYLYDVDGNKYIDYLQAYGPIITGHAHPHITEAIQDQAAKGVLYGTPTELEINFSKKLREAVPSLEKIRFVNSGTEAVMTTIRVARAYTKRNKIIKFAGSYHGHSDLVLVAAGSGPSQLGSPDSAGVPQSVAQEVITVPFNDIESYREAIDYWKDDIAAVLVEPIVGNFGMVMPQPGFLEEVNKISHDNGTLVIYDEVITAFRFHYGAAQDLLGVKPDLTAFGKIVGGGLPIGGYGGRQDIMEHVAPLGPAYQAGTMAGNPLSMRAGIALLEVLEQEGVYDKLDQLGRRLEEGLQKLIDKHHITATINRIYGSLTLYFTNEKVTHYEQVENSDGDAFAQFFKLMLNQGINLAPSKFEAWFLTTEHTEEDIDRTLEAADYAFSKMK

SEQ ID NO: 70617 - protein, 302 aa, Staphylococcus epidermidis
MQKNILKSGIEISELGLGCMSLGTDYKKAQPIIESAIDNGITYFDTADIYDQGVNEEIVGKALKKYQNRDDIVIGTKVGNRLTDDGHMTWDPSKKHIKESVKGSLKRLGLNHLDLYQLHGGTIDDPLDETISAFDELKQEGYIRAYGISSIRPNVIDYYLKNSQIETLMSQFNLIDNRPESLINDVHDKQVKILARGPVFKGLLTSKSVDVIDEKFKNGVLDYTQDELGSTIASIKELESNLTALSFKYLTSHDAMGSIIVGASSVEQLEENVRNYYKEISLDQIKSARNRVKDIEYTQHLK

SEQ ID NO: 70618 - protein, 578 aa, Staphylococcus epidermidis
MIKRYLKFVKPYRYRIIATIIVGIIKFGIPMLIPLLIKYAIDGVINNHSLTNQEKFSHLGVAIGIALFIFLIVRPPIEFIRQYLAQWTSNKILYDIRKQLYNHLQALSVRFYANNQVGQVISRVINDVEQTKDFILTGLMNIWLDCITIIIALSIMFFLDVKLTFAAIFIFPFYILTVYFFFGRLRKLTRVRSQALAEVQGFLHERVQGMSVIKSFAIEDNEAKNFDNHNKNFLQRAFQHTRWNAYSFAAINTVTDLGPIIVIGVGSYLAITGSITVGTLAAFVGYLEQLFGPLRRLVSSFTTLTQSFASMDRVFQLMDEDYDIKNGIGAQPIKISKGQIDLKHVSFKYNENEKEVLHDINLTINKGETVAFVGMSGGGKSTLINLIPRFYDVTQGEILIDHHNVKDFLTGSLRNQIGLVQQDNILFSDTVKENILLGRPDATDDEVVEAAKMANAHDFISNLPNGYDTEVGERGVKLSGGQKQRLSIARIFLNNPPVLILDEATSALDLESEAIIQEALDVLSKDRTTLIVAHRLSTITHADRIVVMENGRIVETGTHQQLINKRGAYEHLYSIQNL

SEQ ID NO: 70619 - protein, 494 aa, Staphylococcus epidermidis
MSTKQKHIPCLITIFGATGDLSHRKLFPSIFHLYQQDNLDEHIAIIGIGRRDYNNEQFRDQVKASIQTYVKDTDRIDEFMTHVFYHKTDVSDKESYQSLLQFSERLDSEFALGGNRLFYLAMAPQFFGVISDYLKSSGLTQTTGFKRLVIEKPFGSDLKSAESLNNQIRRSFKEEEIYRIDHYLGKDMVQNIEVLRFANAMFEPLWNNKYISNIQVTSSEVLGVEDRGGYYESSGALKDMVQNHMLQMVALLAMEAPISLNSEDIRAEKVKVLKSLRQLKPEEVKKNFVRGQYDQGNIDGKQVKSYREEDRVAKDSVTPTFVSGKLTIDNFRWAGVPFYIRTGKRMKSKTIQVVVEFKEVPMNLYYETDNLLDSNLLVINIQPNEGISLHLNAKKNIQGIDTEPVQLSYAMSAQDKMNTVDAYENLLFDCLKGDATNFTHWEELKSTWKFVDAIQDQWTMVEPCFPNYEAGTNGPLESDLLLSRDGNHWWDDIH

SEQ ID NO: 70620 - protein, 551 aa, Staphylococcus epidermidis
MKRNWWKEAVAYQVYPRSFNDSNGDGIGDLPGLIEKLDYLENLGIDVIWLSPMYPSPNDDNGYDISDYKGIMSEFGTMNDFDQLLSSIHQRGMKLILDLVVNHTSDEHPWFIESKSSKTNAKRDWYIWADPKPDGSEPNNWESIFNGSTWEFDESTKQYYFHLFSKKQPDLNWENPDVRQAVFEMMNWWFEKGIDGFRVDAITHIKKNFEAGDLPVPDGKKFAPAFDVDMNQPGIQEWLQEMKDKSLSRYDIMTVGEANGVTPNDAEEWVGEENGKFNMIFQFEHLGLWSTGDTKFDVKSYKQVLNRWQKQLENVGWNALFIENHDQPRRVSTWGDDKNYWYESATSHATAYFLQQGTPFIYQGQEIGMTNYPFESIESFNDVAVKTEYQIVKKEGGDVNQLLDKYKMENRDNARTPMQWNNSINAGFTTGKPWFHVNPNYTEINVKQQLNDKFSILSYYKALIQLKKSDLIYTYGKFNMVDAENKQVFAYTRTFKNNTVLIVANLTNEVSELNLPFELDISSVDIKLHNYHLNDINLDHIKPYESFVVEI

SEQ ID NO: 70621 - protein, 468 aa, Staphylococcus epidermidis
MTQQIGVVGLAVMGKNLAWNIESRGYSVSVYNRSRQKTDEMVKESPGREIYPTYSLEEFVESLEKPRKILLMVKAGPATDATIDGLLPLLDDDDILIDGGNTNYQDTIRRNKALAESSINFIGMGVSGGEIGALTGPSLMPGGQKDAYNKVSDILDAIAAKAQDGASCVTYIGPNGAGHYVKMVHNGIEYADMQLIAESYAMMKDLLGMSHKEISQTFKEWNAGELESYLIEITGDIFNKLDDDNEALVEKILDTAGQKGTGKWTSINALELGVPLTIITESVFARFISSIKEERVTASKSLKGPKAHFEGDKKTFLEKIRKALYMSKICSYAQGFAQMRKASEDNEWNLKLGELAMIWREGCIIRAQFLQKIKDAYDNNENLQNLLLDPYFKNIVMEYQDALREVVATSVYNGVPTPGFSASINYYDSYRSEDLPANLIQAQRDYFGAHTYERKDREGIFHTQWVEE

SEQ ID NO: 70622 - protein, 325 aa, Staphylococcus epidermidis
MLKLNPYKIGFRTVKTAVGMTLGVIICKLLSLDNYASSAILVVLCIKHTKMHSVQAILSRLVSCLLILFLGSAIFSLLGQHAFVLGLIVLLFIPLTVVLNVQEGVITSCVILLHVFNAKAINGHLILNEIMLLIVGLGIAFLMNLMMPSLDKKLNHFKQDIENQITEIFNIFSQACSMHNDHLNIKFDSLLLNIKKAKSLAFRDVKNHFVRNENSFYHYFDMREEQVELLKRMTSLLERINTDDPILEKISQLMYEIGSNVNSNDYTALRLHSLYEIRLSLDDLPLPTTHKTLNSRAHIIQILNELEEYLNIKSQFGSLKLHSEI

SEQ ID NO: 70623 - protein, 176 aa, Staphylococcus epidermidis
MANTNRKSKKMSDAKCIKTRQVYPQDTNHHHTMFGGTLMANIDEIAAITAMKHAGNPVVTASTDSVDFLRPITTGDILSYEAMVSYAGTSSMEICVQIVIDDVYKNERHLAALSFLTFVALDSDGKPTSVPDVEPETSVEKWFHETAPQRVARRKERRKESIDTIEYLSRVRHIEK

SEQ ID NO: 70624 - protein, 154 aa, Staphylococcus epidermidis
MIHVAFVCLGNICRSPMAEAIMRQRLQERGISDIKVHSRGTGRWNLGEPPHNGTQKILQKYHIPYDGMVSELFEPDDDFDYIIAMDQSNVDNIKQINPNLQGQLFKLLEFSNMEESDVPDPYYTNNFEGVFEMVQSSCDNLIDYIVKDANLKER

SEQ ID NO: 70625 - protein, 348 aa, Staphylococcus epidermidis
MNHYIRAIGSMLILVYSMLIAFLFIDKVFVNIIFFQGMFYTQIFGIPVFLFLNLLIVLLCIIVGSVLAYKINQQNDWIISQIERSIEGQTVGINDQNIELYTETIDIYHTLVPLNQELHRLRMKTQNLTNENYNINDVKVKKIIEDERQRLARELHDSVSQQLFAASMMLSAIKESKLEPPLNQQIPILEKMVQDSQLEMRALLLHLRPIGLKDKSLGEGIKDLVIDLQKKVPMKVVHEIQDFEVPKGIEDHLFRITQEAISNTLRHSNGTKVTVELFNQEDYLLLRIQDNGKGFNVDEKFEQSYGLKNMRERALEIGATFHIVSLPDSGTRIEVKAPLNKEENSSGD

SEQ ID NO: 70626 - protein, 241 aa, Staphylococcus epidermidis
MNELTVYHFMSDKLNLYSDIGNIMALKQRAKKRNIKINVKEINETEGVTFDDCDIFFIGGGSDREQALATKELSKIKTSLKNAIEDGMPGLTICGGYQFLGHKYITPDGTELEGLGVLDFYTESKKERLTGDIIIESDTFGTIVGFENHGGRTYHPYGTLGRVTYGYGNNDNDRKEGIHYKNLLGSYLHGPILPKNHEITDYLLEKACERKGILFEPKKIDNTEEEAAKQVLIKRAKENKK

SEQ ID NO: 70627 - protein, 253 aa, Staphylococcus epidermidis
IPKSTNYRWKNKTHKNDTVTQKVIELCKANHYTYGYRKITALINQCYTSPINHKRVQRMMQKHHLNCRVRPKKTTRIGKPYYKTDNLLQRQFKASCPMEVLTTDITYLPFGHSMLYLSSIMDIYNREIVAYKIDDKQDQSLVNDTLNQIDIPEGCILHSDQGSVYTSYAYYQLCEEKGIIRSMSRKGTPADNAPIESFHSSLKSETFYINNELNRSNHIVIDIVEKYIKNYNNNRIQQKLGYLSPVKYRELIA

SEQ ID NO: 70628 - protein, 326 aa, Staphylococcus epidermidis
MKENFWSTLPRPFFILAPMEDVTDIVFRHVVSEAARPDVFFTEFTNTESYCHPEGIHSVRGRLTFSDDEQPMVAHIWGDKPEQFREMSIGLADMGFKGIDLNMGCPVANVAKKGKGSGLILRPETAAEIIQASKAGGLPVSVKTRLGYYDIDEWRDWLKHVFEQDIANLSIHLRTRKEMSKVDAHWELIEAIKTLRDEIAPNTLLTINGDIPDRQTGLELANKYGIDGIMIGRGIFHNPFAFEKEPREHSSKELLGLLRLHLSLFEKYDKDEARHFKSLRRFFKIYVRGIRGASELRHQLMNTQSIAEARELLDTFEARMDARSEV

SEQ ID NO: 70629 - protein, 437 aa, Staphylococcus epidermidis
MRQWTATHMAKLARKASIAVGKKGTDLPGQIARRVDHNILRKLAKQVDDIVFISGTNGKTTTSNLIGHTLKKNQINIIHNNEGANMAAGITSAFIMQSSKNTNIAIIEIDEGSIPRVLNEVTPSMMVFTNFFRDQMDRFGEIDIMVDNIAKSISNKGIKLLLNADDPFVSRLKIASHSIVYYGMKKFAHDFEQSTMNESKYCPNCGRLLQYDYIHYNQIGHYHCECGFKREEPTYEVSSFDASPFLKMIINQSEFNMKIAGDFNSYNAIAAYTVLRELGLNDDAIRKGFETYTSDNGRMQYFSKNKKEAMINLAKNPAGMNASLSVGEQIDDKKIYVISLNDNAADGRDISWIYDADFEKLATQDIEAIIVSGTRAEELQLRLKLAEVEVPIKVEKDIYKATALTMKYSSFTVAIPNYTSLTPMLEQLNRSFEGGQS

SEQ ID NO: 70630 - protein, 316 aa, Staphylococcus epidermidis
MRKRARIIYNPTSGKELFKRVLPDALIKLEKAGYETSAYATEKIGDATFEAERALESEYDLLIAAGGDGTLNEVVNGIAEQPNRPKLGVIPMGTVNDFGRALHLPSDIMGAIDVIIDGHTTKVDIGKMNNRYFINLAAGGKLTQVSYETPSKLKSIVGPFAYYIKGFEMLPQMKAVDVRIEYDDNIFQGEALLFLLGLTNSMAGFEKLVPDAKLDDGYFTLIIVEKANLAELGHIMTLASRGEHTKHPKVIYAKAKSINISSFTDMQLNVDGEYGGKLPANFLNLEQHIEIFTPKDVFNEELLENDTITDITPDKQ

SEQ ID NO: 70631 - protein, 475 aa, Staphylococcus epidermidis
MHFETVIGLEVHVELKTDSKMFSPSPAHFGAEPNSNTNVIDLAYPGVLPVVNRRAVDWAMRASMALNMDIATNSKFDRKNYFYPDNPKAYQISQFDQPIGENGYIDIEVDGETKRIGITRLHMEEDAGKSTHKDGYSLVDLNRQGTPLIEIVSEPDIRSPKEAYAYLEKLRSIIQYTGVSDCKMEEGSLRCDANISLRPYGQKEFGTKTELKNLNSFNYVKKGLEYEEKRQEEELLNGGEIGQETRRFDESTGKTILMRVKEGSDDYRYFPEPDIVPLYVDEDWKARVRETIPELPDERKAKYVNDLGLPEYDAHVLTLTKEMSDFFEGAIDHGADVKLTSNWLMGGVNEYLNKNQVELKDTQLTPENLAGMIKLIEDGTMSSKIAKKVFPELAENGGDAKQIMEDKGLVQISDEATLLKFVTDALDNNPQSIEDYKNGKGKAMGFLVGQIMKASKGQANPQKVNSLLKQELDNR

SEQ ID NO: 70632 - protein, 485 aa, Staphylococcus epidermidis
MSIRFESIEKLTELIKNKEIKPSDVVKDIYAAIEETDPTIKSFLALDKENAIKKAEELDELQAKDQMDGKLFGIPMGIKDNIITKDVETTCASKMLEGFVPIYESTVMNKLHDENAVLIGKLNMDEFAMGGSTETSYFKKTLNPFDHTAVPGGSSGGSAAAVAAGLVPFSLGSDTGGSIRQPASYCGVVGMKPTYGRVSRFGLVAFASSLDQIGPITRNVKDNALVLEAISGVDANDSTSAPVDDVDFTSDIGKDIKGLKIALPKEYLGEGVSEEVKTSVKEAVETLKSLGAEVDEVSLPNTKYGIPSYYVIASSEASVNLARFDGIRYGYHSKEAQSLEELYKMSRSEGFGEEVKRRIFLGTFALSSGYYDAYYKKSQKVRTLIKNDFDKVFESYDVVVGPTAPTTAFNIGEEIDDPLTMYANDLLTTPVNLAGLPGISVPCGQSNGRPIGLQLIGKPFDEKTLYRVAYQFETQYNLHDAYENL

SEQ ID NO: 70633 - protein, 261 aa, Staphylococcus epidermidis
MRYLKKVTIYISLLILTIFIGGCGFINKEDSKETEIKQNFNKMLNVYPTKNLEDFYDKEGFRDEEFDKGDKGTWIIRSEMTKQPKGKIMTSRGMVLYINRNTRTAKGYFLIDEIKDDNSGRPIENEKKYPVKMNHNKIFPTKPISDDKLKKEIENFKFFVQYGDFKNLKDYKDGEISYNPNVPSYSAQYQLNNNDNNVKQLRKRYDIPTNQAPKLLLKGDGDLKGSSVGSKNLEFTFVENKEENIFFTDAVQFTPSEDDES

SEQ ID NO: 70634 - protein, 259 aa, Staphylococcus epidermidis
MKHSSKIIVFVSFLILTIFIGGCGFINKEDSKEAEIKQNFNKTLSMYPTKNLEDFYDKEGYRDEEFDKDDKGTWIINSKMIVEPKGEEMEARGMVLRINRNTRTAKGNFIIKRITENNKGIPDVKDKKYPVKMEHNKIIPTKQIKDKKLKKEIENFKFFVQYGNFKNLKDYKDGEISYNPNVPSYSAQYQLNNYDNNVKQLRKRYDIPTNQAPKLLLKGTGDLKGSSVGYKHLEFTFVENKKENIYFTDSINFNPSRGN

SEQ ID NO: 70635 - protein, 294 aa, Staphylococcus epidermidis
MLDSIMEFIKTFVMLFFELLTLFIIVSFIVSLIQQVVSEEKIKRFLSKPNQAISYVLGMVFGAMTPFCSCSTIPILAGLLNSKVPFGPAVSFLIASPLMNPLMIFMLWALLGWKVAIVYFIVLTIFSILTGFVFSKMNLAETYKGVNVKGDGFFANKTESRFKQALNDAWAFLYPMLPYLFIGVFIGAFIYGFVPETFITKYASGGGIISVFIASIIGIPMYIRPETMLPIAEALASKGMSLGTVVALIIGGAGASIPEVVLLSKLFKKKFVISFVIAILVVAISTGLMVNIVI

SEQ ID NO: 70636 - protein, 104 aa, Staphylococcus epidermidis
MNYSEISQYLKVMADSSRLEILDLLSCGELCACDLLQHFSFSQPTLSHHMKVLKDNNLITSRKDGNKNLYKLNHAVLDDITSRLTLLSSSTVPCICETVEKGEC

SEQ ID NO: 70637 - protein, 100 aa, Staphylococcus epidermidis
MTKVTREEVEHIANLARLQISPEETEEMANTLESILDFAKQNDSADTEGIEPTYHVLDLQNVLRDDKAIEGIPQELALKNAKETEDGQFKVPSIMNGEDA

SEQ ID NO: 70638 - protein, 665 aa, Staphylococcus epidermidis
MQGVKKRVEKLHDLLNQYSYEYYVQDNPSVPDSEYDKLLHELIEIEEKYPEFKSTDSPTVRVGGEAQSSFEKVNHDTPMLSLGNAFNEEDLRKFDQRIRDSIGKVEYMCELKIDGLAVSLKYENGRFVQGLTRGDGTTGEDITENLRTIHAIPLKIKEPLNFEVRGEAYMPRRSFIHLNNEKEQNGEQPFANPRNAAAGSLRQLDSKLAAKRKLSVFLYSVNDLTEFNATTQSEALEELDQLGFKTNQERERVSDIEGVLNYIEKWTSKRGSLSYDIDGIVIKVNDLSQQEEMGYTQKSPRWAIAYKFPAEEVITKLLDIELSIGRTGVVTPTAILEPVKVAGTTVSRASLHNEDLIHERDIRIGDSVVIKKAGDIIPEVVKSILDRRPNESEIYHMPTHCPSCGHELVRIEGEVALRCINPKCQAQLIEGLIHFVSRQAMNIDGLGTKIIHQLYENQLIKDVADIFYLKEEDLLPLERMGKKKVDNLLLAIEKSKEQSLEHLLFGLGIRHLGVKASQVLAERYETMDQLFKVTESELIEIQDIGDKLAQSVVTYLENSDIRSLIEKLSNKNVNMSYKGIKTTEIEGHPDFSGKTIVLTGKLEQMTRNEASEWLKMQGAKVTNSVTKSTDIVIAGADAGSKLAKAEKYGTEIWTEAAFIEKQNGI

SEQ ID NO: 70639 - protein, 729 aa, Staphylococcus epidermidis
MNALVKNMNSEQSEAVRTTEGPLLIMAGAGSGKTRVLTHRIAYLLDEKDVSPYNILAITFTNKAAKEMKARVEHLVGEEAQVIWMSTFHSMCVRILRRDADRIGIERNFTIIDPTDQKSVIKDVLKSENIDSKRFEPRMFIGAISNLKNELKTPEDAQKEANDFHSQMVATVYKGYQRQLSRNEALDFDDLIMTTINLFERVPETLEYYQNKFQYIHVDEYQDTNKAQYTLVKLLANKFKNLCVVGDSDQSIYGWRGADIQNILSFEEDYPEAKTIFLEQNYRSTKNILNAANEVIKHNSERKPKGLWTANSGGDKIQYYEAMTERDEAEYVVKEIMKHQRSGKKYSEMAILYRTNAQSRVLEETFMKSNIPYTMVGGQKFYDRKEIKDLLSYLRVIANSNDDISLQRIINVPKRGIGPSSVEKIQTYALQNNISMFDALAEVDFIGLSKKVTQECISFYEMIQNLIKEQEFLEISEIVDEVLQKSGYRDMLDREQSIESRSRLENLDEFMSVPKDYEENTPLEEQSLINFLTDLSLVADIDEADTQNGVTLMTMHSAKGLEFPIVFIMGMEESLFPHIRAIKSEDDHEMEEERRICYVAITRAEELLYITNATTRMLFGRSQSNMPSRFLKEIPEDLLDSHTGQKRQTIYPKSQPKRGFSKRTTSTKKQVSSSDWKVGDKVMHKAWGEGMVSNVNEKNGSVELDIIFKSEGPKRLLAQFAPITKKEDS

SEQ ID NO: 70640 - protein, 431 aa, Staphylococcus epidermidis
MIERYSRDEMSSIWTDQNRYEAWLEVEILACEAWSELGYIPKEDVKKIRENAKVNVERAKEIEQETRHDVVAFTRQVSETLGDERKWVHYGLTSTDVVDTALSYVIKQANEILEKDLERFIDVLAAKAKKYQYTLMMGRTHGVHAEPTTFGVKMALWYTEMKRNLKRFKEVRKEIEVGKMSGAVGTFANIPPEIEAYVCEHLGIDTAAVSTQTLQRDRHAYYIATLALIATSMEKFAVEIRNLQKTETREVEEAFAKGQKGSSAMPHKRNPIGSENITGISRVIRGYITTAYENIPLWHERDISHSSAERIMLPDVTIALDYALNRFTNIVDRLTVYEDNMRNNIDKTYGLIFSQRVLLALINKGMVREEAYDKVQPKAMESWETKTPFRELIEQDSSITDVLSSEELDDCFDPKHHLNQVDTIFARAGLS

SEQ ID NO: 70641 - protein, 275 aa, Staphylococcus epidermidis
MSRLQDVVVNEMKVKKQIDSVEEIQEIKQFIKAYVKSHSFIQTLVLGISGGQDSTLTGKLAQLAVNELKEEGRNCKFIAVKLPYGVQQDAHEVEDALEFINPDTTYTVNIKPAVDQSVQSLSEAGIKLTDFQKGNEKARERMKVQFSIASNTQGIVLGTDHSAENITGFYTKYGDGAADIAPIFGLNKRQGKQLLAYLGAPKHLYEKVPTADLEDDKPQLPDEEALGVSYHDIDDYLEGKEIPGTARETIEKHYVRNAHKRELAYTRYSWPKYNK

SEQ ID NO: 70642 - protein, 489 aa, Staphylococcus epidermidis
MYQYNDDSLMLHNDLYQINMAESYWNDGIHERIAVFDLYFRKMPFNSGYAVFNGLKRVVNFIENFGFTNEDITYLKSIGYEEDFLNYLKDLKFTGNIKSMQEGEICFGNEPLLRVEAPLIQAQLIETILLNIINFQTLIATKASRIRQIATHDTLMEFGTRRAQEIDAALWGARAAFIGGFDSTSNVRAGKLFNIPVSGTHAHALVQTYGDEYIAFKKYAERHKNCVFLVDTFHTLKSGVPTAIKVAKELGDTINFIGIRLDSGDIAYLSKEARRMLDEAGFTEAKIIASNDLDEQTITSLKAQGAKVDGWGVGTKLITGYDQPALGAVYKLVSIETDDGTMSDRIKLSNNAEKVTTPGKKNVYRIINNKTGKAEGDYITLEGENPNDESPLKMFHPVHTYKMKFIKSFKAVNLHQSIFENGKLVYHLPDEYEAQDYLKNNLSILWEENKRYLNPQDYPVDLSTKCWENKHKRIFEVAEHVKEMEDENE

SEQ ID NO: 70643 - protein, 184 aa, Staphylococcus epidermidis
MSNKALIIVDYSFDFIDDNGKLTCGKPGQEIETFITQRIKNYHNNQQEIFFLMDLHYENDKFHPESKLFPNHNIHQTPGRELYGEVGRLYNSIKDQMNVHYLDKTRYDSFYGTPLDSLLRERQINDIEIVGVCTDICILHTAVSAYNLGYNITIPIRGVASFNQDGHQWALSHFKNSLGAKVEE

SEQ ID NO: 70644 - protein, 309 aa, Staphylococcus epidermidis
MTKTFIFGHKNPDTDAISSALIMADFEQQTGNTEAKAYRLGEISAETQFALDHFNVEAPELLNEDLKGQDVILVDHNEFQQSADTISNATIKHVIDHHRISNFETAGPLYYRAEPVGCSATILYKMYKERGFEIKPEIAGLMISAIISDSLLFKSPTCTKEDVDAAQALKDIANVDLEAYGLEMLKAGASTTDKSAETLVNMDAKSFNMGDYVTRIAQVNTVDIDEVLDRKEEFEKVMLEMSANEKYDLFVLVVTDIINSDSKILVVGAEKDKVGEAFKVQLDDGMAFLSGVVSRKKQVVPQITEVLTQ

SEQ ID NO: 70645 - protein, 253 aa, Staphylococcus epidermidis
MRYLKKVTIYISLLILVSGCGNGKETEIKQNFNKMLDMYPTKNLEDFYDKEGYRDEEFDKKDKGTWIVGSTMTIEPKGKYMESRGMFLYINRNTRTTKGYYYVRKTTDDSKGRLKDDEKRYPVKMEHNKIIPTKPIPNDKLKKEIENFKFFVQYGDFKNLKDYKDGDISYNPNVPSYSAKYQLSNNDYNVKQLRKRYDIPTNQAPKLLLKGDGDLKGSSIGSKSLEFTFIENKEENIFFSDGVQFTPSEDSES

SEQ ID NO: 70646 - protein, 236 aa, Staphylococcus epidermidis
MNKDDGKETEIKQNFNKMLNVYPTKNLENFYDKEGYRDEEFDKDDKGTWIVHSKMVIEPKGKNMESRGMVLFINRNTRTSKGYFIVNEIEKDRKGRPINNKKKYPVKMKNNKIIPTKPISNDKLKKEIENFKFFVQYGNFKDIKNYKDGDISYNPNVPSYSAKYQLSNNEYNVQQLRKRYDIPTKKVPKLLLKGDGDLKGSSVGSKNLEFTFIENKEENIYFTDSVLFSPSEDNES

SEQ ID NO: 70647 - protein, 238 aa, Staphylococcus epidermidis
MVSGCGDSKETEIKQNFNKMLNVYPTKNLEDFYDKEGYRDEEFDKDDKGTWIIRSEMTKQPKGKIMTSKGMVLHMNRNTRSTTGYYVIRKISEDNKSEIDDEEKKYPIKMVNNKIIPTQKINDNKLKNEIENFKFFVQYGSFKNSDDYKEGDIEYNPNAPNYSAQYHLSNDDYNIKQLRKRYDIKTKKTPRLLMRGAGDPKGSSVGYKNLEFTFVKNNEENIYFTDSINFNPSKGKSL

SEQ ID NO: 70648 - protein, 260 aa, Staphylococcus epidermidis
MKHSKKLLLCISFLLITIFISGCGFINKDDSKETEIKKSFNKTLSMYPIKNLEDLYDKEGYRDEEFNKNDKGTWVITSSINIQQKGEGLKTRRMVLFMNRNTRTSKGKFMITEVKEKSDIGFQTRKKEYPVKLIDNKFIPSKQIKDEKIKKEIENFKFFSQYGNFKDLKDYKDGEVSYNPNAPNYSAKYQLSNNDYNVKQIRKRYDIPTEQAPKLLLKGTGDLKGSSTGSKNIEFTFVEKKGENIYFTDSVEYTPSGDDK

SEQ ID NO: 70649 - protein, 234 aa, Staphylococcus epidermidis
MTKEDNKEEKIKKGFEKTLGMYPIKNLEDLYDKEGYRDEEFDEGDKGTWILYSEMVIQRKGDDLVTRGMILKVNRNTRTSKGNYIINKISTDSKGVSRNTQKKFPVKMENNKIIPIKKIEDSKIKREIDEFKFFAQYANFNSLKDYKNGDIATNPKVPSYSAEYDLENSDYNVKQLRKRYDIPTQQAPKLLLKGTGDLKGSSIGSKDIEFTFIEKPKKNIYFSDSLDYKPSEGH

SEQ ID NO: 70650 - protein, 259 aa, Staphylococcus epidermidis
MKHSKKLLLCISFLLITFFISGCGFMNKDDSKETEIKKSFNKTLSMYPIKNLEDLYDKEGYRDEEFDKDDKGTWLLHSEMAIQRKGEDLETRGMVLKINRNTQTSKGDYITNKITYDNKGRPQSNKKKYPVKMENNKIIPIKKIEDSKINREINEFKFFAQYANFKELKDYKNGNISYNPNVPSYSAEYDLENTDYNVKQLRERYDIPTKQAPKLLLKGTGDLKGSSIGTKDVEFTFVKGKQENIYFSDSMNFMPSEDD

SEQ ID NO: 70651 - protein, 304 aa, Staphylococcus epidermidis
MNAIELKDVNYRSNAFQLQDVSFNVPKGYVTGFIGGNGAGKTTIIRLIMDLIQSESGTISVFEKDIKIHPREIKNKIGFVYSEIYFNQKWTVKKLENIIAPFYDRWDHEIFIKYLKFFQLPYKNKIKTFSTGMKMKLSLAIAFSHHAELFILDEPTSGLDPLIRNELLEIIQQELIDENKTVFFSTHIISDLEKIADYIVFLSEGEIIFNESRDKLSQKYKIVSGSNEDLDEELDELLIYKESKQTGYIGLTEYYQTFNELFGSGVEIKDASIEQLMIYLEKSKHKRNTNSKYKVRFNYEAIND

SEQ ID NO: 70652 - protein, 125 aa, Staphylococcus epidermidis
MKIILKNNSESPIYEQIKQQIKENVLKGYVSPGEHLPSMRELAKDLKVSLITTKRAYEDLEKDGFVTTIRGKGTFVKEQDNSILKEKQFFVIENLAHSMSKEAKTIGMPLEELIEILTMIYEEDD

SEQ ID NO: 70653 - protein, 539 aa, Staphylococcus epidermidis
MAKDLKFSEDARQAMLRGVDKLANAVKVTIGPKGRNVVLDKDYTTPLITNDGVTIAKEIELEDPYENMGAKLVQEVANKTNEIAGDGTTTATVLAQSMIQEGLKNVTSGANPVGLRQGIDKAVQVAIEALHEISQKVENKNEIAQVGAISAADEEIGRYISEAMDKVGNDGVITIEESNGFNTELEVVEGMQFDRGYQSPYMVTDSDKMIAELERPYILVTDKKISSFQDILPLLEQVVQASRPILIVADEVEGDALTNIVLNRMRGTFTAVAVKAPGFGDRRKAMLEDLAILTGAQVITDDLGLELKDASLDMLGTANKVEVTKDHTTVVDGNGDENNIDARVGQIKAQIEETDSEFDKEKLQERLAKLAGGVAVIKVGAASETELKERKLRIEDALNSTRAAVEEGIVAGGGTALVNIYQKVSEIKAEGDVETGVNIVLKALQAPVRQIAENAGLEGSIIVERLKHAEAGVGFNAATNEWVNMLEEGIVDPTKVTRSALQHAASVAAMFLTTEAVVASIPEPENNEQPGMGGMPGMM

SEQ ID NO: 70654 - protein, 518 aa, Staphylococcus epidermidis
MSTTEKQRQQQAELQKKLWSIANDLRGNMDASEFRNYILGLIFYRFLSEKTEEEVAELLKEDNISYAEAWEDEAYREALQQELINLIGFVIEPQDLFSHLIQKIETQTFEIEDLHKAINKIEESTRGEDSEEDFDHLFADMDLNSTRLGNTNAARTKLISKVMVNLATLPFVHSDIEIDMLGDAYEYLIGQFAANAGKKAGEFYTPQQVSKILAKIVTTNKPNLKNVYDPTCGSGSLLLRVGREADVRFYYGQEYNNTTFNLARMNMLLHDVNYTRFKIDNDDTLENPAFRGEKFDAVVANPPYSAKWSADPSFLDDERFSGYGKLAPKSKADFAFIQHMIHYLDDNGTMAVVLPHGVLFRGAAEGTIRKYLIEEKNHLDAVIGLPANLFFGTSIPTSILVFKKCREDSDNVLFIDASQSFEKGKNQNLLTDEDVDKIVETYRNRETIDKFSYVVSLDEIIENDYNLNIPRYVDTFEEEEPIDLDQVQQQLSDIDKEIANVESEINDYLKELGVLKHD

SEQ ID NO: 70655 - protein, 930 aa, Staphylococcus epidermidis
MVYQSEYALENEVLQQLENLGYERVNIHNVEQLHDNFRTIINERHKEKLNGKPLTDREFERLMTGINGKSVFDSAMQLRDSYVLKRDDDTDLYLNFMNLKQWCQNKFQVTNQISVKDKYKSRYDVTILINGLPLVQIELKRSGVAITEAFNQIERYRRQNYTGLFRYIQLFVVSNKMETRYYANSDREIFKGQMFYWSNEQNERINYLKDFIEDFLESCHISKMISRYMVVNETDKFLMALRPYQVYAVEAILNRALETNNNGYIWHTTGSGKTLTSFKASQLLSQEENIKKVIFLVDRKDLDNQTLAEFNKFQEDSVDFTDNTRKLLKQLADPTLPLIVTTIQKMANAVKSNHSVMESYKQDKVIFIIDECHRTQFGDMHRLIKQHFENAQYFGFTGTPRFEENKSQDGRATADIFDKCLHHYLIKDAIRDHNVLGFSVEYNQTFNSHEDLDEEYISKINTSEIWMADERIEAVCRHLISNYHKKTDNGNYTSMFAVQSIPMAIKYYDTFQRLKNEGVHDLNVATIFTYQANEDAQEDENHVHSREVLDRIMNDYNQTFKTNYNTDNFEGYFSDVSKRMKEVVRDDKIDILIVVNMFLTGFDSKKLNTLYVDKNLKHHDLIQAYSRTNRVEKERKPYGNIVCYRDLKKQTDEAIEIFSQTDNTDTVLSLSYEEYLDNFKDILQDVFQLAPTPLDVDKLEAEDLKKEFVISFRDLSNTLIKLKTFDEFQFTEDELGIAEQTYEDYKGKYLNIYEEVMRGKKVDGEEGVSVLDDIDFQVELMRNDLINVKYIMDLIGQINLSDAKARDEKRHQIHKLLDKADDQQLRLKADLIRSFLDKVVPSLKEDSDINEAYYEFEDKEKTKEIDAFAEQKAFSAMLLNEAVNEYEYSGNIDRKSIGQNISEPFMKRKRKTDQIIQFIEDTVEKYGVVE

SEQ ID NO: 70656 - protein, 673 aa, Staphylococcus epidermidis; identical to SEQ ID NO: 70213

SEQ ID NO: 70657 - protein, 906 aa, Staphylococcus epidermidis
MDNMLYINYDVIKRGCLMESTYKKRGKLTIYLGYSPGVGKTYEMLSNGIDQYQEGADIKIGYIEPHQRPETNALVQQLPEISTSSRKFGSHTFHYIDVSKIIEANPDVVLIDELAHTNISKERHLKRYKDIEEILSHGIDVWTTLNIQHIESLSGQIALMTGIQVTERVPDQFITSADAFEVVDISPNMLIQRLKAGKVYKKERLETAFSNFFTYENLTELRELTLRTVADIMSQKGQQYKTKHTDITPHIAVAISGSIYNERVIREARRAAYKEHAKFTAVYIDVFETPSESRKQDHYVHKNLMLAKALGAEIKVLYAQDIAKALTDWCDLAFVTKLVLGQSEQPRWKDYFKQSLIEQINHVPHHFKLEIVPIHYIHSDKPTNTPKQAQKSSRLTVEIMKMLVIQTICVLLGIWVYNLDKSESSAIILLMFFIGIIVLSIWTQSYLIGFFASILNVFVFNYFFTVPRFTLEMYRFEYPITFATSIFASIFTSAILKNLKHQHSLTERQLYRTNIMLQFNQSIKESYSIERLLNIAGDQIHQLLNQDVTVFLIQSKKVAASNSFGNRSISSSDKTHDAETLSWVIENESRAGKLTDTFPGSKFLCIPIGTNPVKGVISIRFTDETYIDTYDNSILDSMLNDITLAIENVDLLKQTRQSILKAEREATRSNFLHSISHDIRTPLTSIMGNLDMLKYHNEHLNDQQQAELLTASYGEAQYLHTLVTNILSLTKLESSDIQIQRTPYLVEELLEEFEEGLIRRHQANHVIIENEDDASLINIDSKLILQVLFNLIDNALKHAESHSEIKLHVQHETNKIKFEMIDCGKGIPEEERQLIFNPYYSGDNFKDNKKDSLGLGLYLVQLILKQHNSELEYQPNTPQGSIFYFYLTVNPIEMEGAMDENNIIGR

SEQ ID NO: 70658 - protein, 132 aa, Staphylococcus epidermidis
MKRVITYGTYDLLHYGHIELLRRAREMGDYLIVALSTDEFNQIKNKKSYYDYEQRKMMLESIRYVDLVIPEEGWGQKEKDVDRFDVDVFVMGHDWEGEFDFLKDKCEVIYLNRTEGISTTKIKQELYGKDTK

SEQ ID NO: 70659 - protein, 265 aa, Staphylococcus epidermidis
MSRLSGEQVKIGYGDSTIINNLDVAIPDGKVTSIIGPNGCGKSTLLKALSRLLSIKEGKINLDGKSIHATSTKEIAKKIAILPQSPEVPDGLTVGELVSYGRFPHQKGFGRLTAEDKKEIDWALSVTGTSEFRHRTINDLSGGQRQRVWIAMALAQRTDIIFLDEPTTYLDICHQLEILNLVKKLNEEEGCTIVMVLHDINQAIRFSDHLITMKAGDIVATGQTDEVLTKDILEKVFNIDGVLDIDPRTGKPILVTYDLFCQTYS

SEQ ID NO: 70660 - protein, 105 aa, Staphylococcus epidermidis
MKEINIVSLQMIKTDTLSYLKNRISNPEDAAEIMRSFIGNSDREHLILICMNSKNEPTHIQTLSIGSINQTVIHPREIFKTAILSNANSIMLGHNHPSGDVLTIV

SEQ ID NO: 70661 - protein, 336 aa, Staphylococcus epidermidis
MSYILIVTIAIVIFSLIFDFINGFHDTANAVATAVSTRALTPRRAILLAAVMNFIGALTFTGVAGTITKDIVDPFKLQHGLVVVLAAIIAAIIWNLITWLYGIPSSSSHALIGSIAGAAIASQGSFAVLHYQGFTKIIIVLIISPIIAFCVGYMMYTIVKIVFKNSNLTRTNRNFRFFQIFTAALQSFSHGTNDAQKSMGIITLALIVGNLQDGSNVEPQVWVKVACATAMGLGTAVGGWKIIKTVGGNIMKIRPANGAAADISSALTIFVASSLHFPLSTTHVVSSSILGVGASNRAKGVKWSTAQRMVVTWVITLPISAVLAAIIYFIIHLFLK

SEQ ID NO: 70662 - protein, 238 aa, Staphylococcus epidermidis
MGRKWNNIKEKKAQKDKNTSRIYAKFGKEIYVAAKSGEPNPESNQTLRLVLERAKTYSVPNHIIDRAIDKAKGAGDENYDHLRYEGFGPNGSMLIVDALTNNVNRTASDVRAAFGKNGGNMGVSGSVAYMFDHTATFGVEGKSVDEVLETLMEQDIDVRDVIDDNGLTIVYAEPDQFAQVQDALREAGVEEFKVAEFEMLPQTDIELSEEDQAIFEKLIDALEDLEDVQNVFHNVDLK

SEQ ID NO: 70663 - protein, 224 aa, Staphylococcus epidermidis
MITKEDIVADVVTDYPKSADIFRNAGIDFCCGGQESIASAVNHKPNIDLNSLLNKLNHIDNTEGNSTINPKFLNVESLIQYIQSAYHETLKEEFKNLTPYMTKLAKVHGPSHPYLLKLQDLYREFRDSMLDHIRKEDEEDFPKLIQYSQGQDVQNIKIILEDLINDHEDTGQLLNVMNQLTSDYQTPEEACGTWKLVYQRLQNIERQTHQHVHLENHVLFKKVS

SEQ ID NO: 70664 - protein, 402 aa, Staphylococcus epidermidis
MFTALLQIKNYKLFVVNMLLLGMGIAVTVPYLILFATKDLGMTTTQYGLLLALAAISQFIVNSIIARFSDTHHLNRKILIITALFMGAVSFSIYFYVHQIWLFIVLYALFQGLFAPAMPQLYASARESINASSSRDRAKFANTVLRSMFSLGFLFGPFIGAQLIELKGYSGLFGGTIAIILFTLILQVFFYKNLPVKNQISEQQHIEKIAPNMFKDKSLFIPFIAFILLHIGQWMYTMNMPLFVTDYLNEKERYVGYLASLCAGLEVPFMVILGILSAKLPTRTLLIIGSVFGGAFYFSIGVFKNFHMMLVGQICLAIFLAILLGLGISYFQDILPDFPGYASTLFANAMVIGQLGGNLLGGVMSHWVGLENVFFVSASSIFVGMILILFTKDQKITIEDVE

SEQ ID NO: 70665 - protein, 188 aa, Staphylococcus epidermidis
MKRIAVYCGASKGKNPSYVKEAYELGKYMAEQGYELVFGAGSVGIMGAIQDGILEHGGKAIGVMPKMLDEREITSQKVSELILVDSMHERKNKMTELADAFIMAPGGAGSLEEFFEMYSWAQIGIHQKPIGVFNLNGFFEPLQHLIDHMIKEGFIDEKYQKLAPLYDTKESLIEGLKHYKPLGVRTYD

SEQ ID NO: 70666 - protein, 387 aa, Staphylococcus epidermidis
MKKQLFILYFNIFLIFLGIGLVIPVLPVYLKDLGLKGSDLGMLVAAFALSQMIISPFGGTLADKLGKKLIICIGLVFFAVSEFMFAAGQSFTILIISRVLGGFSAGMVMPGVTGMIADISPGADKAKNFGYMSAIINSGFILGPGFGGFLAEISHRLPFYVAGTLGVVAFIMSVLLIHNPQKATTDGFHQYQPELFTKINWKVFITPVILTLVLAFGLSAFETLFSLYTADKVNYTPKDISIAIIGGGVFGALFQVFFFDKFMKYMSELNFIAWSLLYSAIVLVMLVLANGYWTIMIISFVVFIGFDMIRPALTNYFSNIAGKRQGFAGGLNSTFTSMGNFIGPLVAGALFDVNLEFPLYMAIAVSLSGIIIIFIEKGLKSRRKEAN

SEQ ID NO: 70667 - protein, 306 aa, Staphylococcus epidermidis
MIYTVTFNPSIDYIIFTDGFEISGLNRAKATYKFAGGKGINVSRVLKTLDVDSTALGFSGGFPGDFIAQTLEDSNIQSDFVQVDEDTRINVKLKSGQETEINAPGPKVTHAQFEQLLSQIRRTTNDDIVIVAGSVPNSIPSDAYAQIAQITEKTGAQLVVDAEKDLVETVLPYRPLFIKPNKDELEVMFNTTVKSDEDVIKYGKEILKKGAQSVIISLGGDGAIYVDQHQSIKAVNPQGHVVNTVGSGDSTVAGMVAGLSMGLNIDEAFQQAVASGTATAFSEDLATRDAIENIKSQVTISVLDGE

SEQ ID NO: 70668 - protein, 650 aa, Staphylococcus epidermidis
MRITELLTKETIAMDLDASDKSGVITELVNQLDKAGKLSDPVSFKEAIHNRESQSTTGIGEGIAIPHAKVAAVKTPAIAFGKSKEGVDYQSLDMQPAHLFFMIAAPEGGAQTHLDALAKLSGILMDEKIREKLIHAESPEEVLNIIDEADDEATKEEEAEANENATVSTDNSNQDNNEPYVLAVTACPTGIAHTYMARDALKKQAEKMNIKIKVETNGSSGIKNHLTEQDIERATGIIVAADVHVETDRFDGKNVVEVPVADGIKRPEELINTALDTNRKPFVAQGGSKKHDDNEEKLSPGKAFYKHLMNGVSNMLPLVISGGILMAIVFLFGANSFKPDSSEYNAFAEQLWNIGKNSAFALIIPILAGFIARSIADKPGFAAGLVGGMLAISGGSGFIGGIIAGFLAGYLTQGIKYITRKLPQAIEGLKPTLIYPLLSVSITGLLMVYVFNPPAAWLNHLLLNGLNSLSGSNIMLLGLVIGAMMAIDMGGPFNKAAYVFATAALTEGNAAPITAAMIGGMIPPLAIATAMLIFRRKFTKEQRGSIVPNYVMGLSFITEGAIPFAAADPLRVIPSMMVGSGVAGAIALGLGSSIKAPHGGIFVIIGTDFNHILQTLIALVVGTLVSALIYGFLKPKVTENEIQASQAMDE

SEQ ID NO: 70669 - protein, 390 aa, Staphylococcus epidermidis
MSEYVLTNGIVYTENEMINNGYVHIKDGKILDVGKCPFHPSSSHNTIDIIDVKKRHILPGFIDIHIHGGYGEDAMDASEQGLQHLAESLLSEGTTSFLATTMTQSTVNIERALQTIAKYTQQQDVTNAAEIVGVHLEGPFISEHKVGAQHPQFVQRPTVDKIKSFQEVANGLIKIITYAPEVDGATETLKTMKNDIIFSIGHTVATFDQANTAVSHGAKHITHLYNAATGFQHREPGVFGAAWLNQGLHTEMIVDGVHSHPASIALAYRLKGNQSCYLITDAMRAKGMPEGHYDLGGQDVIVKGSEARLSSGALAGSILKMNEGLKNLIQFTGDTIEHLWRVTSLNQAITLGIDDIKGSIKIGKDADIVIIDDACNVETTIKNGKYHAFK

SEQ ID NO: 70670 - protein, 449 aa, Staphylococcus epidermidis
METSTIISLAIFFLLIALTTVFVGSEFALVKVRSTRIEQLVDEGNKSAKIVKKMIDNLDYYLSACQLGITVTSLGLGWLGEPTFEKMMHPLFELLHLPSPLTTTISFVVSFIVVTYLHVVLGELAPKSFAIQHTEQLALLYSRPLFYFGNFMKPLIWLMNGSSRVIVRMFGFDPDAQTDAMSEEEIKIIINNSYNGGEINQTELAYMQNIFSFDERHAKDIMVPRTQMVTLNEPFNVDELLDTIKEHQFTRYPITEDGDKDHVKGFINVKEFLTEYASGKPIKIANYIHELPMISETTRISDALVRMQREHVHISLIIDEYGGTAGILTMEDILEEIVGEIRDEFDDDEVNDIVKLDDHTYQINGRVLLDDLNEKFGIEFEDSEDIDTIGGWLQSQNTNLQKDDFVDTEYDRWTITEIDNHQIIWVNLNYEFNSGRPSVNEEQEDDERD

SEQ ID NO: 70671 - protein, 139 aa, Staphylococcus epidermidis
MQQIYPSVTHPYQFELNKDFNFSAAHYIPFEEAGKCIRTHGHTYYVNLTIAGNTLDKCGFLVNFRDLKKLVHEQFDHYLLNDLPAFKDKSPSTEIVAQTIYHIIQKELNQRENQPKCVQVYLRETPSSYVVYRPKEDQV

SEQ ID NO: 70672 - protein, 729 aa, Staphylococcus epidermidis
MSKFIEPSNEEIKLEKLYQDMGLSDKEYDKVVEILGREPNFTEVGIFSVMWSEHCSYKHSKPFLKQFPTTGEHVLMGPGEGAGVVDIGDNQAVVFKVESHNHPSAIEPYQGAATGVGGIIRDIVSIGARPINLLNSLRFGELTVKQNQRLLKGVVSGIGGYGNCIGIPTTAGEIEFDERYDGNPLVNAMCVGIIDHDMVQKGTAKGVGNSVIYVGLKTGRDGIHGATFASEELTEESESKRPSVQIGDPFVGKKLMEATLEAITFDELVGIQDMGAAGLTSSSSEMAAKGGSGLHLRLDQVPTREPGISPYEMMLSETQERMLLVVEKGTEQKFLDLFNKHELDSAVIGEVTDTDRFVLTYDDEVYADIPVQPLADEAPVYILEGEEKEYNTSKNDYSNIDVHDTFIKLLQHPTIASKHHLYEQYDQQVGANTIIKPGLQASVVRVEGTQKAIASTIDGEARYVFNQPYEGGKMVVAEAYRNLIAVGATPLAMTDCLNYGSPEKKEIYQQLIDSTKGMSEACKVLQTPVVSGNVSLYNETRGTSIFPTPVVGMVGLIEDVSYLKEFKPKAGDKIYLVGETRDDFGGSQLEKLLYGSVNHEFESIDLSDEVSKGKLIKQAIRNGIASHVQTVGKGGLLVTLAKISAHYDLGMQAQLDVTNAQLFSETQGRYIVVVKEGQTLDIDQAQEIGHLTHQQLFDISNSDVKMKENVSDIKQKWEGAIVQCLTTQD

SEQ ID NO: 70673 - protein, 646 aa, Staphylococcus epidermidis
MSLPKKKIGIFAFFLLTVFTITLKTYFSYYVDFSLGVKGLVQNLILLMNPYSLIALVLSVFLFFKGKKAFWFIFIGGFLLTFLLYANVVYFRFFSDFLTFSTLNQAGNVESMGGAVSASFKWYDFVYFIDTIIYLAILIFKRKWLDNRAFSKKFVPVVMATSVALFFLNLAFAETDRPELLTRTFDHKYLVKYLGPYNFTVYDGVKTIENNQQKALASEDDLTKVLNYTKQKRTEPNPEYYGAAKKKNIIKIHLESFQTFLINKKVNGKEVTPFLNKLSSGNQDFTYFPNFFHQTGQGKTSDSEFTMDNSLYGLPQGSAYSLKGDNTYQSLPAILDQKQGYTSNVMHGDYKTFWNRDQVYKHFGIDNFYDATYYDMSDDNIVNLGLKDKPFFKASADYQSKMKKPFYSHLITLTNHYPFTLDEEDASIDKPNTGDSTVDGYIQTAHYLDQALEEYITDLKKKGLYDNSVIMIYGDHYGISENHNNAMEKLLGEKITPAKFTDLNRTGFWLKVPGKSGGVNKEYAGQMDVMPTLLHLVGIDSKNYLMFGSDMFSKQHNNVVPFRNGDFITEDYKYVNGKIYSNKDNELLTEKPKDFDKNKKQVEKDLEMSDSVLNGDLFRFYKNPDFKKVNPGKYEYKSGPKGNEKK

SEQ ID NO: 70674 - protein, 357 aa, Staphylococcus epidermidis; identical to SEQ ID NO: 70497

SEQ ID NO: 70675 - protein, 627 aa, Staphylococcus epidermidis
MEAYKIEHLNKSYADKEIFNDLNLSISEHERIGLVGINGTGKSTLLKVIGGLDEDFTADITHPNQYRIRYSSQKQDLNGHMTVFEAVLSSDTPTLRIIKKYEEAVNRYALDQSDSNFNKMMEAQEEMDQKDAWDYNAEIKTILSKLGIHDTTKKIVELSGGQQKRVVLAKTLIEQPDLLLLDEPTNHLDFESIRWLINYVKQYPHTVLFVTHDRYFLNEVSTRIIELDRGKLKTYPGNYEDYIVMRAENELVEQKQQEKQKALYKQELAWMRAGAKARTTKQQARINRFNQLESDVKTQHTQDKGELNLAYSRLGKQVYELKNLSKSINNKVLFEDVTEIIQSGRRIGIVGPNGAGKTTLLNILSNEDQDYEGELKIGQTVKVAYFKQTEKTLDRDIRVIDYLREESEMAKEKDGTSISVTQLLERFLFPSATHGKKVYKLSGGEQKRLYLLRLLVHKPNVLLLDEPTNDLDTETLTILEDYIDDFGGSVITVSHDRYFLNKVVQEYWFIHDGKIEKIIGSFEDYESFKKEHERQAMLSKQTEQQNKHKHQPKKKTGLSYKEKLEYETIMTRIEMTETRLEDLEQEMINASDNYARIKELNEEKEQLEATYEADITRWSELEEIKEQ

SEQ ID NO: 70676 - protein, 592 aa, Staphylococcus epidermidis
MQETLSHYFGYKSFRPGQEEIITKILNHQHTLGVLPTGGGKSICYQVPGLMQGGTTIVISPLISLMKDQVDQLQAMGIQAAYLNSSLTHKQQKEIEEQIKRGAIQFLYVAPERFENTFFLNLLRKIEIPLIAFDEAHCISKWGHDFRPSYQSVIQKVFTLPQNFTIVALTATATAEVQQDIMSKLSIGQNDVVKTSTKRRNLIFKVNPTYQRQKFVVDYVANHEGQAGIIYCSTRKQVEELHEALNSEKIKSTIYHAGLTNKERIEAQNDFLYDRVEVVIATNAFGMGIDKSNVRYVIHYNMPGDLESYYQEAGRAGRDGLKSECILLFSERDKGLHEYFITVSQADDDYKDKMGEKLTKMIQYTKTKKCLEATIVHYFEPNENLEECNQCSNCIQENKTYDMTREAKMIISCIARMKQQENYSVIIQVLRGEVTDYIKHHHYNELTTHGLMKNYTTSELSHLIDELRFKGYLNENDEILMCDTSVKQLLNNHTKVYTTPFKQKTKEKVFINTVEGVDRALYRELVDVRKQLSDKLGIAPVSIFSDYTLEEFAKRKPESKQEMIAIDGVGSYKLKHYCPKFIETIQSYKTRI

SEQ ID NO: 70677 - protein, 390 aa, Staphylococcus epidermidis
MKLATLNKGKETKYLNHYPLIDEEDLFEHDHLKEGDLITLVTEQQQYIATGYIGRQHKGLGWVLSYNQNEEINTLFFKRLFEAALEERQYYFNIEGTNAFRLFNAEGDGVGGLTIDNYNGHLLIQWYSKGIYKFRFPILEAIKEVYEYTSIFEKMRFKGTSYTGGFVEGNAPEFPIVVEENFTFYNVDLNDGLMTGIFLDQKEVRKKLRDQFSERRHVLNLFSYTGAFSVIAAENANSTTSVDLANRSRGLTEENFGLNGINPKSQYIYVMDTFDFYNYAGRHGHQYDTIVIDPPSFARNKKKTFSVQKDYNLLIEGALNILSPGGTLLLCTNSSAFSLKAFKNVIKKTLAQNNIVYEINEVMGLPKDFKTHPHYKPSKYLKAVFVTIKH

SEQ ID NO: 70678 - protein, 518 aa, Staphylococcus epidermidis
MCLLIYLLIRRKRHMNEFFATLSDRKGQLFSTIIEHIQLSFIALFIATLIAVPIAILLTKTKKLSEIVMNIAAVLQTIPSLALLGLMIPIFGIGRLPAIIALVVYALLPILRNTYTGIKEVDPSLIEAAKGIGMKPLRRLTKVELPIAMPVIMAGIRTAMVLIIGTATLAALIGAGGLGDLILLGIDRNNSALILIGAIPAALLAIIFDFILRYMERLSYKKLLISLGTIVIVIIIAIAIPMAAQKGDKITFAGKLGSEPSIITNMYKILIEEDTDDTVEVKDGMGKTSFLFNALKSDEIDGYLEFTGTVLGELTKEDLKSKKENDVYQQAKSSLEKKYDMTMLKPMKYNNTYALAVKRDFAKKYQIKTIGDLRKVEDKLKPGFTLEFNDRPDGYKAVKKTYHLNLSNVKTMEPKLRYTAVKKGDINLIDAYSTDAELKQYNMVVLKDDQHVFPPYQGAPLFKEKYLKDHPEVKKPLNKLANRITDEEMQEMNYKVTVKKEDPYKVAREYLEKEKLIK

SEQ ID NO: 70679 - protein, 88 aa, Staphylococcus epidermidis
MEQKSYVITDETGIHARPATMLVQTASKFDSDIQLEYNGKKVNLKSIMGVMSLGVGKDAEITIYADGSDETDAIQSITDVLSKEGLAE

SEQ ID NO: 70680 - protein, 572 aa, Staphylococcus epidermidis
MSKLIKGIAASDGVAIAKAYLIVEPDLSYDSNEKVTDIESEVEKFNDAIEASKIELTKIRNNAEAQLGADKAAIFDAHLLVLDDPELIQPIQDKIRNDKVNAATGLDEVTTQFISIFESMDNEYMKERAADIRDVSKRVLAHILGVDLPNPSLINESAVIVGNDLTPSDTAQLNKEFVQGFVTNIGGRTSHSAIMSRSLEIAAVVGTKSITEEVKQGDMIIVDGMSGDVIIDPTEDELIAYQNKRERFFEDKKELQKLRDADTVTVDGVHAELAANIGTPDDLSGVIDNGAQGIGLYRTEFLYMGRDQMPTEEEQFEAYKKVLETMDGKRVVVRTLDIGGDKELPYLDLPKEMNPFLGYRAIRLCLAQPEIFRPQLRALLRASVYGKLNIMFPMVATIKEFRDAKSMLLEEKENLLREGYEVSDDIELGIMVEIPATAALADVFAKEVDFFSIGTNDLIQYTLAADRMSERVSYLYQPYNPSILRLVKQVIEASHKEGKWTGMCGEMAGDQTAVPLLLGLGLDEFSMSATSILKARRQINGLSKNEMAELANRAVECSTQEEVVDLVNQLAK

SEQ ID NO: 70681 - protein, 869 aa, Staphylococcus epidermidis
MLSVTKKNTYESNKDEVTQMIDSLAEKGQEALKELSKKSQHEINDIVHQMSMAAVDQHMHLAKLAYDETGRGIYEDKAIKNLYASEYIWNSIKDNKTVGIIGEDKQKGLTYVAEPIGVICGVTPTTNPTSTTIFKAMIAIKTGNPIIFAFHPSAQQSSKYAAKVILEAATKAGAPKDCIQWIEVPSIEATKQLMNHKDIALVLATGGSGMVKSAYSTGKPALGVGPGNVPTYIEKTAHIKRAVNDIIGSKTFDNGMICASEQVMVVDKEVYTDVVKEFKLHQTYFVNKNELQQLEDAIMNEDKTAVKPDIVGKSAVDIAKLSGISVPEKTKLLVAEIDGIGKDYPLSREKLSPVLAMVTAKSTGHALQICEDILKFGGLGHTAVIHTEDSQLQQKFGLKMKACRVLVNTPSAVGGIGNMYNELIPSLTLGCGSYGRNSISHNVSAVDLLNIKTIAKRRNNMQWFKLPPKVYFEENSVMYLTEMDNVERVMIVCDPGMVNIGYTDIVEQVLRRRENQPQIKVFNEVEPNPSTHTVYKGLEMFINFQPNTIIALGGGSAMDAAKAIWMFFEHPETSFFGAKQKFLDIRKRTYKITKPKNAKFICIPTTSGTGSEVTPFAVITDSETHVKYPLADYALTPDIAIVDPQFVLSVPKDVAADTGMDVLTHAIESYVSVMASDYTRGLSLQAIKLTFDYLKSSVQENDKHSREKMHNASTMAGMAFANAFLGISHSIAHKIGGEYGIPHGRTNAILLPHVIRYNAKDPQKHALFPKYDFFRADTDYADIAKFLGLKGNTTEELVDALANAVYDLGCSVGIDMNLKSQGVTEELLHSTIDRMAELAFEDQCTTANPKEPLISELKGIIETAYDYER

SEQ ID NO: 70682 - protein, 78 aa, Staphylococcus epidermidis
MTDTVIIYTQDDCPPCAFIKNYLVNKNIKFTEKNIKNQKYKNEMMDYDAFATPFILLKGMPMYQVDMEKLNDELNITP

SEQ ID NO: 70683 - protein, 560 aa, Staphylococcus epidermidis
MKQLHSNEVGVYALGGLGEVGKNTYAVEYKDEIVIIDAGIKFPDDNLLGIDYVIPDYTYLEQNQDKIVGLFITHGHEDHIGGVPFLLKQINVPIYGGPLALGLIRNKLEEHHLLRTTELHEIDESSVIKSKHFEISFYLTTHSIPEAYGVIVDTPEGKIVHTGDFKFDFTPVGEPANIAKMAQLGHEGVLCLLSDSTNALVPDFTLSEREVGQNVDKIFRNCKGRIIFATFASNIYRVQQAVEAAIKYNRKIVTFGRSMENNIKIGMELGYIKAPPETFIEPNKINSVPKHELLILCTGSQGEPMAALSRIANGTHKQIKIIPEDTVVFSSSPIPGNTKSINRTINALYKAGADVIHSKISNIHTSGHGSQGDQQLMLRLIQPKYFLPIHGEYRMLKAHGETGVQCGVDEDNVFIFDIGDVLALTHDSARKAGRIPSGNVLVDGSGIGDIGNVVIRDRKLLSEEGLVIVVVSIDFNTNKLLSGPDIISRGFVYMRESGQLIYDAQRKIKGDVISKLNSNKDIQWHQIKSSIIETLHPYLYEKTARKPMILPVIMKVNEDK

SEQ ID NO: 70684 - protein, 139 aa, Staphylococcus epidermidis
MTKEGDSMKVVYYSFSGNVRRFISRAGIKDTFEITQDNCNESVNEPYILVTGTIGFGEVPQPVQSFLNVNHTQLQAVAASGNRNWGQNFAKAGHTISEEYKVPLMMKFEVQGTNKDIIEFKDKVGNFNENHGRKEIQSY

SEQ ID NO: 70685 - protein, 701 aa, Staphylococcus epidermidis
MKTMEEKKYNHIELNNEVTKRKDNGFFDLEKDQEALKVYLEEIHDKMISFDDEIERLHYLVDNNFYFNVFEKYSEAELIEITEYAKSIHFQFASYMSASKFYKDYALKTNDKTKFLEDYNQHVAIVALYLANGNVKQAKQFISAMVEQRYQPATPTFLNAGRARRGELVSCFLLEVDDSLNSINFIDSTAKQLSKIGGGVAINLSKLRARGEAIKGIKGVAKGVLPVAKALEGGFSYADQLGQRPGAGAVYLNIFHYDVEEFLDTKKVNADEDLRLSTISTGLIVPSKFFDLAKEGKDFYMFAPHTVKQEYGVTLDDIDLEKYYDDMVANPNIDKKKKDAREMLNMIAQTQLQSGYPYLMFKDNANKVHANSNIGQIKMSNLCTEIFQLQETSVINDYGIEDEIKRDISCNLGSLNIVNVMESGKFRDSVFTGMDALTVVSDEANIQNAPGVKKANSELHSVGLGVMNLHGYLAKNKIGYESEEAKDFANIFFMIMNYYSIERSMEIAKERGEKYQDFEQSDYANGKYFEFYTSQEFEPKFEKVRQLFDGIDIPTSNDWKELQNKVEQYGLYHAYRLAIAPTQSISYVQNATSSVMPIVDQIERRTYGNAETFYPMPFLSPETMWYYKSAFNTDQMKLIDLVATIQTHVDQGISTILYVNSEISTRELSRLYVYAHHKGLKSLYYTRNKLLSVEECTSCAI

SEQ ID NO: 70686 - protein, 322 aa, Staphylococcus epidermidis
MKAVNWNTQEDMTNMFWRQNISQMWVETEFKVSKDIASWKTLTDSEKNTFKKALAGLTGLDTHQADDGMPLIMLHTTDLRKKAVYSFMAMMEQIHAKSYSHIFTTLLPSSETNYLLDTWVIEEPHLKYKSDKIVENYHKLWGKEASIYDQYIARVSSVFLETFLFYSGFYYPLYLAGQGKMTTSGEIIRKILLDESIHGVFTGLDAQSLRNELSESEKQKADQEMYKLLNELYDNEVSYTHLLYDDIGLAEDVLNYVRYNGNKALSNLGFEPYFEEREFNPIIENALDTSTKNHDFFSVKGDGYTLALNVEPLRDEDFVFDN

SEQ ID NO: 70687 - protein, 370 aa, Staphylococcus epidermidis
MAPKLQAQFDAVKVLNETQSKFEMVQILDEDGNVVNEDLVPDLTDEQLVELMERMVWTRILDQRSISLNRQGRLGFYAPTAGQEASQLASQYALESEDFILPGYRDVPQIIWHGLPLTDAFLFSRGHFKGNQFPEGVNALSPQIIIGAQYIQTAGVAFGLKKRGKNAVAITYTGDGGSSQGDFYEGINFASAYKAPAIFVIQNNNYAISTPRSKQTAAETLAQKAISVGIPGIQVDGMDALAVYQATLEARERAVAGEGPTVIETLTYRYGPHTMAGDDPTRYRTSDEDAEWEKKDPLVRFRKYLEAKGLWNEDKENEVVERAKSEIKAAIKEADNTEKQTVTSLMDIMYEEMPQNLAEQYEIYKEKESK

SEQ ID NO: 70688 - protein, 324 aa, Staphylococcus epidermidis
MKFIFKGYTLFILLVILTIVSLFIGVSQLSLIDIFHLSDEQINILFSSRIPRTVSILLSGSSLALSGLIMQQMMQNKFVSPTTAGTMEWAKLGILMSLLFFPNGPILIKLLFAVVLSIVGTFLFVQLINLIRVKDVIFVPLLGIMIGGILSSFTTFVALRTNALQSIGNWLTGNFAVITSGRFEVLYLTIPLLILAFVFANHFTIAGMGKDFSHNLGVSYEKIIKIALFITATLTALVVVTVGTLPFLGLIVPNIISIYRGDHLKNALPHTLMLGAIFVLIADIIGRIIVYPYEINIGLTIGVFGTIIFLILLMKGRKNYANER

SEQ ID NO: 70689 - protein, 325 aa, Staphylococcus epidermidis
MAQMTMVQAINDALKSELKRDEDVLVFGEDVGVNGGVFRVTEGLQKEFGEDRVFDTPLAESGIGGLALGLAVTGFRPVMEIQFLGFVYEVFDEVAGQIARTRFRSGGTKPAPVTIRTPFGGGVHTPELHADNLEGILAQSPGLKVVIPSGPYDAKGLLISSIQSNDPVVYLEHMKLYRSFREEVPEEEYKIDIGKANVKKEGNDITLISYGAMVQESLKAAEELEKDGYSVEVIDLRTVQPIDIDTLVASVEKTGRAVVVQEAQRQAGVGAQVAAELAERAILSLEAPIARVAASDTIYPFTQAENVWLPNKKDIIEQAKATLEF

SEQ ID NO: 70690 - protein, 433 aa, Staphylococcus epidermidis
MAFEFRLPDIGEGIHEGEIVKWFIKAGDTIEEDDVLAEVQNDKSVVEIPSPVSGTVEEVLVDEGTVAVVGDVIVKIDAPDAEEMQFKGHGDDEDSKKEEKEQESPVQEEASSTQSQEKTEVDESKTVKAMPSVRKYARENGVNIKAVNGSGKNGRITKEDIDAYLNGGSSEEGSNTSAASESTSSDVVNASATQALPEGDFPETTEKIPAMRKAIAKAMVNSKHTAPHVTLMDEIDVQELWDHRKKFKEIAAEQGTKLTFLPYVVKALVSALKKYPALNTSFNEEAGEVVHKHYWNIGIAADTDKGLLVPVVKHADRKSIFEISDEINELAVKARDGKLTSEEMKGATCTISNIGSAGGQWFTPVINHPEVAILGIGRIAQKPIVKDGEIVAAPVLALSLSFDHRQIDGATGQNAMNHIKRLLNNPELLLMEG

SEQ ID NO: 70691 - protein, 468 aa, Staphylococcus epidermidis
MVVGDFPIETDTIVIGAGPGGYVAAIRAAQLGQKVTIVEKGNLGGVCLNVGCIPSKALLHASHRFVEAQNSENLGVIAESVSLNYQKVQEFKTSVVNKLTGGVEGLLKGNKVEIVRGEAYFVDNNSLRVMDEKSAQTYNFKHAIIATGSRPIEIPNFEFGKRVIDSTGALNLQEVPNKLVVVGGGYIGSELGTAFANFGSEVTILEGAKDILGGFEKQMTQPVKKGMKEKGIEIVTEAMAKSAEETENGVKVTYEAKGEEQTIEADYVLVTVGRRPNTDELGLEELGLKFADRGLLEVDKQSRTSIENIFAIGDIVPGLPLAHKASYEGKVAAEAIDGQAAEVDYIGMPAVCFTEPELAQVGYTEAQAKEEGLSIKASKFPYAANGRALSLDDTNGFVKLITLKEDDTLIGAQVVGTGASDIISELGLAIESGMNAEDIALTVHAHPTLGEMTMEAAEKAIGYPIHTM

SEQ ID NO: 70692 - protein, 104 aa, Staphylococcus epidermidis
MAKVYGSLIDNETRCTHYYSSLDVIAIKFKCCNKYYPCYKCHNEHVSHTIERWAENEFDEKAIMCGVCKHEMRIRDYMMVEMCPRCKAHFNSRCKFHYHLYFEV

SEQ ID NO: 70693 - protein, 306 aa, Staphylococcus epidermidis
MNKNDILRGLESILPKDIIKVDEPLKRYTYTETGGEADFYLSPTKNEEVQAIVKFAHENSIPVTYLGNGSNIIIREGGIRGIVLSLLSLNHIETSDDAIIAGSGAAIIDVSNVARDHVLTGLEFACGIPGSIGGAVFMNAGAYGGEVKDCIDYALCVNEKGDLLKLTTAELELDYRNSVVQQKHLVVLEAAFTLEPGKLDEIQAKMDDLTERRESKQPLEFPSCGSVFQRPPGHFAGKLIQDSNLQGYRIGGVEVSTKHAGFMVNVDNGTATDYEALIHHVQKIVKEKFDVELNTEVRIIGDHPTD

SEQ ID NO: 70694 - protein, 357 aa, Staphylococcus epidermidis
MKRFFQLIISAIVIGILCLMISHWFKSKDNTHSNEKLYVYNWGEYIDPSLIKKFKKETGIQVVYETFDSNEAMEAKIRNGGTHYDVAFPSEYTVQKLKKAKLLETLNHDKIPNIRNLDNDYMNLSYDPNNRYSIPYFFGTVGILYDKEKYPNETFDSWDDLYHSQFKNDILLVDGAREIIGMGLNKLGYSLNDKNPTHIHQAEKDLHNLAPQVRGIVGDEITMMLQQNEGHVAVVWSGVAAPLVQENTRYNYVIPKEGSNLWFDNMVIPKTAQNKEGAYKFMNFLLDAQNSAQNTEWVGYATPNKAARSKLPKKVRNDYRFYPSNQEQQRLEVYKDLGQTSLSEYNESFLNFKMSLK

SEQ ID NO: 70695 - protein, 376 aa, Staphylococcus epidermidis
MKVLVAMDEFNGIISSYQANRYVEEAVASQIEDADIVQVPLFNGRHELLDSVFLWQSGNKYRVSAHDADMKETEAIYGQTDSGMTIIEGHLFLNGKKPIQHRSSYGLGEVIKAALDNHTEHLVISLGGIGSFDGGAGMLQALGATFYDDEAQIVDMRKGAYLIKYIRRIDLSGVHPQLTKVNIQLMSDFSSRLYGKKSEIMQTYESLDLSQNEAAEIDNLIWYFSELFKNELKIAMGPIERGGAGGGIAAVLNSLYQAEILTSHELVNQITHLENLIQQADLIIFGEGLKEEDQILETTTIRIAELTQQYSKPAIAICATNDKFDLFESLNVTAMFNTFIDMPDSYTDFKMGIQIRHYTVQALKLLKTQINLPLSS

SEQ ID NO: 70696 - protein, 448 aa, Staphylococcus epidermidis
MNSNNNNHEQQRSLDEINNTINFNHNDSASQKFLAFLGPGLLVAVGYMDPGNWITSMQGGAQYGYTLLFIILISSLSAMLLQSMTVRLGIATGMDLAQMTRHFLNKPVAIMFWIIAELAIIATDIAEVIGSAIALDLIFGIPLIVGALITVFDVFLLLFIMKFGFRKIEAIVGTLIFTVLAIFVFEVYISSPQITDMLNGFVPHKEIITNQGILYIALGIIGATIMPHNLYLHSSIVQSRKYDRHSIHEKAQAIKYATIDSNIQLSIAFVVNCLLLTLGAALFFGTKTEDLGGFYDLYLALKTEPALGATLGGIMSTLFAVALLASGQNSTITGTLAGQIVMEGFLKLSIPNWLRRLITRSLAVIPVIICLIVFKGNTEKIEQLLVFSQVFLSIALPFSLIPLQLATSNQNLMGPFKNKTWINIISWLLIIVLSGLNVYLIIQTFQEL

SEQ ID NO: 70697 - protein, 412 aa, Staphylococcus epidermidis
MKKQIIERLTRYVKIDTQSNPDSKTTPSTNKQWDLLNLLEEELQSLGLKTDMDEHGYLFATLESNINYNVPTVGFLAHVDTSPDFNASHVNPQIIEAYNGQPIKLGESQRILDPDVFPELNKVVGHTLMVTDGTSLLGADDKAGVVEIMEGIKYLIDHPDIKHGTIRVGFTPDEEIGRGPHQFDVSRFNADFAYTMDGSQLGELQFESFNAAEVTVTCHGVNVHPGSAKNAMVNAISLGQQFNSLLPSHEVPERTEGYEGFYHLMNFTGNVEKATLQYIIRDHDKEQFELRKKRMMEIRDDINVHYNHFPIKVDVHDQYFNMAEKIEPLKHIIDIPKRVFEALDIVPNTEPIRGGTDGSQLSFMGLPTPNIFTGCGNFHGPFEYASIDVMEKAVHVVVGIAQEVANSHQSYK

SEQ ID NO: 70698 - protein, 615 aa, Staphylococcus epidermidis
MTNLREDVRNIAIIAHVDHGKTTLVDQLLKQSGIFRENEHVDERAMDSNDLERERGITILAKNTAIDYKGTRINILDTPGHADFGGEVERIMKMVDGVVLVVDAYEGTMPQTRFVLKKALEQNLKPVVVVNKIDKPAARPEGVVDEVLDLFIELEANDEQLDFPVVYASAVNGTASLDSEKQDENMQSLYETIIDYVPAPVDNSDEPLQFQIALLDYNDYVGRIGVGRVFRGKMRVGDNVSLIKLDGTVKNFRVTKIFGYFGLKREEIEEAQAGDLIAVSGMEDINVGETVTPHDHRDPLPVLRIDEPTLEMTFKVNNSPFAGREGDYVTARQIQERLDQQLETDVSLKVTPTDQPDSWVVAGRGELHLSILIENMRREGFELQVSKPQVILREIDGVLSEPFERVQCEVPSENAGAVIESLGARKGEMLDMMTTDNGLTRLIFMVPARGMIGYTTEFMSMTRGYGIINHTFEEFRPRVKAQIGGRRNGALISMDQGQATSYAIINLEDRGVNFMEPGTEVYEGMIVGEHNRENDLTVNITKAKHQTNVRSATKDQTQTMNRPRILTLEEALQFINDDELVEVTPESIRLRKKILNKSAREKEAKRVKQLMQDEQ

SEQ ID NO: 70699 - protein, 357 aa, Staphylococcus epidermidis
MNDLDHPQLIFESTGIYSRGMERFCCVNQINYIQMNPLEAKFKTSALRSWKTDQADAHKLACLGPTLKQTDSLPIHELIFFELRERVRFHLEIENEQNRLKFQILELLHQTFPGLERLFSSRYSIIALNIAEIFTHSDMVLDIDKEVLITHIFNSTDKGMSMDKATKYALQLRVIAQESYPNVDRHSFLVEKLRLLIQQLKQSIHHLKQLDDAMIQLAQQLDYFENIHSIPGIGKLSTAMIIGEIGDIKRFKSNKQLNAFVGIDIKRYQSGHTHCRDTINKRGNKKARKLLFWVIMNIIRGQHHYDNHVVDYYYKLRKQPNEKPHKTAIIACINRLLKTIHYLVMNHKLYDYQMSPH

SEQ ID NO: 70700 - protein, 91 aa, Staphylococcus epidermidis
MSNQSKLNSAAYDQLNKDADRILHLIKVQMDNLTLPSCPLYEEVLDTQMFGLQKEVDFAVQLGLVDKEDGKQLMLRLEKELSKLHEAFTNV

SEQ ID NO: 70701 - protein, 407 aa, Staphylococcus epidermidis
MKNFKNIMRYIGKTSKFIDYPLLITYVVLCLIGLVMVYSASMVAATKGTLTGGVPVSGTYFYNRQLLYVIMSFVIVFFMAFIMNVKVLKKPNVQKGMMIGIFILLLLTLVIGKNINGSKSWINLGFMNLQASELLKISIILYIPFMIEKKMPAVRHNIKLILGPILFVVTCLILVLFQKDVGQTMLIVIIFFSIIFYSGIGVQNMLKWGALVAIGFIIVATFMFMLDMVPSYLQARFSTLTNPFSQESGTGYHISNSLLAIGNGGLFGRGLGNSIMKLGYLPEPHTDFIFAIICEEMGLIGGLIVLILEYFIVYRAFQLANKTQSYFYKLVCVGIASYIGSQTFVNIGGISATIPLTGVPLPFISFGGSSMISLSIAMGLLLITAKQIKQDDKRLKQRKVDIKRRYN

SEQ ID NO: 70702 - protein, 611 aa, Staphylococcus epidermidis
ITDTTFRDAHQSLLATRVRTKDMMNIASKTAEVFKDSFSLEMWGGATFDVAYNFLKENPWERLERLRKAIPNVLFQMLLRASNAVGYKNYPDNVIKKFVHESAKAGVDVFRIFDSLNWVDQMKVANEAVQEAGMVSEGTICYTGDILNAERSNIYTLDYYVKMAKELEREGFHILAIKDMAGLLKPKAAYELIGELREATHLPIHLHTHDTSGNGLLTYKQAIDAGVDIIDTAVASMSGLTSQPSANSLYYALNGFPRNLRTDIDGLEELSHYWSVVRPYYADFESDIKSPNTEIYQHEMPGGQYSNLSQQAKSLGLGERFDEVKEMYRRVNFLFGDLVKVTPSSKVVGDMALYMVQNDLDEDTVINDGYKLDFPESVVSFFKGDIGQPVNGFNKKLQDVILKGQQPITERPGEYLEPVDFEAIRQELSDIQQDEVTEQDIISYVLYPKVYKQYIQTKEQFGNVSLLDTPTFLFGMRNGETVEIEIDTGKRLIIKLETISEPDENGKRTIYYAMNGQARRIYIQDENVKTNANVKPKADKSNPNHIGAQMPGSVTEVKVSVGDEVQANQPLLITEAMKMETTIQAPFDGIIKQINVANGDAIATGDLLVEI

SEQ ID NO: 70703 - protein, 349 aa, Staphylococcus epidermidis; identical to SEQ ID NO: 70462

SEQ ID NO: 70704 - protein, 246 aa, Staphylococcus epidermidis
MEQITSAQNSKIKNANKLKKKRERDKTGLALIEGIHLIEEAYQSQIEVIQLFIVDPDRMSSSIVDYAKEVYQINLKVAEALSGTVTPQGFFAIIKKPTYDKTQAKQVLLIDRIQDPGNLGTLIRTADAAGLDLIVMEKGTADPFQDKVIRASQGSIFHIPVIFDDIYNYIHQFNGPVYGTALENAVSFNDVEAQANFALVLGNEGEGVNPDLLKETTQNLTIPIYGKAESLNVAIAGSILMYQLKG

SEQ ID NO: 70705 - protein, 352 aa, Staphylococcus epidermidis
MTQNDLMSELKQQALVDINEANDAQALQEVKVKYLGKKGSVSALMKNMKDLPNEEKPAYGQKVNELRQTIQSELDERQKLIKEEKLNQQLSEETIDVTLPSRHIEIGSKHPLTRTVEEIEDLFLGLGYEIVDGYEVEQDYYNFEALNLPKSHPARDMQDSFYITEEILMRTHTSPVQARTMEKRKGQGPVKIICPGKVYRRDSDDATHSHQFTQIEGLVVDKNIKMSDLKGTLELVAKKLFGADREIRLRPSYFPFTEPSVEVDVSCFKCKGQGCNVCKHTGWIEILGAGMVHPNVLEMAGFDSKEYSGFAFGMGPDRIAMLKYGIEDIRHFYTNDVRFLDQFKAVEDRGEQ

SEQ ID NO: 70706 - protein, 800 aa, Staphylococcus epidermidis
MLISNEWLKDYVNVDQSVQALAERITRTGIEVDDIIDYTKDIKKLVVGHVLSKTPHPNADKLNICQVDLGEEEPVQIVCGAPNVDEGQHVIVAKVGGRLPGGVKIKRAKLRGERSEGMICSLQEIGISSHVTPKNYESGIYVFPEAVKPGTDALEALYLNDQVMEFDLTPNRADALSMIGTAYEVAALYQTKMNKPQLTSNESQESAKDELTIEVKNEDKVPYYSARVVHDVTIGPSPVWMQFRLIKAGIRPINNVVDISNYVLLEYGQPLHMFDQEQIGSQSIEVRQAKKDETMRTLDGEERRLLDTDIVITNGKDPIALGGVMGGDFSEVTEQTRHVVVEGAIFDPVSIRHTSRRLNLRSESSSRFEKGIATEFVDEAVDRACYLLETYASATVLKDRISYGDLGSFVTPIKITADKVNRTIGFNLTDEEIIDIFEQLGFKTENKNGDIIVNVPSRRKDISIKEDLIEEVARIYGYDDIPSTLPVFKDVTSGELTDRQFKTRTVKETLEGAGLDQAITYSLVSKNHATDFALQNRSTIELLMPMSEAHSTLRQSLLPHLIDAVSYNVARKNTNVKLYEIGRVFFGNGEGELPDEVEYLSGILTGDFVNNKWQGKKEPVDFYLTKGIVERVAEKLNLQFDFRAGQIDGLHPGRTAIVSLNGKDIGFIGELHPTLAANNDLKRTYVFELNYDAMMEVSVGYINYEPIPRFPGVTRDIALEVNHEVTSSELLSIIHENGEDILNDTLVFDVYEGEHLEKGKKSIAIRLSYLDTENTLTDERVNAVHDKILEALKKHGAIIR

SEQ ID NO: 70707 - protein, 782 aa, Staphylococcus epidermidis
MRQKTLDVLEFEKIKSFVADETISDLGREKVQEMAPASNFDTVEFQMNETDEISQIYNKHRLPSLSGLAKVSPLVHRASIGGVLNVAELNRIKRLVQVQNQFKTFYNQMLEEDEEVKYPILHDKMNHLPILTDLFKEINETCDAHDLFDHASYTLQSIRSKISRTNQRIRQNLDRIVKNQGNQKKLSDAIVTVRNDRNVIPVKAEYRQDFNGIVHDQSASGQTLYIEPNSVVEMNNQISRLRNDEAVERERILTELTGFVSAEADALLIAESVMGQIDFLIAKARYARTIKGTKPTFKEDRTIYLPNAFHPLLDKDTVVANTIEFIDDVETVIITGPNTGGKTVTLKTLGLIIVMAQSGLLIPTLDGSQLSIFENVYCDIGDEQSIEQSLSTFSSHMKNIVEILQDADQNSLILFDELGAGTDPSEGAALAMSILDYVRRLGSLVMATTHYPELKAYSYNREGVMNASVEFDVETLSPTYKLLMGVPGRSNAFDISKKLGLSLNIINKAKTMIGTDEQEINAMIESLEQNSKRVDQQRIELDRLVREAQQTHDALSKQYQQYQNYETSLMDEAKEKANQRVKSATKEADEILKELRNLRDHKGAEVKEHELIDKKKQLDDQYEVKSIKQHVQKKKYDTIHTGDEVKVLSYGQKGEVLELVGDEEAVVQMGIIKMKLPIEDLEKTKKKKEKPTKMVTRQNRQTIKTELDLRGYRYEEALNELDQYLDQAVLSNYEQVYIIHGKGTGALQKGVQQHLKKHKSVRQFRGGMPSEGGFGVTVAELK

SEQ ID NO: 70708 - protein, 267 aa, Staphylococcus epidermidis
MNKPIGVIDSGVGGLTVAKEIMRQLPNETIYYLGDIARCPYGPRPGEEVKKFTTELAQKLMEFDIKMLVIACNTATAVALDYLQNILPIPVIGVIEPGARTAIMTTKNQNVLVLGTEGTIKSEAYRTHIKKINPNVNVYSVACPGFVPLVEQMRYKDPTITNIVIHQTLKQWRNSDADTVILGCTHYPLLYQPIYEYFSGTKTVISSGLETAREVSALLTFSNEHASYTEHPQHRFFATGDTTHIKNIIDEWLNMKVEVKRITVNDS

SEQ ID NO: 70709 - protein, 195 aa, Staphylococcus epidermidis
MEDIVIATNNQGKINDFKAIFKNQNVIGISELIEDFDVEETGATFEENAKLKSEAAAHALNKRVIADDSGLEVFALNGEPGVYSARYAGLGKNDEDNIEKLLTNLEDVQDRRAQFVCVISMSAPNEKTKTFKGTVSGVITTERHGKNGFGYDPIFFVPELNKTMAEITNDEKGKISHRGNAILLLKEYLEGEQHV

SEQ ID NO: 70710 - protein, 145 aa, Staphylococcus epidermidis
MDLNFDLYMNDVVEQARNEIEHAGYHQLTSAEDVDQVLQQKGTSLVMVNSVCGCAGGIARPAAAHALHYDKLPQRLVTVFAGQDKEATQQAREYFEGYAPSSPSFALIKDGKITEMIERHQIEGHDVMDVINQLQALFDKYCEER

SEQ ID NO: 70711 - protein, 439 aa, Staphylococcus epidermidis
MDIKMPKLGESVHEGTIEQWLVSVGDHVDEYEPLCEVITDKVTAEVPSTISGTITELVVEEGQTVNINTVICKIDSENGQNQTESANEFKEEQNQHSQSNINVSQFENNPKTHESEVHTASSRANNNGRFSPVVFKLASEHDIDLTQVKGTGFEGRVTKKDIQNIINNPNDQEKEKEFKQTDKKDHSTNHCDFLHQSSTKNEHSPLSNERVVPVKGIRKAIAQNMVTSVSEIPHGWMMVEADATNLVQTRNYHKAQFKQNEGYNLTFFAFFVKAVAEALKVNPLLNSTWQGDEIVIHKDINISIAVADDDKLYVPVIKNADEKSIKGIAREINDLATKARLGKLAQSDMQNGTFTVNNTGSFGSVSSMGIINHPQAAILQVESVVKKPVVIDDMIAIRNMVNLCISIDHRILDGVQTGKFMNLVKKKIEQYSIENTSIY

SEQ ID NO: 70712 - protein, 327 aa, Staphylococcus epidermidis
MTKLSYLEAIQNAQDLALNHFSNAFILGEDVGKKGGVFGTTKGLQSKYGDERVIDTPLAESNIIGTAIGAAMLGKRPIAEIQFADFILPATNQIISEAAKMRYRSNNDWNCPLTIRAPFGGGVHGGLYHSQSVESIFASTPGLTIVIPSSPYDAKGLLLSSIESNDPVLYFEHKKAYRFLKEEVPETYYTVPLGKADVKRPGEDITVFCYGLMVNYCLQAADILANDGIDVEVVDLRTVYPLDKATIIERSQRTGKVLLVTEDNLEGSIMSEVSAIIAENCLFDLDAPIMRLAAPDVPSMPFSPTLENEIMMNPEKIQDKMRELAQF

SEQ ID NO: 70713 - protein, 332 aa, Staphylococcus epidermidis
MIDYKSAGLTEEDLKKIYKWMDLGRKTDERLWLLNRAGKIPFVVSGQGQEATQIGMAYAMQKGDISSPYYRDLAFVTYMGISPLDTMLSAFGKRDDINSGGKQMPSHFSHKEKGILSQSSPVATQIPHSVGAALALKMDNKPNIATATVGEGSSNQGDFHEGMNFAAVHKLPFVCVIINNKYAISVPDSLQYAAEKLSDRALGYGMHGIQVDGNDPIAVYKAMKEARERALAGEGPTLIEAVTSRMTPHSSDDDDTYRTKEERDLLKQEDCNIKFKTALLDQGIINENWLSQLEKEHKELINEATKSAEAAPYPSEEEALTYVYEEGGQRND

SEQ ID NO: 70714 - protein, 473 aa, Staphylococcus epidermidis
MSEKQYDLVVLGGGTAGYVAAIRASQLGKKVAIVEKSLLGGTCLHKGCIPTKALLKSAEVNHTIKNAHTFGIDVNHFKINFPKILERKDAIVKQLHEGVNQLMKHHHIDIYNGIGRIMGTSIFSPQSGTISVEYEDGESDILPNKNVLIATGSSPQSLPFIKFDHKQILSSDDILRLNTLPQRLAIIGGGVIGLEFASLMNDLGADVVVIEANDRVLPTESTQVASLLKEELTNRGVTFYENIQLTKDHFNQTDKGVTINISDEPVQFDKVLVAIGRKPNTNDIGLNNTQIKTSDAGHIITNGYQQTEDKHIYAAGDCIGQLQLAHVGSKEAIVAVEHMFDCSPIPINYDLIPKCVYTNPEIASIGKNLEQAKKAGIKAKSIKVPFKAIGKAIIEDVTQSKGFCEMVVNKDDDEIIGLNMIGPHVTELINEISLLQFMNGSSLELGLTTHAHPSLSEVVMELGLKANGQAIHV

SEQ ID NO: 70715 - protein, 293 aa, Staphylococcus epidermidis
MKKLQMNKLINIINTSLNKSIQSSPLKTNLEESMKYSLNAGGKRIRPVILLLTLKMLNKDYQQGLNSALALEMIHTYSLIHDDLPAMDNDDYRRGKLTNHKVYGEWKAILAGDALLTKAFELVSNDTTIEDSVKVSIIKRLSKASGHLGMVGGQALDMESEGKSIRLETLESIHETKTGALLNFSVMAAVDIAQVEQNIAKNLDEFSHHLGMMFQIKDDLLDVYGDESKLGKKVGSDIVNHKSTYVSLLGKEGAEEKLNNHQYLAMNCLNQISDQYDTSELSDIVDLFYNRDH

SEQ ID NO: 70716 - protein, 143 aa, Staphylococcus epidermidis
MFMGEFDHQLDTKGRMIIPSKFRYDLNERFIITRGLDKCLFGYTLEEWQQIEEKMKTLPMTKKDARKFMRMFFSGAVEVELDKQGRINIPQNLRKYANLSKECTVIGVSNRIEIWDRETWNDFYDESEESFEDIAEDLIDFDF

SEQ ID NO: 70717 - protein, 445 aa, Staphylococcus epidermidis
MTEYLSVSALTKYIKYKFDQDPHLQSVLIKGELSNFKKHSSGHLYFNVKDKESVISGMMFKGNASKLGFEPKEGDEVLIEARVSVYERRGNYQIYVNKMQLDGIGNLYQKLELLKKKLKKEGYFDQSNKKLIPKYPKKIAVLTASTGAAIRDIHSTINNRYPLVEQIQISTLVQGTQARQDIIEKIQYADSLDVDTIIVGRGGGSIEDLWNFNEEDVVKTIFNCQTPIISAVGHETDFTLSDFVADVRAATPTQAAVIATPDQYELLQQIKQYEYTLSRYIKQYIEHQKKQLNHISSYYKFKQPSLLYDQQIQKRDELERQLNHLLNTKVEKSKHHLKLLQQSFNFKNLNQQITQEKQSIYQLHSRLSKIMSNNITNLKTVLKNKLESLNNLSPTNTMLRGYAIVNKDNEVVTSTHKLNENDQISLTMKDGSVDATVKKVRCNDE

SEQ ID NO: 70718 - protein, 311 aa, Staphylococcus epidermidis
MFHHVSVMLNETIDYLNIKEDGVYVDCTLGGAGHALYLLNQLNDKGRLIAIDQDLTAIENAKEVLKEHLHKVTFVHNNFRELTNILNELEIDKVDGIYYDLGVSSPQLDVPERGFSYHNDAKLDMRMDQTQSLSAYEVVNQWSYEALVKIFYRYGEEKFSKQIARRIEAHREQQPIETTLELVDVIKEGIPAKARRKGGHPAKRVFQAIRIAVNDELSAFEDSVEQAIECVKVGGRISVITFHSLEDRLCKQIFQEFEKGPDVPRGLPVIPEAYTPKLKRVNRKPITATDDDLNENNRARSAKLRVAEILK

SEQ ID NO: 70719 - protein, 129 aa, Staphylococcus epidermidis
MSRKDARVQAFQTLFQLEIKETDLTIQEAIEFIKDDHSDLDFDFIYWLVTGVKDHQIVLDETIKPHLKDWSIDRLLKSDRIILRMATFEILHSDTPKKVVVNEAVELTKQFSDDDHYKFVNGVLSNIND

SEQ ID NO: 70720 - protein, 133 aa, Staphylococcus epidermidis
MAVEKIYQPYDEATQTSIPQRQPQSSPEKQTVKRKVVVQLTRFEKILYIALITVIALISIYMLSLKMDAYDTRGKIADLDQKIEKQSSENSALKSEIKKNSSYERIYDKAKKQGMSLENDNVKVVRNNGEAKN

SEQ ID NO: 70721 - protein, 775 aa, Staphylococcus epidermidis
MAKRKIKIKKNKIGAVLLVGLFGLLFFILVLRFSYIMITGHSNGQDLIMKANEKYLVKNSQQPERGKIYDRNGKVLAEDVERYKLVAVVDKKASKESKKPRHVVDKKKTAKKLAEIIDMDADEIEKRLNNKKAFQIEFGQKGTNLTYQEKEKIEKMKLPGIALYPETERFYPNGNFASHLIGMAQKDPDTGELNGALGVEKIFNSYLNGSRGALKYIHDIWGYIAPNTKKEQQPKRGDDVHLTIDSNIQVFVEEALDDMVERYAPKDLFAVVMDAKTGEILAYSQRPTFNPETGKDFGKKWANDLYQNTYEPGSTFKTYGLAAAIQEGKFKPDEKYKSGQRNIMGSEISDWNKTGWGRIPMSLGFTYSSNTLMMHLQDLVGADKMKSWYERFGFGKKTGGMFDGEAAGNIGWANELQQKTSAFGQSTTVTPAQMIQAQSAFFNKGNMLKPWFVSSIDNPITKKNYYSGKKEFAGKPVTQETANKVEEELDKVVNSKKSHAMNYRVKGYDIEGKTGTAQVADSNGGGYVKGENPYFVSFMGDAPKKDPKVIVYAGMSLAQKNDQEAYEMGVSKAFKPIMENTLKYLNVGKSSDTSSKTDYSKVPNVQGDEVQKAEDSVNAQSLKPITIGNGKQIKQQSVKSGTKVLPHSKVMLMTDGELTMPDMTGWTKEDVLAFEDLTKIKVSTKGNGFVTNQSISKGQIIKNKDKIEVSLSAEDTDDDQEKTDEDSSDKKSKKDKVDEDNSNASSSSKNEKSNADSKNDSDDSTNETSGSERNN

SEQ ID NO: 70722 - protein, 321 aa, Staphylococcus epidermidis
MIFIYAIIALLITFILVPILIPTLKRMKFGQSIREEGPQSHMKKTGTPTMGGLTFLISIIITSIIAIIFVDHSNPIILLLFVTIGFGLIGFIDDYIIVVKKNNQGLTSKQKFLAQIIIAVIFFVLSDVFHLVHFTTDLHIPFVNFDIPLSFAYVIFIVFWQVGFSNAVNLTDGLDGLATGLSIIGFAMYAVMSYMLDSPAIGIFCIIMIFALLGFLPYNLNPAKVFMGDTGSLALGGIFATISIMLNQELSLILIGFVFVVETLSVMLQVASYKLTKKRIFKMSPIHHHFELSGWGEWKVVTVFWTVGLITGLIGLWIGVH

SEQ ID NO: 70723 - protein, 449 aa, Staphylococcus epidermidis
MLNYTELENKNVLVVGLAKSGYEAAKLLLKLGANVKVNDGKDLSQDAHAKDLESMGIEVISGSHPFSLLDDNPIIVKNPGIPYTVSIIEEAAKRGLKILTEVELSYLISEAPIIAVTGTNGKTTVTSLIGDMFQKSVLTGRLSGNIGYVASNVAQEVKSDEYLITELSSFQLLGIEKYKPHIAIITNIYSAHLDYHETLENYQNAKKQIYKNQTKDDYLICNYHQRHLIESENLEAKTFYFSTQQEVDGIYIKDGFIVFNGIRIINTKDLVLPGEHNLENILAAVLASIIAGVPVKAIVDSLVTFSGIDHRLQYIGTNRTNKYYNDSKATNTLATQFALNSFDQPIIWLCGGLDRGNEFDELIPYMENVRVMVVFGETQDKFAKLGNSQGKYVIKATDVEDAVDKIQDIVEPNDVVLLSPACASWDQYHTFEERGEKFIDRFRAHLPSY

SEQ ID NO: 70724 - protein, 465 aa, Staphylococcus epidermidis
MLMEENKNQPNNENMSNKDDNTIHLNDSQSNEDLELFRRNKNARQRRRRRIDNQSKEKDATSTQSQLETKPMDKFIDNHKSHNQDKEIKSDLIEDNVNDEDDNQKYNNDKLNDRSVQQTSETRQSNEDEEEFLTDHQSEKQTKDSRHSKKHKLLSKFTSKKEKETFTSFNSNEKVTQIKPLSLEEKRAIRRKKQKRIQYTIITLLILIIVLILLYMFTPLSKISNVNIKGNNNVSTSKIKKELNVTSRSRMYTFSKNKAIRNLKQNPLIKEVDIHKQLPNTLTVNVTEYQIVGLEKNKDKYVPIIEDGKELTEYKDEVSHDGPIIDGFKGDKKTRIIKALSEMSPKVRNLIAEVSYAPTKNKQSRIKIFTKDNMQVIGDITTIADKMQYYPQMSQSLSRDDSGELKTNGYIDLSVGASFIPYQGSSTVQSGTEQNVTKSTQEENDAKEELQNVLNKINKQSKENN

SEQ ID NO: 70725 - protein, 403 aa, Staphylococcus epidermidis
MKRVYQSENQSLLFIVILGSLTAFGPLAIDMFLPGLPNISHDFDISASTTQLTISFFMIGLALGNFLAGPISDITGRKKPLIFSLIIFTIASLGIIFVTNIWIMIILRFIQGLTGGAGAVISRAIASDMYSGNALTKFLSLLMLVNGIAPIIAPALGGIILNYGPWRIVFVILTMFGIVMLIGTLFKVPESLEKSLRESSNIGTMLINFKELFKTPRFVLPMLIQGVSFVLLFTYISASPFIVQTIYGLTPLNFSIMFAFIGVTLIISSQLTGKLVDYIDRLLLLRIMSTIQVIGVIIVSLTLLNHWTFWILSCGFVILVAPVTGIATLGFSIAMDESKGAKGSSSSLLGLFQTLLGGVISPLVGIKGDSNAIPYIIVIVITAIILMVLQLINVKIFKKAKIH

SEQ ID NO: 70726 - protein, 222 aa, Staphylococcus epidermidis
MGLVVKDISKTFGEKTSKTEVLKDINFEVKDGEFIILNGASGSGKTTLLTILGGLLSQTSGDVVYEGKSLFERHTNKAHLRLNDIGFIFQASHLVPYLKVLDQLTLIGKETGMSSKEAQARAKELLTKIGLEEQLNSYPHMLSGGQQQRVAIMRALMNHPKIVLADEPTASLDASRAQEVVEMIRKQIKANQMIGIMITHDESLFKYADRIVQLYDGKIKNS

SEQ ID NO: 70727 - protein, 350 aa, Staphylococcus epidermidis
MNLAWKEIKFYKFRFILIMFIIFLMAIMVLFISGLAQGLARENISIFDQIKGNQFVVQKMKEPQLEKSILSRSKQDNISKIIDEKPFKMAGKTFKINGNEENVMAINSVKNHQPNLKSGHYPKNGNQIAINEKLTAEGLYLDDKVKVKGDDTTYKVVGILKNTMYSHSNIVMMDQSKIEQSSNVATFYVTNQLSKSDKNKINHIKGVQTATTDNITSNIASYKAEQTPLDMMIISLYIITAIVLSAFFYVMTIQKTSEIGILKAIGITTKHLLTSLILQISMITFIGVAIAEVVILLISQILPVSMPFHIDMHNIIIVLVIFMIVGLIGTSLSFIKLIKIDPIEAIGGGQ

SEQ ID NO: 70728 - protein, 452 aa, Staphylococcus epidermidis
MKKILIANRGEIAVRIIRAAHDLGIQTVAIYSEGDKDALHTQIADEAYCVGPTLSKDSYLNIPNILSIATSTGCDGVHPGYGFLAENGDFAELCEACQLKFIGPSYQSIQKMGIKDIAKAEMIKANVPVVPGSEGLIQSIDDAKKIAKKIGYPVIIKATAGGGGKGIRVARDEKELETGYRMTQQEAETAFGNGGLYLEKFIENFRHIEIQIIGDTYGNVIHLGERDCTIQRRMQKLVEEAPSPVLSEDKRQEMGNAAIRAAKAVNYENAGTIEFIYDLDDNQFYFMEMNTRIQVEHPVTEMVTGVDLVKLQLKVAMGEALPFKQEDISINGHAIEFRINAENPYKNFMPSPGKITQYLAPGGFGVRIESACYTNYTIPPYYDSMVAKLIVHEPTREESIMTGIRALSEYLVLGIDTTIPFHLRLLNNHIFRSGEFNTKFLEKYNIMDDNNQ

SEQ ID NO: 70729 - protein, 155 aa, Staphylococcus epidermidis
MNFKEIKELIEILDQSSLTEINIEDNKGSVVNLKKEKETEIVTPQVTQQPTQPINHTHNETQQKPSHSSKDEQSSDNEYNTINAPMVGTFYKSPSPDEEAYVQVGDKVTNESTVCILEAMKLFNEIQAETTGEIIEILVEDGQMVEYGQPLFKVK

SEQ ID NO: 70730 - protein, 492 aa, Staphylococcus epidermidis
MNTQHSKTDVILIGGGIMSATLGTLLKELTPEKDIQLFERLSQPGEESSNVWNNAGTGHSALCELNYTKEGKDGSVDITKAIHINEQFQISKQFWAYLIREGHIESPDKFIQSVPHMSFVKGEENVKFLKSRVASLQKNVLFEKMKISQDPEKINSWVPLMMEGRQSDEAIAITYDETGTDVNFGALTKKLIANLQQKNVGINYKHEVLDIKKLNNGNWQVVVKDLNTSNVMNYESKFVFIGAGGASLPLLQKTKIKESKHIGGFPVSGLFLRCKNPDVIHRHHAKVYGKAEVGAPPMSVPHLDTRFVNGEKSLLFGPFAGFSPKFLKNGSYLDLVKSVKPNNMITMLSAGVKEFNLTKYLVSQLMLSNEERINDLRVFLPEAKDEDWEVITAGQRVQVIKDTDKSKGQLQFGTEVITSEDGSLAALLGASPGASTAVDIMFDVLQRCYKSEFKSWEPKIKEMVPSFGLKLSEHEDMYHSINEEVKKYLNVK

SEQ ID NO: 70731 - protein, 464 aa, Staphylococcus epidermidis
MEEHYYVSIDIGSSSVKTIVGEKFHNGINVIGTGQTYTSGIKNGLIDDFDIARQAIKDTIKKASIASGVDIKDVFLKLPIIGTEVYDESNEIEFYEDTEIDGTHIESVLEGIRDKNDVPETEVINVFPIRFVVDKDNEVSDPKELIARHSLKVDAGVIAIQKSILINMIKCVEACGVDVLDVYSDAYNYGSILTPTEKELGACVIDIGEDLTQVAFYERGELVDAESIEMAGRDITDDIAQGLNTTYDTAEKVKHQYGHAFYDSASDQDVFSVDQVDSDEHVQYTQKDLSDFIEQRVEDIFFEVFDVLQELGLTKVNGGFVVTGGSANLLGVKELLQDMVSEKVRIHTPSQMGIRKPEFSSAISTISSSIAFDELLDYVTISYQDNEEFEEEVIESDKDSETKSSGFDWFKRKSNKKENDEVAPEAPREESYEDRENHLEDEQQTEGKAKEESKFKKLMKSLFE

SEQ ID NO: 70732 - protein, 394 aa, Staphylococcus epidermidis
MLEFEQGFNHLATLKVIGVGGGGNNAVNRMIDHGMNNVEFIAINTDGQALNLSKAESKIQIGEKLTRGLGAGANPEIGKKAAEESREQIEDAIQGADMVFVTAGMGGGTGTGAAPVVAKIAKEMGALTVGVVTRPFGFEGRKRQTQAAAGVESMKAAVDTLIVIPNDRLLDIVDKSTPMMEAFKEADNVLRQGVQGISDLIAVSGEVNLDFADVKTIMSNQGSALMGIGVSSGENRAVEAAKKAISSPLLETSIVGAQGVLMNITGGESLSLFEAQEAADIVQDAADEDVNMIFGTVINPELQDEIVVTVIATGFEDKPSSQGRKATSTGFGSSVNSSSNHQSGASAKEDSFSAHTSHSQSSESVSERSHTTKDDDIPSFIRNREERRSRRTRR

SEQ ID NO: 70733 - protein, 222 aa, Staphylococcus epidermidis
MDVKENLAKIETEIDASVKKSAHSAQPHVIAVTKYVTIERAREAYKAGIRHFGENRLDGFKEKKESLPSDIKLHFIGSLQSRKVKDIINEVDYFHALDRLSLAKEINKRANHVIKCFLQVNVSGEKSKHGIALEEVNQFINQIKEYENIQIIGLMTMAPLTDDLSYIKNLFKELRHKRNEIQQFNLAHAPCTELSMGMSNDYQMAVEEGATFVRIGTKLVGE

SEQ ID NO: 70734 - protein, 353 aa, Staphylococcus epidermidis
MNKLRKVLDIIEHKHLDAIIVLSDYNRRYLSDFTGTSGALIITPKKQYLITDFRYIDQATEQAQDFEIINRKSSLISEIKSILERENLSNIGFEGHLISYDTYVELNKGLITLISISNEIDKIREIKNKEEIQLIQKAAKIVDQTYEYILTQVSIGMTEREIKAKLESKMLELGADGPSFDTIVASGYRGALPHGVASDKRIEKGDMITLDFGAYYRGYCSDITRTFAIGEPDPKLKEIFNIVLTSQKKAIEQIKPGMTAKEADAISREYISSHNYGEQFGHSLGHGIGLDIHEGPLLSQNSSDELKINNCVTIEPGIYIEGLGGVRIEDDILITENGCHVFTKCSKDLIILE

SEQ ID NO: 70735 - protein, 197 aa, Staphylococcus epidermidis
MALKDLFNNFFVVEEEEEVEGPEERESSRSRERVQEREDYNRNENQATPQTFNNKQQAIKSVPQKNTLRSNTTSEERNYRMNNNSKNNSRNVVTMNQASQSYTAQESSKMCLFEPRVFSDTQDIADELKNRRATLVNLQRIDQVSAKRIIDFLSGTVYAIGGDIQRVGTDIFLCTPDNVEVAGSITDHIENMEQHYE

SEQ ID NO: 70736 - protein, 218 aa, Staphylococcus epidermidis
MPFTPSEIKNKEFTRVKNGLEPTEVANYLEQLSNEIERLKEDKKQLEKVIEDRDSNIKSYKDVHQSVSDALIQAQKVGEETKQAATKEAEAVLSKAQVQADSIVNDAIEKARRLAFQTEDMKRQSKVFRSRFRMLVEAQLDLLKSEDWDYLLNYDLDAEQVTLEDIHHLNENDLTPEERAMKQKQNQELSANQPSTSSSESVSQSNTNSESSQSTSNN

SEQ ID NO: 70737 - protein, 919 aa, Staphylococcus epidermidis
MNIMNYKDTLLMPKTDFPMRGGLPNKEPQIQEMWDNDDQYRKALEKNKNNPSFILHDGPPYANGNLHMGHALNKIIKDFIVRYKTMQGFYAPYVPGWDTHGLPIEQALTKKGVDRKKMSVAEFREKCKEFALKQIDIQKKDFKRLGVRGDFNNPYITLTPEYEAAQIRLFGEMADKGLIYKGKKPVYWSPSSESSLAEAEIEYHDKRSASIYVAFDVKDSKGKVDSDAQFIIWTTTPWTIPSNVAITVHPELKYGQYNVDGHKYIVAQALSEEVAEALGWDKDSIQLEKEFTGKELEFVEAQHPFLDRVSLVINGEHVTTDAGTGCVHTAPGHGEDDYIVGQKYDLPVISPLNDKGVFTEEGGPFEGMFYDKANKAVTDLLKEKDALLKLDFITHSYPHDWRTKKPVIFRATPQWFASINKVRQDILDAIEDTNFKVDWGKTRIYNMIRDRGEWVISRQRVWGVPLPVFYAENGDIIMTKETVNHVADLFEKHGSNIWFEKEAKELLPEGFSHPGSPNGEFTKETDIMDVWFDSGSSHRGVLETRPELSFPADLYFEGSDQYRGWFNSSITTAVATRGQAPYKFLLSHGFVMDGEGKKMSKSLGNVIVPDQVVKQKGADIARLWVSSTDYLSDVRISDEILKQTSDVYRKIRNTLRFMLGNINDFNPETDSIAETNLLEVDRYLLNRLREFTASTINNYENFDYLNIYQEVQNFINVELSNFYLDYGKDILYIEKKDSHKRRSMQTVLYQILVDMTKLLAPILVHTAEEVWSHTPHVKEESVHLSDMPKVVDVDEELLEKWNTFMNLRDDVNRALEQARNEKVIGKSLEAKVVIGSNESFNTAEFLQQFNDLQQLFIVSQVEVKDKVNDGVSYQYGDIHIKHAEGEKCERCWNYTEELGSVGELEHLCPRCQEVVKTLV

SEQ ID NO: 70738 - protein, 215 aa, Staphylococcus epidermidis
MKKVLASATILSLMLVGCSNGGNDESSHKDDSSKTEQKDKSSSQHDSKKDSKRNDTNNKQDNQENNTNKEQTNNQNPNDGEQRTSERPTTNSNGNSSDNQNKQQQSVQDNQNKYVAPYQSENATRVARCLSPFEGDRSQALQQLPNFETALSIAKNEANMYGSENKSYNDYSIEQTEDGFRYVFSFKDPSKSNTYSIVTLNRQGQPTVVDPNFQP

SEQ ID NO: 70739 - protein, 721 aa, Staphylococcus epidermidis
MNKLTIIVTYYNAEEYITGCLESIKQQRTQDFNLIIVNDGSTDQSKKLMDEAIKDYDKNIRFIDLDENSGHAHARNIALEEVETPYFMFLDADDELASYAITFYLEKFNNTDGLIAPIHSFTTQRPQFVDLDRVRVEYFNAKENINSFLRKQSACNIIFRTAIVRAHHIRFNENLNTYVDWSFVLEYMKYVNKFVRIFNFPFYFRGEVYDPFETLTLSEQNFDILFKDYVNSFYDAIKRATNPKVREFIVTKMGNKIANEFEPTRYDINERYQTHKDTLVELSKFLHVHLVKNQKLINKIETILLMNNETDKAFKVNQFRKTLRHVKNIVLRRKNKERSLYDLTDKEDNVKPKTIVFESFGGKNYSDSPKYIYEYMQKYYPNYRYIWSFKNPDKNVVPGSAEKVKRNSAEYYQAYSEASHWVSNARTPLYLNKKENQTYIQTWHGTPLKRLANDMKVVRMPGTTTPKYKRNFNRETSRWDYLISPNRYSTEIFRSAFWMDEERILEIGYPRNDVLVNRANDQEYLDEIRTHLNLPSDKKVIMYAPTWRDDEFVSKGKYLFELKIDLDNLYKELGDDYVILLRMHYLISNALDLSGYENFAIDVSNYNDVSELFLISDCLITDYSSVMFDYGILKRPQFFFAYDIDKYDKGLRGFYMNYMEDLPGPIYTEPYGLAKELKNLDKVQQQYQEKIDAFYDRFCSVDNGKASQYIGDLIHKDIKEQ

SEQ ID NO: 70740 - protein, 128 aa, Staphylococcus epidermidis
MSISLYIAIGIIVIIIAYMIIQQILNKRAVNELDQNKFHKGLRKAQVIDVREKVDYDYGHINGARNIPITVFKQRYQGLRNDQPIYLCDANGIASYRAARILRKNGYKNIYMLKGGYKKWTGKIKSKK

SEQ ID NO: 70741 - protein, 502 aa, Staphylococcus epidermidis
MISKSSPLIFERSKKDRYAYSLPQNDIENISIASLLDDKYIRKHKAEFPEVSELDLVRHYTELSNKNFGVDTGFYPLGSCTMKYNPKINEKVARISGFSESHPLQEEEHVQGSLEIIYSLQEELKEITGMDEVTLQPAAGAHGEWTALMIFKAYHEKNGQSHRDEVIVPDSAHGTNPASASFAGFKSVTVKSNQRGEVDIEDLKRVVNDNTAAIMLTNPNTLGIFEQDIIEIGKIVHEAGGLLYYDGANLNAILDKVRPGDMGFDAVHLNLHKTFTGPHGGGGPGSGPVGVVEKLASYLPKPMVIKDNDRYKYDNDIPNSIGRVKPFYGNFGIYLRAYTYIRSMGANGLKEVSEAAVLNANYIKSRLKNHFEIPFNQYCKHEFVLSGTLQKQYGVRTLDMAKRLLDFGVHPPTIYFPLNVEEGMMIEPTETESKETLDYFIDAMIQIADETKNDPDKVLEAPHTTIIDRLDETTAARKPILKFEELKDEKYKEHTNIDSEDN

SEQ ID NO: 70742 - protein, 133 aa, Staphylococcus epidermidis
MTKIHFEAPSPEDYCNLRANAGMSSKSIEAAIKGLPHACFNVTLYENDMLIGMGRVIGDGGTVFQIVDIAVKDIYQGLGHGMTIMHEIMKYIESVAEEGTYVSLIADYPADQLYEKFGFKSTEPYSKGMYIKY

SEQ ID NO: 70743 - protein, 363 aa, Staphylococcus epidermidis
MTTDLKKTPLYQNYVDSGAKIVEFGGWAMPVQFSSIKEEHNAVRYNVGLFDVSHMGEIEISGKDAEQFIQYILSNDTNLLTNDKAMYSALCNDEGGIIDDLVTYKLNENHYLLIVNAANTNKDYQWIKKHSSNFTVDVSNTSDKYGQLAIQGPHSRALINELVDIDVSHMAMFEFKQNVQIFGKSIILSQSGYTGEDGFEIYCKQEDTKDIWEQLLEYDVTPCGLGARDTLRLEAGLPLHGQDLSESITPYEGGIAFAAKPLIENHFIGKSVLKAQKENGSERRTVGLELLGKGIARTGYDVLDENSNEIGFVTSGTQSPSSGKSIALAIIDRDAFEMGKKVIVQIRKRQVEAKIVKKNQIEK

SEQ ID NO: 70744 - protein, 125 aa, Staphylococcus epidermidis
MKERGKIEKLWREEKYRVLFHDQNAYHSIRTLLKSPTTLGEVKEHITHALTITPTKGSVINAFEHMWGYFKKQCTQYEKQHSRELKALYIENQIDYFELLSFLKNLADKYAVEYLQQSTILNITK

SEQ ID NO: 70745 - protein, 183 aa, Staphylococcus epidermidis
MDKKGLRRNIIKKMKSYDKEQKYLADEWLAKKLYQSEAYRKANTIGFVLSMPHEVNTYPIITHSLNNNKKIFVPETNYQQQDMTFKQLLSIEDIEKDSKGIYHSISPVGTTNKMDLVVVPGVAFDKLGYRIGYGGGYYDRFLSQHKCNTVSLLYDFQLAQFNIEPHDQPVEQLIIYHNKVVEE

SEQ ID NO: 70746 - protein, 696 aa, Staphylococcus epidermidis
MLKRLKEKSNDEKMRNTMNKRINFIFGFIVFIFAIVVLRLGYLQIAQGSHYKQLIKNDENITVNESVPRGRILDRNGKVLVDNASKMSITYTRNRKTSQKEMLNTAKKLTDLIKMDTDKITERDKKDFWIQMYPSSAKKLMRKEQLMLEDGSISQDQFDTQLRDKIGKKQLKQLTKKDLQVLAIYREMNAGSTLDPQTIKNEDVSEKEYAAVSQQLSKLPGVNTTMDWDRKYPYGDTLRGIFGDVSTSTEGIPKELTEQYLSKGYSRNDRVGKSYLEYQYEDVLKGTKKQMKYTTDKSGRVISSEVLNPGSRGHDLQLTIDIDLQKKVESLLEKQISKLRSQGAKDMDNALMVVQNPKNGDILAIAGKQIDKQGKLKDYDIGNFTAQYTVGSSVKGGTLLAGYQNKAINVGETMVDEPLKFQGGLTKRSYFNKNGHVSIDDKQALMHSSNVYMFKTALKLAGDPYTSGMSLPNNIADAGRKLRKGLNQVGLGLKTGIDLPNETPGQIEPLTNNPGNYLDLAIGQYDTYTPLQLSQYVSTIANDGYRIQPHIGLSIYESTNKDETGPLKRKIKGNVLNKVNNSNDEIKEVQEGFKMAFNEKQGTGYASFRNTVVPSAGKTGTAEVFQDGEPRVNSTYIGYAPVDDPKLSFSIVYTNQPVPPPWLNGGDLGRDVINYYFKDKDNKKDDSQSNNEEKED

SEQ ID NO: 70747 - protein, 525 aa, Staphylococcus epidermidis
MSVLTVMQFIVNIIIMIVLLTIMILGVIWLFKDKGQNQHSVLRNFPVLGRIRYISEKIGPELRQYFFANDNEGKPFSRSDYKNIVLAGKYKSRMTSFGTGKDYLEGFYIQNTMFPLQATELHIDHTEFISTFLYHIENERLFSREEYRKSAQVDPFFLTDEHAVVLGSNLKHPFKIKRLVGQSGMSYGALGKNAITALSMGLAKAGTWMNTGEGGLSEYHLKGNGDIIYQIGPGLFGVRDHDGNFNRDMFINLAEHNNVRAFEIKLAQGAKTRGGHMEGNKVTEEIARIRNVKPYETINSPNRFDFIKNPTDLLNFVNHLQSIGQKPVGFKIVVSKVEEIEALVKTMIEIDTYPSFITVDGGEGGTGATFQELEDGVGLPLFTALPIVSSMLEKYGIRNKVKIFASGKLVTPDKIAIALGLGADLVNIARGMMISVGCIMSQQCHLNTCPVGVATTDPKKEKGLIVDEKQYRVTNYVTSLHEGLFNIAAAVGVHSPTEITSDHIIYRQLDGTTTSIQDYKLKLIS

SEQ ID NO: 70748 - protein, 272 aa, Staphylococcus epidermidis
MERLENKIAVITGASTGIGQASAVALAIEGAHVLALDISDQLEETVQSINDNGGKATAYRVDISDDKQVKQFSEKIAQEFGHVDVIFNNAGVDNGAGRIHEYPVEVFDKIMAVDMRGTFLVTKFLLPLMMKQGGSIINTASFSGQAADLYRSGYNAAKGGVINFTKSIAIEYGRENIRANAIAPGTIETPLVDNLAGTSDEEAGQTFRENQKWVTPLGRLGTPDEVGKLVAFLASDDSSFITGETIRIDGGVMAYTWPGEMLSDESWKNSTK

SEQ ID NO: 70749 - protein, 387 aa, Staphylococcus epidermidis
MNMKKGVSQLTLQTLSLVAGFMAWSIISPLMPFISQDVDISPGQISVILAIPVILGSVLRVPFGYLTNIVGAKWVFFWSFIVLLLPIFLLGQAQSPGMLMLSGFFLGIGGAIFSVGVTSVPKYFSKDKVGLANGIYGVGNIGTAVSSFCAPVLAGAIGWQNTVRSYLIILSIFAILMFFLGDKNEPKVKIPLMAQVKDLSKNYKLYYLSLWYFITFGAFVAFGIFLPNFLVDHFSIDKVDAGIRSGIFIALATFLRPVGGVIGDKFNAVQALIIDFVIMIIGALILSLSSHIVLFTIGCLAISICAGIGNGLIFKLAPSYFSKEAGSANGIVSMMGGLGGFFPPLVITFVTSITGSSHLAFFFLAIFGVIALITMIHLNKKEKAIRI

SEQ ID NO: 70750 - protein, 343 aa, Staphylococcus epidermidis
MEQTDLSLEQLLKNYYETTNEKIVFVNRQGKIIAMNDAAKDILTEEDNYNAMTNAICHRCEGYSNEYDVQSCKDCFLETTQLQHSNFQVFMKTKDNEIKPFTAMYQNIDEQRGISAFTLQNVAPQIERQEKMYQQKMLHRSIQAQENERKRISRELHDSVIQDMLNIDVELRLLKYKHRDKVLAETSQRIEGLLSQLIDDIRNMSVELRPSSLDDLGIEAAFKSYFKQFEENYGMHIKYDSNIKGMRFDNEIETVVYRVVQEGVFNALKYAEVNEIEVSTHSDGKQIVAEVVDRGKGFSLDHHPKGSGLGLYGMRERAELVNGHVNIETHINRGTIITLDIPI

SEQ ID NO: 70751 - protein, 139 aa, Staphylococcus epidermidis
MNTNDAIKVLKENGLKYTDKRKDMLDIFVKEDKYLNAKHIQQQMDKDYPGISFDTVYRNLHLFKDLGIIESTELDGEMKFRIACTNHHHHHFICENCGETKVIDFCPIEKIKSQLPNVNIHTHKLEVYGICEECQRKAN

SEQ ID NO: 70752 - protein, 225 aa, Staphylococcus epidermidis
MLNQFVWVIYPYLCLAIFVIGHIARYKYDQFSWTAKSSEMIEKKRLKWGSLLFHLGIIPVFFGHVVGLLIPANWLEAIGVNNHIYHIGAVYIGSVFGIITLIGMLLLTLRRLSIKNVRRLSSFSDIFVNIVLLIILIMGCYSTLVTNAIQPEFDYRQTIAIWFRHLFMFSPNADLMLNVPWSFKLHILLGFTVFACWPFTRLVHVWSVPLSYMNRRYIVYRKNKI

SEQ ID NO: 70753 - protein, 296 aa, Staphylococcus epidermidis
MLIGSHVSMSGKKMLQGSAEEAHKYGESTFMIYTGAPQNTRRKNIEDLNIEKGQQAMKTYGLSNIVVHAPYIINIANTTKPEVFNLGVDFLQKEIERTQALGAKDIVLHPGAHVGAGVDKGIQKIIEGLNEVLTHDNDVRIALETMAGKGTEVGRSFEEIAQIIDGVTHNDRLSVCFDTCHTHDAGYNVKEDFDGVLEKFDSIIGVDRIKVVHVNDSKNLRGAQKDRHENIGFGHIGFDALNYVVHHDTFKNIPKILETPYVGEDKKNKKPPYKLEIDMLKSQKFDPELKNKILTQ

SEQ ID NO: 70754 - protein, 448 aa, Staphylococcus epidermidis
MSKHPFEHFNLDENLIEAVKNLNFEKPTEIQNRIIPRILKGTNLIGQSQTGTGKSHAFLLPLIQLIESDIQEPQAIVVAPTRELAQQLYQVAMHLVKFKKGINVKLFIGGTDLEKDKQRCSHQPQLIIGTPTRINDLAHSGYLHAHLASYLIIDEADLMIDLGLIEDVDHIAARLDDENAHLAVFSATIPKSLQPFLNKYLSQPEFVEVDGKAHNKENIEFYLIPTKGSAKVDKTLELIDILNPYLCIIFCNSRENADELADTLNKEGIKIGMIHGGLTPRERKQQMKRIRNLDFQFVIASDLASRGIDIEGVSHVINFDVPNDIDFFTHRVGRTGRGNYKGVAITLYSPDEESNITLIEDRGYKFENVDIKNGELKPIKAYNMRKSRQRKDDHLTNEVKHKVRSKSKRKVKPGYKKKFKQEVEKMKRQERKQYSKKQNRQKRKNNKG

SEQ ID NO: 70755 - protein, 368 aa, Staphylococcus epidermidis
MSDNQVKIKKQTIDPTLTLEDVKKQLIDKGKKEGHLSHEEIAEKLQNFEMDSDQMDDFFDQLNDNDITLVNEKDSSDTDDKINPNDLSAPPGVKINDPVRMYLKEIGRVNLLSAQEEIELAKRIEQGDEIAKSRLAEANLRLVVSIAKRYVGRGMLFLDLIQEGNMGLIKAVEKFDFSKGFKFSTYATWWIRQAITRAIADQARTIRIPVHMVETINKLIRVQRQLLQDLGRDPAPEEIGEEMDLPPEKVREILKIAQEPVSLETPIGEEDDSHLGDFIEDQEAQSPSDHAAYELLKEQLEDVLDTLTDREENVLRLRFGLDDGRTRTLEEVGKVFGVTRERIRQIEAKALRKLRHPSRSKRLKDFMD

SEQ ID NO: 70756 - protein, 598 aa, Staphylococcus epidermidis
MRIDQSVIDEIKNKTDILDLVSEYVKLEKRGRNYIGLCPFHDEKTPSFTVSEDKQICHCFGCKKGGNVFQFTQEIKDVSFVEAVKDLGERVNIQVDIGQNQTNSSTKIASDELKMIEMHELIKDYYHYALMKTVEGEEALNYLHERGFTDDLIKEREIGYAPDNSHFCHDFLEKKGYDIELAFEAGLLSRNEENFTYFDRFRNRIMFPLKNGQGRIVGYSGRTYTDQEPKYLNSPETPIFQKRRILYNLNKARKFIRKQDEIILLEGFMDVIKSDYAGLKQVVASMGTQLSQEHITFLQKLTQNVTLMFDGDYAGKEATLKTGQALLNQGLNVYVVQLPSGMDPDDYIRKYDNEQFLKFVQQDKQSFVLFKVKMYQNEINHNDLAYEKHFKETVRDLSLVNSGIIRNKLIQNIADIFKVNPETIQYELDATYQHQMSSNTYPTFQDEPSKQQLILGRLTKNEKAERALIKHLTKDKDTFLNYYQKIVPEDFTNSYLKRIFSYLYDYYSKNDYYTISDMMQYIESNELREVLIELDQYHLNDEPYENEIEDYIQIIKNNNNEDSLESLNYKLREASRIGDSELQKYYLQLIVNKNKNRM

SEQ ID NO: 70757 - protein, 952 aa, Staphylococcus epidermidis
MSNLIQDIKQSLYKGFIDKDSSHKGNFVPRLLVNNKEENVLSTIIDQLHNCQSFCISVAFITESGLASLKSHFYDLSKKGVKGRIITSNYLGFNSPKMFEELLKLENVEVKLTNIEGFHAKGYIFEHHNHTSFIIGSSNLTSNALKLNYEHNLFLSTHKNGDLVNNIKYKFDELWDSSFSLTNEWINEYKQSFEYQTLQKVFDNTVVQNSDIKKFNESKLIKPNLMQEHALKSLESLRNVGEEKGLIISATGTGKTILCALDVRAYSPDKFLFIVHNEGILNRAIEEFKKVFPYEDESNFGLLTGKRKDHDAKFLFATIQTLSKKENYKLFNSNHFDYIVFDEAHRIAASSYQKIFNYFKPNFLLGMTATPERTDELNIFELFNYNIAYEIRLQEALESNILCPFHYFGVTDYIQNEMSQEDAFNLKYLASNERVEHIIKKTNYYGYSGDVLKGLIFVSSRGEAYQLANQLSKRGISSVGLTGKDSIAYRAETIQQLKEGSINYIITVDLFNEGIDIPEINQVVMLRPTKSSIIFIQQLGRGLRKSTNKEFVTVIDFIGNYKTNYMIPIALSGNKSQNKDNYRKFLTDTTVLNGVSTINFEEVAKNKIYNSLDSVKLNQPKLIKEAFNNVKDRIGKLPLLMDFINNDSIDPSVIFSRFKNYYEFLIKNKIIENELSINEFKNLTFLSRQLTPGLKKVDIDVLKEIIQNDVTYENLTKKMLNINNDISEYDINTSLSILDFTFFKKTIGKTYGLPLIQYKDNLICLANEFKEALNKPLFNTFIHDLIDLANYNNDRYQNKKNSLILYNKYSREDFVKLLNWDKDESGTINGYRMKHRTLPLFITYDKHENISDNTKYDDEFLSQDELKWYTRSNRKLTSPEVQNILKHEESNTDMYIFVKKRDDEGKYFYYLGKAKYIKGTEKQDYMPNGNSVVTMHLSMNTSIRDDIYRYIT

SEQ ID NO: 70758 - protein, 546 aa, Staphylococcus epidermidis
MKNNWIDVLDESLVKDFYNNQTSEEQQEGLNTTLSFGTAGIRGKFGLGEGRLNKFTVSKVALGFAHYLTSSIAHPVVVIHYDTRHLSPEFAQIIANILASHDIKVYLADTYRTTPDLSFAVRYLQADAGVMITASHNPKDYNGIKVYGEDGAQLSTDASAQLSTYIDKLGHPLHINVPSLTTEQQSLIHSVPSEVREDYFKNVQDLVGTIPQSDLKVVFTSLHGTSVPIVPDILSSLNFNQFELVASQCEPDSDFSSVASANPEDHKAFDQSIELANLIDADLLIGTDPDADRLGIVERDAEGNIYYYNGNQIGALLLNYRIKQTEGLPNRIMFQSIVSGGLAKSLAQYHNVNFKEVLTGFKYIAAEIRHLSPEQNFIFGYEESYGFLARPFVRDKDAIQIVPLMIKYAAELKNEGRMLKDELEDITRNVGNFNDKLFSHTFEGTQGKAKIENIMTQFRSETPTEMCGLKVIAIEDFETGKKTDLQNDEVSDITLPKANVIKIYFNEGFIALRPSGTEPKIKLYVSLSCDHFDVIAQKINDAIFNS

SEQ ID NO: 70759 - protein, 288 aa, Staphylococcus epidermidis
MKKIKKAIIPAAGLGTRFLPATKAMPKEMLPILDKPTIQYIVEEASKAGIEDIIIVTGKHKRAIEDHFDNQKELEMVLENKGKADLLEKVQYSTDLANIFYVRQKEQKGLGHAIHTAKQFIGNEPFAVLLGDDIVESDTPAIKQLMDVYEETGHSVIGVQEVPESDTHRYGVIDPSAKEGSRYEVRQFVEKPKQGTAPSNLAIMGRYVLTPEIFDYLETQQEGAGNEIQLTDAIERMNSKQQVYAYDFEGNRYDVGEKLGFVKTTIEYALKDPEMSQDLKAFIKQLDI

SEQ ID NO: 70760 - protein, 513 aa, Staphylococcus epidermidis
MKYMIGVDMGTTSTKAVLYDENGKFIMKHNIGYDLHTPNVDVSEENPDEIFDAVLMTVKYIVRESGIAKEDIKFISLSAQMHSLIVMNENNQRLTENITWADNRANDYADLIEKSYGGFELYQRTGIPIHPMSPLSKIFWMRHEEPKIFKQTAMFADLKTYVLFQLYERFVIDYSLGSATGMMNLEQLDWDNKALELLGIERNQLPQLVPTTHVLTGMKKRYATLMGIDEQTPVIVGASDGVLSNLGVNSYQKGEVAVTIGTSGAIRTVINQPKTDEKGRTFCYILDKDQYVIGGPVNNGGVVLRWLRDEILASEVETAKRLGVDPYDVLTQIASRVKPGAEGLIFHPYLAGERAPLWNADARGSFFGLTLSHKKEHMIRAALEGVLYNLYTVYLALIEVMNETPTTIKATGGFAKSEIWRQIMADIFDTDLIVPESYESSCLGACVLGMKALGEIDDFSVIKDMVGTTHAHEPNQETVAIYQQLVTIFINISRSMTENYSDIANFQREHLSD

SEQ ID NO: 70761 - protein, 311 aa, Staphylococcus epidermidis
MSITYPGTVYLIGAGPGNPNLLTKKAERLIRSADVILFDRLVNPFILQYASSQTKVINVGKKPYCKHIQQEEINQKIVEAANQYQCVVRLKGGDPAIFGRITEEVQTLENHHIHYEIVPGVTSASAAVATMNMGLTMRSIAPSVTFSTGHFKDSVNHDTDIRNLINGGTLAIYMGVKRLGQIIKQIESYTNEDYPIAIVFNASCYNEKIVIGHLSTIEEQLVSQQLEGHPGICILGNILDDINRTLLNNNKNDKGNLYLIKGDKERAIAKAETLYDEGIQCLIDFDHSYHISQQNVYNEMIKHKSIKTIYV

SEQ ID NO: 70762 - protein, 104 aa, Staphylococcus epidermidis
MKAKEKIKVTTMNEMIPQIGKKVVVNEKEIGIFLTDNGDLYAIGNICPHKEGPLSEGTVSGDYVYCPLHDQKIALKTGEVQQPDTGCVETYEVEVIDGDIYLCL

SEQ ID NO: 70763 - protein, 801 aa, Staphylococcus epidermidis
MAKQKLVMIGNGMAGLRTIEEILERSQSQFDITIIGKEPYPNYNRIMLSNILQKKMTVEDTIMNPYDWYQENNIELINNDPVEKVDKENKIVTTSKGIEVEYDICIFATGSKAFVLPIPGSNLPSVIGWRTIDDTNKMIEIAQTKKRAVVIGGGLLGLECARGLLDQGMEVTVLHLADWLMEMQLDRKAGEMLKADLEKQGMKIELQANSKEIIGDKDVEAIKLADGRVIETDLVVMAVGIRPYTEVAKDSGLDVNRGIVVNDYMQTSDSHIYAVGECAEHDGKVYGLVAPLYEQGKVLADYLTGKETKGYKGSTTFTSLKVSGCDLYSAGQIVEDEDVHGVEIFNSVDNIYKKVYLSQGQVVGAVLYGDTDDGSRFYNMMKKHETLEDYTLVSLLHKGDEDAGTSIADMSDDETICGCNGVDKGTIVNAITSKGLTSVDEVTKATKAGNSCGKCKGQIGELLQYTLGDDFIAAKPTGICPCTDLTRDQIVTQIRAKNLKSSKEVRHVLDFKDKDGCPKCRPAINYYLNMVYPFEHRDEKDSRFANERYHANIQNDGTFSVIPQMRGGVTDADQLIRLGEVAKKYNVPLVKVTGSQRVGLYGLKKEELPQVWKDLGMRSASAYGKKTRSVKSCVGKEFCRFGTQYTTRLGIRLEKTFEYIDTPHKFKMGVSGCPRSCVESGVKDFGVISVENGYQIFIGGNGGTDVTVGKLLTTVETEDEVIQLCGALMQYYRETGVYAERTAPWLERMGFENVKNVLLNQEKQKELYLRIMEAKKAVENEPWETIVENKEAQKIFEVEKV

SEQ ID NO: 70764 - protein, 463 aa, Staphylococcus epidermidis
MVKNMDTIVQLAKHRGFVFPGSDIYGGLSNTWDYGPLGVELKNNIKKAWWQKFITQSPYNVGIDAAILMNPKTWEASGHLGNFNDPMIDNKDSKIRYRADKLIEDYMQNEKGDENFIADGLSFDEMKKIIDDEGIVCPVSKTANWTDIRQFNLMFKTFQGVTEDSTNELFLRPETAQGIFVNYKNVQRSMRKKLPFGIGQIGKSFRNEITPGNFIFRTREFEQMELEFFCKPGEEIEWQNYWKTFASEWLTDLNISEDNMRLRDHDEDELSHYSNATTDIEYKFPFGWGELWGIASRTDYDLRQHSEHSGEDFKYHDPETNEKYIPYCIEPSLGADRVTLAFLCDAYAEEGVEGSKDARTVMHFHPALAPYKAAVLPLSKKLSSEAIKIFEQLSSSFAIDFDESQSIGKRYRRQDEIGTPYCITFDFDSLEDNQVTVRDRDSMEQVRMPISELETFLAEKVKF

SEQ ID NO: 70765 - protein, 239 aa, Staphylococcus epidermidis
MIGNILVAHGMRKGNQNEALEEFIGTLLKDEQYYYELAFLESETQNLEIIMEKMIKQGITKFRIVPLLIFSAMHYISDIPQILKEMKARYPQIDSKMSAPLGTHPYMKTLVENRIADEKVSEGSTKATIVIAHGNGSGRFTKAHDELKAFVKTLDSHHPVYARALYGTLAFKNDLDKISEQYDELVIVPLFLFDGRLVNKVKRLLGEMTLHSQLHITPSINFDPILRLIIRERLEALDI

SEQ ID NO: 70766 - protein, 299 aa, Staphylococcus epidermidis
MTEHKSGFVSIIGRPNVGKSTFVNRVIGHKIAIMSDKAQTTRNKIQGVMTRDDAQIIFIDTPGIHKPKHKLGDYMMRVAKNTLSEIDAIMFMVNVNEDIGRGDEYIMEMLKNVKTPIFLVLNKIDLVHPDTLMPKIEQYQSYMDFTDIIPISALEGLNVDHFIDVLKSFLPEGPKYYPDNQISDHPEQFVVSEIIREKILHLTSEEIPHAIGVNVDRMIKEDEDRVRIETTIYVERDSQKGIVIGKGGKKLKEVGKRARRDIEMLLGSKVYLELWVKVQRDWRNKVNFIRQIGYVEDQD

SEQ ID NO: 70767 - protein, 118 aa, Staphylococcus epidermidis
MKRFKYAYEGFCAILKKDQNFLLHILAAIIIIILGFVLNIDRIDWILIIVAIGLVLSFEAINTSIEFVVDLITTDYHEYAKYAKDIAAFSVVIVSIVSICIGLIVFLPYILEIFKGGM

SEQ ID NO: 70768 - protein, 227 aa, Staphylococcus epidermidis
MNIGIIIFIISVIITGVSALRDKSHEDRQNQRPNQKTSNEQHQEGGFFEKLEKTFQEISDELNDEPEKKQSKPFETSLPPLNEDWNENEKKKTSHHKEKQNTSQSKRQTTSTHEHQNIPQPDKTTSRDDNYEKLKQELEQDVTKNLIDVRKEIDKEKEKQLVMIERKAQDIINDKYLSERTKRYRIKQLLNSRNVEKNMSRSAFQYDSDEVINGIIWSEILNKPKQL

SEQ ID NO: 70769 - protein, 226 aa, Staphylococcus epidermidis
MTYGYPKKWKENMTSGQVIAAELRLGIVSGEIESHIQLSENQVAQQFNVSRSPVRDAFKLLQTDQLIQLERMGAQVLPFGDQEKKEMYDLRLMLESFAFSKLSGTDTQHIIKEMKKQLEMMKVAVQFEDAEAFTQHDFEFHEVMIQATNHQYLKVFWNHLKPVMESLILISMRQRMANDPKDFERIHKNHQVFIDAVENDDASILRKAFHLNFDDVGENIEAFWLR

SEQ ID NO: 70770 - protein, 137 aa, Staphylococcus epidermidis
MPWTMEDYPQSWKNFEELERKKAIDIGNAMLKDGYKESDVIPIATNQAEKWYEHASKEELETLKNKHITQHQEDESANPKLNEENVHVYYEDQLWKVKSKEARRASDTFDTKSEAVNRAQHIAENKGTKVIEHRKDE

SEQ ID NO: 70771 - protein, 638 aa, Staphylococcus epidermidis
MQQIINSLIHFDRSKIDIAKGIRQGFLMILPALIGYLLGFPMFGILISTGTLAHVYVFSGSPQSMLKTVITCSLSFTICMILGTLTVSQPILFGLLLLIVVTIPYYTFNALKIAGPSSTFFLVTFCLSINLPIAPEEALLRGSAILIGGILATITVILTIIFAKEKAEDRAIHADFKTLHNLLHHFDEPEDFKAYARNAVTEFRNSEKLLITSTSGGNGKLSKRFQKLILLHTSAQGIYSELLELNENHIRPLPSDLVEMMDHIINSVQQPKQQYRPWSKVVDVAPEFQNLMDHILKIDEMIHANDNQIKYEADIRKPLYSKRIYQNLTFDSIVFRNALQYTVIMAVAIFIALAFNIQKAYWVPLSAHTIMLGNVTTIRTLDRSLARGIGTIIGTIVLSGILAFHIDPIFAIIIMGFSAMMTEAFVASNYAFAVIFITTQVIMLNGLASQNLNIEIAYTRIIDVLIGIAIAVIGIFILARKTASSMLSDAIAELVRKEGILFHYLFSKNKQETNERDRVESLNLNVKISNVTQIYNSANGELFSNKEAVRYYYPSIFALEEISFMLERAMNNKHRQTINDDLMGEYLVVFENIAKHFQFQADLNLRDMQPLPQYNYIRASLMNIQRNCVEQRQAITKD

SEQ ID NO: 70772 - protein, 424 aa, Staphylococcus epidermidis
MKEKRSNVRWYFAIGFFFIGVIAYMDRSNISYIAVPMMKDLGLTKTQFGLLASFFSLGYALMQVPSGMLAEKFGPRKMITVALVWWSAFTILTGMIKHHGLLYFIRFLFGVGEAPMYPSNAVFNSFWFAKNEKGRASSALLAGSYFGPVLAPIITIAIVNAFNWQAVFYIFGVVGILMAVLWAIIAKDLPEQHKMVNDAEKRFITQNRDIVATEKSLPPWKRFLSHFSFYAIALQYFVVQFVIALFLIWLPTYLTEQYHVNFKEMTISALPWLFMFFLILFAGAISDKILNTGQSRFVARGVIAIAGFVVFSISIFLAVHTDNLYVTIFWLSLCLGGVGISMGMSWAAATDLGRNFSGTVSGWMNLWGNVGALISPLLAGIVVDHLGWSMTLQLLIVPAIIAAILWFFVKPDKPLIVSEEHVNK

SEQ ID NO: 70773 - protein, 253 aa, Staphylococcus epidermidis
MDNLQRYFMNQSADENQCFFIENKEDYHHIVNVMRYKEGQNIIVTFSDENVFKCKIISINDQSIEIKLVEKQQINTELPQNITICSGLIKADKYEWMIQKATEMGANEFIAVAMERSVVKLNDSKVEKKLSRWQKIIKEAAEQSYRLTIPNIKFKSNLKEIYGMISQYDYVLIAYEEQAKHGELSQFKQTIKQFKTQDRVLIIFGPEGGLSDSEISLFGDVSTIVGLGPRILRAETAPLYALSAVSYEKELLG

SEQ ID NO: 70774 - protein, 609 aa, Staphylococcus epidermidis
MGKVIGIDLGTTNSCVSILEGDEPKVIQNPEGARTTPSVVAFKNGETQVGEVAKRQAITNPNTVQSIKRHMGTDYKVDIEGKSYTPQELSAMILQNLKSTAENYLGDTVDKAVITVPAYFNDGERQATKDAGKIAGLEVERIINEPTAAALAYGLDKTETDQKVLVFDLGGGTFDVSILELGDGVFEVLSTAGDNKLGGDDFDQVIIDYLVSEFKKENGVDLSQDKMALQRLKDAAEKAKKDLSGVSQTQISLPFISAGENGPLHLEISLTRSKFEELADSLIKKTMEPTRQALKDAGLSTSEIDEVILVGGSTRIPAVQEAVKKEIGKEPHKGVNPDEVVAMGAAIQAGVITGDVKDVVLLDVTPLSLGIEIMGGRMNTLIERNTTIPTSKSQVYSTAADNQPAVDIHVLQGERPMASDNKTLGRFQLTDIPPAPRGVPQIEVTFDIDKNGIVNVTAKDLGTNKEQNITIQSSSSLSDEEIDRMVKDAEENAEADKKRREEVDLRNEADSLVFQVEKTVKDLGENISDEDKKNAEEKKDALKTALEGEDIDDIKAKKEELEKVIQELSAKVYEQAQQAQQQGQEEQGSQDSTVEDADFKEVKDDEDKK

SEQ ID NO: 70775 - protein, 265 aa, Staphylococcus epidermidis
MTNFHSIDATQVTNVTLNVKDLNKLTDFYSNVLGFSIEKQTNQQTVFNIGNLGYTLTLNELNNGRQPEFREAGLFHVAYLLPTRSDLADFLYHANNLNIAMGGGDHLVSEALYFTDPEGNGIEVYHDRPSEDWVWRDGFVKMDTLEVDVNDLMTQRSNEGWQGWSEEGKIGHLHLKTHNLESAYAFYVEKLGFEHISNFPQALFMSTQKYHHHIATNSWQSNKIRTQNEQTYGLCHFDIYQPNANTTHVTSPEGFDITIHGNEIK

SEQ ID NO: 70776 - protein, 497 aa, Staphylococcus epidermidis
MTNINVRNYIDESYGLFINNEFQASDSGETLTVSNPANGEDLAKVARAGKKDVDKAVQAAHDAFDSWSKISKEERADYLLEISRRIHEKTEHLATVESLQNGKPYRETSTIDVPQAANQFKYFASVLTTDEGSVNEIDQNTMSLVVNEPVGVVGAVVAWNFPILLASWKLGPALAAGNTVVIQPSSSTPLSLIELAKIFQEVLPKGVVNVLTGKGSESGDAIFHHEGVDKLSFTGSTDVGYGVAQAGAERIVPTTLELGGKSANIIFDDANLEQVIEGVQLGILFNQGEVCSAGSRLLVQSSIYDELLPKLKEAFENIKVGDPFDEDTKMSAQTGPEQLDKIESYIKIAEEDDKANILTGGHRITDNGLDKGYFFEPTIIEINDNKHQLAQEEIFGPVVVVEKFDDEQEAIEIANDSEYGLAGGIFTTDIHRALNVAKAMRTGRIWINTYNQIPAGAPFGGYKKSGIGREVYKDAIKNYQQVKNIFIDTSNQTKGLY

SEQ ID NO: 70777 - protein, 194 aa, Staphylococcus epidermidis
MEISRAKELVKEKLPDKRYQHSLRVADTAVKLAEIYDGDIKKAELAGILHDYCKYEDLSTMYQIVRQYELESDLLSYGGEILHGPVCAALMKHEFDVNDEEVLLAIKYHTTGRQQMTKTEKLVFIADYIEPGRKTPGVEEIRDMAYNQGSLDKTIYEISKRTVLFLIEKDITVYGATIACLNYYNYSDERIKDD

SEQ ID NO: 70778 - protein, 269 aa, Staphylococcus epidermidis
MKFAVIGNPISHSLSPLMHHANFQSLNLENTYEAINVPVNQFQDIKKIISEKSIDGFNVTIPHKERIIPYLDDINEQAKSVGAVNTVLVKDGKWIGYNTDGIGYVNGLKQIYEGIEDAYILILGAGGASKGIANELYKIVRPTLTVANRTMSRFNNWSLNINKINLSHAESHLDEFDIIINTTPAGMNGNTDSVISLNRLASHTLVSDIVYNPYKTPILIEAEQRGNPIYNGLDMFVHQGAESFKIWTNLEPDIKAMKNIVIQKLKGEL

SEQ ID NO: 70779 - protein, 366 aa, Staphylococcus epidermidis
MNEILKCIGCGAPLQSENKDAPGYVPEHNMFREDVICRRCFRLKNYNEVQDVGMESEDFLNLLTGLSEKKGIIVNVVDVFDFEGSFINAIQRIVGNKKIILVANKIDLLPKQINHRRVKEWLRKSARKYGLEAEDVVLISANKGWGIDELLQSINHVRNKDDVYIVGTTNVGKSTLINKLIEQSVGEKDVVTTSRFPGTTLDMIDIPLDEKSFMFDTPGIIQSHQMTNYVSENELKIIIPKNEIKQRVYQLNEKQTLFFGGLARIDYVSGGKRPLVCFFSNDLNIHRTKTEKANDLWKSQLGALLSPPQDAQQFNLNDVKAVRLETGKTKRDIMISGLGFITIDAGAKVIVRVPKHVDVILRNSIL

SEQ ID NO: 70780 - protein, 228 aa, Staphylococcus epidermidis
MIGIIGAMEEEVTILKRKLNDMNEINIAHVKFYVGKLNHKEVVLTQSGIGKVNASISTTLLIEKFNPEVVINTGSAGALDQTLSIGDILVSNHVLYHDANATAFGYEYGQIPQMPKTYTTDPTLLKKTMHVLEQQQLNGKVGMIVSGDSFIGSSEQRQKIKQQFPEAMAVEMEATAIAQTCYQFKVPFIVTRAVSDLANGKADISFEEFLDKAALSSSETVSLLVESL

SEQ ID NO: 70781 - protein, 269 aa, Staphylococcus epidermidis
MIKAIAVDMDGTFLDTNKQFDRNRFETIFKELIDKNIKFIAASGNQFAKLKSIFGDREMFFISENGAVIYKGNQLYNYRSFDQYIFQKVVNYLNLNQKINNLIICGVKSAYILKETSEAFKQDARTYYHQLIEVDSLQTLPDDDYVKIAFNINRQTHPDLDEKLALKFKDDIKLVSSGRDSIDVIMPNMTKGQALSRLLKEWQMPASHLMAFGDANNDKDMLELAEHSYVMANSEDQSLFDIASHVAPSNDEQGVLSTIENVVLGYSNK

SEQ ID NO: 70782 - protein, 203 aa, Staphylococcus epidermidis
MKQWMNRLITLIGVLLIILAIYLFSKPYIDNYLHEKDNDHKIENYDKKEKEQTKTSKSTPKIPSDKSKMAGYIEVPDAQIKEPVYPGPATPEQLNRGVSFAEGDESLNQQNISIAGHTFTDRSHYQFTNLKSAKIGSKVYFKTGNQTRKYKITKIRDVKPTEVKVLDEHPNKKNQLTLITCDDYNEETGVWETRKIFIATQIN

SEQ ID NO: 70783 - protein, 299 aa, Staphylococcus epidermidis
MFDSIRETIDYSVENNISFADMMINDEMEREGKSREEVRDLMRQNLNVMREAVEKGTTGDGVESVTGYTGHDAAKLRDYNENNHALSGHEMIDAVKGAVATNEVNAAMGIICATPTAGSSGTIPGVIFKLEKTHNITEDQMIDFLFTSALFGRVVANNASVAGATGGCQAEVGSASAMAAAAAVSIFNGSPEQSGHAMALAISNLLGLVCDPVAGLVEIPCVMRNAIGSGNALISADLALAGVESQIPVDEVIGAMDRVGRNLPASLRETGLGGLAGTPTGEEIKRKIFGEADNMVKNK

SEQ ID NO: 70784 - protein, 317 aa, Staphylococcus epidermidis
MKNISDIAKLAGVSKSTVSRFLNNGSVSPATKEKITKIIEENNYQPNQFAQSLRARRTNLIGAIIPRMNSYAVDETIKGLVHQCNQHRYQLLLNYTGLKIDGEISALKTLSRSKVDGIVLMATHITEAHIEVIEKIDVPVIIVGQEHDRLYSIYHDDYEAGYKIGVLIGEKGCRNVHFFGVSEEDIAVGIQRKLGVIQALKDYHISPKIYETTFKHEQAFKDVSQQLERVHDADAIVGATDTIAFAIHKYCSDHQQRFYNCSIYGFGGDPMTQIVSPVIQTVSYNYFEAGKQALKEINQLLKGEQTTLKIKIPIKLN

SEQ ID NO: 70785 - protein, 466 aa, Staphylococcus epidermidis
MNTSQKFRGDNRLLLGIILGVITFWLFAQSLVNLVVPLQSSYNSDIGTINIAVSLSALFSGLFIVGAGDIADKIGRVKVTYIGLALNIVGSVLIIITPLPSLLIIGRAIQGLSAACIMPATLAIINEYYIGTARQRALSYWSIGSWGGSGVCTLFGGLMATNLGWRSIFIVSIILTILSMFLIKHTPETKAEPIGDQPTETKKFDVVGLIILVVSMLSINVIITQTSQFGLFSPFILGLIAIFVISLIIFVIYENKIKQPLVDFDIFKNKGYTGATISNFMLNGVAGGTLIVVNTFYQQKLDFNSQETGYISLTYLIAVLIMIRVGEMILQSLGPKRPLLLGSALTVIGLILLSLTFLPNAWYIASSVIGYLLFGTGLGVYATPSTDTAVAQAPDDKVGVASGVYKMASSLGNAFGVAISSTVYSVLAAQLNLTLGGFTGVMFNALIALLAFLSILFLIPKKQSNV

SEQ ID NO: 70786 - protein, 250 aa, Staphylococcus epidermidis
MKIDLNCDLGEAFGNYTFGGDQHILPLITSANIACGYHAGDEDVMNETVQLAKKNNISIGAHPGLPDLKGFGRRKMDLTPNEIYNLVIYQLGALSGFCKINHVKMMHVKPHGALYQMGARNKEIAHAIAQAVFDFDSNLIFVGLANTLLISEAELVGLKVASEVFADRRYEDDGQLVSRKKTDATITNTDEAIQQALKMVLENKVVSKNGKIIDLKADTICVHGDGKHALEFVTQIRNELMKEGIDIQSL

SEQ ID NO: 70787 - protein, 591 aa, Staphylococcus epidermidis
MLNLFILLLERVGLIILLAYILMNINHFKTMMSERDKWRSKFQLIIIFGIFSMISNFTGIEIENGHIVSGDIYYHLSKDASMANTRVLTIGVSGLIGGPWVAIIVGIISGLCRLYIGGADAYTYLISSIVIAIISGYFGHQTIKQNTYPSIKKGAIIGAITEIIQMGCILLFTNNLHHAITLVSFIALPMIIINSLGTAIFLTIILSTIKQEEQMRAVQTHDVLQLANETLPYFRSGLNEKSAQQAAEIILKLMQVSAVAITNKKDILTHIGAGSDHHVARKEIITDLSKEVIQSGKLKVAHTREGIGCHHPNCPLEGAIVVPLYIHNEVAGTLKFYFTDNNIISTSDQQLAKGLANIFSSQLELGQAEMQGQLLKDAEIKSLQAQVNPHFFFNAINTISALVRIDSEKARRLLIQLSQFFRSNLNGARNNTITLQKELQQVAAYLSLEQARYPNRFNIHYRIDDQCQDALIPPFIIQILVENSIKHAFKNRKKNNHIDVDVSMKQDYLSISVQDNGQGIPADQLDTIGYTTVTSTTGTGNALVNLNKRLTGLFGTTSALNIQSSQSGTTVSCLIPYKSSKEEHFNESVNR

SEQ ID NO: 70788 - protein, 453 aa, Staphylococcus epidermidis
MMYRCLIANRGEIAVRIIRACRELNIETVAIYAKGDENSLHVSLADQAICIGEANPLDSYLNIDRIISAAKVTESNVIHPGYGFLSESTNFAKAVEDNHIHFIGPSKTTMEMMGDKITARQTVKQAGVPVIPGSNDAVQSVDEIKLLSKEIGFPVVLKAASGGGGKGIRIVKEASHLDQALKEAKSEGQKYFNDDRVYVEAFIPVAKHVEVQIIGDGKNNYVHLGERDCSVQRKNQKLIEEAPCAALTEERRTRICGDAVKVAQASRYRSAGTIEFLVTEDAHYFIEMNARIQVEHTVTEMRADRDLLQAQLYLLTHGELPFTQKDILFNGHVIEARINAENPEKNFLPTPGKVNKLHLPQGFNIRVDSLLYTGYQVSPYYDSLVAKVIVKDSNRQTAINKLKVALDEMVIEGFTTTADFLYAVLNYPIYAKGDASKVDIKFLEKHQIIKEVK

SEQ ID NO: 70789 - protein, 252 aa, Staphylococcus epidermidis
MKALIVDDEPLARNELQYLLNLNDAIDEIEEAENIEETLEKLLYNTFDLIFLDINLMDESGIDLAQKINKMKRSPHIIFATAHEKFAVKAFELNATDYILKPFEKERINQAVNKVDMAKDKPKNKDKTITPKYIDYSDDERAQTHVLPIEVDERIHILNFTDIIALSVNNGITTIDTTKQSYETTETLNHYEKKLPSSLFIKIHRATIVNKEHIQTIEHWFNYTYQLTLTHEFKYQVSRSYMKTFKQQLGLQ

SEQ ID NO: 70790 - protein, 340 aa, Staphylococcus epidermidis
MTREIKARATNWDKDNSIALTYWKQNVKQMWTEEEFKPSKDLSVWKTLSADEQETYVKALSGLTGLDTTQGTEGMPLLAFHYPEEIWRGVFAFMSMMENIHHKSYSHIFTSLLERKDTHYYLKEWVPANKYLNKKTKLITTNYYKLLKPNPTDREIYVAMASSIFLESFLFFSGFYYPLYLAGQGKMVHSGEIIRKIILDETIHGSGTGYAAQVIFDKFSKEEQEDIRKELMELFDQLYFNEVEYAASLYDKLGLTEDVIRYIQYNGNRALMNLGWETVFNPEPFNPIVENGLRTDTTNHDFFSVKGDGYTLALNQVPLRDKDFDFNNVISYELSNKFLQ

SEQ ID NO: 70791 - protein, 87 aa, Staphylococcus epidermidis
MPYLSPETMWFYSPTAFDIPQEHIINVAAVAQKWIDQGVSTILFVNSEIETNKLARLYAYAHDRGLKSLYYTRNKLISIAECTSCAV

SEQ ID NO: 70792 - protein, 134 aa, Staphylococcus epidermidis
MKKTAVLNSHISSAISTLGHYDLLTINDAGMPIPNDDKRIDLAVTKSLPCFIDVLETVLTEMEIQKIYLAEEIKTANAQQLKAIKKLINDDVEIKFIAHSEMKEMLKSPLNKGNIRTGEITPFSNIILESNVTF

SEQ ID NO: 70793 - protein, 422 aa, Staphylococcus epidermidis
MKTLEEVKSKTQKIMKKPELLAPAGNLEKLKIAVHYGADAVFLGGQEYGLRSNADNFTMEEIAEGVDFANRYGAKIYVTTNIIAHDENMEGLEEYLQNLESTGATGIIVADPLIIETCKKVAPRLEIHLSTQQSLSNYKAVEFWKQEGLDRVVLARETGAMEMSEMKEKVDIEIEAFIHGAMCIAYSGRCTLSNHMTARDSNRGGCCQSCRWDYDLLEVDSDGELDLYYDNSDVTPFAMSPKDLKLIESIPQMMELGIDSLKIEGRMKSIHYIATVVSVYRKVIDAYAEDPENFKIKTEWLMELNKCANRDTAPAFFQGTPGYEEQMFGEEQSKKSSYDFCGLVLDYDHETQLATIQQRNHFKPGQEIEFFGPEIDSFKQVVEAIYDEEGNSLDAARHPLQIVQIKVDKPIYSNNMMRKEIG

SEQ ID NO: 70794 - protein, 534 aa, Staphylococcus epidermidis
MNIYNKVTLSVILVITIIISFLFYFYTTEKKVDKDKLYENKITNHKQAGKPKNYGVASNNKIATKVGNKIIEDGGNAVDAAIGVSYALAVTEPHSSGLGGGGATLTYNGKENETPKAYEYKTMSSYEYKEGDKIGVPGFVRGLHDMHAKEGKMDEKKILDYVIPLAKDGFEVDSELERSLKLYGRDIDHNSPFYKGNKSVREGDIVKQDKLANTLTKIKDKGPDYFYEDIGKSVSKQLDNKLTERDFKEFKTEEKEAVSTDYKNNQVYSAPNPLGGTLMLQGLKIDEKENVDNMDRNNFITAMIKSRDVMYKNRDIVNGNEPSNEQHLTDDYLLGELNKVNIGENTDNGSDFDQIRTDNTSTTHFVVIDKNGKLASTTNTLSSYFGTGDYMKEGFYMNNSLGDFSKDKSSPNHGEPHKAPRSFISPSVIVGPNFYMGIGTPGGNKIPTILNEVIVDYLNSDGSLQESINKPRFYNDGGTIFYENAMTDEDINIFKSLGYGVEEKHNDPNFGSVQGAVYDKDKNTVDVGHDVGNR

SEQ ID NO: 70795 - protein, 350 aa, Staphylococcus epidermidis
MKAYEYLKPGHAQLTDKEKPTITSSTDAIIRIVKTTICGTDLHIIKGDTPEVKSHTTLGHEGIGIIEEIGDNVNNFKVGDKVIISCISSCGKCYYCKKGIYAHCENGGGWILGHLVNGTQAEYVKVPFADNSLYHAPSNLKEDALVMLSDILPTGYEIGVLKGKVKPGCTVAIVGAGPVGLAALLTAQFYSPSKIIMIDLDDNRLETAKELGATHLINSKETETAIKKVKSLNPRGVDVAIEAVGIPQTFDLCQNLIGVDGTIANVGVHGLPVQLDIDKLWIKNINVTTGLVSGNTTEELLEALKSKIIQPEQLVTHYSKLSEIESAYDLFRNATDHKAIKLIIENDITI

SEQ ID NO: 70796 - protein, 137 aa, Staphylococcus epidermidis
MDKRESISVPSKLSLAYYSRTRQTERFMEKVLEQIQIDVHRIKDEPLEINNSYVLITPTYDFGEVPAPVETFLKNETNQNNLIAVMSSGNRNWGTNFAIAGDTISKRFNVELIGKYELAGNMVDVNKLVDYIKGRVM

SEQ ID NO: 70797 - protein, 418 aa, Staphylococcus epidermidis
MLSIKNLTKIYSGNKKAVDNISLDIQSGEFIAFIGTSGSGKTTALRMINRMIEATDGQIMMNGKDVRNMNPVELRRSIGYVIQQIGLMPHMTIRENIVLVPKLLKWSKEKKDEKAKELIKLVDLPEEYLDRYPAELSGGQQQRIGVVRALAAEQDIILMDEPFGALDPITRDTLQDLVKELQQKLGKTFIFVTHDMDEAIKLADKICIMSKGKVVQYDTPDNILRYPANDFVRDFIGQNRLIQDRPNMKSVESAMIKPVTVKADDSLNDAVNIMRTRRVDTIFVVNNQNKLLGFLDIEDINQGLRARKELIDTMQRDVYKVHINSKLQDSVRTILKRNVRNVPVVDNDEHLIGLITRANLVDIVYDSIWGEEDSDSYEIPNESLDENNHDLPQNQTDTRTNINEDVNDYHDAQHRGED

SEQ ID NO: 70798 - protein, 350 aa, Staphylococcus epidermidis
MKAAVWYGQKDVRVEDREPKAIKDNEVQVKVSWAGICGTDLHEYLEGPIFISTDQPDPLLGQTAPVTLGHEFSGVVENVGKDVSRFKKGDRVVVNPTVSKREKPENVDLYDGYSFIGLGSDGAFAEFTNAPETNVYHLPDNVSAREGALVEPTAVAVQAVKEGELLFGDTVAVFGAGPIGLLTIVAAKAAGASKIFVFDLSEERLAKAKSVGATHVYNSGNVDPVQTVYEHTDNGVDVSFEVAGVGITLQQSIEVTRPRGTAVIVSIFGHPVEFNPLLQMNKGVKLTTTIAYTPTTFQQTIDLIANGSLNVKDVVTDQIELDNIVESGFNQLVNDKSQAKILVRLNGDQK

SEQ ID NO: 70799 - protein, 102 aa, Staphylococcus epidermidis
MTEHNHDAELTINNEEELLTLYDENGNEVLYRKMLEFYHPEFKKEYVVLAEEGAQSDDEDMIELVPMINEPDESGDGGKLVPIETDEEWDMIEEVVNTEINE

SEQ ID NO: 70800 - protein, 142 aa, Staphylococcus epidermidis
MLKHKILGLDVGSKTVGIAISDLMGWTAQGLDTLRINEEQDDLGIDQLVKIIKDNQVGTVVIGLPKNMNNSIGFRGEASIKYKEKLQESIPSIDIVMWDERLSTMAAERSLLEADVSRQKRKKVIDKMAAVFILQGYLDSIQ

SEQ ID NO: 70801 - protein, 392 aa, Staphylococcus epidermidis
MTVARTTTFILSVFIVGMVEMMVAGIMNLMSQDLHVSEAVVGQLVTLYALTFAICGPLLVKLTHRFSSRSVLLWTLIVFIFGNGMIAIAPHFGIIVVGRILSSAAASLIIVKVLALTAMLTSAKNRGKMIGIVYTGFSGANVFGVPIGTVIGDWVGWRFTFLFIIIVSVFVGVLMLIYLPKEDELSHPNQTPRSSSIESQTGSSVIRPREVFKYLMITFLVLVANSVTFVFINPLILSNGHEMSFVSLALLVNGVAGVIGTSLGGVLSDKFTSKRWLIISISIFIIMMIILNLLLPGTGLLLVGLFMWNLMQWSTNPAIQSGIIEHVEGDTSQVMSWNMSSLNAGIGVGGIVGGLVMTHLSVEYVTYTSALIGLISLIIVFTLKNRHYAKNL

SEQ ID NO: 70802 - protein, 86 aa, Staphylococcus epidermidis
MENFDKTMKFSYEEIPKEDVKSVLQNVHRTLEERGYNAVNQIVGYLLSGDPAYIPRQNEARNQIRHIDRDVIMEELVSNYLKESKN

SEQ ID NO: 70803 - protein, 876 aa, Staphylococcus epidermidis
MKKMKASEIRQKYLDFFVEKGHMIEPSAPLVPIDDDSLLWINSGVATLKKYFDGRETPKKPRIVNSQKAIRTNDIENVGFTARHHTFFEMLGNFSIGDYFKHEAIEFAWEFLTSDKWMGMEPEKLYVTIHPEDTEAFRIWHEDIGLEESRIIRIEGNFWDIGEGPSGPNTEIFYDRGSAYGKDDPAEEMYPGGENERYLEVWNLVFSEFNHNKDNTYTPLPNKNIDTGMGLERMTSISQNVRTNYETDLFMPIIKEVEHVSGKKYLIDDAQDVAFKVIADHIRTISFAIADGALPANEGRGYVLRRLLRRAVRFSQSLGINEPFMYKLVDIVADIMEPYYPNVKDKSNFIKRVIKSEEERFHETLEEGLTILNELIKEAKNSDQVIKGHDAFKLYDTYGFPIELTEELATQENLSVDMPTFEQEMQQQRDRARQARQNSQSMQVQSEVLKNIQDESQFVGYETTDYQSLITHIIYNGEEVKHVEAGETIYFILRETPFYAVSGGQVADKGTVGNESFEINVTDVTKAPNGQNLHKGIVQFGEATQNAKVEARVNKEDRRLIQKNHSATHLLHAALKEVLGDHVNQAGSLVEPERLRFDFSHFGPMTQEEINLVERRVNEEIWRAIDVRIQEMSIEEAKSIGAMALFGEKYGDIVRVVNMAPFSIELCGGIHVNNTAEIGLFKIVSESGTGAGVRRIEALTGKGAFLHLEEIETQFNNIKNHLKVKSDNQVVEKVKQLQEEEKGLLKQLEQRNKEITSLKMGNIEEQVELINNLKVLATEVEIPNPKAIRSTMDDFKSKLQDTIIVLVGQVDGKVSVIATVPKSLTNQVKAGDLIKNMTPIIGGKGGGRPDMAQGGGTQPEKITEALRFIKDYIKNL

SEQ ID NO: 70804 - protein, 810 aa, Staphylococcus epidermidis
MSDPTLFDYSMIKGTVDAILFQNTDNFYTVLKVDTIESNEKFDSMPTVVGFLPNVVEGDVYTFKGQVVQHPRYGKQLKAETFEKELPQTKEAIISYLSSDLFKGIGKKTAQNIVNTLGENAINDILTRPEILESVPSLPKKKQKQIADQINANQESEKIMIRLHDLGFGPKLSMAIYQFYMGDTLNVLDKNPYQLVYDIKGIGFNKADQLARNVGIEPHSPERLKAALLFTLEEECIKQGHTYLPRTIVIETTQNLLNEDIEKPIETEQLLEIIDVLSEEKKLISEADQVSIPSLYYSELKSVQNLYRIKTNTSKLKEIEQSDLQIHIGDIESQNEVNYSASQKEALETAINSKIMLLTGGPGTGKTTVIKGIVELYAEIHGLSLDYDDYNEDDYPVVLAAPTGRASKRLHESTGLEAMTIHRLIGWNQDTQPQDILENEINARLIIIDEMSMVDTWLFHQFLSAVPLEAQIVFVGDEDQLPSVGPGQVFKDLIDSEIIPRVNLTEVYRQQDGSSIIDLAHRMKLNEPIDITKRYHDRSFIRCGTNQIPDVVDKVVKSAVAKGYDMSDIQVLAPMYKGNAGIKRLNQVLQSILNPKQQDDREIEFGEAVFRKGDKVLQLVNRPNDNIFNGDIGIIVGIFWAKENALNKDVLVVDFEGNEITFTKQDLMELTHAYCTSIHKSQGSEFPIVIMPIVRQYYRMLQRPILYTGLTRAKQSLVLLGEQEAFDIGLKTNGQIRLTQLNDLLKSYFGQNKNNLTTNKQTINEQKENNNHLDLKNEKENDIQLNESTIFQIDPMINMGEMTPYDFVER

SEQ ID NO: 70805 - protein, 372 aa, Staphylococcus epidermidis
MSNKDIRVVVGMSGGVDSSVTAYLLKEQGYDVIGIFMKNWDDTDENGVCTATEDYNDVIAVCNQIGIPYYAVNFEEQYWDKVFTYFLDEYKKGRTPNPDVMCNKEIKFKAFLEHALKLGADYVATGHYARIRRHDDGHVEMLRGVDNNKDQTYFLNQLSQEQLSKVMFPIGDIEKSEVRRIAEEQNLATAKKKDSTGICFIGERNFKEFLSHYLPAQSGEMLTLNGKKMGQHSGLMYYTIGQRHGLGIGGDGDPWFVVGKNLNDNVLYVEQGFHHDALYSDYLIASDYSFVNPSEIDLEKGFECTAKFRYRQKDTKVYVQRENENSIRVTFAEPVRAITPGQAVVFYNQEVCLGGATIDDVYKNEGQLSYVV

SEQ ID NO: 70806 - protein, 677 aa, Staphylococcus epidermidis
MIMFKKLFGQMQRIGKALMLPVAILPAAGLLLAIGTAFQGEALQHYLPFIKNDIVQQIANMLTGAGGIIFDNLPIIFALGVAIGLAGGDGVAAIAAFVGFIILNKTMGAFLHVTPDKLSDPTNGYANVLGIPTLQTGVFGGIIIGALAAWCYNKFYNITLPSYLGFFAGKRFVPIMMATTSFILAFPMAIIWPTIQNGLNAFSEGLLDSNTGLAVFLFGFIKRLLIPFGLHHIFHAPFWFEFGSWKNAAGEIIRGDQRIFIEQIREGAHLTSGKFMQGEFPVMMFGLPAAALAIYQTAKPENKKVVAGLMISAALTSFLTGITEPLEFSFLFVAPFLFVIHAVLDGLSFLTLYLLNVHLGYTFSGGFIDYVLLGILPNKTAWWLVIPVGIIYAVIYYFVFRFLIVKFNYKTPGREDKKSSVTTTSASQLPFDVLKAMGGKENIKHLDACITRLRVEVNEKSKVDVAGLKSLGASGVLEVGNNMQAIFGPKSDQIKHDMAKIISGEITKPSETTIDEEVSDDPVHVEDIVETEIYAPGHGEIIPLSEVPDKVFSEKMMGDGIGFVPDSGEIVAPFDGTVKTIFPTKHAIGLESDSGVEVLIHIGIDTVKLNGEGFESLVNTDEPVTQGQPLMKIDLEYLKEHAPSIITPVIITNQEDKTLTIEDVKQVDPGKAIMTIK

SEQ ID NO: 70807 - protein, 579 aa, Staphylococcus epidermidis
MAQIKANEALVKALQTWNIDHLYGIPGDSVDAVVDSLRTVRDQFKFYHVRHEEVASLAAASYTKMTGKIGVALSIGGPGIVHLLNGMYDAKMDNVPQLIIAGQTNSTLLGTKFFQETNISKMVDDVAVYHHQIQKGDNVFEITNEAIRTAYEKKGVSVIICPNDLLTQKIKDTTNRAVDTTKPKPASPKFKSIKKAAKLIDKAKKPVMLIGLGTQHAKDELREFIEAAKIPVIHTLPAKTILPDDHPYSIGNLGKIGTKTSYQTIQDADLLIMAGTNYPYVNYLPKKNIKAIQIDTNEENIGARFKINVGILGDSKVAFHQLTENIKHVAKRPFLDKTLERKAVWDKWMKQDLNNDNSPLRPERLMKAINANLKDDAIISADVGTSTVWSTRYLNLSVNNKFIISSWLGTMGCGLPGAMAAKIAYPNRQAVAITGDGAFQMVMQDFATAVQYNLPMTIFVLNNKQLSFIKYEQQAAGELEYAIDFSDMDHAKFAEAAGGKGYVVRDVSRLDDIVEEAMAQDVPTIVDVHVDPNAAPLPGKIVNEEAFGYSKWAYRSITEDKNLDFDQIPPISVAAKRFL

SEQ ID NO: 70808 - protein, 425 aa, Staphylococcus epidermidis
MKSLDKGFRHLTRKDKLKKLVEYGWLDDENYEILLNHPLINEEVANSLIENVIGQGALPVGLLPRIIVDDKEYVVPMMVEEPSVVAAASYGAKLVNQSGGFKTISSERLMIGQIVFDDVEDTGTLANSIYQIESQIHQIADEAYPSIKARGGGYQRIEIDTFPNHRLLSLKVFVDTKDAMGANMLNTILEAITAHLKVKFSNQNVLMSILSNHATASVVKVQGEIDIEDLHRGERSGEEVAQRMERASVLAQVDIHRAATHNKGVMNGIHAVVLATGNDTRGVEASAHAYASKDGHYRGIATWEYDRSRNKLVGTIEVPMTLATVGGGTKVLPIAKASLNLLNVENAQELGQVVAAVGLAQNFSACRALVSEGIQQGHMSLQYKSLAIVVGAKGEEIAQVAEALKYESQANTAKAQEILMNIRKS

SEQ ID NO: 70809 - protein, 172 aa, Staphylococcus epidermidis
MYQSMYDSPVGLLQLITNDGISLSHVLYPNQHLKGIKTKDTLDVFKDTKAWLREYFKGNYPEIKVPLAPKGTDFQQKVWNELQTIRYRELKTYGEIAKTVGRAMNKPAMSAQAVGGAVGSNPISILIPCHRVVGKDGNLTGYGGTLDNKIKLLKLEEIDMTHLYRPKKTTKP

SEQ ID NO: 70810 - protein, 161 aa, Staphylococcus epidermidis
MTLSIIVAHDKQRVIGYQNQLPWHLPNDLKHIKQLTTGNTLVMARKTFNSIGKPLPNRRNVVLTNQASFHHEGVDVINSLDEIKELSGHVFIFGGQTLYEAMIDQVDDMYITVIDGKFQGDTFFPPYTFENWEVESSVEGQLDEKNTIPHTFLHLVRRKGK

SEQ ID NO: 70811 - protein, 318 aa, Staphylococcus epidermidis; identical to SEQ ID NO: 70576

SEQ ID NO: 70812 - protein, 794 aa, Staphylococcus epidermidis
MANTTLTLDIIGMTCAACSNRIEKKLNRMNHVQAKVNLTTEKATIDYESDDYHLEDFVEQIQSLGYDVAVEQVELNINGMTCAACSNRIEKVLNQTQGVQQATVNLTTEQALIKYYPSATNTEALIKRIQNIGYDAETKTSSKAQSNRKKQELKHKRNKLIISAILSLPLLLVMVVHISPISIPSILVNPWVQLILSTPVQFIIGWQFYVGAYKNLRNGSANMDVLVAVGTSAAYFYSIYEMMMWLTHQTHHPHLYFETSAILITLILLGKYLEARAKSQTTNALSELLNLQAKEARVIKENKEIMLPLDKVKVGDTLLIKPGEKIPVDGKVTKGDTSIDESMLTGESIPVEKSSGDSVIGSTMNKNGSIMIEATQVGGDTALSHIIKVVEDAQSSKAPIQRLADIISGYFVPIVVSIAVITFIIWIIFVHPGQFEPALVSAISVLVIACPCALGLATPTSIMVGTGRAAENGILFKGGQFVERAHYVDTIVLDKTGTITNGQPVVTDYVGDNDTLQLLASAENASEHPLADAIVTYAKDKGLNLLDNDTFKSIPGHGIKATIHQQQILVGNRKLMNDYNISISNKLNDQLNHYEHLGQTAMMIAVDNQINGIIAVADTVKNDAKQAIKELRNMNIDVVMLTGDNNRTAQTIAKQVGIEHVIAEVLPEEKAHQISLLQDKGKQVAMVGDGINDAPALVKADIGMAIGTGAEVAIEAADITILGGDLLLVPKAIKASKATIKNIRQNLFWAFGYNVAGIPIAACGLLAPWIAGAAMALSSVSVVMNALRLKKMKL

SEQ ID NO: 70813 - protein, 71 aa, Staphylococcus epidermidis
MIIMTQKIIKVEGMSCEHCRNAVESALAKLNGVSSAEVNLDENHVRVEYNDSKVTFENMKEAIEEQGYDVK

SEQ ID NO: 70814 - protein, 386 aa, Staphylococcus epidermidis
MEMSERLASIPDSYFGKIMGRIVEHGPLPLINMAVGIPDGETPKGIINHFSEALCIPENQKYGPFHGKDAFKQAIVNFYQRHYDVELDKEDEVCILYGTKNGLVALPTCVVNPGEIVLLPDPGYTDYLAGVMLADAKPLPLKLSPPNYLPNWNTISAKVLEKTKLIYLTYPNNPTGSTATQDDFDEAIHRFKGTQTKIVHDFAYSAFGFDAKNPSILASKNAKDVAIEIFSLSKGYNMSGFRVGFAVGNKKMIQALKKYQTHTNAGMFGALQDAATYALNHYDEFLEKQNEIFRRRRDNFESQLKHAHLPFVHSKGGLYIWLHTPPGYDSEAFEQLLLKEKSILVAPGKPFGENGNQYVRVSLALDDKQLEEAANRLTQLRYLYER

SEQ ID NO: 70815 - protein, 602 aa, Staphylococcus epidermidis
MNENNYRRLNKTYKPHYLPGLDGLRAIAVIGIIIYHLNTKWLSGGFLGVDTFFVISGYLITSLLLSEYYRNNSINLVNFWLRRFKRLIPAMMFVVTVVLIYTLLFKPELIISIKHDAIAALFYVSNWWYIIQDVDYFNQFAVAPLKHLWSLAIEEQFYLFFPFILLGLLKFFKKRTTMIILLIISLLSLTAMITIHMYTGNNSRVYFGTDTRLQTLLLGCLLAFIWPPFSFRKDISKGAKASISAIGIVGMAVLIYLFVVVSDQDKWIYSGGFYAISFLTLFVIASVVHPSSVLKKILSFKLFIYIGKRSYSLYLWHYPIIIFMNSYFVQGQIPWFVYICEVILMFVMAEVSYKFIETPIRKNGFKAFTVIPKNLTRFSRTIIVLILLVPSAFIVFGAYDSLGKEHDKQQAAKQKSFKTNQKAKPKKPDENNQDKSSQQHFNPKEASPLLLGDSVMVDIGQVFSEKVPNANIDGKVGRQLIEGKDLINQKYQDYTKKGQSVVIELGTNGEFTKDQMNELIDSLGEADIYLIKVRVPRDYESTNNKIMEQVAKKHKNVHIVDWYKTSEGHSEYFAYDGIHLEYSGVKALSNEIIKKMKEVNEK

SEQ ID NO: 70816 - protein, 247 aa, Staphylococcus epidermidis; identical to SEQ ID NO: 70212

SEQ ID NO: 70817 - protein, 474 aa, Staphylococcus epidermidis
MSGKLEELQLKVARLSRRTHELGIPIMVLFEGIPASGKTRLSNELLLHLDAKYSRFIATKSPESNDLRYQFLQKYWNTLPQKGNINIYFRSWYSHFLDYKENKIKHDQYKNYDVLVNQIYHFESMLKNDNYEIIKFFIEINEEKRNEHIQQTKDNPLTRWKVQEYENVIPQESYLNQMHQFINKDKDWKVIDYTEREHAFEKMYLHLIDRLEQAIKKVEQQTTKVNGKFTSSFTTSLFNNNLEKVDKKTYKNLIVELQQRMREIQFALYERKIPLVLVFEGMDAAGKGGNIKRIREKLDPTGYEVNGISAPTDVELKHHYLWRFAKKMPKSGHIEIFDRSWYGRVLVERVEGFASQNEWQRASDEINQFEKMWTDEGTIILKFFLCLDKDEQLKRFKDRENNPDKQWKITEEDWRNREKWDKYLEASHDMIESTNTSYAPWYIVLADHKKTSRIEVLKTIIRKCEEVLWGVKTY

SEQ ID NO: 70818 - protein, 159 aa, Staphylococcus epidermidis
MKITILSVGKLKEKYWKQAIAEYEKRLGPYTKIELIEVPDEKAPENMSDKEIEQVKEKEGQRLLNKIKPQSTVITLEIKGKMLSSEGLAKELQTRMTQGQSDFTFVIGGSNGLHQDVLQRSNYALSFSNMTFPHQMMRVILIEQIYRAFKIMRGEAYHK

SEQ ID NO: 70819 - protein, 98 aa, Staphylococcus epidermidis
MLLFIGGPIMDKINKEDTDTKKDSNNNYKHQNDHIDRQGLNGYQKTDLDLEIERELQEMMENGESNKETKSKHFKILSFVSMIVIVVIAIIRFIQKTI

SEQ ID NO: 70820 - protein, 610 aa, Staphylococcus epidermidis
MKWLKQLQSLHTKLVIVYVLLIIIGMQIIGLYFTNSLEKELLDNFKKNITQYAKQLDVNIEKVYKDKDKGSVNAQKDIQDLLNEYANRQEIGEIRFIDKDQIIMATTKQSNRGLINQKVNDGSVQKALSLGQTNDHMVLKDYGSGKERVWVYNIPVKVDKQTIGDIYIESKINDVYNQLNNINQIFIVGTAISLFITVILGFFIARTITKPITDMRNQTVEMSKGNYTQRVKIYGNDEIGELALAFNNLSKRVQEAQANTESEKRRLDSVITHMSDGILATDRRGRVRIANDMALKMLGLAKEDVIGYYMLGVLNLENEFSLEEIQENSDSFLLDINEEEGIIARVNFSTIVQETGFVTGYIAVLHDVTEQQQVERERREFVANVSHELRTPLTSMNSYIEALEEGAWQDKELAPSFLSVTREETERMIRLVNDLLQLSKMDNESDQITKEIIDFNMFINKIINRHEMAAKDTTFVREIPQQTIFAEIDPDKMTQVFDNVITNAMKYSRGEKRVEFHVKQNALYNRMTIRIKDNGIGIPINKVDKIFDRFYRVDKARTRKMGGTGLGLAISKEIVEAHNGRIWANSVEGQGTSIFITLPCEIIEDGDWDE

SEQ ID NO: 70821 - protein, 239 aa, Staphylococcus epidermidis
EKRFIYMARKVVVVDDEKPIADILEFNLKKEGYDVYCAYDGNDAVDLIYEEEPDIVLLDIMLPGRDGMEVCREVRKKYEMPIIMLTAKDSEIDKVLGLELGADDYVTKPFSTRELIARVKANLRRHYSQPAQEVSGATNEITIKDIVIYPDAYSIKKRGEDIELTHREFELFHYLSKHMGQVMTREHLLQTVWGYDYFGDVRTVDVTIRRLREKIEDDPSHPEYIVTRRGVGYFLQQHD

SEQ ID NO: 70822 - protein, 427 aa, Staphylococcus epidermidis
MSSIVVVGTQWGDEGKGKITDFLAEQADVIARFSGGNNAGHTIQFGGETYKLHLVPSGIFYKDKLAVIGNGVVVDPVALLKELDGLNERGISTDNLRISNRAQVILPYHLAQDEYEERRRGDNKIGTTKKGIGPAYVDKAQRIGIRMADLLEKETFERRLKENIEYKNAYFKGMFNETCPTFDEIFDEYYAAGQRLKDYVTDTAKILDDANVADEKVLFEGAQGVMLDIDHGTYPFVTSSNPVAGNVTVGTGVGPTSVSKVIGVCKSYTSRVGDGPFPTELFDEDGHHIREVGREYGTTTGRPRRVGWFDSVVLRHSRRVSGITDLSINSIDVLTGLDTVKICTAYELDGEKITEYPANLDQLRRCKPIFEELPGWTEDITGCRSLDELPENARNYLERISELCGVHISIFSVGPDREQTNLLEQLW

SEQ ID NO: 70823 - protein, 466 aa, Staphylococcus epidermidis
MDGMYEQNQMPHSNEAEQSVLGAIIIDPELINTTQEVLLPESFYRGAHQHIFRAMMHLNEDNKEIDVVTLMDQLSSEGSLNEAGGPQYLAELSTSVPTTRNVQYYTDIVFKHALKRKLIQTADSIANDGYNDELELDTILSDAERRILELSSTRESDGFKDIRDVLGQVYETAEELDQNSGQTPGIPTGYRDLDQMTAGFNRNDLIILAARPSVGKTAFALNIAQKVATHEDMYTVGIFSLEMGADQLATRMICSSGNVDSNRLRTGTMTEEDWSRFTIAVGKLSRTKIFIDDTPGIRINDLRSKCRRLKQEHGLDMIVIDYLQLIQGSGSRFSDNRQQEVSEISRTLKAIARELECPVIALSQLSRGVEQRQDKRPMMSDIRESGSIEQDADIVAFLYRDDYYNRGEGDEDDDDAGFEPQTNDDNGEIEIIIAKQRNGPTGTVKLHFMKQYNKFTDIDYAHADMS

SEQ ID NO: 70824 - protein, 148 aa, Staphylococcus epidermidis
MKVIFTQDVKGKGKKGEVKDVPVGYANNFLLKNKYAVEATPGNLKQLEQQNKRAEADRQQEIDDAKALKEQLKDIEVEVSAKTGEGGKLFGSISTKQIAEALKKQHDIKIDKRKMDLPHGIHALGYTNVPVKLDKEVEGTIRVHTVEQ

SEQ ID NO: 70825 - protein, 272 aa, Staphylococcus epidermidis
MKTLNHLNKMKASQQKISMVTAYDYPSAKQAQQAEIDMILVGDSLGMTVLGYDSTVQVTLNDMIHHGKAVKRGASDTFIVVDMPIGTVGLSDEEDLKNALKLYQNTNANAVKVEGAHLTSFIQKATKMGIPVVSHLGLTPQSVGVMGYKLQGDTKTAAMQLIKDAKAMETAGAVVLVLEAIPSDLAREISQQLTIPVIGIGAGKDTDGQVLVYHDMLNYGVDRHAKFVKQFADFSSGIDGLRQYNEEVKAGTFPSENHTYKKRIMDEVEQHD

SEQ ID NO: 70826 - protein, 655 aa, Staphylococcus epidermidis
MNRQSTKKALLIPFILMVLTAIALVVVWFIFNQLVAGIATAILIVMIIISGVLLRKAFLKMDNYVDDLSGHISASSNKAIKHLPIGMIVLDEDNHIEWMNQFMTDHIETNVISENVNEVFPNILKQLEKVQEVEIENNNYYYHVRYSENEHCLYFFDMTETERTNELYEDSKPIIATIFLDNYDEITQNMNDTQRSEINSMVTRVISRWAQDYNIYFKRYNSDQFVAYFNQKILAELEDSNFEILSQLREKSVGYRAQLTLSIGVGEGTENLIDLGELSQSGLDLALGRGGDQVAIKNMNGNVRFYGGKTDPMEKRTRVRARVISHALKDILTEGDKVIVMGHKRPDLDAIGAAIGVSRFASMNNLEAFIVLNDSDIDPTLRRVMDEIDKKPELKERFVTSDEAWDMMTSKTTVVVVDTHKPEMVLDENVLNKANRKVVIDHHRRGESFISNPLLVYMEPYASSTAELVTELLEYQPTEQRLTRLESTVMYAGIIVDTRNFTLRTGSRTFDAASYLRAHGADTILTQHFLKDDVDTYINRSELIRTVKIQDQGVAIAHGSDDKIYHPVTVAQAADELLSLEGIEASYVVAKREDNLIGISARSLGSINVQLTMEALGGGGHLTNAATQIKGATIDEAIEQLQQAITEQMSRSEDA

SEQ ID NO: 70827 - protein, 234 aa, Staphylococcus epidermidis
MTNVLYQHGTLGTLMAGLLEGTASINDLLEHGDLGIATLTGSDGEVIFVDGKAYHANEHKEFIELTGDEMTPYATVTKFKADSSFKTSNKNQEEVFDEVKKQMKSENMFSAVKISGTFKKMHVRMMPGQEPPYTRLIDSARRQPEETRENIKGSIVGFFTPELFHGIGSAGFHIHFANDDRDFGGHILDFEVDDVTVEIQNFETFEQHFPVDAKSFTDADIDYKDIADEIREAE

SEQ ID NO: 70828 - protein, 554 aa, Staphylococcus epidermidis
MAEKQYSAAQMVIDTLKNNGVEYVFGIPGAKIDYLFNALEDDDIELVVTRHEQNAAMIAQGIGRLTGKPGVAITTSGPGVSNLTTGLLTATSEGDPVLAIGGQVKRNDLLRLTHQSIDNASLLRSSTKYSAEVQDPESLSEVITNAMRTATSGKNGASFISIPQDVISSPVKADAISLCQKPHLGVPSEQEINEVIEAIKNSKFPVLLAGMRSSSQAETEAIRRLVQKTNLPVVETFQGAGVISRELENHFFGRVGLFRNQVGDELLRKSDLVITIGYDPIEYEASNWNKELDTKIINVDEEHAEITNYMQPVKELIGNIAGTIDMISEHVNEPFINQDHLDELEKLRGEITEATGIKATHKEGVMHPVEIIETMQKVLTDDTTVTVDVGSHYIWMARKYRSYNPRHLLFSNGMQTLGVALPWAISAALVRPNTQVVSVAGDGGFLFSGQELETAVRKNLNIIQLIWNDGRYNMVEFQEEMKYKRSSGVEFGPVDYVKYAESFGAKGLRVTNQEELEAALKEGYETDGPVLIDIPVNYADNVKLSTNMLPNALN

SEQ ID NO: 70829 - protein, 483 aa, Staphylococcus epidermidis
MGSFFNRMTRKENPTIYQNKDGHLKRTLRVRDFLALGVGTIVSTSIFTLPGVVAAEHAGPAVALSFLLAAIVAGLVAFTYAEMASTMPFAGSAYSWINVLFGELFGWVAGWALLAEYFIAVAFVASGFSANLRGLIAPLGISLPKSLSNPFGSNGGVIDIIAAVVIILTALLLSRGMNEAARMENVLVILKVLAIILFVIVGLTAINFSNYIPFIPEHKVTETGDFGGWQGIYAGVSMIFLAYIGFDSIAANSAEAINPQKTMPRGILGSLIVAIVLFVAVALVLVGMFHYSQYADNAEPVGWALRESGHGIIAAIVQAISVIGMFTALIGMMLAGSRLLYSFGRDGLLPSWLSQLNHKHLPNRALVILTIIGVVIGSMFPFAFLAQLISAGTLVAFMFVSLAMYRLRKREGKDLPKPEFKLPLYPILPAITFILVLLVFWGLSFEAKLYTLIWFIVGIIIYLIYGIRHSKKNDEEAYQVPRE

SEQ ID NO: 70830 - protein, 428 aa, Staphylococcus epidermidis
MLDIRLFRNEPEKVKSKIELRGDDPKVVDQVLELDEQRRELISKTEEMKAKRNKVSEEIAQKKRNKEDADDVIAEMRHLGDEIKDIDNQLNEVDNKIRDILIRIPNLINEDVPQGASDEENVEVKKWGTPRDFEFEPKAHWDLVEELKMADFERAAKVSGARFVYLTKDGALLERALMNYMLTKHTTQHGYTEMMTPQLVNADTMFGTGQLPKFEEDLFKVEKEGLYTIPTAEVPLTNFYRDEIIQPGVLPELFTAQTACFRSEAGSAGRDTRGLIRLHQFDKVEMVRIVQPEDSWDALEEMTQNAEAILEELGLPYRRVILCTGDIGFSASKTYDLEVWLPSYNDYKEISSCSNCTDFQARRANIRFKRDAASKPELVHTLNGSGLAVGRTFAAIVENYQNEDGTLTIPEALVPFMGGKTKIEKPIK

SEQ ID NO: 70831 - protein, 893 aa, Staphylococcus epidermidis
MAELPQSRINERNITSEMRESFLDYAMSVIVSRALPDVRDGLKPVHRRILYGLNEQGMTPDKPYKKSARIVGDVMGKYHPHGDSSIYEAMVRMAQDFSYRYPLVDGQGNFGSMDGDGAAAMRYTEARMTKITLELLRDINKDTIDFIDNYDGNEREPSVLPARFPNLLVNGAAGIAVGMATNIPPHNLTEVIDGVLSLSKNPDITINELMEDIQGPDFPTAGLVLGKSGIRRAYETGRGSIQMRSRAEIEERGGGRQRIVVTEIPFQVNKARMIEKIAELVRDKKIDGITDLRDETSLRTGVRVVIDVRKDANASVILNNLYKQTPLQTSFGVNMIALVNSRPKLINLKEALIHYLEHQKTVVRRRTEYNLKKARDRAHILEGLRIALDHIDEIITTIRESDTDKIAMASLQERFKLTERQAQAILDMRLRRLTGLERDKIESEYNELLEYIKELEEILADEEVLLQLVRDELTEIKERFGDERRTEIQLGGLEDLEDEDLIPEEQIVITLSHNNYIKRLPVSTYRSQNRGGRGIQGMNTLDEDFVSQLVTMSTHDHVLFFTNKGRVYKLKGYEVPELSRQSKGIPIINAIELENDETISTMIAVKDLESEEDYLVFATKQGIVKRSSLSNFSRINKNGKIAINFKEDDELIAVRLTTGNEDILIGTAHASLIRFSESTLRPLGRTAAGVKGISLREGDTVVGLDVADSESEDEVLVVTENGYGKRTPVSEYRLSNRGGKGIKTATITERNGNIVCITTVTGEEDLMVVTNAGVIIRLDVHDISQNGRAAQGVRLMKLGDGQFVSTVAKVNEEDDNEENADEAQQSTTTETADVEEVVDDQTPGNAIHTEGDAEMESVESPENDDRIDIRQDFMDRVNEDIESASDNEEDSDE

SEQ ID NO: 70832 - protein, 642 aa, Staphylococcus epidermidis
MNTLSDVNNTDNYGAGQIQVLEGLEAVRKRPGMYIGSTSERGLHHLVWEIVDNSIDEALAGYASHIEVVIEKDNWIKVTDNGRGIPVDIQEKMGRPAVEVILTVLHAGGKFGGGGYKVSGGLHGVGSSVVNALSQDLEVYVHRNGTIYHQAYKQGVPQFDLKEIGDTDKTGTAIRFKADKEIFTETTVYNYETLQKRIRELAFLNKGIQITLKDEREEEVREDSYHYEGGIKSYVDLLNENKEPLHDEPIYIHQSKDDIEVEIALQYNSGYATNLLTYANNIHTYEGGTHEDGFKRALTRVLNSYGTQSKIIKEDKDRLSGEDTREGLTAVVSIKHGDPQFEGQTKTKLGNSEVRQVVDRLFSEHFERFLYENPSVGRIIVEKGIMASRARVAAKKAREVTRRKSALDVSSLPGKLADCSSKNPEESEIFLVEGDSAGGSTKSGRDSRTQAILPLRGKILNVEKARLDRILNNNEIRQMITAFGTGIGGEFDISKARYHKIVIMTDADVDGAHIRTLLLTFFYRFMRPLIEAGYVYIAQPPLYKLTQGKQKYYVFNDRELDKLKQELNPSPKWSIARYKGLGEMNADQLWETTMNPEHRSMLQVRLEDAIDADQTFEMLMGDVVENRRQFIEDNAVYANLDF

SEQ ID NO: 70833 - protein, 377 aa, Staphylococcus epidermidis
MMEFTIKRDYFINQLNDTLKAISPRTTLPILTGIKIDAKENEVILTGSDSEISIEITIPKQVDGEEIVEITETGSVVLPGRFFVDIIKKLPGKEVKLSTNEQFQTLITSGHSEFNLSGLDPDQYPLLPEVSRDDAIQLSVKVLKNIIAQTNFAVSTSETRPVLTGVNWLIQDNELICTATDSHRLAVRKLQLEDESENKNVIIPGKALSELNKIMSDSDEDIDIFFASNQVLFRVGNINFISRLLEGHYPDTTRLFPENYEIKLGINNGDFYHAIDRASLLAREGGNNVIKLSTGNELVELSSTSPEIGTVKEEVNANDVEGGNLKISFNSKYMMDALKAIDNDEVEVEFFGTMKPFILKPKDDDSVTQLILPIRTY

SEQ ID NO: 70834 - protein, 451 aa, Staphylococcus epidermidis
MSEKEIWDKVLEIAQERISNTSYQTFIKDTQLYSLKNDEAIILVSLPFNASWLNQRYSEIMQAIIYDVIGYEVKPHFISEDELASYNNVNTQEVQEPQVQHSSIDDKTWGKEQFNMHNTFDTFVIGPGNRFPHAASLAVAEAPAEAYNPLFIYGGVGLGKTHLMHAIGHHVLSNKPNAKVIYTSSEKFTNEFIKSIRDNETEAFREKYRKIDVLLIDDIQFIQNKEQTQEEFFHTFNELHQNNKQIVISSDRPPKEIAKLEDRLRSRFEWGLIVDITPPDYETRMAILQKKIEEENLDIPPEALNYIANQIQSNIRELEGALTRLLAYSKLQGKPITTELTAEALKDIIQSPKSKKITIQDIQKIVGQYYSVRIEDFSAKKRTKSIAYPRQIAMYLSRELTDFSLPKIGEEFGGRDHTTVIHAHEKIANDIKSDPTFKQEVENLEKEIRNQ

SEQ ID NO: 70835 - protein, 644 aa, Staphylococcus epidermidis
MILLQLNDISKSFDGEDIFTDVNFEVKTGERIGVVGRNGAGKSTLMKIIAGVENYDSGRISKIKNLTMSYLTQQMTLNSEATVFEEMSKPFEHIKKIENLIKDETDWLARNGQDYESDEYQSHIEKYETLTNRYEQLDGYQYESKIKTVLHGLNFTESDFNKPINDFSGGQKTRLSLAQMLLKEPDLLLLDEPTNHLDMETTKWLEDYLKYFKGAIVIISHDRYFLDKIVTQVYDVALGNVKHYVGNYEQFIKQRNQYYEKRMQEFEKQQEEIKRLETFVEKNITRASTSGMAKSRRKTLEKMERIDKPMIDARSANIQFGFDRNTGNDVMHIHDLKIGYDSPITLPINLEIFKGDHIAIIGPNGVGKTTLIKTIAEKKHKLGGQIIFGANLQIGYYDQKQAEFKSNKTILDYVWDQYPHMNEKDVRAVLGRFLFVQEDVKKIINDLSGGEKARLQLALLMLQRDNVLILDEPTNHLDIDSKEMLEQALKDFEGTIIFVSHDRYFINQLANKVFDLNINGGQMYLGDYQYYIEKTEEAAAIKAHETITQNNFENKEINQDANTSTYISQKQQKRQQRKLERQIEHCERQIEELEAQISHIDEQLTQPEVFNDPLKASKFANQKSDTEQKLEQIMLEWEKLQEKL

SEQ ID NO: 70836 - protein, 345 aa, Staphylococcus epidermidis
MGEFEMTNNKLILAIETSCDETSVSVIKNGTELLSNTVLSQIDSHKRFGGVVPEVASRHHVEGITATIDESLVSAKVKMEDIDAIAVTQGPGLIGALLIGINAAKALAFAYDKPIIPVHHIAGHIYANHLEQPLTFPLMSLIVSGGHTELVYMKNHLDFEVIGETRDDAVGEAYDKVARTINLPYPGGPHIDRLAAKGKDVYDFPRVWLEKDSYDFSFSGLKSAVINKLHNLRQKNIEIVAEDVATSFQNSVVEVLTYKAIHACKTYNVNRLIVAGGVASNKGLRNALSEACKKEGIHLTIPSPVLCTDNAAMIGAAGYYLYQAGLRGDLALNGQNNIDIETFSV

SEQ ID NO: 70837 - protein, 45 aa, Staphylococcus epidermidis; identical to SEQ ID NO: 43823

SEQ ID NO: 70838 - protein, 562 aa, Staphylococcus epidermidis
MRSDMIKKGDHQAPARSLLHATGALKQPTDMNKPFVAICNSYIDIVPGHVHLRELADIAKEAIREAGAIPFEFNTIGVDDGIAMGHIGMRYSLPSREIIADAAETVINAHWFDGVFYIPNCDKITPGMLLAAVRTNVPAIFCSGGPMKAGLSAQGKALTLSSMFEAVGAFKEGTISKEAFLDMEQNACPTCGSCAGMFTANSMNCLMEVLGLALPYNGTALAVSDQRREMIRQAAFRLVENIKNDIKPRDIITQDAIDDAFALDMAMGGSTNTVLHTLAIANEAGIDYDLERINEIAKKTPYLSKIAPSSSYSMHDVHEAGGVPAIINELMKKDGTLHPDRLTVTGKTLRENNEGKNIKNFDVIHPLENPYDKQGGLSVLFGNLAPKGAVIKVGGVDPSIKVFTGKAICFNSHDEAVEAIDNHTVREGHVVVIRYEGPKGGPGMPEMLAPTSSIVGRGLGKDVALITDGRFSGATRGIAVGHISPEAASGGPIGLIRDGDKITIDLINRTLNVNQSEEELYRRKNQLEPFRAKVKTGYLARYTSLVTSANTGGIMQVPENLI

SEQ ID NO: 70839 - protein, 115 aa, Staphylococcus epidermidis
MEKAYRIKRNSDFQAIYKNGKSVANRQFVVYTYKNRDLKHFRLGISVSKKLGNAVTRNRIKRAIRENFKVHKQNIIAKDIIVIARQPAKDMNTLEIQSSLEHVLKIAKVFNKKIK

SEQ ID NO: 70840 - protein, 583 aa, Staphylococcus epidermidis
MIKMSNQKSMASPHPSVHQTKESQPLITRSGSQLLVEALQQEDVDFIFGYPGGAVLPLYDTFYDGKIKHILARHEQGATHAAEGYARVSGKTGVVVVTSGPGATNAITGITDAYSDSLPLVVFTGQVATPGIGKDAFQEADLLSMTTPITKHNYQVKKIEDIPRIVHEAFHLANTGRKGPVVIDFPKDMGVLKTDVELTKDINIPGYEVNSNPNKEDINKLIYMIKEAKKPLILAGAGINHSKSNHLLTEFVTRHQIPTVTTLLGLGAVPYHHPLFLGMGGMHGSYASNMALTNCDLLINLGSRFDDRLASKPDAFAPNAKVVHVDIDPSEINKVINTDLGIVADCKLVLENLCHEQVLTSSHEEWNDYCINNKSNYPFKYDENDKNFCKPQKAIEYIGKVTNGNAIVTTDVGQHQMWTAQFYPFKNYGQWVTSGGLGTMGFGIPSAIGAQLAEPEKTVVCFVGDGGFQMTNQEMALLPEYGLNVKIVLINNGTLGMVKQWQDKFFNKRFSHSVFNDQPDFMKMAEAYGIKGFLIDSPDKLESSIDEAFAYHGPALIEVRISPIEPVNPMVPSGKSNHEMEGY

SEQ ID NO: 70841 - protein, 459 aa, Staphylococcus epidermidis
MDFDTITSISTPMGEGAIGIVRLSGPQAIEIGDILYKGKKKLSEVETHTINYGHIIDPETNETVEEVMVSVLRAPKTFTREDIIEINCHGGILTINRILELTMTYGARMAEPGEYTKRAFLNGRIDLSQAEAVMDFIRSKTDRASKVAMNQIEGRLSDLIKKQRQSILEILAQVEVNIDYPEYDDVEDATTDFLLEQSKRIKEEINQLLETGAQGKIMREGLSTVIVGRPNVGKSSMLNNLIQDNKAIVTEVAGTTRDVLEEYVNVRGVPLRLVDTAGIRDTEDIVEKIGVERSRKALSEADLILFVLNNNEPLTEDDQTLFEVIKNEDVIVIINKTDLEQRLDVSELREMIGDMPLIQTSMLKQEGIDELEIQIKDLFFGGEVQNQDMTYVSNSRHISLLKQARQSIQDAIDAAESGIPMDMVQIDLTRTWEILGEIIGESASDELIDQLFSQFCLGK

SEQ ID NO: 70842 - protein, 625 aa, Staphylococcus epidermidis
MVQEYDVVVIGAGHAGIEAGLASARRGAKTLMLTINLDNIAFMPCNPSVGGPAKGIVVREIDALGGQMAKTIDKTHIQMRMLNTGKGPAVRALRAQADKVLYQQEMKRVLENEDNLDIMQGMVDELIIEDNEVKGVRTNIGTEYRSKAVIITTGTFLRGEIILGNLKYSSGPNHQLPSVTLADNLRKLGFDIVRFKTGTPPRVNARTIDYSKTEIQPGDDIGRAFSFETTEFILDQLPCWLTYTNGDTHQVIDDNLHLSAMYSGMIKGTGPRYCPSIEDKFVRFNDKPRHQLFLEPEGRNTNEVYVQGLSTSLPEHVQRQMLETIPGLEKADMMRAGYAIEYDAIVPTQLWPTLETKAIKNLYTAGQINGTSGYEEAAGQGIMAGINAAGNVLGTGEKILSRSDAYIGVLIDDLVTKGTNEPYRLLTSRAEYRLLLRHDNADLRLTDMGYELGLISEERYARFNEKRQQIKDEIQRLTDVRIKPNEHTQAIIEAKGGSRLKDGILAIDLLRRPEMNYETILEILEESHQLPEAVEEQVEIQTKYEGYINKSLQQVEKVKRMEAKKIPEDLDYSKVDSLASEAREKLAEVKPLNIAQASRISGVNPADISILLVYLEQGKLQRVKQ

SEQ ID NO: 70843 - protein, 239 aa, Staphylococcus epidermidis
MSIEWLSEKLSEQGIELSNTQKEQFQKYYKLLVEWNKKMNLTSITDEHDVYLKHFYDSIAPSFYYDFNGQLSLCDIGAGAGFPSIPLKIVYPELKVTIVDSLNKRIQFLNHLAAELGLEDVSFVHDRAEIYGKGVYRESYDIVTARAVARLTVLSELCLPLVKKGGQFLALKSSKGEEELQEATFAINILGGNVKETHTFELPENAGERQMIIIDKRRQTSKKYPRKPGTPNKSPLVES

SEQ ID NO: 70844 - protein, 334 aa, Staphylococcus epidermidis
MTKVYYDETVTQDALQGKKIAVIGYGSQGHAHAQNLKDNGYDVVIGLRPGRSFNKAKEDGFDVYTVSEATQQADVVMVLLPDEIQGEVYNKEIKPYLEKGNALAFAHGFNIHFSVIEPPSDVDVFLVAPKGPGHLVRRTFVEGSAVPALFGVQQDATGQARNIALSYAKGIGATRAGVIETTFKEETETDLFGEQAVLCGGVSKLIQSGFETLVEAGYQPELAYFEVLHEMKLIVDLMYEGGMENVRYSISNTAEFGDYVSGPRVITPNVKENMKKVLEDIQNGNFSRRFVEDNKNGFKEFYQLREDQHGHQIEQVGRELREMMPFIKSKSIEK

SEQ ID NO: 70845 - protein, 456 aa, Staphylococcus epidermidis
MGQTLFDKVWKKHVLHGKEGEPQLLYIDLHLIHEVTSPQAFEGLRIQNRKLRRPDLTFATLDHNVPTIDIFNIKDEIANKQITTLQQNAKDFGVHIFDMGSDEQGIVHMVGPETGLTQPGKTIVCGDSHTATHGAFGAIAFGIGTSEVEHVFATQTLWQTKPKNLKININGSLPAGVYAKDIILYLINQYGVDFGTGYALEFTGETIKNLSMEARMTICNMAIEAGAKYGLMQPDETTFNYVKGRPYATDFDSSMAWWKELYSDDDAYFDKVIELDVTNLEPQVTWGTNPEMGVSFSNPFPEIKNANDQRAYDYMGLHPGQKAEDIKLGYVFLGSCTNARLSDLIEASHIIKGQQVHPNITAIVVPGSRTVKKEAEALGLDKLFKDAGFEWREPGCSMCLGMNPDQVPEGVHCASTSNRNFEGRQGKGARTHLVSPAMAAAAAINGKFIDVRKVVV

SEQ ID NO: 70846 - protein, 122 aa, Staphylococcus epidermidis; identical to SEQ ID NO: 70609
  MISC_FEATURE (106)..(106): X=any amino acid

SEQ ID NO: 70847 - protein, 208 aa, Staphylococcus epidermidis
  MISC_FEATURE (62)..(62): X=any amino acid
  MISC_FEATURE (67)..(67): X=any amino acid
  MISC_FEATURE (112)..(112): X=any amino acid
GSFRPVAGNLHLHRTMISPSLSLRQCPNRYAFRAGRNLPDKEFRYLRTVIVTAAVYWGFDSXLRRSXPLLLTFQHRAGVSPYTSPYGLAETCVFDKQSLGPIHCGSSGREPXRAPLLPKLRGHFAEFLNESSLAHLRILILTTCVGLRYGHLYLSRGFSRQCEISDSRKQFPLPITAQPYECRICLTLSLTAWTCTPTARFAYPTASP

SEQ ID NO: 70848 - protein, 129 aa, Staphylococcus epidermidis; identical to SEQ ID NO: 70612
  MISC_FEATURE (17)..(17): X=any amino acid
  MISC_FEATURE (102)..(102): X=any amino acid
  MISC_FEATURE (122)..(122): X=any amino acid

SEQ ID NO: 70849 - protein, 372 aa, Staphylococcus epidermidis
MNKKLLWSIIGIVIIVVLIIAAFILKQVNGSGSKDSNAYDTYTVRKETPISLEGKASPESVKTYNNNQSVGNFLSVSVQDGQTVKQGERIINYDTNGNKRQQLLNKVNQAQSQVNDDYQKVNQSPNNHQLQVKLTQDQSALNEAQQSLSQYDRQLNDSMNASFDGKINIKNDSDVGEGQPILQLISSNPQINATITEFDINKIKEGDEVNVTVNSTGKKGKGKILKIDELPTSYDTSDDSTASSAQAGAQGDSEEGTEMTTSNPTINQPTGGKSGETSKYKVIIGDLDIPVRSGFSMDAKIPLKTKKLPNNVLTKDNNVFVVDKNNKVHKREIKIERNNGEIIVKKGLKSGDKVLKSPKGNLNDGEKVEVSS

SEQ ID NO: 70850 - protein, 57 aa, Staphylococcus epidermidis; identical to SEQ ID NO: 70614

SEQ ID NO: 70851 - protein, 669 aa, Staphylococcus epidermidis
  MISC_FEATURE (177)..(177): X=any amino acid
  MISC_FEATURE (178)..(178): X=any amino acid
KRFSIRKYAVGVVSIITGATIFIGGQQAQAAETSVQHADAHPEDSQTTQQLKNDKVEETLKASKQGNADSQQVQTIDQSKTNQNNQHSVAESAQLKSDETANQPKKEEGSSVKQDVQPSKNVNQQDVATQSNERENNDIKDEGQTSKTSNQHIQSSNSHINQQEQKTATQKKSTNHXXNYQKPSNDSTYQTQSKTKQDSSKQLPQEKTTKRQIQTTENEQTTKVDSKKANDTQNVEKHTQEPKNDTSTSQKNHQQVATKEQSNRSTTRETQKQSANANQNHQSTHQAQFKNQYPVVFVHGFLGFAGDNQFSLAPKYWGGTKYNIDRNLTNEGYNVHEANIGAFSSNYDRAVELYYYVKGGRVDYGAAHAAKYGHHRYGRTYKGIMRDWEPGKKIHFIGHSMGGQTIRQMEEFLRNGNQEEIEYQRQHGGTISDLFTGGKDNMVASITTLGTPHNGTPAADKIGTRKLVKETINRIGRLSGGKDVDIDLGFSQWGLKQQPNESYIDYAERVSKSKIWNTEDQAVNDLTTQGAEKINQQTSLNPNIVYTTYTGSATHTGPLGNELPNSSEILLLNLTSRIIGKDANKEIRPNDGVVPVISSQHPSNQAFKKVDDHTPATDKGVWQVRPVQHDWDHLDLVGMDAFDLTHTGRELGQFYLGIMDNIMRIEEAD

SEQ ID NO: 70852 - protein, 252 aa, Staphylococcus epidermidis
MAILTANQLSKVYGHKQKYRALNNISFSVEKGEFVAVMGPSGSGKTTLLNVLSSIDTISGGTVEVEGKEINKLSHKEVANFRKQHLGFIFQDYSVLPTLTVKENIMLPLSVQKFHKYEMEQNYKEVAEALGIYNLGNKYPSEISGGQQQRTAAARAFVHKPTIIFADEPTGALDSKSAQDLLHRLEDMNKQFNSTIMMVTHDPSAASYAERVIMLKDGDIHSEIYQGNDSKQTFYQEIMKLQTALGGVSHDI

SEQ ID NO: 70853 - protein, 716 aa, Staphylococcus epidermidis
MDNSLIETIVSKYQFSEKQIKAVLKLLKENNTVPFIARYRKEATGGLDEVEIKQINDEYNYMLNLQKRKEEVIHNIDQQGLLTSDLKQDILTQTKLQRVEDLYRPYKQKKKTRATEAKRKGLEDLADWFSQSKLDTKIEDKAQLFLNDEVTTIEDAIEGAKDIIAERISDNPQYRSKILKDVFNQGLIVSSKKKKAEDEKQTFSMYYDYKEPIKRIANHRVLAMNRGEKEKVLSIKIDFDTTRIQREIANVEIKTQNEATPFIKEAIQDSLKRLILPSIEREIRGDLTQNAESHAIDVFSENLRNLLLQPPMKGKQILGVDPAFRTGCKLAVVNPFGTFIAKGVIYPHPPISKVEAAEKELVKMISDYNIELLAIGNGTASRETEQFVAQVIKKYQLQAQFIIVNEAGASVYSASEIARQEFPDFQVEERSAVSIGRRVQDPLSELVKIDPKSIGVGQYQHDVNQKDLSSALTFVVETAVNQVGVDVNTASKSLLQYVSGLTSTIAQNIIDYKEENGPIKHHKEISRIKRLGAKTFEQSIGFLRIVDGEEPLDNTAIHPESYDVAYRMLHQLDLTAQDIGSVKLKNTLSNVNISTLVSQLNIGEPTLKDIIQSLIAPNRDPRDEFETPILKSDVLSIEDLSKGMKLNGTVRNVVDFGAFVDIGVKQDGLVHISKLSKKFVKNPMDMISVGDIVEVWILDIDENKGKVSLTMVAPNE

SEQ ID NO: 70854 - protein, 120 aa, Staphylococcus epidermidis
MIRRGDVYLADLSPVQGSEQGGVRPVVIIQNDTGNKYSPTVIVAAITGRINKAKIPTHVEIEKKKYKLDKDSVILLEQIRTLDKKRLKEKLTFLSESKMIEVDNALDISLGLNNFDHHKS

SEQ ID NO: 70855 - protein, 394 aa, Staphylococcus epidermidis
MSRIVLAEAYRTPIGVFGGVFKDIPAYELGATVIRQILEHSQIDPNEINEVILGNVLQAGQGQNPARIAAIHGGVPEAVPSFTVNKVCGSGLKAIQLAYQSIVAGDNEIVIAGGMESMSQSPMLLKNSRFGFKMGNQTLEDSMIADGLTDKFNDYHMGITAENLVEQYQISRKEQDQFAFDSQQKASRAQQAGVFDAEIVPVEVPQRKGDPLIISQDEGIRPQTTIDKLAQLRPAFKKDGSVTAGNASGINDGAAAMLVMTEDKAKALGLQPIAVLDSFGASGVAPSIMGIGPVEAIHKALKRSNKVINDVDIFELNEAFAAQSIAVNRELQLPQDKVNVNGGAIALGHPIGASGARTLVSLLHQLSDAKPTGVASLCIGGGQGIATVVSKYEV

SEQ ID NO: 70856 - protein, 382 aa, Staphylococcus epidermidis
MSEKFYRATYLNVNLDAILANYQNFNQLHANKTVISVIKANGYGLGSVKIAQHLMRHGATFFAVATLDEAIELRMHGVDAKLLVLGVVPTEDIEKAIQHRVALTVPSKAWLKETIKQIPDDNQKNLWLHVKLDTGMGRIGMKDIDEYKEVVDLINKRDHLVFEGVFTHFASADEPGSSMNEQYTLFKEMVNQVEKPIYIHCQNSAGSLLMDGQFCNAIRLGISLYGYYPSEYVKDNVKVHLRPSAQLVSETVQVKTLKVGETVSYGRTFIADEEMTIAILPIGYADGYLRSMQGAFVNVNGSQCEVIGRICMDQMIVKVPSHVKTGEKVILMDNHVDSPQSAEAVANKQGTINYEVLCNLSRRLPRIYYYDNNEEVTNELLK

SEQ ID NO: 70857 - protein, 117 aa, Staphylococcus epidermidis
MIYGIGIDLIEIERIKNLQNQTKFIERILTIEERDKLNQYTHEQRRLEFLAGRFTVKEAFSKALGTGLGKSVSFQDINCYNDALGKPCIDYPGFYTHVSITHTENYAMSQVILEKNE

SEQ ID NO: 70858 - protein, 612 aa, Staphylococcus epidermidis
MSHLLNQLKSNVLVADGAIGTIFYSEGLDTCPESYNLTHPDKVERIHRSYIEAGADVIQTNTYGANFEKLKSFGLEHKVKEIHQAAVQIAKHAANEDTIILGTVGGFRGVRQEDISLSTIQYHTELQIDTLIDEGVDALLFETYYDLDELTRIVTATRQKYDIPIIAQLTASNTNYLVDGTEINAALKYVVECGANVVGLNCHHGPHHMQRSFSHIELPKHAYLSCYPNASLLDIENSEFKYSDNAQYFGDIAQELINEGVRLIGGCCGTTPEHIRYIKSAVKHLKPVKDKKVIPINKASSQKQTRVLKQNLTSKVKNGPTVIVELDTPKHLDTDTFFDNVGKLDEAGIDAVTLADNSLATVRVSNIAAASLIKQRYDIEPLVHVTCRDRNLIGLQSHLLGLSLIGVNEILAITGDPSKVGHLPGATNVYDVNSKGLTELALRFNKGINTDGDALKKHTNFNIAGAFDPNVRKLDGAIKRLEKKVASGMSYFITQPVYSKEKIIQVYEETKHLNTPFFIGIMPIASYNNALFLHNEVPGIKMSDDVLNQFKAVKDDKEKTKELSLRLSKELIDTVHEYFNGLYIITPFQKVDYSLELAAYSKSITANKEAIL

SEQ ID NO: 70859 - protein, 367 aa, Staphylococcus epidermidis
MKDTDLAQIALTQDHTGAIANPIYLSTAYQHPHLGESTGYDYTRTKNPTRTAFEEAFAQLEKGIASFATSSGMAAIQLICNIFKPGDEILVAFDLYGGTFRLFDFYEKQYGLKFKYVDFLNYEEVEKNITPQTRALFIEPISNPQMIEIDVETYYILSKKHQLLTIIDNTFLTPYLSTPLEEGADIVLHSATKYIGGHNDVLAGVVTVKDAQLAEQLNQFHNMIGATLSPLDSYLLQRGLKTLHLRIERSQENAQKLAQRCRQSDSIDEVLYSGRTGMLSLRLNQAYSVAKFLENLEICIFAESLGGTETFITFPYTQTHVDMPDEEKDKRGIDEYLIRLSVGIEDYNDIEADIIQALENSKVGVIS

SEQ ID NO: 70860 - protein, 291 aa, Staphylococcus epidermidis
MNQLKHILSSLFEPLTKVETYENLITKVIMILIYILVAIVVIAILNKIIEQAFKIQNKSKKGNKKRSKTLISLVQNIVKYIVWFVVITTILSKFGISVEGIIASAGVVGIAVGFGAQTIVKDIITGFFIIFENQFDVGDYVKINSSGTTVAEGTVKSIGLRSTRINTISGELTILPNGSMGEITNFSITNGTAIVELPVSVDENIDQVEKKLNRLFVSLRSKYYLFVSDPVVDGIDAIESNKVTIRISAETIPGEGFSGARIIRKEAQKMFRQEGIRMPQPVISNYNEGKS

SEQ ID NO: 70861 - protein, 67 aa, Staphylococcus epidermidis
MTSKYGINDIVEMKKPHACGTNRFKIIRMGADIRIKCEHCQRSVMIPRQVFNKKMKKVLESHQDKES

SEQ ID NO: 70862 - protein, 365 aa, Staphylococcus epidermidis
MALTAGIVGLPNVGKSTLFNAITKAGALAANYPFATIDPNVGIVEVPDSRLIKLEEMVQPKKTIPTTFEFTDIAGIVKGASKGEGLGNKFLSHIREVDAICQVVRAFDDENVTHVSGRVNPLDDIEVINMELVLADLESVEKRLPKIEKMARQKDKTAEMELRILTQIKEALEDGKPVRSIDFNEDDQKWVNQAQLLTSKKMLYIANVGEDEIGDKDNDKVKAIREYAANEDSEVIVISAKIEEEIATLDDEDKEMFLEDLGIEEPGLDRLIRTTYDLLGLSTYFTAGVQEVRAWTFKQGMTAPQCAGIIHTDFERGFIRAEVTSYEDYVQHGGENGAKEAGRQRLEGKDYIMQDGDIVHFRFNV

SEQ ID NO: 70863 - protein, 509 aa, Staphylococcus epidermidis
MQNFKELGISDKTVQTLEAMGFKEPTPIQKDSIPYALEGDDILGQAQTGTGKTGAFGIPLIEKVVGQQGVQSLILAPTRELAMQVAEQLREFSKGQKVQVVTVFGGMPIERQIKALKRGPQIVVGTPGRVIDHLNRRTLKTQGIHTLILDEADEMMNMGFIDDMRFIMDKIPAEQRQTMLFSATMPKAIQELVQQFMKAPKIIKTMNNEMSDPQIDEYYTIVKELEKFDTFTNFLDVHQPELAIVFGRTKRRVDELTSALLSKGYKAEGLHGDITQAKRLEVLKKFKNDQIDILVATDVAARGLDISGVSHVYNFDIPQDTESYTHRIGRTGRAGKEGIAVTFVNPIEMDYIRQIEDVNNRRMKALRPPHRKEVLKAREDDIKDRVQNWMSRENEPRLQRISSELLKEYDSTELVASLLQELVEANDEVEVQLTFEKPLARKNRSSKGGSRRSNHKRGNGKFDNKNRRSKGSKGQSSKKKNQKKFDRRDKQQKSGNQSLKGRTFADHQK

SEQ ID NO: 70864 - protein, 451 aa, Staphylococcus epidermidis
MINVTLEQIKNWIDCEIDEKHLKKTINGVSIDSRKINEGALFIPFKGENVDGHRFITQALNDGAGAVFSEKENKHSEGNQGPIIWVEDTLIALQQLAKAYLNHVNPKVIAVTGSNGKTTTKDMIESVLSTEFKVKKTQGNYNNEIGMPLTLLELDEDTEISILEMGMSGFHQIELLSHIAQPDIAVITNIGESHMQDLGSREGIAKAKFEITTGLKTNGIFIYDGDEPLLKPHVNQVKNAKLISIGLNSDSTYTCHMNDVKNEGIHFTINQKEHYHLPILGTHNMKNAAIAIAIGHELGLNETIIQNNIHNVQLTAMRMERHESSNNVTVINDAYNASPTSMKAAIDTLSVMKGRKILILADVLELGPNSQLMHKQVGEYLKDKNIDVLYTFGKEASYIYDSGKVFVKEAKYFDNKDQLIQTLISQVKPEDKVLVKGSRGMKLEEVVDALL

SEQ ID NO: 70865 - protein, 357 aa, Staphylococcus epidermidis
MTKENICIVFGGKSAEHDVSILTAQNVLNAIDKERYQVDIIYITNDGEWKKKDNITQEIKNTDELVINDVETGEISQLLSKGSLGKSYDAVFPLLHGPNGEDGTIQGLFEVLDIPYVGNGVLAASSSMDKLVMKQLFEHRGLPQLPYISFLRSEYEKYENNIIKLVNDKLTYPVFVKPANLGSSVGISKCNNEEELKSGIAEAFQFDRKLVIEQGINAREIEVAVLGNDYPETTWPGEVVKDVAFYDYKSKYKDGKIRLDIPADLDQDVQMTLRNMALEAFKATDCSGLVRADFFVTDDNQIYINETNAMPGFTAYSMYPNLWKNMGLSYPDLIAKLIDLAKERYEDKKKNKYKIDY

SEQ ID NO: 70866 - protein, 97 aa, Staphylococcus epidermidis
MADMESAHHSEQIKTNLKSRLNRIEGQVRAINRMIDDDVYCDDVLTQIRATRSALNSVATKLLDHHMKGCIMEKINDGAQEEAMDELLVTFQKLIKD

SEQ ID NO: 70867 - protein, 269 aa, Staphylococcus epidermidis
MLKKFSYSIISLSIFATSLNFIDTQAQASSSSVSEKGTMGYGYQQYLKDHPKKQTHKTQNRSTFSAESNITETNNGERVLDISEWQGLLTNEQIKQLKKNYDFIILRAQYGSEYVDKTFEKNAELLEQNKMKYGVYSYSMYESPKDARYEAKTLSQRAPKAAFYINDYEEQTVKSGDDETATQAWANEMRKLAGNKKILFYSYENFMLNHASNAVSSYDGYWLAAYQAEEPKREKVLWQYTDSYYSPELNQNVDANYIDENVNSSWFTS

SEQ ID NO: 70868 - protein, 98 aa, Staphylococcus epidermidis
MRTYEIMYIVRPNIEEDAKKALVERFNGILASEGSEVLEEKDWGKRRLAYEINDFKEGFYNIVRIKTDNNKSTDEFQRLAKINDDIIRYIVIREDQDK

SEQ ID NO: 70869 - protein, 169 aa, Staphylococcus epidermidis
MLNRVVLVGRLTKDPEYRTTPSGVSVATFTLAVNRTFTNAQGEREADFINCVVFRRQAENVNNYLSKGSLAGVDGRIQSRSYENQEGRRIFVTEVVCDSVQFLEPKNAQHGGQRSQNNNFQDYGQGFGGQQSGQNTSYNNNNSSNSNQSDNPFANANGPIDISDDDLPF

SEQ ID NO: 70870 - protein, 80 aa, Staphylococcus epidermidis
MAGGPRRGGRRRKKVCYFTANGITHIDYKDTELLKRFISERGKILPRRVTGTSAKYQRMLTTAIKRARHMALLPYVKEEQ

SEQ ID NO: 70871 - protein, 84 aa, Staphylococcus epidermidis
MFGLIGMIIVGGIIGWIAGLILGKDVPGGILGNIIAGIVGSWVGTMILGEWGPQLGKIHIFPALLGSIILIFIISLILKALRKK

SEQ ID NO: 70872 - protein, 189 aa, Staphylococcus epidermidis
MSLINKEILPFTAQAYDPKKDEFKEVTQEDFKGSWNVVCFYPADFSFVCPTELEDLQNQYAKLQELGVNVYSVSTDTHFVHKAWHDHSDAISKLEYSMIGDPSQTITRNFDVLDEETGLAQRGTFIIDPDGVVQAAEINADGIGRDASTLVNKIKAAQYVRQHPGEVCPAKWEEGSESLQPGLDLVGKI

SEQ ID NO: 70873 - protein, 300 aa, Staphylococcus epidermidis
MLTKEFAQRVELSEKQVRKIVQHLEERGYHLSKTEYRGREATDFKEDDIELFTDIANKVKQTNSYDLAFEELEKEKDFLQVIVKDEDSQLPTDQNVAQLVEDLRSEIQKMREERQMLGQMINQVHQQQQELKELQTDITTKLDSNAQSLKSIQNSQEAIQSAQEQQSKDIAKANELKDSELRSHFDSMSNSASISQSNVASQSTTASLSQSESANDSMSSSLSESNSITSESNTNSKSEIESKSTSTSEFLSESGSVSNSEKSESISHSQSTSATPSSQSTYQQQPKEEKKGFFARLFNL

SEQ ID NO: 70874 - protein, 359 aa, Staphylococcus epidermidis
MYTLLLIAFTMIVSLIITPIIIVISKKLDLVDRPNFRKVHTKPISVMGGTVILFSFLIGIWLGHPIEREVKPLILGAITMYMVGLIDDIYDLRPYLKLAGQIVAALIVTFYGITIDFISLPIGPTIHFGIFSIPITVIWIVAITNAINLIDGLDGLASGVSALALMTIGFIAILQANIFIIMICCVLLGSLLGFLFYNFHPAKIFLGDSGALMIGFIIGFLSLLGFKNITFIALFFPIVILAVPFIDTLFAMIRRMKKGQHIMQADKSHLHHKLLALGYTHRQTVLLIYSIAIMFSLSSVILYLSQPLGALMMFILIVFTIELIVEFTGLIDDNYRPILNLITKKGNGKQHHYDEHHRS

SEQ ID NO: 70875 - protein, 515 aa, Staphylococcus epidermidis
MTMEMAKEQELILVLDFGSQYNQLITRRIREMGVYSELHDHEISIEEIKRMNPKGIILSGGPNSVYEEGSFTIDPEIYNLGIPVLGICYGMQLTTKLLGGKVERANEREYGKATINAKSDELFFGLPSEQTVWMSHSDKVIEIPEGFEVIADSPSTNYAAIEDKKRRIYGVQFHPEVRHTEYGNDLLRNFVRRVCNCTGEWTMENFIEIEIEKIRQQVGNRKVLCAMSGGVDSSVVAVLLHKAIGDQLTCIFVDHGLLRKGEGDMVMEQFGEGFDMNIIRVNAQERFMSKLKGVSDPERKRKIIGNEFVYVFDDEAAKLTDVDFLAQGTLYTDVIESGTKTAQTIKSHHNVGGLPEDMEFELIEPINTLFKDEVRALGIELGIPEHLVWRQPFPGPGLGIRVLGEITEDKLEIVRESDAILREVIREEGLERDIWQYFTVLPGIQSVGVMGDYRTYDHTVGIRAVTSIDGMTSDFARIDWEVLQKISSRIVNEVDHVNRVVYDITSKPPSTIEWE

SEQ ID NO: 70876 - protein, 844 aa, Staphylococcus epidermidis
MGFLSKIVDGNKKEIKRLGKLADKVLALEEDTAILTDEEIREKTKSFQKELAEIEDVKKQNDYLDKILPEAYALVREGSKRVFNMIPYKVQVMGGIAIHKGDIAEMRTGEGKTLTATMPTYLNALAGRGVHVITVNEYLSSSQSEEMAELYNYLGLTVGLNLNSKSTEEKREAYAQDITYSTNNELGFDYLRDNMVNYAEERVMRPLHFAIIDEVDSILIDEARTPLIISGEAEKSTSLYTQANVFAKMLKAEDDYNYDEKTKAVHLTEQGADKAERMFKVDNLYDVQNVEVISHINTALRAHVTLQRDVDYMVVDGEVLIVDQFTGRTMPGRRFSEGLHQAIEAKEGVAIQNESKTMASITFQNYFRMYNKLAGMTGTAKTEEEEFRNIYNMTVTQIPTNKPVQRKDNSDLIYISQKGKFDAVVEDVVEKHKKGQPVLLGTVAVETSEYISNLLKKRGVRHDVLNAKNHEREAEIVSNAGQKGAVTIATNMAGRGTDIKLGDGVEELGGLAVIGTERHESRRIDDQLRGRSGRQGDRGDSRFYLSLQDELMVRFGSERLQKMMNRLGMDDSTPIESKMVSRAVESAQKRVEGNNFDARKRILEYDEVLRKQREIIYNERNEIIDSEESSQVVNAMLRSTLQRAINHFINEEDDNPDYTPFINYVNDVFLQEGDLQDTEIKGKDSEDIFEIVWSKIEKAYAQQQETLGDQMSEFERMILLRSIDTHWTDHIDTMDQLRQGIHLRSYAQQNPLRDYQNEGHELFDIMMQNIEEDTCKYILKSVVQFEDDVEREKSKSFGEAKHVTAEDGKEKAKPQPIVKGDQVGRNDPCPCGSGKKYKNCHGKA

SEQ ID NO: 70877 - protein, 333 aa, Staphylococcus epidermidis
MMTDPDFWNDQTKAQDIIDKNNALKSIVNGYYQLTNAVDDMSATRELLQEEYDEDMKIELEEEVQQFEEQIDQYELQLLLDGPHDANNAILELHPGAGGTESQDWVSMLLRMYQRYCEQNGFKVETVDYLPGDEAGVKSVTLLIKGHNAYGYLKAEKGVHRLVRISPFDSSGRRHTSFASCDVIPDFNNDEIEIEINPDDITVDTFRASGAGGQHINKTESAIRITHHPTGIVVNNQNERSQIKNREAAMKMLKSKLYQLKLEEQEQEMAEIRGEQKDIGWGSQIRSYVFHPYSMIKDHRTNEETGKVDAVMDGEIGPFIEAYLRKEMDSRDV

SEQ ID NO: 70878 - protein, 153 aa, Staphylococcus epidermidis
DGKFINLYQSNIEKVNDNRHSNETSIHNDDYKKILNKVLKSDIIIFSTPLYWYSMSASLKLFIDRWTESLRDTQIDNFKEIMSKKNLILIIGGDSPRIKAQPLVHQFKLIFEFMNITHFRFLIGEGNKPFDVLNDSQFMEELANTNLALKKGD

SEQ ID NO: 70879 - protein, 498 aa, Staphylococcus epidermidis
MLSSELILFMFFITLVIAILSGLIFLNHRVPIQYIKFHIYLLVLPIITGLSGLIFFGERANVGPFVVDHLTWLMMTFILTLGFIIQKFSMRYLIGDMHYRKYFPFFTLITAFASLAWLSGDLRLMTMFWGATLFVLTRLIKVNKLWKVPREAARISAWSFILAWLSLLIAVILLYIATGDWYIYSNMSDDNAINYGMRLCINLLIVLAVIIPAAQFPFQGWLIESVAAPTPVSAIMHAGIVNAGGVILTRFSPVFNDEIAISLLLIIASISVLLGSGISLVHVDYKRQLVGSTISQMGFMLVQCALGAYSAAIVHLILHGVFKATLFLQSGSVVKRFNIPTPPSVKKSYGWLVFGRLLAILIAIIFWLNSDRHAYDVLSALILAWSLMVSWNQLVAFSHGLIGRVIGVCMIIVVVIVYIITHHYFFTTLSNVDIHIVSPPLISIILSIAIIVFGSMLSIWVSRRRESKAFAKLYLWLIKVGEAKTQSIESHPSYLKRF

SEQ ID NO: 70880 - protein, 944 aa, Staphylococcus epidermidis
MKGPSIVVKGARAHNLKGVDIELPKNKLIVMTGLSGSGKSSLAFDTIYAEGQRRYVESLSAYARQFLGQMDKPDVDTIEGLSPAISIDQKTTSKNPRSTVATVTEIYDYIRLLYARVGKPYCPYHGIEIESQTVQQMVDRILELEERTKIQLLAPVISHRKGSHEKLIEDIGKKGYVRLRVDDEIVDVNEVPQLDKNKNHTIEVVVDRLVVKDGIETRLADSIETALELAEGNLTVDVINGEELKFSENHACPICGFSIGELEPRMFSFNSPFGACPTCDGLGQKLKVDLDLVIPDKNKTLNEGAIEPWEPTSSDFYPTLLKRVCEVYKINMDKPYKKLTDRQKNILMNGSGEKEIEFTFTQRNGGTRKRKMVFEGVVPNIDRRYHESPSEYTREMMSKYMTELPCETCHGKRLSKEALSVYVGDYNIGEVVEYSIKNALYYFENLKLSDQDKSIADQILKEIISRLSFLNNVGLEYLTLDRSSGTLSGGEAQRIRLATQIGSRLTGVLYVLDEPSIGLHQRDNDRLINTLKEMRDLGNTLIVVEHDDDTMRAADYLVDVGPGAGNHGGEVVSSGTPNKVMKDKKSLTGQYLSGKKRIEVPEYRREITDRKIQIKGAKSNNLKNVNVDFPLSVLTVVTGVSGSGKSSLVNEILYKALAQKINKSKVKPGNFDEIKGIDQLDKIIDIDQSPIGRTPRSNPATYTGVFDDIRDVFAQTNEAKIRGYQKGRFSFNVKGGRCEACKGDGIIKIEMHFLPDVYVPCEVCDGKRYNRETLEVTYKGKNIADVLEMTVEEATHFFENIPKIKRKLQTLVDVGLGYITLGQQATTLSGGEAQRVKLASELHKRSTGRSIYILDEPTTGLHVDDISRLLKVLNRIVENGDTVVIIEHNLDVIKTADHIIDLGPEGGEGGGTIIATGTPEEIAQNKGSYTGQYLKPVLERDSVE

SEQ ID NO: 70881 - protein, 310 aa, Staphylococcus epidermidis
MLTTDRLVNTLNLELLTGEEGLDRPIKNTDISRPGLEMAGYFSHYASDRIQLLGTTELSFYNLLPDEEKKGRMRKLCRPETPAIIVTRGLEPPEELIQASQETHTPIIVAKDATTSLMSRLTTFLEHELAKTTSLHGVLVDVYGVGVLITGDSGIGKSETALELVKRGHRLVADDNVEIKEITKDELVGKPPKLIEHLLEIRGLGIINVMTLFGAGSILTEKQIRLNINLENWNKNKLYDRVGLNEETLKILDTEITKKTIPVRPGRNVAVIIEVAAMNYRLNIMGINTAVEFNERLNEEIVRNSHKSEE

SEQ ID NO: 70882 - protein, 669 aa, Staphylococcus epidermidis
  MISC_FEATURE (649)..(649): X=any amino acid
  MISC_FEATURE (650)..(650): X=any amino acid
  MISC_FEATURE (664)..(664): X=any amino acid
EDVIAQSASVFTKEGTRLIDILNAHMIKWSKLYVDDFQSSWTMPKREKGFYHAWQRLVKHDPLFTKKQRLTLAHLPNQATEAIEYAFQELGVKEEHRQSYIESHLLSLPGWAGIMYHRSQTQSNDAYLLTDYVAIRLSIEMVLLNDHHTTLLKKSIYLQKKLEQIRYLLFNIQMNVEQWLNLSSKKQQAYIELGTRFSPFYFKKLWLDAWEETHERRLVDEIYRVPTEDTDQAKAKVQLAFCIDVRSEPFRRHLESEGPFETIGIAGFFGLPIQKEVLDEQFAHPSLPVMVEPAYRIKEYADQHEMKIYNQQQHTLTSMFYNFKLMKNNVLPSLLLPELSGPFLSIATIANTIFPKKAKRIVHRFSQKWLRKPTGKLTIQREQDAYSKLPIGFTLEEQIQFSKKALQLMDLTDDFAPLIVLCGHGSESHNNPYHASLECGACGGASSGFNAKLLAVMCNQENVRRGLLMEGIDIPRHTVFIAAEHQTSVDELEYIYVPPLTTEAQNAFDELKHVMPKVCYKANLERLASLPNINNTDHNPNAEAHRHASDWSEVRPEWGLARNAEFIIGKRQITQNSNLEGRAFLHNYDWTKDEDGEILNTIISGPALVAQWINLQYYASTVAPHYYGSGSKTTQTVTSGVGVMQGKCXXFNVWLTMAVSNDEXQRGVS

SEQ ID NO: 70883 - protein, 233 aa, Staphylococcus epidermidis
MNHIKEIGVDMNFKYMNIAKGIIPILISMIILLSFISTHVLAQNQWLRMVDLSVQEWFSNQFGDPNRVFGHGFINNIMTFCATFGDVKIILIVATIIAVLLTFYKKVPQAIWLIITMTSGALINYLIKQTIERSRPENHLIVDTGWSFPSGHSNINTLFFLMIMIIIIPLIRQRAFKFIITILSIAFWISVLISRLYFHAHYFSDVVGGVSLAIIWVSLFILVSPLLKFGGEK

SEQ ID NO: 70884 - protein, 302 aa, Staphylococcus epidermidis
MTSNEKEMGKSELLVVTGMSGAGKSLVIQSLEDMGFFCVDNLPPVLLPKFVELMAQGNPSLQKVAIAIDLRGKELFKSLVKEIDIIKSRNDVILDVMFLEAKTEKIISRYKESRRAHPLNEQGQRSLIDAINEEREHLSEIRSIANYVIDTTKLKPKELKQRISKFYLDENFETFTINVTSFGFKHGIQMDADLVFDVRFLPNPYYVEELRPFIGLDEPVYNYVMKWKETQIFFDKLTDLLKFMIPGYKKEGKSQLVIAIGCTGGQHRSVALAKRLAEYLNEIFEYNVYVHHRDAHIESGER

SEQ ID NO: 70885 - protein, 179 aa, Staphylococcus epidermidis
MTKQDLSLSVFTNENYKNLRYTSSSFRNSMYDELEVNKSRFKNCNFNEGIFKNIEAICNCKFTTCGFNNCIFEDVHFYKNQFKDSTFVNTPFDQSVFNSTLFQNAMFDSNLIRSVKWTDIIFKNVSFKNVEIEGTTFKDVKFKNCEFKNVIITNSTMSQKLMNELQKQDVTLENIDTSI

SEQ ID NO: 70886 - protein, 331 aa, Staphylococcus epidermidis
MKQMNVVLIGGGTGLSVLARGLREFPIDITAIVTVADNGGSTGKIRDVMDIPAPGDIRNVIAALSDSESILTQLFQYRFGENQVDGHSLGNLVIAGMTNITNDFGHAIKELSKVLNIKGQVIPSTNASVQLNAVMEDGEIVHGETNIPKTHKKIDRVFLEPSDVEPMNEAIEALEQADLIVLGPGSLYTSVISNLCVKGISEALLRTSAPKLYVSNVMTQPGETDNYDVKEHIDALTRQVGEPFIDFVICSSESYSKDVLQRYEEKNSKPVAVHKEQLKDSGIRVLTASNLVEISNEHYVRHNTKVLSKMIYELALELTSTIRFTPSDKKK

SEQ ID NO: 70887 - protein, 314 aa, Staphylococcus epidermidis
MSFASDMKNELTRIEVDESNAKAELSALIRMNGALSLSNQQFVINVQTENATTARRIYSLIKRIFNVEVEILVRKKMKLKKNNIYICRTKMLAKEILNDLGILKKGVFTHDIDPDMIKDDEMKRSYLRGAFLAGGSVNNPETSSYHLEIFSQYEDHSEGLTKLMNSYELNAKHLERKKGSIAYLKEAEKISDFLSLIGGYQALLKFEDVRIVRDMRNSVNRLVNCETANLNKTVSAAMKQVESIQLIDEEIGLENLPDRLREVAKLRVEHQEISLKELGEMVSTGPISKSGMNHRLRKLNELADKIRNGEQIEL

SEQ ID NO: 70888 - protein, 299 aa, Staphylococcus epidermidis
MKRYLITGGTGMVGSHLVNEIKQTDAHITILTRQDKTSNHPKITYINWSKEGWQHQVPDIDIVINLAGATLNKRWTSSHKQAMMLSRIQSTQTLFELFETREHKPEVLFNASAMGYYPPDLFTSYTELYRTLPFDFLSEIVYQWERFANKFKQFGTRVVLGRFGLILSDDGGALEMMELPYRLYVGGKLGSGRQWYSWIHIDDLIRGILFTINHDNAEGPFNLTAPIPERQNLFGYTLARAMHKPHETWAPKLILRAVLGQMSTVILDTQKVLPNKLHALGFEFKYNNLRNALDDLIKA

SEQ ID NO: 70889 - protein, 337 aa, Staphylococcus epidermidis
MKDLIKVQQKLIPDLIDKMYRRFYILSTISQNQPVGRRSLSEHMDMTERVLRSETDMLKKQELIRVKPTGMEITNEGTEVLAQLGEYFNVYSDDHKLASAIKDKFHIKDVHVIPGDSDSNRTVKREMGQQAGQLLEGILYEDAIVSVTGGSTMACVSESIHLLPFNVFFVPARGGLGENVVYQANTIASSMAQQAGGYYTTLYVPDNVSESTYDTLMLEPSVMHTLDKIKQANITIHGIGDALKMAHRRQSSQNVIDNLQHHQAVGEAFGYYFDAQGQIVHKVKTIGLQLEDLENKDFIFAVAGGQSKGEAIKAYLSIAPENTVLITDEAAAKVILQ

SEQ ID NO: 70890 - protein, 336 aa, Staphylococcus epidermidis
MAIKVAINGFGRIGRLAFRRIQDVEGLEVVAVNDLTDDDMLAHLLKYDTMQGRFTGEVEVIEGGFRVNGKEIKSFDEPDAGKLPWGDLDIDVVLECTGFYTDKEKAQAHIDAGAKKVLISAPAKGDVKTIVFNTNHDTLDGSETVVSGASCTTNSLAPVAKVLSDEFGLVEGFMTTIHAYTGDQNTQDAPHRKGDKRRARAAAENIIPNSTGAAKAIGKVIPEIDGKLDGGAQRVPVATGSLTELTVVLDKQDVTVDQVNSAMKQASDESFGYTEDEIVSSDIVGMTYGSLFDATQTRVMTVGDRQLVKVAAWYDNEMSYTAQLVRTLAHLAELSK

SEQ ID NO: 70891 - protein, 396 aa, Staphylococcus epidermidis
MAKKIVSDLDLKGKVVLERADFNVPIKDGEITNDNRIVQALPTIEYIIEQGGKLVLFSHLGKVKEESDKEGLSLKPVAENLSKKLGKEVIFVPETRGEKLETAIENLNEGDVLLVENTRFEDLDGKKESKNDPELGKYWASLGDVFVNDAFGTAHREHASNVGISTHLETAAGYLMEKEIKFIGGVVNDPQKPVVAILGGAKVSDKINVIKNLVNIADKILIGGGMAYTFIKAQGKEIGLSLLEEDKIDFAKDLLENNGDQIVLPVDCKIAKEFSNDAKITEVSINEIPSDQEAMDIGPKTVELFNKELQGAHTVVWNGPMGVFEFSNFAKGTIGVCESIAKLEDATTIIGGGDSAAAAISLGFEDDFTHISTGGGASLEYLEGKELPGIKAINDK

SEQ ID NO: 70892 - protein, 434 aa, Staphylococcus epidermidis
MPIITDVYAREVLDSRGNPTVEVEVLTESGAFGRALVPSGASTGEHEAVELRDGDKSRYLGKGVTKAVENVNEMIAPEIVEGEFSVLDQVSIDKMMIQLDGTHNKGKLGANAILGVSIAVARAAADLLGQPLYKYLGGFNGKQLPVPMMNIVNGGSHSDAPIAFQEFMILPVGAESFKESLRWGAEIFHNLKSILSERGLETAVGDEGGFAPRFEGTEDAVETIIKAIEKAGYKPGEDVFLGFDCASSEFYENGVYDYTKFEGEHGAKRSAAEQVDYLEELIGKYPIITIEDGMDENDWEGWKQLTDRIGDKVQLVGDDLFVTNTEILSKGIEQGIGNSILIKVNQIGTLTETFDAIEMAQKAGYTAVVSHRSGETEDTTIADIAVATNAGQIKTGSLSRTDRIAKYNQLLRIEDELYETAKFEGIKSFYNLDK

SEQ ID NO: 70893 - protein, 156 aa, Staphylococcus epidermidis
MAKKKSKSPGTLAENRKARHDYNIEDTIEAGIALRGTEIKSIRRGSANLKDSFAQVRRGEMYLNNMHIAPYEEGNRFNHDPLRTRKLLLHKKEIQKLGERTREIGYSIIPLKLYLKHGQCKVLLGVARGKKKYDKRQALKEKAVKRDIDRAVKARY

SEQ ID NO: 70894 - protein, 180 aa, Staphylococcus epidermidis
MKLKLLGTLALSSIILTACGQENVKKTESNPKEEQNKTDNMQTNGSVTNSNSNQKQKTAQKQISAQEAEQIVSNYYINKGINKQQVLEFKTNIDRSNANEYYVEHLVRDAAGTPIKFCAVVNKSTGEVINRFNDMNEEEMKEFEEFKKRSPKYHNSGEEKNKMQENSSSSEQQEVHNSVI

SEQ ID NO: 70895 - protein, 195 aa, Staphylococcus epidermidis
MVKTLYLMRHGQTVFNLKGKIQGASDSPLTALGVQQANAAQQYFKTKNIHFDYLYSSPQQRACDTLENAVPNQQYWCVKDLKEWGFGLFEGESIELLRAIKQPRYLYGDAVVPFGGESRSEVEHRVYRALYEMMDTTDGETILAVSHGSTIGLFVRNILGYDKGSKFEIGNCNIVKFEYDGEEFIFKDLINPIKK

SEQ ID NO: 70896 - protein, 238 aa, Staphylococcus epidermidis
MTHVDIAATIAPEDKLSKTLLKDIKVNEESIDIIELRIDQWPSFNKALLNEVIKQLKIFHLKILVTYRTSVQGGKGAVNEQEYLNILGELIECPQFDMIDIEWSSAVKIEKYTHLVQRAQQKGLEVVLSHHNFQETPALDELKFIYFKMQKLNPEYLKLAVMPKCQEDVLHLLEAMSLTAKHTTCRIVGISMSSLGKVSRIAQGVFGGTLSYGCIEEPQAPGQIHVSKLKSMVSFYED

SEQ ID NO: 70897 - protein, 180 aa, Staphylococcus epidermidis
MELQEAISNRRSVKKFKHDMVVDDQTVYDAIYKATDAPNHGMREPWRLVHISKDKLGDFSRDITRFAFPDSPDKREDHFHAVTNLGGMLLLILKDDPRQRQSRENYFAFGAFAQNLMLLLYEAGIGTCWKSPQYIFDPKIRKALGVKDNEILAGFLYLTDLEEVPTKAKRKNKNLITEFE

SEQ ID NO: 70898 - protein, 231 aa, Staphylococcus epidermidis
MGKSYGEIFHEMATMPNVQWPEVWQAILETLYMTIVSTLFAFVLGLILGVLLFLSAKSNSLAAKIFYTIVSFIVNLFRAIPFIILILLLIPFTSILLGTISGPTGALPALIIGAAPFYARLVEIAFKEIDKGVIEAAWSMGANTSIVVRKVLLPEAMPALVSGITVTAIALVGSTAIAGVIGAGGLGNLAYLTGFTRNQNDVILVSTVFILIIVFIIQFLGDWLTNKIDKR

SEQ ID NO: 70899 - protein, 270 aa, Staphylococcus epidermidis
MKKLFGIILVLALTIALAACGGGKDKEKTITVGASPAPHAEILEKAKPLLKKKGYDLKIKPINDYTTPNKLLDKGEIDANFFQHTPYLNTESKEKGYKIESAGNVELEPMAVYSKKYKSLKDLPKGATVYVSNNPAEQGRFLKFFVDEGLIKLKKGVKIENAKFDDITENKKDIKFNNKQSAEYLPKIYQNQDADAVIINSNYAIDQKLSPKKDSIALESPKDNPYANLIAVKKGHKDDKNIKVLMEVLQSKEIQDYIKDKYDGAVVPAK

SEQ ID NO: 70900 - protein, 253 aa, Staphylococcus epidermidis
MSSTLEIKDLHVSIEDKEILKGVNLTINTGEIHAIMGPNGTGKSTLSSAIMGHPSYEVTQGEVLLDGVNILELDVDERAKAGLFLAMQYPSEITGVTNADFMRSAINAKREEGQEINLMQFIKKLDKQMDFLDIDKDMAQRYLNEGFSGGEKKRNEILQLMMLEPKFAILDEIDSGLDIDALKVVSKGINQMRGEEFGALMITHYQRLLNYITPDKVHVMYGGKVVKSGGPELAKRLEEEGYEWVKEEFGAAE

SEQ ID NO: 70901 - protein, 154 aa, Staphylococcus epidermidis
MNFNNLDQLYRSVIMDHYKNPRNKGVLDNGSMTVDMNNPTCGDRIRLTFDIEDGIINDAKFEGEGCSISMSSASMMTEAVKGHSLGEAMQMSQEFTKMMLGEDYEITEEMGDIEALQGVSQFPARIKCATLAWKALEKGTVEKEGKSEGTTEED

SEQ ID NO: 70902 - protein, 425 aa, Staphylococcus epidermidis
MKLIKNGKILKNGILKDTEILIDGKRIKQISSKINASSSNIEVIDAKGNLIAPGFVDVHVHLREPGGEHKETIESGTKAAARGGFTTVCPMPNTRPVPDTVEHVRELRQRISETAQVRVLPYAAITKRQAGTELVDFEKLALEGVFAFTDDGVGVQTASMMYAAMKQAAKVKKPIVAHCEDNSLIYGGAMHKGKRSEELGIPGIPNIAESVQIARDVLLAEATGCHYHVCHVSTKESVRVIRDAKKAGIHVTAEVTPHHLLLTENDVPGDDSNYKMNPPLRSNEDREALLEGLLDGTIDCIATDHAPHAKEEKEQPMTKAPFGIVGSETAFPLLYTHFVRRGNWSLQQLVDYFTIKPATIFNLNYGKLHKDSYADLTIIDLNTEKEIKSEDFLSKADNTPFIGEKVYGNPTLTMLKGEVVFEEEK

SEQ ID NO: 70903 - protein, 1120 aa, Staphylococcus epidermidis
YLVLEDGSYYEGYRLGSDDLSIGEIVFNTAMTGYQETISDPSYTGQIITFTYPLIGNYGINRDDFESLTPKLNGVVVKEASTHPSNFRHQKTLHETLAQYHIPGISGVDTRSITRKIRNHGVLRAGFTDNKDNIQELVEQLKTAELPRDEVQTVSTKTPYVSTGSDLSVVLLDFGKKQNIVRELNLRGCNVTVVPYDTSAEEILSMSPDGVMLSNGPGDPDEVDVALDMIRGILGKIPFFGICLGHQLFALSQGATSFKMKFGHRGANHPVKDLRTGKIDITSQNHGYSIDRDSLKNTDLEVTHIALNDGTVEGLRHKELPAFSVQYHPEARPGPSDSNYLFDEFITMMKDFKEKSVKSMPKRDDIQTILVVGSGPIIIGQAAEFDYAGTQACLALKEEGYRVILVNSNPATIMTDKEIADKVYIEPLTHDFIARIIRKEQPDALLPTLGGQTGLNMAIQLHDSGVLEANNVKLLGTELESIQQAEDREMFRTLMNDLNVPVPESDIVNTVEQAFEFKEQVGYPLIVRPAFTMGGTGGGICHNDAELKEVVSNGLHYSPATQCLIEKSIAGYKEIEYEVMRDKNDNAIVVCNMENIDPVGIHTGDSIVVAPSQTLSDVEYQMLRDVSLKVIRALGIEGGCNVQLALDPHSLNYYIIEVNPRVSRSSALASKATGYPIAKLAAKIAVGLTLDEMLNPITGTSYAAFEPTLDYVISKIPRFPFDKFEKGERELGTQMKATGEVMAIGRTYEESLLKAIRSLEYGVHHLGLPNGESYELDYIKERIGHQDDERLFFIGEAIRRGTSLEELHNMTKIDYFFLNKFQNIIDIEHELKNHQGDLEYLKYAKDYGFSDKVIAHRWDMEEKDIYELRMSQNIKPVYKMVDTCAAEFESTTPYYYGTYEDENESIVTDKEKILVLGSGPIRIGQGVEFDYATVHAVWAIQNAGYEAIIVNNNPETVSTDFSISDKLYFEPLTEEDVMNIINLEQPKGVVVQFGGQTAINLADKLAQHGVKILGTSLEDLNRAEDRKEFEALLREISVPQPQGKTATSPKEALKNAREIGYPVVVRPSYVLGGRAMEIVDNDQELENYMTQAVKASPEHPVLVDRYLTGKEIEVDAISDG

SEQ ID NO: 70904 - protein, 136 aa, Staphylococcus epidermidis
MNKAINITSLIGIILQSFSSLLFLVFLVFSITGAMDANFTTTVNGETTVHSAEAAQHVFSVGFLVIFIVAIFSIIFGIIGMMKKKTNTIASGVFYIIGAILSLNMITFISWLVCGILLIKKRQNKSIKDNKTHLVD

SEQ ID NO: 70905 - protein, 439 aa, Staphylococcus epidermidis
MELTIYHTNDIHSHLNEYARIQAYMAKHRPQLEHPSLYIDIGDHVDLSAPVTEATVGHKNIELLNEAHCDIATIGNNEGMTISHDALQNLYNDADFKVICTNVIDEEGHLPHHITSSYIKEIKGTRILFVAATAPFTPFYRALDWIVTDPLAAIKDEINAHQGEYDLLMVMSHVGIFFDEKLCQEIPEIDVIFGSHTHHHFEHGEINNGVLMAAAGKYGYYLGEVNITIENGKIVDKIAKIHPIETLPLVETHFEEEGRALLSKPVVNHHVNLVKRTDVVTRTSYLLAESVYEFSRADCAIVNAGLIVNGIEADKVTEYDIHRMLPHPINIVRVRLTGKQLKQVIQKSQKQEYMHEHAQGLGFRGDIFGGYILYNLGFIESEDRYFIGDEEIQNDKQYTLGTVDMYTFGRYFPLLKGLSTDYIMPEFLRDIFKEKLLKL

SEQ ID NO: 70906 - protein, 203 aa, Staphylococcus epidermidis
MAKNIAKALLDIEAVSLSPNDLFTWSSGIKSPIYCDNRITLGYPEVRNAIRDGLIQLIKEHFSNVEIISGTATAGIPHAAYISEKMELPMNYVRSKSKSHGKQNQIEGAKSENKNVVVVEDLISTGGSSITAVEALEEAGANVLGVVAIFTYGLAKADETFNKAHIPFYTLSDYNELIEVAKDDGKISLNDIQTLVDWRDNLS

SEQ ID NO: 70907 - protein, 304 aa, Staphylococcus epidermidis
MATRNEEILRKPDWLKIKLNTNDNYTGLKKMMREKNLHTVCEEAKCPNIHECWGARRTATFMILGAVCTRACRFCAVKTGLPNELDLNEPERVAESVELMNLKHVVITAVARDDLRDQGSNVYAETVRKVRERNPFTTIEILPSDMGGDYEALETLMASRPDILNHNIETVRRLTPRVRARATYDRTLQFLRRSKELQPDIPTKSSLMVGLGETMEEIYETMDDLRANDVDILTIGQYLQPSRKHLKVEKYYTPLEFGKMRKIAMEKGFKHCQAGPLVRSSYHADEQVNEAAKEKQRQGEEQLN

SEQ ID NO: 70908 - protein, 135 aa, Staphylococcus epidermidis
MDIPKITTFLMFNDEAEEAIQLYTSLFEDSEIITMVKYGEEGPGTPGSVQHSIFTLNGQVFMAIDANSGEELPMNPAMSLYVTVKDTMEMERLFNGLKSEGAILMPKTEMPPFREFAWVQDKFGVSFQLALPENK

SEQ ID NO: 70909 - protein, 129 aa, Staphylococcus epidermidis
MIKVDQQYFELIEEYRECFDEEIFSARYSDILDKYDYVVGDYGYDQLRLKGFYKDSNKKAEISKRFSSIQDYILEYCNFGCPYFVVRRLSPNEFIEEIDDKEDIIDKLHDVKIQPTIQDTEKHTQAIDQ

SEQ ID NO: 70910 - protein, 565 aa, Staphylococcus epidermidis
MAYDGLFTKKMIESLQGLVSGRIHKINQPENDTIIIVIRQNRKNHQLLLSIHPSFSRLQLTTKKYDNPFTPPMFARVFRKHLEGGFIKAIRQVGNDRRIEIDIESKDEIGDTIYRTIILEIMGKHSNLILVDDQRKIIEGFKHLTPNTNQYRTVMPGFKYEAPPNQNKINPYELTGQEVLKYIDFNAGKIAKQLLNICEGFSPLIANEIVNRRQFMTQKTLPDAFDEVMAETKSASTPVFHKNHETGKEDFYFMKLNQFYDDIVEYHSLHELLDRFYDARGERERVKQRANDLVRFVQQQLQKQQNKLSKLIDEYESAKNKETQQLYGELITANIYRIQQGDDSVIALNYYTGEEVKIPLNPTKSPSTNAQYYYKQYNRMKTREHELTHQIKLTKENIDYFDNIEQQLKHITVDDIDDIRDELAEQGFMKQRKQSKKKKQSKIQLQTYHSTDGDTILVGKNNKQNDYLTNKKAHKNHLWFHTKDIPGSHVVILNESPSETTIKEAAMLAGYFSKAGSSAQIPVDYTEIRHVHKPSGAKPGFVTYDNQKTLFATPDYDHIQQMKES

SEQ ID NO: 70911 - protein, 485 aa, Staphylococcus epidermidis
MADLINILNHFVQEQPEAVAVRHTNDELTYKQLDEESSKLAHLLQDSKKPMILYGHMSPYMIVGMIGAIKSGCGYVPIDTSVPKERVNMIIDKVQPEIIFNTSDETLEQTNAQVLKVSDIQDSQYPIVFDSQMKQNDVVYTIFTSGSTGEPKGVQIEYASLNEFAEWMVSLNKTGTGKEWLNQAPFSFDLSVMAIYPCLTSGGTLNLVDKDMIKKPKLLNEMLVQTPMNVWVSTPSFIEMCLLLPNLNEQQYNSLKQFFFCGEILSHKTAKVLVERFPNSMIYNTYGPTEATVAVTSIQITEEILNQYNPLPVGVARPGTRLFATEEGELVIEGQSVSLGYLKNEEKTAAVFNFEDGVRTYHTGDKAKIEDGLWFIQGRIDFQIKLNGYRMELEEIETQLRQSKHVREAVVVPVYKNGKVVHLIGAVVPTESVEDNLAMTTQIKHELKSRLPEYMIPRKFEWMERLPLTLNGKLDRKKIAEVVNG

SEQ ID NO: 70912 - protein, 435 aa, Staphylococcus epidermidis
MMKSVRTYALETINDVLNKGAYSNLKINEVLSTNNINTVDKNLFTELVYGTLKRKYTLDYLLKPFIKTKIKSWVRQLLWMSLYQYLYLDKIPNHAIIHEAVDIAKKRGGYHTGNIVNGILRTVMRTELPSFEDIDDTKKRIAIQYSLPKWIVDHWVTHFGIEKTENIAQSFLEPVATTVRANISRGSIDSIISKLEQEGYHVKKDDMLPFCLHISGLPVVNSNAFKEGYISIQDKSSMMVAYVMNLGRDDKVLDACSAPGGKACHMAEILSPEGHVDATDIHEHKINLIKQNIKKLKLNNIKAFQHDATEVYDKMYDKILVDAPCSGLGVLRHKPEIKYSQSQNSIKSLVELQLQILENVKDNIKPGGTIVYSTCTIEQMENENVIYTFLKRHKDFEFEPIQNPVTGEQVKTLQILPQDFNSDGFFISKIKRKES

SEQ ID NO: 70913 - protein, 666 aa, Staphylococcus epidermidis
MIGKVINERYTITDKLGGGGMSIVYLAEDSILNRKVAIKAISIPPSEKEETFKRFEREVHNSSQLSHENIVSMIDVDEEDDCFYIVMEYIEGPTLAEYIHSHGPLSVETAIQFTEQILSGIKHAHDMRIVHRDIKPQNILIDKNKKLQIFDFGIAKALSETSLTQTNHVLGTVQYLSPEQAKGEATDESTDIYSIGIVLYEMLVGEPPFNGETAVSIAIKHIQDSIPNITTDKRNDVPQSLSNVVLRATEKDKYHRYHTVQEMCDDLTSALHENRLNEEKYELDKTKTVPLTKDDLNHKIYDEQNQNDLNKTMQIPIVNDSIKQQEFQSSEPRYYQKSDKKRSKMKIAILSIIFVILLIGLFSFVAMAVFGNKYEEMPDLKGKTEKQAEKVLDSHHLKVGDISRNYSDKYPENQIIKTNPDSGERVEQGDRIDIVLSKGPEKVKMPNVLGMSKNDALKKLKAIGFKDIHVEQAYSQTYEKGLISEQSVVANSEVSVNNHHITIYESLGVRQVYVNNYENKSYESAKKELEDKGFKVQVTKENNDDVEKGNVISQSPKDKTVDEGSTILLVVSKGEKSDEDDDEDKDTTTKNETVKVPYTGKKNKSQKVEVFIRDIDNKGDSAVQTFNIKSDKTINIPLKIKKGSDAGYTIRVDNKIVADKDVSYDG

SEQ ID NO: 70914 - protein, 62 aa, Staphylococcus epidermidis
MGKQCFVTGRKASTGNHRSHALNANKRRWNANLQKVRILVDGKPKKVWVSARALKSGKVTRV

SEQ ID NO: 70915 - protein, 428 aa, Staphylococcus epidermidis
MACHMFIAFIYIVGWLKYYESLGELEMAQDRKKVLVLGAGYAGLQTVTKLQKELSADAAEITLINKNEYHYESTWLHEASAGTINYEDLLYPVEKTVNKDKVNFVVAEVTKIDRNAKRVETDKGVYDFDILVVALGFVSETFGIDGMKEHAFQIENVLTSRKLSRHIEDKFANYAASKEKDDKDLSILVGGAGFTGIEFLGELTDRIPELCSKYGVDQSKVKLTCVEAAPKMLPMFSDDLVSYAVKYLEDRGVEFKIATPIVACNEKGFVVEVNGEKQQLEAGTSVWTAGVRGSHLMEESFEGVKRGRVINKQDLTIEGHNDIFVIGDCSAFIPAGEERPLPTTAQIAMQQGEHTASNIKRLLNGESTQDFQYVNRGTVCSLGANDGVGIVYGRDIAGKKAAFLKKVIDTRAIYKLGGIGLAFKKGKF

SEQ ID NO: 70916 - protein, 493 aa, Staphylococcus epidermidis
MQFFINQDTPTSIETIVVGVPDHLNQLGEIKYHKTLIKERLETLKQYHVINSSIGKISSTLIYIDEKPKRLLTVGLGNLKILSYQRLLKVWGQLFQYLKDVHVTDCELLLDTFKSKYGNIIEICQTLGLQSAQSIFEFDHYKSDKKPPYQGRVYIQTTEHNIETKINEGQQLGESINYARELSQMPPNILTPQYFAEEIKKHFEGSSVSVDIKDHRKIIDEGFGLIHAVGKGSNHGPRLITVSYYGAEADEPPISLVGKGITYDSGGYSIKSKIGMQTMKYDMCGAANVIGMVDAISKQKLPVNIVGVIASAENMIGESSMKPDDVFTALNGETVEMLNSDAEGRMVLGDAVFYATQFKPQLILDFATLTGAAIVALGDDKAAAFQSHAENELKNLLTVARHVDEKVFELPITETERHLIKQSDVADLVNHTNGQGKALFAAAFISHFSGDIPHIHFDIAGPATIKSATYKGPKGPTGYMIPTVVEWLQQKYK

SEQ ID NO: 70917 - protein, 312 aa, Staphylococcus epidermidis
MSKMGKIAVVFPGQGAQKVGMASDLYNEEERSTRVLNLAQETVDFDLLETMFNDNDGKLGETENTQPALLTHSIALLESLNHLKVDYTMGHSLGEYSSLVASGVLAFEDAVRIVRKRGQLMAQAFPNGVGGMAAVLGLDYDDVDKICQTLSTNEQLIEPANINSPGQIVVSGHKPLIDELVEKGKELGAKRVLPLAVSGPFHSSMMKVIEEDFANFINQFEWHNANYPIVQNVNAKGETDAEVIKRNMVKQLYLPVQFIQSTEWLINQGVDHFIEIGPGKVLSGLIKKINRDVKITSIQTLEDVKGWNNNHE

SEQ ID NO: 70918 - protein, 244 aa, Staphylococcus epidermidis
MNKSALVTGASRGIGRSIALQLAEEGYNVAVNYAGSKDKAEAVVEEIKAKGVESFAIQANVAKGDEVKEMIKEVVSQFGSVDVLVNNAGITKDNLLMRMKEQEWDDVIDTNLKGVFNCIQKVTPQMLRQRSGAIINLTSIVGAMGNPGQANYVATKAGVIGLTKTAARELASRGITVNAVAPGFIVSDMTNALSDDLKDQMLEQIPLKRFGEDTDIANTVAFLASDKAKYITGQTIHVNGGMYM

SEQ ID NO: 70919 - protein, 77 aa, Staphylococcus epidermidis
MENFDKVKDIIVDRLGVDADKVTEDASFKDDLGADSLDIAELVMELEDEFGTEIPDEEAEKINTVGDAVKYINSLEK

SEQ ID NO: 70920 - protein, 1189 aa, Staphylococcus epidermidis
MVYLKSIDAIGFKSFADHTNVQFDKGVTAIVGPNGSGKSNITDAIKWVLGEQSAKSLRGAKMEDIIFSGAEHRKAQNFAEVKLKLDNHSQKLQIDSEELVVTRRLYRSGESEYYLNNDRARLKDIIDLFLDSGLGKEAFSIISQGRVDEILNAKPINRRQIIEESAGVLKYKKRKAESIQKLDHTEDNLNRVEDILYDLEGRVEPLKEEAAIAKEYKQLSKEMEQSDVIVTVSDIDHYTEDNQRLDERLNHLKSQQAEKEGQQAQINQLLQRYKGKRQQNDYDIEKLNYELVKATENYEQLSGKLNVLEERKKNQSETNARYEEELDNLESQIDSIKNEKAQNEKLLADLKNKQKQLNKEVQELESLLYVSDEQHDEKLEEIKNSYYTLMSEQSDVNNDIRFLEHTINENEAKKSRLDSRLVEAFNQLKDIQQNITQTNKAYQSSKKSMQKVEQNIQQLERQLTDSKRLLSEYENKLYQAYRYNEKLKSRIDSLATQEEDYTYFFNGVKHILKAKDKELRGIHGAVAEVINVPSEMTQAIETALGASLQHVIVDNEKDGRQAIQYLKQRGLGRATFLPLNVIQPRHVAAEIKDVARSSQGFINIASDAINVSAKYQNIIENLLGNTIIVENLKHANELARAIRYRTRIVTLEGDVVNPGGSMTGGGARKTKSILSQKDELSTMRNQLEDYQRQTAEFERQFKEQKTQAEQLSEQYFSASQQYNNLKEQVHHHELELDRLKTQEAHLKNEHEEFEFEKNDGYQSDKSKETLKEKQNHLTEIQQQLKQLENDIERYTQLSKEGKASTHQTQQQLHQKQSDLAVVKERIKSQKQVHEHLDKQLSDSERQKLEVNEKIKLFNSDEMMGEDAFEKLKEQIQQQENVRQNLNQQLSEIKQQRKDFNEKIEMNEGQLQKCHQDILSIENHYQDIKAKQSKLDVLINHAIDHLNDTYQLTVERARMEYDSDETIDNLRKKVKLTKMSIDELGPVNLNAIEQFEELNERYTFLNEQRTDLREAKETLEQIIHEMDKEVEGRFKTTFHAVQDHFTTVFKQLFGGGQAELRLTEDDYLSAGVDIIVQPPGKKLQHLSLLSGGERALSAIALLFAILKVRSAPFVILDEVEAALDEANVIRYAQYLNELSTETQFIVITHRKGTMEFSDRLYGVTMQESGVSKLVSVNLNTIDEVMKEEQA

SEQ ID NO: 70921 - protein, 408 aa, Staphylococcus epidermidis
MSFFKRLKDKFSSKNEDDIQKDLDESVDSNVNSDSDSMDPNDSDEQVKPKKKPKKLSEADFDEDGLISIEDFEEIEAQKIGAKFKAGLEKSRQNFQEQLNNLIARYRKVDEDFFEALEEMLITADVGFNTVMKLTDELRTEAQRRNIQETEDLREVIVEKIVEIYHQEDDHSEAMNIEDGRLNVILMVGVNGVGKTTTIGKLAYRYQQEGKKVMLAAGDTFRAGAIQQLNVWGERVGVEVVSQNEGSDPAAVVYDAINAAKNKDVDILICDTAGRLQNKSNLMQELDKMKRVINRAIPDAPHEALLCLDATTGQNALSQARSFKEVTNVSGIVLTKLDGTAKGGIVLAIRNELHIPVKYVGLGEKMDDLQPFSPESYVYGLFADMIEQNEDIPEEISRNSSVESEEGN

SEQ ID NO: 70922 - protein, 110 aa, Staphylococcus epidermidis
MGQNDLVKTLRMNYLFDFYQSLLTNKQKNYLELFYLQDYSLSEIADTFEVSRQAVYDNIRRTGDLVEDYESKLRLYQRFEKRRELYNLMKQSLNQPELLKQYITQLEELE

SEQ ID NO: 70923 - protein, 455 aa, Staphylococcus epidermidis
MAFEGLSDRLQATMQKMRGKGKVTEADIKTMMREVRLALLEADVNFKVVKEFVKTVSERALGSDVMQSLTPGQQVIKIVQEELTSLMGGENTSIKMANKPPTVVMMVGLQGAGKTTTAGKLALLMRKKYNKKPLLVAGDIYRPAAIDQLQTVGKQIDIPVYSEGDQVSPQQIVENALKHAKEEHLDFVIIDTAGRLHIDETLMNELQEVKEISKPDEIMLVVDAMTGQDAVNVAQSFDEQLDVSGVTLTKLDGDTRGGAALSIRSVTQKPIKFVGMSEKLDGLELFHPERMASRILGMGDVLSLIEKAQQDVDQEKAKDLEKKMRESSFTLDDFLEQLDQVKNLGPLDDIMKMIPGMNKMKGLDKLNMSDKQIDHIKAIIQSMTPKERSNPETLNVSRKKRIAKGSGRSLQEVNRLMKQFNDMKKMMKQFTGGGKGKKAKRNQMQNMLKGMNLPF

SEQ ID NO: 70924 - protein, 91 aa, Staphylococcus epidermidis
MAVKIRLTRLGSKRNPFYRIVVADARSPRDGRIIEQLGTYNPAHVNAPEVKIDEELALKWLHDGAKPTDTVHNILSREGILKKFDEQKNAK

SEQ ID NO: 70925 - protein, 167 aa, Staphylococcus epidermidis
MEVEVGQIVNTHGIKGEVKVKSNSDFTETRFQPGEQLLVKHNNTEIVYTVDSYRIHKGFHMLRFEGINNINDIEHLKGDYIYQERDHQDIELGEHEYYYSDIIGCTVFKDDDTPIGRVINIFETGANDVWIVKGEKEYLIPYIEDVVKDIDIENKTIKITPMEGLLD

SEQ ID NO: 70926 - protein, 245 aa, Staphylococcus epidermidis
MKIDYLTLFPEMFEGVLNHSILKRAQDKGIINVNTINFRDYSINKHNQVDDYPFGGGQGMVLKPEPVFNAMEDINRNEHTRVILMCPQGRPFTQEIAQELSEAKHIVFICGHYEGYDERIRKHLVTDEISMGDYVLTGGELPAMTMTDAIVRLIPGVLGNQASHQDDSFSDGLLEFPQYTRPREYKNMSVPEVLLSGNHAHIDQWRHEQKLIRTYEKRPDLLEQYPLTEKDREILETYKKKLKND

SEQ ID NO: 70927 - protein, 116 aa, Staphylococcus epidermidis
MSNHKLIEAVTKSQLRTDLPTFRSGDTLRVHVRIVEGSRERIQVFEGVVIKRRGGGISETFTVRKISSGVGVERTFPLHTPKIEKIEVKRRGKVRRAKLYYLRSLRGKAARIQEIR

SEQ ID NO: 70928 - protein, 287 aa, Staphylococcus epidermidis
MAIQWYPGHMAKAKRQVSEQLKKVDVVFELVDARIPYSSRNPMIDDVIKQKPRVVILNKKDMTNLKELEKWETYFKDEGFYPVAVDAKHGKNLKNVEVEAIKATQEKFDREKAKGLKPRAIRAMIVGIPNVGKSTLINKLAKRSIAETGNKPGVTKQQQWIKVGKSLQLLDTPGILWPKFEDEEVGKKLSLTGAIKDSIVHLDEVAIYGLNFMIKHDVSALKRHYNIDTHEDAEILDWFDAIGRRRGLLQKGNEVDYESVIELIINDMRNAKIGTYCFDILKEMKSE

SEQ ID NO: 70929 - protein, 260 aa, Staphylococcus epidermidis
MNDSMSLTIKEIKEKLSRIETLEELHKHEANNDSRKGVINAIKSREKNILKQQALEEHYLSMNQYENNIMSSNRDALICGIDEVGRGPLAGPVVACAVILEKNHHYIGLDDSKKVSPKNRARLNQNLKENVYQYAYGIASSVEIDELNIYRATQLAMLRAINQLDVTPTHLLIDAMTLDIDIPQTSIIKGDAKSVSIAAASIMAKEYRDQYMRQLSKQFPEYGFDKNAGYGTKQHLKAIDQVGIINEHRQSFEPIKSMMK

SEQ ID NO: 70930 - protein, 302 aa, Staphylococcus epidermidis
MSVFIDKNTKVMVQGITGSTALFHTKQMLDYGTQIVAGVTPGKGGQVVEGVPVYNTVEEAKNETGANVSVVYVPAPFAADSIIEAADADLDMVICITEHIPVVDMVKVKRYLQGRKTRLVGPNCPGVITADECKIGIMPGYIHKKGHVGVVSRSGTLTYEAVHQLTEEGIGQTTAVGIGGDPVNGTNFIDVLKAFNEDSETKAVVMIGEIGGTAEEEAAQWIKENMNKPVVGFIGGQTAPPGKRMGHAGAIISGGKGTASEKIKTLNDCGVETADTPSEIGTTLIDAAKKAGIYEELLTIKK

SEQ ID NO: 70931 - protein, 689 aa, Staphylococcus epidermidis
MADNLVIVESPAKAKTIEKYLGKRYKVIASMGHVRDLPRSQMGVDTEDNYEPKYITIRGKGPVVKDLKKHAKKAKKIFLASDPDREGEAIAWHLSKILELEDSKENRVVFNEITKDAVKDSFKHPRGIEMDLVDAQQARRILDRLVGYNISPVLWKKVKKGLSAGRVQSVALRLVIDRENEIRNFKPEEYWSIEGEFRYKKSKFTAKFLHYKNKPYKLNNKDDVQRITEALNGDQFEITNVNRKEKTRYPAHPFTTSTLQQEAARKLNFKARKTMMLAQQLYEGIDLKRQGTVGLITYMRTDSTRISTSAKSEAQQYINDKYGEQYVSQRKSSGKQGDQDAHEAIRPTSTMRTPDDMKAFLTRDQHRLYKLIWERFVASQMAPAILDTVALDVTQNDIKFRANGQTIKFKGFMTLYVEAKDDKENDKENKLPQLDKGDKVTATKIEPAQHFTQPPPRYTEARLVKTLEELKIGRPSTYAPTIDTIQKRNYVKLESKRFIPTELGEIVYEQVKEYFPEIIDVEFTVNMETLLDKIAEGDMNWRKVIGDFYNSFKQDVERAESEMEKIEIKDEPAGEDCEVCGSPMVIKMGRYGKFMACSNFPDCRNTKAIVKTIGVTCPKCNEGDVVERKSKKNRIFYGCSRYPECDFISWDKPVGRDCPKCHHYLVNKKKGKSSQVVCSNCDYEEEVQK

SEQ ID NO: 70932 - protein, 443 aa, Staphylococcus epidermidis
MSDFRRGKMTQKVNVVGAGLAGSEAAYQLAQRGIKVNLIEMRPVKQTPAHHTDKFAELVCSNSLRGNALTNAVGVLKEEMRHLDSLIITSADKARVPAGGALAVDRHDFAGYITDTLRNHPNITVLNEEVNHIPEGYTIIATGPLTTEHLAQEIVDITGKDQLYFYDAAAPIIEKDSINMDKVYLKSRYDKGEAAYLNCPMTEEEFNRFYDAVLEAEVAPVNEFEKEKYFEGCMPFEVMAERGRKTLLFGPMKPVGLEDPKTGKRPYAVVQLRQDDAAGTLYNIVGFQTHLKWGAQKEVIRLIPGLENVDIVRYGVMHRNTFINSPDVLNEKYELKGHDNLYFAGQMTGVEGYVESAASGLVAGINLAHKILDKGEVIFPRETMIGSMAYYISHAKNEKNFQPMNANFGLLPSLEKRIKDKKERYETQAKRALEYLDNYKQTL

SEQ ID NO: 70933 - protein, 296 aa, Staphylococcus epidermidis
MDKIQETFLYMLKVERNFSEYTLKSYHDDLVQFNNFLEREHLQLETFEYKDARNYLAFLYSNQLKRTTVSRKISTLRTFYEFWMTQDNSIINPFVQLVHPKKEKYLPQFFYEEEMEALFQTVEHDNKKGIRDKVIIELLYATGIRVSELINIKLKDIDMNLPGVKVLGKGNKERFIPFGEFCRQSIERYLEEFQPKQLANHDYLIVNMKGDPITERGVRYVLNDVVKRTAGVNDIHPHKLRHTFATHLLNQGADLRTVQSLLGHVNLSTTGRYTHVSNQQLRKVYLNAHPRAKKGE

SEQ ID NO: 70934 - protein, 180 aa, Staphylococcus epidermidis
MDNSLHATTIYAVRHNGEAAMAGDGQVTLGQQVIMKQTARKVRRLYEGKVLAGFAGSVADAFTLFEKFETKLQQFSGNLERAAVELAQEWRGDKQLRQLEAMLIVMNKDAILIVSGTGEVIAPDDDLIAIGSGGNYALSAGRALKRHAAQLSASEMAYESLKVAADICVFTNDNIIVETL

SEQ ID NO: 70935 - protein, 262 aa, Staphylococcus epidermidis
MAVISMKQLLEAGVHFGHQTRRWNPKMKKYIFTERNGIYIIDLQKTVKKVEEAYNFVKQISEEGGKVLFVGTKKQAQESVKAEAERAGQFYVNQRWLGGILTNYKTISKRIKRISEIEKMEEDGLFEVLPKKEVVELKKEYDRLIKFLGGIRDMKSMPQALFVVDPRKERNAIAEARKLNIPIVGIVDTNCDPDEIDYVIPANDDAIRAVKLLTGKMADAILEGQQGVSNEEVAAEQNINLDDKEESEQAETTEENTSVESN

SEQ ID NO: 70936 - protein, 292 aa, Staphylococcus epidermidis
MAISAKLVKELREKTGAGMMDCKKALTETDGDIDKAIDYLREKGIAKAAKKADRIAAEGLVHVEVKDNEAAIVEINSETDFVARNEGFQELVKEIANHILDSKVETVDALMESKLSSGKTVDERMKEAISTIGEKLSIRRFSIRTKTDNDAFGAYLHMGGRIGVLTVVEGTTDEEAAKDVAMHIAAINPKYVSSEQVSEEEINHEREVLKQQALNEGKPEKIVEKMVEGRLRKYLQEICAVDQNFVKNPDETVEAFLKAKGGKLTDFVRYEVGEGMEKREENFAEEVKGQMK

SEQ ID NO: 70937 - protein, 240 aa, Staphylococcus epidermidis
MAQTSKYKRVVLKLSGEALAGDKGFGINPIIIKSVAQQVAEVAKMDCEIAVIVGGGNIWRGKTGSDLGMDRGTADYMGMLATVMNALALQDSLEQLDCDTRVLTSIEMKQVAEPYIRRRAIRHLEKKRVVIFAAGIGNPYFSTDTTAALRAAEVEADVILMGKNNVDGVYSADPKVDANAIKYEHLTHIQMLQEGLQVMDSTASSFCMDNNIPLNVFSIMEEGNIKRAVMGEKIGTLITK

SEQ ID NO: 70938 - protein, 184 aa, Staphylococcus epidermidis
MSDIIKDTKSRMQKSIDNLSRELANISAGRANSNLLNGVTVDYYGAPTPVQQLASINVPEARLLVISPYDKSSVADIEKAIIAANLGVNPTSDGEVIRISVPALTEERRKELVKEVKKIGEDAKVSIRNIRRDINDQLKKDEKNGDITEDDLRSQTDDVQKATDNSIKEIDQLVADKEKDIMSV

SEQ ID NO: 70939 - protein, 256 aa, Staphylococcus epidermidis
MFKKLKNKNKTETNHNNDLDIHNIPEHVAIIMDGNGRWAKKRKMPRIKGHYEGMQTIKKITREASDIGIKYLTLYAFSTENWSRPESEVNYIMNLPVNFLKTFLPELIEKNVKIETIGFYEGLPQSTIDAIDFAKAKTQHNTGLTLVFAINYGGRAEIIQSMKAIYNELQLNGQGSEVIDEALIKRHLMTHSYPDPDLLIRTSGEQRISNFLIWQASYSEFIFNEKLWPDFDEKELRECLKIYQSRQRRFGGLSEE

SEQ ID NO: 70940 - protein, 260 aa, Staphylococcus epidermidis
MKVRTLTAIIALLIFLPILLKGGLILMLFAFLLALIALKELLNMNMIKFLSIPGLISALALIIIMLPQDAGEWVQVIQLKGLIAMSFIVLSYTVLSKNRFSFMDAAFCLMSVAYVGIGFMYFYETRSEGLRYILFAFLIVWLTDTGAYIFGRLMGKHKLWPVISPNKTIEGFFGGILCSILVPLVMQMFVDLHMNIWLLLLVTIVLSMFGQLGDLVESGFKRHFGVKDSGRILPGHGGILDRFDSFMFVLPLLNILLIQT

SEQ ID NO: 70941 - protein, 567 aa, Staphylococcus epidermidis
MKQSKVFIPTMREVPAEAEALSHRLLLKAGLIKQSTSGIYSYLPLATRVLNNISKIIREEMESIDAVEILMPALQQAELWEESGRWSAYGPELMRLKDRNGREFALGPTHEEVVTSLVRDELKSYKQLPLTLFQIQSKYRDEKRPRFGLLRGREFLMKDAYSFHSDEASLDATYQDMYQAYSRIFKRVGINARPVVADSGAIGGSHTHEFMALSEIGEDTIVYSNESDYAANIEKAEVVYHPSHKHSALAELTKVETPNVKTAQEVAEYLKRPLDEIVKTMIFKIDGEFIMFLVRGHHELNEVKLKSYFGTEHVEMATPDEIVNLVDANPGSLGPIFDKDIKIYADNYLQDLNNFVVGANEDHYHYINVNIGRDFDVTEYGDFRFITQGEMLSDGSGVAQFAEGIEVGQVFKLGTKYSESMNATFLDNQGKAQPLIMGCYGIGVSRTLSAIVEQNNDENGIIWPKSVTPFDIHLITINPKKDDQRTLGDQLYQKLMDSYDVLYDDRKERAGVKFNDSDLIGLPVRVVVGKRAEEGIVEVKQRINGLSEEVQIDELEYYLQELFKNIK

SEQ ID NO: 70942 - protein, 1438 aa, Staphylococcus epidermidis
MAMTNREKFKVLADQIKISNQLEQDILEQGELTRIDVSNKNRTWTFQISLPHFLSHEDYLLFTHAIEEEFKEIATVAIDFSIKDTNNQDEFALKYFGHCIDQTRLSPKVKGQLKQKKLIMSGNVLKVLVSNDIERNHFDKACNGSLVKAFRQCGFEIDKVVFETDSTNHDDDLASLEAHIQQEDEQSAREATEKLEKMKAEKAKQQDNNESTVEKCQIGKPIQIENIKPIESIIEEEFKVAIEGVIFDINLKELKSGRHIVELKVTDYTDSLVLKMFTRKNKDDLDHFKALSVGKWVRAQGRIEEDTFVRDLVMMMSDIEEIKKTPKQDKAEDKRVEFHLHTSMSQMDGIPNISAYVEQAAKWGHQALAVTDHNVVQAFPDAHNAAEKHGIKMIYGMEGMLVDDGVPIAYKPTDRNLKDATYVVFDVETTGLSNQYDKIIELAAVKVHNGEIIDKFERFSNPHERLSETIINLTHITDDMLTDAPEIEEVLTEFKEWVGDAIFVAHNASFDMGFIDTGYERLGFGPSTNGVIDTLELSRTINTEYGKHGLNFLAKKYGVELTQHHRAIYDTEATAYIFIKMVQQMKELGVNNHLEINKKLTNEDAYKRARPSHVTLIVQNQEGLKNLFKIVSASLVKYYYRTPRIPRSLLNEYREGILIGTACDEGELFTAVMQKDQSEVEKIAKFYDFIEVQPPALYQDLMDRELIRDNETLTQIYKRLIDAGKSANIPVIATGNAHYLYEHDAIARKILIASQPGNPLNRSTLPEAHFRTTDEMLDDFHFLGEEKAYEIVVTNTNELANKIEKVVPIKDKLFTPRMDGANEEIRELSYSNAKKLYGEDLPQIVIDRLEKELDSIIGNGFSVIYLISQRLVKKSLDDGYLVGSRGSVGSSFVATMTEITEVNPLPPHYICSHCKTSEFFDDGSVGSGFDLPDKKCPTCGNELIKEGQDIPFETFLGFKGDKVPDIDLNFSGEYQPNAHNYTKVLFGEDKVFRAGTIGTVAEKTAFGFVKGYLNDQGIHKRGAEIDRLVKGCTGVKRTTGQHPGGIIVVPDYMDIYDFTPIQFPADDQSAAWMTTHFDFHSIHDNVLKLDILGHDDPTMIRMLQDLSGIDPKTIPVDDKETMQIFSGPESLGVTEDEILCKTGTFGVPEFGTGFVRQMLEDTKPTTFSELVQISGLSHGTDVWLGNAQELIRQGICDLSSVIGCRDDIMVYLMYAGLEPSMAFKTMEFVRKGRGLTDEMVEAMKENNVPDWYLDSCRKIKYMFPKAHAAAYVLMAVRIAYFKVHHPLYYYAAYFTIRASDFDLITMIKDKTSIRNTVKDMYSRYMDLGKKEKDVLTVLEIMNEMAHRGFRLQPISLEKSQAFDFIIEGDTLIPPFISVPGLGENVAQRIVEAREEGPFLSKEDLNKKAGLSQKVIDYLDELGSLPDLPDKAQLSIFDM

SEQ ID NO: 70943 - protein, 407 aa, Staphylococcus epidermidis
MSSNELLLATEYLEKEKKIPREVLIDAIEAALITAYKKNYDSARNVRVELNMDEGSFRVIARKEVVEEVFDDRDEVDLSTALVKNPAYEVGDIYEQDVTPKDFGRVGAQAAKQAVMQRLRDAEREILYDEFIDKEEDILTGVIDRVDHRYVYVNFGRIEAVLSEAERSPNEKYIPNERIKVYVNKVEQTTKGPQIYVSRSHPGLLKRLFEQEVPEIYDGTVIVKSVAREAGDRSKISVYSDNPDIDAVGACVGSKGARVEAVVEELGGEKIDIVQWDEDPKVFVRNALSPSQVLEVIVDEENQSTVVVVPDYQLSLAIGKRGQNARLAAKLTSWKIDIKSESDAREAGIYPVIESEEVADEIVNSGDEDVEFDNVNLEETNLTSTELAAETDEDKKDKTEEDNDTES

SEQ ID NO: 70944 - protein, 728 aa, Staphylococcus epidermidis
MNMVRSDYMSKKRIYEYAKELNLKSKEIIDELKSMNVEVSNHMQALEEEQIKALDKKFKASQAKDTNKQNTQNNHQKSNNKQNSNDKEKQQSKNNSKPTKKKEQNNKGKQQNKNNKTNKNQKNNKNKKNNKNNKPQNEVEETKEMPSKITYQEGITVGELAEKLNVESAGIIKKLFLLGIMANINQSLDEETLELIADDYGVEIEKEVVVDEEDLSIYFDDETDDSDAIERPAVVTIMGHVDHGKTTLLDSIRNTKVTEGEAGGITQHIGAYQIENSGKKITFLDTPGHAAFTTMRARGAQVTDITILVVAADDGVMPQTIEAINHAKEAEVPTIVAVNKIDKPTANPDRVMQELTEYGLIPEDWGGDTIFVPLSALSGDGIDDLLEMIGLVAEVQELKANPNKQAVGTVIEAELDKSRGPAASLLVQNGTLNVGDAIVVGNTYGRIRAMVNDLGKRIKSAGPSTPVEITGINDVPLAGDRFVVFGDEKQARRIGEARHEASVIQQRQESKNVSLDNLFEQMKQGEMKDLNVIIKGDVQGSVEALAASLMKIDVEGVNVRIIHTAVGAINESDVTLANASNGIIIGFNVRPDAGAKRAAEAENVDMRLHRVIYNVIEEIESAMKGLLDPEFEEQVIGQAEVRQTFKVSKVGTIAGSYVTEGKITRNAGVRVIRDGIVLFEGELDTLKRFKDDAKEVAQGYECGITIEKYNDLKEGDIIEAFEMVEIQR

SEQ ID NO: 70945 - protein, 305 aa, Staphylococcus epidermidis
MYNGILPVFKERGLTSHDVVFKLRKILKMKKIGHTGTLDPEVNGVLPICLGDATKVSDYIMEMGKTYHAMITLGKSTTTEDQTGDILETRAVDKNDINEDTIDQVLQQFEGHIQQIPPMYSSVKVNGRKLYEYARNNETVERPKRQVFIKDIHRISEVTFQEQTCHFEVEVTCGKGTYIRTLATDIGLKLGFPAHMSRLTRIASGGFQLESSLTIDQIKELHEHDSLHNELFPIEYGLKGLKSFQVKDSNFKKKICNGQKFHKKVLSQNVKEPFIFVDSSTQKVLAIYIVHPDKPYEIKPKKVFN

SEQ ID NO: 70946 - protein, 323 aa, Staphylococcus epidermidis
MKVIEVTHPIQSNQFITENVAMAFGFFDGMHRGHDKVFQVLDEKAKEHQLKKAVMTFDPHPSVVLNPERKRTTYLTPLSDKLEMIAEHGIDYCIVINFSSRFANVTSDDFIKNYIINNHVKEVIAGFDFTFGKFGKGNMTVLQESKAFNTTIVGKQEMDSEKISTTAIRQALTDGHLQKANDELGYIYRIKGTVVQGEKRGRTIGFPTANVQPSDDYVLPKKGVYAVSMEIGPESKLHRGVANVGVKPTFHDPTRAELVIEVNIFDFNENIYGERVTVYWHHFLRPEVKFDGIDPLVKQMNEDKAQAKHLLSIDFDDDISYNI

SEQ ID NO: 70947 - protein, 89 aa, Staphylococcus epidermidis
MAISQQRKDELIKEYRVHETDTGSPEVQIAVLTAEITALNEHLREHKKDHHSRRGLLKMVGRRRHLLNYLRSKDIQRYRELIKSLGIRR

SEQ ID NO: 70948 - protein, 701 aa, Staphylococcus epidermidis
MSQEKKVFKTEWAGRSLTIETGQLAKQANGAVLVRYGDTVVLSTATASKEPRDGDFFPLTVNYEEKMYAAGKIPGGFKKREGRPGDEATLTARLIDRPIRPLFPKGYRHDVQIMNIVLSADPDCSPEMAAMIGSSMALSVSDIPFQGPIAGVNVGYIDGKYVINPSVADKEISRLDLEVAGHKDAVNMVEAGASEITESEMLEAIFFGHEEIKRLVAFQQEIIDHIQPIKQEFVPVERDEDLVEKVKSLTEDKGLKDTVLTFDKQQRDENLDALKEEVVGHFLDEEDPENETLVKEVYAILNDLIKEEVRRLIADEKIRPDGRKVDEIRPLESEVGLLPRAHGSGLFTRGQTQALSVLTLGALGDYQLIDGLGPEVEKRFMHHYNFPNFSVGETGPVRAPGRREIGHGALGERALRYIIPDTQDFPYTIRIVSEVLESNGSSSQASICGSTLALMDAGVPIKAPVAGIAMGLVTRDDSYTILTDIQGMEDALGDMDFKVAGTKDGITAIQMDIKIDGLTREVIEEALEQARQGRLAIMDHMLHTIEQPREELSAYAPKVVTMSINPDKIRDVIGPGGKKINEIIDETGVKLDIEQDGTIFIGAVDQAMINRAKEIIEDITREAEVGQVYHAKVKRIEKYGAFVELFPGKDALLHISQISQERINKVEDVLKIGDTIEVKITEIDKQGRVNASHKVLEQSKN

SEQ ID NO: 70949 - protein, 572 aa, Staphylococcus epidermidis
MSLYMDGSLFIGGNILSLIKKKNKDIRIIPLGGVGEIAKNMYIVEVDDEMFMLDAGLMFPEDEMLGVDIVIPDIQYVIENKERLKGIFLTHGHEHAIGAVSYVLEQIDAPVYGSKLTIALVKEAMKARNIKKKVRYYTVNHDSIMRFKNVNVSFFNTTHSIPDSLGVCIHTSYGSIVYTGEFKFDQSLHGHYAPDLKRMAEIGDEGVFALISDSTEAEKPGYNTPENIIEHHMYDAFAKVKGRLIVSCYASNFVRIQQVLNIASQLNRKVSFLGRSLESSFNIARKMGYFDIPKDLLIPINEVENYPKNEVIIIATGMQGEPVEALSQMARKKHKIMNIEEGDSIFLAITASANMEVIIADTLNELVRAGAHIIPNNKKIHASSHGCMEELKMMLNIMKPEYFVPVQGEFKMQIAHAKLAAETGVAPEKIFLVEKGDVISYNGKDMILNEKVQSGNILIDGIGVGDVGNIVLRDRHLLAEDGIFIAVVTLDPKNRRIAAGPEIQSRGFVYVRESEELLKEAEEKVRKIVEEGLQEKRIEWSEIKQNMRDQISKLLFESTKRRPMIIPVISEI

SEQ ID NO: 70950 - protein, 797 aa, Staphylococcus epidermidis
MPQAKKRTSTKRKGNKKTNKKKQNETPLRYIFSIIVVILIILGAFQLGIIGRMIDSFFNYLFGMSRYLTYILVLIATIFITYSKQIPRTRRSIGAIVLQLALLFIAQLYFHFSHNITSQREPVLSFVYKAYEQTHFPNFGGGLIGFYLLKLFIPLISIVGVIIITILLLASSFILLLNLRHRDVTKSLFDNLKSSSNHASESIKQKREQNKIKKEEKAQLKEAKIERKKQKKSRQNNNVIKDVSDFPEISQSDDIPIYGHNEQEDKRPNTANQRQKRVLDNEQFQQSLPSTKNQSINNNQPSTTAENNQQQSQAEGSISEAGEEANIEYTVPPLSLLKQPTKQKTTSKAEVQRKGQVLESTLKNFGVNAKVTQIKIGPAVTQYEIQPAQGVKVSKIVNLHNDIALALAAKDVRIEAPIPGRSAVGIEVPNDKISLVTLKEVLEDKFPSKYKLEVGIGRDISGDPISIQLNEMPHLLVAGSTGSGKSVCINGIITSILLNTKPHEVKLMLIDPKMVELNVYNGIPHLLIPVVTNPHKASQALEKIVSEMERRYDLFQHSSTRNIEGYNQYIRKQNEELDEKQPELPYIVVIVDELADLMMVAGKEVENAIQRITQMARAAGIHLIVATQRPSVDVITGIIKNNIPSRIAFAVSSQTDSRTIIGAGGAEKLLGKGDMLYVGNGESTTTRIQGAFLSDQEVQDVVNYVVEQQKANYVKEMEPDAPVDKSEMKSEDALYDEAYLFVIEKQKASTSLLQRQFRIGYNRASRLMDDLERNQVIGPQKGSKPRQILVDLENDEV

SEQ ID NO: 70951 - protein, 140 aa, Staphylococcus epidermidis
MKISTKGRYGLTLMISLAKREGQGCVSLKTIAEENKLSDLYLEQLVGPLRNAGLIRSVRGAKGGYQLRVPSEEITAGDIIRLLEGPITFVESIDSEPPAQKQLWIRMRDAVRDVLDHTTLKYLADYKDTNEDLEGYMFYI

SEQ ID NO: 70952 - protein, 423 aa, Staphylococcus epidermidis
MSTEPLASRMRPKNIDEIISQQHLVGPKGIIRRMVDTKRLSSMIFYGPPGIGKTSIAKAISGSTQFKFRQLNAVTNTKKDMQLIVEEAKMSGQVILLLDEIHRLDKAKQDFLLPHLENGKIVLIGATTSNPYHAINPAIRSRAQIFELYPLDQDDIRLALDRAINDKERGLSTYHPIVDEDAIEYFSTQSQGDVRSALNALELAVLSAHIGEENERHITLDDAKDCLQKGAFVSDKDGDMHYDVMSAFQKSIRGSDVNAALHYLARLIEAGDLPTIVRRLLVISYEDVGLASPNAGQRTLAAIQSAERLGFPEARIPLSQAVIELCLSPKSNSGITAIDKALGDIRNGHIGQIPDYLKDGHYSGAKKLGRAIGYKYPHNYENGHVVQQYLPEKLKNRVYYEPKTTSKSEQQFKTIYDNLRNKT

SEQ ID NO: 70953 - protein, 588 aa, Staphylococcus epidermidis
MNKRTTYCGLVTEEFLNEKVTLKGWVHNRRDLGGLIFVDLRDREGIVQIVFNPDFSEEALQVAETVRSEYVVEVEGVVTKRDAETINPKIKTGQVEVQVSNIEIINKSETPPFSINEENVNVDENIRLKYRYLDLRRQELAQTFKMRHQTTRSIRQYLDNNGFFDIETPVLTKSTPEGARDYLVPSRVHEGEFYALPQSPQLFKQLLMISGFDKYYQIVKCFRDEDLRADRQPEFTQVDIEMSFVDQEDIIAMGEDMLRKVVKDVKGIDVSGPFPRMTYAEAMDRFGSDKPDTRFGMELINVSQLGKEMNFKVFKDTVDNNGEIKAIVAKDAANKYTRKDMDALTEFVNIYGAKGLAWVKVVDDGLSGPIARFFEDVNVETLKQLTEAKPGDLVMFVADKPNVVAQSLGALRIKLAKELGLIDESKLNFLWVTDWPLLEYDEDAKRYVAAHHPFTSPKREDIEKLDTEPENVQANAYDIVLNGYELGGGSIRIHDGELQQKMFEVLGFTNEQAQEQFGFLLDAFKYGAPPHGGIALGLDRLVMLLTNRTNLRDTIAFPKTASATCLLTDAPGEVSDKQLQELSLRIRH

SEQ ID NO: 70954 - protein, 424 aa, Staphylococcus epidermidis
MIKMPRGTQDILPQDSAKWRYIENRLHTLMELYNYKEIRTPIFESTELFARGVGDSTDVVQKEMYTFKDKGDRSLTLRPEGTAAVVRSYIEHKMQGEPNQPIKLYYNGPMFRYERKQKGRYRQFNQFGVEAIGAENPSIDAEILAMVMHIYESFGLKHLKLVINSIGDSESRKEYNEALVKHFEPVIDTFCSDCQSRLHTNPMRILDCKIDRDKEAVKNAPRITDYLNNDSKSYYEQVKLHLDNLNISYVEDPNLVRGLDYYTHTAFELMIDNPEYDGAITTLCGGGRYNGLLQLLDGPDETGIGFALSIERLLMALDEEGISLDVSEDFDLFVVTMGEDADRYAVKLINDLRRNGIKVDKDYLNRKIKGQMKQADRLNAKYTVVIGDQELENNEIGVKNMISGESENVQLDELVNYFKSRKEV

SEQ ID NO: 70955 - protein, 429 aa, Staphylococcus epidermidis
MKTHQYELIDEKVFEHEFDNGLKLFIIPKPGFQKTYVTYTTQFGSLDNHFKPIGSQQFVKVPDGVAHFLEHKLFEKEDEDLFTAFAEENAQANAFTSFDRTSYLFSATSNIESNIKRLLNMVETPYFTEETVNKEKGIIAEEIKMYQEQPGYKLMFNTLRAMYSKHPIRVDIAGSVESIYEITKDDLYLCYETFYHPSNMVLFVVGDVSPQSIIKLVEKHENQRNKTYQPRIERAQIDEPREINQRFVSEKMKLQSPRLMLGFKNEPLDESATKFVQRDLEMTFFYELVFGEETEFYQQLLNKDLIDETFGYQFVLEPSYSFSIITSATQQPDLFKQLIMDELRKYKGNLKDQEAFDLLKKQFIGEFISSLNSPEYIANQYAKLYFEGVSVFDMLDIVENITLESVNETSELFLNFDQLVDSRLEMENR

SEQ ID NO: 70956 - protein, 291 aa, Staphylococcus epidermidis
MKKIDSWLTKHGLKNRLTLVVIVIFIIFLILLFMFVNLSDEDTGQITITENAELRTGPNAAYPVIYKIEKGESFKKIDRKGKWIEVQNHAGTEKGWVAGWHTNLNIPADQSLSSNPLKGKTIVLDPGHGGSDQGASSSTPSKSLEKNYTLKTAKELKKLLNKEGAHVKMTRSNDKYVSLDDRNIKGDAFISIHNDALDSSNANGVTVYWFKDKQETLAQTLNSAIQKKALLTNRGSRQQNYQVLRQTDIPAVLLELGYISNPTDESMINDQLHRQVVEQAIVDGLKQYFSS

SEQ ID NO: 70957 - protein, 234 aa, Staphylococcus epidermidis
MKALVIGGSGTIGRAIVKRLLFEGYEVFLHYHSAQYSDLSNQFKNSKVTFIQCDLTKDIELEDYFGHIDELDCLIYTSGTALYGMLQDMSDCDIDNSYALNVRQFIRLTRYFIDILRQSNNGRIIVISSIWGETGASLETIYSAMKSAQIGFVKALSQELALTSVTVNAITPGMVKGKMSDVWSKDELSNIVSELPQQRMIDPSEVAHACAYLCSTMSKSITGTVHKVNGGWYI

SEQ ID NO: 70958 - protein, 275 aa, Staphylococcus epidermidis
MTFAKRKEWYLEYEITVNRAGLLGDISSLLGMLGISIVTINGVDQGKRGLLIKTDQLEKVERFEQIVKEINEIEITKLRVPELRDRLAVRHGRYIEQDADDKKTFKFEREDLGLLVDFLAELFKVEGHKLIGIRGMPRVGKTESIVAGSVCAHKRWLFISSTLIKQTVRRSLFKGEYDSNHVYIIDGAVTARELNPEHQELVREVMTLPSIKVVEHPDLFVESCNYNMEDFDYIIELRENEDQEIRYEEMKKHTVQSKNNLDFGDPFGGGFGFFE

SEQ ID NO: 70959 - protein, 729 aa, Staphylococcus epidermidis
MNNEYPYSADEVLYKAKSYLSTSEYEYVLKSYHIAYEAHKGQFRKNGLPYIMHPIQVAGILTEMRLDGPTIVAGFLHDVIEDTSYTFEDVKDMFNEEIARIVDGVTKLKKVKYRSKEEQQAENHRKLFIAIAKDVRVILVKLADRLHNMRTLKAMPREKQVRISKETLEIYAPLAHRLGINTIKWELEDTALRYIDSVQYFRIVNLMKKKRSEREAYITNAINKIKNEMTKMNLSGEINGRPKHIYSIYRKMIKQKKQFDQIFDLLAIRIIVNSINDCYATLGLVHTLWKPMPGRFKDYIAMPKQNMYQSLHTTVVGPNGDPLEIQIRTHEMHEIAEHGVAAHWAYKEGKTVNQKTQDFQNKLNWLKELAETDHTSADAQEFMESLKYDLQSDKVYAFTPASDVIELPYGAVPIDFAYAIHSEVGNKMIGAKVNGKIVPIDYVLQTGDIIEIRTSKHSYGPSRDWLKIVKSSSAKSKIKSFFKKQDRSSNIEKGKFMVEAEIKEQGFRVEDILTEKNLEVVNEKYHFANDEDLYAAVGFGGVTSIQIVNKLTERQRILDKQKALNEAQEVTKSVPIKKDITTDSGVYVEGLENVLIKLSKCCNPIPGDDIVGYITKGHGIKVHRTDCPNIKNETDRLISVEWVKSKDSTQQYQVDLEVTAYDRNGLLNEVLQAVNSTAGSLIKVSGRSDIDKNAVINISVMVKNVNDVYRVVEKIKQLGDVYTVSRVWN

SEQ ID NO: 70960 - protein, 130 aa, Staphylococcus epidermidis
MKTIGEVLKSRRERLGMTLSELEQRTQLKRQTLIHIENNDFNELAKSDYTEGFIRKYAKVVNIEPNQLIEAHQDEIPETQYQIDDVIQTFSNGYEPPYRRQSKEAFQLLMWMGFIILISLIVWILAVLII

SEQ ID NO: 70961 - protein, 193 aa, Staphylococcus epidermidis
MNIPNQITVFRVILIPFFILFALVDFGFGQISILGGNHIRIEILISAIIFVVASLSDFADGYLARKWQLVTNMGKFLDPLADKLLVASALIVMVQLGFTNSVVAIIIIAREFAVTGLRLLQIEQGFVSAAGQLGKIKTAVTMVAIIWILLGDPFVHYLRFPIGVWLLYIGVFFTILSGIEYFYKGRDVFKHSK

SEQ ID NO: 70962 - protein, 349 aa, Staphylococcus epidermidis
MDNERQKALDTVIKNMEKSFGKGAVMKLGDNKGRRVSSTSSGSVTVDNALGVGGYPKGRIIEIYGPESSGKTTVALHAIAEVQKNGGVAAFIDAEHALDPVYAQALGVDIDNLYLSQPDHGEQGLEIAEAFVRSGAVDIVVVDSVAALTPKAEIEGEMGDTHVGLQARLMSQALRKLSGAISKSNTTAIFINQIREKVGVMFGNPETTPGGRALKFYSSVRLEVRRAEQLKQGQDIVGNRTKIKVVKNKVAPPFRVAEVDIMYGQGISKEGELIDLGVENDIVDKSGAWYSYNGDRMGQGKENVKNYLKENPQIKEEIDRKLREKLGIFDGDVDENENEDDSPKTLFDE

SEQ ID NO: 70963 - protein, 519 aa, Staphylococcus epidermidis
MNLLSLLLILLGIILGVVVGYIVARNLLHQKQVQARQTADDIVSYANKEADNIKKEKLLEAKEENQILKEQAENELRERRGELQRQETRLLQKEENLDRKSDLLDKKDEILEQKESKLEERQQQVDAKESSVQTLIMKHEQELERISGLTQEEAVKEQLQRVEEELSQDIAILVKEKEKEAKEKVDKTAKELLATTVQRLAAEHTTESTVSVVNLPNDEMKGRIIGREGRNIRTLETLTGIDLIIDDTPEAVILSGFDPIRREIARTALVNLVSDGRIHPGRIEDMVEKARKEVDDIIRDAGEQATFEINVHNMHPDLVKILGRLNYRTSYGQNVLKHSIEVAHLSGMLAAELGEDVTLAKRAGLLHDVGKAIDHEVEGSHVEIGVELAKKYNENNIIINAIHSHHGDVEPTSIISILVAAADALSAARPGARKETLENYIRRLERLETLSESYDGVEKAFAIQAGREIRVVVSPEEIDDLKSYRLARDIKNQIEEELQYPGHIKVTVVRETRAIEYAK

SEQ ID NO: 70964 - protein, 757 aa, Staphylococcus epidermidis
MIKSKYNWDITQPNTFISESSSDQFKLSPIVKKVLESKNIVDNQEIQNLFEGTNISHDYMLLSDMQKAIDRIKLAIDQNERILVYGDYDADGVTSTTILVSTLRLLGAQVGWYIPNRFTEGYGPNELAFKNAYDEGISLIITVDNGIQGHHEISTIQELGVDVIVTDHHEIGETLPDAFAIVHPMHPNFEYPFKYLCGAGVAYKLAQGLIEHPPQHFIALAAIGTIADLVSLTDENRYIVKQGLKILNNHTPSSIKAILNQAGFNDEITEETIGFIIGPRLNAVGRLEDASLAAELLLSDEFEEAEFLAEQVEHFNHERKDIVSKITDEALLLAEEQIKQGHLFLLLAKEGWHEGVLGIVASKIVETYALPTLILNIDENQNHAKGSARSIEQVSMFDILNDHQQLIDKFGGHHMAAGMTMSIDNIEHLHKELDMWMKELTVTTSLEPSIKVDAQLEEKEINIKNIKDIFQLRPFGTDFNSPLFMVRDLIVKSTKGIGQDNKHLKLTLGHSGLTALFWNHGHLASELEPGQPIHIIGTLQINEWNGNQTPQFIIKDIAIDQLQILDYRSKRKNIQFKESESNVAYVIHPKLKKSNSHYYHYGEAIDRPYDKIVFRDLPNTMVEIEQTLEHSQISQLYLVLQHEKSIYFEGIPSKSLFKKCYKALINKKETDLIKEGMLLCEYLNIKPEILTFMLKVFKELEFIYDEKGLIKINPAPNKQDIENSRIYQMRRARMEVEERLLYDDFLNIKEWIISKLT

SEQ ID NO: 70965 - protein, 379 aa, Staphylococcus epidermidis
MPAVTYEHIKTCKQSGARLGIVHTPHGSFETPMFMPVGTKATVKTMSPEELRNIEAKIILGNTYHLWLQPGNDIIKHAGGLHKFMNWDGPILTDSGGFQVFSLSNLRKISEEGVEFRHHTNGSKLFLSPEKSMQIQNDLGSDIMMAFDECPPMPAEYDYVKDSIERTTRWAARCLKAHQRPGDQALFGIIQGGEYKDLREQSAKELVSLDFPGYAIGGLSVGEPKPVMYDMVEHTEQFMPKDKPRYLMGVGSPDALIECSIRGMDMFDCVLPTRIARNGTCMTSNGRLVVKNAKYADDLRPLDEQCDCYTCQHYTRAYIRHLVKAEETFGIRLTTIHNLHFLLKLMEDIRQAIREDRLLDFKDEFFEQYGLNVENPKNF

SEQ ID NO: 70966 - protein, 264 aa, Staphylococcus epidermidis
MRILFIGDIVGKVGRKMITTYLPKIKQTYHPTVSIVNAENAAHGKGLTEKIYKQLLREGVDFMTMGNHTYGQREIYDFIDDAHRMVRPANFPDEAPGTGMRIIKINDIKLAIINLQGRSFMQDIDDPFKKADQLIEEAQKSTPYIFVDFHAETTSEKNAMGWYLDGRVSAVVGTHTHIQTSDDRILPHGTGYITDVGMTGYYDGILGINRDEVIQRFITSLPQRHVVPDDGRGVLSGVIIDLDKEGKTTQIKRLLINEDHPFQI

SEQ ID NO: 70967 - protein, 341 aa, Staphylococcus epidermidis
MNIEDFDYHLPESLIAQTPLKNRDQSRLLVLSKDTGELTHLHFRDVIHYFEPGDTLVLNDTRVMPARLFGLKEETGAKVEMLMLTQIEGNDWEVLLKPAKRIKKGHRLNFGDGKIVAECIEELEQGGRIMRLHYEGILQERLDELGDMPLPPYIKERLDDPDRYQTVYAKESGSAAAPTAGLHFTDDLLNKIKQKGVHIAFITLHVGLGTFRPVSVENIDDHEMHSEYYQMTQETADLLNKTKESGKRVISVGTTSTRTLETIRRDHPQFVATSGWTDIFIYPGFEFKAIDGLITNFHLPKSTLVMLVSAFSNKKYILNAYHKAVEMEYRFFSFGDAMLII

SEQ ID NO: 70968 - protein, 151 aa, Staphylococcus epidermidis
MDNKDNRKFYLIREDVLPESVIKTLKVKDALKNNSNLSIYDAVKQFNLSRSAFYKYRETIFPVDEKILDQREFTLILYVNDIVGMLAQVLNAISQLQLSVLTIHQSVPIEDKATITLSLNARNSNLSIDEVIESLREINHVTKVDLISMTM

SEQ ID NO: 70969 - protein, 430 aa, Staphylococcus epidermidis
MFVDQVKISLKAGDGGNGITAYRREKYVPFGGPAGGDGGIGASVVFEVDEGLRTLLDFRYQRHFKAKKGENGQSSNMHGRNAEDLVLKVPPGTIIKSVESEEVLADLVEDGQRAIVARGGRGGRGNSRFATPRNPAPDFSENGEPGEELEVTLELKLLADVGLVGFPSVGKSTLLSIVSKAKPKIGAYHFTTIKPNLGVVSTPDHRSFVMADLPGLIEGASDGVGLGHQFLRHVERTKVIVHMIDMSGSEGRNPLDDYKIINQELINYKQRLEDRPQIIVANKMDLPDSQGNLSHFKEQLDNDVTVVPVSTITRDNIDQLLYQIADKLEEVKDVDFSVEEDENLGVNRVLYKHTPSADKFTISRDDDGAYVVSGNAIERMFKMTDFNSDPAVRRFARQMRSMGIDDALRERGCSNGDIVRILGGEFEFVE

SEQ ID NO: 70970 - protein, 877 aa, Staphylococcus epidermidis
MKIEMANITPMMQQYLKIKSEYDDCLLFFRLGDFYEMFFDDAKEASRVLEITLTKRDAKKENPIPMCGVPYHSADNYIETLINKGYKVAICEQMEDPKQTKGMVRREVVRIITPGTVMDQNGMDEKKNNYILSFIENEEFGLCYCDVSTGELKVTHFKDTATLLNEITTINPNEIVIKQALSEELKRQINMITETITVREDISDEDYDMNQLTHQLMHDTTQLLLDYIHHTQKRDLSHIEEVIEYAAVDYMKMDYYAKRNLELTESIRLKSKKGTLLWLMDETKTPMGARRLKQWIDRPLINKQQINDRLNIVEEFMDRFIERDTLRNHLNQVYDIERLVGRVSYGNVNARDLIQLKHSISEIPHIKALLNELGAQTTTQFKELEPLDDLLQILEESLVEEPPISIKDGGLFKNGFNAQLDEYLEASKNGKTWLAELQAKERERTGIKSLKISFNKVFGYFIEITRANLNNFQPEAFGYNRKQTLSNAERFITDELKEKEDIILGAEDKAVELEYELFVKLREHIKTYTERLQKQAKIISELDCLQSFAEIAQKYNYVKPTFSDDKVLHLENSRHPVVERVMDYNDYVPNDCHLDDETFIYLITGPNMSGKSTYMRQVAIISIMAQMGAYVPCDSATLPIFDQIFTRIGAADDLVSGKSTFMVEMLEAQKALTYATENSLIIFDEIGRGTSTYDGLALAQAMIEYVAQTSHAKTLFSTHYHELTSLDQMLKCLKNVHVAANEYQGELIFLHKVKDGAVDDSYGIQVAKLADLPNEVIDRAQVILNAFEQKPSYQLSHENTDNQQTVPSYNDFGRTEEEQSVIETHTSNHNYEQATFDLFDGYNQQSEVECQIRELNLSNMTPLEALIKLNELQSQLK

SEQ ID NO: 70971 - protein, 99 aa, Staphylococcus epidermidis
MRCIPMLKLNLQFFASKKGVSSTKNGRDSESKRLGAKRADGQYVSGGSILYRQRGTKIYPGENVGRGGDDTLFAKIDGVVKFERKGRDKKQVSVYAVAE

SEQ ID NO: 70972 - protein, 106 aa, Staphylococcus epidermidis
MITVDITVNDEGKVTDVVMDGHANHGEYGHDIVCAGASAVLFGSVNAIMGLTSEKPDINYEDDGGYFHIRSVDTNNKEAQLILQAMLVSLQTIEEEYNENIKLNYK

SEQ ID NO: 70973 - protein, 102 aa, Staphylococcus epidermidis
MFAIIETGGKQIKVEEGQEIYVEKLNANEGDSFTFDKVLFVGGDSVKVGAPTVEGASVTATVNKQGRGKKITVFTYKRRKDSKRKKGHRQPYTKLTIDKINA

SEQ ID NO: 70974 - protein, 173 aa, Staphylococcus epidermidis
MRTFYYFLIGILLFYIDTIIGLTIPMHFGKIDIIFVPHLTIMYILIMTVYRGFGVAMSLAFFFGIVTDLYFGSIYGLYMFGYIILVVIVDKFFKIFYRDYSVLFFIILLSTMFLEVYVAMIYGVIGFIKFNLIEFVLLRLIPTLIINFLLLIMLFPIIIKFTKKVKNTIDSKA

SEQ ID NO: 70975 - protein, 184 aa, Staphylococcus epidermidis
MRINEMALHEKPRERLITYGAKSLSNVELLAILLNTGRKGFSSIDIANELLKQQSTIRDLKKLSINDLLKIKGIGLYKAVIIQAAFELGERINSTSTFDKVQITHPSDVASLMMSTMKDLEQEHFVVLLLNSKNIVTKQAWVYKGTLNSSIIHPREVFNIAIRESSNSIIVVHNHPSGDVLTIV

SEQ ID NO: 70976 - protein, 876 aa, Staphylococcus epidermidis
MEMKPKYDPREVEKGRYEEWVSNGYFKPSEDKSKEAYTIVIPPPNVTGKLHLGHAWDTTLQDIITRMKRMQGYDTLYLPGMDHAGIATQAKVEAKLNEQGISRHDLGREKFLQQAWDWKEEYATFIRQQWAKLGLGLDYSRERFTLDDGLSKAVRKVFVDLYNKGIIYRGERIINWDPKARTALSDIEVIHEDVQGAFYHFKYPYADGNGYIEIATTRPETMLGDTAIVVNPNDERYKDVIGKTVILPIVGRELPILADEYVDIEFGSGAMKVTPAHDPNDFEIGQRHQLENIIVMDEYGKMNDKADKYKGMDRFDCRNQLVKDLKEQDLVIKIEEHTHSVGHSERSGAIVEPYLSTQWFVKMKPLAQRALDNQNTKDRIDFFPGRFENTFNRWMEEIRDWTISRQLWWGHQIPAWYHKDTGEVFVGEEAPEDIENWIQDEDVLDTWFSSALWPFSTLGWPDTNADDFKRYYPTNALVTGYDIIFFWVARMIFQGLEFTDRRPFNDVLLHGLVRAEDGRKMSKSLGNGVDPMDVIDEYGADSLRYFLATGSSPGHDLRYSTEKVESVWNFINKIWNAARFSLMNIGEDFKVEDIDLSGNLSLADQWILTRLNETISTVTELSDKYEFGEVGRALYNFIWDEFCDWYIEMSKIPMNGEDESQKQTTRSVLSYVLDKIMKMLHPFMPFVTETIWQSLPHHGETIVKANWPTVDQALIFNESKQTMEQLVEIIKSVRQSRVEVNTPLSKAIPILIQTKDEKIKHTLMDNISYLHKFCNPSQLTIDTEIEIPEKAMTTVVVAGKVVLPLEGLIDMDKEIARLEKELDKLQSELDRVDKKLSNENFVNKAPEKIINEEKEKQQHYQEKYNGVKSRIEQLKA

SEQ ID NO: 70977 - protein, 143 aa, Staphylococcus epidermidis
MHWLKIFYHLLCATTISVILLIITILMDALLQNTHLTQLLLNIDFLINPDEVPTIIEVLIHLSIGILIYLAFLIIYHYSKSLYHLAYLPLVLIFTLMYPLLVFLAQRPFFSFSWNEFAWWLVAHLFFIILMATCLPIISKKIL

SEQ ID NO: 70978 - protein, 296 aa, Staphylococcus epidermidis
MNKEQLEKMTHGKGFIAALDQSGGSTPKALKEYGVNEDQYSNEDEMFQLVHDMRTRVVTSPSFSPDKILGAILFEQTMDREVEGKYTGDYLADKGVVPFLKVDKGLAEEKNGVQLMKPIDDLDATLNRANERHIFGTKMRSNILELNEQGIKDVVEQQFEFAKKIIAKGLVPIIEPEVNINAKDKSEIEKVLKAEIKKGLDSLNDDQLVMLKLTIPTEANLYKDLADHPNVVRVVVLSGGYSRDEANKLLKDNDELIASFSRALASDLRASQSQEEFDKALGDAVDSIYDASVNKN

SEQ ID NO: 70979 - protein, 272 aa, Staphylococcus epidermidis
MKDNNEVLKLFIVSDSIGETAQRMIHATLTQFPDLTQVEIKKFPYIKDEQEFLNVLQLAKEQNAIVATTLVSESFNALGHQFANEHQIPYVDYMSELISIIKQHTHAKPLMESGALRKLNDEYFKRIEAIEYSVKYDDGKHFTDIGEADALIVGVSRTSKTPLSMYLANKGYKIANIPLVPEVAIPDNVFQQKNLKVFGLTASPNYIANIRRNRAETLGLSSESNYNSLERIKKELSYAEEVFRKLNATVINTEYKSIEESAFYIEKFLAKR

SEQ ID NO: 70980 - protein, 324 aa, Staphylococcus epidermidis
MKFDRHRRLRSSKTMRDLVRETHVRKEDLIYPIFVVEQDDIKSEIKSLPGIYQISLNLLHEEIKEAYDLGIRAIMFFGVPNDKDDIGSGAYDHNGVVQEATRISKNLYKDLLIVADTCLCEYTDHGHCGVIDDHTHDVDNDKSLPLLVKTAISQVEAGADIIAPSNMMDGFVAEIREGLDQAGYQNIPIMSYGIKYASSFFGPFRDAADSAPSFGDRKTYQMDPANRLEALRELESDLKEGCDMMIVKPSLSYLDIIRDVKNNTNVPVVAYNVSGEYSMTKAAALNGWIDEEKIVMEQMISMKRAGADLIITYFAKDICRYLDK

SEQ ID NO: 70981 - protein, 226 aa, Staphylococcus epidermidis
MKPVIVMTQTNEVHSHLVDIIHKPFIQLKQLHFNEKLLDHSYDWLIFSSKNAVKYFYPYLKNVKVKKVAVIGDKTAQYCNELGISVDFVPRDFSQEGFLDEFKISEQHLLLPSSEKARPKLVQQLSKYNEVVKIDLYRPVPNFKNISQVKSLVRKHQIDAVTFSSSSAVEFYFKEDNVPEFDHYFAIGKQTARTILKFNTSVKVANKQTLDSLIDKIIESREQNEI

SEQ ID NO: 70982 - protein, 308 aa, Staphylococcus epidermidis
MRKLIVGSRRSKLALTQSQQFIDKLKFIDPSLDIEIKEIVTKGDKIVDKQLSKVGGKGLFVKEIQNELFNKEIDMAIHSLKDVPSMIPDGLTLGCIPDREIPFDAYIAKNHIPLQELSEGSIVGTSSLRRGAQILSKYPHLKIKWIRGNIDTRLKKLETEDYDAIILAAAGLKRMGWSDNIVTTYLDRDILLPAIGQGALGIECRSDDKELLDLLSKVHNHDVAQCVTAERTFLSEMDGSCQVPIGGYATIAQDNQIEFTGLIMSPDGKERYEHTALGTDPVKLGIEVSQVLKKQGAYDIIKKLNEAE

SEQ ID NO: 70983 - protein, 270 aa, Staphylococcus epidermidis
MQETLLIRFHEIILMIYLFSIICYFVDFINKNYKTRTVGFYSLGIVWVLQTISLSIFFIHTKQVPLGSIFDVFFSLTWIIISISLILNLIKVMNFSVFFLNLIGFILMSLNTFQPEHYQTQIQQIAVINELLLVHIALAVLSYAFFAIAFVNSLLYIIQYRNLKEKNFDQNYFRIGSVATLETIVFYSTLVAWIILILSTILGAQWGIFAVGKQIFIDPKVIFSTIINLLYGVYIFIRIKKWISQRNLIYFNIILFCLCMINLFFLTHFR

SEQ ID NO: 70984 - protein, 448 aa, Staphylococcus epidermidis
MHFVAISINHRTADVTLREQVAFRDDALRLAHEDLYETKAILENVILSTCNRTEVYAIVDQVHTGRYYIQRFLARSFGFEVDDIKDMSEVKVGDDAVEHLLRVTSGLDSIVLGETQILGQMRDAFFLAQNTGTTGTIFNHLFKQAITFAKKAHSETDIADNAVSVSYAAVELAKKVFGKLKSKHAVVIGAGEMGELSLLNLLGSGISNVTIVNRTLSKAKILAEKHNVSYDSLSALPSLLETTDIVISSTSAEDYIITNSMVKTISETRKLDSLVLIDIAVPRDIEPGIDAITNIFNYDVDDLKDLVDANLRERQLAAETIAGQIPEEIDSHNEWVNMLGVVPVIRALREKAMNIQAETMESIDRKLPDLSERERKVISKHTKSIINQMLKDPIKQAKELSTDKKSNEKLELFQNIFDIEAEDPREKAKLEKESRAKEILAHRIFSFE

SEQ ID NO: 70985 - protein, 420 aa, Staphylococcus epidermidis
MFKFNEDEENLKCSFCGKDQDQVKKLVAGSGVYICNECIELCSEIVEEELAQNTSEGFTELPTPKEIMDHLNEYVIGQEKAKKSLAVAVYNHYKRIQQLGPNEDDVELQKSNIALIGPTGSGKTLLAQTLAKTLNVPFAIADATSLTEAGYVGDDVENILLRLIQAADFDIDKAEKGIIYVDEIDKIARKSENTSITRDVSGEGVQQALLKILEGTTASVPPQGGRKHPNQELIQIDTTNILFILGGAFDGIDEVIKRRLGEKVIGFASNEADKYDEEALLEQIRPEDLQSYGLIPEFIGRVPIVANLETLDVAALKNILTQPKNALVKQYTKMLELDNVELEFSEEALSAISEKAIERKTGARGLRSIIEEALIDIMYDVPSSENVSKVVITEQTINEEIEPELYDDEGNLINKNKTSA

SEQ ID NO: 70986 - protein, 572 aa, Staphylococcus epidermidis
MRRKRDSYDYVIIGGGSAGSVLGARLSEDKDKNVLVLEAGRSDYFWDLFIQMPAALMFPSGNRFYDWEYQTDEEPHMGRRVDHARGKVLGGSSSINGMIYQRGNPMDYEGWAEPEGMDTWDFAHCLPYFKKLETTYGAAPYDKVRGHDGPIKLKRGPATNPLFKSFFNAGVEAGYHKTADVNGYRQEGFGPFDSQVHHGRRMSASRAYLRPALRRRNLDVETRAFVTKLIFDENNSKKVTGVTFKKNGKEHTVHANEVILSGGAFNTPQLLQLSGIGDSEFLKSKGIEPRMHLPGVGENFEDHLEVYIQHKCKQPVSLQPSLDVKRMPFIGLQWIFARKGAAASNHFEGGGFVRSNDDVDYPNLMFHFLPIAVRYDGQKAPVAHGYQVHVGPMYSNSRGSLKIKSKDPFEKPSIVFNYLSTKEDEREWIEAIRVARNILKQKAMDPFNGGEISPGPQVQTDEEILDWVRKDGETALHPSCSAKMGPASDPMAVVDPLTMKVHGMENLRVVDASAMPRTTNGNIHAPVLMLAEKAADIIRGRKPLEPQYVDYYKHGIDDEKAGAMEDDPFYQY

SEQ ID NO: 70987 - protein, 496 aa, Staphylococcus epidermidis
MELVDKLSNRQYIDGEWVESSNKNTRDIINPYNQETIFTVAEGTKEDVERAILAARRSFEDGEWSLETSEVRGKKVRAVADKIKENREELAKLETLDTGKTLEESYADMDDIHNVFMYFAGLADKDGGEIINSPIPNAESKVVKEPVGVVTQITPWNYPLLQASWKIAPALATGCSLVMKPSEITPLTTIRVFELMEEVGFPKGTINLVLGAGSEVGDVMSGHEEVDLVSFTGGIETGKHIMKQAANHVTDVALELGGKNPNIIFDDADFELAVDQALNGGYFHAGQVCSAGSRILVHNDIKDKFEKALIDRVSKIKLGNGFDQDTEMGPVISTAHRDKIEGYMEVAKKDGATIAIGGKRPEREDLQAGLFFEPTVITDCDTSMRIVQEEVFGPVVTVEGFADEEEAIRLANDSIYGLAGAIFTKDIGKAQRVANKLKLGTVWINDFHPYFAQAPWGGYKQSGIGRELGKEGLEEYLVSKHILTNTNPEPVDWFSK

SEQ ID NO: 70988 - protein, 199 aa, Staphylococcus epidermidis
MSESNHITWHDSEVTKKQRQHKNGHKSAVIWFTGLSGSGKSTVSVALEKELFNEGKQTYRLDGDNVRHGLNKNLGFSPEDRSENIRRIGEVAKLMVDAGALTVTAFISPYKEDREGVRALLEDNEFIEVYTKCSVEECEKRDPKGLYKKARSGEIPEFTGISAPYQAPENPEITIDTEHDTIEQSVVQIIRYLKEHEYI

SEQ ID NO: 70989 - protein, 203 aa, Staphylococcus epidermidis
MSKFDEQIIVVNRDILFNKDKNAFNGFLHKNNFKGKEIFSALSKYEVKRRGDMEDDPSFKQLISYCLLENEKGEILIYERLSGGGEERLHGQSSIGVGGHMNDVVGADSINEVLRVNAQRELEEEVGLSNNKSQNMEYLGFINDDDNDVGKVHMGVVFKITVHSNDVEAKETDTLKIKWIEQGDIQSYEDFETWSALILQDIS

SEQ ID NO: 70990 - protein, 118 aa, Staphylococcus epidermidis
MPRVKGGTVTRARRKKTIKLAKGYFGSKHTLYKVAKQQVMKSGQYAFRDRRQRKRDFRKLWITRINAAARQHDISYSRLMNGLKKAEIDINRKMLSEIAISDDKAFAELVSKAKEALK

SEQ ID NO: 70991 - protein, 66 aa, Staphylococcus epidermidis
MPKMKTHRGAAKRVKRTGSGQLKRSRAFTSHLFANKNTKQKRQLRKAKLVSKSDMKRVKQLLAYKK

SEQ ID NO: 70992 - protein, 175 aa, Staphylococcus epidermidis
MSTIAKDQTQINEKIRAKELRLIGQDGEQIGVKSKREALEMAERVDLDLVVVAPNAKPPVARIMDYGKYKFEQQKKEKEMKKKQKVINVKELRLSPTIEEHDFQTKLKNGRKFLSKGDKCKVSIRFRGRAITHKEIGQRVLEKFADECKDIATVEQKPKMEGRQMFIMLAPINEK

SEQ ID NO: 70993 - protein, 500 aa, Staphylococcus epidermidis
MKKNNKQNDGVQRGLKDRHISMIAIGGCIGTGLFMTSGGAIHDAGALGALIAYAVIGAMVFFLMTSLGEMATYLPVSGSFSTYATRFVDPSLGFALGWNYWFNWVITVAADVTIAAQVIQYWSPMQGIPAWVWSCIFLIIIFALNSLSVRVYGESEYWFALIKVVTVIIFIGIGILTILGIMGGEFVGFDTFTKGDGPILGGNLGGSLLSILGVFLVAGFSFQGTELIGITAGESENPERAVPKAIKQVFWRILLFYILAIFIIGMLIPYDSKALMGGGDSIATSPFTLVFKNAGLAFAASFMNAVILTSVLSAGNSGMYASTRMLYSMSKDKLAYNSFGKTNKSGVPYVSLIATGVLVILIFALQHLSGDAYEYIVAASGMTGFIAWVGIAISHFRFRRAFDKQNYDKSKLKYKAKLFPFGPIFAGILCVIVIIGQDVDFIKTGNFDMNRFFITYMGIPVFLIFFFYHKFRYKTKKIPLNKVDLRQDVSMEEVRHHKNN

SEQ ID NO: 70994 - protein, 645 aa, Staphylococcus epidermidis
MNQINIQFPDGNTKEFDKGTTTEDIAQSISPGLRKKAVAGKFNGQLVDLTRPLEQDGAIEIITPGSEEALEVLRHSTAHLMAQALKRLYGDVKFGVGPVIEGGFYYDFDMDDKVSSDDFDKIEKTMKQIVNENHKIVREVVSKEKAKDFFKDDPYKLELIDAIPEDESVTLYTQGEFTDLCRGVHVPSTSKIKEFKLLSTAGAYWRGNSDNKMLQRIYGTAFFDKKDLKAHLKMLEERRERDHRKIGKDLELFTNNQLVGAGLPLWLPNGATIRREIERYIVDKEVSMGYDHVYTPVLANVDLYKTSGHWDHYQEDMFPAMKLDEDEAMVLRPMNCPHHMMIYKNKPHSYRELPIRIAELGTMHRYEASGAVSGLQRVRGMTLNDSHIFVRPDQIKEEFKRVVNMIQDVYKDFGFEDYRFRLSYRDPEDKHKYFDDDEMWEKAESMLKEASDELGLTYEEAIGEAAFYGPKLDVQVKTAMGKEETLSTAQLDFLLPERFDLTYIGQDGEQHRPVVIHRGVVSTMERFVAFLTEETKGAFPTWLAPMQVEIIPVNIDLHYDYARLLQDELKSQGVRVEIDDRNEKMGYKIREAQMKKIPYQIVVGDQEVENQEVNVRKYGSEKQESVEKDEFIWNVIDEIRLKKHR

SEQ ID NO: 70995 - protein, 299 aa, Staphylococcus epidermidis
MRKVLIFAIAGFLAQLVDGLLGMGFGASSSSILLTYGIAPAVVSATVHFSEIATTAASGTSHWRFDNVHKPTMLKLAIPGSISAFIGAGVLTFIHGDYIKPFIALFLLSMGFYILYQFLFKRAHEHHHHVGDLSSFKVIPQGFVAGFLDAIGGGGWGPVNTPLLLSSKKIQPRYAIGTVSASEFFVTSSAALSFIIFLGVTQINWFAVIALSLGGMVAAPISAYLVKVLPINILAICVGGLIIFTNSNALLSYFVKDNTISNTVRFIIILAIIILLVFQVVRNKKLSFSYKKSRVNKYN

SEQ ID NO: 70996 - protein, 341 aa, Staphylococcus epidermidis
MATNIAINGMGRIGRMVLRIALNNKNLNVKAINASYPPETIAHLLNYDTTHGVYDKKVEPIESGIKVNGHEIKLLSDRNPENLPWNEMDIDVVIEATGKFNHGDKAVAHINAGAKKVLLTGPSKGGDVQMIVKGVNDNQLDIDTYDIFSNASCTTNCIGPVAKVLNDKFGIINGLMTTVHAITNDQKNIDNPHKDLRRARSCNESIIPTSTGAAKALKEVLPEVEGKLHGMALRVPTKNVSLVDLVVDLEQNVTVTQVNDAFKNADLSGVLDVEEAPLVSVDFNTNPHSAIIDSQSTMVMGQNKVKVIAWYDNEWGYSNRVVEVADKIGQLIDDKAMVKAI

SEQ ID NO: 70997 - protein, 290 aa, Staphylococcus epidermidis
MPELPEVEHVKRGIEPFIKSAKIEKVTFAKNVINGKNNNRETIIKGMELDTFKKLTEGYVIKKVERRSKYIIFYIADHDDDRILVSHLGMAGGFFVVNNLDEISTPNYRKHWQVIFDLDNKQKLVYSDIRRFGEIRNIVNFDSYPSLLEIAPEPFEEVAFEHYLECLTMKKYKNKPIKQTILDHRVIAGAGNIYACEALFRAGITPDKITNSLTKQERKSLFYYVREVLEEGIKYGGTSISDYRHADGKTGQMQLHLNVYKQKKCKVCGHSIETKVIAGRNSHFCPNCQR

SEQ ID NO: 70998 - protein, 876 aa, Staphylococcus epidermidis
MNKLVLIDGNSLSFRAFYALPLLSNHAGIHTNAVYGFAMLLEKIIKEEKPNHFLVAFDAGKTTFRHSKYSEYKGGRQKTPPELSEQFPYIRQLLDAYHIKRYELDNYEADDIIGTLSRQADEEDFETIIITGDRDLTQLATDNVTIYYTKKGVTDVDHYTPKFIAEKYNGLVPKQIIDMKGLMGDTSDNIPGVAGVGEKTAIKLLNQFESVEGVYEHIEEVTAKKLKEKLINSKDDALMSKDLATINVHSPIEVSLEDTKLTLQDDTTEKIELFKKLEFKQLLADIDTSSTNEEVIDKTFEIEQDFQNVDLNDLNEAVIHFELEGTNYLKDTILKFGFYTNHQHVVINAEDVKDYKHLVQWLEDKNTTKIVYDAKKTYVSAHRLGINIENIEFDVMLASYIIDPSRSIDDVKSVVSLYGQNYVKDNITIFGKGKKHHIPEEPILNEHIASVTEAIAAVTPTMKSQLEDYNQIELLKDLELPLARILSEMEEIGIYTDINDLKEMEFEIQKKLDVLISNIHESAGEAFNINSPKQLGVVLFETLQLPVIKKTKTGYSTAVDVLEKLQGEHPIIDDILEYRQLAKLQSTYVEGLQKVISKDHRIHTRFNQTLAQTGRLSSIDPNLQNIPIRLEEGRKIRKAFKPTSKDSVILSADYSQIELRVLAHITQDESLKHAFINGHDIHTATAMKVFNVESDQVDSLMRRQAKAVNFGIVYGISDYGLSQSLGITRKQAKAFIDDYLASFPGVKQYMSDIVKDAKAQGYVETLLHRRRYIPDITSRNVNLRSFAERTAMNTPIQGSAADIIKLAMVKFSEKIKETKYHAKLLLQVHDELIFEIPKSEVEDFSKFVEEIMEQALVLDVPLKVDSNYGATWYDAK

SEQ ID NO: 70999 - protein, 422 aa, Staphylococcus epidermidis
MSAEKITQSKDGLNVPNEPIIPFIIGDGIGPDIWKAASRVIDAAVEKAYNGEKRIEWKEVLAGQKAYDETGEWLPQETLETIKEYLIAVKGPLTTPIGGGIRSLNVALRQELDLFTCLRPVRWFKGVPSPVKRPEDVDMVIFRENTEDIYAGIEFKQGTSEVKKVIDFLQNEMGATNIRFPETSGIGIKPVSKEGTERLVRAAIQYALDNNRKSVTLVHKGNIMKFTEGSFKQWGYDLAHNEFGDKVFTWQQYDEIVEQKGKDAANEAQSKAEQEGKIIIKDSIADIFLQQILTRPAEHDVVATMNLNGDYISDALAAQVGGIGIAPGANINYETGHAIFEATHGTAPKYAGLNKVNPSSEILSSVLMLEHLGWQEAADKITDSIEATIASKIVTYDFARLMDGAKEVSTSDFADELIKNIR

SEQ ID NO: 71000 - protein, 373 aa, Staphylococcus epidermidis
MAELKRGLEGVIAAETKISSIIDSQLTYAGYDIDDLAENAQFEEIIFLLWNYRLPNENELSELKEKLFDYMTLNNRVYKHFEEYVTDHVHPMTALRTSVSYVAHFDPEAENESDENKYDRAIRIQAKIASLVTAFARVRDGKEPVKPNSELSYAANFLYMLRGELPTEVEVEAFNKALILHADHELNASAFTARCAVSSLSDMYSGVVAAIGSLKGPLHGGANERVMSMLKEIGSIDNVDHYLDERFANKDKIMGFGHRVYKDGDPRAKYLREMSRKITEETGQSELFEMSLAIEKRMKEEKGLIPNVDFFSATVYHSMNIPHDLFTPIFAVSRTSGWIAHILEQYRDNRIMRPRAKYIGEQNRKYVPIEERP

SEQ ID NO: 71001 - protein, 670 aa, Staphylococcus epidermidis
MTFKILWKMIKQNFVNQRHIIVPFISVISILFGIEYILLSLTTNIYFNEHHPELKISAIIGIVFMTMLLFIFLIYANHFVMNHRKKEFALNMALGMEKKHLRLIILIELFIQFIISAILSIVGGYLFGELFFMLFNKIVNTHQPQLSDYPFDVLSMKITLTMLLSLMIILFVINNFKISFKNSLQLLIKNKSKTHEKSRVRLIIFLILGLIFIGIGYYLAIKPNTAIGSLGIIFFAILSTLIGTYLLFVSLGSIVLEMLQKLDHYYYKPNHFFFIAGLKSRVKSSAIGLATISFMCTFLIVTLSMTVSTYRNMDHRFEFAFKNDYAGYYIGDFHKDSKIQRKIENLKKDIRQEVPTGQFKIYARGMVGAELQGGLKHKKLKRQTVSSGLFNFGNKQKFNSFISIYNKSDYNKNNKKIKLDDDEIAISTSVSLFKKMKTLNIFGKTYRVKYIESTNIDNLLYADGITLIVNQQQLMDRIVNEYRNHNDENLIITPNQVQTAVEFNVLKEKDKLNHRIKKIGVQHDIEFQVKKQNLLMWKQVNSSLVFVGSVVSLVLLIGIFLMMYYKQVSEGHEDRDAYITMKQLGLDEILIKKTINKQVIWVFLIPVIVAIIHTLAAFRIIYSVLGIVGQYDLGLYATSYVGVIVVFIIFYSIMYWITSRIYYTMINGKH

SEQ ID NO: 71002 - protein, 489 aa, Staphylococcus epidermidis
MKFMNKMGKTTLASSIVAASVLSTVNVSYASGSSEQSAQTKQTQNDAIAFGNTKNPKNVIFMVGDGMGPSFNTAYRYYKNKPGAKKMTPTAFDKYLKGTNRTYSNDPKENVTDSAAGGTAFSTGHKTYNGAISVDTNKKPIKSVLEQAKEQGKSTGLVTTAELTDATPAVYAAHIDSRDKKDEIAQQFYNDKINGKHKVDVMLGGGAKYFGKENKNLAKKFKKDGYDIVSNKDELNQSQSKQVLGTFSEKDMPLQIDAPQSNPLLVDMQNSALNKLSKNNKGFFLMVEGASIDKAAHPNDITGVMSEMSGFETAFDNAINYAKTHKDTLVVATADHSTGGLSTAKGKDYKWNPEAIHKMKHSGMYMTKQIADGKDPEKVIKDGYGIDFPNKQLDKVKKAADELHKLQKEGKDDKDEKVVEQTTKLQNAIQKPINDASHTGWTTNGHTGVDVNTYAYGPGSNKFKGNMENTQSAKNLFDFFGDNVTSNQN

SEQ ID NO: 71003 - protein, 585 aa, Staphylococcus epidermidis
MRKTKIVCTIGPASESEEMLEKLMNAGMNVARLNFSHGSHEEHKARIDTIRKVAKRLNKTIGLLLDTKGPEIRTHNMKDGLIVLEKGKEVIVSMNEVEGTPEKFSVTYENLINDVNIGSYILLDDGLVELQVKEINKDKGEVKCDILNTGELKNKKGVNLPGVKVNLPGITDKDADDIRFGIKENVDFIAASFVRRPSDVLDIRQILEEEKAEITIFPKIENQEGIDNIEEILEVSDGLMVARGDMGVEIPPESVPMVQKDLIRKCNKLGKPVITATQMLDSMQRNPRATRAEASDVANAIYDGTDAVMLSGETAAGQYPEEAVKTMRNIAVSAEAAQDYKKLLSDRTKLVETSLVNAIGVSVAHTALNLNVKAIVAATESGSTARTISKYRPHSDIIAVTPSEKTARQCAIVWGVNPVVKEGRKTTDALLNNAVATAVETGRVSNGDLIIITAGVPTGEKGTTNMMKIHLVGDEIAKGQGVGRGSVVGHAIVADSASDLEGKDLSDKVIITNSVDETLVPYVEKAIGLITEENGITSPSAIIGLEKGIPTVVGVEQATKEIKNDMLVTLDASQGKVFEGYANVL

SEQ ID NO: 71004 - protein, 307 aa, Staphylococcus epidermidis
MNAAVRAVTRTAIYNNIEVYGVYQGYQGLLDDDIHKLELGSVGDTIQRGGTFLFSARCPQFKEEDVRKKAIENLRKRGIEGLVVIGGDGSYRGAQRISEECKEIQTIGIPGTIDNDINGTDFTIGFDTALNTIIESVDKIRDTASSHARTFIVEVMGRDCGDLALWAGLSVGAETIVLPEVNTDIKDVAEKIEQGIKRGKKHSIVMVAEGCMSGQECADELTKYINIDTRVSVLGHIQRGGSPSGADRVLASRLGGYAVELLKQGETAKGVGIRNNQLTSTPFDEIFAESNRKFNSQMYELAKELSI

SEQ ID NO: 71005 - protein, 314 aa, Staphylococcus epidermidis
MLDFEKPLFEIRNKIDSLKESQEKNEVDLQDEIDMLEASLKRETTKVYTNLKPWDRVQIARLPERPTTLDYIPYIFDSFIELHGDRSFRDDPAMIGGIGYLDGKSVTVIGQQRGKDTKDNIYRNFGMAHPEGYRKALRLMKQAEKFNRPIFTFIDTKGAYPGKAAEERGQSESIAKNLMEMASLTVPVIAVVIGEGGSGGALGIGISNRVLMLENSTYSVISPEGAAALLWKDSNLAQIAAETMKITAHDLLDLGIIDEVINEPLGGAQKDEEAQALSIKKMFLKHLNELKQLTPEELANDRFEKFRKIGSVVE

SEQ ID NO: 71006 - protein, 285 aa, Staphylococcus epidermidis
MFKDFFNRSKKKKYLTVQDSKQNDVPAGIMTKCPNCKKIMYTKELNENLNVCFNCDHHIALTAYKRIEAISDDGSFIEFDRGMTSANPLDFPGYEEKIEKDQQKTGLNEALVSGTAKLDGIQYGVAVMDARFRMGSMGSVVGEKICRIIDYCTEHRLPFILFSASGGARMQEGIISLMQMGKTSVSLKRHSDAGLLYISYITNPTTGGVSASFASVGDINLSEPKALIGFAGRRVIEQTINEKLPDDFQTAEFLLEHGQLDKVIHRKDMRETLSNILKIHQEVSN

SEQ ID NO: 71007 - protein, 1065 aa, Staphylococcus epidermidis
MVAHLNIHTSFDLLDSSLRIDALIDKAKKEGYRALAITDTNVLYGYPKFYDACIAAHIHPIFGMTIYLTDGLYTIETVVLAKNNQGLKSLYQLSSAIMMRNKEEVPIEWLKRYDEHLIIIFKEAELSHKQVIDAFEGKKELYLNHNSNNTLTGKRVWMQSARYLNEDDAETIPALHAIRDNTKLDLIHEKETLDEHFPSIEELQTLNLSEDMITNANEIEELCQAEIAYHQSLLPQFVTPNGETSKDYLWTILIHRLREWELNDKTYFNRLKHEYKIITDMGFEDYFLIVSDLIHFAKTHEVMVGPGRGSSAGSLVSYLLGITTIDPLKYNLLFERFLNPERVTMPDIDIDFEDTRREKVIKYVQDKYGEHHVSGIVTFGHLLARAVARDVGRIMGFDETSLNEISKLIPHKLGITLEEAYQKPEFKAFVHRNHRNERWFEVSKKLEGLPRHTSTHAAGIIINDQPLFKFAPLTTGDTGLLTQWTMTEAERIGLLKIDFLGLRNLSIIHQIILQVKKDLNINIDIEAIPYDDKKVFDLLSNGDTTGIFQLESDGVRSVLKRLQPEHFEDIVAVTSLYRPGPMEEISTYITRRHNPNQVAYLHPDLEPILKNTYGVIIYQEQIMLIASQVAGFSYGEADILRRAMSKKNRAILESERQHFIDGAKNNGYDEQISKQIFDLILKFADYGFPRAHAVSYSKIAYIMSYLKVHYPHYFYANILSNVIGSEKKTAAMIDEAKHQRISILPPNINQSHWYYKASNKGIYLSLGTIKGIGYQSVKLIIDERQQNGPYRDFFDFSRRIPKRVKNRKLLESLILVGAFDTFGKTRATLLQAIDQVLDLNSDVEQDEMLFDLLTPKQSYEEKEELPDQLLSDYEKEYLGFYISKHPVEKKFEKKQYLGIFQLSNGSHYQPILVQFDHIKQIRTKNGQNMAFVTMNDGRTMMDGVIFPDKFKKYETSISKEQMYIVLGKFEKRNQQMQLIINQLFEVEAYEQTKLSNSKKVILRNVTHLEPQFEHSKVESNEQHALNIYGFDESANKMTMLGQIERQRQNFDLLIQTYSPADIRFI

SEQ ID NO: 71008 - protein, 371 aa, Staphylococcus epidermidis
MKIGIPKEIKNNENRVGLSPSGVHALVDQGHEVLVETNAGLGSYFEDGDYQEAGAKIVDEQSKAWDVDMVIKVKEPLESEYKFFKEELILFTYLHLANEQKLTQALVDNKVISIAYETVQLPDGSLPLLTPMSEVAGRMSTQVGAEFLQRFNGGMGILLGGIPGVPKGKVTIIGGGQAGTNAAKIALGLGAEVTILDVNPKRLEELEDLFDGRVRTIMSNPLNIEMYVKESDLVIGAVLIPGAKAPNLVTEDMIKEMKDGSVIVDIAIDQGGIFETTDKITTHDNPTYTKHGVVHYAVANMPGAVPRTSTIGLNNATLPYAQLLANKGYREAFKVNHPLSLGLNTFNGHVTNKNVADTFNFEYTSIEDALK

SEQ ID NO: 71009 - protein, 315 aa, Staphylococcus epidermidis
MSEENTIMERLFHKLDDKAKTLNKENGQSFIENLGLAMEDIYTNQRELLEQATLQDRRKAFQFAYLSLLQEENIQANHQITPDSIGLILGFLVQRFLEHKKEMHIVDIASGAGHLSAAVKEVLSDKTIMHHLIEVDPVLSRVSVHLANFLEIPFDVYPQDAIMPLPLEEADVVIGDFPIGYYPLDERSREMKLGFEEGHSYSHHLLIEQSINALKGAGYAFLVVPSHLLEDDKVKQLENFIATETEMQAFLNLPKTLFKNEKARKSILILQKKKSGETRPVEVLLANIPDFKNPQQFQGFISELNQWIVTNHTKK

SEQ ID NO: 71010 - protein, 173 aa, Staphylococcus epidermidis
NHIHYQEAPNLTKVEYGDHYERRFMKPKKLKANIEYTTPHGHVYRTDHKGRIKEVYADDLSLLDGGRNSYAQRTVGREDRLPDDDGGHLIARGFGGSKDIDNLVPQSKYINRSFKENGEWYNMKKEWQKAIKKGREVKNIKIEVKYSENSQRPNKFDVSCEINGEERLYSIEN

SEQ ID NO: 71011 - protein, 148 aa, Staphylococcus epidermidis
MSKNKNDYEHMLFYFAYKTFITTADEIIEQYGMSRQHHRFLFFINKLPGITIKELLITLEISKQGSHATLRKLKEEGLIVEQTSKQDRRVKKLFTTEAGDDLIGKLNQAQDELIQQTLQKVGHDWYAMMEELANYREGFKTIEHLKED

SEQ ID NO: 71012 - protein, 200 aa, Staphylococcus epidermidis
MARFRGSNWKKSRRLGISLSGTGKELEKRPYAPGQHGPNQRKKLSEYGLQLREKQKLRYLYGMTERQFRNTFDIAGKQYGVHGENFMILLASRLDAVVYSLGLARTRRQARQLVNHGHIEVDGGRVDIPSYSLKPGQVITVREKSQNLDIIKESVEINNFVPEYLDFDADNLKGTFVRFPERSELPAEINEQLIVEYYSR

SEQ ID NO: 71013 - protein, 146 aa, Staphylococcus epidermidis
MVRHDFKVKTEWLGGREEVGKLRGDIINENISIPSSLGGQGEGTNPDELLVSAASSCYIISLAATLEKSGFTNVKINQQSIGTASFENKKFKMERITHYPSIKVPSSQTEKLKSILDKLLVIADNNCMISNAIRNNVIISIEPNLI

SEQ ID NO: 71014 - protein, 387 aa, Staphylococcus epidermidis
MQYYQPLLLTPGPTPVPEQILSAVQLPMVGHRSTDFEEIASEAFKGLKPVFGSKNEVLILTSSGTSVLEASMLNIANPDDHIVIIVSGAFGNRFKQIAQTYYNHVHVYDVNWGEAVIVDDFITYLKQLNVPVTAVFTQFCETSTGVIHPVHQLGHALKAFDNSLYFIVDGVSCIGAVDVDLTKDKIDVLVSGSQKAIMLPPGLAFVAYSDRAKKRFADVKTPRFYLDLNKYIKSQEQNSTPFTPNVGLFRGINAYVELVKKEGLNHVISRHFKIRNALRAALKALELELLVKDDAHASPTVTSFVPKNQEELNIIKNQLKSQFNITIAGGQGHLKGQILRIGHMGKISPFDILAVVSALEIILTSNRNVNYIGTGITQFMEVIRHES

SEQ ID NO: 71015 - protein, 467 aa, Staphylococcus epidermidis
MNDTGDKKLSRTSLIGLVIGSMIGGGAFNIQSDMGGHAGGLAIIIGWLITAIGMISLALVFQNLTNERSDLDGGIYSYAQAGFGDFIGFASAWGYWFSAFLGNVAYATLLMSSIGNFFPIFKGGNTFPSIIVASILLWSVHFLILKGVETATLINSIVTITKLIPILLVIICMIVAFNFNTFKIGFFGMDGYGSLSFHFANTMSQVKSTMLVTVWVFIGIEGAVVFSGRAKNKKDVGTATVIGLISVLLIYFLLTVLAQGIVIQNHISKLEAPSMAQILAYIVGDWGATFVNIGLIISVLGAWLGWTLLAGELPFIVAKDGLFPKWFAKENKNGAPMNALFITNVLVQIFLISMLFTKSAYHFAFSLAASAILYPYMFSAFYQVKYTIEHKLTATPKQWIIGILASIYAIWLVYASGIDYLLLTMLLYIPGIIVYIVVQKNNQKRLTQFDYIFFSLIVILALIGLLR

SEQ ID NO: 71016 - protein, 304 aa, Staphylococcus epidermidis
MRKLIATIMVSSLILGGCSTVHEEENCASQSIPASQYKGQGFQPVAEKSAIAHAKKYREEYEKLGEQFFKDNFSLNVKATNVVGSGDAVEVYVHCDDHDIVFNASIPFDMESIHEEGSMRSIDNGDTMSDMVGTVLSGFEYRANKEKMDNLEKYLKDKEDKYHYTGFTDEAITKTQNIGYQNNYFYITTSSTKLRDYRKHFEPLIKESDDDFKKHMKQLKSKKDTYINTEITTTLFSTLDEYDEKIIRKNTLSMAKEMRKEPSIPHNFTFHLLFSNNKLKINDPNISNNQINEYRVFDHDGFKN

SEQ ID NO: 71017 - protein, 646 aa, Staphylococcus epidermidis
MKILAITSCPNGIAHTYMAQEKLEQAAKDMGVDIKVETQGGVGAENVLTSKEIKEADGIIIAADRQVDLSRFNGKPLINESVREGIHRPKELIQRVIDQDAQIYHDQNISSNMSRDQEESHKSNIQMVYQHLMNGVSFMVPFIVVGGLLIAIALTLGGHTTPKGLVIPEDSFWKSIENIGSLSFKFMVPILAGYIAVSIADKPGLVPGMIGGAIAADGSLYGSEAGAGFLGGIVAGFLAGYIAKWIKQIKVPKAMAPIMPIIIIPILSSLIVGLIFIFVIGAPISNIFGALTSWLKGMQGANIIILALIIGAMIAFDMGGPVNKVAFLFGSALIAEGNYTVMGMVAVAVCTPPIGLGLATFVRKHQFNKAEQEMGKASFTMGLFGITEGAIPFAAQDPLRIIPANMIGAMIASVIAAVGGVGDKVAHGGPIVAVLGGISNILWFFIAVVVGSLVTMFTVLLFKRHTPAIAKSNNGNDTSVGTENVFSDDQSINHSKQLSHHMVFDKSLIEITKEPMTRDQAIDRLLTKLCHRHYITNIEEVRTAILKREAESTTAIGMNVAIPHAKSHAVKRPIVAVLNHKAGVEWESLDESNPQLIFLIAVPNDNNDTHLKLLQRLSRTLMKDNTRDELIHAQSRDEIFNILKEI

SEQ ID NO: 71018 - protein, 316 aa, Staphylococcus epidermidis
MVLFLQPVFQERLWGGTNLTQFGYDIPNNSTGECWAISAHKNGPNTILNGKHKGKSLKQVWDEDKALFGNDSRKDFPLLTKILDAHDCLSVQVHPDDEYALKHEGEYGKTECWYILDAQPGAEIIYGVNATSKNELEHMIDHHQFDYLFKHVPVKPGDFFYVPAGTVHAIGSGILILETQQSSDTTYRIYDYDRKDKNGHTRELHLNQSKDVIDITTTEPNTTPKTEMINGNCHTQFVANHFFTVEEWSIKDILDFQKPHTYCLVSMINGHGQVSINNKVYKIDKGDHFILTSEDQYIKFVGNMDLIVSFSKDEAY

SEQ ID NO: 71019 - protein, 952 aa, Staphylococcus epidermidis
MKNALKLFITDLKRVAKTPGVWVILAGLAILPSFYAWFNLWAMWDPYGHTGHIKVAVVNEDQGEKVRGKNINVGNKMVKTLKKNDSFDWQFVSREKADHEIKMGKYYAGIYIPKKFTHEITGTLRKHPQKADIDFKVNQKINAVAAKLTDTGSSFVIDKANKQFNKTVATALLSEANKVGLSIEDNVPTINKIKSAVYQANNSLPKINQFADKIIELNKHQDDLDAYANQFRSLGKYKGNVLDAQEKLNAVNSSIPALNERAKLILALDSYMPNIERILNVAANDVPAQFPRINRGVDIASEGIDAASGQLNDAKGYLTQAKARVGDYQEAAGRAQDVNNQANQNLRNQTSTTPQSAIKSSHSEGKSHSSIKTVPVSQSGENQPVYGDNILSNSDVKSMNTALTEALLSLSNQTDQQAQATQQDIKSLKNIAYGVIASDKPSEFKEPLKNIKSRLENASKYNQQFIDILSELEKSEHVDLSNEIKQVKEANNSINDNLKSTNQLIDALSNGSSGQLEAVNVLRDLPNLNKRLDTLRNYIKKELNRNLLAVSNEITDQLNKGQNTLSTIQSKLNTINRVINAGQDILNSGKKRIDTIQTALPAIENAYINAMRTAQAYFPTAKKDVAKAADFVRNDLPGLERELANVTQSVNQKIPSLFSRYDNAVDLLNEKQPQAKEALASLADFSENKLPDVEKDLKKANKIFKKLDKDDAVDKLIDTLKNDLKKQADIVANPINKKTTDVFPVKDYGSGMTPFYTALSIWVGGLLMVSLLSVDNKHEHLQPIMTKRQVYLGKSGFFFLLGIIQALIVSIGDLVILKASIESPILFVSIAVFSSLVFNSIIYTSVSLLGNPGKAVAIILLVLQIAGGGGTFPIQTTPEFFQAISPYLPFTYSIDALRETVGGIVPEILITKVIILGLFGIGFMVVGYCLKPVTDPIIRKIAEKADESKVTE

SEQ ID NO: 71020 - protein, 676 aa, Staphylococcus epidermidis
MKRTDKIGVYLKLSCSALLLSGSLVGYGFTKDAFADSESTSSNVENTSNSNSIADKIQQAKDDIKDLKELSDADIKSFEERLDKVDNQSSIDRIINDAKDKNNHLKSTDSSATSSKTEDDDTSEKDNDDMTKDLDKILSDLDSIAKNVDNRQQGEERASKPSDSTTDEKDDSNNKVHDTNASTRNATTDDSEESVIDKLDKIQQDFKSDSNNNPSEQSDQQASPSNKTENNKEESSTTTNQSDSDSKDDKSNDGHRSTLERIASDTDQIRDSKDQHVTDEKQDIQAITRSLQGSDKIEKALAKVQSDNQSLDSNYINNKLMNLRSLDTKVEDNNTLSDDKKQALKQEIDKTKQSIDRQRNIIIDQLNGASNKKQATEDILNSVFSKNEVEDIMKRIKTNGRSNEDIANQIAKQIDGLALTSSDDILKSMLDQSKDKESLIKQLLTTRLGNDEADRIAKKLLSQNLSNSQIVEQLKRHFNSQGTATADDILNGVINDAKDKRQAIETILQTRINKDKAKIIADVIARVQKDKSDIMDLIHSAIEGKANDLLDIEKRAKQAKKDLEYILDPIKNRPSLLDRINKGVGDSNSIFDRPSLLDKLHSRGSILDKLDHSAPENGLSLDNKGGLLSDLFDDDGNISLPATGEVIKQHWIPVAVVLMSLGGALIFMARRKKHQN

SEQ ID NO: 71021 - protein, 219 aa, Staphylococcus epidermidis
MFGSSLDSSQLLQALYETLYMVTVSLVIGALIGIPLGILLVVTRKNGIWSNTILHQVLNPIINILRSIPFIILLIAIVPFTKLLVGTSIGTTAAIVPLTVYVAPYIARLVENSLLEVDDGIIEAAKAMGASPLQIIRYFLLPEALGSLILAITTAIIGLIGSTAMAGAVGGGGIGDLALVYGYQRFDTIVIVITVIVLIIIVQIIQTLGNFIARVIRRN

SEQ ID NO: 71022 - protein, 128 aa, Staphylococcus epidermidis
MIKCVCLVEEKNHQLLLVQVRHRDKYYFPGGKIDEGESLVEALQRELKEELRLELAKDELEFIGTIVGEAYPQPNMLTELNGFKVNRAIDWSKVETDHEITDMKWFDINDSENIAPAVNTWIKEFIND

SEQ ID NO: 71023 - protein, 229 aa, Staphylococcus epidermidis
MNYSPKQGVKSHGLPHDPFKSSTVPRPIGWISTVSKEGKDNLAPYSQYQNLTWDPPMVMFAANQSVLGDHERKDTVKNAEETGWFVWNMATYDLREAVNLSSKALPPEDDEFDFAGVTKELCIEAPGSRVKESPVHFECEYVQTVRIPTGDPVSTVDIVIGRVAQVHIDDKVIMDNGKLDIKSIRTIARLGYYDYTVVDEIFEMKAPAASKEELAGLEGRNFDNTNNES

SEQ ID NO: 71024 - protein, 390 aa, Staphylococcus epidermidis
MEESKNYNLITTIMFISGIIVMASLYTALPLTATFAEDFHVPESIATLNGVLFSLTYSISCLFYGTISEKYGRIKTILVGMSALVIICLMIGIVHSFTVLLILRALQGVFAASFSPVVMTYTTETYPRVKRVTAISFISTSFMLSGVLGQNMSELVVSYLNWQWVYFILTILYLILVLVIYKNVPESPHKNPDIQLIKFFNNFKDFKDNLKVFYCLFISLTLLIMFISMYDILNEYVTSHQVGGDMSVSSMMKLFGVIGMLLSLLAGRVSSRIGIKRLLTIALTTCIVSIILMGVTTNIILITTFSVLFVAGIAFAIPTVISKIGVVVKNNQGFFLSVNTFVLFLGTAIAPILMLFVGELSNFFLQFLMIAIVGLIALVVSIFMPGDQRS

SEQ ID NO: 71025 - protein, 118 aa, Staphylococcus epidermidis
MVLRYATNLKLAKELYDASKPKLKGDQGMIDTFTNTFGLPENSVKLAGGVEAAAAGLFAASFLNKNISRLGSLAAISVLGVAAYKHFEAGHGKKGAQHALDLLGLSTLSLLDTFSCKK

SEQ ID NO: 71026 - protein, 796 aa, Staphylococcus epidermidis
MAKGVNQIINNIRLRKLRKILNQINALSEEFSNFSDEALQAKTKEFKVYLNDNKASLNHILPQAYATVREASKRVLGMYPKDVQILGAIAMHQGNIAEMQTGEGKTLTATMPLYLNALTGKGAYLITTNDYLAKRDFLEMKPLYEWLGLSVSLGFVDIPEYEYAENEKYELYHHDIVYTTNGRLGFDYLIDNLADDIRAKFLPKLNFAIIDEVDSIILDAAQTPLVISGAPRVQSNLFHIVKTFVETLEKDKDFIVNFNKKEVWLTDEGSEKASHYFKVNSIYQQQYFDLVRMIHLSLRAKYLFKYNLDYFIFDGEIVLIDRITGRMLPGTKLQSGLHQAIEALENVEISQDMSVMATITFQNLFKQFDEFSGMTGTGKLGEKEFFDLYSKVVIEIPTHSPIERDDRPDRVFANGDKKNDAILKTVIGIHETQQPVLLITRTAEAAEYFSAELFKRDIPNNLLIAQNVAKEAQMIAEAGQLSAVTVATSMAGRGTDIKLSKEVHDIGGLAVIINEHMDNSRVDRQLRGRSGRQGDPGYSQIFVSLDDDLVKRWSNSNLAENKNLQTMDASKLESSALFKKRVKSIVNKAQRVSEETAMKNREMANEFEKSISVQRDKIYAERNHILEASDFDDFNFEQLARDVFTKDVKNLDLSSERALVNYIYENLSFVFDEDVSNINMQNDEEIIQFLIQQFTQQFNNRLEVAADSYLKLRFIQKSILKAIDSEWIEQVDNLQQLKASVNNRQNGQRNVIFEYHKVALETYEYMSEDIKRKMVRNLCLSILAFDKDGDMVIHFP

SEQ ID NO: 71027 - protein, 519 aa, Staphylococcus epidermidis
MARKFRVLQVGGHDLGSLFNQKSNVEWDYFDVGLFDFESGYQDVVVHILDEKGQFDFVFVREKYSDSLMKLLSLVSTPYNTVIDNEYWDNQYQQDKTIQRNFIKPLIYENKEQLQQKLEAVTFPGQYGDKVKPIHCRVSIHFDGSYQFNGNESIEVSGRFGESYQPLITWSQNIIADANKVNQIWPEFKVEGDAKIQYTLRLTPVYSTDQPVEKLIYEQDDLDTPIELPARPYQTYVSVSIKAKGKGTLFIGAIHKRWSRLELGQFILGGKRYSDENKQEFIHYFHPGDLKPPLNVYFSGYRTAEGFEGYFMMKRMNAPFILIADPRIEGGAFYLGSENYEQAIRKVIQNALDYLGFANNQLILSGLSMGSFGALYYATKLNPAAVIVGKPLINLGTIANNMKLVRPNDFGTSLDILRLNQNGITNKDVVQLDNHFWKQIQHSDLSMTTFAIAYMEHDDYDKYAFQDLLPVLTKQHARVISKRIPGRHNDDSATVTHWFINFYHLIMEERFGRVTHARR

SEQ ID NO: 71028 - protein, 933 aa, Staphylococcus epidermidis
DHSYFNVTYLSTLYTGDLESSLNELGNRAIQAVHEGAKILVLDDTSLTHENSYAMPILLALSHVHQLLIREGLRMETSLIAQSGETREVHHVACLLGYGANAVVPYLAQRTIEQLTRQGQLSGTVAENVATYTNVLSEGVIKVMAKMGISTVQSYQGAQIFEAVGLSNSVIEKYFTGTQSKLSGISIEQIDKENKARQSDDSDYLESGSVFQWRQQGQHHAFNPRTIFLLQHACRENDYELFKKFSKTVNLKRTDHIRHLLEFKTRQSIDISRVEPASEIVKRFNTGAMSYGSISAEAHETLAQAMNQIGGKSNSGEGGEDSSRYEIQKDGSNKISAIKQVASGRFGVTSDYLQHAKEIQIKVAQGAKPGEGGQLPGSKVYPWIAETRGSTPGIGLISPPPHHDIYSIEDLAQLIHDLKNANRRADIAVKLVSKTGVGTIASGVAKAFADKIVISGYDGGTGASPKTSIQHAGLPWEIGLAETHQTLKLNDLRSRVKLETDGKLLTGKDVAYACALGAEEFGFATAPLVVLGCIMMRVCHNDTCPVGVATQNKDLRALFRGKAQHVVNFMYFIAEELREILASLGLETVEELVGRTDLLQRSTQLKPNSKAASLQIERLIEQLDGVNTKEISQNHHLDEGFDLNYLYPDARYSIENGHSFTGNYVVNNEQRDVGVITGSAIAKQYGEEGLPEDTILAYTEGHAGQSLAAYAPRGLTIHHTGDANDYVGKGLSGGTVIVNAPNSQRENEIIAGNVNFYGASRGKAFINGKAGERFCIRNSGADVVVEGIGDHGLEYMTGGHVIILGDVGKNFGQGMSGGVSYIFSSDVEKFKKVNALETLEFSSIRFDEEKSLIKDMLEAHFKHTRSNKARQLLDQFDNIEKLAIKVIPKDYKLMMQKIDLKKRQMEREDEATLAAFYDDRETIEQELQPAVIY

SEQ ID NO: 71029 - protein, 487 aa, Staphylococcus epidermidis
MGEFKGFMKYDKQSLSELSLVDRLSNHEAFQQRFTKEDASIQGARCMDCGTPFCQTGQSYGRETIGCPIGNYIPEWNDLVYHQDFKAAYERLRETNNFPEFTGRVCPAPCEQSCVMKINRESVAIKGIERTIIDEAYENEWVHPAYPEDHKDQRVAIVGSGPAGLTAAEELNFKGYKVTVYEKAHEPGGLLMYGIPNMKLDKDVIRRRVSLMKDAGVLFKTGVEIGVDVSRETLEENYDAIILCTGAQNARDLPLEGRMGSGIHFAMDYLTEQTQYLNGEIESLSITAKDKNVIIIGAGDTGADCVATALRENCKSIVQFNKYTKQPEEITFESNTSWPLAMPVFKMDYAHKEYEAKFGQEPRAYGVQTMRYDVDELGNVKGLYTQILKETPDGMVMEDGPERFWPADLVLLSIGFVGTETTVPHAFDIHTERNKIVANDTNYQTNHAKIFAAGDARRGQSLVVWAIKEGREVAHSVDQYLSKEVLV

SEQ ID NO: 71030 - protein, 518 aa, Staphylococcus epidermidis
MKRFIPAWYSRNRWWESTSRPFYLKKQYTDFDDMISLMTMHSSNNVDYQLIVLSFSPYLRTFLHRYDLYESHYWSVFDEIQGIGHQTPQAIDYRDLSWPEGTEFIFTPFQIQAITGDNTFSKIHFSQEGYLMWVEDYKYSTIQRRFVFDDRGFISAVRTYTPDGDNNKKHYFSKDGEEIFVEDLNVNTVTINKNFQSKFKKVTYSSMAELIEEKFQSYVERELNEDDSVIVASDERHNSMMARTIDAPSLCFSIFTERNKVVTQDLYDSISRAYYCLVDTQANQNMIEHYAGLNMNNFNLLRVTPFDAQSLPNQSSQLYDTYIGLWIDGLDEIEIREIVNSLFQYIQHKDGYKLKILTKSRDNLTENLIDEVAHLNDLYHQEKKEISDVIEDVIQNKKETIIDIETVPFEEDLVSVISKLRVVVDLSLEPKLFLQICCIGAGIPQINKKRTDYVKHMHNGYIIDDISQTVESLDYFLAHLKNWNYSYAYSMRLTDDFSSINIIHQINQLFKGDVSSGT

SEQ ID NO: 71031 - protein, 568 aa, Staphylococcus epidermidis
MDYQALYRMYRPQSFDDVVGQTHVTKTLRNAISKGKQSHAYIFSGPRGTGKTSIAKVFAKAINCLNSDDGEPCNECAICKGITQGTNNDVIEIDAASNNGVDEIRNIRDKVKYAPSESKYKVYIIDEVHMLTTGAFNALLKTLEEPPAHAIFILATTEPHKIPPTIISRAQRFDFKAISSDQIIDRLKYVANSQSLDYDDAALEFIAKASEGGMRDALSIMDQAIAFGDERLTLQDALNVTGSVDEAALNELFNDIVKSDVKAAFNRYHHFISEGKEVNRLINDMIYFVRDTIMNKTSNESVHFESLIHFDLDMLYRMIDIINDTLVSIRFSVNQSVHFEVLLVKLAEMIKTQPQTVQNVATASVANEPDNEMLLQRLEQLENELKTLKEQGIKTNKVSQQPKKPTRTIQRSKNTFSMQQIAKVLDKANKDDIKLLKNHWQEVIDHAKSNDKKSLVSLLLNSEPVAASEDHVLVKFDEEIHCEIVNKDDEKRNNIESVVCNIVNKTVKVVGVPADQWLRVRAEYLQNRNTNETHQSEKQSTQQSQQIDIAQKAKDLFGEETVHLVDED

SEQ ID NO: 71032 - protein, 105 aa, Staphylococcus epidermidis
MRGGGNMQQMMKQMQKMQKKMAQEQEKLKEERVAGTAGGGMVTVTVTGHKEVVDVEIKEEAVDPEDIEMLQDLVLAATNEAMNKADELTQQRLGKHTQGLNIPGM

SEQ ID NO: 71033 - protein, 1831 aa, Staphylococcus epidermidis
  MISC_FEATURE (1801)..(1801): X=any amino acid
  MISC_FEATURE (1805)..(1805): X=any amino acid
  MISC_FEATURE (1808)..(1808): X=any amino acid
  MISC_FEATURE (1809)..(1809): X=any amino acid
  MISC_FEATURE (1825)..(1825): X=any amino acid
  MISC_FEATURE (1828)..(1828): X=any amino acid
MTKKEKDYKKSLEQQKTRVKIYKSGKSWVKASINEIELLKTMGLPFLSKNEIQENVTEKTKGHKLKKSAAKTTALVGGAFTFNMLNNHQAFAASETPITSEISSNSETVANQNSTTIKNSQKETVNSTSLESNHSNSTNKQMSSEVTNTAQSSEKAGISQQSSETSNQSSKLNTYASTDHVESTTINNDNTAQQDQNKSSNVTSKSTQSNTSSSEKNISSNLTQSIETKATDSLATSEARTSTNQISNLTSTSTSNQSSPTSFANLRTFSRFTVLNTMAAPTTTSTTTTSSLTSNSVVVNKDNFNEHMNLSGSATYDPKTGIATLTPDAYSQKGAISLNTRLDSNRSFRFIGKVNLGNRYEGYSPDGVAGGDGIGFAFSPGPLGQIGKEGAAVGIGGLNNAFGFKLDTYHNTSTPRSDAKAKADPRNVGGGGAFGAFVSTDRNGMATTEESTAAKLNVQPTDNSFQDFVIDYNGDTKVMTVTYAGQTFTRNLTDWIKNSGGTTFSLSMTASTGGAKNLQQVQFGTFEYTESAVAKVRYVDANTGKDIIPPKTIAGEVDGTVNIDKQLNNFKNLGYSYVGTDALKAPNYTETSGTPTLKLTNSSQTVIYKFKDVQGPQISVDSQTREVGKTINPITITTTDNSKDVLTTTVTGLPSGLSFDQTTNTIIGTPSEVGTTTVTVNTTDATGNVTSKQFTITIQDTISPVVNVTPSQASEVFTPINPITITATDNSGKVVTHTVTGLPQGLKFDASTNSIVGTPTQIGTNTITIESTDASGNKTTTKINYEVTRNSASDSTSTSIVNSVSTSISNSTSLSDSVKASQSLSTKESTSKSLSGSLSASTSNSASIKASESASTSKKLSESASTSMSDSASIKASESASTSKKLSESASTSTSDSASIKASESASTSKKLSESASTSMSDSVSIKASESASTSKKLSESASTSTSDSASTQASESASTSKKLSESTSTSTSDSASTSTSESDSTSESTSLSDSTSASLSESTSTSTSDSASTSTSESDSNSTSTSLSESTSTSLSESTSTSTSDSASTSASVSDSNSASTSLRESTSTSLSDSTSTSTSDSASTSTSESDSDSASTSLSGSSSTSVSDSTSASTSESASTSTSISDSNSTSTSLSESTSTSLSESTSTSTSDSASTSMSVSDSNSASISLSESTSTSVSDSTSTSTSESASTSTSESDSNSASTSLSESTSTSVSDSTSTSTSDSASTSTSVSDSNSASTSLSESTSTSISDSTSTSTSDSASTSTSVSESSSTSKKLSESASTSMSDSASASTSESNSTSTSLSGSTSTSLSGSTSTSTSESASTSTSVSDSNSASTSLSESTSTSLSDSTSTSTSDSTSASTSESDSNSTSTSMSESLSTSVSDSTSTSTSDSASTSTSVSDSNSASTSLSDSTSTSISDSTSASTSDSASESASESESTSESTSVSESSSTSVSDSTSTSTSESASTSTSESESTSESTSVSESSSTSVSDSTSTSTSESASTSTSESESTSESTSLSGSSSTSVSDSTSTSTSESASTSTSVSDSNSTSTSLSESTSTSLSNSTSTSTSDSASTSTSVSDSNSASTSLSGSLSTNVSDSTSTSTSDSASTSTSESDSNSASTSLSGSLSTSISDSTSTSTSDSASTSTSESASTSTSVSESDSESTSMSVSDSNSTSTSLSDSTSTSVSDSTRTSTSDSASTSKSVSESNSASTSVSGSTSTSISDSSSTSTSMSTSETFTSQSPINSESQFIGDSLSEDTIVTQSKNTNMLNKTGKDYDLQEQRGYTDSRTTQXNTKXSSXXSLKQPRFTSSKSFTRXSRXTTD

SEQ ID NO: 71034 - protein, 198 aa, Staphylococcus epidermidis
MHYPEPISKLIDSFMKLPGIGPKTAQRLAFHTLDMKEDDVVKFAKALVDVKRELTYCSVCGHITENDPCYICEDKQRDRSVICVVEDDKDVIAMEKMREYKGLYHVLHGSISPMDGIGPEDINIPALVERLKNDEVKELILAMNPNLEGESTAMYISRLVKPIGIKVTRLAQGLSVGGDLEYADEVTLSKAIAGRTEM

SEQ ID NO: 71035 - protein, 57 aa, Staphylococcus epidermidis; identical to SEQ ID NO: 70614

SEQ ID NO: 71036 - protein, 129 aa, Staphylococcus epidermidis; identical to SEQ ID NO: 70612
  MISC_FEATURE (17)..(17): X=any amino acid
  MISC_FEATURE (102)..(102): X=any amino acid
  MISC_FEATURE (122)..(122): X=any amino acid

SEQ ID NO: 71037 - protein, 208 aa, Staphylococcus epidermidis; identical to SEQ ID NO: 70611
  MISC_FEATURE (62)..(62): X=any amino acid
  MISC_FEATURE (67)..(67): X=any amino acid
  MISC_FEATURE (112)..(112): X=any amino acid

SEQ ID NO: 71038 - protein, 122 aa, Staphylococcus epidermidis; identical to SEQ ID NO: 70609
  MISC_FEATURE (106)..(106): X=any amino acid

SEQ ID NO: 71039 - protein, 203 aa, Staphylococcus epidermidis [sequence omitted]

SEQ ID NO: 71040 - protein, 308 aa, Staphylococcus epidermidis
MDEQQQLANAYHSNKLSHAYLFEGDDAQTMKRVAIHFTKLILCNNSNQCELKVDTFNHPDFSYVSSDENTIKKEQIEKLVHHMNQLPIEGQYKVYIIEDFEKLTVQGENSILKFLEEPPDNTIAILLSTKPEQILDTIHSRCQHVYFKPIDKRQFIERLVEMSIARPVAEMLSTYTTQIEAASSLNEEFDLVTLRKSIIRWCQLILSNKAMALIGVIELLKQAKNRKLQLLTLSAVNGFFEDIMHAKIEMDNYYTFSDLTEEIENYANQLTFNQLILMYDQITEAHKKLNQNVNPTLVFEQIVIKGVI

SEQ ID NO: 71041 - protein, 279 aa, Staphylococcus epidermidis
MTTLYLVGTPIGNLGDITFRAIETLKKVDVIACEDTRVTRKLCNHYEIQTPLKSYHEHNKEQQTDYLIKQLQTGLNIALVSDAGLPLISDPGYELVVEARKNNINIETVPGPNAGLTALMSSGLPSFTYTFLGFLPRKEKEKIEVLEDRMFQNSTLILYESPYRVTDTLKAIAKIDSQRWITVGRELTKKFEQVLTLTVDDMLKLINHDKLPLKGEFVILIEGALPKSGESWFESYTVKEHVDYYIETKHVKPKKAIKFVATDRHMKTGDIYNIYHNID

SEQ ID NO: 71042 - protein, 656 aa, Staphylococcus epidermidis
MAKDTFYITTPIYYPSGNLHIGHAYSTVAGDVIARYKRMQGYDVRYLTGTDEHGQKIQEKAQKAGKTELEYLDEMISGIKNLWSKLEISNDDFIRTTEERHKQVVEKVFERLLKQGDIYLGEYEGWYSVPDETYYTESQLVDPVYENGKIVGGKSPDSGHEVELVKEESYFFNINKYTDRLLEFYDENPDFIQPPSRKNEMINNFIKPGLEDLAVSRTSFDWGVRVPSNPKHVVYVWIDALVNYISSLGYLSDDETLFNKYWPADIHLMAKEIVRFHSIIWPILLMALDLPLPKKVFAHGWILMKDGKMSKSKGNVVDPNVLIDRYGLDATRYYLMRELPFGSDGVFTPEAFVERTNYDLANDLGNLVNRTISMINKYFHGELPAYQGPKHELDEKMEAMALETVKSFNDNMESLQFSVALSTVWKFISRTNKYIDETQPWVLAKDENQREMLGNVMAHLVENIRFATILLQPFLTHAPREIFKQLNINNPDLHQLDSLQQYGMLSEAITVTEKPTPIFPRLDTEAEIAYIKESMQPPKSIKQSDEPGKEQIDIKDFDKVEIKAATIIDAENVKKSEKLLKIKVELDNEQRQIVSGIAKFYRPEDIIGKKVAVVTNLKPAKLMGQKSEGMILSAEKDGVLTLISLPSAIPNGAVIK

SEQ ID NO: 71043 - protein, 256 aa, Staphylococcus epidermidis
MLIDTHVHLNDEQYDEDLNEVISRAREAGVDRMFVVGFDTPTIERTMELIDKYDFIYGIIGWHPVDAIDCTDERLEWIESLSKHPKIIGIGEMGLDYHWDKSPSDVQKEVFKKQIALAKRVQLPIIIHNREATQDCIDILIEEHAEEVGGIMHSFSASPEIADVVINKLNFYVSLGGPVTFKNAKQPKEVAKHVPMDRLLCETDAPYLSPHPYRGKRNEPERVTLVAQQIADLRGMTYEEVCRQTTENAERLFNLN

SEQ ID NO: 71044 - protein, 181 aa, Staphylococcus epidermidis
MKINEFIVVEGKDDTERVKSAVDCDTIETNGSAIDTYTLEVIQHAQQTRGVIVLTDPDFPGDKIRNTIREHVSGVKHAYVDREKAKSKRGKIGIEHANIKDIQEALMHVSSPLEEAKETIDKSVLIDLGLIIGKDARYRRNILGRKLHIGHSNGKQLLKKLNAFGYTEDDVRKALFEEEEN

SEQ ID NO: 71045 - protein, 296 aa, Staphylococcus epidermidis
MEYKDIATPSRTRALLDQYGFNFKKSLGQNFLIDVNIINKIIEASHIDCTTGVIEVGPGMGSLTEQLAKNAKKVMAFEIDQRLIPVLKDTLSPYDNVTIINEDILKADIAKAVDTHLQDCDKIMVVANLPYYITTPILLNLMQQDVPIDGFVVMMQKEVGERLNAQVGTKAYGSLSIVAQYYTETSKVLTVPKTVFMPPPNVDSIVVKLMQRQEPLVQVDDEEGFFKLAKAAFAQRRKTINNNYQNFFKDGKKNKETIRQWLESAGIDPKRRGETLTIQDFATLYEQKKKFSELTN

SEQ ID NO: 71046 - protein, 451 aa, Staphylococcus epidermidis
MQRHAIILAAGKGTRMKSKKYKVLHEVAGKPMVEHVLNNVKQAGVDQIVTIIGHGAESVKDTLGNQSLYSFQDKQLGTAHAVKMAHEHLADKEGTTLVVCGDTPLITYQTLQSLIEHHESTQSHVTVLSASTINPYGYGRIIRNHNGILERIVEEKDANDSERAIKEISSGIFAFNNRVLFEKLEQVKNDNAQGEYYLPDVLSLILKDGGKAEVYCTEDFDEIIGVNDRLMLSEAEKALQQRINRYHMENGVTIIDPSSTFIGTDVKIGIDTTIEPGVRIGGHTTIEEDVWIGQYSEINNSTIHSNANIKQSVINDSIVGENTTVGPFAQLRPGSNLGSEVKVGNFVEVKKADIKDGAKVSHLSYIGDAEIGERTNIGCGSITVNYDGANKFKTIVGKDAFIGCNTNLIAPVTVGNHTLIAAGSTITDNIPEDSLALARARQVNKEGYLKK

SEQ ID NO: 71047 - protein, 321 aa, Staphylococcus epidermidis
MLNNEYKNSSMKIFSLKGNEPLAQEVADHVGIELGKCSVKRFSDGEIQINIEESIRGCDVFIVQPTSYPVNLHLMELLIMIDACKRASAANINIVVPYYGYARQDRKARSREPITAKLVANLIETAGANRMIALDLHAPQIQGFFDIPIDHLMGVPILAQHFENDPDINPEECVVVSPDHGGVTRARKLADILKTPIAIIDKRRPKPNVAEVMNIVGDIEGRTAIIIDDIIDTAGTITLAAQALKDKGAKEVYACCTHPVLSGPAKERIENSAIKQLIVTNSIQLEENRKPNNTKELSVAGLIAKAIIRVYERESVSVLFD

SEQ ID NO: 71048 - protein, 219 aa, Staphylococcus epidermidis
MASLKSIIRQGKQTRSDLKQLRNSGKVPAVVYGYGTKNTSVKVDEVEFIKVIREVGRNGVIDLGVGSKTIKVMVSDYQFDPLKNQITHIDFLAINMSEERTVEVQVQLVGEAVGAKEGGVVEQPLFNLEVTATPENIPETIEVDISELQVNDSLAVSDIKISGDFTIENNPEDSIVTVVPPTDEPSEEEVEAMEGESATEEPEVVGEDKEDDEEENKED

SEQ ID NO: 71049 - protein, 1169 aa, Staphylococcus epidermidis
MKSMIANYISEDNRFQELDEVFGQENILVTGLSPSAKATIIAEKYLKDHKQMLLVTNNLYQADKIETDILQYVDDSEVYKYPVQDIMTEEFSTQSPQLMSERVRTLTALAQGEKGLFIVPLNGFKKWLTPVDLWKDHQMTLKVGQDIDVDAFLNKLVNMGYRRESVVSHIGEFSLRGGIIDIYPLIGTPVRIELFDTEVDSIRDFDVETQRSNDNINQVEITTASDYIITDEVIQHLQNELKKAYEYTRPKIEKSVRNDLKETYESFKLFESTFFDHQLLRRLVSFMYEKPSTLIDYFQKNAIIVVDEFNRIKETEETLTTEVEDFMSNLIESGNGFIGQGFMKYESFDALLEQHAVAYFTLFTSSMQVPLQHIIKFSCKPVQQFYGQYDIMRSEFQRYVHQDYTVVVLVETETKVERIQSMLNEMHIPTVSNIHEDIDGGQVVVTEGSLSEGFELPYMQLVVITERELFKTRQKKQRKRTKTISNAEKIKSYQDLNVGDYIVHVHHGVGRYLGVETLEVGDTHRDYIKLQYKGTDQLFVPVDQMDQVQKYVASEDKSPRLNKLGGTEWKKTKAKVQQSVEDIADELIDLYKEREMSVGYQYGQDTAEQSAFEHDFPYELTPDQSKSIDEIKGDMERARPMDRLLCGDVGYGKTEVAVRAAFKAVMDGKQVAFLVPTTILAQQHYETLLERMQDFPVEIQLVSRFRTAKEIRETKEGLKSGYVDIVVGTHKLLGKDIQYKDLGLLIVDEEQRFGVRHKERIKTLKKNVDVLTLTATPIPRTLHMSMLGVRDLSVIETPPENRFPVQTYVLEQNTNFIKEALERELSRDGQVFYLYNKVQSIYEKREQLQRLMPDANIAVAHGQMTERDLEETMLSFINHEYDILVTTTIIETGVDVPNANTLIIEEADRFGLSQLYQLRGRVGRSSRIGYAYFLHPANKVLNETAEERLQAIKEFTELGSGFKIAMRDLNIRGAGNLLGKQQHGFIDSVGFDLYSQMLEEAVNEKRGIKEESPDAPDIEVELHLDAYLPAEYIQSEQAKIEIYKKLRKVETEEQLFDVKDELIDRFNDYPIEVERLLDIVEIKVHALHAGVELIKDKGKSIQIILSPKATEDINGEELFKQTQPLGRAMKVGVQNNAMNVTLTKSKQWLDSLKFLVRCIEESMAIKDED

SEQ ID NO: 71050 - protein, 396 aa, Staphylococcus epidermidis
MTHTITIVGLGNYGIDELPLGIYRFLEKESKVYARTLNHPVINTLKKEIEFESFDSIYEAHDRFEDVYEAIVTSLIELAQSEDIVYAVPGHPRVAETTTVKLLEYSHFNKDISVKVLGGKSFIDDIFEAVDVDPNDGFTLLDGTSLKESALNVRTNTVITQVYSVMIAADLKLTLMERYPDDFNVKIITGSHSDGAHVIECPLYEIDRYDDYFNNLTSLFIPKINEDTLLYQDFDYAVQTIDLLVDNEKGCPWDKVQTHDSLKRYLLEETFELFEAIDNEDDWHMIEELGDILLQVLLHSSIGKKEGYIDIKEIIESLNTKMIHRHPHIFGNAHVTSQEDLKDIWSRAKEKEGKVPRVKFEKVFADHFLKLYDKTKNRQFDEDDLKQFLQQGEKNS

SEQ ID NO: 71051 - protein, 87 aa, Staphylococcus epidermidis
MRLDKYLKVSRLVKRRTLAKEISDQGRVTVNGNVAKAGTDIKENDELIIRFGQKLVTVKVTGLSDHATKENAKGMYDLIKEERINEE

SEQ ID NO: 71052 - protein, 432 aa, Staphylococcus epidermidis
MNIKTDGWSKKAHIVVAVSTGIDSMSLLYSLLNDYQHTYRKLTCVHVNHGLREQSYEEEAFLREYCHQHHIDIYIKRLDLSDIVADGNSIQQEARQRRYEWFGDIIAQLRADVLLTAHHLDDQFETIIYRLFTGRSTRNSLGMTYESYFNQYKVYRPMLNLKKTEILAYQYANQIPYYEDMSNQDRKYVRNDIRQRIIPAINENPHLNAHQLLKLKDWHDIELQSLKEQAETFINNEVSKSKYLTYSFSRTAFNELNVNIKSVVMDLLFEKLDCHLAMPQHAYDEWFEQIRNDKSQFNIHVTDEWIIQIAYDKLIIMAKSEMDQYILDRICIRKPGTYEFNDYQIDIHPDLPQQLYPLTVRVRQNGDVYKLNGQKGHKKVSRLFIDKKVTLAERQRIPLIINQENAVLAIGDLYVKENFKEFILISNNGDEL

SEQ ID NO: 71053 - protein, 700 aa, Staphylococcus epidermidis
MQKAFRNVLVIAIIGVIIFGLFSFLNGNGNMPKQLTYTQFVNKLNKGDLKTLEIQPEQNVYMVSGKTKKDEDYSSTILYNNEKDLQKITDTAKKQDNLKFTVKEEEKQSVFVSILTTLIPVLIIALLFIFFLSQAQGGGGGGRMMNFGKSKAKMYDSNKRRVRFSDVAGADEEKQELIEIVDFLKDNKKFKQMGSRIPKGVLLVGPPGTGKTLLARAVAGEAGAPFFSISGSDFVEMFVGVGASRVRDLFENAKKNAPCIIFIDEIDAVGRQRGAGVGGGHDEREQTLNQLLVEMDGFGENEGIIMIAATNRPDILDPALLRPGRFDRQIQVGRPDVKGREAILHVHAKNKPLDETVDLKAISQRTPGFSGADLENLLNEASLIAAREGKNKIDMRDIEEATDRVIAGPAKKSRVISEKERNIVAHHEAGHTIIGMVLDEAEIVHKVTIVPRGQAGGYAMMLPKQDRFLMTEPELLDKICGLLGGRVSEDINFGEVSTGASNDFERATQIARSMVTEYGMSKKLGPLQFSSNSGGQVFLGKDMQGEPNYSGQIAYEIDKEVQRIVKEQYERCKQILLEHEEQLKLIAKTLLSEETLVAEQIQSLFYDGVLPEVDYDSAKVVKNENSDYSDGKYGKSYNDIRKEQLEDDDKEDDDNHEKDEVNQDNTDREADNTSHTNEPGHQQSPNIDKPYNPNDPNHRQ

SEQ ID NO: 71054 - protein, 293 aa, Staphylococcus epidermidis
MTHDYIVRGLAYGGEIRAYAAITTESVQEAQTRHYTWPTASAAMGRTMTATVMMGAMLKGNQKLTVTVDGKGPIGRIIADADAQGNVRAYVDHPQTHFPLNDQGKLDVRRAVGTDGSIQVVKDVGMKDYFSGASPIVSGELGDDFTYYYATSEQTPSSVGLGVLVNPDNSIKAAGGFIIQVMPGATDETVTKLEEAISQMQPVSKLIEQGLTPEGILNEILGEGNVQILNSTSAQFECNCSHEKFLNAIKGLGEAEIHSMIKEDHGAEAVCHFCGNKYQYSESELEDLLETMK

SEQ ID NO: 71055 - protein, 310 aa, Staphylococcus epidermidis
MAQKPVDYVTQIIGNTPVVKLRNVVDDDAADIYVKLEYQNPGGSVKDRIALAMIEKAEREGKIKPGDTIVEPTSGNTGIGLAFVCAAKGYKAVFTMPETMSQERRNLLKAYGAELVLTPGSEAMKGAIKKAKELKEEHGYFEPQQFENPANPEIHELTTGPELVEQFEGRQIDAFLAGVGTGGTLSGVGKVLKKEYPNVEIVAIEPEASPVLSGGEPGPHKLQGLGAGFVPDTLNTEVYDSIIKVGNDTAMDMARRVAREEGILAGISSGAAIYAAIQKAKELGKGKTVVTVLPSNGERYLSTPLYSFDN

SEQ ID NO: 71056 - protein, 272 aa, Staphylococcus epidermidis
MIKTKIMGILNVTPDSFSDGGQYHSVDQAVKRAKEMIDEGVDIIDVGGVSTRPGHKEVSHKEVSLKEEMNRVLPVVESIVKYDVQISVDTFRSEVAEACLKLGVSMINDQWAGLFDSNMFNVVSQYGAEIVLMHNGDGHRDKPVVEEMLVSLLAQANKAELAGIPHNKIWLDPGIGFAKTREEENEVMARLDELVATEYPVLLATSRKRYIKEMMNQDSSPSDRDEATAATTAYGIMKGVRGVRVHNVLLNTRLAQSMDFLKENEYERHHLS

SEQ ID NO: 71057 - protein, 159 aa, Staphylococcus epidermidis
MVKAYLGLGSNIGNRELQLNEAIKILHDYQGIQVTQVSHIYETEPVGYTNQPKFLNLCIEIETELNPQSLLKCCLTTEQQLHRKREIRWGPRTLDIDILLFGDQIIEQDNLSVPHPRMKERSFVLIPLNDIATKQIEPISNKSIGQLVVPDNSVKKYKE

SEQ ID NO: 71058 - protein, 495 aa, Staphylococcus epidermidis
MSEEMNDQMQVRRQKLQELIDLGIDPFGHRFNRSSTSSELKEQWDQFSKEELHEKEDESHVSIAGRLMTKRGKGKAGFAHIQDLKGQIQIYVRKDQVGDDQFNIWKMADLGDIIGVEGVMFKTNTGEISVKAKSFTLLSKSLRPLPDKFHGLQDIEQRYRQRYLDLITNEDSTQTFINRSKIIQEMRNYLNKQGFLEVETPMMHQIAGGAAARPFVTHHNALDATLYMRIAIELHLKRLIVGGLEKVYEIGRVFRNEGVSTRHNPEFTMIELYEAYADYHDIMDLTENMVRHIAQEVFGSAKVQYNDEEIDLESSWKRLHIVDAVKEVTGVDFYNVNSDEEAIRLAKEHDIEITENMKYGHILNEFFEQKVEETLIQPTFIYGHPIEISPLAKKNPNDERFTDRFELFIVGREHANAFTELNDPIDQRQRFEAQLVEKEQGNDEAHDMDEDYIEALEYGMPPTGGLGIGIDRLVMLLTDSPSIRDVLLFPYMRQK

SEQ ID NO: 71059 - protein, 57 aa, Staphylococcus epidermidis; identical to SEQ ID NO: 70614

SEQ ID NO: 71060 - protein, 129 aa, Staphylococcus epidermidis; identical to SEQ ID NO: 70612
  MISC_FEATURE (17)..(17): X=any amino acid
  MISC_FEATURE (102)..(102): X=any amino acid
  MISC_FEATURE (122)..(122): X=any amino acid

SEQ ID NO: 71061 - protein, 208 aa, Staphylococcus epidermidis; identical to SEQ ID NO: 70611
  MISC_FEATURE (62)..(62): X=any amino acid
  MISC_FEATURE (67)..(67): X=any amino acid
  MISC_FEATURE (112)..(112): X=any amino acid

SEQ ID NO: 71062 - protein, 122 aa, Staphylococcus epidermidis; identical to SEQ ID NO: 70609
  MISC_FEATURE (106)..(106): X=any amino acid

SEQ ID NO: 71063 - protein, 57 aa, Staphylococcus epidermidis; identical to SEQ ID NO: 70614

SEQ ID NO: 71064 - protein, 129 aa, Staphylococcus epidermidis; identical to SEQ ID NO: 70612
  MISC_FEATURE (17)..(17): X=any amino acid
  MISC_FEATURE (102)..(102): X=any amino acid
  MISC_FEATURE (122)..(122): X=any amino acid

SEQ ID NO: 71065 - protein, 208 aa, Staphylococcus epidermidis; identical to SEQ ID NO: 70611
  MISC_FEATURE (62)..(62): X=any amino acid
  MISC_FEATURE (67)..(67): X=any amino acid
  MISC_FEATURE (112)..(112): X=any amino acid

SEQ ID NO: 71066 - protein, 122 aa, Staphylococcus epidermidis; identical to SEQ ID NO: 70609
  MISC_FEATURE (106)..(106): X=any amino acid

SEQ ID NO: 71067 - protein, 295 aa, Staphylococcus epidermidis
MSKIVGSDRVKRGMAEMQKGGVIMDVVNAEQAKIAEEAGAVAVMALERVPSDIRAAGGVARMANPKIVEEVMNAVSIPVMAKARIGHITEARVLESMGVDYIDESEVLTPADEEYHLRKDQFTVPFVCGCRNLGEAARRIGEGAAMLRTKGEPGTGNIVEAVRHMRRVNSEVSRLTVMNDDEIMTFAKDLGAPYEVLKQIKDNGRLPVVNFAAGGVATPQDAALMMELGADGVFVGSGIFKSEDPEKFAKAIVQATTHYQDYELIGKLASELGTAMKGLDINQISLEERMQERGW

SEQ ID NO: 71068 - protein, 186 aa, Staphylococcus epidermidis
MIKIGVLALQGAVREHIRHIELSGYEGIAIKRVEQLDEIDGLILPGGESTTLRRLMDLYGFKEKLQQLDLPMFGTCAGLIVLAKNVENESGYLNKLDITVERNSFGRQVDSFESELDIKGIANDIEGVFIRAPHIAKVDNGVEILSKVGGKIVAVKQGQYLGVSFHPELTDDYRITKYFIEHMIKH

SEQ ID NO: 71069 - protein, 357 aa, Staphylococcus epidermidis; identical to SEQ ID NO: 70497

SEQ ID NO: 71070 - protein, 187 aa, Staphylococcus epidermidis
MLCENCHFNEAEVKLTVKGIDSTHEKWVCSVCAQGENPWLHSNDDNTYHTHQDDIEEAFVVKQILQHLAAKHGINFHEMAFKEEKKCPTCQMTLKDIAHVGKLGCADCYATFKEDIIDIVQRVQGGQFEHVGKTPQSSYKKLAIKKQIEEKSKYLNKLIDGQEFEEAAIVRDEIKALKSESEVSHDE

SEQ ID NO: 71071 - protein, 341 aa, Staphylococcus epidermidis
MRARCLMMSNIHTNISEWMKMSEETPVIISSRIRLARNLENHVHPLMFPSEQEGYRVINEVQDALSNLTLNRLDTMDQQSKMKLVAKHLVSPELVKQPASAVMLNDDESVSVMINEEDHIRIQALGTDLSLKDLYQRASKIDDELDKALDISYDEHLGYLTTCPTNIGTGMRASVMLHLPGLSIMKRMNRIAQTINRFGFTIRGIYGEGSQVYGHIYQVSNQLTLGKTEEDIIDNLTEVVNQIINEEKQIRERLDKHNSVETLDRVYRSLGVLQNSRIISMEEASYRLSEVKLGIDLNYILLENFKFNELMVAIQSPFLIDDDDNRTVNEKRADLLREHIK

SEQ ID NO: 71072 - protein, 817 aa, Staphylococcus epidermidis
MLFGRLTERAQRVLAHAQEEAIRLNHSNIGTEHLLLGLMKEPEGIAAKVLVSFNITEDKVIEEVEKLIGHGQEQMGTLHYTPRAKKVIELSMDEARKLHHNFVGTEHILLGLIRENEGVAARVFANLDLNITKARAQVVKALGSPEMSNKNAQANKSNNTPTLDGLARDLTVIAKDGTLDPVVGRDKEITRVIEVLSRRTKNNPVLIGEPGVGKTAIAEGLAQAIVKNEVPETLKDKRVMSLDMGTVVAGTKYRGEFEERLKKVMEEIHQAGNVILFIDELHTLVGAGGAEGAIDASNILKPALARGELQCIGATTLDEYRKNIEKDAALERRFQPIQVDEPTVEDTIEILKGLRDRYEAHHRINISDEALEAAAKLSDRYVSDRFLPDKAIDLIDEASSKVRLKSHTTPSNLKEIEQEIDKVKNEKDAAVHAQEFENAANLRDKQSKLEKQYEDAKNEWKNAQGGLDTALSEENIAEVIAGWTGIPLTKINETESDRLLNLEDTLHKRVIGQNDAVNSISKAVRRARAGLKDPKRPIGSFIFLGPTGVGKTELARALAESMFGEDDAMIRVDMSEFMEKHAVSRLVGAPPGYVGHDDGGQLTEKVRRKPYSVILFDEIEKAHPDVFNILLQVLDDGHLTDTKGRTVDFRNTVIIMTSNVGAQELQDQRFAGFGGASEGSDYETVRKTMMKELKNSFRPEFLNRVDDIIVFHKLTKDELKEIVTMMVNKLTHRLSEQNINIVVTDKAKEKIAEEGYDPEYGARPLIRAIQKTVEDNLSELILDGNKIEGKEVTIDHDGKEFKYDIYEITAKKETTES

SEQ ID NO: 71073 - protein, 457 aa, Staphylococcus epidermidis
MAKKKVIFECMACGYQSPKWMGKCPNCGAWNQMEEIVEKVAHPKHGVKTKETAGKVQKLNSVKHEATPRLLTESKEFNRVLGGGIVSGSLVLIGGDPGIGKSTLLLQICAALSQNKNVLYITGEESINQTKLRADRLEEDSSHLNVLAETDLEVIHQTVKEERPDLLVVDSIQTIYHPEISSAPGSVSQVRESTQSLMNIAKQMNIATFIVGHVTKEGQIAGPRLLEHMVDTVLYFEGDEHHAYRILRAVKNRFGSTNEMGIFEMKQSGLKGVLNPSEMFLEERSTNVPGSTIVPTMEGTRPLLIEVQALVTPTTFNNPRRMATGIDHNRLSLLMAVLEKKENYLLQQQDAYIKVAGGVKLTEPAVDLSIIVATASSFKDQAVDGLDCFVGEVGLTGEVRRVSRIEQRVQEATKLGFKRAIIPQTNIGGWTFPEGIQVVGVSSVHEALKYALHSKQR

SEQ ID NO: 71074 - protein, 484 aa, Staphylococcus epidermidis
MSERIRVRYAPSPTGYLHIGNARTALFNYLFAKHYNGDFVVRIEDTDSKRNLEDGESSQFDNLKWLGLDWDESVDKDKGFGPYRQSERAEIYNPLIQQLLEEDKAYKCYMTEEELEAEREAQIARGEMPRYGGQHAHLTEEQRQQYEAEGRKPSIRFRVPKDQTYTFNDMVKGEISFESDNIGDWVIVKKDGVPTYNFAVAVDDHYMQISDVIRGDDHVSNTPKQLMIYEAFGWEAPRFGHMSLIVNEERKKLSKRDGQILQFIEQYRDLGYLPEALFNFITLLGWSPEGEEEIFSKEEFIKIFDEKRLSKSPAMFDRQKLAWVNNQYMKTKDTETVFELALPHLIKANLIPENPSEKDREWGRKLIALYQKEMSYAGEIVPLSEMFFHEMPELGKDEQEVLQGEQVPELMNHLYGKLESLESFEATEIKKMIKEVQKETGIKGKQLFMPIRVAVTGQMHGPELPNTIEVLGKDKVLSRLKNLV

SEQ ID NO: 71075 - protein, 213 aa, Staphylococcus epidermidis
MLKRMRDDIKMVFEQDPAARSTLEVITTYAGLHAVWSHLIAHKLYKNRRYVAARMISQLSRFFTGIEIHPGAKIGKRLFIDHGMGVVIGETCTIGDNVTIYQGVTLGGTGKEKGKRHPDIGDNVLIAAGSKILGNIKIESNVNIGANSVVLQSVPSYTTVVGIPGHIVKQEGRRIGKTFDHRNLPDPLYEQIKHLERQLEKAKNGEIQDDYII

SEQ ID NO: 71076 - protein, 606 aa, Staphylococcus epidermidis
  MISC_FEATURE (477)..(477): X=any amino acid
LKKLRMERFKMITLYNTLTRRKETFEPIEPGKVKMYVCGPTVYNYIHIGNARPAINYDVVRRYFEYKGYEVIYVSNFTDVDDKLINRSKELNESVPEIAEKYIKAFYEDVGALNVKKATSNPRVMHHMGEIIDFIKELVDEGYAYESDGDVYFRTRQFDGYGKLSHQSLDDLKVGARIEAGEQKEDALDFTLWKKAKPGEISWNSPFGKGRPGWHIECSVMAYHELGSTIDIHAGGSDLQFPHHENEIAQSEAHNHAPFANYWMHNGFINIDNEKMSKSLGNFILVHDIIKEVDPDVLRFFMISVHYRSPINYNLELVGAARSGLERIRNSYKLIEEREQIASDLEEQSEYIQQIDKILNQFETVMDDDFNTANAVTAWYDLAKLANKYVLENTTSTKVLNRFKEVYSIFSDVLGVPLKSKETEELLDEDIEQLIEERNEARKNKDFARADEIRDMLKARHIILEDTPQGVRFKRGXHMNVKLLNPLTLAYMGDAVLDQHVREYIVLKLQSKPHRLHQVSKSYVSAKSQAKTLEYLLDIDWFTEEELSVLKRGRNAKSYTKAKNTDIQTYRKSSALEAVIGFLYLDHQSERLENLLETIVRIVDER

SEQ ID NO: 71077 - protein, 175 aa, Staphylococcus epidermidis
MKKRYLIIDGYNMIGQSSTLSTVAKENLEEAREQLLDTIANYNALIADEIVCVFDAYEQSGIEREYFYHGVKTIFTKEKETADSFIERYVYELYNKHTTHITVVTSDMSEQHAIFGSGAYRISSREMWRELKENEVVVNKSLDDFSEKKPRIRIPLSNEILEEFEKIRRGNQKKD

SEQ ID NO: 71078 - protein, 60 aa, Staphylococcus epidermidis
MAKKESFFKGVKSEMEKTSWPTKEELFKYTIIVVSTVIFFLVFFYALDIGINALKQLFLG

SEQ ID NO: 71079 - protein, 182 aa, Staphylococcus epidermidis
MSEEVGAKRWYAVHTYSGYENKVKKNLEKRVESMNMTEQIFRVVIPEEEETQVKDGKAKKLVKKTFPGYVLVELIMTDESWYVVRNTPGVTGFVGSAGAGSKPNPLLPEEVRFILKQMGLKEKTIDVELDVGEQVRIQSGPFANQIGEVQEIEADKFKLTVLVDMFGRETPVEVEFDQIEKL

SEQ ID NO: 71080 - protein, 140 aa, Staphylococcus epidermidis
MAKKVEKVVKLQIPAGKANPAPPVGPALGQAGVNIMGFCKEFNARTQEQAGLIIPVEISVYEDRSFTFITKTPPAPVLLKKAAGVEKGSGEPNKTKVATVTKDQVREIAQTKMQDLNAADEEAAMRIIEGTARSMGITVQ

SEQ ID NO: 71081 - protein, 231 aa, Staphylococcus epidermidis
MAKKGKKYQEAASKVDRTQYYSVEEAIKLAKETSVANFDASVEVAFRLGIDTRKNDQQIRGAVVLPHGTGKSQRVLVFAKGDKITEAEEAGADYVGEADYVQKIQQGWFDFDVVVATPDMMGEVGKLGRVLGPKGLMPNPKTGTVTMDVKKAVEEIKAGKVEYRAEKAGIVHASIGKVSFDEEKLVDNFRTLQDVLAKAKPASAKGTYFKSVAVTTTMGPGVKVDTSSFKL

SEQ ID NO: 71082 - protein, 166 aa, Staphylococcus epidermidis
MSAIIEAKKQQVDTIAEQLKNSVSTVIVDYRGLTVAEVTELRSQLREAGVEYKVYKNTMVRRAAEQAGIEGLDEFLTGPTAIATSTEDVVAPAKVIAGFAKEHEALEVKTGVMEGNVISAEEVKTVGSLPSHDGLVSMLLSVLQAPVRNFAYAVKAVGEQKEESAE

SEQ ID NO: 71083 - protein, 122 aa, Staphylococcus epidermidis
MANQEQIIEAIKEMSVLELNDLVKAIEEEFGVTAAAPVAAAGAAGGGDAAAEKTEFDVELTSAGSSKIKVVKAVKEATGLGLKDAKELVDGAPKVIKEAMPKEDAEKLKEQLEEVGASVELK

SEQ ID NO: 71084 - protein, 202 aa, Staphylococcus epidermidis
MSHYYDEQPDVKSNPKRISYQIKNAQLELTTDAGVFSKDNVDFGSDLLIKTFLKEHPPGPSKTIADVGCGYGPIGLAIGKVSPHHQITMLDINNRALALAEMNKTKNQVDNVTIIESDCLSAVNHQCFDYILTNPPIRAGKDIVHRIFEQAFDRLKTTGELYVVIQKKQGMPSAKKKIEELFGNVEIIAKSKGYYILKSIKG

SEQ ID NO: 71085 - protein, 1183 aa, Staphylococcus epidermidis
MAGQVVQYGRHRKRRNYARISEVLELPNLIEIQTKSYDWFLKEGLLEMFRDISPIEDFTGNLSLEFVDYRLGEPKYDLEESKNRDATYAAPLRVKVRLIIKETGEVKEQEVFMGDFPLMTDTGTFVINGAERVIVSQLVRSPSVYFNEKIDKNGRENYDATIIPNRGAWLEYETDAKDVVYVRIDRTRKLPLTVLLRALGFSTDQEIVDLLGDSEYLRNTLEKDGTENTEQALLEIYERLRPGEPPTVENAKSLLYSRFFDPKRYDLASVGRYKANKKLHLKHRLFNQKLAEPIVNSETGEIVVDEGTVLDRRKLDEIMDVLETNANSEVFELEGSVIDEPVEIQSIKVYVPNDEEGRTTTVIGNALPDSEVKCITPADIVASMSYFFNLLNGIGYTDDIDHLGNRRLRSVGELLQNQFRIGLSRMERVVRERMSIQDTDSITPQQLINIRPVIASIKEFFGSSQLSQFMDQANPLAELTHKRRLSALGPGGLTRERAQMEVRDVHYSHYGRMCPIETPEGPNIGLINSLSSYARVNEFGFIETPYRKVDLDTNSITDQIDYLTADEEDSYVVAQANSRLDENGRFLDDEVVCRFRGNNTVMAKEKMDYMDVSPKQVVSAATACIPFLENDDSNRALMGANMQRQAVPLMNPEAPFVGTGMEHVAARDSGAAITAKHRGRVEHVESNEILVRRLVEENGTEHEGELDRYPLAKFKRSNSGTCYNQRPIVSIGDVVEYNEILADGPSMELGEMALGRNVVVGFMTWDGYNYEDAVIMSERLVKDDVYTSIHIEEYESEARDTKLGPEEITRDIPNVSESALKNLDDRGIVYVGAEVKDGDILVGKVTPKGVTELTAEERLLHAIFGEKAREVRDTSLRVPHGAGGIVLDVKVFNREEGDDTLSPGVNQLVRVYIVQKRKIHVGDKMCGRHGNKGVISKIVPEEDMPYLPDGRPIDIMLNPLGVPSRMNIGQVLELHLGMAAKNLGIHVASPVFDGANDDDVWSTIEEAGMARDGKTVLYDGRTGEPFDNRISVGVMYMLKLAHMVDDKLHARSTGPYSLVTQQPLGGKAQFGGQRFGEMEVWALEAYGAAYTLQEILTYKSDDTVGRVKTYESIVKGENISRPSVPESFRVLMKELQSLGLDVKVMDEHDNEIEMADVDDEDAAERKVDLQQKSAPESQKETTD

SEQ ID NO: 71086 - protein, 1207 aa, Staphylococcus epidermidis
MIDVNNFHYMKIGLASPEKIRSWSYGEVKKPETINYRTLKPEKDGLFCERIFGPTKDWECSCGKYKRVRYKGMVCDRCGVEVTKSKVRRERMGHIELAAPVSHIWYFKGIPSRMGLLLDMSPRALEEVIYFASYVVVDPGPTGLEKKTLLSEAEFREYYDKYPNQFVAKMGAEGIKDLLEEIDLDEELKELRDELESATGQRLTRAIKRLEVVESFRNSGNNPSWMILDVLPIIPPEIRPMVQLDGGRFATSDLNDLYRRVINRNNRLKRLLDLGAPGIIVQNEKRMLQEAVDALIDNGRRGRPVTGPGNRPLKSLSHMLKGKQGRFRQNLLGKRVDYSGRSVIAVGPSLKMYQCGLPKEMALELFKPFVMKELVQREIATNIKNAKSKIERMDDEVWDVLEDVITEHPVLLNRAPTLHRLGIQAFEPTLVEGRAIRLHPLVTTAYNADFDGDQMAVHVPLSKEAQAEARMLMLAAQNILNPKDGKPVVTPSQDMVLGNYYLTLERKDAVNTGAIFNDTNEVLKAYANGYVHLHTRIGVHANSFNNPTFTDEQNSKILATSVGKIIFNEIIPDSFAYINEPSQANLERTTPDKYFVDPTQLGEGGLKEYFDNTELIEPFNKKFLGNIIAEVFNRFSITDTSMMLDRMKDLGFKFSSKAGITVGVSDIVVLPDKQDILDEHEKLVERVTKQYNRGLITEDERYNAVVEIWTDAKDQIQGELMQSLEKTNPIFMMSDSGARGNASNFTQLAGMRGLMAAPSGKIIELPITSSFREGLTVLEYFISTHGARKGLADTALKTADSGYLTRRLVDVAQDVIVREEDCGTDRGLLVSDIKEGTEMIEPFIERIEGRYSKETIRHPETDEVIIRPDELITPDIAKQITDAGIEQMYIRSAFTCNTRHGVCEKCYGKNLATGEKVEVGEAVGTIAAQSIGEPGTQLTMRTFHTGGVAGSDITQGLPRIQEIFEARNPKGQAVITEIEGVVDDIKLAKDRQQEIIVKGANETRSYLASGTSRLKVEIGQSVERGEVLTEGSIEPKNYLSVAGLNATESYLLKEVQKVYRMQGVEIDDKHVEVMVRQMLRKVRIIEAGDTKLLPGSLVDIHNFTDANRDAFKHRKRPATAKPVLLGITKASLETESFLSAASFQETTRVLTDAAIKGKRDDLLGLKENVIIGKLIPAGTGMRRYSDIQYDKATAPVTETSEEVETIE

SEQ ID NO: 71087 - protein, 137 aa, Staphylococcus epidermidis
MPTINQLVRKPRKSKTKQSDSPALNRGFNSKKKQFTNLNSPQKRGVCTRVGTMTPKKPNSALRKYARVRLSNNIEVNAYIPGIGHNLQEHSVVLVRGGRVKDLPGVRYHIVRGALDTSGVDGRRQGRSLYGTKKPKN

SEQ ID NO: 71088 - protein, 290 aa, Staphylococcus epidermidis
MKKKALLPLFLGIMIFLAGCDYSTPEKQDGFFFNTFVQPMKHLLQWLGNDVFHNNFGLAIIVLVLFIRLILLPFMLSNYKNSHMMREKMKVAKPEVDGIQEKVKRARTQEEKMAANQELMEVYKKYDMNPMKSMLGCLPILIQMPIIMGLYFVLKDKLVNGLSEHPHFLWFNLTKPDIWITVIAGVLYFIQAVVSSKTMPQEQRQMGYMMMVISPIMIIWISLQASSALGLYWSVSALFLVIQTHFANIYYSKLAKKEVQPFIEKYEREHNPSSKKKGKNTQVVSKKNKK

SEQ ID NO: 71089 - protein, 213 aa, Staphylococcus epidermidis
MMFDSKQLSVYFICGTQDIPKNKSIEQVLKEALEAGITLYQFREKGPNALKGEKKKQLALKLKQLCHSYHVPMIVNDDVQLAQEINADGIHVGQDDMEIQQFASQFKNKIIGLSVGNLKEYQQSDLSKVDYIGVGPMYTTSSKDDASKPVGPSMISQLRLYIHDFPIVAIGGINETNVQPIVDEGADGISVISAITRSTNIDKTVKYFLRYFT

SEQ ID NO: 71090 - protein, 262 aa, Staphylococcus epidermidis
MNNLERLRSENPLVICYTNDVVKNFTANGLLSLGASPAMSEAPEEAEDFTRMASALLINIGTLTRENEEDIIKIGKIANQQGTPIVFDPVAVGASTYRKNFCQRFLGEVNVTVIKGNASEILTLIDFNTTMKGTDSDSELDSVNIAKKAANTLNTAIVITGKDDIIAKNEKIIKLSNGSPLLTKITGAGCLLGGVLASFLFRNTQPSIDLLVEAVSVYNIAAEFAEQAPHVNGPGTFLSELLDQLYQMNDITYKNQVKKVEI

SEQ ID NO: 71091 - protein, 229 aa, Staphylococcus epidermidis
MTFSKELREASRPIIDDIYNDGFIQDLLAGKLSNQAVRQYLRADASYLKEFTNIYAMLIPKMSSMEDVKFLVEQIEFMLEGEVEAHEVLADFINEPYEEIVKEKVWPPSGDHYIKHMYFNAFARENAAFTIAAMAPCPYVYAVIGKRAMEDPKLNKESVTSKWFQFYSTEMDELVDVFDQLMDRLTKHCSETEKKEIKENFLQSTIHERHFFNMAYINEKWEYGGNNNE

SEQ ID NO: 71092 - protein, 503 aa, Staphylococcus epidermidis
MAIKAEEISALLRSQIENYESEMSVTDVGTVLQIGDGIALIHGLNDVMAGELVEFHNGVLGLAQNLEESNVGVVILGPYEEISEGDEVKRTGRIMEVPVGEEMIGRVVNPLGQPIDGQGPINATKTRPVEKKATGVMDRKSVDEPLQTGIKAIDALVPIGRGQRELIIGDRQTGKTTVAIDSILNQKDQDTICIYVAIGQKDSTVRANVEKLRQAGALDYTIVVSASAADPAPLLYIAPYSGVTMGEEFMFNGKHVLIVYDDLTKQAAAYRELSLLLRRPPGREAYPGDVFYLHSRLLERAAKLNDDLGGGSITALPIIETQAGDISAYVPTNVISITDGQIFLQSDLFFSGVRPAINAGQSVSRVGGSAQIKAMKKVAGTLRLDLASYRELESFAQFGSDLDEFTAKKLARGERTVEVLKQGQNNPLPVEHQVLIIFALTKGYLDDIPVQDINRFEEEFNHWAESNATELLNEIRETGALPDADKFDSAITEFKKGFNKSEE

SEQ ID NO: 71093 - protein, 179 aa, Staphylococcus epidermidis
MAKVAKKYAKALFDVALDTNQLDVVYEDLETISHSSFDFIKQLKAIDSNPSLTANQREEFVERVYNEANPYVVNTLKVLADNRHISIVENVFKSFQNLYNKYYKQDFAIIESTYELSEDEISRIVELIKKQTELSNVIVNTKINQDLIGGFRVKVGTTVMDGSVRNDLVQLQRKFERAN

SEQ ID NO: 71094 - protein, 171 aa, Staphylococcus epidermidis
MTATANTFILGAGVEWGTTFVTLVTFVILIILLKKFAWGPLKEVMDKRERDINKDIDDAEQAKINAQKLEEENRKTLKETQDEVQKILDDAKIQARKQHEEIIHEANEKANGMIETAQSEINSQKERAISDINNQVSELSVLIASKVLRKEISEQDQKELVEKYLKEAGDK

SEQ ID NO: 71095 - protein, 242 aa, Staphylococcus epidermidis
MDHKSPLVSWNVFGFDIVFNLASVLMVVITAILVFILAIVCTRNLKKRPTGKQNFIEWVFDFVRGIIESNMAWKKGGNFHFLAVTLILFIFVANMLGLPFAIVTHDHTLWWKSPTADATVTLTLSTTMILLTHYYGIKMRGTKAYAAGYFKPFWPLAIINVFEEFTSTLTLGLRLYGNIFAGELLLGLLASLFFEQPAWGWIISIPGLIVWQAFSIFVGTIQAYIFVMLSMVYMSHKVADGH

SEQ ID NO: 71096 - protein, 382 aa, Staphylococcus epidermidis
MMKKVMTIFGTRPEAIKMAPLIKTLEKDSDLEPVVVVTAQHREMLDSVLNTFNISADYDLNIMKAGQTLSEVTSEAMKKLEDIIQKEVPDMVLVHGDTVTTFSGALAAFYSQTPIGHVEAGLRSYNKYSPYPEEINRQMVGVMADLHFAPTYNAAQNLVKEGKLAKHIAITGNTAIDAMNYTIDHQYSSSIIQKHKNKNFILLTAHRRENIGKPMINVFKAIRKLIDEYQDLALVYPMHMNPKVRDIAQKYLGNHPRIELIEPLDVVDFHNFAKQAYLIMTDSGGIQEEAPSLHKPVLVLRDSTERPEGVDAGTLRVIGTNEEDVYNETKKLIENPDLYQKMSQAVNPYGDGQASERIVQHIKYYFNLTNDRPNHFEFTKDL

SEQ ID NO: 71097 - protein, 209 aa, Staphylococcus epidermidis
MSKVHVFDHPLIQHKLSYIRDARTGTKEFRELVDEVGMLMAYEVTRDLELQDVEIQTPVTKMTAKRLAGKKLAIVPILRAGLGMTDGVLSLVPAARVGHIGLYRDPETLEAVEYFAKMPQDIDERQIIVVDPMLATGASAIEAISSLKKRGAKSIRFMCLIAAPEGVEKMQEAHPDVDIYIAALDEKLNDKAYITPGLGDAGDRLFGTK

SEQ ID NO: 71098 - protein, 412 aa, Staphylococcus epidermidis
MSYIEKKDKVVYDAIQKEFQRQNSNIELIASENFVSQAVMEAQGSVLTNKYAEGYPGRRYYGGCEHVDVTESIAIERAKALFGAEHVNVQPHSGSQANMAVYLVALEMGDTVLGMNLSHGGHLTHGATVNFSGKFYHFVEYGVDQENELINYDEVRRLAIEHQPKLIVAGASAYSRTIDFKKFKEIADEVGAKLMVDMAHIAGLVAAGLHPNPVEYADFVTTTTHKTLRGPRGGMILCKEEYKKDIDKTIFPGIQGGPLEHVIAAKAVAFGEALNDDFKDYQNQVIKNAQALAQTLIEEGFRVVSGGTDNHLVAVDVKGSINMTGKLAEETLDKVGITCNKNTIPFDKEKPFVTSGVRLGTPAATTRGFDESAFVEVAKIISLALNNYDNDTKLNEAKERVHALTSKYPLYN

SEQ ID NO: 71099 - protein, 278 aa, Staphylococcus epidermidis
MVNYKEKFAEAKTIAVNEGFESTRAEWLFLDVFGWSKTDYLIHKDEQMSLTSINKLDKALDRMITGEPIQYIVGFQSFYGYQYKVNQHCLIPRPETEEVMLHFLELCKKTDTIADIGTGSGAIAITLKLLQPELNVIATDLYEDALNVAKQNASHYHQNIQFLRGNALKPLIENDIKLDGLISNPPYIGHSEIIDMESTVLNYEPHHALFAEKNGFAIYESILEDLPFVMKQGGHVVFEIGYSQGDILKRMIQDLYPEKEVEIFKDINGNQRIISIIW

SEQ ID NO: 71100 - protein, 358 aa, Staphylococcus epidermidis
MFDQLDIVEERYEQLNELLSDPDVVNDADKLRKYSKEQADLQKTVDVYRSYKTKKEELQDIEDMLNETSDKEEVEMLKEESSALKTELPDMEEELKILLIPKDPNDDKDVIVEIRAAAGGDEAAIFAGDLMRMYSKYAEANGFKTEIVEASESDHGGYKEVSFSVSGTGAYSKLKFENGAHRVQRVPETESGGRIHTSTATVAVLPEAEDVEIEIRNEDLKIDTYRSSGAGGQHVNTTDSAVRITHLPTGVIATSSEKSQIQNREKAMKVLKARLYDMKLQEEQQKYASQRKSAVGTGDRSERIRTYNYPQSRVTDHRIGLTLQKLNQIMEGNLDEIVEALTLSEQTEKLKELNNGEL

SEQ ID NO: 71101 - protein, 199 aa, Staphylococcus epidermidis
MYETYHSGWIETITGSMFSGKSEELIRRLRRGIYAKQKVVVFKPAIDDRYHKEKVVSHNGNEIEAINISTAQEILNHKLEEVNVIGIDEVQFFEDDIVNIVEKLAENGHRVIVAGLDMDFRGEPFKPMPKLLAVSEHITKLQAVCSVCGSPSSRTQRLINGEPAKVDDPIILVGANESYEPRCRAHHIVAPSENEKEEM

SEQ ID NO: 71102 - protein, 438 aa, Staphylococcus epidermidis
MPGRERTSPQYESFHELYKNNTTKELTQKAKSLKLTNYSKLNKKELVLAIMEAQMEKDGNYYMEGILDDIQQDGYGFLRTVNYSKGEKDIYISASQIRRFEIKRGDKVTGKVRKPKDNEKYYGLLQVDFVNDHNAEEVKKRPHFQALTPLYPEERILLETQSTNYSTRIMDLVTPIGLGQRGLIVAPPKAGKTSLLKEIANAIASNKPEANLFILLVGERPEEVTDIERSVESAEVVHSTFDEPPEHHVKVAELLLERAKRLVEIGEDVIILMDSITRLARAYNLVIPPSGRTLSGGLDPASLHKPKAFFGAARNIEAGGSLTILATALVETGSRMDDMIYEEFKGTGNMELHLDRKLSERRIFPAIDIGRSSTRKEELLITKAELDSLWQLRNLFTDSTDFTERFIRKLKRSKNNEEFFKQLQKAAEESTKTGRPII

SEQ ID NO: 71103 - protein, 475 aa, Staphylococcus epidermidis
MRNFTKQYINGEWVDSASGETIDVINPATEEVMGKIAKGNEEDVNKAVDAADKVYLEFRHSSVEERRELLDKIVKEYQNRKNDLIEAITDELGAPLSVSENVHYQMGLNHFTAARDALDSFQFEEQRGDDLVVKEAIGVAGLVTPWNFPTNQTSLKLAAAFAAGSPVVLKPSEETPFAAIILAEIFDKVGVPKGVFNLVNGDGSGVGNPLSEHPKVRMMSFTGSGPTGSKIMEKAAKDFKKVSLELGGKSPYIVLDDVDVEEAANATTKKVVNNTGQVCTAGTRVLIPESIKEDYLTAVKEAFSKVKVGQPREEGTQVGPIISKKQFDQVQDYIDKGINEGAELFYGGPGKPEGLDKGYFARPTIFINVDNHMTIAQEEIFGPVMSVITYNNLDEAIEIANDTKYGLAGYVIGKDKDTLRHVARSIEAGTIEINEAGRKPDLPFGGYKESGLGREWGDYGIEEFLEVKSIAGYFK

SEQ ID NO: 71104 - protein, 357 aa, Staphylococcus epidermidis; identical to SEQ ID NO: 70497

SEQ ID NO: 71105 - protein, 419 aa, Staphylococcus epidermidis
MAQEVIKIRGGQALKGEVEISGAKNSAVAIIPATLLAQGQVKLEGLPQISDVETLVSLLEDLNIEARLNGKQLEVDTTQIENAPLPNNKVESLRASYYMMGAMLGRFKKCVIGLPGGCPLGPRPIDQHIKGFKALGAEIDESSNTSMKLVAKELRGAHIFLDMVSVGATINIMLAAVHAKGQTVIDNAAKEPEVVDVANFLMSMGADIRGAGTTSIKINGVEELKGSEYQIIPDRIEAGSYMCMAAAMGEEVILHNIVPKHVEALTVKLQELGVDIEIEDEKIIIRKQTPYKNVDIKTLVYPGFATDLQQPITPLLFMTEGPSFVTDTIYPARFKHVEELQRMGANIKSDEGTAVIKPSTLNGAEVYASDLRAGACLITAGLIAEGVTTIFNVKHIYRGYTNIVEHLKALGADIWTETV

SEQ ID NO: 71106 - protein, 286 aa, Staphylococcus epidermidis
MPLVSMKEMLIDAKENGYAVGQYNLNNLEFTQAILEASQEENAPVILGVSEGAARYMSGFYTVVKMVEGLMHDLNITIPVAIHLDHGSSFEKCKEAIDAGFTSVMIDASHSPFEENVEITSKVVEYAHDRGVSVEAELGTVGGQEDDVVADGVIYADPKECQELVEKTGIDTLAPALGSVHGPYKGEPKLGFKEMEEIGASTGLPLVLHGGTGIPTKDIQKAIPYGTAKINVNTENQIASAKAVREVLNNDKDVYDPRKYLGPAREAIKETVKGKIREFGTSNRAK

SEQ ID NO: 71107 - protein, 535 aa, Staphylococcus epidermidis
MTKFIFVTGGVVSSLGKGITAASLGRLLKDRGLKVTIQKFDPYLNVDPGTMSPYQHGEVFVTDDGAETDLDLGHYERFIDINLNKYSNVTAGKVYSHVLKKERRGDYLGGTVQVIPHITNEIKERLLLAGESTNADVVITEIGGTTGDIESLPFLEAIRQIRSDLGRENVMYVHCTLLPYIKAAGEMKTKPTQHSVKELRGLGIQPDLIVVRTEYEMTQDLKDKIALFCDIKKESVIECRDADSLYEIPLQLSKQNMDDIVIQRLQLNAKYETQLDEWKHLLNTVNNLDGKITIGLVGKYVSLQDAYLSVVESLKHAGYPFKKDVVVKWIDSSEVNDDNVEAYLSDVDGILVPGGFGFRASEGKIAAIRYARENNIPFFGICLGMQLATVEFARHVLGYEGAHSAELDPSTPYPIIDLLPEQKDIEDLGGTLRLGLYPCHIKEGTLAEKIYNKNDIEERHRHRYEFNNEFREQLESNGMVFSGTSPDGRLVEIIEIPKNDFFIACQFHPEFLSRPNRPQPIFKSFVEAALNYQQK

SEQ ID NO: 71108 - protein, 645 aa, Staphylococcus epidermidis
MGKIKELETSLANKIAAGEVVERPSSVVKELLENAIDAQATEINIEVEQSGVSSIRVVDNGTGIAQEDLGLVFHRHATSKIVADDDLFHIRTLGFRGEALASISSVAKVTLKTCTDNENGHEIYAENGKIIHQKPAKAKKGTDIQVDSLFYNTPARLKYIKSLYTELGKITDIVNRMAMSHPEIRISLVSDGKKLLSTNGSGRTNEVMAEIYGMKVAKDLVHISGDTSDYHLEGFVAKPEHSRSNKHYISIFINGRYIKNFVLNKAILEGYHTLLTIGRFPICYINIQMDPILVDVNVHPTKLEVRLSKEDQLYDLIVTKIREAFKDKILIPQNDLNHASKKNKVLETFEQQKINFEKQQSQIGETSAPYVHDQKDKNHDVESHKNNLDSTSSTNNESTEVSNELHNHIDDSYLQSQKEVLFDMEQNTSNEYEISNQQSNDIKGTVSQTPHRRVPYMEIVGQVHGTYIIAQNENGMFMIDQHAAQERIKYEYFREKIGEVTNEVQNLLIPLTFHFSKDEQMIIDQYKDELDKVGVHLEHFGGHDYIVNSYPVWFPKEEAEEIIKDMIELVLKHKSVDVKKIREDAAIMMSCKKSIKANHYLKNNEMADLIDQLREAEDPFTCPHGRPIIINFSNYELEKLFKRVM

SEQ ID NO: 71109 - protein, 272 aa, Staphylococcus epidermidis
MLWSDRHMKIGIDAGGTLIKIVQEHDNRRYYRTELTTNIQKVIDWLNNEEIETLKLTGGNAGVIADQIHHSPEIFVEFDASSKGLEILLDEQGHQIEHYIFANVGTGTSFHYFDGKDQQRVGGVGTGGGMIQGLGYLLSNITDYKELTNLAQNGDRDAIDLKVKHIYKDTEPPIPGDLTAANFGNVLHHLDNQFTSANKLASAIGVVGEVITTMAITLAREYKTKHVVYIGSSFNNNQLLREVVENYTVLRGFKPYYIENGAFSGALGALYL

SEQ ID NO: 71110 - protein, 274 aa, Staphylococcus epidermidis
MNAYLAEFLGTAILILFGGGVCANVNLKRSAGNGADWIVISFGWGFAVTMGFYAVGTFSGAHLNPAVTVALAMDGGFSWAQVPGYIVCQMLGGIVGGVFVWLMYLPHWKVTEDPAVKLGVFSTAPAIKNYFANFLSEIIGTMALTLGILFIGVNKIADGLNPIIVGSLIIAIGLSLGGTTGYAINPARDLAPRIAHAILPIHGKGKSNWSYAIVPVLGPMAGGMLGAIVYEVFYKQTFNFSCFIGLIVLIFTLILGVILNKISQNKNNDIESIY

SEQ ID NO: 71111 - protein, 499 aa, Staphylococcus epidermidis
MEKYILSIDQGTTSSRAILFNKEGEIKGVSQREFKQHFPHPGWVEHDANEIWTSVLSVMAELLNENNINANQIEGIGITNQRETTVVWDKNTGRPIYHAIVWQSRQTQDICTNLKEQGYEETFREKTGLLLDPYFAGTKVKWILDHVEGAREKAENGDLLFGTIDSWLVWKLSGRTAHITDYTNASRTLMFNIYDLKWDDELLELLNIPKQMLPEVKESSEIYGKTIDYHFFGQEVPIAGIAGDQQAALFGQACFDRGDVKNTYGTGGFMLMNTGEEAVKSESGLLTTIAYGLDGKVNYALEGSIFVSGSAIQWLRDGLRMINSAPQTENYASRVESTEGVYMVPAFVGLGTPYWDSEARGAIFGLSRGTEKEHFIRATLESLCYQTRDVMEAMSKDSGIEVQNLRVDGGAVKNNFIMQFQADIVNSSVERPEIQETTALGAAYLAGLAVGFWDDKEDIRERWKLQTEFKPEMDEDQRHKLYSGWKKAVKATQVFKLED

SEQ ID NO: 71112 - protein, 394 aa, Staphylococcus epidermidis
MHNKQKILDFIENNKYDYVEISHRIHERPELGNEEIFASRTLIDQLRANRFEIETDIAGHATGFIATYDSDMTGPVIGFLAEYDALPGLGHACGHNIIGTASVLAAVALKEVVDEIGGKVVVLGCPAEEGGENGSAKASYVKAGVIDEIDVALMIHPGNETYRTINTLAVDVLDIKFYGRSAHASENADEALNALDAMISYINGIAQLRQHIKKGQRVHGVILDGGKAANIIPDFTHARFYTRATSRRELDVLTEKVNQIARGAAIQTGCDFEFGPIQNGVNEFIKAPKLDDLFEKYATELGEEVIDDDFGYGSTDTGNVSHVVPTIHPHIKIGSRNLVGHTHRFREAAASLQGDQALIRGAKILALMGLELIENKPLLDEIIEEHTHIKGHVK

SEQ ID NO: 71113 - protein, 308 aa, Staphylococcus epidermidis
MSQSHFKITVEDGTMLEVKIDKAKKSTIGIVHLFHGMAEHMDRYQELVEALNTQGYDVVRHNHRGHGKEIDENERGHFNSMNQIVDDAYEIIETLYLEELNVPYIIIGHSMGSIIARSFVEKYPDIAQGLILTGTGMFPKWKGVPIRLAMKLVTFIFGKRRRLKWVNQLLNKTFNKKITQPRTDSDWISTRQDEVDKFVEDEFCGFKVSNQLIYQTLKTMMKTVERQQLKRMDKELPILFISGKDDPFGEYGKGIKHLARLYKRVGIKHITVQLYKHKRHEILFEEDYLKTWQHMFEWMEKQILKKQK

SEQ ID NO: 71114 - protein, 220 aa, Staphylococcus epidermidis
MNKAKLIDHTLLKTDSTKEQIDTIINEAKAYQFKSVCVNPTHVQYASEQLKGTDVLVCTVIGFPLGATTTAVKSYETKDAINNGAQEIDMVINIGALKDGRFDKVQNDIEAVVQAANGKTVKVIIETVLLTEKEKIKACQLSEAAGAHFVKTSTGFAGGGATVEDVKLMKDTVGDRLEVKASGGVRNLEDFNNMIEAGATRIGASAGVQIIQGLESNTDY

SEQ ID NO: 71115 - protein, 148 aa, Staphylococcus epidermidis
MSQQQDVVKELNQQVANWTVAYTKLHNFHWYVKGPNFFSLHTKFEELYNEASQYVDDLAERILAIGGNPIGTLSECLDKSIVNEAGKHYSAEEMVEELSKDFSKISKQLEQSIEVAGSASDDVSEDMFIGMQTSVDKHNWMLQSYLGH

SEQ ID NO: 71116 - protein, 446 aa, Staphylococcus epidermidis
MPKRSFTKDDIRKFAEEENVRYLRLQFTDILGTIKNVEVPVSQLEKVLDNEMMFDGSSIEGFVRIEESDMYLHPDLDTWVIFPWTAGQGKVARLICDVFKTDGTPFEGDPRANLKRVLRRMEDMGFTDFNLGPEPEFFLFKLDEKGEPTLELNDDGGYFDLAPTDLGENCRRDIVLELEDMGFDIEASHHEVAPGQHEIDFKYADAVTACDNIQTFKLVVKTIARKHNLHATFMPKPLFGVNGSGMHFNVSLFKGKENAFFDPEGDLQLTDTAYQFTAGVLKNARGFTAVCNPIVNSYKRLVPGYEAPCYIAWSGKNRSPLVRVPTSRGLSTRIEVRSVDPAANPYMALAAILEAGLDGIENKLEVPEPVNQNIYEMNREEREAVGIQDLPSTLYTALKAMRENKSIKNALGNHIYNQFINSKSIEWDYYRTQVSEWEREQYIKQY

SEQ ID NO: 71117 - protein, 285 aa, Staphylococcus epidermidis
MKNIKAIFLDMDGTILHENNKASEYTKQVINELREQNYKVFLATGRSYSEISQLVPDGFTVDGIISSNGTSGEIHGDNLFRHSLTLERVQKIVELAKKQHIYYEVFPFESNRISLKEDEDWMKEMISTIEPPDAVSQSEWSSRREAIKGKIDWRDTLPDAHFSKIYLFSPNLDKITDFRNQLVENQSNLGITVSNSSRYNAETMPYHTDKGTGIKEMIDHYGIKQEETLVIGDSDNDRAMFNFGHHTVAMKNARQEIKNLTDDITEYTNEEDGAAHYLKSHLLDN

SEQ ID NO: 71118 - protein, 601 aa, Staphylococcus epidermidis
MCGIVGYIGYDNAKELLLKGLEKLEYRGYDSAGIAVVNDDGTKLFKEKGRIAELRKVADNSDEDGTLGIGHTRWATHGVPNYENSHPHQSTSGRFTLVHNGVIENYEELKAEYLSDVTFSSETDTEVIVQLVDYFSRQGLATEDAFTKVVKLLHGSYALGLLDDNDKDTIYVAKNKSPLLVGVGEGFNVIASDALAMLQTTNQYKEIHDHEIVIVKRDTVEIKDLEGHIQQRDTYTAEIDAADAEKGVYDHYMLKEIHEQPAVMRRIIQEYQDEKGNLKIDSEIINDVADADRIYIVAAGTSYHAGLVGKEFIEKWAGVPTEVHVASEFVYNMPLLSEKPLFIYISQSGETADSRAVLVETNKLGHKSLTITNVAGSTLSREADHTLLLHAGPEIAVASTKAYTAQIAVLSILSQIVAKNHGRETDVDLLRELAKVTTAIETIVDDAPKMEQIATDFLKTTRNAFFIGRTIDYNVSLEGALKLKEISYIQAEGFAGGELKHGTIALIEDGTPVIGLATQENVNLSIRGNMKEVVARGAYPCMISMEGLNKEGDTYVIPQVHELLTPLVSVVTMQLISYYAALQRDLDVDKPRNLAKSVTVE

SEQ ID NO: 71119 - protein, 451 aa, Staphylococcus epidermidis
MGKYFGTDGVRGVANQELTPELAFKLGRYGGYVLAHNKGEKHPRVLVGRDTRVSGEMLESALIAGLISIGAEVMRLGVISTPGVAYLTKEMEAALGVMISASHNPVADNGIKFFGSDGFKLSDDQENEIEQLLDQTNPDLPRPVGEDIVHYSDYFEGAQKYLSYLKSTVDVNFEGLKIVLDGANGSTSSLAPFLFGDLEADTETIGCNPDGYNINEQCGSTHPEKLAEAVLETESDFGLAFDGDGDRIIAVDENGQIVDGDQIMFIIGQEMYKNQELNGNMIVSTVMSNLGFYKALEKEGIQSNKTKVGDRYVVEEMRRGNYNLGGEQSGHIVLMDYNTTGDGLLTGVQLASVIKMSGKTLSELASQMKKYPQSLINVRVTDKYRVEENIHVQEIMTKVETEMNGEGRILVRPSGTEPLVRVMVEAATDADAERYAQSIADVVEDKMGLDK

SEQ ID NO: 71120 - protein, 364 aa, Staphylococcus epidermidis
MESRSWGVRIGELSTLIYLIFPILAIFVDKRGNFLTYLIVCTIFIISYVTMILFYKYLSNSILYSLLVIHYLGIFYFVYSVNPMNSLFFFYSAFALPFIFNVRVVSKEFITFLIAMVSCLILTYIFNPTFVVLLSAFYLVILIVAIGNFKNRDERIMKAKLEEKNKYINVLIAQQERNRISQDLHDTLGHVFASLTLKSELAVKLIDTNPEEAKNEMQAINQLSTEALNKVRLIIDDLKIQSFEDEISSLEKLLQNANLHFKFNNKSAAKSLNPAKQSILSMIFREAINNVIKHAHATEVTGELEVHEHQIILKIKDNGVGMENEDASNLKSIKERVDYLNGKLIVQSNNGTLIIVEIPRGDLL

SEQ ID NO: 71121 - protein, 311 aa, Staphylococcus epidermidis
MLESKWGLRFVALILAVFFFLSVNNVFGNIFNTDDLSQKSSKTIQDVPVDVIYNSKDLHVTKIPENVDVNLTGPQSKLIKIENPEDLKVVVDLSGKKAGKYQKKYQVRGIDSGINYQIKPEVAHINLENKITRVMHVQPDISSNSLDPKYKISKQSISPETVKVTGGEQQLKNIAYLKATFKNSSKVNKDTNDVADVSAFDKQLNKLNVSINPNEVNLKVTVEPFSKMVKVRTKTTGKLNENKELDSVKLEDKEVEIFGNRDELQNINEITAEVDIDGISESTEKTVSFNLPKDVTKVNPKETKAYINVKN

SEQ ID NO: 71122 - protein, 200 aa, Staphylococcus epidermidis
MISLVITEDQLMLRKAMVQLIEMHEEMNVLKDFENGLETLEFIENNEPNVAILDIEIPGITGLEILSYVRKKQLNTRIIIVTTFKRPGYFEKAVANDVDAYVLKERSIDDLIKTIYKVTKGEKEYSPSLMTSLFTESNPLTHKEQVVLREIGNGLSSKEIASKLYLSNGTVRNYTSTIIDKMNSDHRFEAWKKANEKGWI

SEQ ID NO: 71123 - protein, 122 aa, Staphylococcus epidermidis; identical to SEQ ID NO: 70609
  MISC_FEATURE (106)..(106): X=any amino acid

SEQ ID NO: 71124 - protein, 208 aa, Staphylococcus epidermidis; identical to SEQ ID NO: 70611
  MISC_FEATURE (62)..(62): X=any amino acid
  MISC_FEATURE (67)..(67): X=any amino acid
  MISC_FEATURE (112)..(112): X=any amino acid

SEQ ID NO: 71125 - protein, 134 aa, Staphylococcus epidermidis
  MISC_FEATURE (22)..(22): X=any amino acid
  MISC_FEATURE (107)..(107): X=any amino acid
  MISC_FEATURE (127)..(127): X=any amino acid
GTGISTCYPSPTPVGLSLGPDXPRADEPSSGNLSQSVDGILTRLFATHTGILTSKRSTCPCDHASTPLERSPTIVKGQSTASVICLAPVHFRRSVTRLVSYYALFKXWLLLSQHPSCLGNATSFSTXHIFWDLS

SEQ ID NO: 71126 - protein, 57 aa, Staphylococcus epidermidis; identical to SEQ ID NO: 70614

SEQ ID NO: 71127 - protein, 458 aa, Staphylococcus epidermidis
MKVAKFGGSSVSTAEQIKKVLTIVNEDPERKIIIVSAPGKRHNDDIKTTDLLIRLYEKVLNKLNYESKKQEIIQRYADIVEELGIGNDILITINDTLEEYIKNLSDKPNRLYDALLSCGENFNAQLIAQYNNSQGIPTRYISPKEAGLTVTDLPQQAQILDSAYNDIYKLRDYDEKLIIPGFFGVSKQNYIVTFPRGGSDITGAIIARGVRASLYENFTDVSGIYKANPNIINNPELIEEITYREMRELSYAGFGVFHDEALQPLYKDRIPVVIKNTNRPNDKGTYILHDREIDSKNVISGISCDKGFTVINIKKYLMNRLVGFTRKILGVLEDYNISFDHMPSGIDNISIIMRTNQIQGKESQVLNAIRKRCEVDELSIDHDLAVLMIVGEGMNQVVGTASKITHALSESNINLIMINQGASEISMMFGIHEADAEKAVLSTYEFCYNGVCLKNLCK

SEQ ID NO: 71128 - protein, 306 aa, Staphylococcus epidermidis
MEEVLKLKIPASTANLGVGFDSIGMALDKYLHMSIRKIERANWEFLYYSSELEGLPKDENNYIYQTALNVARKYNVTLPSLQIEMRSDIPLARGLGSSASALVGALFIANYFGNIQLSKYELLQLATEIEGHPDNVAPTIYGGLIAGFYNPITKITDVARIEVPHVDIILTIPPYELRTEDSRRVLPDTFSHKGAVQNSAISNTMICALIQHKYKLAGKMMEQDGFHEPYRQHLIPEFNQVRKLSRQHDAYATVISGAGPTILTLCPKEKSGKLVRTLREKINNCASELVTINEIGVKDEVVYLKS

SEQ ID NO: 71129 - protein, 268 aa, Staphylococcus epidermidis
MTQYKMVVLDMDDTLMNSDNKLSIETKSYLLDIQKRGYYVVLASGRPTEGMLPTARELELNKYNSFIISYNGGKTINMANENVEVDQPVSKEDFDNIVDYCRDKNFLVLTYDNGYIIHDSSHEYMNIESQLTGLPMNRVADLKEYINHSVPKVMGVDYVGHITEARIELDGYFNNDIDVTTSKPFFLEFMAKNVSKGNAIKALCKRLQISLEEVIVFGDSLNDKSMFEVAGYSVAMGNASDELKKIADEVTLDNNSNGIPYALKELLV

SEQ ID NO: 71130 - protein, 227 aa, Staphylococcus epidermidis
MSQSSKRKNDSVVETFKDIIPLTFGEEIGNAASHGAAALLTLFILPYAAVHSFNNGGTLESISVSVYVISIFMMFISSTIYHSMQNNTSHKYILRIIDHSMIYVAISGTYTPVLLSVVGGWLGWLVTILLWGTTLWGILYKSIATKVNHRLSLIVYLVMGWVGIIFLPIIIMRTSWWFIFFIFLGGLSYTIGAWFYAQKNKPYFHMIWHIFIVLASFLHMIGIFYFM

SEQ ID NO: 71131 - protein, 395 aa, Staphylococcus epidermidis
MLDKNQLEKYNQEHLYEYEKLMSSNEKNALDEKVDQLNLAEIQDLYQDLYVNRKTIDDVSSVSEVKYEVKSRLNEEERHTYEQKGYEAIRNGEFAVLLMAGGQGTRLGYKGPKGSFEIEGTSLFELQARQLIRLKEETGHTINWYIMTSDINHKDTIEYFKQHKYFNYDANHIHFFKQDNIVALSEEGKLVLNRDGHIMETPNGNGGVFKSLKKAGYLDKMQQDHVKYIFLNNIDNVLVKVLDPLFAGFTVTQSKDITSKTIQPKDSESVGRLVNVDCKDTVLEYSELDTDIANQFNNANIGIHAFKLGFITSAVDRELPYHLAIKQLKQLDENFGVVERPTLKFELFYFDIFRYGTSFVTLQVPREEEFSPLKNKEGKDSVHTATEDLKRMDLI

SEQ ID NO: 71132 - protein, 504 aa, Staphylococcus epidermidis
MSKQDGKLTGLFGAPVSDRENSMTAGQRGPLLMQDVYYLEQISHFDREVIPERRMHAKGSGAFGTFTVTNDITQYTNAKIFSEVGKQTEMFARFSTVSGERGAADLERDIRGFALKFYTEDGNWDLVGNNTPVFFFRDPKLFISLNRAVKRDPRTNMRSAQNNWDFWTGLPEALHQVTILMSDRGMPKGFRNMHGFGSHTYSMYNDKGERVWVKYHFRTQQGIENYTDEEAAKIVGMDRDSSQRDLYNAIENGDYPKWKMYIQVMTEEQAKNHPDNPFDLTKVWYKKDYPLIEVGEFELNRNPENYFLDVEQAAFTPTNIVPGLDYSPDKMLQGRLFSYGDAQRYRLGVNHWQIPVNQPKGVGVENLCPFSRDGQMRFLDNNQGGGPHYYPNNQGIYESQPEHKKPPFPTDGDGYEYNYRQDDDNYFEQPGKLFRLQSEDAKERIFTNTANAMDGVSKDVKVRHIRHCYKADPEYGKGVAKALGIDINQIDLETNQDETYENFK

SEQ ID NO: 71133 - protein, 89 aa, Staphylococcus epidermidis
MAKKSKIAKEQKRQELVNKYYELRKELKAKGDYEALRKLPRDSSPTRLTRRCKVTGRPRGVLRKFEMSRIAFREHAHKGQIPGVKKSSW

SEQ ID NO: 71134 - protein, 325 aa, Staphylococcus epidermidis
MKIFDYEDIQLIPNKCIVESRSECNTSVKFGPRTFKLPVVPANMQTVMNEELAQWFAENDYFYIMHRFNEENRIPFIKKMHHAGLFASISVGVKENEFNFIEKLASSSLIPEYITIDIAHGHSNSVINMIKHIKKHLPNSFVIAGNVGTPEGVRELENAGADATKVGIGPGRVCITKIKTGFGTGGWQLSALNLCNKAARKPIIADGGLRTHGDIAKSIRFGATMVMIGSLFAAHEESPGETVELDGKKYKEYFGSASEYQKGEHKNVEGKKMFVEHKGSLKDTLTEMEQDLQSSISYAGGKDLKSLRTVDYVIVRNSIFNGDRD

SEQ ID NO: 71135 - protein, 321 aa, Staphylococcus epidermidis
MIKQNLKMRYTIVLLLLIFSTIFSLCIGSVMINPIHAVTGFFLHNDFILNEYRIPRTLLGLLIGSSLAISGSVIQGVIRNPLASPDVIGITKGASLAAVMIIMIFPSAPLFVLPLGSFIGALTISIILSVLISKFDVKGSKLALIGLAIGAICTAIVQFLLIRNPLDANNALLWLTGSLYGHNIVNFYSLLPWFIITVPIVLLLGYQLDILNLGDHVAIALGARVKILKMILLVLAVMLAGASIAVVGGISFLGLIAPHIARQLVGHKNIHVIIMSGLVGAILLTFGDGLARGIQPPLDIPVGVVIAIIGAPYFLFLLRKM

SEQ ID NO: 71136 - protein, 343 aa, Staphylococcus epidermidis
MTMVNKDSQSAIEQKKKKRTTLTFIVGVCLLFISVYLNLAIGSSKIQFNDILSYVTGHTNTKATFLIHNVRMPRMLAGLIIGGALAIAGLLMQAITKNPLASPQIFGVNAGASFVIVLITVLIPSLGSYSTILAIIGAFLGGFTVYTLSGSTKSITPIKLALAGMAIHLFFSSMTQGIIILNEDSNDTVMFWLVGSLAGIKWQQIIFILPFLLLAIFVTIFMGRQLTILELGDDIARGLGQRTEIVRMIVGILVVVLAGVSVSIAGPIGFVGLIVPHIVKRYINKNYVLMIPLTFIFGATLLLISDVLCRLITYPFESPVGIVTSFVGAFYFLFITVRGVNRI

SEQ ID NO: 71137 - protein, 662 aa, Staphylococcus epidermidis
MFNEKDQLAIDTIRALSIDAIEKANSGHPGLPMGAAPMAYTLWTRHLNFNPQSKDFFNRDRFILSAGHGSALLYSLLHVSGSLELEELKQFRQWGSKTPGHPEYRHTDGVEVTTGPLGQGFAMSVGMALAESHLAGKFNKDQFDIVNHYTYVLASDGDLMEGISHEAASFAGHNQLDKLIVLYDSNDISLDGDLDKSFSEDTKQRFEAYGWNYILVENGNDLDEIDNAITQAKSQQGPTIIEVKTIIGFGSPNKAGSNGVHGAPLGEEERALTFKEYGLDPEKRFNVPEDVYEIFKSTMLKRANENEEAWNNMLKNYSEAYPELAEEFKLAMSGKLPNNYADALPEYDLNHSGASRADSGEIIQKLSEFVPSFFGGSADLAGSNKSNVKEAKDYNKDTPEGKNVWFGVREFAMGAAINGMAAHGGLHPYAATFFVFSDYLKPALRLSSIMGLNSTFIFTHDSIAVGEDGPTHEPIEQLAGLRAIPNMNVIRPADGNETRVAWEVALESEQTPTSLVLTRQNLPTLDVDKQTVENGVRKGAYIVFETEQQLEYLLLASGSEVNLAVEAAKELEQQGKGVRVISMPNWYAFEQQSSEYKESILPSDVTKRIAIEMASPLGWHKYVGIEGKVIGINSFGASAPGDLVVEKYGFTKENILKQVRSL

SEQ ID NO: 71138 - protein, 331 aa, Staphylococcus epidermidis
MRGLKILSVIGLLFVLIATAACGNNSSSNSSKESSKDGVEIKHEEGTTKVPKHPKRVVVLEYSFVDALVALDVKPVGIADDNKKNRIIKPLRDKIGKYTSVGTRKQPNLEEISKLKPDLIIADNNRHKGIYKDLNKIAPTIELKSFDGDYNENIDAFKTISKALGKEEEGKKRLEEHDKKIEEYKKEITMDKNQKVLPAVAAKSGLLAHPSNSYVGQFLSQLGFKEALSDDVTKGLSKYLKGPYLQMNTETLSQVNPERMFIMTNKASSNEPSLKELEKDPVWKKLNAVKNQRVDILDRDLWARSRGLISSEEMAKELVELSKKDSKKDNK

SEQ ID NO: 71139 - protein, 374 aa, Staphylococcus epidermidis
MKIVHTADWHLGKILNGKQLLEDQKYILTQFKQHMEKEQPDLIVIAGDLYDTSYPSKEAIGLLEETIEYLNIELKIPIIMISGNHDGRERLNYGSKWFENNQLYIRTQLENIDDPIELSGVQFFTLPFATVSEVQNYFKDKQIETYQQALNECLEQMSSSIDNNKVNILIGHLTIEGGKTSDSERPLTIGTVESVDMHSFRLFDYVMLGHLHHPFSINNSFIKYSGSILQYSFSEVNQSKGYRVLDIENNQLLNETFVPLKPLRELEVIEGDYEDIIQERIKVKNKNNYFHFKLTNVSHITDPMMKLKQIYPNILALSNVVFDHSENFSHVEIKKQDDQTIIENFYKNMTDQHLSQVQSDKIKHLLSFILDREG

SEQ ID NO: 71140 - protein, 653 aa, Staphylococcus epidermidis
MNFNQFINKQNIIMTEDEHNVYDFLKHHNPNWSSNYIDHLLDGRDKVSQRLITSLHRENLVKSRDHSRILNRHQFAGYGVNVIAILEIYFPTSNIYLYAPITGMHAFDRIDVEGPFYFKNLSKEDDFERVLHPNQILDWILIEDENLNNEASVQFRNDLNNSAANMTFALSFQHYTMRNERAPLYNLIKNANDSYLRSEQSVIEGHPLHPGAKLRKGMNAEENFMYSSEFGNVIHLRAVFIHKSISRIQSSNVDYNVAVKQMFPDLIKTLEKEFGEDFNLQNYHLMMVHPWQIKHILQSDYRDELNEKLILISNHSVPYYAGLSFRTLVPKQPDLSPHIKLSTNVHITGEIRTLSEQTTYNGPLVTQILREIMSKDEDFSHYQSTYIDENAGIHFYNRNDNEAIQTDRSEQLGTLFRNNLYQFISNETVPVIPSSLVATYPYNTEAPICTLIKTYQNTYQYKNYEEAAKQWIKDYSKALLGLVIPLYSKYGISLEAHLQNSVATFNKDGSLNMIYIRDFEGLRIDNEQLNNAGFTTRHFHEKSRILTNSKTSVFNKMFYSTVQNHLGELVITIAKYSNSKVLEQEIWQIISQTVEDIFNHMTHISKQHLNNIKRTIFASEIDYKCVTTMRLEDQAHEYTYIKVHNPLHRKNDL

SEQ ID NO: 71141 - protein, 1009 aa, Staphylococcus epidermidis
MKPLHIVMENFGPFIKETIDFEQVETDQLFLISGKTGSGKTMIFDAIVYALYGMASTKTRKEGDLRSHFADGKSPMSVIYQFKVNNQTFKIHREAPFIKEGNITKTQAKLNIYELVDNQFELRESKVNQGNQFIVQLLGVNAEQFRQLFILPQGEFKKFLQSNSKDKQSILRTLFNSERFDEIRHLLVENVKQEKVQIENRYTQIENLWNDIDTFNNDELALYKELESSQTDKMIEKFPQFNDYGCKILKSFEEAKNKITKELDDLNHKYKVNVELSENTKKLKAEKIKFDDLKKEQNYIDKLKQELKMIQESKVLITYFTRLQSLKKDKDELVSLHEQSKLNETNYHNEIKGFQKQLEHLSTRENEITQFNQYLEKNQVFFNQLDKIISSYQQKPVIEEEIKRLYSEYNDLITKKEELTKEMNNKNKDFAIIEHYTEEIYKLKKIIDESERQKKDEKLFDKLQLDKSSYLSKLKEKKEQLNEIESSITNIDATLIDLNDKKDFVNEIKSAMSIGDTCPICGNEIHSLGEHIDFESIAQKNNKIKRLESKKVKIRDEIIKIETRIEELNHRENELNFEKQEKKDISELQKQLNHLNQLKDEQQSINKLVENFEKQEKEIVNKIHQFDLDLSRKNTQKEKLEIQINDFERHSQFSSVNDFETYYSHAKKQVETYEYENEKTKDKLNELNNKLKIEMNDQKHLTENLTQTSKEINNLELKMEKEMQQLGFESYDQVKSAADLSAQKDEIEREINIYNKNYQSYEIEINRLKELVKGKKLLNLEELRQSIEKTNLKLDETNSQIATISYKIDNNSNKFNKIKNIIQILDDELKVQKEIFLLSEILAGKNDYKLTLENYVLIYYLEKIIFQANQRLSFMSGNRYQLIRREAISLGLSGLEIDVFDFHSNKSRHISSLSGGETFQASLALALGLSEVVQQESGGITLDSMFIDEGFGTLDQETLETAIDTLINLKSSGRMVGIISHVSELKQRIPLILEVTSNQYESHTQFRKN

SEQ ID NO: 71142 - protein, 79 aa, Staphylococcus epidermidis
MADNNNQNGQDATQQFINILKSFKWRIIGFLAFLIIAILFLTLGFWKTILIIVLCLIGIGIGYIKDRTQDFLNFLNRWS

SEQ ID NO: 71143 - protein, 178 aa, Staphylococcus epidermidis
MKRLKNFILGLLIVAIVGFLLFMYIDDSRIQSYQDYFLQFNWFQPLLIGLAGLLILIGLILVLSIFKPTHRKPGLYKNFDDGHIYVSRKAVEKTIYDTIAKYDQVRQPNVVSKLYNKKNKSFIDIKADFFVPNHVQVKSLTESIRADIKSNVEHFTEIPVRKLEVNVRDQKTSGPRVL

SEQ ID NO: 71144 - protein, 336 aa, Staphylococcus epidermidis
MKAIGFKSSFQLDEGNCFEEFNFDIPHPSGHELLVKVQSISVNPVDTKQRTMPVDKAPRVLGFDAVGVIEKIGDQVSMFQEGDVVFYSGSPNQNGSNEEYQLIEEYLVAKAPTNLKSEQAASLPLTGLTAYETLFDVFGISKEPSENKGKSLLIINGAGGVGSIATQIAKFYGLKVITTASREDTIKWSVNMGADVVLNHKKDLSQQFKDNHIEGVDYIFCTFDTDMYYEMMVNLVKPRGHIATIVAFNSQQDLNLLKSKSVTFTHEFMFSRPLHHTDDVIKHHEYLKDITEKVEQGYYQPTTTKVIDGLDVDSLYEAHQILESHSMIGKLVINLK

SEQ ID NO: 71145 - protein, 334 aa, Staphylococcus epidermidis
MNNEQIVFNKVPDGMPQDDTFKYEDIDVIEPSENELQLKTLYISVDPYMRGRMTNADSYVDPFKQGEPFNGHTVSKVLKSKDSNFDEGDIVVGMLPWRKINTVNSEYVNKVPTSDVPLHLYLSVLGMPGQTAYHGLLDIGQPKEGETVVISAASGAVGSVVGQIAKLKGCRVVGIAGGDKKVNYLKNELRFDAGIDYKKDNFPEALKEAVPNGIDVYFENVGGYIGDEVFKHLNTHARIPVCGAISSYNHPEKDIGPRIQQTLIKNQAMMRGFIVAEFADGFKEASKQLAQWVQENKIKTQVSVEDGFDKVPQAFRNLLTGDNFGKQVIKVASE

SEQ ID NO: 71146 - protein, 329 aa, Staphylococcus epidermidis
MRLSLLDYVPLFEGRTPNDALKHSIKLAQHAEKLGYLRYWVAEHHQVYSVVSSAPEIIMMSILEHTQHIRVGSGGVMLPHYSPYKVAEQFKIMEARHPQRIDMAIGRSPSFKNVNAALNENKNEKLPFNTQITDLLKYFNNDTTQDHRFKSLLATPMVTSFPQLYILGMSNRSAKLAAQRGLPFVIARMGQSETDLHEAISTYRKYFKAYHGEINNAKPYVILATFVVTASNLSRVKQLLHTLQLWLMRINYLNQPKSYPSIETAQNKHYSQRELEKLEKMKSKIIYGMPNDVAEQLTLLHQQFKVDEIIILPHVFGEDARMELIELIA

SEQ ID NO: 71147 - protein, 202 aa, Staphylococcus epidermidis
MMIIVMLILSYLIGAFPSGLIIGKLFFKKDIRQYGSGNTGATNSFRVLGRPAGFIVTFLDIFKGFITVFFPLWFPVHADGVISTFFTNGLIVGLFAILGHVYPIYLKFNGGKAVATSAGVVLGVNPILLLILAIIFFSVLKIFKYVSLSSIIAAISCVIGSIIIHDYILLAVSGIVSIILIIRHKSNIVRIFKGEEPKIKWM

SEQ ID NO: 71148 - protein, 470 aa, Staphylococcus epidermidis
MTKKLPDDFIFGGATAAYQAEGATQTDGKGRVAWDTYLEENYWYTAEPASDFYNRYPVDLELSERFGVNGIRISIAWSRIFPKGYGEVNQKGVEYYHNLFKECHKRHVEPFVTLHHFDTPEVLHKDGDFLNRKTIDYFVDYAEFCFKEFPEVKYWTTFNEIGPIGDGQYLVGKFPPGIKYDFEKVFQSHHNMMVAHARAVKLFKDENYKGEIGVVHALPTKYPYDPSNPEDVRAAELEDIIHNKFILDATYLGKYSRETMEGVQHILSVNGGQLEISDEDYKILDEAKDLNDFLGINYYMSDWMRGFEGESEITHNATGDKGGSKYQLKGVGQREFDVDVPRTDWDWMIYPQGLYDQIMRVVKDYPNYHKIYITENGLGYKDVFDEKEKTVHDDARIDYIKQHLSVIADAIADGANVKGYFLWSLMDVFSWSNGYEKRYGLFYVDFETQERFPKKSAYWYKELAESKEIK

SEQ ID NO: 71149 - protein, 666 aa, Staphylococcus epidermidis
MAMNKQNNYSDDSIQVLEGLEAVRKRPGMYIGSTDKRGLHHLVYEVVDNSVDEVLNGYGDAITVTINQDGSISIEDNGRGMPTGIHASGKPTAEVIFTVLHAGGKFGQGGYKTSGGLHGVGASVVNALSEWLEVEIHRDGNIYTQNFKNGGIPATGLVKTGKTKKTGTKVTFKPDSEIFKSTTTFNFDILSERLQESAFLLKDLKITLTDLRSGKEREEIYHYEEGIKEFVSYVNEGKEVLHDVTTFAGHSNGIEVDVAFQYNDQYSESILSFVNNVRTKDGGTHEVGFKTAMTRVFNEYARRINELKDKDKNLDGNDIREGLTAIISVRIPEELLQFEGQTKSKLGTSEARSAVDSVVSEKLPYYLEEKGQLSKSLVKKAIKAQQAREAARKAREDARSGKKNKRKDTLLSGKLTPAQSKNTDKNELYLVEGDSAGGSAKLGRDRKFQAILPLRGKVINTEKARLEDIFKNEEINTIIHTIGAGVGTDFKIEDSNYNRIIIMTDADTDGAHIQVLLLTFFFKYMKPLVQAGRVFIALPPLYKLEKGKGKNKKVEYAWTDEELENLQKQLGKGFILQRYKGLGEMNPEQLWETTMNPETRTLIRVQVEDEVRSSKRVTTLMGDKVAPRREWIEKHVEFGMQEDQSILDNKEVQILENEKYIEEETN

SEQ ID NO: 71150 - protein, 582 aa, Staphylococcus epidermidis
MNKLIAWIEKGKPFFEKISRNIYLRAIRDGFIAAIPIILFSSIFILITYVPNVFGFTWSKTMEGILMKPYNYTMGIVGLLVAGTTAKSLTDSYNRKLDKTNQINFISTMMAAICGFLFLAADPVKDGGFSSAFMGTKGLLTAFISAFITVIVYNFFVKRNITIKMPKEVPPNISQVFKDIFPLSAVILILYALDLLSRAIVHTNVANAVLKVFEPLFTAADGWIGVTLIFGAFAFFWFVGIHGPSIVEPAIAAITYANLETNLHLIQAGEHADKVITPGTQMFVATMGGTGATLVVPFMFMWLTKSKRNKAIGRASVVPTFFGVNEPILFGAPLVLNPVFFIPFIFAPIVNIWIFKFFVDVLNMNSFSIFLPWTTPGPLGIVMGTGFAFWSFVLAILLIVVDVIIYYPFLKVYDEQVLEEELGNKEANNELKEKVSANFDTKKADAILATAGASEADTDDTSSVDETTSTSSTDTISEQTNVLVLCAGGGTSGLLANALNKAAEEYEVPVKAAAGGYGAHMDIMKDYQLIILAPQVASNFEDIKQDTDRLGIKLAKTEGAQYIKLTRDGEAALEFVKQQFNN

SEQ ID NO: 71151 - protein, 800 aa, Staphylococcus epidermidis
MSEIIQDLSLEDVIGDRFGRYSKYIIQERALPDVRDGLKPVQRRILFAMYSSGNTYDKNFRKSAKTVGDVIGQYHPHGDSSVYDAMVRLSQDWKLRHVLIEMHGNNGSIDNDPPAAMRYTEAKLSQLSEELLRDINKETVSFIPNYDDTTLEPMVLPARFPNLLINGSTGISSGYATDIPPHNLAEVIQGTLKYIDQPDITINQLMKYIKGPDFPTGGIIQGIEGIKKAYETGKGKVVVRSRVDEEPLRSGRKQLIVTEIPYEVNKSSLVKRIDELRADKKVDGIVEVRDETDRTGLRIAIELKKDANSESIKNYLYKNSDLQISYNFNMVAISEGRPKLMGLREIIESYLNHQIEVVTNRTRYDLEQAEKRMHIVEGLMKALSILDEVIALIRNSKNKKDAKDNLVAEYDFTEAQAEAIVMLQLYRLTNTDIEALKKEHEELEALIKELRNILDNHEALLAVIKDELNEIKKKFKVDRLSTIEAEISEIKIDKEVMVPSEEVILSLTQHGYIKRTSTRSFNASGVTEIGLKDGDRLLKHESVNTQDTVLVFTNKGRYLFIPVHKLADIRWKELGQHISQIVPIDEDEEVVNVYNEKDFKNEAFYIMATKNGMIKKSSASQFKTTRFNKPLINMKVKDKDELINVVRLESDQLITVLTHKGMSLTYSTNELSDTGLRAAGVKSINLKDEDYVVMTEDVNDSDSIIMVTQRGAMKRIDFNVLQEAKRAQRGITLLKELKKKPHRIVAGAVVKENHTKYIVFSQHHEEYGNIDDVHLSEQYTNGSFIIDTDDFGEVESMILE

SEQ ID NO: 71152 - protein, 104 aa, Staphylococcus epidermidis
MNRDEVQLLGFEIVAYAGDARSKLLEALNAAKDSEFDKAEQLVEEANECIANAHKAQTNLLAQEAKGEDIAYSITMIHGQDHLMTTLLLKDLMKHLIELYKKGS

SEQ ID NO: 71153 - protein, 325 aa, Staphylococcus epidermidis
MTKSQQKVSSIEKLSNQEGIISALAFDQRGALKRMMAEHQSETPTVEQIEQLKVLVSEELTQYASSILLDPEYGLPASDARNNDCGLLLAYEKTGYDVNAKGRLPDCLVEWSAKRLKEQGANAVKFLLYYDVDDTEEINIQKKAYIERIGSECVAEDIPFFLEVLTYDDNIPDNKSAEFAKVKPRKVNEAMKLFSEDRFNVDVLKVEVPVNMNFVEGFSEGEVVYTKEEAAQHFRDQDAATHLPYIYLSAGVSAELFQDTLKFAHDSGAQFNGVLCGRATWSGAVKVYIEEGEQAAREWLRTVGFKNIDDLNTVLKTTATSWKNK

SEQ ID NO: 71154 - protein, 171 aa, Staphylococcus epidermidis
MKIAIGCDHIVTDTKMEVSQHLKSQGHEVIDVGTYDFTRTHYPIYGKKVGEKVASGEADLGVCICGTGVGISNAANKVPGVRTALVRDMTSALYSKEELNANVVSFGGKVAGELFIFDIVDAFIEAEYKPTEENKKLIAKINHLEAHNNDQADPHFFDEFLEKWNKGEYHD

SEQ ID NO: 71155 - protein, 142 aa, Staphylococcus epidermidis
MTIIIGSDVDGKRLKELIKDYLEDNDYDVLDVTEGKDLDFVDSTVSVAKEVQKSDDNLGIAIDAYGAGSFIVATKIKGMIAAEVSDERSAYMTRSHNNARMITMGAEIVGDTLAKNVAKEFVNGHYDGGRHQIRVDMLNKMC

SEQ ID NO: 71156 - protein, 329 aa, Staphylococcus epidermidis
MTEQKDIKETEYRRQKGTTSTPSRRRNKKRMRKLPFIILVILIILISIIVYITHQYNSGMKYAKEHAKDVKVHKFNGNMKNDGKISVLVLGADKAQGGKSRTDSIMIVQYDYVHKKMKMMSVMRDIYADIPGYDKYKINAAYSLGGPELLRKTLNKNLGVNPEYYAVVDFTGFEKMIDELQPNGVPIDVEKDMSENIGVSLKKGHHKLNGKELLGYARFRHDPEGDFGRVRRQQQVMQTLKQELVNFNTVAKLPKVAGILRGYVNTNMPNSAIFQTGISFGIRGDKDVQSLTVPIKGSYQDINTNNDGSALQIDSEKNKQAIKNFFEDN

SEQ ID NO: 71157 - protein, 130 aa, Staphylococcus epidermidis
MAQVEYKGTGRRKNSVARVRLVPGEGNITVNERDVRDYLPFESLILDLNQPFDVTETKGNYDVLVNVHGGGFTGQAQAIRHGIARALLEADPEYRGSLKRAGLLTRDPRMKERKKPGLKKARRSPQFSKR

SEQ ID NO: 71158 - protein, 145 aa, Staphylococcus epidermidis
MRQTFMANESNIERKWYVIDAEGQTLGRLSSEVAAILRGKNKVTYTPHVDTGDYVIIINASKIEFTGNKEQDKMYYRHSNHPGGLKSISAGELKRTNPERLLETSIKGMLPSTRLGEKQGKKLFVYGGAEHPHAAQQPENYELRG

SEQ ID NO: 71159 - protein, 267 aa, Staphylococcus epidermidis
MRILVEIAYQGNQFLGFQIQQQGRTVQQQFEKILKRMHKHHVRIHPSSRTDRGVHAYQQFFHFDTELNIDNKQWQYAMNRALPDDIYVKNVRNVDEYFHCRYDCVGKRYRYKVYQGNHRNPFKSGTETFVNETLDYDKMNKAAQEFIGTHDFTGFCSQKTEVESKVRTLYQSEIVATKEGFDYVVTGSGFLYNMVRVLVAFLIEVGKGKREPNDVPKLLEDKNRNNVPLTAPPDGLYLEKIYLSPEELIQEYGKDVKIHYKKSLEKH

SEQ ID NO: 71160 - protein, 268 aa, Staphylococcus epidermidis
MKNKLIIGRYLPMQSIIHQLDPRAKLIFVFFFILLIFFCHSLGTYAWLFLFIILFIKLARIPFWFLIKGLTPIFFFLVFTFSMHVLFTNGGIVLFQWKFITIESNGVMEGIYISLRLIFIVMIATIMTLSTSPIDLTDAFEKLFVPLKVIKVPVHQLSMMMSIALRFIPTLMDELEKIILAQKSRGSEISSGSLITRIRAFIPIMIPLFISAFQRAEELAIAMEVRGYDINIKRTSYRLLHWQYKDTLTVLLLIPIATILFILKFSGV

SEQ ID NO: 71161 - protein, 286 aa, Staphylococcus epidermidis
MSIQFNQVSYIYQQGTPYEFEAIKNVSLTLEQGKYYAIIGQTGSGKSTLIQHLNALLKPTTGSVNINGLEVTNKTKDKHLRHIRKEVGIVFQFPESQLFEDSVEKEIEFGPKNFNMNLKNVKDKAFQLLLELGFSRNVMSSSPFQMSGGQMRKIAIVSILAMDPQVIILDEPTAGLDPNSKHQVMSLIKKIQIEENKTIILVSHDMDDVARYSDEVVVMNKGTIVEKSNPRNLFNQKTQLLKWHIELPKVVKLQKDIEKKYNMLFPKLAMNEEEFVKLYKEWHHEE

SEQ ID NO: 71162 - protein, 269 aa, Staphylococcus epidermidis
MNGSNPIIEFKDVSFQYQSDAAFTLNRVSFSIPAGQWTSIVGHNGSGKSTIAKLMVGIEEPSEGQILFQNLPVDSQNKREVRKHIGIVFQNPDNQFVGSIVKFDVAFGLENQLVPYKEMVSKVNQVLTEVDMINKADDEPHSLSGGQKQRVAIAGVLALNPDVLILDEATTMLDPHGKSSLLNLVNEVKVNNHVTIISITHDLDEAMHADQIIVLNKGTVFKQGTPQDIFKCEEALISVGLDLPFPLKMNRLLGFDSTYVTYEGLIKKL

SEQ ID NO: 71163 - protein, 122 aa, Staphylococcus epidermidis
MGYRKLGRTSDQRKAMLRDLATSLIVSERIETTEARAKEVRSVVEKLITLGKKGDLASRRNAAKTLRNVEILNEDDSTQTALQKLFGEIAERYSERQGGYTRILKVGPRRGDGAESVIIELV

SEQ ID NO: 71164 - protein, 314 aa, Staphylococcus epidermidis
MIEIEKPRIETIEVSEDAKFGKFVVEPLERGYGTTLGNSLRRILLSSLPGAAVKYIEIEGVLHEFSAVDNVVEDVSTIIMNIKKLALKIYSEEDKTLEIDVKDEGEVTASDITHDSDVEILNPELKIATVSKGGHLKVRLVANKGRGYALAEQNNTSDLPIGVIPVDSLYSPVERVNYTVENTRVGQSSDFDKLTLDVWTNGSITPQESVSLAAKIMTEHLNIFVSLTDEAQNAEIMIEKEEDQKEKVLEMSIEELDLSVRSYNCLKRAGINSVQELADKSEADMMKVRNLGRKSLEEVKYKLEDLGLGLRKED

SEQ ID NO: 71165 - protein, 331 aa, Staphylococcus epidermidis
MTLLEKIKQNKSLSKKDMQSFIVTLFDSNIETNVKVELLKAYTNKDMGQYELTYLVEYFIQTNYPNQPFYNKAMCVCGTGGDQSNSFNISTTVAFVVASAGVPVIKHGNKSITSHSGSTDVLHEMNIKTNKMNEVEQQLNLKGLAFISATDSYPMMKKLQSIRKSIATPTIFNLIGPLINPFKLTYQVMGVYEASQLENIAQTLKDLGRKRAILIHGANGMDEATLSGENIIYEVSSERALKKYSLKAEEVGLAYANNDTLIGGSPQTNKQIALNILSGTDHSSKRDVVLLNAGIALYVAEQVESIKHGVERAKYLIDTGMAMKQYLKMGG

SEQ ID NO: 71166 - protein, 262 aa, Staphylococcus epidermidis
MTILNEIIEYKKTLLERKYYDKKLEILQDNGNVKRRKLIDSLNYDRTLSVIAEIKSKSPSVPQLPQRDLVQQVKDYQKYGANAISILTDEKYFGGSFERLNQLSKITSLPVLCKDFIIDKIQIDVAKRAGASIILLIVNILSDDQLKELYSYATNHNLEALVEVHTIRELERAHQINPKIIGVNNRDLKRFETDVLHTNKLLKFKKSNCCYISESGIHTKEDVEKIVDSSIDGLLVGEALMKTNDLSQFLPSLKLKKNLYDS

SEQ ID NO: 71167 - protein, 402 aa, Staphylococcus epidermidis
MKIQTEVDELGFFGEYGGQYVPETLMPAIIELKKAYEDAKSDTHFKKEFNYYLSEYVGRETPLTFAESYTKLLGGAKIYLKREDLNHTGAHKINNAIGQALLAKRMGKTKLVAETGAGQHGVASATIAALFDMDLIVFMGSEDIKRQQLNVFRMELLGAKVVSVSDGQGTLSDAVNKALQYWVNHVEDTHYLLGSALGPDPFPTMVRDFQSVIGNEIKSQILSKEGRLPDALVACVGGGSNSIGTFYPFIQDDVKLYGVEAAGKGSHTHNHALAIGKGKPGVLHGSKMYLIQNDDGQIELAHSISAGLDYPGIGPEHSYYNDIGRVSYVSATDNEAMEALITFSKVEGIIPAIESAHALSYVEKLAPNMDEKEIIVVTISGRGDKDMETIKQYKENGGEQNE

SEQ ID NO: 71168 - protein, 223 aa, Staphylococcus epidermidis
MYIFMSKKVLFVLTSTSQFTDGTETGLWLEEAGAPYNILTEEGINVDVISIKGGKVNLDPNSVSNESLNQYAKFVSHLNDTPSIENVNADEYDAIYLPGGHGTVYDFANNEKLADILLQFKNSNKIISSVCHGPSVFVGVKDANNHYLVDGVKITSFTDSEEKAMGFENKVPFLTQSKLEEQGANFVVKDDFTSHVEKDGQFITGQNPQSSEDIGKALANELK

SEQ ID NO: 71169 - protein, 417 aa, Staphylococcus epidermidis
MKFTELTVKEFENFVQNPSLESHYFQVKENIATRESDGFQVVLLGVKDDDNRVIAASLFSKIPTMGSYVYYSNRGPVMDYSDLGLVDFYLKELDKYLHQHQCLYVKLDPYWLYQVYDKDINPLTEKNDALVNLFKSHGYDHHGFTTQYDSSSQVRWMGVLDLEGKTPASLRKEFDSQRKRNINKAINYGVKVRFLSKDEFDLFLDLYRETEARTGFASKTDDYFYNFIEHYGDKVLVPLAYIDLNEYIQHLQESLNDKENRRDDMMAKENKTDKQLKKIAELDKQIDHDKKELLQASELRQTDGEILNLASGVYFANAYEVNYFSGGSSEKYNQYMGPYAMHWHMINYCFDNGYDRYNFYGLSGDFTENSEDYGVYRFKRGFNVRIEELIGDFYKPINKVKYWLFNTLDRIRNKLKK

SEQ ID NO: 71170 - protein, 490 aa, Staphylococcus epidermidis
MYKLLQHLGRSLMLPVAVLPAAAIIVGIGHVLDALNILPQAALFFTSVGTTILEQLGILFAIGVAIGMAKKNDGAVALAAALGFFIVTVVLSPEKLATLLQIKESKIDLAFSQMNNGNVFVGIIIGLIAAYSYNKFSETNLPMALSFFSGKRLVPIMTAFFCTILAIILLLIWPPVYNGIVTFGKWIVGMGPFGALLYGFFNRLLIPTGLHHALNNVFWFDTAGINDIGKFQSGKNAIKGITGRYQAGFFPVMMFGVPAAALAMYHTAKTNQKKQVYAWFLASSVSAFFVGVTEPIEFAFMFVAPVLFVIHAVLTGLSLFIAAMFHWTAGFSFSAGLIDYVLSLVNPISNQPWMLLLQGVVFFIIYYVIFRVVIQVFNLSTIGRGDNELIDPTSNDTSEMEVLQNKTTTSKYYQNAKRILDGLGGKENIISLNHCATRLRLELKDNSIIDEQKIKNAGAIGITQNGHHYTQVIIGTHVQQVANEMDHQMN

SEQ ID NO: 71171 - protein, 207 aa, Staphylococcus epidermidis
MYNFISKILDVILVKMSKSLYVIGKENIPKDSKYVVTCTHESYNEVIMLGMALLPNQIHYMAKKELFKNQWAGKFLKSLNAFPVDRENPGPSTLKKPVNLLKEHKTIGIFPTGHRTSVEGAPLKRGAATIAMLGKAPILPAAYVGPKKIHGLITGQALIKIGKPIEMDDIPKDLKRNEKVDFLTKEIERRTTQLQKELNEISHSLKK

SEQ ID NO: 71172 - protein, 412 aa, Staphylococcus epidermidis
MSEQEKNQHHYRNSSQKRHTFPWIKTIIVAIIAGIIGALLVLGIGKLLNKNGFNNESATVHQVSNSHGGNQLDGKSNQYKSVHDMIKDVSPAIVGVINMQKSTNLDDLFNGKASKSKEAGIGSGVIYQISEGSAYIVTNNHVVDGASEIKVQLHNSKQVDAKLIGKDALTDIAVLKIKDTKGIKAIQFANSSKVQTGDSVFAMGNPLGLEFANSVTSGIISASERTIDANTSAGNTKVNVLQTDAAINPGNSGGALVDINGNLVGINSMKIAAAQVEGIGFAIPSNEVRVTIEQLVKHGKIERPSIGIGLINLSDIPENYRKELHTHKDKGVYVAKVDSENAIKKGDIITGIDGKQIKDDTDLRTYLYESKKPGETVTLKVIRDGKTQDINVKLKKQASASESSQSQSQFAQ

SEQ ID NO: 71173 - protein, 421 aa, Staphylococcus epidermidis
MANALIEDLKWRGLIYQQTDEEGIEELLNKEQVTLYCGADPTADSLHIGHLLPFLTLRRFQEHGHRPIVLIGGGTGMIGDPSGKSEERVLQTESQVEANVKGLSNQMHRLFEFGSDKGAKLVNNKDWLGQISLISFLRDYGKHVGVNYMLGKDSIQTRLEHGISYTEFTYTILQAIDFGYLNRELNCKIQVGGSDQWGNITSGIELMRRMYGQTEAYGLTIPLVTKSDGKKFGKSESGAVWLDPEKTSPYEFYQFWINQSDEDVIKFLKYFTFLEKEEINRLEQSKNEAPHLREAQKALAENVTKFIHGEAALKDAIRISKALFSGDLKSLSAKELKEGFKDVPQVTLSTKTTNIVEALIETGIASSKRQAREDVNNGAIYINGERQQSVDYELSSKDLIEDEITIIRRGKKKYFMVNYQS

SEQ ID NO: 71174 - protein, 363 aa, Staphylococcus epidermidis
MTNKLEQYREEIVSLNDQILELLSKRGELAQKIGEEKIKQGTRVYDPQREKEMINQLLDKNKGPFNDNVIKQLFKEIFKASTDLQKSENEKHLYVSRKLKPEDTIVKFDNGGIIGDGNKSFVFGPCSVESQEQVDAVAQDLQAKGEKFIRGGAFKPRTSPYDFQGLGVEGLKILKNVKDKYNLNVVSEIVNPNDFEIASDYLDVFQIGARNMQNFELLKEAGRTDKPILLKRGLSATIEEFIYAAEYIASQGNRNIILCERGIRTYEKATRNTLDISAVPILKQGTHLPVMVDVTHSTGRKDIMLPTAKAALAVGADGVMAEVHPDPSVALSDAGQQMDLNEFNQFYHELKPLADMYNSKKLK

SEQ ID NO: 71175 - protein, 291 aa, Staphylococcus epidermidis
MVNSQVADKEKLDAQTNNQDSVATIVTTENNKKYTIPDSEKKIVYSTQNLDLWYGENHALQNINLDILENNVTAIIGPSGCGKSTYIKALNRMVELVPSVKTAGKILYRDQNIFDAKYSKEKLRTNVGMVFQQPNPFPKSIYDNITYGPKTHGIKNKKILDEIVEKSLRGAAIWDELKDRLHTNAYGLSGGQQQRVCIARCLAIEPDVILMDEPTSALDPISTLRVEELVQELKENYSIIMVTHNMQQAARVSDKTAFFLNGYVNEYDDTDKIFSNPADKQTEDYISGRFG

SEQ ID NO: 71176 - protein, 308 aa, Staphylococcus epidermidis
MASQTKVREMIAKNNAKKGGLSDKIVPIILAIISAISILTTIAILFTLLTETITFFTRVPLSKFFLSGTWNPTGSSPEFGIWALIIGTLKITVIATIVAVPIGLGAAIYLNEYASDRSRRIIKPILEILAGIPTIVFGFFALTFVTPILRNLIPNLGEFNSISPGIVVGIMIVPMITSMSEDAMSSVPDKIREGAFGLGATKFEVATKVVLPAATSGVVASIVLGISRAIGETMIVSLAAGSSPTSSLSLTSSIQTMTGYIVEIATGDAAFGSDIYYSIYAVGFTLFIFTLIMNLLSQWISKRFREEY

SEQ ID NO: 71177 - protein, 407 aa, Staphylococcus epidermidis
MEHYNRDNFEKSHTSEELYHRTSRSQSNSLKRKDFVVSFIASAIVGSAVGLYYKNKIYKKTDELKEKEQDLRSKVENYRQRAEDTVVSVKSKVEQLKYDSKDNIHADELQAQKAAIQRETDLADESPEAQAIQEAKKETKQVDDVRPSATELAAQQNAIQHETDLADESPEAQAIQEAKSEVDSNNKTSTTHIDSEKEPSAEEIAIAQTAVKEEARNHDLANPSASGEDTKSKSETETEKLAAAAKAKKDRINNNNEVASNTKNLMQEEAIKASNNSDVPNLVTNLNQSQASDTNSVAYRLAQAAKEKRSKLTNGSKETQLTEALLKEPSIAKAQTKLKRIPTLITESKKHSNNPHSQKNSNQTKNITATKEDSKGKQQHTPNQNKRNKQQKVEKTSSKIEKRTFND

SEQ ID NO: 71178 - protein, 437 aa, Staphylococcus epidermidis
MTHYHFVGIKGSGMSSLAQIMHDLGHEVQGSDIESYVFTEVALRNKGIKILPFDANNITKEMVVIQGNAFPDNHEEIVRAHELKLDIIKYHDFLGHVINQYTSVAVTGAHGKTSTTGLLSHVMNGDKKTSFLIGDGTGMGLPGSDYFAFEACEYRRHFLSYHPDYAIMTNIDFDHPDYFKNIDDVYDAFQHMALNVKKGIIAWGDDEYLRKLDVDIPVYYYGFKETDDIYAKNIQITEKGTQFDVYIKGEFYDQFLSPQYGNHNILNALAVIAISYLEDMNVENIKEALITFGGVKRRFNETKVSNQVIVDDYAHHPREISATIETARKKYPQKDVVAVFQPHTFSRTQAFLNEFAESLSKADQVFLCEIFGSIRENTGDLTIEDLINRIDGSTLIDENSIDVLEKFDNAVILFMGAGDIQKLLKAYFEKLGVKNDF

SEQ ID NO: 71179 - protein, 1169 aa, Staphylococcus epidermidis
MSWFDKLFGDDNGSNDDLLRKNKNRRQSQQSKQNNQDSLLPQNNDIYSRPRGKFRFPIQVSENEYTQKNENYNEHNQEETNDIMRSYNQHDNPEFDSSGKRHRRRRQAYSKHDQSKITQQKQFADNNYTNNNSVFNQNDNKKSSQQRKSIQSENIKNKANTKNTSTSPEFTYLNHSFKSSEVPSAIFGTKKRRPIENGVIPPEHKELNDKEIVQQDEVSHSTKSIDASKNVSNSNDNNIEKNQQKKQQTTAQTESSSENMHNVEKSNYQTTKRKTPNYSKVDNTINIENIYASQIVEEIRRERERKVLQKRRFKKALQQKRQQNQQSEEDSIQKAIDEMYAKQAQHYTGESSLDLENESNQDSSSNSLEKQSNSSNIDNKEAQNNTPLFNYEEIDLDTTSDVYKVNEEETESKNDEDLVSSNHYHSNDDAEVEDAEYHELDDNRQQNQSNSQDDIISSKSSTSNMYDNAISASVDNNTERAKSNEDKNDTEITHLDGTTSAKVSDEKIESNTNNHLEQDKNVKLKNVNSLKSSNSDTGQTRKQRFGGSRPFNVLMTPSDKKRMMDQNHKKVSVPELKPEKQANANHRKDSESNKSEEFKQINTNRETDSNSYESNGIEHDMNSSSDEHVYETPSKQQDEQIQKLQDDFHFENANHAKINNSNETGNQSNISHSKRSQYSTNESKNIDTQTSNSSTSNQNFQRIRKGPNIKLPSYQLLEAPEPHEKDQDWIDNKKQELNDALYYFNVPAEVKNVTEGPSVTRFELSVEKGVKVSRITALQDDIKMALAAKDIRIEAPIPGTSLVGIEVPNQNPTKVNLRSIIESPKFKNTESKLTVAMGYRINNEPLLMDIAKTPHALIAGATGSGKSVCINSILMSLLYKNHPEELRLLLIDPKMVELAPYNDLPHLVSPVITDVKAATQSLKWAVEEMEKRYKLFAQYHVRNITAFNKKAPYEQRMPKIVIVIDELADLMMMAPQDVEQSIARIAQKARACGIHMLVATQRPSVNVITGLIKANIPTRIAFMVSSSVDSRTILDSGGAERLLGYGDMLYLGSGMNKPIRVQGTFVSDDEIDEVVDFIKQQRDPEYLFEEKELLKKTQTQAQDDLFDDVCEFMVEEGHISTSLIQRHFQIGYNRAARIIDQLEQLGYISGANGSKPRDVYITEADLSKE

SEQ ID NO: 71180 - protein, 198 aa, Staphylococcus epidermidis
MNLFYNPKGVGDVAFIQIEPSVGPFEYEQKHGVVEIKKENEVVGYNIFNVSNNVTINDNGHIKLTTELIKDLQQLITEAGFDYQLDTDVSPKFVVGYVETKEKHPNADKLSVLNVNVGTEKLQIVCGAPNVESGQKVVVAKVGAVMPSGMVIKDAQLRGVDSSGMICSMKELNLPNAPKEKGIMVLNDDYDIGQAFFE

SEQ ID NO: 71181 - protein, 535 aa, Staphylococcus epidermidis
MLQVTDVSLRFGDRKLFEDVNIKFTEGNCYGLIGANGAGKSTFLKILSGEIDSQTGHVSLGKDERLAVLKQDHFAYEDERVLDVVIKGHERLYQVMKEKDEIYMKPDFNDEDGIRAAELEGEFAEMNGWNAEADAANLLSGLGIEPDLHDKNMSELENNQKVKVLLAQSLFGDPDVLLLDEPTNGLDIPAISWLEDFLINFENTVIVVSHDRHFLNNVCTHIADLDFGKIKLYVGNYDFWYQSSQLAQKMAQEQNKKKEEKMKELQDFIARFSANASKSKQATSRKKQLEKIELDDIQPSSRRYPYVKFTPEREIGNDLLTVENLSKTIDGEKVLDNVSFTMNPNDKAILVGDSEIAKTTLLKILAGEMEPDEGTFKWGVTTSLSYFPKDNSEFFDDVDMNLVEWLRQYAPEDEQTETFLRGFLGRMLFSGEEVKKKASVLSGGEKVRCMLSKMMLSSANVLLLDEPTNHLDLESITAVNDGLKSFKGSIIFTSYDFEFINTIANRVIDLNQAGALSKEVPYEEYLQEIGVLQNN

SEQ ID NO: 71182 - protein, 329 aa, Staphylococcus epidermidis
MTRLAVAGATGLVGTKMLETLDRKQIPFDELVLFSSARSAGKKVEFQGQSYTVQELTDEAASEHFDYVLMSAGGSTSEHFAPLFEAAGAIVIDNSSQWRMAEDVDLIVPEVNEPQFTRGIIANPNCSTIQSVVPLKILQDAYGLKRVAYTTYQAVSGSGVKGKRDLTEGANGKKPEAYPYPIYNNVLPHIDVFLENGYTKEEQKMIDETKKILNDQNLKVTATCVRVPVQDSHSIEIDVTLNQDTTVKEIQELFAQDQRVVLVDNPSKNEYPLAIHSTGKDEVFIGRIRRDDSLENTFHVWCTSDNLLKGAALNAVQVLEQILTLKGAR

SEQ ID NO: 71183 - protein, 240 aa, Staphylococcus epidermidis
MNILLIGYGAMNQKVARLAEDKGHEIVGVIDRTPKSSTPYSQYKHISECKEADVAIDFSNPELLFPLLEEQFNLPLVIATTGEKETLIQKLETLSQRTPVFFSANMSYGVHALTKILETAVPLLEDFDIELTEAHHNKKVDAPSGTLVKLYDVIKELRDNISPVYDRHEKTEKRTHDEIGIHAVRGGTIVGEHDILFAGTDETITISHRAQSKDIFANGAIGAAEKLIHKNPGFYTFNNL

SEQ ID NO: 71184 - protein, 240 aa, Staphylococcus epidermidis
MVQHLSAQEIIQYISDAKKSTPLKVYVNGHFENVTFPESFKVFGSEHSKVIFCEADEWKQFYQKNHSLITELEIEMDRRNSAIPLKDLTNTNARIEPGAFIREQAIIEDGAVVMMGATINIGAIVGEGTMIDMNATLGGRATTGKNVHVGAGAVLAGVIEPPSASPVVIEDNVLIGANAVILEGVRVGAGAIVAAGAIVTQDVPAGAVVAGTPAKVIKQTSEVQDSKREIVSALRKLNNE

SEQ ID NO: 71185 - protein, 263 aa, Staphylococcus epidermidis
MEQFYQLGWTLDSAGGASGEAYMAEQDGQKLFLKRNSNPFIAALSAEGIVPKLVWTKRIETGEVVTAQHWKNGRELNEDEMNQTRVAELLHKIHGSRPLLTMLKRMEMEPITPDIMLNKINASLSREVLTHHVVRRALTYLEDHIPNLDARFFTVVHGDVNHNNWLLSDRDELYLVDWEGAMIADPAIDIGMLLYNYVPQNKWSQWFKTYGVEESVNLNKRMKWYTVIQAIGLIQWYEEQKRYRDMNTWLKFLNEVMNSNLFI

SEQ ID NO: 71186 - protein, 469 aa, Staphylococcus epidermidis
MWKEKVLEYENQMIEDLKGLLSIESIRDDSKATADAPVGPGPREALDYMYNLGKRDGFSTHDVDHIAGRIEAGKGEDVLGILCHVDVVPAGDGWDSNPFQPVVTDNAIIARGTLDDKGPTIAAYYAVKILNEMKVDWKKRIHIIIGTDEESDWKCTDRYFKTEEMPALGFAPDAEFPAIHGEKGITTFDLVQNEVTEDTDEPDYELLKFESGQRYNMVPDYAKAEVLVKENMTDVIQNFENFLQQNQLQGESTVDSGILILTIEGKAVHGMDPSLGVNAGLFLLKFLASLNLNKSAKDFVEFNERYLFESHFGEKMGMKFHTDIMGDVTTNIGVISYDKEKAGRYGINLRYPEGFKFEDAIDRFRSEINELGFNLELGKVQKPHYVDKNDPFVKTLVNAYRNQTGDMTEPYTIGGGTYARNLDKGVAFGAMFADSEDLMHQKNEYITKKQLINATSIYLEAIYALCVED

SEQ ID NO: 71187 - protein, 230 aa, Staphylococcus epidermidis
MRLDKFLANMGVGTRSEVKQLLKKGSVKVNQNIVKLPKLHVNPNSDEIMVNDEVVSYIDKVYIMLNKPKGYISATEDELHPTIIDLIPEYAHLNIFPVGRLDKDTEGLLLVTNDGQFNHEVMNPNKHVSKTYEVYSKHPITQFDIDKFKSGIELSDGKLKPAILKKVDDYVSHVTIYEGKYHQVKRMFHSIENEVLELKRIKIAQLELDHNLDLGSYRLLTQIDFDNLKN

SEQ ID NO: 71188 - protein, 553 aa, Staphylococcus epidermidis
MSESKEMVRGTFLITISILITKVLGVLFIIPFTALIGGQANMAPFTYAYAPYNIAIAIATAGVPLAASKYVAKYNALGAYKVSQKFYKSSFVVMSITGIVGFLVLYLLAPYIAELTLSRNTHGNSGWTVADITWIIRIISMVVIFIPVLATWRGIFQGYKSMGPTAVSEVTEQIARIVFILVGSYLTLNVFGGTVLQANGIATFAAAIGAIAGILTLWYYWIKRRKNIKKMVDSDTANLNVSYGKMYKEIIAYSIPFVIVSLNFPLFNLVDQFTHNGALNLVGVKPGLQDIFFNMLNMSTNKIVMIPTSLSAGFAVSLIPFITKTYEEGRYAEMHRQIRTSIGVLMFITVPASIGIMALAQPLFTVFYGFDPVVHGHDPNFDGSRLLFYYAPVAILISLLSVTASMLQGIDKQKLTVFIILGSVLIKLILNYPLIMLLHTPGAVLSTAIALLFAICCNFYILKKYANFKFSYSWIHLAKIILISIIMMIGVEVIFFILRLFLEPTRFNYLIIVAIGVIVGAIIYGGITIKTKLADEFLGDIPAKIRRKVKMLR

SEQ ID NO: 71189 - protein, 425 aa, Staphylococcus epidermidis
MEVIIMYQTIVIGGGPSGAMAAVAASEKNKSVLLIEKKKGLGRKLKISGGGRCNVTNRLPYDEIIKNIPGNGKFLYSPFSVFDNLSIINFFETRGVKLKEEDHGRMFPVSNKSQDVVDVLINQLKENHVEVKEETPVVSVSYDHNFKVKTQIGEFESHSLIIATGGTSVPQTGSTGDGYKFAKSLGHSITELFPTEVPITSSETFIKSNRLKGLSLKDVNLSVLKKNGKKRVSHQMDMIFTHFGISGPAALRCSQFVYKEQKNQKKKNIHMQLDVFPELNVDQLSQKVRKILNAEPDKYIKNSLRGLIEERYLLFILEQSGINDEMTAHHLSNQQFQTFINLLKTFTFTVDGTLPLDKAFVTGGGISLKEIEPKTMMSKLVPGLFLCGEVLDIHGYTGGYNITSALVTGHVAGMFAGEFKIDQNK

SEQ ID NO: 71190 - protein, 804 aa, Staphylococcus epidermidis
MNYNHKEIEKKWQNYWEENKTFKTNDNLGQKKFYALDMFPYPSGAGLHVGHPEGYTATDIISRYKRMQGYNVLHPMGWDAFGLPAEQYALDTGNDPREFTQKNIQTFKRQIQELGFSYDWDREVNTTDPEYYKWTQWIFIQLYNKGLAYVDEVAVNWCPALGTVLSNEEVVDGVSERGGHPVYRKPMKQWVLKITEYADRLLEDLDELDWPESIKDMQRNWIGRSEGAKVTFKIEQSDQNIEVFTTRPDTIYGTSFLVLSPEHPLVNEITTSDKEQEVKLYQNEASKKSDLERTDLAKEKTGVFTGTFAINPLSGDKLPIWIADYVLSTYGTGAVMAVPGHDERDHEFATKFNLPIIEVIEGGEVQKYAYTGEGKHINSGELDGLENEAAISKAIELLESKGAGEKKVNYKLRDWLFSRQRYWGEPIPIIHWEDGSMTTVPEDELPLLLPETDEIKPSGTGESPLANIDAFVNVIDEKTGMKGRRETNTMPQWAGSCWYYLRYIDPHNEKMIADPEKLKHWLPVDLYIGGVEHAVLHLLYARFWHKVLYDLGVVPTKEPFQKLYNQGMILGEGNEKMSKSKGNVINPDDIVASHGADTLRLYEMFMGPLDAAIAWSEKGLDGSRRFLDRVWRLIITDENSINKKIVDSNNHSLDKVYNQTVKKVTEDFDTLSFNTAISQLMVFINECYKTNEVYKPYIEGFVKMLSPIAPHIGEELWDRLGHENTITYQPWPTFDESLLVDDEVEIVVQVNGKVRAKINIPKDLSKEEMQDLALSNDNVKMSIEGKEVKKVIAVPQKLVNIVAK

SEQ ID NO: 71191 - protein, 412 aa, Staphylococcus epidermidis
MHVFNFLLFYPIFMSIYWIVGSIYYFFIKEKPFNRSLLVKSEHQQVEGISFLLACYNESETVQDTLSSVLSLEYPEKEIIIINDGSSDNTAEIIYDFKKNHDFKFVDLEVNRGKANALNEGIKQASYEYVMCLDADTVIDDDAPFYMIEDFKKNPKLGAVTGNPRIRNKSSILGKIQTIEYASIIGCIKRSQSLAGAINTISGVFTLFKKSALKDVGYWDTDMITEDIAVSWKLHLFDYEIKYEPRALCWMLVPETIGGLWKQRVRWAQGGHEVLLRDFWPTIKTKKLSLYILMFEQIASITWVYIVLCYLSFLVITANILDYTYLKYSFSIFFFSSFTMTFINIIQFTVALFIDSRYEKKNIVGLIFLSWYPTLYWVINAAVVIMAFPKALKRKKGGYATWSSPDRGNIQR

SEQ ID NO: 71192 - protein, 153 aa, Staphylococcus epidermidis
MNFEGKLVGKDLKIAIVVSRFNDFITTRLLEGAKDTLIRHEVEDTNIDVAYVPGAFEIPLVAKKLAQKGEYDAVITLGCVIRGATSHYDYVCNEVAKGVSKANDISDTPVIFGVLTTESIEQAVERAGTKAGNKGSEAAVSAIEMANLIKQIN

SEQ ID NO: 71193 - protein, 393 aa, Staphylococcus epidermidis
MQFDTIELAIEALRNGESIIVVDDEDRENEGDLVAVTEWMDDNTINFMAREGRGLICAPIDKSIAERLKLQSMEQNNTDIYGTHFTVSIDHYKTTTGISAHERTQTARALIDENTNPEDFHRPGHLFPLIAKENGVLTRNGHTEAAVDLARLTGAQPAGVICEIMNDDGTMAKGEDLQSFKERHHLKMITIKSLVAFRKAVELNVNLKAKVKMPTDFGHFDMYGFTTNYSDEEIVAIVKGDLKSNPNVRMHSACLTGDIFHSQRCDCGAQLEASMKYIDEHGGMIIYLPQEGRGIGLINKLRAYELIEKGYDTVTANLALGFDEDLRDYHVAAEILKYFDISEINLLSNNPKKFEGLEDYGIEIVDRIELIVPETQYNHSYMETKKNKMGHLI

SEQ ID NO: 71194 - protein, 210 aa, Staphylococcus epidermidis
MFTGIIEEIGTVQQVRSEQSVRTLEIKAQNILIDMHIGDSISVNGACLTVIDFTDSSFSVQVIKGTENKTYLGSVQRNTEVNLERAMSGSGRFGGHFVLGHVDELGTISKINETANSKIISIKTTKNILNQMVKQGSITVDGVSLTVFDLHDYTFDIHLIPETRRSTILSSKKVGDKVHLESDVLFKYVENIMNQNQSQLTEEKLRAFGF

SEQ ID NO: 71195 - protein, 347 aa, Staphylococcus epidermidis
MSRFMDDAIQLAKMVNGQTGVNPPVGSVVVKNGRIVGLGAHLKKGDKHAEVQAIEMAGLNTQGATIYVSLEPCTHHGSTPPCVDKIIEAGISKVIYAVKDTTLVSKGDEILREAGIEVEFQYNENAAALYRDFFTAKRNEVPEVTVKVSSSLDGKQATDFNESKWITNKEVKEDVYQLRHEHDAVITGRRTIEADNPLYTTRVPDGKHPIRVILSKKGQLDFNQQIFKDTASEIWIYTENEKLKTNKSFIKIINISNCDTTTILQDLYQRGIGKLLVEAGPNITSQFLQSKHLNELILYIAPKLIGGSGKHQFYKTDEVIDLPEATQFEIVDSKLINQNLKLKLRKK

SEQ ID NO: 71196 - protein, 237 aa, Staphylococcus epidermidis
MTKLNVKVFADGADIEEMKSAYKNQLVDGFTTNPSLMAKAGVTDYKAFAEEVVSEIPDASISFEVFADDLPTMEKEAEILKQYGDNVFVKIPIVTTTGESTLPLIKRLSSKQVRLNVTAVYTIEQVKAITDAVTEGVPTYVSVFAGRIADTGIDPLPLMKESVKVTHSKEGVQLLWASCREVYNVIQADEIGADIITCPADVVKKVNNNLGRDIGELSVDTVKGFAKDIQSSGLSIL

SEQ ID NO: 71197 - protein, 204 aa, Staphylococcus epidermidis
MLRVALAKGRLLKSFIEYLQQVNQIDIATVLLNRQRQLLLTVDNIEMILVKGSDVPTYVEQGIADVGIVGSDILNGQKYNINKLLDLPFGKCHFALAAKPETSRYKKVATSYVHTATQFFNKEGMDVEVIHLNGSVELSCVVDMVDAIVDIVQTGSTLTANGLVEKKHISEINAKLITNKESYFKQSSEIERLIKQLGVSINYA

SEQ ID NO: 71198 - protein, 171 aa, Staphylococcus epidermidis
MTKFNFDQVHSDIQFKIKHLMVSQVKGTFKQFDVQLDGDINDLTSLKATATIIPSSIDTQNEDRDNHLRSNDFFGTEDNDKMTFVTKEINENQVVGDLTIKGETHEETFDVEFNGVSKNPMNGQQVTGFIVSGTINREKYGINFNQALETGGVMLGKNVKFEASAEFSIDN

SEQ ID NO: 71199 - protein, 320 aa, Staphylococcus epidermidis
MDYRVLLYYKYVTIDDPETFAAEHLKFCKEHHLKGRILVSTEGINGTLSGTKEDTDKYIEHMHADSRFADLTFKIDEAESHAFKKMHVRPRREIVALDLEEDINPREITGKYYSPKEFKAALEDENTVILDARNDYEYDLGHFRGAIRPDITRFRDLPEWVRNNKEQLDGKNIVTYCTGGIRCEKFSGWLVKEGFENVGQLHGGIATYGKDPETKGLYWDGKMYVFDERISVDVNQIDKTVIGKEHFDGTPCERYINCANPECNKQILVSEENEEKYLGACSYDCAKHERNRYVARHHISNEEWQRRLNNFKDVPEHTHA

SEQ ID NO: 71200 - protein, 170 aa, Staphylococcus epidermidis
MKRFAKAFVVSGITLGAVLGLNVTEHNGVSNEAKAQTAHSYWYKYNGYTASGGDFVLSNSFYQGLKAGNVTFNGIKVNQKYESKTATKKIYDQTFQQINGNKANNVQFKIASRTVTLDQVKQKYGKNYNYQPSLSKNKTSKTDGLYGYQVGKGNIVFHVKDGYVTSATLS

SEQ ID NO: 71201 - protein, 278 aa, Staphylococcus epidermidis
METVQFYNGRTMPKIGLGTYRVKDGDECRESVKYAIEQGYRSIDTAMIYGNEETVGQGIKEGLESTGLSREDLFITSKLWLTDFGRQNVEDAYRQSVAKLGLDYLDLYLMHWPGTNEAVMIDTWRGMEDLYKQNQVKNIGVSNFTPEHFEALLAQVSIKPVINQVEFHPYLTQNELRKYLEAQNIIMESWSPLMNSQILHDEVINEVANEVGKTPAQVVIRWNIQHDVVVIPKSVTPHRIEENLDVWNFELSDNQMERIDQLNQDKRIGPNPLEFNGK

SEQ ID NO: 71202 - protein, 399 aa, Staphylococcus epidermidis
MTYNKRLFTSESVTEGHPDKIADQVSDAILDEILKDDPNARVACETTVTTGMALISGEISTTTYVDIPKVVRETIKDIGYTRAKYGYDSQTMAVLTAIDEQSPDIAQGVDKALEYRNDISEEEIEATGAGDQGLMFGYATDETDTYMPLPIFLSHQLAKRLADVRKDEILDYLRPDGKVQVTVEYGEDDKPRRIDTIVVSTQHAEDVELAQIEKDIKTHVIYPTVDKALLDDETKFYINPTGRFVIGGPQGDAGLTGRKIIVDTYGGYARHGGGCFSGKDPTKVDRSAAYAARYVAKNIVAAGLAKQCEVQLAYAIGVAEPVSISINTFDTGKVSEARLVEAVRKHFDLRPAGIIKMLDLKQPIYRQTAAYGHFGRTDVLLPWEKLDKVNVLKDAVEIQ

SEQ ID NO: 71203 - protein, 569 aa, Staphylococcus epidermidis
MLSILYIVTISILKWINSICMLYYLNVRAYINYRMEGLGMSIDTYTETLKINKLIEKATSHFQLSSTQLYKKILKNHEGELTELGAINVKTGKYTGRSPKDKFIVTEPSYKDNINWGDINQPMDEETFLKLYNKVLDYLNQKEELYIFSGYAGSDKESRLKLKVINELAWHNLFARNMFIRPESIDEAQNIKPNFTIVSAPHFKANPKLDGTHSETFVIISFKHKVILIGGTEYAGEMKKGIFSVMNYLLPIQDIMSMHCSANVGEKGDVALFFGLSGTGKTTLSADPKRKLIGDDEHGWNKNGVFNIEGGCYAKAIHLSKQKEPQIYNAIKYGTILENTVTNDDGTVDFDDNTYTENTRAAYPIDYIENIVTPSKAAHPNTIIFLTADAFGVIPPISKLTKDQAMYHFLSGFTSKLAGTERGVTEPQPSFSTCFGAPFLPLSPTKYADLLGNLIDIHDVDVYLVNTGWTGGKYGVGRRISLHYTREMVDQAISGKLKNTKYIKDDTFGLNIPVQIDSVPTTILNPINAWNNKDNYKAQAYDLIQRFNNNFKKFGKEVEHIANKGAFNQ

SEQ ID NO: 71204 - protein, 165 aa, Staphylococcus epidermidis
MKSSVRLLNHIIKIMNLQQSLIIRDEQWNQSYEAYNFNINGYVFKSRLAKKTTKKKGYFLSLWEKDKTKKNRAFDYESFPGKLIVHVMDDSQVGQFIFPKHVLFHKGILRNHASKGKMAFRVYPTWEKDLNRVAHKTQEWQKQYFIDMSQTIDVPSIKRAYFNED

SEQ ID NO: 71205 - protein, 446 aa, Staphylococcus epidermidis
MKANKYLIFILGALGGLLYGYDNGVISGALLFIHKDIPLNSTTEGIVVSSMLIGAIVGAGSSGPLADKLGRRRLVMLIAIVFIIGALILAASTNLALLIIGRLIIGLAVGGSMSTVPVYLSEMAPTEYRGSLGSLNQLMITIGILAAYLVNYAFADIEGWRWMLGLAVVPSVILLVGIYFMPESPRWLLENRNEEAARQVMKITYDDSEIDKELKEMKEINAISESTWTVIKSPWLGRILIVGCIFAIFQQFIGINAVIFYSSSIFAKAGLGEAASILGSVGIGTINVLVTIVAIFVVDKIDRKKLLVGGNIGMIASLLIMAILIWTIGIASSAWIIIVCLSLFIVFFGISWGPVLWVMLPELFPMRARGAATGISALVLNIGTLIVSLFFPILSDALSTEWVFLIFAFIGVLAMIFVIKFLPETRGRSLEEIEYELRERTGARTE

SEQ ID NO: 71206 - protein, 2387 aa, Staphylococcus epidermidis
MNIEALYFQKYFYFKHLNQSSSEHSVTYWVKLSRDIELHRLMYALVDVVQNQPVLRTQFVTDDFNQLKINLRDFFPFIEIKEVNEMSQSIDLEAFFTRNLNSYHFNQLPLFNFKIYQFLDDAYLLLDFHATIFNESQLTPFLQQLNIAYTHSLKSEYSISDFYNWIKEMNQKMDQNQVVCPSKHFNVLNADGDNYAYIPVKNTCEKKKMCSLHAELPSLDIDVWIVSIYLAHHFISQSSDVTLGIHFSIDNKNTENMMVLNTDIAPLNLSISQSDVVKDMVDECSALLEELQMCGASFVVQPKAVQTDVETMIHIEKVQEQFELNHICHHIHRLYNEASSFADLEFYPHVQDGFDIVYNDNVYDDLTVHTLVKLINGIYMQITQNPSLLIKDIKLSDRSDLAKYNDINNQNNDINYSEVTYKTVVERFERQVHQHPDSIALQYEQRSMTYHQLNQCANLLAYRLRLNHQIEPNDMVALIAERSLEMIIGMLGILKAGAGYIPIDPDYPEERMNYIIEDAKPKAVVTYRTSFQSGLPQMDIELIVDSREHDIDNPRGINCSEDIAYVIYTSGTTGKPKGTLVPHRGIDRLVHNPNYVELNENTTVLLSGTVAFDAATFEIYGPLLNGGRLVITSKDTLLNPQLLDQAITENKVNTMWLTSSLFNQIASERIEALESLTYLLIGGEVLNAKWVHLLNSRECHPQIINGYGPTENTTFTTTFAIPQEMPSRIPIGLPISGTTVYVMQGDRICGVGVPGELCIGGAGLAKGYLNQPKLTAERFIQSPFNNEMLYRSGDLVRLQEDGYIDYISRIDKQVKIRGFRIELSEIEKALEAIRDINKAVVIVREQDQDKQIVAYYEASQLKSTGQLKDILSETLPEYMIPVHFMKVDRIPITMNGKLDVRALPEINLKNNRNYVEPRNDIERTVCRIFEEILHVDQVGVKDNFFELGGHSLRATLVVNRIEERLKKRLKVGDLMKSPTVEQLGQQIEELQNDVYEVIPKANESYQYDLSASQKSMYLLWKVNPKDTVYNIPFLWRLSSELNVMQLQRALSKLIERHEILRTQYVIDDNEVKQRIATHVSPDFEEVTTSLTNEQDIIQSFMEPFDLEQSSQMRVKYIHGPQQDYLFMDTHHSINDGMSNTILLSDLNALYQDKSLPELKLQYKDYSEWMVHRDLSKQRHFWLQQFENQVPILNMPTDYPRPSIKTTNGNMLTFHYNRQIKQQLKSYVEQHQVTDFMFFASAIMVLLHKYTRQDDIAIGSVISARTHRDTENMLGMFANTLVYRGRPHDQKTWDQLMAEMKEMCLGAYEHQEYPFESLVNDLVDERDASHNPLFDVMLVLQNNETNHANFGHSQLTHIPPQSTTAKFDLSFIIEEDQDDYVINIEYNTDLYKQETIHHIAEQLQMIIKHVISTENLKIQDIDENDDLLIWLDKHVNDCSLDLPKNKSIQQLLHDVMKAKADDVALKMNGQSMTYQELDDYSNSMAQTLIQNGIQKGERVALLTERSFEMVASMIAVLKVGGSYVPIDVTYPNKRIEFIIEDAEVAAVLTYGKTISSHIPVIKIEDIDNTENNKRLNIEYAGNLEDDMYHIYTSGTTGKPKAVSVKQRNILNLVCAWTKRLNLSDDEVYLQYANYVFDASATDFYCSLLNGYPLVIATSVERTNTDLLEKVISQENITIASIPLQVYNVMHHFYIPKVITGGATSTPAFVQHISKHCDMYVNAYGPSENTVITSCWIYEKGDAIPSTIPIGKPLANVDIFIMSGGKLCGVGIPGELCIAGESLTSGYLNRPELSAEKFINNPFGPGQLYRSGDLARLMPDGQIEFLGRIDKQVKVHGYRIELGEIENIINSVDTVTDSVVILAKQGEREVLHAYYVGSQEDENHISQHLNQYLPKYMIPKTLTAISEIPLTGNDKVDESRLPVPNVHKNKFVAPRNNIEREIAQIVSGVLDVSSMSIDDDFFEMGGTSLDAMVVVSKLKSNGIHITMQDVYQFKTVRYIANHTEKRQALPEVVLPDHLPQLQSLVERRYQLKSQHLTQSSLGHVLLTGATGFLGAYLIDEMQDDADQITCIVRGHDINQAKTNLENNLNCYFDTAHVDKLMKHIDIILADLSELDHLIIDSAIDTIIHAGARTDHFGDDETFFDVNVRSTQALIDLAKDKKAKLIYISTISVGTVFEVHQDDITFSEKDLYKGQLFTSPYTKSKFYSEIKVLEAVNEGLAAQIIRLGNLTSASTGPLNMKNLTTNRFSIVMHDLLKMPFIGESISKAKVEFSFIDVTARHIIKLARSNAIPIIYHVYAPCSITMKQVIDNAKGSEMTVVSDSEFEQKLHELGMHELIGLNSNGDNQISGVTDSNMTQTVMKELQGEWPHLSYQWLQQWYHLLFEKFDAN

SEQ ID NO: 71207 - protein, 184 aa, Staphylococcus epidermidis
MTDIIIVHSKHGNSKNHWYEWLRHNLTLEGYDVSLFNLEANDHAQIDEWVNEMKQQLHIRKKDTYFVTHGFGSIAALKFLEETHHHIEGFFSIAGFKEDAQDIDEDVDLKGVTIDYDKIKEQVDKFYGLTSKDDQYVSYKETQRLMNSLNGHTRVVEDGGHFLEEEGFVTFTSLINRMQGYMTR

SEQ ID NO: 71208 - protein, 413 aa, Staphylococcus epidermidis
MKQLSTTLKVRLICDFFQNIIVTAFLPFIALYLTDMVNQHFSGLFLFGLVMINFPISLISGHIIERLPKKTLTLSYQFILSLMLVIMAISISQHTFKIILFCIAYAIFSITIGMQQPIMDTIIMDAITPEVEQYIYKISYWLTNIAVAFGALIGGLMYGAHKSMLFFIAFVIYIMVFIALIVWLPKDLNIVTQSHTHHANEKQFSMGQILKSYKPAFKDTTYLLLIIGFSILTMGELSASSYISVRLKQEFDPMILFSLHINGVKMYSLLLMTNTIIVIIFTYFISKIVMRMNVKTALLIGIIFYVIGYSNLTYLNDFTLLIIFMIIATIGEMVYSPILEENRFKMVPSHKRGTYSAVHALGFNLAELLARFGIILGVFLTSMEMGIYMFVLLLLGGMSLYIAVSRFNNTNSQ

SEQ ID NO: 71209 - protein, 321 aa, Staphylococcus epidermidis
MTLNLAQRVLNQESLTKDEAISIFENAEIDTFDLLNEAYTVRKHYYGKKVKLNMILNAKSGICAEDCGYCGQSVKMKEKQRYALVEQDQIKEGAQVATENQIGTYCIVMSGRGPSNREVDHICETVEDIKKIHPQLKICACLGLTKEEQAKKLKAAGVDRYNHNLNTSERYHDEVVTTHTYEDRVNTVEMMKDNNISPCSGVICGMGESNEDIIDMAFALRAIDADSIPINFLHPIKGTKFGGLDLLSPMKCLRIIAMFRLINPTKEIRIAGGREVNLRSLQPLALKAANSIFVGDYLITGGQPNEEDYRMIEDLGFEIDS

SEQ ID NO: 71210 - protein, 142 aa, Staphylococcus epidermidis
MEITNVNHICFSVSDLNTSIQFYKDILHGDLLVSGRTTAYLTIGHTWIALNQEKNIPRNEISHSYTHVAFSIDEEDFQQWIQWLKENQVNILKGRPRDIKDKKSIYFTDLDGHKIELHTGTLKDRMEYYKCEKTHMQFYDEF

SEQ ID NO: 71211 - protein, 313 aa, Staphylococcus epidermidis
MRNVEKLNPGDSVDHFFLIHRATQGVTAQGKDYMTLFLQDKSGDIEAKLWTATKDDMQTLKPETIVHVKGDIINYRGRKQMKIHQIRLAQAEDKVSTKDFVDGAPMSPTEIQEELSHFMLDIENANLQRITRHLIKKYQDRFFTYPAASSHHHNFASGLSYHVLTMLRIAKSVCDIYPLLNRSLLYSAIILHDLGKVRELSGPVATTYTVEGNLLGHISIASDEVAETAKELGIDGEEVMLLRHMILAHHGKMEFGSPKLPHLKEAEILYFIDNIDAKMNMFDKAFKKTEKGQFTERIFGLENRQFYNPTTLD

SEQ ID NO: 71212 - protein, 333 aa, Staphylococcus epidermidis
MKNLRNRSFLTLLDFSRQEVEFLLTLSEDLKRAKYIGTEKPMLKNKNIALLFEKDSTRTRCAFEVAAHDQGAHVTYLGPTGSQMGKKETAKDTARVLGGMYDGIEYRGFSQRTVETLAQYSGVPVWNGLTDEDHPTQVLADFLTAKEVLKKEYADINFTYVGDGRNNVANALMQGAAIMGMNFHLVCPKELNPTEELLNRCERIATENGGNILITDDIDKGVKDSDVIYTDVWVSMGEPDEVWQERLKLLKPYQVNQALLEKTGNPNVIFEHCLPSFHNAETKIGQQIYEKYGISEMEVTDDVFESKASVVFQEAENRMHTIKAVMVATLGEF

SEQ ID NO: 71213 - protein, 398 aa, Staphylococcus epidermidis
MVKFIHCADLHLDSPFKSKSYLSPNIFEDVQKSAYESFKNIVDLALKQEVDFIIIAGDLFDSENRTLRAEVFLNEQFERLRKEQIFVYICHGNHDPLTSKITSQWPNNVSVFSNQVETYQAITKSGETIYIHGFSYQNDASYENKIDAYPSSQGQKGIHIGVLHGTYSKSSVKDRYTEFRLEDLNQRLYHYWALGHIHQREQLSDMPVINYPGNIQGRHFNELGEKGCLLVEGDHLKLTTQFYPTQFIKFEEATIETDHTSKQGLYDVIQSFKDKVRTEGKSFYRLNVRINSEDIIAPQDLIQLKEMITEFEENENQFVFIEDLNLQYVQNDEMPIVKEFSPELLDDASLFDSAMTDLYLNPRASKFLDDYNEFDKVELVNHAERLLKDEMRGEQNDN

SEQ ID NO: 71214 - protein, 310 aa, Staphylococcus epidermidis
MAKIVVALGGNALGKSPQEQLELVKNTAKSLVGLITKGHEIVISHGNGPQVGSINLGLNYAAEHDQGPAFPFAECGAMSQAYIGYQLQESLQNELHSMGIDKQVVTLVTQVEVDEGDPAFNSPSKPIGLFYTKEEANRIQQEKGYQFVEDAGRGYRRVVPSPQPISIIELESIKTLVENDTLVIAAGGGGIPVIREQHDSFKGIDAVIDKDKTSALLGADIHCDQLIILTAIDYVYINYHTDQQQALKTTNIDTLKTYIEEEQFAKGSMLPKIESAISFIENNPNGSVLITSLNQLDAALEGKIGTLITK

SEQ ID NO: 71215 - protein, 521 aa, Staphylococcus epidermidis
MKPLEQAINDNKKKKRFNFRMPGAFMILFILTVVAVIATWIIPAGAYSKLSYEPSSQELKIVNPHHQVKKVPGTQKELDRLGVKIKIEQFKSGAINKPVSIPNTYERLKQHPAGLDQITSSMVKGTIEAVDIMVFILVLGGLIGVVQASGSFESGLLALTQKTKGHEFMLIAFVSILMIIGGTLCGIEEEAVAFYPVLVPIFIALGYDSIVSVGAIFLASSVGSTFSTINPFSVVIASNAAGTTFTDGLYWRIGACIIGAIFVISYLFWYCKKIKKDPKSSYSYEDKAAFEKQWSVLHDDGSSEFTLRKKIILTLFVLPFPIMVWGVMTQGWWFPVMASAFLIFTIVIMFIAGTGQYGLGEKGTVDAFVNGASSLVGVSLIIGLARGINLVLNKGMISDTILHFSSSIVQHMSGPLFIIVLLFIFFCLGFIVPSSSGLAVLSMPIFAPLADTVGIPRFVIVTTYQFGQYAMLFLAPTGLVMATLQMLNMRYSHWLRFVWPVVAFVLIFGGGLLITQVLIYS

SEQ ID NO: 71216 - protein, 982 aa, Staphylococcus epidermidis
MNKMIIKSLEIYGYGQFVQRKIEFNRQFTEIFGENEAGKSTIQAFIHSILFGFPTKKSKEPRLEPRLGNQYGGKLSLIFDDGIEAEVERIKGSAHGDVKIYLKDGTIRDEVWLNKKLNYISKKTYQGIFSFDVLGLQDIHKNLDEEQLQDYLLEAGALGSTEFTSMRDRIGQKKEELYKKSGKNPIINQQIEQLKQLENQIRNEESKLDTYHRLVDDKDKSSRRLENLKQNLNQLSKMHEQKQKEVALHDQTQEWKRLEQSLNIEPINFPEKGIDRYETAKSHKQSLERDKSLREERLSILNKEAESINPVDQKYIDSFNSLYQQETEIKQKEFELRSIEKDIADKQRELEALQSNIGWQEVFYDTDSTEAMKSHMSDLVLGKQEQIAYINQLERGLEENKIERNSNSNEINQVENELVPDETFEKKKEYTQQVLELHEKENLYEKLKETFEEEQTQKNKRQKFLRIGFIVLTILSAALSIFSFFTANLIFGIIFALLTVIFVVGIIFSRSKAVDYSTAISQEINDLENQLTQLEKEYNLDFDLEYQQQVREQWRHAKKNKKILEEKHQYINQSLTTANERLDSLKHSIIEIKKELRLSEKLSDELVVESISTIGQIKAHDKYIIDLNQQRNNLLKDINHFYERAQSVTEPHLKLFNQMSFFHDVKQWLKNAEEQNEAWNKNQTETQLLNNELKQLKSRLSETNQMIKQLFDYVDVDNEEDYYTHHHHFETYQSDLNRFNDLNQYLENQNYTYEMSSQLSEKTTAQLEEEDHRLAKQVDDYNDQFLEMQAEVSDLNAQINHMETDRTLAQLRHEYYSLKNRLNDIAKDWASLSYMQALVEEHIKQIKDKRLPQVINEAVSIFKNLTNGTYNMIHYTENHKIHVKHSNGQVFEPVELSQSTKELLYVALRISLIKVLKPYYPFPVIVDDAFVHFDKYRKERMLKYLRELSEHYQILYFTCTKDHVIPAKEVLTLNKLQEGGKK

SEQ ID NO: 71217 - protein, 41 aa, Staphylococcus epidermidis
MKLDISYSSKSITFKTFPSFNYGIFGDHFTPFTATVRSTVF

SEQ ID NO: 71218 - protein, 178 aa, Staphylococcus epidermidis
MKIFKLTSLTLAALTLAFPFSHVAQAHTYLEKHHQTNETKQSHSFSLEGEAGENPTFLTQPQFINSLDNGHLNINGYQIQQDDTNDIEYKKVYDQEIRATSNHTAISVRFSINNQSLSLESMKDAYPNERLNHIPHTSNDSQYPEDGIYVYHGKMIKLQYKVTHGFVTSVTIGEGVDE

SEQ ID NO: 71219 - protein, 48 aa, Staphylococcus epidermidis
MKGKEPSNKYFDKMKPYLITLLYLAIFIALYLIYGSGDTQNNFIYNEF

SEQ ID NO: 71220 - protein, 205 aa, Staphylococcus epidermidis
MEEKFNNSQEERQFQQFQEYQKRQEEEKKKKRKKGWLFGCGGCLVLLILIIVGVTACTGTFVNEVDKEINEEGKLDKDKDTKIKSIGETTEIDGVSFTLDNASYTEERNEFADVQADKVIKVDMTVKNNSKEEIPVGGDIKVYVDGKQAKSYPIDNQLIDSLSPNREISGSEGFAINGNPKKIELEFQPLTSFSNKRYIYNIKPE

SEQ ID NO: 71221 - protein, 302 aa, Staphylococcus epidermidis
MSIPIIIDTDPGIDDATAISIALSHPQFDVKMISTVNGNVGIEKTTANALKLKRFFNSSVPVHRGASQPLINDIFEATSIHGESGMDGYEFPQINQDDLTSIHAVEAMRNLLVNTQEPLTLIAIGPLTNIAILLTSYPEVQPFIKEIVLMGGSTGRGNVTPLAEFNIYCDPEAAQIVFNSGLPLTMIGLDLAREALFTHHFVKDFKDTNATSNMLYNLFQHYKSEDFEIGFKLYDVFTILYLLDPEAFNVKEAYTQIELNGNFTRGATVVDFNMEHPNCTVVLSPVERQYEDLFLNALSYCK

SEQ ID NO: 71222 - protein, 114 aa, Staphylococcus epidermidis
MSENWCTPKPKLTERPLLDTENAESLSETFKILSNGTRLRILHTLLRTPNASVSEVAEQLEMKPQAISNQLQRLVDKGIVCSIREANFIRYRIVDNCVVSLLDRGWCLTEDLPK

SEQ ID NO: 71223 - protein, 421 aa, Staphylococcus epidermidis
MDKIVINGGNRLTGEVNVEGAKNAVLPVLTASLLASEGHSKLVNVPELSDVETINNVLSTLNANVEYDKDKNAVKVDATKTLNEEAPYEYVSKMRASILVMGPLLARLGHAIVALPGGCAIGTRPIEQHIKGFEALGADIHLENGNIYANAKDGLKGAHIHLDFPSVGATQNIIMAASLASGKSIIENVAKEPEIVDLANYINEMGGKITGAGTDTITIHGVEKLYGVEHAIIPDRIEAGTLLIAGAITRGDIFVRGAIKEHMASLIYKLEEMGVDLEYYEEGIRVTANGDLNPVDVKTLPHPGFPTDMQSQMMALLLTANGHKVITETVFENRFMHVAEFRRMNANISVEGRSAKIEGKSHLQGAQVKATDLRAAAALILAGLVAEGTTQVTELKHLDRGYVNLHGKLKSLGANIERVNR

SEQ ID NO: 71224 - protein, 591 aa, Staphylococcus epidermidis
MYYTNSNYEAFARPKKPENVDNKSAYLIGAGLASLAAACFLIRDGQMKGENIHILEELDISGGSLDGINMEHHGYVVRGGREMENHFECLWDLFRSIPSLEQTNASVLDEFYWLNKEDPNYSKCRAIESGGKRIDTDGDFTLTKKAIKEILNLCLMKEEDLDDVKITDVFSRDFLNSNFWLYWKTMFAFEPWHSAMEMRRYLMRFVHHIGGLADFSALKFTKYNQYESLVLPMIEYLKSHSVNFEFGVQVNNILVDATPSTKIAREIILTRDDKEESIPLTVNDLVFVTNGSITESSTYGDNDHPAPITHSLGGSWTLWKNLANQSPEFGRPEKFCDHIPAKSWFVSATATTDNKKIISYIEQLCKRDVLSGRTVTGGIISVANSSWQLSFTVNRQQQFKKQPKNQVSVWIYALYSDEKGDFIKKPITECTGSEICQEWLYHMGVPQEEIVELAQSECNTIPVYMPYVTAYFMPRAYKDRPLVVPNGSKNLAFIGNFAETARDTVFTTEYSVRTAMEAVYQLLDVDRGVPEVYASEFDARVLMDAFYELNDRKSLHELVNKNFIKRSVLNTVLKKIRGTFIEELLRKHKLL

SEQ ID NO: 71225 - protein, 433 aa, Staphylococcus epidermidis
MKQFLNITQRKFIEWLIILSIFIVSIPNKWTLMISIALSLLLLKRGALGVVQLIILYMLRSQIYTPYDTQEMAHYIVSMKYILIYVIGVFFLFKYVKHWIRNEMILRFIKSTMILMLLYIIMSLVVSNDPIESILKLLNFFIPLILIVMYVSLIKKIKNLINWINQFITLVIAFTFLFIVIAPKSYLIDEESLRSVFKDAHSFAVILAMGLVLYMVTIIKQQDYDVFNLLLLNIGMIELYLSNSRHIFISVILCLMLLLPLSHIKKRIKHPIIGAMILMAIAIINQPYIYHLFIKLILKGKNSQEVFMPSDMNIKAIDYALTEHPFLGSGFGIPMIKASSEIQYFNVATSNIIFGMIIFTGIIGLTLCTIYMLHMVLLVTFPMSITILLFLITIFVNMDYIILFDSVGLGILCYIFWGIYLKEGMYQYNNGQW

SEQ ID NO: 71226 - protein, 37 aa, Staphylococcus epidermidis
MKVRPSVKPICEKCKVIKRKGKVMVICDNPKHKQRQG

SEQ ID NO: 71227 - protein, 81 aa, Staphylococcus epidermidis
MRIKSLQFHGMMMNVYHYHSNDLIMLAIPELFWSIELSKELDANQLYEELVMQLFNLLTEVEADALARNITDLIRNESKGE

SEQ ID NO: 71228 - protein, 445 aa, Staphylococcus epidermidis
MNNKEHTKSIILVLLVLMSIVLTYMVWNFSPDLSNIDNTDNSKSDKPKPLTKPMTAEMEGTITPFQIVHSRDDKSQGTVASGAVLDKMIQPLKNQEVKSVSHLKREHNLVIPELSNNFIVLDFTYDLPLSTYLSQVLDIDAKVPNNFNFDRLLIDQDHNNHVVLFAISKDRHEVVKLKTTMKGNNVDKAFKSIEPDMQPYTEIITNKDTIDKATHVFAPSKPKDLKTYRMVFNTISVERMNSILFDDSTIVRSSQSGTTTYNNNTGVANYNDKDEMYHYKNLSEDAKSSSNMQETIPGTYEFINSHGGFLNEDYRLFKTDNRTGKLTYQRFLNGHPTFNKHNFNEIQVTWGDKGVYDYQRSLLKTDVTLNSEESKSVPTVESVRSALANHPDIDFEKVTNIAIGYDMDDKANNEDIEVQRNCELIPRWFVEYDGNWYAYKDGRLE

SEQ ID NO: 71229 - protein, 61 aa, Staphylococcus epidermidis
MAKTSMVAKQQKKQKFAVREYTRCERCGRPHSVYRKFKLCRICFRELAYKGQIPGVRKASW

SEQ ID NO: 71230 - protein, 1227 aa, Staphylococcus epidermidis
MGKFGLNFFKPTEKFNGNWSVLEHKSREWEKMYRERWSHDKVVRTTHGVNCTGSCSWKVFVKNGVITWENQQIDYPSCGPDMPEFEPRGCPRGASFSWYEYSPLRVKYPYIRGKLLDLWTEALEEQKGNRIAAWASIVENEEKAKQYKEARGKGGHVRANWKDATDIIAAQILYTIKKDGPDRIAGFTPIPAMSMISYASGARFINLLGGEMLSFYDWYADLPPASPQIWGEQTDVPESSDWYNASYIMMWGSNVPLTRTPDAHFMTEVRYKGAKVISVAPDYAENVKFADHWLAPHPGTDAAVAQAMTHVILQEYYENQPNDMFINYAKQYSDMPFVIMLDEDENGYKAGRFLRASDLGMSGENNEWKPVIQDKLSQQLLVPNGTMGQRWEEGKKWNLKLETEDGTPIDPMLSMVESDYHVETIQFPYFDSSGDGIFERPIATRTIQLANGEEVKIATVYDLMTSQYGVQRFEHELEATSYDDASSKYTPAWQEQITGIKKELVTKVAKEFAQNAIDTGGRSMIIMGAGINHWFNSDTIYRSILNLVLLCGCQGVNGGGWAHYVGQEKCRPIEGWNTIAFAKDWQGPPRLQNGTSWFYFATDQWKYEESNVDKLKSPLAENIKHQHPADYNVTAARMGWLPSYPQFNKNSLLFGEEAKDEGDDSNEAILQKAIESVKNKDTQFAIEDPDLRKNHPKTLFVWRSNLISSSAKGQEYFMKHLLGARSGLMAEPNEDDKPEEIKWREDTEGKLDLLVSLDFRMTATPLYSDIVLPAATWYEKHDLSSTDMHPFIHPFNPAIDPLWESRSDWDIYKTLSKAVSEMAKDYLPGKFKDVVTTPLGHDSKQEISTEYGIVKDWSKGEIEGVPGKTMPNFSIVERDYTQIYDKFVTVGPKLEKGKIGAHGVSYSVSEEYEELKSIVGTWNDDNTISVKNDRPRIDTARKVADVILNISSATNGKLSQKSYEDLENQTGMELKDISKERASEKISFLNITSQPREVIPTAVFPGSNKDGRRYSPFTTNVERLVPFRTLTGRQSYYIDHEVFQQFGESLPVYKPTLPPMVFGARDKKVKGGQDTLVLRYLTPHGKWNIHSTYQDNERMLTLFRGGPVVWISNEDAADHGINDNDWLEVYNRNGVVTARAVTSHRMPRGTMFMYHAQDKHIETPGSEITDTRGGSHNAPTRIHLKPTQLVGGYAQISYHFNYYGPIGNQRDEYVAVRKMKEVNWLED

SEQ ID NO: 71231 - protein, 60 aa, Staphylococcus epidermidis
MAKLQITLTRSVIGRPETQRKTVEALGLKKTNSSVVVEDNPAIRGQINKVKHLLTIEEEK

SEQ ID NO: 71232 - protein, 2397 aa, Staphylococcus epidermidis
MGKRRQGPINKKVDFLPNKLNKYSIRKFTVGTASILLGSTLIFGSSSHEAKAAEEKQVDPITQANQNDSSERSLENTNQPTVNNEAPQMSSTLQAEEGSNAEAPQSEPTKAEEGGNAEAAQSEPTKAEEGGNAEAPQSEPTKAEEGGNAEAAQSEPTKTEEGSNVKAAQSEPTKAEEGSNAEAPQSEPTKTEEGSNAKAAQSEPTKAEEGGNAEAAQSEPTKTEEGSNAEAPQSEPTKAEEGGNAEAPQSEPTKTEEGGNAEAPNVPTIKANSDNDTQTQFSEAPTRNDLARKEDIPAVSKNEELQSSQPNTDSKIEPTTSEPVNLNYSSPFMSLLSMPADSSSNNTKNTIDIPPTTVKGRDNYDFYGRVDIESNPTDLNATNLTRYNYGQPPGTTTAGAVQFKNQVSFDKDFDFNIRVANNRQSNTTGADGWGFMFSKKDGDDFLKNGGILREKGTPSAAGFRIDTGYYNNDPLDKIQKQAGQGYRGYGTFVKNDSQGNTSKVGSGTPSTDFLNYADNTTNDLDGKFHGQKLNNVNLKYNASNQTFTATYAGKTWTATLSELGLSPTDSYNFLVTSSQYGNGNSGTYASGVMRADLDGATLTYTPKAVDGDPIISTKEIPFNKKREFDPNLAPGTEKVVQKGEPGIETTTTPTYVNPNTGEKVGEGEPTEKITKQPVDEIVHYGGEEIKPGHKDEFDPNAPKGSQTTQPGKPGVKNPDTGEVVTPPVDDVTKYGPVDGDPITSTEEIPFDKKREFNPDLKPGEERVKQKGEPGTKTITTPTTKNPLTGEKVGEGEPTEKITKQPVDEITEYGGEEIKPGHKDEFDPNAPKGSQEDVPGKPGVKNPDTGEVVTPPVDDVTKYGPVDGDPITSTEEIPFDKKREFNPDLKPGEERVKQKGEPGTKTITTPTTKNPLTGEKVGEGEPTEKVTKQPVDEITEYGGEEIKPGHKDEFDPNAPKGSQEDVPGKPGVKNPDTGEVVTPPVDDVTKYGPVDGDPITSTEEIPFDKKREFDPNLAPGTEKVVQKGEPGTKTITTPTTKNPLTGEKVGEGEPTEKVTKQPVDEIVHYGGEEIKPGHKDEFDPNAPKGSQEDVPGKPGVKNPDTGEVVTPPVDDVTKYGPVDGDPITSTEEIPFDKKREFDPNLAPGTEKVVQKGEPGTKTITTPTTKNPLTGEKVGEGEPTEKVTKQPVDEIVHYGGEEIKPGHKDEFDPNAPKGSQEDVPGKPGVKNPDTGEVVTPPVDDVTKYGPVDGDPITSTEEIPFDKKREFNPDLKPGEERVKQKGEPGTKTITTPTTKNPLTGEKVGEGEPTEKITKQPVDEITEYGGEEIKPGHKDEFDPNAPKGSQTTQPGKPGVKNPDTGEVVTPPVDDVTKYGPVDGDPITSTEEIPFDKKREFNPDLKPGEERVKQKGEPGTKTITTPTTKNPLTGEKVGEGEPTEKITKQPVDEITEYGGEEIKPGHKDEFDPNAPKGSQEDVPGKPGVKNPDTGEVVTPPVDDVTKYGPVDGDPITSTEEIPFDKKREFNPDLKPGEERVKQKGEPGTKTITTPTTKNPLTGEKVGEGEPTEKITKQPVDEITEYGGEEIKPGHKDEFDPNAPKGSQEDVPGKPGVKNPDTGEVVTPPVDDVTKYGPVDGDPITSTEEIPFDKKREFDPNLAPGTEKVVQKGEPGTKTITTPTTKNPLTGEKVGEGEPTEKITKQPVDEITEYGGEEIKPGHKDEFDPNAPKGSQEDVPGKPGVKNPDTGEVVTPPVDDVTKYGPVDGDPITSTEEIPFDKKREFDPNLAPGTEKVVQKGEPGTKTITTPTTKNPLTGEKVGEGEPTEKITKQPVDEIVHYGGEEIKTGHKDEFDPNAPKGSQTTQPGKPGVKNPDTGEVVTPPVDDVTKYGPVDGDPITSTEEIPFDKKREFDPNLAPGTEKVVQKGEPGTKTITTPTTKNPLTGEKVGEGEPTEKITKQPVDEIVHYGGEEIKPGHKDEFDPNAPKGSQEDVPGKPGVKNPDTGEVVTPPVDDVTKYGPVDGDSITSTEEIPFDKKREFDPNLAPGTEKVVQKGEPGTKTITTPTTKNPLTGEKVGEGEPTEKITKQPVDEIVHYGGEQIPQGHKDEFDPNAPVDSKTEVPGKPGVKNPDTGEVVTPPVDDVTKYGPVDGDSITSTEEIPFDKKREFDPNLAPGTEKVVQKGEPGTKTITTPTTKNPLTGEKVGEGKSTEKVTKQPVDEIVEYGPTKAEPGKPAEPGKPAEPGKPAEPGTPAEPGKPAEPGTPAEPGKPAEPGKPAEPGKPAEPGKPAEPGTPAEPGTPAEPGKPAEPGTPAEPGKPAEPGTPAEPGKPAESGKPVEPGTPAQSGAPEQPNRSMHSTDNKNQLPDTGENRQANEGTLVGSLLAIVGSLFIFGRRKKGNEK

SEQ ID NO: 71233 - protein, 69 aa, Staphylococcus epidermidis; identical to SEQ ID NO: 70406

SEQ ID NO: 71234 - protein, 198 aa, Staphylococcus epidermidis
MAALLLTLNLLVVLIFVTAYYNQLKSIFYSKNLTGISSMFWYLVSFSTLFSLLNVLRTGNAEWYIYLGQFINAGVALIIVIWLNFKRLEKPIAIIFSLLYILLALVIFSHLSLEVSQTVATVSIVLAYIDQIIHFIRKKTSEGANPLLYLFFAIGLSLLVTIFSLTGVSIHIIITEVANICLLLTCFILAKVYSKNKK

SEQ ID NO: 71235 - protein, 3692 aa, Staphylococcus epidermidis
MNLFRKQKFSIRKFNIGIFSALIATVAFLAHPGQATASELEPSQNNDTTAQSDGGLENTSQSNPISEETTNTLSGQTVPSSTENKQTQNVPNHNAQPIAINTEEAESAQTASYTNINENNDTSDDGLHVNQPAKHHIEAQSEDVTNHTNSNHSNSSIPENKATTESSSKPKKRGKRSLDTNNGNDTTSTTQNTDPNLSNTGPNGINTVITFDDLGIKTSTNRSRPEVKVVDSLNGFTMVNGGKVGLLNSVLERTSVFDSADPKNYQAIDNVVALGRIKGNDPNDHDGFNGIEKEFSVNPNSEIIFSFNTMTAKNRKGGTQLVLRNAENNQEIASTDIQGGGVYRLFKLPDNVHRLKVQFLPMNEIHSDFKRIQQLHDGYRYYSFIDTIGVNSGSHLYVKSRQVNKNVKNGKEFEVNTRIENNGNFAAAIGQNELTYKVTLPENFEYVDNSTEVSFVNGNVPNSTVNPFSVNFDRQNHTLTFSSNGLNLGRSAQDVARFLPNKILNIRYKLRPVNISTPREVTFNEAIKYKTFSEYYINTNDNTVTGQQTPFSINVIMNKDDLSEQVNKDIIPSNYTLASYNKYNKLKERAQTVLDEETNNTPFNQRYSQTQIDDLLHELQTTLINRVSASREINDKAQEMTDAVYDSTELTTEEKDTLVDQIENHKNEISNNIDDELTDDGVERVKEAGLHTLESDTPHPVTKPNARQVVNNRADQQKTLIRNNHEATTEEQNEAIRQVEAHSSDAIAKIGEAETDTTVNEARDNGTKLIATDVPNPTKKAEARAAVTNSANSKIKDINNNTQATLDERNDAIALVNRSKDEAIQNINTAQGNDDVTEAQNNGTNTIQQVPLTPVKRQNAIATINAKADEQKRLIQANNNATTEEKADAERKVNEAVITANQNITNATTNRDVDQAQTTGSGIISAISPATKIKEDARAAVEAKAIAQNQQINSNNMATTEEKEDALNQVEAHKQAAIATINQAQSTQQVSEAKNNGINTINQDQPNAVKKNNTKIILEQKGNEKKSAIAQTPDATTEEKQEAVSAVSQAVTNGITHINQANSNDDVDQELSNAEQIITQTNVNVQKKPQARQALIAKTNERQSTINTDNEGTIEEKQKAIQSLNDAKNLADEQITQAASNQNVDNALNIGISNISKIQTNFTKKQQARDQVNQKFQEKEAELNSTPHATQDEKQDALTRLTQAKETALNDINQAQTNQNVDTALTSGIQNIQNTQVNVRKKQEAKTTINDIVQQHKQTIQNNDDATTEEKEVANNLVNASQQNVISKIDNATTNNQIDGIVSDGRQSINAITPDTSIKRNAKNDIDIKAADKKIKIQRINDATDEEIQEANRKIEEAKIEAKDNIQRNSTRDQVNEAKTNGINKIENITPATTVKSEARQAVQNKANEQINHIQNTPDATNEEKQEAINRVSAELARVQAQINAEHTTQGVKTIKDDAITSLSRINAQVVEKESARNAIEQKATQQTQFINNNDNATDEEKEVANNLVIATKQKSLDNINSLSSNNDVENAKVAGINEIANVLPATAVKSKAKKDIDQKLAQQINQIQTHQTATTEEKEAAIQLANQKSNEARTAIQNEHSNNGVAQAKSNGIHEIELVMPDAHKKSDAKQSIDNKYNEQSNTINTTPDATDEEKQKALDKLKIAKDAGYNKVDQAQTNQQVSDAKTEAIDTITNIQANVAKKPSARVELDSKFEDLKRQINATPNATEEEKQDAIQRLNGKRDEVKNLINQDRRDNEVEQHKNIGLQELETIHANPTRKSDALQELQTKFISQTELINNNKDATNEEKDEAKRLLEISKNKTITNINQAQTNNQVDNAKDNGMNEIATIIPATTIKTDAKTAIDKKAEQQVTIINGNNDATDEEKAEARKLVEKAKIEAKSNITNSDTEREVNGAKTNGLEKINNIQPSTQTKTNAKQEINDKAQEQLIQINNTPDATEEEKQEATNRVNAGLAQAIQNINNAHSTQEVNESKTNSIATIKSVQPNVIKKPTAINSLTQEANNQKTLIGNDGNATDDEKEAAKQLVTQKLNEQIQKIHESTQDNQVDNVKAQAITAIKLINANAHKRQDAINILTNLAESKKSDIRANQDATTEEKNTAIQSIDDTLAQARNNINGANTNALVDENLEDGKQKLQRIVLSTQTKTQAKADIAQAIGQQRSTIDQNQNATTEEKQEALERLNQETNGVNDRIQAALANQNVTDEKNNILETIRNVEPIVIVKPKANEIIRKKAAEQTTLINQNQDATLEEKQIALGKLEEVKNEALNQVSQAHSNNDVKIVENNGIAKISEVHPETIIKRNAKQEIEQDAQSQIDTINANNKSTNEEKSAAIDRVNVAKIDAINNITNATTTQLVNDAKNSGNTSISQILPSTAVKTNALAALASEAKNKNAIIDQTPNATAEEKEEANNKVDRLQEEADANILKAHTTDEVNNIKNQAVQNINAVQVEVIKKQNAKNQLNQFIDNQKKIIENTPDATLEEKAEANRLLQNVLTSTSDEIANVDHNNEVDQALDKARPKIEAIVPQVSKKRDALNAIQEAFNSQTQEIQENQEATNEEKTEALNKINQLLNQAKVNIDQAQSNKDVDSAKTRSIQDIEQIQPHPQTKATGRHRLNEKANQQQSTIATHPNSTIEERQEASAKLQEVLKKAIAKIDKGQTNDDVEKTVVNGIAEIENILPATTVKDKAKADVNAEKEEKNLQINSNDEATTEEKLVASDNLNHVVETTNQAIEDAPDTNQVNVEKNKGIGTIRDIQPLVVKKPTAKSKIESAVEKKKTEINQTQNATHDEVREGLNQLNQIHEKAKNDVNQSQTNQQVENAEQNSLDQINNFRPDFSKKRNAVAEIVKAQQNKIDEIEQEFSATQEEKDNALQHLDEQVKEIINSINQANTDNEVDNAKTSGLNNITEYRPEYNKKKNAILKLYDVSDTQEAIINGYPDATEDELQEANSKLNKILLDAKKQIGLAHTNNEVDDIYNEVSQKMKTILPRVDTKAVARSVLNALAKQLIKTFENTADVTHEERNDAINHVKEQLSLVFNAIEKDRKDIQVAQDELFGLNELNSIFINITQKPTARKAISGMASQLNNSINNTPYATEEERQIALNKVKAIVDDANEKIREANTDSEVLGTKSNAITLLQAISADVQVKPQAFEEINAQAEIQRERINGNSDATREEKEEALKQVDTLVNHSFITINNVNKNQEVYDTKDKTIEAIHKIKPISTIKPQALNEITIQLDTQRDLIKNNKESTVEEKASAIDKLIKTAARIAESIDKAQTNEEVKNIKKQSIDEISKILPVIEIKSAARNEIHQKAEVIRGLINDNEEATKEEKDIALNQLDTTLTQANVSIDQALTNEAVNRAKEIANSEINKISVIAIKKPEAIAEIQELADKKLNKFKQSQEATIEEKQSAINELEQALKSAINHIHQSQNNESVSAALKESISLIDSIEIQAHKKLEAKAYIDGYSDDKINDISSRATNEEKQIFVSKLKALINRTHKQIDEAETFVSVETIVRNFKVEADKLNSIVRKKAKASKEIELEADHVKQMINANLSASTRVKQNARTLINEIVSNALSQLNKVTTNKEVDEIVNETIEKLKSIQIREDKILSSQRSSTSMTEKSNQCYSSENNTIKSLPEAGNADKSLPLAGVTLISGLAIMSSRKKKKDKKVND

SEQ ID NO: 71236 - protein, 179 aa, Staphylococcus epidermidis
MGERIRSVQITEVEQLQLIAKRTFFTTFRESYSDEDFKQFFSDAYDIDVLRKELEQSNSFHYFYEVDQNIVGFLKLNINDAQTENKGHAYLEIQRIYFDEAFQGSGRGQLFINLAIDQAIKFGKSKIWLGVWEHNPKALSFYKNRGFRVTGSHQFYTGSVVDNDLIMELDLTTNYKQSL

SEQ ID NO: 71237 - protein, 58 aa, Staphylococcus epidermidis; identical to SEQ ID NO: 70357

SEQ ID NO: 71238 - protein, 86 aa, Staphylococcus epidermidis
MTVMPNIKSAIKRVRTTETAEERNISKKNAMRTAVKRAKTAISTDAENKDELLRFAIKQVDKASQSNLIHSNKADRIKSKLMSANK

SEQ ID NO: 71239 - protein, 47 aa, Staphylococcus epidermidis
MSFMDKAKEAAEKFKDSDNEQVNKVKDKINEYTGGEDNKDKKDKKDK

SEQ ID NO: 71240 - protein, 133 aa, Staphylococcus epidermidis
MEKRSINMKKVFMIISILTITVTLSACGGSGKQKEPSKESQKSDKYDYVYYEILNDGDSETPNVEIKYKDKKGKSHIEKADLDHVYEHILGDGNKKPYIVKDGKKIHVYRPPYMIYGDDDVEGKAVSKDEVTK

SEQ ID NO: 71241 - protein, 152 aa, Staphylococcus epidermidis
MTDSNAKEIRTGRLIAISSLVFCILLIIHHFIVLDESTAKSILSLAGQKTSDTAVKNILNSDRYTGIMYILAYLAGTVAFWNRHPYLWWFMFAVYISNALFTLVNLYLFIQGILDVKNVLAVLPILIVVIGSIILAIYMLVVSITRKSTFNR

SEQ ID NO: 71242 - protein, 63 aa, Staphylococcus epidermidis
MAEDKFEQAKGNIKETVGNATDNKELEKDGKGDKASGKAKEAVENVKEKANDVIDKFKGNKGD

SEQ ID NO: 71243 - protein, 357 aa, Staphylococcus epidermidis
MNDLDHPQLIFESTGIYSRGMERFCCVNQINYIQMNPLEAKFKTSALRSWKTDQADAHKLACLGPTLKQTDNLPIHELIFFELRERVRFHLEIENEQNRLKFQILELLHQTFPGLERLFSSRYSIIALNIAEIFTHPDMVLDIDKEVLITHIFNSTDKGMSMDKATKYALQLRVIAQESYPNVDRHSFLVEKLRLLIQQLKQSIHHIKQLDDAMIQLAQQLDYFENIHSIPGIGKLSTAMIIGKIGDIKRFKSNKQLNAFVGIDIKRYQSGHTHCRDTINKRGNKKARKLLFWVIMNIIRGQHHYDNHVVDYYYKLRKQPNEKPHKTAIIACINRLLKTIHYLVMNHKLYDYQMSPH

SEQ ID NO: 71244 - protein, 148 aa, Staphylococcus epidermidis
MLISDTNKTYIIEETSNSFTIERNNDQQHYEVLESINSLSNDSFCVLNHLFVNGGNEEVFESRFLKRNQYLQDVSGFKALRFLRPLVKGRHYIIITLWNSRQAFYDWQNSQAYAQTHKKRGTQKGVDHRIVNRDLSYNIRIELESLNN

SEQ ID NO: 71245 - protein, 56 aa, Staphylococcus epidermidis
MTDLKINDRDIAEINGFWVYHNTKNKQFTVNGKKFKVIDSYDDASTSNSIVAVGAN

SEQ ID NO: 71246 - protein, 77 aa, Staphylococcus epidermidis
MERTIHFTLVDQVSTLNRITSAFVRLQCNIDELHVKHSDKEGISNMKLKVNIKDDDTFKIVLKKLSQQVNVLSVKSE

SEQ ID NO: 71247 - protein, 145 aa, Staphylococcus epidermidis
METIFDYNQIKQIIPHRQPFLLIDKIVEYEEGKRCVGLKQVSGNEPFFQGHFPNYAVMPGVLITEALAQTGAVAMLNSEENKGKIALFAGIDKCRFKKQVVPGDTLMLEVEITKIKGPIGKGSAKATVDGQLACSCELTFAIQDA

SEQ ID NO: 71248 - protein, 70 aa, Staphylococcus epidermidis; identical to SEQ ID NO: 70397

SEQ ID NO: 71249 - protein, 52 aa, Staphylococcus epidermidis
MFNVRVNITLACTECGDRNYITTKNKRNNPERIEMKKYCPRLNKYTLHRETK

SEQ ID NO: 71250 - protein, 85 aa, Staphylococcus epidermidis
MKQGIHPEYHKVIFLDTTTNFKFLSGSTKTSSETMEWEDGNEYPVIRLDVSSDSHPFYTGRQKFAAADGRVERFNKKFGLKSNNN

SEQ ID NO: 71251 - protein, 178 aa, Staphylococcus epidermidis
MNDLDHPQLIFESTGIYSRGMERFCCVNQINYIQMNPLEAKFKTSALRSWKTDQADAHKLACLGPTLKQTDSLPIHELIFFELRERVRFHLEIENEQNRLKFQILELLHQTFPGLERLFSSRYSIIALNIAEIFTHPDMVLHLIKSKLQKNHLNQYFHFEYMYLKWKVLISKIVKPVS

SEQ ID NO: 71252 - protein, 293 aa, Staphylococcus haemolyticus
MAKKSMNELINQINSALDGVIETSPLNTNLEESMQYSLNAGGKRIRPLLVFLTLDVLNQDYKKGKKTALALEMIHTYSLIHDDLPAMDNDDYRRGKLTNHKVYGEWKAILAGDALLTKAFEIIADDELLESDVKVKILSRLAHNSGHLGMVGGQTLDMQSEDKPVDLDTLEQIHKAKTGALLQFAVLSAADIAKVDKSTSQALEDFSNHMGLMFQIKDDLLDVYGDESKLGKKVGSDIENHKSTYVSLLGKDGAEDKLNFHKDAAIKSIEQLSSHYDIKPLLDIVELFYTRDH

SEQ ID NO: 71253 - protein, 279 aa, Staphylococcus haemolyticus
MKELVWTRILDQRSISLNRQGRLGFYAPTAGQEASQLASQYALEKEDFILPGYRDVPQIIWHGLPLTEAFLFSRGHFKGNQFPEGVNAFSPQIIIGAQYIQTAGVAFGIKKRGKKAVAITYTGDGGSSQGDFYEGINFASAYKAPAIFVIQNNNYAISTPRSKQTAATSLAQKAIAVGIPGIQVDGMDALAVYQATKEARDRAINGEGPTLIETMTYRYGPHTMAGDDPTRYRTSDEDADWEKKDPLVRFRKFLENKGLWNEEKENEVIERAKDDIKKA

SEQ ID NO: 71254 - protein, 295 aa, Staphylococcus haemolyticus
FGPKTFKLPVVPANMQTVMSEELAHWFAKNDYFYIMHRFDEAARIPFIQKMQKDGLFASISVGVKANEFKFIEEFADKQLVPEYITIDIAHGHSDSVIKMIKHIKKYIPKTFVIAGNVGTPEGVRELENAGADATKVGIGPGRVCITKIKTGFGTGGWQLAALNICSKAARKPIIADGGLRTHGDIAKSIRFCASMVMIGSLFAAHEESPGETVELDGKRYKEYFGSASEFQKGEHKNVEGKKMFVEHKGSLKDTLVEMQQDLQSSISYAGGKDLKSLTTVDYVIVRNSIFNGGR

SEQ ID NO: 71255 - protein, 106 aa, Staphylococcus haemolyticus
MITIDITINDSGKVTDVIMDGHANHGEYGHDIVCAGASAVLFGSVNAILGLTSEKPDIDYEDDGGHFHIRSVDTNNEQAQLILQAMLVSLQTIEDEYNENIRLNYK

SEQ ID NO: 71256 - protein, 99 aa, Staphylococcus haemolyticus
MRCIPMLKLNLQFFASKKGVSSTKNGRDSESKRLGAKRADGQYVTGGSILYRQRGTKIYPGENVGRGGDDTLFAKIDGVVRFERKGRDKKQVSVYAVAE

SEQ ID NO: 71257 - protein, 101 aa, Staphylococcus haemolyticus
MREEVKALENGIELEDGFTQPAQVKVKKQDKDKNITLVEITISEGRNRQVRRMFEHFGHQVDKLTRIEFGNLNLKGLNAGEGRVLTPHEVKVLRHMAENGK

SEQ ID NO: 71258 - protein, 111 aa, Staphylococcus haemolyticus
MPWTMNDYPNTWKNFDELERKKAIDIGNAMLKDGYKEGDVIPIATQQAKDWYKDATKDELDELKHKHITQHQKDQSANPKLNDENVHVYFEDDEWKVKTEGAKQASDTFEK

SEQ ID NO: 71259 - protein, 49 aa, Staphylococcus haemolyticus; identical to SEQ ID NO: 70323

SEQ ID NO: 71260 - protein, 89 aa, Staphylococcus haemolyticus
MAKKSKIAKEMKREKLVNQYYELRKELKAKGDYEALRKLPRDSSPTRLTRRCKVTGRPRGVLRKFEMSRIAFREHAHKGQIPGVKKSSW

SEQ ID NO: 71261 - protein, 112 aa, Staphylococcus haemolyticus
ASILRGKNKVTYTPHVDTGDYVIIINAAKIELTGKKESDKIYYRHSNHPGGIKSVTAGELKRNNPERLLETSIKGMLPSSRLGEKQGKKLFVYGGAEHPHAAQQPENYELRG

SEQ ID NO: 71262 - protein, 130 aa, Staphylococcus haemolyticus
MAQVEYRGTGRRKNSVARVRLVPGEGNITVNERDVREYLPFESLILDLNQPFDVTETKGNYDVLVNVHGGGFTGQAQAIRHGIARALLEADPEYRGSLKRAGLLTRDPRMKERKKPGLKKARRSPQFSKR

SEQ ID NO: 71263 - protein, 96 aa, Staphylococcus haemolyticus
MDVKQNLRNIESEIQSHFKNSEASTLPNVIAVTKYVTIDRAKEAYDVGLRHFGENRLEGFLEKKSALPNDVTMHFIGSLQSRKVKEVINEIDYLHA

SEQ ID NO: 71264 - protein, 313 aa, Staphylococcus haemolyticus
  MISC_FEATURE (14)..(14): X=any amino acid
  MISC_FEATURE (48)..(48): X=any amino acid
IEFNDSHRTSQILXADLGPGLLVAVGDMDPGNWITSMQGGAQFGYTLXFVILISSLSAMLLQSMTVRLGIATDKDLAQMTRHYLNKPTAIIFWVIAELAIIATDIAEVIGSAIALDLLFNIPLIIGALITVFDVFLLLFIMKFGFRKIEAIVGTLIFTVLMIFVFEVYISSPNLIEILNGFVPHYQIIANHSILYIALGIIGATIMPHNLYLHSSIVQSRKYNRHSFTEKAQAIKFATIDSNIQLSIAFIVNCLLLVLGAALFYGVNSNNIGGFYDLYQAFRTQPVFGVVMGWYMCTLFAIALLAAGHKSTIT

SEQ ID NO: 71265 - protein, 107 aa, Staphylococcus haemolyticus
LNNMVQGVSQGFEKTLELVGVGYRAQMQGSDLVLNVGYSHPVEIKAEDGITFAVEKNTTVRVSGVSKEQVGAIASNIRSVRPPEPYKGKGIRYQGEYVRRKEGKTGK

SEQ ID NO: 71266 - protein, 120 aa, Staphylococcus haemolyticus
MISKIDKNKVRLKRHARVRTKLSGTAEKPRLNVYRSNKHIYAQIIDDVKGETLVQASSKDKDIASDSTSKVDLATKVGETIAKKASDKGIKEIVFDRGGYLYHGRVKALAEAARESGLEF

SEQ ID NO: 71267 - protein, 241 aa, Staphylococcus haemolyticus
MDHKNPLVSWNVFGFDLVFNLASIMMLVITAIIVFLIAIICTRNLKKRPSGKQNFIEWIFDFVRSIIESNMAWKKGGQFHFLAVTLILFIFVANMLGLPFAIVTKDHYLWWKSPTADATVTLTLSTMMILLTHYYGVKMRGTKAYIGNYFKPFWPLAIINVFEEFSSTLTLGLRLYGNIFAGELLLSLLAGLVVSSAWGWIIGIPGLIVWQGFSIFVGSIQAYIFIMLSMVYMSHKVADTH

SEQ ID NO: 71268 - protein, 70 aa, Staphylococcus haemolyticus
MGLIAAAIAIGLSALGAGIGNGLIVSRTVEGVARQPEARGQLMSIMFIGIGLVEALPIIGVVIAFMTLFQ

SEQ ID NO: 71269 - protein, 343 aa, Staphylococcus haemolyticus
MTIRSTDSQSALDKANKRRTTLTFIVSGCFLFIFAYFNLAIGSSEIHAKHIFEYFFTSINNKQTFLIHNVRMPRMIGGLLIGGALALAGLLMQAITRNPLASPQIFGVNSGASFVIVLVTILIPSLGNYATYLAFLGAFIGGLTVYVLSGSTKKITPIKLALAGMAMHLFFSSLTQGIIILNEDSNTTVMVWLVGSLNGLKWTAVLSVMPLLILALIITMYLGRQLTIMELGDDIAKGLGQKTQLIRIIVGLLVIVLAGASVSIVGPIGFIGLIVPHIVKRYISKDYFLMVPLTFLIGADLLLLSDMLSRLITFPYESPVGIVTSFVGAIYFLLITLKGVKRI

SEQ ID NO: 71270 - protein, 144 aa, Staphylococcus haemolyticus
MDRTEHSLKAFIGLNRALDTLEKIVQQDVKNYGLNVTDFAVLELLYSKGPQPIQRIRDRVLIASSSISYVVSQLEDKGWITRDKDPSDKRVYNATLTDKGQQFMADIFPQHASTLEQAFSVLSEEELITIQQAFKKLSAQSTEV

SEQ ID NO: 71271 - protein, 231 aa, Staphylococcus haemolyticus
AILILFGGGVCANVNLKRSAGQDSDWIVIAAGWGLAVSMGAYAVGKFSGAHLNPAVSIALAMDGSFSWAQVPGYIICQMLGGIFGGVLVWLMYLPHWKATEDQGAKLGVFSTAPAIKNYFANFLSEIIGTAILCLGILFIGVNKIADGMNPLIVGGLIVAIGLSLGGPTGYAINPARDLGPRIAHAILPIAGKGGSNWGYAIVPVLGPIAGGMLGAVIYKVFYKGQFDLIC

SEQ ID NO: 71272 - protein, 163 aa, Staphylococcus haemolyticus
MELQEAIASRRSIKKFKHDMTIDDDKLYQAIEKAADAPNHGMREPWRIIHIAKDRLGEMSRDVTHFAFPNHPEKQEDHYNNVTNLGGMLVLVLKTDPRQRQNRENFFAMGAYAQNLMLLLHEQGIGTCWKTPPYIFEPKVRKVFGVHGDEVIAGFLYLTDLEE

SEQ ID NO: 71273 - protein, 197 aa, Staphylococcus haemolyticus
MFNSSSLNVYFICGTQDVPEGKDIREILKQALEAGITLFQFREKGPTSLDGVEKEHLAIDLLKLCHDYQVPFIVNDDVDLAEKINADGIHVGQDDENVKSFAERFKDKIIGLSIGNEKEYYHSDLEHVDYIGVGPMFATISKNDVNAPVGPSMIATLKNINPSLPMVAIGGITEDNIEPIAQNGADGVSVISAIARS

SEQ ID NO: 71274 - protein, 66 aa, Staphylococcus haemolyticus
MPKMKTHRGAAKRVKRTGSGQLKRSRAFTSHLFANKNTKQKRKLRKAKLVSKSDMKRVKQLLAYKK

SEQ ID NO: 71275 - protein, 118 aa, Staphylococcus haemolyticus
MPRVKGGTVTRARRKKTIKLAKGYFGAKHTLYKVAKQQVMKSGQYAFRDRRQRKRDFRKLWITRINAAARQHDMSYSRLMNGLKKADININRKMLSEVAISDEKAFAELVSKAKEALK

SEQ ID NO: 71276 - protein, 58 aa, Staphylococcus haemolyticus
FAGIDKCRFKKQVTPGDTLMLEVEITKIKGPIGKGTAKATVDGQLACSCELTFAIQNA

SEQ ID NO: 71277 - protein, 62 aa, Staphylococcus haemolyticus
MGKQCYVTGRKASTGNNRSHALNANKRRFNANLQKVRILVDGKPKKVWVSARALKSGKVTRV

SEQ ID NO: 71278 - protein, 314 aa, Staphylococcus haemolyticus
EVEFLLNLSEDLKRAKYAGIEQQKLKGKNIALIFEKDSTRTRCAFETAAYDQGAHVTYLGPTGSQMGKKESAKDTARVLGGMYDGIEYRGFSQRTVEELAKYSGVPVWNGLTDEDHPTQVLADFLTAKEVLKKPYHEINFTYVGDGRNNVANALMQGAAIMGMTFHLVCPKELNPTDELLNRCKEIAAKNGGEILVTDDIDEGVKGSDVIYTDVWVSMGEPDEVWEKRIKLLEPYRVTKEMMEKTGNPRAIFEHCLPSFHDTETKIGKEIQEKYGLTEMEVADEVFESEQSVVFQKAENRAHTIKAVMVATLGE

SEQ ID NO: 71279 - protein, 166 aa, Staphylococcus haemolyticus
MARREEETKEFEERVVTINRVAKVVKGGRRFRFTALVVVGDKNGRVGFGTGKAQEVPEAIKKAVEAAKKDLVVVPRVEGTTPHTITGRYGSGSVFMKPAAPGTGVIAGGPVRAVLELAGITDILSKSLGSNTPINMVRATINGLQNLKNAEDVAKLRGKSVEELYN

SEQ ID NO: 71280 - protein, 59 aa, Staphylococcus haemolyticus
MAKLQITLTRSVIGRPETQRKTVEALGLKKTNSSVVVEDNPAIRGQINKVRHLLTVEEK

SEQ ID NO: 71281 - protein, 86 aa, Staphylococcus haemolyticus
  MISC_FEATURE (79)..(79): X=any amino acid
  MISC_FEATURE (82)..(82): X=any amino acid
MKLHELKAAEGSRRVRNRVGRGAGSGNGKTSGRGQKGQKARSGGGVRPGFEGGQLPLFRRFSKRGFTNINRKEYAIVTXDHXNKLK

SEQ ID NO: 71282 - protein, 240 aa, Staphylococcus haemolyticus
EVAGRMSAQVGSQFLQKFNGGMGILLGGVPGVPKGKVSIIGGGQAGTNAAKIALGLGANVTILDVNPKRLAELDDLFDGRVNTIMSNPLNIENAVKESDLVIGAVLIPGAKAPSLVTEDMIKQMTDGSVIVDIAIDQGGIFETTDKITTHDDPTYVKHGVVHYAVANMPGAVPRTSTIALNNATLPYAQLLASKGYREAFKANHALSLGLNTYKGHVTHKGVAEAFGLEYTSVEDALKED

SEQ ID NO: 71283 - protein, 227 aa, Staphylococcus haemolyticus
MIELYEAYADYHDIMDLTESMVRHIAQEVFGSAKVQYNEEEIDLESAWTRLHIVDAVKEATGVDFYQIKSDEEAIAAAKEHGIEITNNMKYGHILNEFFEQKVEETLIQPTFIYGHPIEISPLAKKNPEDPRFTDRFELFIVGREHANAFTELNDPIDQRERFEAQLVEKAQGNDEAHEMDEDYIEALEYGMPPTGGLGIGIDRLVMLLTDSPSIRDVLLFPYMRQK

SEQ ID NO: 71284 - protein, 306 aa, Staphylococcus haemolyticus
MYSASEIARSEFPNFQVEERSAVSIGRRVQDPLSELVKIDPKSIGVGQYQHDVNQKELESALTFVVETAVNQVGVDVNTASKSLLQYVSGLSSAIAQNIIDYREENGAIKHNKEISKVKRLGAKTFEQSIGFLRIVDGSEPLDNTSIHPESYDVTYELLTVLNFDINDLGTDKLKTELSNINTNQIAEQLNVGVPTLEDIIKSLMAPNRDPRDEFETPILKSDVLSIEDLKEGMKLSGTVRNVVDFGAFVDIGVKQDGLVHVSKLSKKFVKNPMDVVSVGDIVEVWILDIDKNKGKVSLTMIDPHE

SEQ ID NO: 71285 - protein, 273 aa, Staphylococcus haemolyticus
MTNLQDIVVNEMKVKKHIDSEQESREIIQFIKSYVQSHSFIKSLVLGISGGQDSTLTGKLAQLAVEELRNEGRDCQFIAVKLPYGVQKDAEEVEDALNFIHPDEIITVNIKPAVDQSVKSLNEAGIELTDFQRGNEKARERMKVQFSIASNRSGIVIGTDHSAENITGFYTKYGDGAADIAPIFGLNKRQGRQLLKYLNAPKHLYEKVPTADLEDDKPQLPDEEALGVTYDQIDDYLEGKHISSEARDTIENHYVKNAHKRELAYTRYTWPKN

SEQ ID NO: 71286 - protein, 191 aa, Staphylococcus haemolyticus
MNIPNQITVFRVILIPLFILFALVNFGFGNVSILGGFEIRIEQLIAAIIFIVASLSDFLDGYLARKWQLVTNMGKFLDPLADKLLVSSALIVMVQLGLTNSVVAIIIIAREFAVTGLRLLQIEQGFVSAAGQLGKIKTAVTMVAIIWILLGDLLATWIGIQIGQVLLYIGVLFTILSGIEYFYKGRDVFKH

SEQ ID NO: 71287 - protein, 159 aa, Staphylococcus haemolyticus
MVQAYLGLGSNIGDREQQLQEAIKIIDSIEGITVTKISPIYETAPVGYTEQPNFLNLCLEIDTELEPKELLKYCLETEQRLHRVRDIRWGPRTLDVDILLYGDKVIEEDDLEVPHPRMSERAFVLIPLNDIAPTQIEPRSKTRISDLVIPDDTVKKYKG

SEQ ID NO: 71288 - protein, 184 aa, Staphylococcus haemolyticus
MSEEMNDQMQVRRQKLQELIDLGIDPFGKRFERSATASELKSQWDEFSKEELHDKEDESHVSIAGRLMTKRGKGKAGFAHVQDLTGQIQIYVRKDQIGEEDFDNLWKGADLGDIVGIEGVMFKTNTGELSVKAKTFTLLSKALRPLPDKFHGLQDIEQRYRQRYIDLITNQDSTQTFINRSKII

SEQ ID NO: 71289 - protein, 244 aa, Staphylococcus haemolyticus
KVDILGVEFNNVTMLDMIEHVKTFFTQETEDNLFIVTANPEIVDYASEHSTYNQLINSADFVVPDGTGVIKASNRLGTPLKRRVPGIELMEHCLKIAHTNYQKVYLLGAKNEVVTLAHKNLQHKYPQAQFDYHHGYIDLNDETVIKRIKRFDPDYIFVGMGFPKQEEWIQKHRHTFKRTVMMGVGGSFEIYSGTKKRAPKLFIKLNIEWVYRLLIDWKRIGRMRTIPKFMFKVFKVQRKMKKKK

SEQ ID NO: 71290 - protein, 264 aa, Staphylococcus haemolyticus
MSVSVNINNVTKEYRIYRNNKERIKDALIPKNKNNTFFALDDVSITAHEGDVIGLVGINGSGKSTLSNMIGGSISPTSGNIERNGESCVIAINAGLNGRLTGVENIEFKMLCMGFKRKEIKQLMSQVIEFSELGEFIHQPVKNYSSGMRAKLGFSINVTINPDILVIDEALSVGDQTFTQKCLDKIYEFKEANKTIFFVSHNIRQVREFCTKIAWIEGGKLKEYGDLEEVLPKYEQFLKDFKKKSKADQKAFRKGLDEKRFIVK

SEQ ID NO: 71291 - protein, 175 aa, Staphylococcus haemolyticus
MKGFKFAGIVALLFALVLVTACGNVSNNGSGDSGNKSSSKDSIKIKHELGTTKVPKDAKRVVALEFSFVDALAALNVKPVGVADDNKPNRIIKPLKEKIGDYKSVGARKQPNLEEISKLKPDLIIADSNRHKGIYKELSKIAPTIELKSFDGDYNDNIDAFKTIAKALNKDDVGQ

SEQ ID NO: 71292 - protein, 247 aa, Staphylococcus haemolyticus
MNKVDAWLSKHDLKNLTTLIVVGAFILFLILLFMLMNHSDQGSNRITVSENAELRTGPNAAYPVIYQVEKGDTFTRLSKSGKWIEVESRDGSEKGWIAGWHTSLNIEAGANKKVNPLKNKVIVLDPGHGGNDQGASSNTSKKSLEKNYTLKTAKELRRALEKAGATVKLTRSDDTYVSLDDRQLNGDAYISIHNDSLDSPNANGATVYWYKNNQEALAETLNTNIQKKAMLFNRGLRQETSQVLRQT

SEQ ID NO: 71293 - protein, 119 aa, Staphylococcus haemolyticus
MILRYAANLKLAKELYSSAKPKLKGDQGMIDTFQNVFGLPESSVKLAGTVEAAAAAFYAASFLNKNLSRLGSIATFGVLGVAAYKHFEAGHGKEGAQHALDLLGLAALSFADTFDCDNK

SEQ ID NO: 71294 - protein, 296 aa, Staphylococcus haemolyticus
VLIIVLAACGNNGGSGKSDSKEETKSYKLDSGKTIKIPKDPKRIAVVAPTFAGGLHKLGANIVAVNNQVDQSPILKEKFKDTTKIGEADVEKVAKKKPDLIIVYSTDKNIKKYQKIAPTIVVDYGKHKYLEQQEMLGKIMGKEDEVKKWEDKWKKQTEKDGKEIKDAIGKDSTVSILDEFDKKVYTYGDNWGRGGEVLYQAFGLNMPKGQQDLVKKEGWAEVSQEKIEDVAGDYIVSTGEGKSKPSYETTNIWKNLPAVKNNNVIEVKAETYWYNDPYTLDFMRKDLKDKLLKASK

SEQ ID NO: 71295 - protein, 48 aa, Staphylococcus haemolyticus
DLGYTRATMDNTKGSETARSSKSHKVVLSSDCSLQLDYMKLESLVIVD

SEQ ID NO: 71296 - protein, 45 aa, Staphylococcus haemolyticus; identical to SEQ ID NO: 43823

SEQ ID NO: 71297 - protein, 114 aa, Staphylococcus haemolyticus
MEKAYRIKKNTDFQTIYKRGKSVANRQFVVYTYNSNKNHFRLGISVSKKLGNAVTRNRIKRAIRENFKIHKEDIIARDIIVIARQPAKDMTTLEIQGSLEHVLKIAKVFNKKIK

SEQ ID NO: 71298 - protein, 200 aa, Staphylococcus haemolyticus
MARFRGSNWKKSRRLGISLSGTGKELEKRPYAPGQHGPNQRKKLSEYGLQLREKQKLRYLYGMTERQFRNTFDIAGKQHGVHGENFMILLASRLDAVVYSLGLARTRRQARQLVGHGHVEVDGRRVDIPSYSLKPSQVITVREKSQNLDIIKESVEINNFVPEYLDFDADSLKGTFVRFPERSELPAEINEQLIVEYYSR

SEQ ID NO: 71299 - protein, 214 aa, Staphylococcus haemolyticus
MQHVDMLEIDVHFSKDNHLVVIHDDTINRTSNGEGKVKDYTLEELLKFDFGVKHDKSFQNTKISTFEEVLSLIKNFSKKLLIEIKVPHQYPGIEEAVLNALEIYKVPKYKAIIQSFDEDCVKRLNSLDSEYQLGLLISRKKYWYKSPNFEEISDYANFINPNYKLVNSRFIKNAHSQSLKVIPYTVNKPKDAKKLINLGVDGIISDLPEDIFRL

SEQ ID NO: 71300 - protein, 452 aa, Staphylococcus haemolyticus
MQFMPEKVRTSPQYESFHELYKNYTTKELTQKAKTLKLTNYSKLNKSELVLAIMEAQMEKDGNYYMEGVLDDIQPDGYGFLRTVNYSKGEKDIYISASQIRRFEIKRGDKVTGKVRKPKDNEKYYGLLQVDFVNDENAEVVKKRPHFQALTPLYPEERIVLETDPQNYSTRIMDLVTPIGLGQRGLIVAPPKAGKTSLLKEIANAISKNKPDAKLFILLVGERPEEVTDIERSVESAEVVHSTFDEPPEHHVKVAELLLERAKRLVEIGQDVIILMDSITRLARAYNLVIPPSGRTLSGGLDPASLHKPKAFFGAARNIEAGGSLTILATALVETGSRMDDMIYEEFKGTGNMELHLDRKLSERRIFPAIDIGRSSTRKEELLISKSELDSLWQLRNMFTDSTDFTERFIRKLKRSKSNKEFFQQLQKAAEESTKTGNRLFNECQFEGCVLS

SEQ ID NO: 71301 - protein, 263 aa, Staphylococcus haemolyticus
MFSDLEGKVVIITGAGSGIGKSFAENFGKSKAKVVLNYRSDRHLDEIEEIKHMISNAGGEAIAVQADVAVEEDVKRLVQSAVKEFGTLDIMINNAGFEKPIPTHKMSVDEWQKVIDINLTGAFVGSREAVNQFLKEDKKGIIINTSSVHDTIPWPNYVNYAASKGGLKLMMETMSMEYAQYGIRINNISPGAIVTEHTKEKFSDPETRAETLEMIPAKEIGEAQDVANVALFLASDLANYIHGTTIYVDGGMTNYPAFMGGKG

SEQ ID NO: 71302 - protein, 176 aa, Staphylococcus haemolyticus
MNKVVKTIASTTLAFGTLLGVSSAVLPVQDTAHAATQTKGYYYSYNGYVDKDAKFLTDKNFINAIKHDNIKFNGIKLAKTNSTTVKEKYNQKFTGVTSNGKKANKLQFIVKGDLTYSQLKKAYGKDLKKVKGNNNVKGSGIYVYKPNKDGLATSFVLNNNKVVEVDISYVGFTTSK

SEQ ID NO: 71303 - protein, 278 aa, Staphylococcus haemolyticus
MFNEKDQLAIDTIRALSIDAIEEANSGHPGLPMGAAPMAYTLWTRHLNFNPQSKDYFNRDRFVLSAGHGSALLYSLLHVSGSLELEELKQFRQWGSKTPGHPEFRHTDGVEVTTGPLGQGFAMSVGMALAEDHLAGKFNKDDFNIVDHYTYVLASDGDLMEGISHEAASFAGHNQLDKLIVLYDSNDISLDGELNKAFSEDVKKRFESYGWNHILVKDGNDLDAIDKAITKAKSQNGPTMIEVKTIIGYGAPNVSGTNGVHGAPLGSDERKLTFEAYG

SEQ ID NO: 71304 - protein, 200 aa, Staphylococcus haemolyticus
MSPVAIKDLFNNFFLMDDEEEVESPEERQRRVVQNEENETNNVQQNQPQQSERSYSNQSKLKTVPQKKTTRNYNSEERNVRMNQPPSKSNGKNVVTMNQTSQSYSGYESSKMCLFEPRVFSDTQDIADELKNRRATLENLQRIDKISAKRIIDFLSGTVYAIGGDIQRVGTDIFLCTPDNVEVAGSITDHIEQMESQHYE

SEQ ID NO: 71305 - protein, 230 aa, Staphylococcus haemolyticus
STTTEDQTGEVIDKIDVQANAININEIDAVLKQFEGIIEQVPPMYSSVKVNGKKLYEYARKGETVERPIRKVNIDSIARTSELQFEDGKCHFNIEVKCGKGTYIRTLATDIGKQLGYPAHMSLLTRINSGGFDIKDSITLDQISQLHEQDTLQPHLFPLEYGLKSLPKIYVSDENIKTRILNGQKFNKKQFNQTIEQQLVFIDSETEKVMAIYIQHPEKNHEIKPKKVFN

SEQ ID NO: 71306 - protein, 323 aa, Staphylococcus haemolyticus
MKVIEVTHPIQEDQLIKEDVAMAFGFFDGMHRGHHKVFEALDERAAAQNLKKAVTTFDPHPSVVLNPERKRTDYLTPLSDKLEMIEQHDVDYCIVINFSSRFASVTAEEFVQDYIINNRVKEVIAGFDFTYGKFGKGNMSVLNEMDEFSTTIVGKQEMETEKISTTAIREALKEGNLKKVNEQLGYLYRIKGTVVQGEKRGRTIGFPTANVQPSDDYVLPKKGVYAVSMAIGAENKIYRGVANVGVKPTFHDPSKAEVVIEVNIFDFNDNIYGERVIVYWHHYLRPEVKFDGIDPLVEQMNNDKEKAKYLLSVDFGDDVSYNI

SEQ ID NO: 71307 - protein, 89 aa, Staphylococcus haemolyticus
MAITQERKNEIIKEYRVHETDTGSPEVQIAVLTAEIAALNEHLREHKKDHHSRRGLLKMVGRRRHLLNYLRGKDIQRYRELIKSLGIRR

SEQ ID NO: 71308 - protein, 330 aa, Staphylococcus haemolyticus
EEIAEKLQNFDMESDQMDDFFDQLNDNDISLVNEKDSSDTDEKLNPNDLSAPPGVKINDPVRMYLKEIGRVNLLSAQEEIELAKRIEQGDEIAKSRLAEANLRLVVSIAKRYVGRGMLFLDLIQEGNMGLIKAVEKFDFSKGFKFSTYATWWIRQAITRAIADQARTIRIPVHMVETINKLIRVQRQLLQDLGRDPAPEEIGEEMDLPPEKVREILKIAQEPVSLETPIGEEDDSHLGDFIEDQEAQSPSDHAAYELLKEQLEDVLDTLTDREENVLRLRFGLDDGRTRTLEEVGKVFGVTRERIRQIEAKALRKLRHPSRSKRLKDFMD

SEQ ID NO: 71309 - protein, 246 aa, Staphylococcus haemolyticus
MEQITSAQNSKIKNANKLKKKRDRDKTGQALIEGIHLIEEAYQSGIAIKQLFVIEPNRTDEALKDYAEETFEINMKVAESLSGTITPQGFFAVIEKPKYDVKQAKQVLLIDRIQDPGNLGTLIRTSDAAGIDLIVMEKGTADPYQDKVLRASQGSVFHIPVITADLKTFIAGFNGPVYGTALENAQPYKEVASQDIFALLLGNEGEGVNKALLNETSQNLTIPIYGKAESLNVAIAGSILLYHLKG

SEQ ID NO: 71310 - protein, 370 aa, Staphylococcus haemolyticus
  MISC_FEATURE (279)..(279): X=any amino acid
GGGTLKNFSIFAMGIMPYITASIVMQLLQMDIVPKFSEWAKQGEVGKRKLSNVTRYFAIILAFIQSIGMAFQFNNYLGGKLIIHQSIMSYLLIAVVLTAGTAFLIWLGDQITQFGVGNGISIIIFAGILSTLPSSIIQFVQQAFVGNDDTTLAWLKVIGLIVGLVLLTIGAIYVLEAKRKIPIQYAKKQSAQRLGSQATYLPLKVNSAGVIPVIFAMAFFLLPRTLTLFFPKADWAQTISEYANPSNTYGMIVYVVLIIAFTYSMPLFKLILKKWLITXRNKVVTFQVIRPGEQTKKYITKVLYRLTFVGSIFLAVIAILPILATKFMSLPQSIQIGGTSLLIVIGVAIETMKSLEAQVSQKEYKGFGGR

SEQ ID NO: 71311 - protein, 216 aa, Staphylococcus haemolyticus
MNIILMGLPGAGKGTQASENVKKFPIPHISTGDMFRKAIKDETDLGKEAKSYMDRGELVPDEVTVGIVKERISEDDAKKGFLLDGFPRTIDQAEALNDIMSELGRNIDAVINIEVPEEELMNRLTGRRICEKCGTTYHLVFNPPKVDGICDIDGGKLYQREDDNPETVSNRLNVNVKQSKPILEYYNEKGVLKNIDGAKDIDDVTKDVIDILDQLK

SEQ ID NO: 71312 - protein, 261 aa, Staphylococcus haemolyticus
TPGKGGQVVEGVPVYNTVAEAKEETGANVSVVYVPAPFAADSILEAADADLDMVICITEHIPVVDMVKVKRYLEGRKTRLVGPNCPGVITADECKIGIMPGYIHKKGHVGVVSRSGTLTYEAVHQLTEEGIGQTTAVGIGGDPVNGTNFIDVLKAFNEDEDTKAVVMIGEIGGTAEEEAAEWIKANMTKPVIGFIGGQTAPPGKRMGHAGAIISGGKGTADEKIKTLNECGVKTADTPSEIGTTLIEAAKEAGIYEELLTI

SEQ ID NO: 71313 - protein, 313 aa, Staphylococcus haemolyticus
MRNVEKLNPGDSVENFFLIHRATQGVTAQGKDYMTLFLQDKSGDIEAKLWTVSKEDMQILKPETIVWVKGDVINYRGRKQMKVNQFRLAKPEDGFKTQDFVAGAPLSPDEIQENISHYILDIENANLQRITRHLLKKYQDKFFTYPAASSHHHNFASGLSYHVLTMLEIAKSLCNIYPLLNRSLLYSSIILHDLGKVRELSGPVATTYTVEGNLLGHISIASDEVAEAAKELGIDGEEVMLLRHMILAHHGKMEFGSPKLPHLKEAEILFFIDNIDAKMNMFEKAFKKTDKGQFTERIFGMENRQFYKPEKLD

SEQ ID NO: 71314 - protein, 322 aa, Staphylococcus haemolyticus
MLKVNTSLWNNTEHIVIAVSTGVDSMSLFHNLLSQSSRTYKQLTCLHVNHGLREASHKEEAFIEAFCKQYEITCYVKHLNLTDVVAQGKSIQADARQLRYEWFDEMMKRLDADVLLTAHHLDDQLETIFYRLFTGRSTRSTLGIDVQSIRNHYTICRPLLEVSKEDIRDYQHKYQVPYYEDSSNSDNKYVRNDIRNRLLPAINQNADLDSTHLLKLKRWHDIQLQESRKKAQSFIENDCLINKNGTQIQFSRNAFNQLDDIAKMILLDQLFEQLQLNKAFSEKQYHEWFHQISNQIAQFEISLTEKWVIQIAYDKFIIWAKM

SEQ ID NO: 71315 - protein, 246 aa, Staphylococcus haemolyticus
MAHNVKKAIIAWGDDDHLRQLKADVPIYYYGLNKNDDIYADNIQITDKGTQFDVYVNGEYYDQFLSPQYGDHNIQNALAVIAISYLEKMDVNNIKEALETFGGVKRRFNETNVANQVLVDDYAHHPREISATIETARKKYPNKDIVAVFQPHTFSRTQAFLDEFATSLSKADHVYLCEIFGSIRENTGDLTIQDLINRIDGSALIEENNIDVLDQFDNAVILFMGAGDIQKLQRAYEEHVGMTNEF

SEQ ID NO: 71316 - protein, 323 aa, Staphylococcus haemolyticus
EENFWSELPRPFFILAPMEDVTDIVFRHVVSEAARPDVFFTEFTNTESYCHSEGIHSVRGRLTFSEDEQPMVAHIWGDKPEQFREMSFGLAEMGFKGIDLNMGCPVANVAKKGKGSGLILRPETAAEIIQATKAGGLPVSVKTRLGYYDIEEWRDWLKHVFKQDIANLSIHLRTRKEMSKVDAHWELIAAIKQLRDDIAPNTLLTINGDIPDRKTGHELAMKYGVDGVMIGRGIFNNPFAFEKEPREHTSKELLNLFRLHLSLFEKYSSDESQQFKRLRRFFKIYVKGIKGASQLRHQLMSTESVDEARDLLDEFESKIEEDV

SEQ ID NO: 71317 - protein, 812 aa, Staphylococcus haemolyticus
MDLIQRIPINWKNYPSVQGDNIQYGQYIGAKANELLNKAESYMKEYEDEYISMEHVLRAAMDIDDTTKQFVGNKEEVVKEIITKVRGGNHVTSQNPEVNYEALEKYGRDLVEEVRQGKMDPVIGRDEEIRNTIRILSRKTKNNPVLIGEPGVGKTAIVEGLAQRIVRKDVPESLLDKTIFELDLSALVAGAKFRGEFEERLKAVLKEVKESDGRIILFIDEIHMLVGAGKTDGAMDAGNMLKPMLARGELHCIGATTLNEYREYIEKDSALERRFQKVGVSESDVEDTISILRGLKERYEVYHGVRIQDRALVAAAELSDRYITDRFLPDKAIDLVDQACATIRTEMGSNPTELDQVNRRVMQLEIEESALKNESDNASKHRLEELQEELSNEKEKQASLQSRVEQEKEIIAKVQEKRAELDRSRQALEDAQTEGNLEKAAELQYGTIPQLEKELKEFEEAYQDEQGDSERMIREVVSDEEIGDIVSQWTGIPVSKLVETEREKLLNLSDILHERVVGQDKAVDLVSDAVVRARAGIKDPNRPIGSFLFLGPTGVGKTELAKSLAASLFDSEKHMIRIDMSEYMEKHSVSRLIGAPPGYVGHDEGGQLTEAVRRNPYSVILLDEVEKAHSDVFNVLLQILDEGRLTDSKGRSVDFKNTIIIMTSNIGSQVLLENVKDTGDITEETEKAVMDSLHAFFKPEILNRMDDIVLFKPLSINDMSMIVDKILTQLNIRLMDQRISIEVSDDAKKSLGEEAYEPQFGARPLKRFVQRQIETPLARMMIKESMPEGTVVKVDINDDHELTFDVQKPENE

SEQ ID NO: 71318 - protein, 423 aa, Staphylococcus haemolyticus
RCLIANRGEIAVRIIRACREMGIETVAIYAKGDEQSLHVSLADQAVCIGEANPLDSYLNIERIIGAAEITGANAIHPGYGFLSESTTFAEKVEENNIQFIGPSKKTMELMGDKITARQTVDDAGVPVIPGSKGAVNSVDEIKELAEEIGYPVVLKAASGGGGKGIRIVKEPEQLEKSLKEAKSEGQKYFNDDRVYVEAFIPVAKHVEVQIIGDGKGNYVHLGERDCSVQRKNQKLIEECPCAALTEERRQQICADAVAVAKASNYRSAGTIEFLVTKDAHYFIEMNARIQVEHTVTEMRADRDLLQAQLYLMQHDKLPFSQDDIVFNGHVIEARINAENPEKKFQPTPGKVKKLHLPQGFNIRVDSLLYPGYQVSPYYDSLVAKVIVKDTNRKTAINKLKVALDEMVIDGFTTTANFLYAVLS

SEQ ID NO: 71319 - protein, 250 aa, Staphylococcus haemolyticus
MRIDLNCDLGEAFGNYSFGGDNQIIPLITSANIACGFHAGDENVMYDTIKLVKDNGVGIGAHPGLPDLKGFGRRNMDITPKEIYNLVVYQLGALDGFCKVHQTRINHVKPHGALYNMGAKDKNIAHAIAQAVYDFDSSLILVGLSNTLLITEAESLGLRTASEVFADRRYEDNGQLVSRKEADAVITNTEEALDQVLKMVIENKVVSKNGKEIDLKADTICVHGDGAHALEFVSQIREKLTKEGIDIQSL

SEQ ID NO: 71320 - protein, 121 aa, Staphylococcus haemolyticus
MSKTPYDIIGETALYNMIDHFYALVEKDDRINHLFPGDFAETSRKQKQFLTQFLGGPNLYTEEHGHPMLKKRHMEFKITTYERDAWLENMHTAITEAQFPAGVGEYLYERLRLTANHMVNS

SEQ ID NO: 71321 - protein, 265 aa, Staphylococcus haemolyticus
MAEELKIVDNRSREDANLSPVNKIEIYSFFDPFNTDCFKLSAIISKLRIEYNQYIRIRHILNPSLKVLTKCQAQSTSDFDNIALAYKAAELQGRLRAERFIHLMQNEIIPKKDIITEEMICDCIINAGLDYNEFKEDLQKSKLTESLKIDLHIAREMEIEQAPSLVFFSEDVHEEGLKVEGLYPYHIYTYIINELMGTPIEKNLPPKIEHYIQKKQLVTMEELLTIYEWPEKLMTKELKKLALQQKVEKLQYPEGDFWQSKMPRI

SEQ ID NO: 71322 - protein, 188 aa, Staphylococcus haemolyticus
MKRIAVYCGASKGKDPIYVKEAYELGKYMAEQGYELVFGAGSVGIMGAIQDGVLDHGGHAIGVMPKMLDEKEITSQKVSELILVDSMHERKQKMAELADAFVMTPGGAGSLEEFFETYSWAQIGIHEKPIAVYNLNGFFNPLQQLINSMIEEGFIDEKYKHLAPLYNSKEDLINGLLNFKPLGIRTYD

SEQ ID NO: 71323 - protein, 82 aa, Staphylococcus haemolyticus
MAKYTIVDMDTCIACGACGAAAPDIYDYDDEGIAFVILDDNQGTAEVPEELYEDMEDALEGCPTDSIKIEEEPFDGDALKFE

SEQ ID NO: 71324 - protein, 530 aa, Staphylococcus haemolyticus
MSVDTYGETPKIKKLLEKESSLFQLSTTQLYYKIMDNNEGELTELGAINASTGKYTGRSPKDKFIVTEPSYKDNIHWGDINQPIDEETFLNLYSKVLDYLDKKDELYVFNGYAGSDKDTQLKLTVINELAWHNLFAQNMFIRPDSKEEASNIKPNFTIVSAPHFKADPEVDGTKSETFVIISFKHKTILIGGTEYAGEMKKGIFSVMNYLLPMQDIMSMHCSANVGDKGDVALFFGLSGTGKTTLSAAPDRKLIGDDEHGWNKNGIFNIEGGCYAKAINLSKEKEPQIYNAIQYGTILENTVVNERGVVDFDDNSYTENTRAAYPIHHIDNIVLPSKAAHPNTIIFLTADAFGVLPPIAKLTKSQAMYHFLSGFTSKLAGTERGVTEPEPSFSTCFGAPFLPLNPIKYADLLGELIDKHEVDVYLVNTGWTGGKYGVGRRISLHYTRYMVDQAIKGKLKNAEFTKDEKFGLSIPTEMEDVPKTILNPINAWSDSDKYRAQADDLIKRFEENFKKFGPEVEEIANTGGFNK

SEQ ID NO: 71325 - protein, 275 aa, Staphylococcus haemolyticus
MWKWETEPDAKRCVVIVHNILEHTGRYAYVITMLRRNGYHVIMGDLPGQGQTSRANKGQLEHFDIYHETLIEWVRIANEYKIPTFVMGVGLGGLILLNVLEKTELPIEGMLLLSPLLEFKRNNKTRKNMLISNVGKGSKDARFKLGIETKDLTRNDEVIEETKQDGLMLRKVTYKWYNILLETMKDTVQHFKDIQSMPTLLMYGTEDKLLELRSFNELKNNLNTNEFYFKVWEGFYHEIHNEPERDQVMRYVLTFLNNSVNTMGFIVNEEEIEEV

SEQ ID NO: 71326 - protein, 329 aa, Staphylococcus haemolyticus
METLFSGIQPSGIPTIGNYIGALKQFADVQNDYDCYFCIVDQHAITVPQDKIKLRKQIRQLAAIYLASGINPEKATLFIQSEVPAHVQAGWMLTTISSVGELERMTQYKDKAQKRTDGIPAGLLTYPPLMAADIVIYNTNIVPVGEDQKQHMELTRNLVERFNSRYNDILVKPEIRMPKVGGRVMSLQDPTKKMSKSDDNQKNFISLLDEPNVAAKKIKSAVTDSDGIIKFDRDNKPGISNLLTIYSSLTNESIKDLEAKYENEGYGKFKTDLSEIVKDFLINFQEKYNEFYNSDKLDDILDHGRDKAQKASFKTLKKMERAMGLGRKR

SEQ ID NO: 71327 - protein, 121 aa, Staphylococcus haemolyticus
MPNGGSIVATTYLGGEFAVQNYNVMGVAKASLEANVKYLAYDLGPDNIRVNAISAGPIRTLSAKGVGGFNTILKEIEERAPLRRNVDQEEVGKTAAYLLSDFSSGVTGENIHVDSGFHAIK

SEQ ID NO: 71328 - protein, 232 aa, Staphylococcus haemolyticus
  MISC_FEATURE (221)..(221): X=any amino acid
MKVNKGGVLMITNESIVAEIVTDIPLSADIFRKYGIDFCCGGNISINEAVKNKKVDAETLIDEINELPNHDQGNINVKYLDAPSLIQYIQSRYHETMREEFKNLSPYVTKVAKVHGPNHPFLIQLQDLYRQYRDGMLEHMAQEDEHDFPALIKLSRGEQVDHSSDIIQSLVDDHTQTGQLLEDMRELTSQYQPPSEACQTWRLVYHRLMNLERETHEHVHXRNHVLFTNSVR

SEQ ID NO: 71329 - protein, 489 aa, Staphylococcus haemolyticus
MELIDAIPEDESVTLYSQGEFTDLCRGVHVPSTSKIKEFKLLSTAGAYWRGDSNNKMLQRIYGTAFFDKKDLKAHLEMLEERRERDHRRIGKDLELFTNNQLVGAGLPLWLPNGATIRREIERYIVDKEVSMGYDHVYTPVLANVELYKTSGHWDHYRDDMFPPMKLDETEEMVLRPMNCPHHMMVYNNRPHSYRELPIRIAELGTMHRYEASGAVSGLQRVRGMTLNDSHIFVRPDQIKDEFKRVVNMIQEVYSDFGFEDYTFRLSYRDPEDKEKYMDDDEMWNKAETMLKEAVDEMGLPYVEAIGEAAFYGPKLDVQVKTAMGKEETLSTAQIDFLLPERFELTYIGSDGENHRPVVIHRGVVSTMERFVAFLTEETKGAFPTWLAPKQVEIIPVNVDLHYDYARNLQDELKSQGVRVEIDDRNEKMGYKIREAQMQKIPYQIVVGDKEVENNQVNVRKYGSQDQETVEKDEFIWNLVDEIRLKKHR

SEQ ID NO: 71330 - protein, 585 aa, Staphylococcus haemolyticus
MTNRLNSVVIKLWLTILFIVTTVLILLSAALITFIQYYYTQQTENAIREDASRISHLVEQADNKTLAIEHSQQLIDGSGGVIIMANKSSSIKSSNSNTKDKMLEEIHKNSQFQRVFSQGKSTTQNITISNNGNSHSYILLGYPMKAQENANSKYSAVFIYQDLKSIEDTNNAITIIILITAIIFIAVSTVFAFFLSNRITKPLRQLRTQAINISKGDYSKQTSVSTKDEIGELSHTFNNMSSEIQENIEALSTQKNIRDSLINSMIEGVLGLNDKREVILSNKMADDIIKSIDKTVYKEIEKQIEATFVSKDTEFQEYEINNKYYVIIMSYVERIQQDGRSGIVVIIRDMTNEHNLDQMKKDFIANVSHELRTPISLLQGYTESIVDGIVTEPEEIRDSLSIVLDETKRLNRLVNELLNVARMDAEGLTVNKEKQPIKPLLSKMQMKYRQQAEDLELNMSLEPNIDDELWEYDADRIDQVLTNLIDNATRYTQPGDSISITTTTDDSYQTLYIKDTGSGISPEHLELVFDRFYKVEASRTRGKQGTGLGLFICKMIIEEHGGTIKVESKVNKGTTFIIKLPKPKN

SEQ ID NO: 71331 - protein, 314 aa, Staphylococcus haemolyticus
MIRNNAKISESTSNKVKAAMSKLGYIPNQAARTLITNKTLTIGLIQKSSAPEIRQNPFNSDVLNGINQACNVRGYSTRMTVSENSGDLYHEVKTMIQSKSVDGFILLYSLKDDPIEHLLNEFKVPYLIVGKSLNYENIIHIDNDNIDAAYQLTQYLYHLGHRHILFLQESGHYAVTEDRSVGFKQYCDDVKISNDCVVIKSMNDLRDFIKQYCIDASHMPSVIITSDVMLNMQLLNVLYEYQLRIPEDIQTATFNTSFLTENATPSQTSVNINPDVLGFTAGNTIIDVLRNETISFREKLISTQIVERVSTTKI

SEQ ID NO: 71332 - protein, 613 aa, Staphylococcus haemolyticus
CSNRIEKVLNKAPGVKDATVNLTTEQAMVTYYPGQTDLDTLIGRIRNLGYDAQPKQSEEDQATRKQQELKHKRNKLMISTILSLPLLMTMLVHLFNMHLPDILMNPWFQFILATPIQFIIGWQFYVGAYKNLRNGGFNMDVLVALGTSAAYFYSIYEMIKWFSGATNMPHLYFETSAVLITLILFGKYLEARAKSQTTNALSELLNLQAKEARLIDDNGMEKMVPLNQVNVDDILLIKPGEKIPVDGQIIKGETAIDESMLTGESMPVDKHVDDVVIGSTMNTNGVITIMATKVGKDTALSNIIKVVEEAQSSKAPIQRLADIISGYFVPIVIAIALLTFLIWITLVHPGQFEDALVAAISVLVIACPCALGLATPTSIMVGTGRAAENGILFKGGEYVERTNQVDTVVFDKTGTLTHGKPEVTYFEGDKDTLTLVASAENNSEHPLATAIVNYAKQHKVNLVNVTNYQTLPGHGIQAIIDDSMLFVGNQKLMLDHQINIQSIKQKMKQMEAEGHTVMLIAYDGELRGMIAVADTDTASAGVAIRQLSSVIIRSVMLTGDAERTAKAVAKEVGIDQVTAGVLPDDKAHHITQLLEQRQYVAMVGDGINDAPDL

SEQ ID NO: 71333 - protein, 221 aa, Staphylococcus haemolyticus
MASLKSIIRQGKQTRSDLKKLRNTGKVPAVVYGYGTKNTSVKVDEVEFIKVIREVGRNGVIDLGVGSKSIKVMVSDYQFDPLKNQITHIDFLAINMTEERTVDVPVHLVGEAAGAKEGGVVEQPLFDLQVTATPENIPESIEVDITELEVNDSYSVSDIKVSGDFTIENDPEESVVTVVPPTDEPTEEEVEAMEGEAATEEPEVVGEEKEEDSEEENKDEE

SEQ ID NO: 71334 - protein, 322 aa, Staphylococcus haemolyticus
MKKIAVLTSGGDSPSMNAAVRAVVRKAIYNNIEVYGIYQGYQGLLDDNIHKLELGSVGDTIQRGGTFLYSARCPQFKEASVRQKGLENLHKRGIEGLVVVGGDGSYRGAQRISEETKDIKTIGIPGTIDNDINGTDFTIGFDTALNTIIDSVDKIRDTASSHARTFIVEVMGRDCGDLALWAGLSVGAETILVPEANTDIKDIAEKIESGIKRGKKHSIVMVAEGSMSGQECADQLMKYINVDARVSVLGHIQRGGSPSGADRVLASRLGGYAVELLMQGRSGQGVGIMNNKLTATPFDEIFNGNDHKFNTDIYELAKELSI

SEQ ID NO: 71335 - protein, 456 aa, Staphylococcus haemolyticus
MRKTKIVCTIGPASESEEMLEKLMKAGMNVARLNFSHGSHEEHKARIDTIRKVADRLGKTIGILLDTKGPEIRTHDMKDGLIMLEKGKEVIVSMSQIEGTPEKFSVTYEDLINDVQVGSYILLDDGLVELQVKDIDKTKGEVKCDILNTGELKNKKGVNLPGVKVNLPGITDKDADDILFGIKEDVDYIAASFVRRPSDVLDIREILERENNHNITIFPKIENQEGIDNIEEILEVSDGLMVARGDMGVEIPPESVPIVQKDLIRKCNKLGKPVITATQMLDSMQRNPRATRAEASDVANAIYDGTDAVMLSGETAAGLYPEEAVKTMRNIAVSAEAAQDYKKLLSDRTKLVETSLVNAIGVSVAHTALNLNVKAIVAATESGSTAVTISKYRPHSDIIAVTPSEHTARQLALVWGAYPVIKKGRKTTDDLLNNAVATAVETGKVTNGDLIIITAG

SEQ ID NO: 71336 - protein, 485 aa, Staphylococcus haemolyticus
MTDIINLINDFGQSDPERVAVRHKDEELTYQQLMDESSKLAHLLQDNHKPLIVYGHMSPYMLVGMIGAIKAGCGYVPIDTSVPSERVNMIINKVQPDIIFNTTDTQLNYSNIQELTIQSIQGSDNPTLFDSQMGLTDVVYTIFTSGSTGEPKGVQIEYANLIEFAEWMVSLNESEGSQEWLNQAPFSFDLSVMAIYPCLTSGGTLNLVDKEMINKPKLLNEMLVNTPINAWVSTPSFMEMCLLLPNLNELSYTSLNHFFFCGEILPHRTAKALLDRYPSAVVYNTYGPTEATVAVTGIKLTPEIIEAYNPLPVGVSRPNTSLFTTDEGELVIKGNSVSLGYLDNKEKTDAVFNFEDGLRIYHTGDKAIEKDGQWFIQGRIDFQIKLNGYRMELEEIETQLRQSEFVRDTVVVPVYTTNRVIHLIGAVVPTEEVKDDLEMTRQIKSELKSRLPEYMIPRKFVWMKQLPLTSNGKLDRKQVAEDINA

SEQ ID NO: 71337 - protein, 720 aa, Staphylococcus haemolyticus
  MISC_FEATURE (540)..(540): X=any amino acid
MNKEQSEAVRTTEGPLLIMAGAGSGKTRVLTHRIAYLLDEKDVSPYNILAITFTNKAAKEMKERVEQLVGEEAQVIWMSTFHSMCVRILRRDADRIGIERNFTIIDPTDQKSVIKDVLKNENIDSKRFEPRMFIGAISNLKNELKTPDDAINEANDFHSQMVATVYSGYQRQLTRNEALDFDDLIMKTIQLFERIPDALEYYQNKFQYIHVDEYQDTNKAQYTLVKLLASKFKNLCVVGDSDQSIYGWRGADIQNILSFEEDYPDAKTIFLEQNYRSTKTILTAANEVIKHNSERKPKGLWTANTGGEKIKYYEAMTERDEAEYVVREIMKHRKAGKDYSDMAILYRTNAQSRVLEETFMKSNLPYTMVGGQKFYDRKEIKDLLSYLRVVANSNDEISLQRIINVPKRGIGPSSVEKIQRYANDNNISMFDALAEVDFIGLSKKVTQECIKFYELIQNLIKEQEFLEVSEIVVEILDKSGYRDMLEREQTLESRSRLENIDEFMSVPKDYEENTPLEEQSLINFLTDLSLVADIDEAQNXKWVTLMTMHSAKGLEFPIVFLMGMEESLFPHIRAIKSDDDHEMEEERRICYVAITRAEEVLYITHATSRMLYGRSQSNMPSRFLREIPEDLLETPSKQQRQTITPKTSTKQPKRGFSKRTTSSKKQVSASDWKIGDKVTHKSWGEGMVSNVNEKNGSVELDIIFKSEGPKRLLAQFAPIE

SEQ ID NO: 71338 - protein, 652 aa, Staphylococcus haemolyticus
  MISC_FEATURE (249)..(249): X=any amino acid
IKSRVNELHDLLNQYGYEYYVQDNPSVPDSEYDKLLRELIDIEEAHPEFKSPDSPTVRVGGEVQSSFEKVNHDTPMLSLGNAFNEQELRRFDQRIREQVGSVEYMCELKIDGLAVSLKYVEGRFVQGLTRGDGTTGEDITENLRTIHAIPLKINEPLSFEVRGETYMPRSSFIRLNEEKEKNEEQPFANPRNAAAGSLRQLDPKLAAKRKLSVFLYSVNDFTDFDATTQSGALDELDRLGFKTNHERMXVGDIEGVLEYIEKWTKQREQLSYDIDGIVIKVNDIEQQDEMGYTQKSPRWAIAYKFPAEEVVTTLQDIELSIGRTGVVTPTAILDPVRVAGTTVSRASLHNEDLIHERDIRIGDSVVVKKAGDIIPEVVKSITERRPEGTLPYSMPTHCPSCDHELVRIEGEVALRCINPKCQAQLVEGLIHFVSRQAMNIDGLGTKIIQQLYHHNVINDVADIFYLTEDDLLPLERMGSKKVENLLKAIEDAKANSLEYLLFGLGIRHLGVKASQVLAEKYETMDRLLEVTEEELISIHDIGDKLAQSVVTYLENEDIKALIEKLKYKNVNMVYNGIKTSDIEGHPDFKNKTIVLTGKLQQLTRKEASAWLELQGAKVTSSVTKKTDLVIAGEDAGSKLTKAEKFGTEIWTE

SEQ ID NO: 71339 - protein, 124 aa, Staphylococcus haemolyticus
MKERGYIEKLWREEKYNVLYHSQQHYNYIRELLKQSPTLNEVQLTINEALQTTPSNGSIINAYDHMWGYFKHKANEIEKNKSAQLKADFKQDNVQSKELLIFIKYLADKYEVSYLQKSTLLNFQ

SEQ ID NO: 71340 - protein, 400 aa, Staphylococcus haemolyticus
KKGTDLPGQVARKVDQNILRKLAAQVDDIVFISGTNGKTTTSNLIGHTLKANHIDIIHNNEGANMAAGITSAFIMQSTKNTKVAVIEIDEGSIPRVLKEVTPSMMIFTNFLRDQMDRFGEIDIMVNNIAKSISNKGIKLLLNADDPFVSRLKIASDSIVYYGMKAHAHEFEQSTMNESKYCPNCGKLLVYDYIHYNQIGHYHCSCGFKRELPKYEVSSFTVSPFLALNINETTFNMKIAGDFNAYNALAAYTVLRELGLNDESIRIGFESYTSDNGRMQYFKLDHKEAMINLAKNPAGMNASLLVGEQLVGKKVYVISLNDNAADGRDTSWIYDADFEKLSEQNIETIIVTGTRAEELQLRLKLAEVNVPIILVKDIYKATAMTMNYEGFTVAIPNYTSL

SEQ ID NO: 71341 - protein, 158 aa, Staphylococcus haemolyticus
MNELTVYHFMSDKLNLYSDIGNIIALKQRAKKRGIQLNVVEVNQTEGVTLDNCDIFFIGGGSDREQSIATKELSKIKTTLKDAIEDGMPGLTICGGYQFLGTKYITPDGTELEGLGILDFYTESRTERLTGDIVIESDTFGTIVGFENHGGRTHHNFG

SEQ ID NO: 71342 - protein, 237 aa, Staphylococcus haemolyticus
MWRWLSMDKSYGDIFKEMITMPNVQWPEVWQAIYETLYMTIVSTIFAFIFGLILGVLLFLSAKSNSKGARVFYSIVSFIVNLFRAIPFIILILLLIPFTSVILGTISGPTGALPALVIGAAPFYARLVEIAFKEIDKGVIEAAWSMGASTWTVVRKVLLPEAMPALVSGITVTAIALVGSTAIAGVIGAGGLGNLAYLTGFTRNQNDVILVSTVFILIIVFIIQFIGDWITNKIDKR

SEQ ID NO: 71343 - protein, 271 aa, Staphylococcus haemolyticus
MKKLLSLFLVLTLTVVLAACGNGSGDKDKKIVVGASPAPHAEILEKAKPLLKKKGYDLEIKTINDYTTPNKLLDKGELDANYFQHVPYLKTESKEKGYKIEDAGKVHLEPMAVYSKKYKSLKDLPKGATVYVSNNPAEQGRFLKFFVDEGLIKIKKGVKIEDAKFEDITENKKDIKFNSKQSAEYLPKIYQNEDVDAAIINSNYAIDQGLSPQKDSIAIEKPNNNPYANLIAVQKGHKDDEKIKALIEVLQSKEIQDFIKDKYKGAVVPAK

SEQ ID NO: 71344 - protein, 390 aa, Staphylococcus haemolyticus
QIDIRHPFKSRSHLAPSIFEDVQNSAYESFKKIVDTALKEEVDFVLIVGDLFDSENRTLRAEVFLKEQFMRLEKEQIFVYISHGNHDPLTEKITNDWPDNVSVFSNRVETYQAITKDGETIFVHGFSYQHDTSYENKIDEYPSSQGKKGIHIGMLHGTYSKSSTKNRYTEFILEDLNQKLYHYWALGHIHERQELSDMPPIYYPGNIQGRHFGEQGPKGCLLVEGDHLRLNATFIPTQQIRFEEATIKTDKLTKQGIYEAIQSFKESVRSDGKAFYRLTVNVDSDRPISSQDISQIKEMIDDYEENEHHFVIIETLTFNYMQMDEVPLVREFSADLIKDNKVFEEAMTELYLNPRASKYLEDYTEFDTVELVNRAEKILKADMRGESDDH

SEQ ID NO: 71345 - protein, 286 aa, Staphylococcus haemolyticus
MKIKFNDVTYTYQQGTPYEYKALDHINLTIEQGKYYAIVGQTGSGKSTLIQHFNGLLNPTNGNIEHDELTIHSKTKDKFIRPIRQKVGLVFQFPESQLFEDNIEREIEFGPKNFGMNVEEVKERAFDLLLELGFPRNVMSLSPFQMSGGQMRKIAIVSILAMNPDVIVLDEPTAGLDPKSRQQVMELFKEIQLKQNKTIILVSHDMNEVAKYAEEIIVMNDGNIIEQDTPKELFRQGSKLEEWHIDLPDIVQLQRDIEIKHGIKFKTIALTEKEFVSMYQEWQHHE

SEQ ID NO: 71346 - protein, 265 aa, Staphylococcus haemolyticus
KLIIGRYLPNNSVIHQLDPRAKVLFVFMFIILIFFAHSFATFGWIILLILMFMFLAKIKLWFLIKGLTPIFIFTIFTFFMHIFFTHGGTRLVDFGIIKIDSAGILEGIFISLRLITIVMVATIMTLSTSPIDLTDAFEKLLTPLKWFKLPVHQLSMIMSIALRFIPTLMDELDKIILAQKSRGSELSSGGLMTRIKAFLPLMIPLFISAFQRAEELAIAMEVRGYDANVERTSYRKLQWHIGDTMCLISIIPIAIVLLVLKYIGV

SEQ ID NO: 71347 - protein, 111 aa, Staphylococcus haemolyticus
MRILVNISYQGSQFLGFQIQQQGRTVQQQFEKILKRMHRRHVRIHPSSRTDRGVHAYEQFFHFDTDLNIEPKQWKYAMNSALPDDIYVKEVQQVDDHFHCRYDCLGKRYRY

SEQ ID NO: 71348 - protein, 245 aa, Staphylococcus haemolyticus
MYKTKGGFQLTLQTLSLVVGFMAWSIISPLMPYISQDVKVNPGQLSIILAIPVILGSILRVPFGYLTNIIGAKWVFFCSFVILLFPIFFLGQAQTPGMLMLSGFFLGVGGAIFSVGVTSVPKYFSKDKVGLANGIYGMGNIGTAVSSFLAPPIAGIIGWQTTVRSYLIIIAIFAILMFIFGDKNEPKVKVPLASQFKKLSSNYKLYYLSLWYFITFGAFVAFGLFLPNYLVNNFGIDKVDAGIRS

SEQ ID NO: 71349 - protein, 359 aa, Staphylococcus haemolyticus
KSVKQFLQLILGAIVVGLICLGISHWFKSQDNTGTGEKIYVYNWGEYIDPALIKQFEKETGIQVIYETFDSNEAMEAKIRNGGTHYDVAFPSEYTVQKLKRENLLEPLDHSKIPNIKNLDSDYMNMSYDRHNKYSLPYFFGTVGILYNKKVYPNEDFSSWQALYQPKYKNDILLVDGAREIMGLALNKLGYSLNDTNPSHLKEAEKDLNHLTPQVRGVVGDEVTMMLEQNEGNIAVVWSGVAAPLVQDSNKYNYVIPKEGSNLWFDNMVIPKTAQNKEGAYKFMNFLLDAKNNKQNTEWVGYATPNKAARQLLPKEVRDDHRFYPTQKEQSRLEVYKDLGPKTLGEYNESFLNFKMSLK

SEQ ID NO: 71350 - protein, 1096 aa, Staphylococcus haemolyticus
  MISC_FEATURE (1065)..(1065): X=any amino acid
  MISC_FEATURE (1075)..(1075): X=any amino acid
  MISC_FEATURE (1076)..(1076): X=any amino acid
  MISC_FEATURE (1081)..(1081): X=any amino acid
  MISC_FEATURE (1094)..(1094): X=any amino acid
HLNLHTTYDLLNSSLRINDVVKKAQNNHYDTLAITDTNVLYGFPKFYDACIKANIKPIFGMTVNVTDGLYTIETVVLAINNDGLRSLFQLSSAIKMKQKEVISVEWLKKYSTNFAIIFKQANQPHYSIVEQFQNHQNIFINHSSDLAFYNNIRVVWFKNARYLNQEDVETIPALEAIKNNTKIDLVNDTEDIGEHFPKQNELETLNIDREVWNNTLELASLCNASLEYHQNLLPKFDAPSGNSSKEYLWSQLQSSLKKMELNHDERYTKRLEHEYRVITEMGFEDYFLIVSDLIHYAKTHDVMVGPGRGSSAGSLVSFLLDITTIDPIRFNLLFERFLNPERVTMPDIDIDFEDTRRERVIQYVQDKYGKHRVSGIVTFGHLLTRAVARDVGRIIGFDDKTLNEISKLIPHQLGITLDEAYEDEQFKQFVHRNHRHEKWFELSKKLEGLPRHTSTHAAGIIINDQPLYNYAPLTLGDTGLLTQWTMTEAERIGLLKIDFLGLRNLSIIHQIITQVKKDLNISLEIEEIPFNDVDVFKLLSRGDTTGIFQLESEGVRKVLKRLQPEHFEDIVAVTSLYRPGPMEEIPTYISRRHNESEIKYLHPDLEPILKNTYGVIIYQEQIMQIASQFASFSYGQADILRRAMSKKNRAVLESERQHFVEGAIKNKYDEKISKQIFDLILKFADYGFPRAHAVSYSKIAYIMAYLKVHYPNYFYANILSNVVGNESKTAAIIDEAKNQKLKILPPNINESHWYYRATNSNIYLSLGAIKGVGYQSVKSIVDERYQNGKYKDFFDFTRRIPNRIKTRKLLESLILVGAFDTFGKTRSTLLSSIDQVLDEVSNVEQNDLLLDILTPKQSYADKDEFSDQMISSYEMEYLGFYVSNHPVEKQFNKKQYLGIYTLSNVVNHKPILVQVDQIKQIRTKNGQNMAFLVLNDGRHTMDAVLFPDKFKRYETQLNEREMYVVWGKFEKRKQQLQLILNQMDSVEHFEVTKINEASQIILRNIQNLDEIKQILNDHKNNHMIKVNIYNEQTGELDYLGSMDKTSNEIKNFVEAFDPKDIRILXTFMYKKIMIXXTDDLXNKVISLFYLKKFXMQ

SEQ ID NO: 71351 - protein, 253 aa, Staphylococcus haemolyticus
MNNLQRYFIDQNADESQRFFITNKEDIHHITNVMRNTIGNQIIITFKDKIVFKSEIITIENESIEIKLIEQIDINSELPVQVTICSGLIKADKYEWLIQKATELGADSFIVVEMDRSVVKLTPNKVQKKLERWQKIIKEAAEQSYRLIIPNIIFKSNLNEIYDTINHYDYILLAYEDEAKRGEVSLFKETLKKFKTNDRILLIFGPEGGFSEKEITLLNETSFNVGLGPRILRAETAPLYALSAISYENELMG

SEQ ID NO: 71352 - protein, 305 aa, Staphylococcus haemolyticus
MKKLLAITLALVLFLAACSLESPLKNDKNGKTNKKKSEITIGVSISTLNNPFFVKIKNGIEKDAKAQGMKVKVVDARDDSAKQTNDIEDLIQQQVDYLIVNPTDSSAISSAVESANNEGIPVITLDRSVDKGDVASFIASDNVEGGKMAGKYLVDKVGKNAKVGELEGVPGASATRERGKGFHEIADKQLKVIAKQSAKFDRAEGLNVTQNMLEAHPNIKAIFAQNDEMALGAIEAIGDKDIQVIGFDGNEDAMKSIKNGKLDATIAQQPELMGKEAIKVVNGLMKGDSVNKQIKVPLKLKQSKN

SEQ ID NO: 71353 - protein, 171 aa, Staphylococcus haemolyticus
MSEYITMIENMDVSDLRQISETTFYDTFEGEYSDDDFNQFFKESYNEKVLLNELNNPNSFHYFYKVNDQIAGYLKLNVGNAQTEPKGEDYLEIQRIYFYKTYQGGGRGQKFIQLALDKAKELNKNKVWLGVWEHNQQALSFYKKHGFEVTGQHEFITGEVVDIDLIMEREI

SEQ ID NO: 71354 - protein, 581 aa, Staphylococcus haemolyticus
EDKVIEVSNDFNTINFKELKEAVIHIEVDGTNYLQDTILKFGFYDGVDHVVIASDQLKEYPELIKWLENETTEKIVYDAKKTYVVAHRLDIDIKNIVFDVMLASYIIDPSRTIDDVNSVVSNYNQNFVQDDISIYGKGKKRHVPEDTILNKHIASITEAIYACKPEMVAELESHQQIDLLLNLELPLARILSEMEETGIYTDINDLRQMQSEIQGKLDLLISNIHEAAGEEFNINSPKQLGVVLFETLELPVIKKTKTGYSTAVDVLEQLQGQHPIIDYILEYRQLSKLQSTYVEGLQKVISKDNRIHTRFNQTLAQTGRLSSVDPNLQNIPVRLEEGRKIRKAFKPTSNDSVILSADYSQIELRVLAHITQDESMKEAFINEKDVHTATAMKVFDVEANEVNALMRRQAKAVNFGIVYGISDYGLSQSLNITRKKAKAFIDDYLASFPGVKQYMSDIVKDAKADGYVETLLHRRRYIPDINSRNFNLRGFAERTAMNTPIQGSAADIIKLAMVEFDRQIKQTSYHAQLLLQVHDELIFEVPANEVEDFSLFVEEIMEHALQLDVPLKVDSNYGSTWYDAK

SEQ ID NO: 71355 - protein, 290 aa, Staphylococcus haemolyticus
MPELPEVEHVKRGIEPYILNATIKSVTFSNKVIEGKQQGKETIIKGINLDGFRLNSESFKIKSIDRRSKYIVFTIEKNNNQRIILSHLGMAGGFFIVDKLSDISTPNYRKHWHVVFHLDNGKQLVYSDIRRFGELRNLATYNDYPAFLEIAPEPFDDNALNYFLDRIKLKKYQNKPIKQMLLDHKMIAGCGNIYACEALFRAGVLPERKVKDVSNQERQMLFYYVQEVLNEGINNGGTSISDYRHADGKTGEMQLHLNVYKQKTCKICGHDIEQKVIASRNSHFCPHCQK

SEQ ID NO: 71356 - protein, 431 aa, Staphylococcus haemolyticus
MIDRYSREEMANIWTDQNRYEAWLEVEILACEAWSELGHIPKEDVKKIRQNAKVDVKRAQEIEQETRHDVVAFTRQVSETLGDERKWVHYGLTSTDVVDTALSYVIKQANEIIEKDIERFIKVLEEKAKNYKYTLMMGRTHGVHAEPTTFGVKMALWYTEMKRNLKRFKEVRKEIEVGKMSGAVGTFANIPPEIEQYVCDHLGIDTAPVSTQTLQRDRHAYYIATLALVATSLEKFAVEIRNLQKTETREVEEAFAKGQKGSSAMPHKRNPIGSENITGISRVIRGYITTAYENVPLWHERDISHSSAERIMLPDVTIALDYALNRFTNIVDRLTVFEDNMRNNIDKTFGLIFSQRVLLALINKGMVREEAYDRVQPKAMESWETKTPFRQLIEKDESITNVLSKEELDECFNPEHHLNQVDTIFKRAGLE

SEQ ID NO: 71357 - protein, 201 aa, Staphylococcus haemolyticus
MPPQGGRKHPNQELIQIDTTNILFILGGAFDGIDEVIKRRLGEKVIGFASNEADKYDEEALLEQIRPEDLQSYGLIPEFIGRVPIVANLETLDVEALKNILTQPKNALVKQYTKMLELDNVELEFTEEALAAVSEKAIERKTGARGLRSIIEEALIDIMYDVPSSEDVTKVVITDKTINDEVDPELYDSEGNILNDSKTSA

SEQ ID NO: 71358 - protein, 448 aa, Staphylococcus haemolyticus
MHFIAISINHRTADVALREQVAFRDDALRLAHEDLFETKSILENVILSTCNRTEVYAIVDQIHTGRYYIQRFLARSFGFDVDDIKNMSEVKVGDEAVEHLLRVTSGLDSIVLGETQILGQMRDAFFLAQDIQTTGTIFNHLFKQAITFAKKAHNETDIADNAVSVSYAAVELAKKVFGKLKGKQTIIIGAGEMSELSLLNLLGSGIDDITVVNRTETNAYKLATKHGVNYNTLESLPTLLTNADIVISSTSSPDFIVTKSMIESVNLKRKASSLLLIDIAVPRDIEPNVNISENIFSYDVDDLKGLVDANLRERQMAADFIASQIPDEVQAHNDWVNMLGVVPVIRALREKAMTIQSETMDSIDRKLPDLSDRERTIISKHTKSIINQMLKDPIKQAKELSNDKRSNEKLELFQNIFDIDTADPYEDIKARKAQKEKEVSIRHIFSFE

SEQ ID NO: 71359 - protein, 499 aa, Staphylococcus haemolyticus
MEKYIMSIDQGTTSSRAILFDKEGDIKGVAQREFKQYFPKSGWVEHDANEIWTSVLAVMTEVLNENEINADQIEGIGITNQRETTVIWDKNTGRPIYHAIVWQSRQTQSICHELKEQGHEETFRNKTGLLLDPYFAGTKVKWILDNVDGAREKAENGDLLFGTIDTWLVWKLSGGEAHITDYSNASRTLMYNIYDLQWDDELLDLLNVPKQLLPEVKESSEIYAHTKDYHFFGQEVPISGIAGDQQAALFGQACFERGDVKNTYGTGGFMLMNTGEEPVKSESGLLTTIAYGLDGKVNYALEGSIFVSGSAIQWLRDGLRIINSAPQSENYATRVDSTDNVYFVPAFVGLGTPYWDSEARGAIFGLSRGTEKEHFIRATLESLCYQTRDVMEAMSKDSKIEVNNLRVDGGAVKNNFIMQFQADIVNTAVERPEIQETTALGAAYLAGLAVGFWDSKDEIANRWQLETEFTPQMSEEDRTKLYKGWKKAVEATQVFKLED

SEQ ID NO: 71360 - protein, 207 aa, Staphylococcus haemolyticus
MNRTKRITLLIVFTLIFGIIASFHESRLGKWIDTEVYEFIYSSESFITTSILLGATKLGEVWAMVCLSLMLVAYLMLKRFKIEALFFVIVMSLSSILNPLLKNIFDRERPTLLRLIDISGFSFPSGHAMGSTSFFGSAMFIANRKASGHNKGIIIGLCALFILLISISRVYLGVHYPTDVIAGIIGGAFCIVLSTLILKNHLYPTAT

SEQ ID NO: 71361 - protein, 186 aa, Staphylococcus haemolyticus
LSTAVASKEPRDGDFFPLTVNYEEKMYAAGKIPGGFKKREGRPGVFAMIYRQVIGYPEHIRPGITFASKRLLKFAIILYGLKLNMGDILGKGWKLLLIDIIVIIFSISLTLILNQIIKGNQDISMLTWYWFSRLQLAVAGHKDAVNMVEAGASEITEKDMLEAIFFGHDEINRLVAFQKKVVTHIQ

SEQ ID NO: 71362 - protein, 268 aa, Staphylococcus haemolyticus
SRKLKPEDTIVKFDNGGIIGDGNKSFVFGPCSVESQEQVDAVAKDLQARGEKFIRGGAFKPRTSPYDFQGLGIEGLKILKNVKDKFGLNVVSEIVNPADFEVADEYLDVFQIGARNMQNFELLKEAGRTNKPILLKRGLSATIEEFTFAAEYIASQGNKNIILCERGIRTYEKATRNTLDISAVPILKQGTHLPVMVDVTHSTGRKDIMLPTAKAALAVGADGVMAEVHPDPSVALSDSGQQMDLNEFDQFYNELKPLAELYNSKKLK

SEQ ID NO: 71363 - protein, 441 aa, Staphylococcus haemolyticus
MDIKMPKLGESVHEGTIEQWLISVGDYVDEYEPLCEVITDKVTAEVPSTVSGTITEILVSEGETVQIDHVICKIETSETDNSTNTKNTDIETVKDSTDLNINGNDTLTVETSASASKNTSDKEVSHSVKSNAHTQASLLNNGRYSPVVFKIASENDIDLSSVPGTGFEGRVTKKDIENYINSSHQKPKINNNSQSNFEHTKSNVYSTQSQIGQSIPVGVRKAIAQNMVTSVTEIPHGWMMLEVDATNLVKTRNHHKNSFKENEGYNLTFFAFFVKAVAEALKSNPLLNSSWDGEEIILHKDINISIAVADEDKLYVPVIKHADEKSIKGIAREINELALKARNKQLSQEDMSGGTFTVNNTGTFGSVSSMGIINHPQAAILQVESIVKKPVVIDDMIAIRSMVNLCISIDHRILDGVQTGRFMSQVKERIEQFTIENTSIY

SEQ ID NO: 71364 - protein, 145 aa, Staphylococcus haemolyticus
MDLNFDLYMNGVVEQARNEIENAGYEQLTTADEVDKVLQQNGTSLVMVNSVCGCAGGIARPAASHALHYDKLPDRLVTVFAGQDKEATQQARDYFEGYAPSSPSFALIKDGKITEMIERHQIEGHDVMDVINQLQGLFDKYCDER

SEQ ID NO: 71365 - protein, 325 aa, Staphylococcus haemolyticus
  MISC_FEATURE (300)..(300): X=any amino acid
MLKLNPYKIGFRTLKTAVGITLGVILAKWIGLDNYASSAILIVLCIKHTKVHSVQAIVSRFVSCILILLFGSLVFSLLGQNALVLGLIVLLFIPITVMLKVQEGVVTSCVILLHVFNATTINLHLIINELLLLTIGLGIAFIMNLIMPSLDKTLVSFKKDIEKGFKEIFMTYSEACSNYNNDFTLSFEKLQLDIRKAKSIAFRDVKNHFIRNENSYYHYFDMRQEQLELLRRIKPLLNQVTVDDPLLTDVSHLMSEIGNNVNSNDYTALRLHSLYEIRLSLDELPLPKSHQSLKSRSSMXAILNELEEYLNIKSQFGSLRLHNEI

SEQ ID NO: 71366 - protein, 100 aa, Staphylococcus haemolyticus
MTKVTREEVEHIAHLARLQISEEETEEMANTLESILDFAKQNDTADTEGIEPTYHVLDLQNVLRDDEAIEGIPQELALKNAKETENGQFKVPAIMNEEEA

SEQ ID NO: 71367 - protein, 384 aa, Staphylococcus haemolyticus
MRRKLKMSIRYESVEKLSEMIKNNEIKPSEIVKDIYDAIEETDPTIKSFLALDKDNAIKKAKELDELQAKGQMEGKLFGIPMGIKDNIITKDVETTCASKMLEGFVPIYESTVMNKLHDENAILIGKLNMDEFAMGGSTETSYFKQTVNPFDHTAVPGGSSGGSAAAVAAGLVPFSLGSDTGGSIRQPAAYCGVVGMKPTYGRVSRFGLVAFASSLDQIGPITRNVKDNAIVLETISGVDKNDSTSAPVEDVDFTSEIGKDIKGLKVALPKEYLGEGINEDVKEAVKNAVETLKSLGAEVDEVSLPNTKYGIPSYYVIASSEASANLARFDGIRYGYHSKEAQSLEELYKMSRSEGFGAEVKRRIFLGTFALSSGYYDAYYKKS

SEQ ID NO: 71368 - protein, 165 aa, Staphylococcus haemolyticus
MYIKEGEIKMENQLNQPSQRERNAGKLIGYSSLILCILLIIHNFIALDTLTAKTLLSQAGQKASDSAVANILNSFRYTGIMYILAYLAGVIALWNRHKYLWWFMFAVYVSNVLFTLVNVTMVINAIITAKSVLFIIPIIIVIVGSTVLALYMLVISIIRKSTFNR

SEQ ID NO: 71369 - protein, 177 aa, Staphylococcus haemolyticus
MSNSQGIRKSMSESKSYKAKQVFPQDTNHHHTMFGGSLMANIDEIAAITAMKHANAQVVTASTDSVDFLRPIKTGDITSYEAMVSYAGTSSMEVCVQIIIEDVLNKERHLAALSFLTFVALDDNGKPVQVPDVYPESKVEKWFYESAPKRVQRRKDRREESKNTIEFLSNAQHIEEL

SEQ ID NO: 71370 - protein, 456 aa, Staphylococcus haemolyticus
MKLILDLVVNHTSDEHPWFIESKSSKDNPKRDWYIWADPKDDGSEPNNWESIFNGSTWQFDETTNQYYFHLFSKKQPDLNWDNPEVRESVFNMMNWWFEKGIDGFRVDAITHIKKTFEAGDLPAPEGKKYAPAFDVDMNQPGIQNWLQEMKDESLSQYDIMTVGEANGVNPDNAEEWVGEDKGKFNMIFQFEHLGLWSTGDSQFDVKSYKEVLNRWQKRLEGIGWNALFIENHDQPRRVSTWGNDKDYWFESATSHAVVYFLQQGTPFIYQGQEIGMTNYPFESIETFNDVAVRNEYQIVKEQGGDVDQLLDKYRMENRDNSRTPMQWNNSTNGGFTEGKPWFPVNPNYKDINVAHQLEDEHSVLNFYKKLIQLKKSHDIYMYGQFDLIDAENENVFAYTRQLEGKTVVVAGNLTDKQSSLTLPFDIEEDAIKLHNYNSQLDATSLKPFEAFVAEI

SEQ ID NO: 71371 - protein, 170 aa, Staphylococcus haemolyticus
MEEKGYKFVEDSGRGYRRVVPSPMPINIVELDSIETLIKHGTLVIAAGGGGIPVVKEEGNYKGVDAVIDKDKTSALLAAHLKSDQLIILTAVDYVYINYGKDNQEALGEVTVDEMNQHIADGQFAKGSMLPKVEAALQFIEKNPEGSVLITSLEDLGDALDGKIGTLIKK

SEQ ID NO: 71372 - protein, 315 aa, Staphylococcus haemolyticus
MSEEQTIMEKLFKTLDEKAKVLNEQNGQSFIENLGLAMEDVYSNKRELLEQATLQDRRKAFQFAYLSLMQEETIQANHQITPDSIGLILGFLVQKFTENNEELHVVDIASGAGHLSASVNEVLKDTTIMHHLIEVDPVLSRVSVHLANFLEIPLDVYPQDAIMPLPLEEADIVIGDLPIGYYPLDERSHEMQLGFKEGNSYSHYLLIEQAITALKQSGFAFLVVPSNIFENDNVKQLENFIATETEMQAFLNLPKTLFKNENARKSILILQKKKSNETKPVEVLLANIPDFKNPNQFQGFIGELNTWMKDNHPQK

SEQ ID NO: 71373 - protein, 322 aa, Staphylococcus haemolyticus
MSMVQAINNALKTELQNDENVLVFGEDVGVNGGVFRVTEGLQKEFGEDRVFDTPLAESGIGGLALGLTVEGFRPVMEIQFLGFVFEVFDEVAGQIARTRFRSGGSKVAPVTIRAPFGGGVHTPELHADNLEGILAQSPGIKVVIPSGPYDAKGLLLSSIRSNDPVVYLEHMKLYRSFREEVPEEEYTIDIGKANVKKEGNDITLIAYGAMVQESEKAAEELEKEGYSVEVIDLRTVQPIDIDTLVASVEKTGRAVVVQEAQRQAGVGATVAAELAERAILSLEAPIARVAAADTVYPFTQAENVWLPNKNDIIEKAKATLEF

SEQ ID NO: 71374 - protein, 337 aa, Staphylococcus haemolyticus
MAFEFRLPDIGEGIHEGEIVKWFVKAGDTIEEDDVLAEVQNDKSVVEIPSPVSGTVEEVVVDEGTVAVVGDVIVKIDAPDAEDMQFKGGHDDDASSEEAPAQEEAKTEEAPAASASQDEEVDENRQIKAMPSVRKYAREKGVNIKAVAGSGKNGRITKEDIDNHLNGGGAQAATASNESAAASTSEDTSAVQTQSVPEGDFPETTEKIPAMRRAIAKAMVNSKHTAPHVTLMDEIDVQDLWDHRKKFKEVAAEQGTKLTFLPYVVKALVSALKKYPALNTSFNEEAGEIVHKHYWNIGIAADTDRGLLVPVVKNADRKSIFQISDEINELAVKARDG

SEQ ID NO: 71375 - protein, 352 aa, Staphylococcus haemolyticus
MTQNDSMAELKQQALVDINEAQNERELQDVKVKYLGKKGSVSGLMKNMKDLPNEEKPAYGQKVNELRQTIQKELDEKQELLKNEKLNQQLAEETIDVTLPSRQISIGSKHPLTRTVEEIEDLFLGLGYEIVDGYEVEQDYYNFEALNLPKSHPARDMQDSFYITDEILMRTHTSPVQARTMEKRNGQGPVKIICPGKVYRRDSDDATHSHQFTQIEGLVVDKNIKMSDLKGTLELVAKKLFGADREIRLRPSYFPFTEPSVEVDVSCFKCKGKGCNVCKHTGWIEILGAGMVHPNVLEMAGFDSNEYSGFAFGMGPDRIAMLKYGIEDIRYFYTNDVRFLEQFKAVEDRGEA

SEQ ID NO: 71376 - protein, 529 aa, Staphylococcus haemolyticus
MLISNEWLKDYVDAGVKVEDLAERITRTGIEVDNMIDYSKDIKNLVVGYIQSKEKHPDADKLNICQVDIGEEEPVQIVCGAPNVDAGQHVIVAKVGGRLPGGIKIKRAKLRGERSEGMICSLQEIGISSNVVPKAYENGIFVFPTEVEPGTDALTALYLNDQVMEFDLTPNRADALSMVGTAYEVAALYQTEMTKPETQSNETSESATNELSVTIDNPEKVPYYSARVVKNVSIEPSPIWVQARLIKAGIRPINNVVDISNYVLLEYGQPLHMFDQDHIGSKEIVVRQAKDEETMTTLDNNERKLVDTDIVISNGQEPIALAGVMGGDFSEVTEQTTNVVIEGAIFDPVSIRHTSRRLNLRSEASSRFEKGIATEFVDEAVDRACYLLQELASGEVLQDRVSSGDLGSFVTPIDITAEKVNKTIGFNLSNDEIQSIFRQLGFETTLKGETLTVNVPSRRKDITIKEDLIEEVARIYGYDEIPSSLPVFGEVTCGELTARNVTLITGRNRVRVRWYTKNFNIHSILRSRL

SEQ ID NO: 71377 - protein, 93 aa, Staphylococcus haemolyticus
IKPHATVITLDIQGKMLSSEGLAEEMQRRMTQGQSDFVFVIGGSNGLHEDVLQRSNYALSFSKMTFPHQMMRVVLIEQVYRAFKIMRGEAYHK

SEQ ID NO: 71378 - protein, 257 aa, Staphylococcus haemolyticus
EKTTSNALKLKAFFNSDVPVHRGSAKPLINKAIDASQVHGESGMDGYDFPSISNDQLASTNSISAMREILLHSDTPITLIALGPLTNIALLISTFPEVKDHIREIVLMGGSSGRGNVTPLAEFNIYSDPESAHIVFESDLPITMIGLDLARQSLLTHDYLASFEHLSRTSAMLYQIFQHYRENDFAKGLKLYDVFTVLYLLDPESYETILASVRIELHGTLTKGATVVDYDSHYPNCKIVTSSINKNYCSIFKDTIK

SEQ ID NO: 71379 - protein, 391 aa, Staphylococcus haemolyticus
MKNNKLKIIAFILVLIVLILLIILFVIKVTNYSIKDSEYNNVNDNKAYIEHRDKNHKTVDKLKTVQAKDDNIEQINTYLKNVHFNGSITVLKDGKLMLDKGYGYQNISSKKKSNANTMYLIGSAQKFTTGLILKHLELSNKININDPVTKYLPWFKTNKTITLKDLMLHRSGLYKFSANPNTKSLDGAVHDIQRRGINSKYYHKHLYNDANYLVLAQVIEAVTHHSYVENYYKFLAEPYHLEHSAFFNEKPYKKNMATGYKVKNEKLKTMKPNTLDQYYGAGNLFMSTHDMARLVNDLQQNNIFNQAVTTSLLQEIGSTKYPESYRYGFYSTPQVNRINGVFFGQIFTVYFNEDYIIVLATNKVDYSKVSNESIISHIYYQLLGQNIYETK

SEQ ID NO: 71380 - protein, 429 aa, Staphylococcus haemolyticus
MRETYYELIDERVFEHELTNGLRLFVIPKNGFQKTFVTYTTQFGSLDNTFKPHNQNDFVTVPDGVAHFLEHKLFEKDDTEDLFTAFANDNAQVNAFTSFDRTSYLFSATDNVERNILRLLEMVETPFFSKETVDKEKGIIAEEIKMYQEQPGYKIMFNTLRAMYQKHPIKVDIAGSVESIYNITKDDLYLCYETFYHPSNMVLFVVGDVNPENIRDIVETHENKRDKTNQPSIERATVDEPTNVITPFVSEEMKLQSPRLMLGFKNEPTEASPHEYVQHDLEMTLFFELIFGEETEFYQTLLNEDLIDETFGYQFVLEPTYCFSIITSATQYPDKLKEVLLSELNKYCGNLDDQEAFELLKKQFIGEFISSLNSPEYIANQYSKLYFEGVSVFDMLDIIDNITLDSINETATKFLNINNMVDSRLEPKA

SEQ ID NO: 71381 - protein, 234 aa, Staphylococcus haemolyticus
MRALVLGGSGTIGTAIVERLLEEGNEVIIQYFQSDLKALQDKYKGEAVEFIQADLTQNIDLETTFAHIKYLDCLIYSSGTALYGLLQDMSDIDIDLSYNIHVKQLIRCCRYFIDLIRQSEFGRIIVISSIWGETGASMETIYSAMKSAQIGFVKALSQELAMTNVTVNAITPGFVSGNMSQVFNSDELKAILEELPQQRMINPCEIAHTCAYLWNPLAKSITGTVQKVNGAWYI

SEQ ID NO: 71382 - protein, 69 aa, Staphylococcus haemolyticus
MKTIGETLKGRRERLGMTLAELEERTQIKRDTLKLIEQNQFDKLAKVDYAEGFIRRYASVVNIDSQQLI

SEQ ID NO: 71383 - protein, 266 aa, Staphylococcus haemolyticus
MNKPIGVIDSGVGGLTVAKEIMRQLPNETIYYLGDIARCPYGPRPGDEVKQFTTQLANKLMQFDIKMLVIACNTATAVALEHLQQMLPIPVIGVIEPGSRTAIMTTKNQNVLILGTEGTIKSEAYRHHIKHINPNVHVLWCSLPRFVPLVEQMRYDDPTITSIVIHQTLKQWRNTDADTIILGCTHYPLLYKPINDYFGGEKKVISSGLETAREVSALLTFSNEHASYTQHPEHRFFATGDTVHIKNIILQWLKLDVEVERISVDE

SEQ ID NO: 71384 - protein, 193 aa, Staphylococcus haemolyticus
MADIVIATNNKGKINDFKSIFPNDNVIGISELIKDFDVEETGTTFEENARLKSEEAAKVLNKRVIADDSGLEVFALNGEPGVYSARYAGLDKSDDANIDKLLKNLDGIENRDARFVCVISMSAPNETTQTFKGTVSGVITTERQGEHGFGYDPIFYVPEKGKTMAQLTTTEKSEISHRGNAIKKLNAYLESEK

SEQ ID NO: 71385 - protein, 222 aa, Staphylococcus haemolyticus
MLESKWGLRFIALLLAIFFYLSVNNVFGNIFSNDNLSQNSSKTIEDVPVEIIYNSKDLHVTKAPETVNVTVSGPQSKLLKIENTDDIKVAVDLSNAKAGKYKEDYIVKGLSNDINYNVKPKQAYVTLENKETKTMHVQADIGKDDIDPNYKVKDSSVEPNSVKVTGGREQLKKIAYLKATYKEANKLSQDTSDVADVTAFDKSLNKLDVNIQPNQVKLNVKL

SEQ ID NO: 71386 - protein, 54 aa, Staphylococcus haemolyticus
MQYFNEWWKQLFGESEGKDFKGIYPSSANYTTDLHSLGQYVQEGRRFLFETVVK

SEQ ID NO: 71387 - protein, 228 aa, Staphylococcus haemolyticus
MRIKSMAKSELPRERLIHNGAKSLSNSELLAILINTGRHGFSSLDIANELLISFNGLKELKHLSINDLTTIKGIGLYKAVILKAAFELGERMYARDFNEKIKITSPSDVSNIMMSKMKDLTQEHFVVLLLNSKNIVIKEETIYKGTLNSSVIHPREVFKAAIRASSNAIIVLHNHPSGDVTPSKEDIETTIRLKECGELLGIQVLDHIIIGDQKYASLVEEGYFDLRN

SEQ ID NO: 71388 - protein, 171 aa, Staphylococcus haemolyticus
MANLNLDPAHSGVNFSIQHLVVSNVKGRFNEFDANISGDFNDLSSLQGTFTVKANSIDTKVADRDNHLKSADFLDAENYPEIKFEITNVDDKSVTGNLTMKDQTHEETFDLDYKGTSLNPLNGKNTAGLVITGSLNREKYGITFNQQLETGGFLLGKDLNVEFDLEFPLED

SEQ ID NO: 71389 - protein, 556 aa, Staphylococcus haemolyticus
MKQLHANEVGVYALGGLGEVGKNTYAIEYKNEIVIIDAGIKFPDDNLLGIDYVIPDYTYLEQNQDKIVGLFITHGHEDHIGGVPYLLKQINVPIYGGPLALGLIRNKLDEHNLLRNASLNEITEDSVIKSKHFEISFYLTTHSIPEAYGVIIDTPEGKIVHTGDFKFDFTPVGEPANIAKMAELGKEGVLCLLSDSTNALVPDFTLSEREVGQNVDKIFRNCKGRIIFATFASNIYRVQQAVEAAIKYNRKIVTFGRSMENNIKIGMELGYIKAPPETFVEPNKINNIPKHELLILCTGSQGEPMAALSRIANGTHKQIKIIPDDTVVFSSSPIPGNTKSINRTINALYKAGADVIHSKISNIHTSGHGSQGDQQLMVRLIQPKYFLPIHGEYRMLKAHGQTGVDCGVKEENVFIFDIGDVLALTHDSARKAGRIPSGNVLVDGSGIGDIGNVVIRDRKLLSEEGLVIVVVSIDFNTNKLLSGPDIISRGFVYMRESGQLIYDAQRKIKTDVISKLNANPNIQWHQIKSSIIETLQPYLYDKTARRPMILPVIMKV

SEQ ID NO: 71390 - protein, 292 aa, Staphylococcus haemolyticus
KEIVDITGKDHLYFYDAAAPIIEKESIDMDKVYLKSRYDKGEAAYLNCPMTEEEFNRFYDAVLEAEVAPTNEFEKEKYFEGCMPFEVMAERGRKTLLFGPMKPVGLEDPKTGKRPFAVVQLRQDDAAGTLYNIVGFQTHLKWGAQKEVIRLIPGLENVDIVRYGVMHRNTFINSPDVLNEKYELIKEDRIQFAGQMTGVEGYVESAASGLVAGINLAHKLLDKGEVIFPRETMIGSMAYYISHAKNEKNFQPMNANFGLLPSLEKRIKDKKERYEAQANRALEYLENYKKTL

SEQ ID NO: 71391 - protein, 297 aa, Staphylococcus haemolyticus
MEEIQVTFLNMLKVERNFSAHTLKSYHDDLVQFNHFLEQELLNLRTFEYKDARNYLSYLYSQNLKRTTVSRKISTLRTFYEFWMTQDETIINPFVQLVHPKKENYLPQFFYEEEMEALFETVAKDTKKGLRDRVILELLYATGIRVSELVNIQLKDIDMSLPGVKVLGKGNKERFVPFGEFCRQSIEQYLREFKPIQHTKHSFLLVNMNGAPITERGVRYVLNDVVKRTAGVTEIHPHKLRHTFATHLLNQGADLRTVQSLLGHVNLSTTGRYTHVSNQQLRKVYLNAHPRAKKESK

SEQ ID NO: 71392 - protein, 181 aa, Staphylococcus haemolyticus
MSKTSLHATTIYAVRHNGEAAMAGDGQVTLGEQVIMKQTARKVRRLYEGKVLAGFAGSVADAFTLFEKFETKLQQFSGNLERAAVELAQEWRGDKQLRQLEAMLIVMDKDAILVVSGTGEVIAPDDDLIAIGSGGNYALSAGRALKRHASQLSAKEMAYESLKVASDICVFTNDNIIVETL

SEQ ID NO: 71393 - protein, 73 aa, Staphylococcus haemolyticus
SMAKQDVIELEGTVLDTLPNAMFKVELENGHEILAHVSGKIRMNYIRILPGDKVTVEMSPYDLSRGRITYRYK

SEQ ID NO: 71394 - protein, 37 aa, Staphylococcus haemolyticus; identical to SEQ ID NO: 71226

SEQ ID NO: 71395 - protein, 121 aa, Staphylococcus haemolyticus
MARIAGVDIPREKRIVISLTYVYGIGTSTAKKIVEEANVSADTRVKDLTDDELGRIREVVDSYKVEGDLRREQNLNIKRLMEISSYRGIRHRRGLPVRGQKTKNNARTRKGPVKTVANKKK

SEQ ID NO: 71396 - protein, 129 aa, Staphylococcus haemolyticus; identical to SEQ ID NO: 43880

SEQ ID NO: 71397 - protein, 314 aa, Staphylococcus haemolyticus
MIEIEKPRIETIEISEDAKFGKFVVEPLERGYGTTLGNSLRRILLSSLPGAAVKYIEIEGVLHEFSAIDNVVEDVSTIIMNIKKLALKIYSEEDKTLEIDVRDEGEVTASDITHDSDVEVLNPELKIATVSKGGHLKIRLVANKGRGYALADQNNTSDLPIGVIPVDSLYSPVERVNYTVENTRVGQSSDFDKLTLDVWTNGSITPQESVSLAAKILTEHLNIFVGLTDEAQNAEIMIEKEEDQKEKVLEMSIEELDLSVRSYNCLKRAGINSVQELADKSEADMMKVRNLGRKSLEEVKYKLEDLGLGLRKED

SEQ ID NO: 71398 - protein, 123 aa, Staphylococcus haemolyticus
MGYRKLGRTSDQRKAMLRDLATSLIVSERIETTEARAKEVRSVVEKLITLGKKGDLASRRNAAKTLRNVEILNEDETTQTALQKLFGEIAERYTERQGGYTRILKVGPRRGDGAESVIIELVD

SEQ ID NO: 71399 - protein, 298 aa, Staphylococcus haemolyticus
MFDSIRETIDYAVENKMSFADIMIQEEMELSGKTRDEVRETMKQNLDVMRDAVIKGSTGEGVKSVTGYTGQDAIKLAKYNENNHALSGHEMVEAVKGAVATNEVNAAMGIICATPTAGSSGTIPGVLFKLEKTHDLTEEQMIDFLFVSSLFGRVVANNASVAGATGGCQAEVGSASAMAAAAAVSIFGGEPEASGHAMALAISNLLGLVCDPVAGLVEIPCVMRNAIGSGNALISADLALAGVESRIPVDEVIEAMDKVGRGLPAELRETGLGGLAGTPTGEAIKRKIFGEAEVNSFS

SEQ ID NO: 71400 - protein, 186 aa, Staphylococcus haemolyticus
MSKIAFTGGGTVGHVSVNLSLIPTATDKGHDAFYIGSKTGIEREMIESQLPNIEYYPISSGKLRRYLSVDNAKDVFKVLKGVIDARKVLKREKPDLLFSKGGFVSVPVVIAARSLNIPTIIHESDLTPGLANKISLKFAKKIYTTFEDTLKYLPKDKADFVGATIRQDLKEGNQSRGYQLTGFDAS

SEQ ID NO: 71401 - protein, 724 aa, Staphylococcus haemolyticus
MNIVRSDYMSKKRIYEYAKELNVKSKEIIDELKNMNVEVSNHMQALEDDQIKTLDKKFRQQESNNNTKQNTQNNHQKQQNKNNNKNNNKQSNKGNANQKGNNNNKNNAKNNKNNKNNKNNKNNKNNKGNKNNKPAAEPKEMPSKITYEEGITVGELADKLNIESSGIIKKLFLLGIVANINQALDEETLELIADDYGVELEKEVVVNEEDLSIYFDEEEADPDAIERPAVVTIMGHVDHGKTTLLDSIRHTKVTAGEAGGITQHIGAYQIENAGKKITFLDTPGHAAFTTMRARGAQVTDITILVVAADDGVMPQTIEAINHAKEANVPTIVAVNKIDKPTANPDRVMQELTEYGLIPEDWGGETIFVPLSALSGEGIDDLLEMIGLVAEVQELKANPDKQAVGTVIEAELDKSRGPAASLLVQNGTLNVGDSIVVGNTYGRIRAMVNDLGQRIKSAGPSTPVEITGINDVPLAGDRFVIFKDEKQARRIGEARHEASVIQQRQESKNVSLDNLFEQMKQGEMKDLNVIIKGDVQGSVEALAASLMKIDVEGVNVRIIHTAVGAINESDVTLANASNGIIIGFNVRPDAGAKRAAEAENVDMRLHRVIYNVIEEIESAMKGLLDPEFEEQVIGQAEVRQTFKVSKVGTIAGSYVTEGKITRNAGVRIIRDGIVLFEGELDTLKRFKDDAKEVAQGYECGITIEKFNDIKEGDIIEAFEMVEIER

SEQ ID NO: 71402 - protein, 154 aa, Staphylococcus haemolyticus
MVDVAFVCLGNICRSPMAEAIMRQRLIDRNISGVNVYSKGTGKWNLGEPPHEGTQDILNRHNIPFDGMISELFESSDDFDYIIAMDQSNVDNIQNINPNIKGKLFKLLEFSNMEESDVPDPYYTNNFEGVYEMVQSSCDNLIDFIVKDANLKEG

SEQ ID NO: 71403 - protein, 293 aa, Staphylococcus haemolyticus
MGAQDPRTKFKTSDYEKQEQELPGLQSELTPQPDCGETSYEGHNRLLDYKMLVTGGDSAIGRAAAIAYAKEGADVAINYLPSEEQDAQEVKAVIEKAGRKAVLIPGDIRDEQFNYDLVEQAYKELGGLDNVTLVAGHQQYHDKLEEFDTQSFKETFETNVYPVFWTIQKALDYLQPGASITTTSSVQGYNPNPLIHDYAASKAAIISLTKSFSEQLGEQGIRVNCVAPGPFWSPLQITGGQPQLAIPQFGQDTPLGRAGQPVELSGTYVLLASEESSYTTGQVFGVTGGIQIN

SEQ ID NO: 71404 - protein, 611 aa, Staphylococcus haemolyticus
MSKVIGIDLGTTNSCVAVLEGDEPKVIQNPEGARTTPSVVAFKNGETQVGEVAKRQAITNPNTVQSIKRHMGTDYKVDIEGKSYKPQEISAMVLQNLKNTAESYLGDKVDKAVITVPAYFNDAERQATKDAGKIAGLEVERIINEPTAAALAYGLDKTDQDQKVLVFDLGGGTFDVSILELGDGVFEVLSTAGDNKLGGDDFDQVIIDYLVSEFKKENGVDLSQDKMALQRLKDAAEKAKKDLSGVSQTQISLPFISAGESGPLHLEISLTRSKFEELADSLIRRTMEPTRQALKDAGLSTSEIDEVILVGGSTRIPAVQEAVKKEIGKDPHKGVNPDEVVAMGAAIQGGVITGDVKDVVLLDVTPLSLGIEIMGGRMNTLIERNTTIPTSKSQVYSTAADNQPAVDIHVLQGERPMASDNKTLGRFQLTDIPPAPRGVPQIEVTFDIDKNGIVNVTAKDLGTNKEQNITIQSSSALSDEEIDRMVKDAEENAEADKKRREEVDLRNEADSLVFQVEKTITDLGDNISEEDKSNAESKKDALKSALEGQDIEDIKAKKEELEKVIQDLSAKVYQQAQQAQQQAQDGAQQTQNDSNVEDAEFKEVNDDEDKK

SEQ ID NO: 71405 - protein, 727 aa, Staphylococcus haemolyticus
MQKAFRNVLVIAIIGVIIFGVFSYINGNGNTPKQLSYSQFVEKLDKGDLKTLEIQPEQNVYLVSGKTKNDEDYSSTILYNNEKDLQKITNEAKSQKGLDFKVKEEEKQSVFVSMLTTLIPVLIIAFLFIFFLSQAQGGGGGGRMMNFGKSKAKMYDNQKRRVRFSDVAGADEEKQELIEIVDFLKDNKKFKQMGSRIPKGVLLVGPPGTGKTLLARAVAGEAGAPFFSISGSDFVEMFVGVGASRVRDLFENAKKNAPCIIFIDEIDAVGRQRGAGVGGGHDEREQTLNQLLVEMDGFGENEGIIMIAATNRPDILDPALLRPGRFDRQIQVGRPDVKGREAILHVHSKNKPLDETVDLKAISQRTPGFSGADLENLLNEASLIAAREGKNKIDMRDIEEATDRVIAGPAKKSRVISDKERNIVAHHEAGHTVIGMVLDEAEVVHKVTIVPRGQAGGYAMMLPKQDRFLMTEPELLDKICGLLGGRVSEDINFHEVSTGASNDFERATQIARSMVTEYGMSKKLGPLQFSSSGGGQVFLGKDMQGEPNYSGQIAYEIDKEVQRIIKEQYERCKQILLDHEKELKLIAKTLLTEETLVAEQIRSLFYDGVLPEVDYDAARVVKDEDSDYSEGKYGKSYDDIREEQLEEGKEDMREDRKEDNDMNRERRHRQRDDRDNQTGHDQLRDGSNGDNDQHRGHSNNEEDTGHEQSPNIDKPYNPNDPNNPSNR

SEQ ID NO: 71406 - protein, 309 aa, Staphylococcus haemolyticus
MAKTYIFGHQNPDTDAIASAIIMADFEQLTGNSEATPYRLGDINPETKFALDHFEVKAPELLSDNLDGQEVILVDHNEFQQSAETISDAEIKHVVDHHRIANFETASPLWYRAEPVGCTATILYKMYKERGFEIKPHIAGLMISAIISDSLLFKSPTCTDEDVNAAKDLKDLANVDLDEYGLEMLKAGASTTDKSAEELLDMDAKSFNMGDYVTRIAQVNTVDIDEVLNRKEDLEKAMLETSANEKYDLFVLVVTDIINSDSKILVVGAEKDKVGEAFKVQLDDGMAFLSGVVSRKKQVVPQITDALIK

SEQ ID NO: 71407 - protein, 614 aa, Staphylococcus haemolyticus
MTNRREDVRNIAIIAHVDHGKTTLVDELLKQSGIFRENEHVDERAMDSNDLERERGITILAKNTAIDYKGTRINILDTPGHADFGGEVERIMKMVDGVVLVVDAYEGTMPQTRFVLKKALEQDLKPVVVVNKIDKPSARPEGVVDEVLDLFIELEANDEQLDFPVVYASAVNGTASLDSEKQDENMQSLYETIIDYVPAPLDNHDEPLQFQVALLDYNDYVGRIGVGRVFRGKMRVGDNVSLIKLDGTVKNFRVTKIFGYFGLKREEIEEAQAGDLIAVSGMEDINVGETVTPTDHQEALPVLRIDEPTLEMTFKVNNSPFAGREGDYVTARQIQERLDQQLETDVSLKVTPTDSPDTWVVAGRGELHLSILIENMRREGFELQVSKPQVILREIDGVLSEPFERVQCEVPSENAGSVIESLGARKGEMLDMSTTDNGLTRLIFMVPARGMIGYTTEFMSMTRGYGIINHTFEEFRPRVKAQIGGRRNGALISMDQGQATAYAIINLEDRGVNFMEPGTEVYEGMIVGEHNRENDLTVNITKAKHQTNVRSATKDQTQTMNRPRILTLEEALEYINDDELVEVTPQSIRLRKKILNKSLREKEAKRVKQMMQDE

SEQ ID NO: 71408 - protein, 175 aa, Staphylococcus haemolyticus
MFCLKNKQNKYSIRKFTVRTASILVGAALIFGSANDEAKAAEKDQVSTTTNSNEEQNVKAKGNVQTSESTTLSQVNPEQVDVTKQNVETDVDNNSSENASNNEISNETSKQESTENSSNQDVSSQEVTNENNSIETSKNSNSTETLSSEEPSQNNSAEKSISEKTTKKASTEESR

SEQ ID NO: 71409 - protein, 103 aa, Staphylococcus haemolyticus
YLIVALSSDEFNQIKNKKSYYDYEQRKMMLESIRYVDLVIPENDWGQKEIDVDRFEVDVFVMGHDWEGEFDFLKDKCEVVYLKRTEGISTTKIKQELYGKDSK

SEQ ID NO: 71410 - protein, 301 aa, Staphylococcus haemolyticus
GKMHHNSLIETIWFVVPIIIVIALSIPTVKTLYDYEKPPESKEDPMVVYAVSAGYKWFFAYPEQKVETVNTLTIPKNRPVVFKLQAMDTMTSFWIPQLGGQKYAMTGMTMNWTLQADETGTFRGRNSNFNGEGFSRQTFKVHSVDQSEFDSWVKDAKSKKTLSQDEFDKQLLPSTPNKELTFSGTHMAFVDPAADPEYIFYAYKRYNYVQKDPNFVAEKDLYKDVTDKPQKPARKVQITNANYKRHGMKPMILGNNDPYDNEFKKEEDHNSKEMEKISKSAKDENASKFGSKADNDHGGGH

SEQ ID NO: 71411 - protein, 648 aa, Staphylococcus haemolyticus
  MISC_FEATURE (489)..(489): X=any amino acid
  MISC_FEATURE (539)..(539): X=any amino acid
RWTLMNFPWDQLLVKGNWMITMAQIGAPFLVIGLIAVITYFKLWKYLYKEWFTSVDHKKIGLMYLICAVLMFVRGGIDALLLRTQLTIPDNTFLESNHYNEIFSTHGVIMIIFMAMPFVFGLWNVVVPLQIGARDVAFPVMNNISFWLFFVGMILFNLSFIIGGSPAAGWTNYAPLAGEFSPGPGVNYYLVAIQISGIGTLMTGINFFVTILRCKTPTMKFMQMPMFTVTTFITTLIVILAFPVFTVVLALMTFDRVFGTAFFTVADGGMPMLWANFFWVWGHPEVYIVILPAFGIYSEIIPTFARKRLFGHQSMVWATAGIAFLSFLVWVHHFFTMGNGALINSFFSISTMLIGVPTGVKLFNWLLTLYKGRITFESPMLFSLAFIPNFLLGGVTGVMLAMASADYQYHNTYFLVAHFHYTLVTGVVFACLAGLIFWYPKMMGYKLNEKLNAWCFWLFMIGFNVCFLPQFILGLDGMPRRLYHLYAFXWLWLLNVISTIGALLMAVGFLFLVVSIVYSHIKAPREATGDNWDGLGRIXEWSTASAIPPKYNFAITPDWNDYDTFVDMKEHGRHYLDNHNYKDIHMPNNTHTGVIMGIFMLLGGFFLIFETVIPAAICLVGILGSLVYQSFVQDHGYHIPASEVAENE

SEQ ID NO: 71412 - protein, 474 aa, Staphylococcus haemolyticus
MREVSNMTQQIGVVGLAVMGKNLAWNIESRGYSVSVYNRSSEKTDEMVNESKGKQIHPTYSLEEFVNSLEKPRKILLMVKAGPATDATIDSLLPLLDDDDILIDGGNTNYQDTIRRNKALAESGINFIGMGVSGGEVGALTGPSLMPGGQEAAYNKVSDILDAIAAKAKDGASCVEYIGPNGAGHYVKMVHNGIEYADMQLIAESYAMMKDLLGMSHEDISKTFKEWNAGELESYLIEITGDIFTKLDDDNEALVEKILDTAGQKGTGKWTSINALELGIPLTIITESVFARFISSIKQERVNASKELNGPKAEFTGNKEEFLEKIRKALYMSKICSYAQGFAQMRKASEENEWNLKLGDLAMIWREGCIIRAQFLQKIKDAYDNNSELQNLLLDPYFKGIVTEYQDALRDVVATGVRNGVPTPGFSASVNYYDSYRSENLPANLIQAQRDYFGAHTYERKDKEGIFHTQWVEE

SEQ ID NO: 71413 - protein, 1920 aa, Staphylococcus haemolyticus
MSKRKQGPINKKVDFLSNKLNKYSIRKFTVGTASILVGATLIFGADHEAQAAENTADSTNETVDSNSANKFDSAETSTTEQPSTQQDSKTDEATTQSTKEQLKEESSSTTEQSSTQQDSKTDEATTQSTKEQLKEESSSTTEQSSTQQDSKTDEATTQSTKEQPKEESSSTTEQPSTQQDSKTDEATTQSTKEQLKEESSTTTEQSSTQQDSKTDEATTQSTKEQPKEESSSTTEQPSTQQDSKTDEATTQSTKEQLKEESSSTTSSKNNTTQDTTSNKLDSSEASPSDATKQSNNLTDTTGKSSTTDALSITSDSSVANKQAYTNDMVDNLNAGTSNNKDAIVDAVSNDVNLETATQDQIDNAVVAETIKTDFSNPDYGLASPFMTLVAVAPMSTASTDSTPTTFALNSTDTTSSTGGSLVNDKIHITNASLTLNKKNNQHDNNTVWPTSNEQLKLSADYELDNSIKEGDTFTIKYGDYIRPGALELPAKNTQLRSKEGSIVANGVYDETTNTTTYTFTNYVDQYQNITGSFNLLATPKRETVTTDKQTYPMNVTIANQEVSENFVVDYGNKENDITNAAVANVDNVNNQHNEVVYLNQSGDRIYDAKYFSIVQNGTFIPNEVKVYEVLDSNVLVDSFNPDLNGSAVKDVTSKFTPQYSLNNTRVDIDLNRSNLNKGARYIITQAVKPSGTGNVSTNYELTRYGNEASRYPTGTKSTTVSYINGSSTAQGDNPTYNLGDYVWLDKNKDGIQNDDEKGIPGVYVILKDSNNKELQRATTDDTGRYQFNNLQNGTYNVEFVIPNNYTPSPSNTIGNDKIDSDGQKDGDYNVVVAKGIIDNADNMTVDTGFYETPKYNLGDYVWEDTNKDGIQDSDEKGIAGVTVTLKDDNGNVLKTTTTDESGKYQFTGLENGTYTVDFETPKDYKPTSVNSGNDNEKDSDGTTTTAIIKDADNETIDSGFYKPTYNLGDYVWEDTNKDGIQDSDEKGIAGVTVTLKDSDGNTIGTTTTDESGKYQFTDLEDGTYEVSFTTPEDYTPTTVNAGNDEKDSDGLTTTGVINGADNWTLDSGFYKTPKYNLGDYVWEDTNKDGIQDSDEKGIAGVTVTLKDDNGNVLKTTTTDESGKYQFTGLENGTYTVDFETPKDYKPTSVNSGNDNEKDSDGTTTTAIIKDADNETIDSGFYKPTYNLGDYVWEDTNKDGIQDSDEKGIAGVTVTLKDSDGNTIGTTTTDESGKYQFTDLEDGTYEVSFTTPEDYTPTTVNAGNNDEKDSDGLTTTGVINGADNWTLDSGFYKTPKYNLGDYVWEDTNKDGIQDSDEKGIAGVTVTLKDDNGNVLKTTTTDESGKYQFTGLDSGDYIVHFDKPEGLTQTITNSGSDDEKDADGEEVHVTITDHDDFSIDNGYFDEDSDSDSDSDSDSDSDSDSDSDSDSDSDSDSDSDSDSDSDSDSDSDSDSDSDSDSDSDSDSDSDSDSDSDSDSDSDSDSDSDSDSDSDSDSDSDSDSDSDSDSDSDSDSDSDSDSDSDSDSDSDSDSDSDSDSDSDSDSDSDSDSDSDSDSDSDSDSDSDSDSDSDSDSDSDSDSDSDSDSDSDSDSDSDSDSDSDSDSDSDSDSDSDSDSDSDSDSDSDSDSDSDSDTDSDSDSDRNSDSDSDSDSDSDSDSDTDSDSDSDTVSDSDSSSDSDSDSDSDSDSDSDSDTSSDSDSDSDSDSDSDTISDSDSDTDSDSDSDSRSDSDSDSDSDSDSDSDSDSDSDSDSDSDSDSDSDSDSDSDSDSDSDSDSDSDSDSDSDSDSDSDSDSDSDSDSDSDSDADSDSDSDSDSDSDSDSDSDSDSDSDSDSDSDSDSDSDSDSDSDSDSDSDSDSDSDSDSDSDSDKDHNDKTDKSNNKELPDTGNDVPNNGTLFGSLFATLGGLFLIGRRRKNKNNEE

SEQ ID NO: 71414 - protein, 425 aa, Staphylococcus haemolyticus
MSEFNQENQSIYNNYQQPQPGKPKFPWFKTIIVALIAGVIGALLVLGASKIMGLVGIDNGGAQVQEANNSKGGNVLDGKSDKYKSVNAMIKDVSPAIVGVINMQKANGLEDFLQGKSSSESEEAGIGSGVIYQINNNSAYIVTNTHVISGASEIKVQLHSGKQVKAKLIGKDTVSDIAVLKIDNTKGIKSIKFANSSKVQTGDSVFAMGNPLGLEFANSVTSGIISANERTIESNTTSGGTKVNVLQTDAAINPGNSGGALVDINGNLVGINSMKIAAEQVEGIGFAIPSNEVKVTIEQLVKNGKIERPSIGIGLLNLSDIPDSYKKELNTDRDDGIYVAKVSRSSELKTGDIITKIDDKTVKEDTDLRTYLYQNKKPGETAKLTVIRDGKTLTVNVNLKSQSDISSNQSSDSESDNSRNSQFIQ

SEQ ID NO: 71415 - protein, 207 aa, Staphylococcus haemolyticus
MYQFISRLLDLILVKMAKSLYVIGKENIPKDNKYVVTCTHESYNEVIMLGMALVPNEIHYMAKKELFNNKWFGQFLTSLNAFPVDRENPGPSTLKRPVNLLKENKTVGIFPTGHRTSAEGAPLKRGASTIAMLGKAPILPAAYVGPKKLHGLITGQALIKFGEPIYQSDIPKDLKRNEKIDYLTHEIERRTAQLQKELHLIQDSLEK

SEQ ID NO: 71416 - protein, 487 aa, Staphylococcus haemolyticus
MFKFFQNLGRSLMLPVAVLPAGAIIVGIGNLLKALNLLPTVSLFFTTVGTAILGQLGLIFAIGVAIGMAKKNDGAVALAGALGYALVVKVLSPEFIAPLFNIKESAVNDGFSKMDNSNVFIGIIIGLIAAYCYNKFSDVELPTALSFFSGKRLVPIMTVFYCTFLIAILLFAWPFIYSAIVAFGKWLIGFGPFGAFLYGFFNRLLIPTGLHHALNAVFWFDTAGINDIGKFQTGQDAIKGITGRYQAGFFPIMMFGMPAAALAMYHTAESAQKKQVYGWFIASSISAFMVGVTEPIEFAFMFVAPVLFVIHALLTGLSLFIAALFHWTAGFSFSAGLIDYALSLINPVANHPLMILVQGIVFFALYYFIFRFVIKIFNLNTIGRGDNLLADPTVNTTEKDGAETTSKSKYHHTASQILEGLGGSENITTLTNCATRLRMELKDNSIIDEQKIRNAGAVGVTKNGQHSAQVIIGTHVQQVADEIEKQM

SEQ ID NO: 71417 - protein, 386 aa, Staphylococcus haemolyticus
MNYYEPLLLTPGPTPVPKEINHALGLPMVGHRSPDFESIAKKAFNNLKPIFGTENEVMILTSSGTSVLEASMLNIVNPDDHFVVIVSGAFGNRFKQIAETYYKNVHIYNVEWGQSIDVKEFITYLNNLNHQISAVFTQFCETSTAVLHPVGELGKALKTFNQDIYFVVDGVSCIGAVDVNLERDYIDVLVSGSQKAIMLPPGLAFVAYNDRALKRFKEVTTPRFYLNLNKYFDSLQQDSTPFTPNVGLFRAVNAYAELIHSEGFENTIKRHYIIRDGLRLALNALDLELLVEDDFASPTVTSFIPTSKDELTHIKSTLKTRFNITIAGGQGKLKGKILRIGHMGKVSPFDMLSVISTLEIILTDYRQTNYIGKGLTKFSEVIHSEA

SEQ ID NO: 71418 - protein, 376 aa, Staphylococcus haemolyticus
MDKVGNDGVITIEESNGLDTELEVVEGMQFDRGYQSPYMVTDSDKMIAELERPYILVTDKKISSFQDILPLLEQVVQSSRPILIVADEVEGDALTNIVLNRMRGTFTAVAVKAPGFGDRRKAMLEDLAILTGATVITDDLGLELKDASIDMLGSANKVEVTKDNTTVVDGDGDDNSIDARVSQIKAQIEETDSDFDREKLQERLAKLAGGVAVIKVGAASETELKERKLRIEDALNSTRAAVEEGIVAGGGTALVNIYNKVDEIEAEGDVATGVNIVLKALSAPVRQIAENAGLEGSVIVERLKHADAGVGFNAATNEWVNMLEEGIVDPTKVTRSALQHAASVAAMFLTTEAVVATIPEPDNNDNPGMGGMPGMM

SEQ ID NO: 71419 - protein, 270 aa, Staphylococcus haemolyticus
MQETLFIRFHEIILIIYLISILCYFIDFVKKSHKIRELGIYTLGIVWILQTISLSVYITSHNEIPLSSLFDVFFFLSWITICIALVLNVVKVLSFSVFFLNVIGFILLMMNTFQPEHYSTNVQRIAVINELLLVHIGLAVLSYALFALAFVNSLLYIIQYRNLREKNFDQKYFRIGSVATLETVVFYSSLSGFIILILSVILGAQWGVYAIGHSIFADPKVVLSSIITIFYAIYLLSRINRWFKTIYLIYFNIMLFCLCMINLFFTTHFT

SEQ ID NO: 71420 - protein, 310 aa, Staphylococcus haemolyticus
MRKLVVGSRRSKLALTQSQQFIDKLKAVDPTLEIEIKEIVTKGDRIVNKQLSKVGGKGLFVKEIQQELFDKEIDMAIHSLKDVPSIIPEGLTLGCIPDREVPFDAYISKNHIPLNELPDGSIIGTSSLRRGAQILSKYPNLEIKWIRGNIDTRLKKLEIEDYDAIILAAAGLRRMGWSDDIVTTYLDKDILLPAIGQGALGIECRSDDVELLELLSKVHNQAVANCVTAERTFLSAMDGSCQVPIGGYATNKENGEIEFTGLIMTPDGTKRYEHTEVGKNPVDLGEAVSRVLKEQGAYEIIKKLNEEQAH

SEQ ID NO: 71421 - protein, 226 aa, Staphylococcus haemolyticus
MKPVVVMTQSSEFNSDLVEIMHKPFIEIQSLEFDTQVLHHKYDWIIFSSKNAVRIFYKYLNQLDVKYVAVIGQKTAELCEALKINVDFIPNDYSQEGFLNQFKKDQQSILIPSSAEARPKLQHTLAQNNIVTKIDLYKPIPNDRNIREVIQLIEHHKVHALTFSSSSAVNAYIKHDVPCGFDKYVAIGAQTANTLRKNGLKPLIADKQTSESLINKIIESWYNNEI

SEQ ID NO: 71422 - protein, 403 aa, Staphylococcus haemolyticus
  MISC_FEATURE (157)..(157): X=any amino acid
  MISC_FEATURE (158)..(158): X=any amino acid
  MISC_FEATURE (159)..(159): X=any amino acid
  MISC_FEATURE (160)..(160): X=any amino acid
MLDQNQLKKYNQEHLSEYEKLMSSNEKEKLESKVNELDLESIQQLFQDLYVNRQSISDVSSVSEVKYQRKTELTDQEGAKYEQKGIEAIRNGEFAVLLMAGGQGTRLGYKGPKGSFEIKGVSLFELQARQLLKLKKETGHLINWYIMTSDISPLKEXXXXIGNRSSYFEQHDYFGYNPDNVHFFKQENMVALCETGQLVLNEQGYIMETPNGNGGVFKSLEKNGYLDKMASDGVKFIFLNNIDNVLVKVLDPLFAGFTVVNDCDVTSKSIQPKDGESVGRLVNQNSKDTVLEYSELDEAVANTFDNANIGIHAFKIAFIKQAVNNDLPYHLAVKKLKQLDEDFGVVEKPTLKFELFYFDIFRYATSFVTLQVNREDEFSPLKNKEGKDSVETATSDLERLNLI

SEQ ID NO: 71423 - protein, 227 aa, Staphylococcus haemolyticus
MSNSTKNAKGTVVESFKDIIPLSFGEEIGNSVSHGVAALLTLFLLPYAAVHSYIAHGTLSSVSISIFVISIFMMFISSTIYHAMKNNTAHKYILRIIDHSMIYVAISGTYTPVLLTVVGGWIGWFVFILLWGTTIWGILYKSISVNVNPKLSLIVYLVMGWVGIIFLPIIIMRTSWLFILFIVLGGLSYTIGAWFYAQKNRPYFHMIWHIFIVIASMFHLIAILYFI

SEQ ID NO: 71424 - protein, 199 aa, Staphylococcus haemolyticus
MYETYHSGWIECITGSMFSGKSEELIRRLRRGIYAKQKVVVFKPAIDDRYHKEKVVSHDGNELEAINISTSRDILLQDLSHVDVIGIDEIQFFDKEIVNIVEKLAENGHRVVVAGLDMDFRGEPFEPMPQIMAVSEQVTKLQAVCAVCGSSSSRTQRLIDGQPAKVDDPIILVGANESYEPRCRAHHIVAPSTSDEEEM

SEQ ID NO: 71425 - protein, 358 aa, Staphylococcus haemolyticus
MFDQLDIVEERYEQLNEMLSDPEIVNDSDKLRKYSKEQADLQKTVDVYRDYKSKKEEIAEIDEMLNETEDKEEIEMLKEESASLKSAIPELEEQLKFLLIPKDPNDEKDVIVEIRAAAGGDEAAIFAGDLLRMYSKYAESQNFKTEIVEAAESDHGGYKEISFSVSGSGAYSKLKFENGAHRVQRVPETESGGRIHTSTATVAVLPEVEDVEIEIRNEDLKIDTYRSSGAGGQHVNTTDSAVRITHLPTGVIATSSEKSQIQNREKALKVLKARLYDMKLQEEQQKYAAQRKSAVGTGDRSERVRTYNYPQSRVTDHRIGLTLQKLDQIMEGKLDEIIDALTLSEQTEKLKELNNGEL

SEQ ID NO: 71426 - protein, 278 aa, Staphylococcus haemolyticus
MVNFKEQLDYAIKQAVDKGYEQSRAEWLMLDLFGWSRTDYLIHMYDDMSKAEEIKFSLATERMLLGEPIQYIVGFQSFYGYQFQVNEHCLIPRPETEEVMLHFLENCKSSATIADIGTGSGVLAITLKKLNKDFTVYATDIVQETLEVASDNAHYHEVAVTFLKGNALKPFIQNNIKLDGIVSNPPYIDVDEMEMMENTVVKYEPHKALFAENKGFAIYELILNDLPKVLNKDAYVTFEIGYNQGERLKNIILEKYPKLDVKVIKDINGNERIVSFKW

SEQ ID NO: 71427 - protein, 122 aa, Staphylococcus haemolyticus
MYRGFIKRSEISDVMEITKDNCTDPFEEPYILVTGTIGFGEVPKEVQSFLEINHHNLRAVAASGNRNWGQNFAKAGRTISEEYHVPLLMKFEVQGSNKDVIEFKNKVGHFNENYEREKVQSY

SEQ ID NO: 71428 - protein, 658 aa, Staphylococcus haemolyticus
MLLNLKIRWGISMKIMNEKKYNHIELNNEVTKRKDNGFFNLEKDQEALAVYLEEIHDKTIYFDSEIERLHYLVDNNFYFNVFDKYSEEDLVEITEFAKSINFEFASYMSASKFYKDYALKTNDKSQYLEDYNQHVAIVALYLADGNKQQAKQFILAMVEQRYQPATPTFLNAGRARRGELVSCFLLEVDDSLNSINFIDSTAKQLSKIGGGVAINLSKLRARGEAIKGIKGVAKGVLPVAKALEGGFSYADQLGQRPGAGAVYLNIFHYDVEEFLDTKKVNADEDLRLSTISTGLIVPSKFFDLAKEGKDFYMFAPHTVKQEYGVTLDDIDLEKYYDDMVANPNIVKKKKDAREMLNMIAQTQLQSGYPYLMFKDNANKVHANSNIGQIKMSNLCTEIFQLQETSVINDYGIEDEIKRDISCNLGSLNIVNVMETGKIKDSVHTGMDALTVVSDEANIQNAPGVRKANSELHSVGLGVMNLHGYLAKNKIGYESEEAKDFANTFFMMMNYYSIERSMEIAKERGEVYQDFEQSDYASGKYFEFYTSQEFEPKFEKVKRLFDHIDIPTAKDWKALQEQVQQHGLYHAYRLAIAPTQSISYVQNATSSVMPIVDQIERRTYGNAETFYPMPFLSPETMWYYKSAFNTDQMKLIDLIATIQ

SEQ ID NO: 71429 - protein, 369 aa, Staphylococcus haemolyticus
MAEKKIIVVGGGLAGLMSTIKAAEQGAHVDLFSIVPVKRSHSVCAQGGINGAVNTKGEGDSPWIHFDDTVYGGDFLANQPPVKAMAEAAPSIIHLLDRMGVMFSRTKEGLLDFRRFGGTLYHRTAFAGATTGQQLLYALDEQVRSFEVDGLVTKYEGWEFLGIVKDEDNAARGIVAQNMTTSEIKSFGSDAVIMATGGPGIIFGKTTNSMINTGSAASIVYQQGAKYANGEFIQIHPTAIPGDDKLRLMSESARGEGGRIWTYKDGKPWYFLEEKYPDYGNLVPRDIATREIFDVCINQKLGINGENMVYLDLSHKDPHELDVKLGGIIEIYEKFTGDDPRKVPMKIFPAVHYSMGGLYVDYDQMTNIK

SEQ ID NO: 71430 - protein, 804 aa, Staphylococcus haemolyticus
MGYNHKEIEKKWQNYWADNKTFKTSDNLGQKKFYALDMFPYPSGAGLHVGHPEGYTATDIVSRYKRMQGYNVLHPMGWDAFGLPAEQYALDTGNDPREFTKQNIQTFKRQIQELGFSYDWDREVDTTDPEYYKWTQWIFIQLYNKGLAYVDEVAVNWCPALGTVLSNEEVVDGVSERGGHPVYRRPMKQWVLKITEYADRLLEDLDELDWPESIKDMQRNWIGRSEGASVSFKVDNSDESIDVFTTRPDTIYGTTFLVLSPEHSLVNEITSEDKLEAVKKYQEDSSKKSDLERTDLAKDKSGVFTGAYAINPLTGKKLPIWIADYVLSSYGTGAVMAVPAHDERDYEFASKFNLPINEVIAGGDIQKEAYTGVGEHINSGELNGLDNETAISKAIELLVAKGAGEKKVNYKLRDWLFSRQRYWGEPIPVIHWEDGTMTTVPEEELPLLLPETDEIKPSGTGESPLANIDEFVNVIDEKTGMKGRRETNTMPQWAGSCWYYLRYIDPHNSNMLADPEKLKHWLPVDLYIGGVEHAVLHLLYARFWHKVLYDLGVVPTKEPFQKLFNQGMILGEGNEKMSKSKGNVVNPDDIVDSHGADTLRLYEMFMGPLDAAIAWSENGLDGSRRFLDRVWRLFINEDGSLSNKIVENNDNGLDKVYNQTVKKVTEDFNTLNFNTAISQLMVFINDCYKAETIYQPYAEGFVKMLAPIAPHIGEELWDRLGNEDTITYQPWPTYDESLLVDSEVEIVVQVNGKVRAKLNIPKDTSKDEMEALALKDENVKLSIEGKDIKKVIAVPQKLVNIVAK

SEQ ID NO: 71431 - protein, 211 aa, Staphylococcus haemolyticus
  MISC_FEATURE (156)..(156): X=any amino acid
  MISC_FEATURE (184)..(184): X=any amino acid
  MISC_FEATURE (186)..(186): X=any amino acid
  MISC_FEATURE (189)..(189): X=any amino acid
  MISC_FEATURE (192)..(192): X=any amino acid
KKQKFSIRKFTVGTFSTVIATLSFITHTGHAAELDEQSQSAQQKVTETSGTDDTNQKSTAPDNASSQVESKEDTSYPSSKVETKADNNPAPKQNSVDDTSAKSSKSETLSNNKNSNKDLAETKSEANNVDTNQPSTEEKTLSNGKSIKAKHKRVKXDANDTSSNPQTQPDPMAINETNSWTDCXWXFYXYIXRCGNSNGCYRICYGCCNTI

SEQ ID NO: 71432 - protein, 412 aa, Staphylococcus haemolyticus
MSYIQNQDKAVYEAIQNEYNRQNNNIELIASENFVSEAVMEAQGSVMTNKYAEGYPGRRYYGGCDYVDVTETIAIERAKALFGAEHVNVQPHSGSQANMAVYLVALEMGDTVLGMNLSHGGHLTHGSPVNFSGKFYNFVDYGVDKETEKIDYEVVRQLAHEHKPKLIVAGTSAYSRQLDFKKFKEIADEVGAKLMVDMAHIAGLVAAGLHPNPVEHADFVTTTTHKTLRGPRGGLILCKEEYKKDIDKTIFPGIQGGPLEHVIAAKAVAFGEALEQDFKVYQEQVIKNAKVLSQTLQEEGFRIVSGGTDNHLLSVDVKNSVNVTGKEAEATLDSIGITCNKNTIPFDQEKAFVTSGIRLGTPAATTRGFDEEAFKEVGRIISLALKNPNNDTKLKEARERVSRLTAKYPLYE

SEQ ID NO: 71433 - protein, 209 aa, Staphylococcus haemolyticus
MSKVHVFDHPLIQHKLSYIRDMNTGTKEFRELVDEVGMLMAYEVTRDLELQDVEIKTPVTTMTAKRLAGKKLAIVPILRAGLGMTDGVLSLVPAARVGHIGLYRDPNTLKAVEYFAKLPQDIDERQIIVVDPMLATGASAIEAINSLKKRGAKNIRFMCLIAAPESVEKMQEAHDDVDIYIAALDEKLNDKAYITPGLGDAGDRLFGTK

SEQ ID NO: 71434 - protein, 377 aa, Staphylococcus haemolyticus
MKKIMTVFGTRPEAIKMAPLVKALEYDAELEPMIVVTAQHREMLDSVLHTFNIKPHYDLNIMEEGQTLSDITSRAMTKLEDVIKKERPDMVLVHGDTTTTFSGALAAFYNKVAIGHVEAGLRTRHKYAPFPEEVNRQMVSNLADLHFAPTKGAANNLLQENKSPDSIIITGNTAIDTLELTIQKEYTSDIIRKHQGKRIILLTVHRRENVGQPMINIYKAMRKIVDEYEDIVIVSPLHLNPKVRELAYEYLGEHERIELIEPLDVVDFHNFANKAYLILTDSGGIQEEAPSLNKPVLVLRDVTERPEGVTAGTLKVVGTDFDNVFKSTTEILENQMIYDQMALTQNPYGDGNASLRICESIKYYFGLTSKMPKSFNS

SEQ ID NO: 71435 - protein, 366 aa, Staphylococcus haemolyticus
KAKKGENGQSSNMHGRGADDLVLKVPPGTIIKSVETDEVLADLVEDGQRAVVARGGRGGRGNSRFATPRNPAPDFSENGEPGEELDVTLELKLLADVGLVGFPSVGKSTLLSIVSKAKPKIGAYHFTTIKPNLGVVSTPDNRSFVMADLPGLIEGASDGVGLGHQFLRHVERTKVIVHMIDMSGSEGRDPFDDYQIINKELVNYKQRLEDRPQIVVANKMDMPDAQDNLTLFKEQVDDSVTIIPVSTITRDNIEQLLYAIADKLDEVKDIDFSVDNDEEIGVNRVLYKHTPSQDKFTITRDDDGAYVVSGNAIERMFKMTDFNSDPAVRRFARQMRSMGIDDALRERGCSNGDIVRILGGEFEFVE

SEQ ID NO: 71436 - protein, 151 aa, Staphylococcus haemolyticus
MDNNDYKKFYLIREDVLPESVVKTLKIKDALKNNPELSIYEAVKLFDLSRSAFYKYRETIFPVDEKMLDHREFTLILYVNDIVGMLAQVLNTVSKLQLSVLTIHQSVPMEEKATITLSLSAKDTTISIDEIIKALRNIEHVSKVELISMSM

SEQ ID NO: 71437 - protein, 341 aa, Staphylococcus haemolyticus
MNVEEFDYDLPESLIAQTPLKDRDQSRLLVLGRNSGNIEHKHFKDVINYLETGDTLVLNDTRVMPARLFGLKEETGAKVEMLMLTRIENNDWEVLLKPAKRIKVGNKLSFGEGKIIAECIEELDQGGRIMRLHYEGILEERLNELGEMPLPPYIKERLDDPDRYQTVYAKESGSAAAPTAGLHFTDELLDEIRAKGINIAFITLHVGLGTFRPVSVEDINDHEMHSEYYQMTQETANLLNQTKKEGHRIISVGTTSTRTLETIRRDYNEFVAVSGWTDIFIYPGFTYKAIDGLITNFHLPKSTLVMLVSAFSSRENILNAYKEAVKLEYRFFSFGDAMLII

SEQ ID NO: 71438 - protein, 299 aa, Staphylococcus haemolyticus
NHKENEMSKSELLVVTGLSGAGKSVVIQCLEDIGYFCVDNLPPILLPKFVELMEQGNPSLQKVAIAIDLRGKELFKSLVEEIDAIKSRNDVIVDVMFLEAETEKLISRYKESRRAHPLNENGQMSLMDSILEEKQLLSNIRTIANYIVDTTQLTTKELKARVKEKFEDENFKSFSINVSSFGFKHGIQKDADLVFDVRFLPNPYYVEDLRPMTGEDEPVYHYVMKWKETEIFFEKLMDLLKFMIPGYKKEGKSQLVIAIGCTGGQHRSVALTKRIGEELTEIFDYNVYVHHRDAHIESG

SEQ ID NO: 71439 - protein, 328 aa, Staphylococcus haemolyticus
MKQLKIVLIGGGTGLSVLARGLREYPIDITAIVTVADDGGSTGKIRSEMDIPAPGDIRNVIAALSDAEPVIEELFQYRFKENQIEGHSLGNLLLAALTNIKNDFGHAVKELSKILNIKGKVIPSTNTNVMLNAVLEDGEIVRGESQIPKKNKCIDRVFLEPENVEPMEEAIDALEDADLIVLGPGSLYTSVISNLCVKGMSEAILRSKAPKLYISNVMTQPGETSDYDVMDHIQAIHKHAGSDFIDYVICSNDKYDDKVLERYRERNAKPVVMDEHKITDHNIRMITSSNLVEILDDHLVRHNTKVLARLIYDLALEMTSTIQFRPKK

SEQ ID NO: 71440 - protein, 314 aa, Staphylococcus haemolyticus
MSFASDMKNELTRIDVDESNAKAELSALIRMNGALSLSNQQFVINVQTENATTARRIYSLIKRIFNVEVEILVRKKMKLKKNNIYICRTKVRAKEILDELGILKNGTFVHDIDASMIKDDEMRRSYLRGAFLAGGSVNNPETSSYHLEIFSQYENHSEGLTKLMNSYGLNAKHLERKKGSIAYLKEAEKISDFLSLIGGYQALLKFEDVRIVRDMRNSVNRLVNCETANLNKTVSAAMKQVESIQLINQEIGLDNLPDRLREIAKLRVEHQEISLKELGEMISTGPISKSGVNHRLRKLNELADKIRSGEKIEL

SEQ ID NO: 71441 - protein, 453 aa, Staphylococcus haemolyticus
AEIDKAAEAKKEAIDHTPNATDEEKATAKAKVDEAVTIAKNAIDQATNNAGVDTAKTNGVDSINNVQPTVVKKDEAKAVIDKAAEAKKAEIDQTPNATDEEKVAAKAKVDEAVTTAKNAIDQTTNNVGVDAAKESGVESINQVQPAVVKKDQAKAEIDNVAQAKKAEIDRNSNATEEEKVAAKSKVDEAATTIKQAIDKAVNNSEVDNAIDVGKTAINNIEADNSAKSKAIKHLQELVKQQMTKIDSNHLATEEEKAKAKQMIKLLFEKAKIEIEKAKTSYEVTKIDAEYSKLITKTLPENKAKLNAKKKIEKIARQLKNKLNNMNGVSKEEKDRIKVIIEQIVKKSFKDIDLASRNNTINKIVNDVKIQFANIKINKQNNKKSLINNENASVIITTEQHKTNKAYHKVRNEKGRYQLPNTGINNDTSSPLISFTFVSGLFLILRSMRRRASK

SEQ ID NO: 71442 - protein, 608 aa, Staphylococcus haemolyticus
MKQDFEKGKQRKTKMRYMPGLDGLRAIAVLGIIIYHLNRKWLTGGFIGVDTFFVISGYLITSLLLKEYEERGIISLKQFWIRRVKRLLPAVVALLIVVGIATLIFEPQQIVRVKHDIIAALFYVSNWWYIAKDVNYFEQFSFMPLKHLWSLAIEEQFYLFFPFVLVILLLTIKKYRNVTLILWIISLVSLLAMVIISQPNVGYSRVYFGTDTRLQTLLLGVILAFVWPPFKLKANPPKVLQRSIDGIGILGLIILIYLFFTVKDTSAWIYNGGFYLISGMTLFIIASVVHPSSILAKVLGHRIFVYIGKRSYSLYLWHFPVISFIHIHFVDGQLPIYVYFVDIILTVLFAELSYRYIETPFRREGLKAFSFNYLKRPKFIRTIVSIIAVIPIVLLFLGVFDRFGKDEIDNKANSFNTNDQDKYLVRMMPGENIKIDGSSSNSKSKKQVYTNISPLLIGDSVMVDIGEEFKSQVPKATIDGKVGRHLQEALSIAGNYSNYNKPSDKVVLELGTNGDFTEEELNQLINKFGKAQIYLVNTRVPRDWQDNVNKQLANAAKKHKNVTLVDWYQRSAGHSEYFAPDGVHLENSGVKALSDEIIKTIKKNSKNK

SEQ ID NO: 71443 - protein, 274 aa, Staphylococcus haemolyticus
MKPYLICLDLDGTLLNDNKEISDYTKQVLTTLKKQGHRIMIATGRPYRASQIYYHELNMDTPIVNFNGAYVHHPKSDDFKTTHEVLDVDLARNMIETLQKAKVTNIIAEVRDHVFINNHDPRLFEGFSMGNPKIETGNLLEELDEAPTSLLVEAEEIYIPRIKQMLTRFYAENIEHRRWGAPFPVIEIVKRGISKARGIDQVKDYLGIEPSHIIAFGDEDNDIEMIKYAKYGIAMDNGLDELKHIANHITYSNNDDGIGRYLNNFFKLNIPYKG

SEQ ID NO: 71444 - protein, 689 aa, Staphylococcus haemolyticus
MADNLVIVESPAKAKTIEKYLGKKYKVIASMGHVRDLPRSQMGVDVEDNYEPKYITIRGKGPVVKDLKKYAKKAKNVFLASDPDREGEAIAWHLSKILELDDSKENRVVFNEITKDAVKESFKHPRGIEMDLVDAQQARRILDRLVGYNISPVLWKKVKKGLSAGRVQSVALRLVIDRENEIRNFKPEEYWSIEGEFRYKKSKFTAKFLHYKNKPFKLKTKKDVEKVTAELDGDKFEITNVNKKEKTRNPANPFTTSTLQQEAARKLNFKARKTMMLAQQLYEGIDLKRQGTVGLITYMRTDSTRISQTAKDEAKQYIEDKYGKDYLSNRTAKGKQGDQDAHEAIRPTSTLRTPYEMKAYLTRDQHRLYKLIWERFVASQMAPAILDTVALDVTQNNIKFRANGQTIKFKGFMTLYVEAKDDKDNEKENKLPNLSKGDEVTATQIEPAQHFTQPPPRYTEARLVKTLEELKIGRPSTYAPTIDTIQKRNYVKLESKRFVPTELGEIVYEQVKDYFPEIIDVEFTVNMETLLDKIAEGDIGWRKVIDNFYGSFKLDVERAEEEMEKVEIKDEPAGEDCEVCGSPMVIKMGRYGKFMACSNFPDCRNTKAIVKTIGVTCPKCKDGDVVERKSKKNRLFYGCSNYPECDFISWDKPVGRDCPKCNHYLMEHKKGRSSQVICSNCDYKEEVQK

SEQ ID NO: 71445 - protein, 423 aa, Staphylococcus haemolyticus
MIRIPRGTQDILPEDSSKWRYIENQLDKLMKLYNYKEIRTPIFESTDLFARGVGDSTDVVQKEMYTFKDKGDRSITLRPEGTAAVVRSYIENKMQGIPNQPVKLYYNGPMFRYERKQKGRYRQFTQFGVEAIGAENPSMDAEVLAMVMHIYESFGLKHLKLVINSIGDADSRKEYNEALIRHFEPVIDTFCDDCKSRLHTNPMRILDCKIDRDKEAVKNAPRITDYLNDDSKAYFNEVKTHLDDLGISYVEDPNLVRGLDYYTHTAFELMMDNPNYDGAITTLCGGGRYNGLLELLDGPNQTGIGFALSIERLLLALEEEGIELDVEDTFDLFIVTMGEEAERYSVKLLNQLRKSGIKADKDYLQRKVKGQMKQADRLNAQYTVVIGDQELENEVIDVKDMSTGETETINLNNLVNYFQEKNN

SEQ ID NO: 71446 - protein, 588 aa, Staphylococcus haemolyticus
MSKRTTYCGLVTEELLNQKVTLKGWVHNRRDLGGLIFVDLRDREGIVQIVFNPDFSEEALSVAETVRSEYVVEVEGTVTKRDPDTVNSKIKTGQVEVQVSNISIINKSETPPFSINEENQNVDENIRLKYRYLDLRRPELAQTFKMRHQTTRAIREYLDNNGFFDIETPVLTKSTPEGARDYLVPSRVHEGEFYALPQSPQLFKQLLMISGFDKYYQIVKCFRDEDLRADRQPEFTQVDIEMSFVDQEDVIQMGEEMLRKVVKDVKGIDVSGPFPRMTYEEAMRRYGSDKPDTRFEMELKDVSQLGREMDFKVFKDTVENNGEVKAIVAKGAADNYTRKDMDALTEFVNIYGAKGLAWVKVVDDGLSGPIARFFEDSNVATLKDLTQAESGDLVMFVADKPNVVAQSLGALRIKIAKELGLIDENKLNFLWVTDWPLLEYDEDAKRYVAAHHPFTSPKQEDISKLDSEPQNAQANAYDIVLNGYELGGGSIRIADGELQEKMFEVLGFTKEQAREQFGFLLDAFKYGAPPHGGIALGLDRLVMLLTNRTNLRDTIAFPKTASATCLLTDAPGEVSDKQLEELSLRIRH

SEQ ID NO: 71447 - protein, 220 aa, Staphylococcus haemolyticus
MAVLSASVENEIRHITLQDAKDCLQKGAFVSDKDGDMHYDVMSAFQKSIRGSDVNAALHYLARLIEAGDLPTIVRRLLVISYEDVGLASPNAGQRTLAAIQSAERLGFPEARIPLSQAVIELSLSPKSNSAITAIDSALSDIRKGNIGQIPDHLRDGHYAGAKDLGRAIGYKYPHNYENGHVIQQYLPDKLKNKIYYEPKSTSKSEQQFKTIYDNLRNKK

SEQ ID NO: 71448 - protein, 465 aa, Staphylococcus haemolyticus
MVVGDFPIETDTIVIGAGPGGYVAAIRAQLGQKVTIVEKGNLGGVCLNVGCIPSKALLHASHRFVEAQHSENLGVIAESVSLKFDKVQEFKKSVVNKLTGGVEGLLKGNKVEIVKGEAYFVDNNSLRVMDEKSAQTYNFKHAIIATGSRPIEIPNFEFGKRVIDSTGALNLQEVPGKLVVVGGGYIGSELGTAFANFGSDVTILEGAKEILGGFEKQMVQPVKKGMKEKGVEIITEAMAKNAEETENGVKVTYEAKGEEKTIEADYVLVTVGRRPNTDELGLEELGLKFADRGLLEVDKQSRTSIDNIYAIGDIVPGLPLAHKASYEAKVAAEAISGQASEVDYIGMPAVCFTEPELAQVGYTEAQAKEEGLDYKASKFPYAGNGRALSLDDTTGFVKLITLKEDDTVIGAQIAGNGASDIISELGLAIEAGMNAEDIALTVHAHPTLGEMSMEAAEKAIGMPIH

SEQ ID NO: 71449 - protein, 210 aa, Staphylococcus haemolyticus
MNAFHTTEATQVTNITLNVEDLNKMSNFYKNILGFSIKEQDDNHVIFNVGANGHTLTLQYLEDGRRPGFREAGLFHVAYLLPTRTDLANFLFHASRLNVPVGGGDHLVSEALYFNDPEGNGIEVYQDRPYESWQWDGNFVKMDTLAVDADDLIAQRTEEGWNGWPADGKIGHLHLKTHDIGQERDFYVEQIGLEHISNFPQALFMSTQKY

SEQ ID NO: 71450 - protein, 225 aa, Staphylococcus haemolyticus
MLKDINLEIKKGEVLAIIGPSGSGKSTLLRCMNLLETPTNGRVIFEGNELSNHKNNLNKLRQKMGMVFQNFNLFPHKTVLNNIILAPKLLNKSDLNQLKQEALTLLEKVGLEDKANVYPSQLSGGQKQRVAIARALAMHPDIILFDEPTSALDPEVVYDVLKVMKDLAKEGMTMVVVTHEMGFAKDVSDKVIFMADGYVIEEGSPQQIFQSPTHQRTQNFLSRVL

SEQ ID NO: 71451 - protein, 156 aa, Staphylococcus haemolyticus
MTNHIVLFQPEIPANTGNIARTCAGTNTHLHLIKPLGFSTDDKMLKRAGLDYWEHVNITYHESIEDFFDATQGEYYLLTKFGKQTYSDFDFSKEDTDYYFIFGRETTGLPDWVKDKYADTALRIPMSENIRSLNLSNTAALLIYEALRQQNFPGLS

SEQ ID NO: 71452 - protein, 294 aa, Staphylococcus haemolyticus
MTHDYIVKSLAFDGEIRAYAALTTESVQEAQTRHYTWPTASAAMGRTMTATLLMGSMLKGEQKLTVTVDGKGPIGRIIADADAEGNVRAYVDKPQTHFPLNEQGKLDVRRAVGTDGSIQVVKDVGMKDYFSGASPIVSGELGEDFTYYFATSEQTPSSVGLGVLVNPDNSIKAAGGFIIQVMPGAKDETVTKLENAINNMQPVSKLIEQGLTPEGILNEILGEDNVQILETMQAQFECNCSHEKFLNAIKGLGEAEIQDMIKEDHGAEAICHFCGNKYNYSEAELEDLLASMNA

SEQ ID NO: 71453 - protein, 310 aa, Staphylococcus haemolyticus
MAQKPVDNITQIIGNTPVVKLRNVVDEDAADVYVKLEYQNPGGSVKDRIALAMIEKAEKEGKIKPGDTIVEPTSGNTGIGLAFVCAAKGYKAVFTMPETMSSERRNLLKAYGAELVLTPGSEAMKGAIKKAKELKEEHGYFEPQQFENPANPEIHALTTGPELVEQFEGKQIDAFLAGVGTGGTLSGVGKVLKEKYPNVEIVAIEPEASPVLSGGEPGPHKLQGLGAGFVPDTLDTNIYDSIIKVDNDTAMETSRRVAKEEGILAGISSGAAIHAAIQKAKELGKGKTVVTVLPSNGERYLSTPLYSFDD

SEQ ID NO: 71454 - protein, 261 aa, Staphylococcus haemolyticus
MTKTKIMGILNVTPDSFSDGGKYNSVDKAVKRAKEMIEEGVDIIDVGGISTRPGFTEISTEEEIERVVPVVKELAKLNIQLSIDTYRSEVAEACLKLGATMINDQWAGLYDPKILDVVASYDAEVVLMHNGDGHREQPVVEEMLLSLITQANKAEMAGIPKHKIWLDPGIGFAKTRDEENEVMARLDELVATEYPVLLATSRKRFIKEMIGTETKALERDEATAATTAYGIMKGVKAVRVHSVQLNARLGQSMDFLKENAR

SEQ ID NO: 71455 - protein, 713 aa, Staphylococcus haemolyticus
  MISC_FEATURE (711)..(711): X=any amino acid
KSLILAEKPSVARDIAEAMNIKGKRNGYIENEKYVVTWALGHLVTNAQPEHYDKAYKEWKLEDLPIIPKRMQTVVIGKTSKQFKTVKSLILDKKVKEVIIATDAGREGELVARLILDKVHNKKPIKRLWISSVTKKAIQEGFKKLKDGREFQHLYEAALARSEADWIVGINATRALTTKYDAQLSLGRVQTPTIQLVNARQQEINHFKAKKYYTLSTEIGGLTFQLSTNKQHMTKEDATQIANEIKHVEGNVDSVEKKVKKSHPKPLYNLTDLQQEAYQRYKMGPKETLNTIQNLYERHKVLTYPRTDSNYLTDDMVDTIKERLYALLATDYKSQVKSLLGQSYSSKMRIFNNHKVSDHHAIIPTEVRPDMQSLSNRESKIYMMVAERFLESLMAPHEYEAVRVNVTVGQHIFAFNEKVTRQLGYKALKMNNDNVVKKVAFQKGEKYHLQSLKVNEHETTPPDYFNEGSLLKAMENPQNYIQLKEKKHANTLRQTGGIGTVATRADIIEKLFNLNAIESRDGKIKVTSKGKQILDLAPQELTSPLLTAEWEEKLLLIEKGRYNSRHFIDEMKAFTQSIVNTIKNSEQKYKHDNLTTTECPTCGKFMIKVKTKNGQMLVCQDPTCKTKKNVQRKTNARCPNCKKKMTLFGRGKDAVYRCVCGHTETQEQMDKRFKNKSSVKVSKKEMKKYMNNEDSLENNPFKDALKNLKLXLK

SEQ ID NO: 71456 - protein, 305 aa, Staphylococcus haemolyticus
MTEQLHLKIPASTANLGVGFDSIGMAIDKYLHLYVKRIEEEEWEFTYLNSELDSLPKNKDNYVFKVAQQVASKYNVKLPSLSVEMRSDIPLARGLGSSASALVGALYIANYFGNIQLSKYELLQLATEIEGHPDNVAPTIYGGLLAGFYNPDTKETNVAHIDVPDVDIILTIPPYELKTEDSRNVLPDQFSHKRAVQSSAISNTMLCALIQHNYGLAGKMMSQDGFHEPYRQHLISEFKEVKAIAQQYDAYATVISGAGPTILTMSSKEKSGQLVRALRKAVTTCHSELATINEIGVVEEIVYPS

SEQ ID NO: 71457 - protein, 267 aa, Staphylococcus haemolyticus
MSNYKMIVMDMDDTLINSENKVSKETKNYLIDIQNQGYKVVLASGRPTEGMLPIAKELELDVHDSYIISYNGGKTIKVATEEVEVSQSVSKKNFDLIVDFCREHNFLILTYQDGHIIHDGDHEYRDIESELTGLPMKRVNDIKAYINDSVPKAMGVDYATNIAKVRDDMHGSFNSEIDVTTSKPFFLEFMAKDVSKGNAIKALCEKLNVSLSEVICFGDSLNDQSMFEVVGCAIAMGNANEELKAIADKITLDNDSNGIPAALKTLL

SEQ ID NO: 71458 - protein, 208 aa, Staphylococcus haemolyticus
NFIKQVSEDGGRVLFVGTKKQAQESVKAEAERAGQFYVNQRWLGGILTNYKTISKRIKRISEIEKMEEDGLFDVLPKKEVVELKKEYDRLIKFLGGIRDMKSMPQALFVVDPRKERNAIAEARKLNIPIVGIVDTNCDPDEIDYVIPANDDAIRAVKLLTGKMADAVLEGQQGVSNDEVAAEQNINLDEKEESQEAESTEENTTVESN

SEQ ID NO: 71459 - protein, 292 aa, Staphylococcus haemolyticus
MAISAKLVKELRERTGAGMMDCKKALTETDGDIDKAIDYLREKGIAKAAKKADRIAAEGLVHVEVKGNEAAIVEINSETDFVARNEGFQELVKEIANQVLDSKAETVDALLETKLSSGKTVDERMKEAISTIGEKLSIRRFEIRTKSDNDAFGAYLHMGGRIGVLTVVEGSTDEEAAKDVAMHIAAINPKYVSSEQVKEEEINHEREVLKQQALNEGKPENIVEKMVEGRLRKYLQEICAVDQNFVKDPDQTVEAFLKSKGGKLVDFVRYEVGEGMEKREENFADEVKGQMK

SEQ ID NO: 71460 - protein, 264 aa, Staphylococcus haemolyticus
MLEGASVSSLLVYITYFYNREEKTMAQTSKYKRVVLKLSGEALAGDKGFGINPIIIKSVAQQVAEVAKMDCEIAVIVGGGNIWRGKTGSDLGMDRGTADYMGMLATVMNALALQDSLEQLECDTRVLTSIEMKQVAEPYIRRRAIRHLEKKRVVIFAAGIGNPYFSTDTTAALRAAEVEADVILMGKNNVDGVYSADPKVDKNAVKYEHLTHIQMLQEGLQVMDSTASSFCMDNNIPLNVFSIMEEGNIKRAVMGEKIGTLITK

SEQ ID NO: 71461 - protein, 184 aa, Staphylococcus haemolyticus
MSDIIQDTKARMSKSIDNLSRELANISAGRANSNLLSGVTVDYYGAPTPVQQLASINVPEARLLVISPYDKSSVADIEKAIYAANLGVNPTSDGEVIRITVPALTEERRKELVKNVKKIGEDAKVSIRNIRRDINDQLKKDEKNGDITEDDLRSQTEDVQKATDNSIKEIDQLVEDKEKDIMSV

SEQ ID NO: 71462 - protein, 260 aa, Staphylococcus haemolyticus
MKVRTLTAIIALLIFLPILLMGGTTLMLFAYLLALIALKELLNMNMIKLISVPGIFSALALIIIMLPQSAGDWVSDIQLKSLIAMSFILLSYTVLSKNRFSFMDAAFCLMSVAYVGIGFMYFYATRSDGLHYILYAFLVVWLTDTGAYIFGRLMGKHKLWPVISPNKTIEGFIGGLICSLIVPIVMLFFVDFNLNIWLLLLVTIILSIFGQLGDLVESGFKRHFGVKDSGRILPGHGGILDRFDSFMFVLPLLNILLIQM

SEQ ID NO: 71463 - protein, 240 aa, Staphylococcus haemolyticus
MTSELKKTPLYQNYVDSGAKIVEFGGWAMPVQFTSIKEEHNAVRYEVGMFDVSHMGEISIKGNDASKFVQYLLSNDTNNLTDTKAQYTALCNEEGGIIDDLVTYKIGDNDYLLIVNAANTDKDFAWVQKHAPKFDVEVSNVSNQFGQLAVQGPKARDLVSGLVDIDVSEMKPFDFQQNVTLFGKNVILSQSGYTGEDGFEIYCEAKDTVDIWNGFIEHNVVPCGLGARDTLRLEAGLPLH

SEQ ID NO: 71464 - protein, 169 aa, Staphylococcus haemolyticus
SKRPVSNTSLISTSAFVVLIRCASGCNFLKIFSNFVNSASVTKSVLFRISDAYGALHDPEGLDIDYLLDRRDSFGTVTNLFDNTISNKELFELDCDILVPAAISNQITEDNAHDIKADIIVEAANGPTTPEATRILTERGILLVPDVLASAGGVTVSYFEWVQNNQGYY

SEQ ID NO: 71465 - protein, 308 aa, Staphylococcus haemolyticus
MVMATKHEEILRKPDWLKIKLNTNDNYIGLKKMMREKNLHTVCEEAKCPNIHECWGARRTATFMILGAVCTRACRFCAVKTGLPNELDLNEPERVAESVELMNLKHVVITAVARDDLRDAGSNVYAETVRKVRERNPFTTIEILPSDMGGDYEALETLMASKPDILNHNIETVRRLTPRVRARATYERTLEFLRRSKELQPDIPTKSSLMVGLGETIEEIYETMDDLRANDVDILTIGQYLQPSRKHLKVEKYYTPLEFGKLRKVAMDKGFKHCEAGPMVRSSYHADEQVNEAAKEKHRLGEEKLQQN

SEQ ID NO: 71466 - protein, 130 aa, Staphylococcus haemolyticus
MIKIGQQYFEIIEEYRSCFDEELFASRYSDILDKYDFIVGDFGYDQLRLKGFYKDTNKKAEISKRFSSIQDYILEYCNFGCPYFVLRHLSNKEVQQLNHDEEDVILSDSEDKLHDVKIKPTIQEVKHQDE

SEQ ID NO: 71467 - protein, 370 aa, Staphylococcus haemolyticus
MSNKDIRVVVGMSGGVDSSVTAHVLKDQGYDVIGIFMKNWDDTDENGVCTATEDYNDVIAVCNQIGIPYYAVNFEQEYWDKVFTYFLDEYKKGRTPNPDVMCNKEIKFKAFLEHALKLGADYVATGHYARIRRHDDGHVEMLRGVDNNKDQTYFLNQLSQQQLSKVMFPIGDIDKKEVRKIAEEQDLATAKKKDSTGICFIGERNFKTFLSQYLPAQSGEMRTLNGDKMGMHSGLMYYTIGQRHGLGIGGDGDPWFVVGKNLEDNILYVEQGFHHDALYSDYLIASDFSFVNPVDLDNGFECTAKFRYRQKDTKVFVQRESQNALRVTFDEPVRAITPGQAVVFYDEEVCLGGATIDDVFKTTGQLSYVV

SEQ ID NO: 71468 - protein, 449 aa, Staphylococcus haemolyticus
  MISC_FEATURE (41)..(41): X=any amino acid
MKVAKFGGSSVSNATQIKKVLDIVNSDSDRKIIIVSAPGIXHKDDVKTTDLLVRLYEKVMNNLNYQDKRKEIIQRYADILHDLDMDDSLLKVIDDTLEEIISTLKDKPLRLYDAILSCGENFNAQLIASYNDSQGFKTTYLSPKDAGILVTDLPQQAQILEEAYEKISKLKDIEGKIIIPGFFGVSKNDYVVTFPRGGSDITGAIIARGIRASLYENFTDVSGIYKANPNIINNPDLIEEITYREMRELSYAGFSVFHDEALQPLYKHRIPVVIKNTNRPQDKGTFIRHDRDVSDKNVIIGISCDKGFSVINIKKYLMNRQVGFTRKILEILEDYNISFDHMPSGIDSISIILRTHQLKGKEKDVLNAIRKRCDVDELSIEHDLAILMIVGEGMNKAIGTANTITHALAESNINLKMINQGSSISMMFGISIADADQAVLSTYEYCYHG

SEQ ID NO: 71469 - protein, 110 aa, Staphylococcus haemolyticus
MVLGNYYLTLERKDAMNTGTIFNDTNEVLKAYANGYVHLHTRIGVHAKSFNNPTFTEAQNNKILATSVGKVIFNEIIPDSFAGPQKQGQQREKVKPRKMEAGIWRAGRLL

SEQ ID NO: 71470 - protein, 200 aa, Staphylococcus haemolyticus
MISIVIAEDQNMLRKAMIQLIEFHDDLKVIDDFDNGIDALQSINSQQPDIAILDIEIPGMTGLEVLSQLRENKINTKVIIVTTFKRPGYFERAVANDVDAYVLKERSVDDLVATIHKVLNGEKEYSTSLMTSLFKEANPLTHKEQVVLREIGEGLSNKEVADKLYLSNGTVRNYTSNIIDKLEAENRFDAWKKANEKGWI

SEQ ID NO: 71471 - protein, 209 aa, Staphylococcus haemolyticus
MNQWDQFLTPYKQAVDELKVKLKGLRKQYEVGEDASPIEFVTGRVKPITSIIDKANKRGIPFDRLREEMYDIAGLRMMCQFVDDIDVVVNMLRQRQDFKVIEERDYINNTKQSGYRSYHVIIEYPIETLNGQKAILAEIQIRTLAMNFWATIEHTLRYKYDGDYPAEIQHRLERAAEAAYLLDEEMSEIKDEIQEAQKYYSQKRAKKHD

SEQ ID NO: 71472 - protein, 269 aa, Staphylococcus haemolyticus
MRYTILSKGDSKSNALKHKMINHMKDFHMVEDAVNPEIVISVGGDGTLLQAFHQYSHMLSQVAFVGVHTGHLGFYADWLPHEVEKLIIEINNSEFQVIEYPLLEIIVRYNDNGYETRYLALNEATMKTENGSTLVVDVGIRGKQFERFRGDGLCISTPSGSTAYNKALGGALIHPSLEAMQIAEIASINNRVFRTVGSPLVLPKHHTCLITPVNHDTILTTIDHVSLKHKNVNGIQFRVANEKVRFARFRPFPFWKRVHDSFIESEDGR

SEQ ID NO: 71473 - protein, 287 aa, Staphylococcus haemolyticus
MKFEYVIQHNEMLKSFLQRHQYSKKTISAIKHNGALIINNSHVTVRKMMMAGDKLTIMLPDETPSSYLIPSRNPIEILYEDDYLIIVSKPNYLNSTPSREHPHDSLIERVLYYLNVGQLIDTSIVPHIVTRLDRNTKGIVIFAKHGHIHHLMTTSAIDKRYMCVCYGQMQLSGVIEEPIARDSQSIITRKVDASGKYAKTSYETVMTKPEASLCEIKLHTGRTHQIRVHFNYLGHPLVGDDLYGGSHPKIHTQSLQCYKVTFIHPIYNREIEIEIDYKWLQNIYAEL

SEQ ID NO: 71474 - protein, 461 aa, Staphylococcus haemolyticus
MSLEIENNDYNKDEVYNQNLLDDLLKQDDIDRFREEFLAMHEYEQSEYFEDTSNENRQKIFEFLSPQEVGEFFEQLEIDDEAYEDLFDTMNAHYASKVLEEMSSDNAVDILNELSKPKVASLLTLMNREDANEIKHLLHYEEDTAGGIMTTEYISLDVNTPVKEALMLVKEQAPDAETIYVIFAVNTDGQLVGVLSLRDLIVAENDAYIEDIMSERVISVNVADDQEDVAQKMRDYDFIAMPVIDYQQHLLGIITIDDILDVMDEEASEDYSRLAGVSDIDSTNDSVVKTATKRLPWLIILTFLGMITATILGSFEATLSQVALLAAFIPIISGMSGNSGTQSLAVSVRNISTGEIDEQSKFKVALREAGSGLLSGLVCATVLFIIIVVIYRQPFLALIVGGSLTIAMTVGTLVGSMIPLFMNKLNIDPAVASGPFITTINDIVSMLIYFGLATTFMSYLT

SEQ ID NO: 71475 - protein, 131 aa, Staphylococcus haemolyticus
EFRNVNVDEYEIGQEVTVDTFEAGDIIDVTGTSKGKGFQGAIKRHGQARGPMAHGSHFHRAPGSVGMASDASRVFKGQKMPGRMGGNTVTVQNLEVVQVDTENNVILVKGNVPGPKKGFVEIQTSIKKGNK

SEQ ID NO: 71476 - protein, 207 aa, Staphylococcus haemolyticus
MANYDVLKVDGSKSGSVELSDSVFAIEPNNSVLFEAINLQRASLRQGTHAVKNRSAVRGGGRKPWRQKGTGRARQGTIRAPQWRGGGIVFGPTPRSYAYKMPKKMRRLALRSALSFKVKENNFTIVDNFGFEAPKTKEFKNVLTTLEQPKKVLVVTDSEDVNVELSARNIPGVQVSTAQGLNVLDITSADSVIITESAAKKVEEVLG

SEQ ID NO: 71477 - protein, 91 aa, Staphylococcus haemolyticus
MEARDVLKRPVITEKSSEAMAEDKYTFDVDTRANKTQVKIAVEEIFDVKVANVNIINYKPKKKRMGRYQGYTNKRRKAIVTLKEGSIDLFN

SEQ ID NO: 71478 - protein, 277 aa, Staphylococcus haemolyticus
MALKKYKPITNGRRNMTSLDFAEITKSTPEKSLLQPLPKKAGRNNQGKLTVRHHGGGHKRQYRVIDFKRNKDGITAKVDSIQYDPNRSANIALLVYADGEKRYIIAPKGLQVGQVVESGADADIKVGNALPLQNIPVGTVIHNIELKPGKGGQLARSAGASSQVLGKEGKYVLIRLRSGEVRMILSTCRATIGQVGNLQHELVNVGKAGRSRWKGIRPTVRGSVMNPNDHPHGGGEGRAPIGRPSPMSPWGKPTLGKKTRRGKKSSDKLIVRGRKKK

SEQ ID NO: 71479 - protein, 92 aa, Staphylococcus haemolyticus; identical to SEQ ID NO: 70548

SEQ ID NO: 71480 - protein, 117 aa, Staphylococcus haemolyticus; identical to SEQ ID NO: 70546

SEQ ID NO: 71481 - protein, 217 aa, Staphylococcus haemolyticus
MGQKINPIGLRVGIIRDWEAKWYAEKDFASLLHEDLRIRKFIDNELKEASVSHVEIERAANRINIAIHTGKPGMVIGKGGSEIEKLRNKLNNLTDKKVHINVIEIKKIDIDARLVAENIARQLENRASFRRVQKQAISRAMKLGAKGIKTQVSGRLGGADIARAEQYSEGTVPLHTLRADIDYAHAEADTTYGKLGVKVWIYRGEVLPTKNTSEGGK

SEQ ID NO: 71482 - protein, 144 aa, Staphylococcus haemolyticus
MLLPKRVKYRRQHRPKTTGRSKGGNYVTFGEYGLQATTTSWITSRQIESARIAMTRYMKRGGKVWIKIFPHTPYTKKPLEVRMGAGKGAVEGWIAVVKPGRILFEVAGVSEEVAREALRLASHKLPVKTKFVKREELGGETNES

SEQ ID NO: 71483 - protein, 87 aa, Staphylococcus haemolyticus
MSERNDRKVYVGKVVSDKMDKTITVLVETYKTHKLYGKRVKYSKKYKTHDENNSAKLGDIVKIQETRPLSASKRFRLVEIVEESVII

SEQ ID NO: 71484 - protein, 143 aa, Staphylococcus haemolyticus
MIQQETRLKVADNSGAREVLTIKVLGGSGRKTANIGDVIVCTVKNATPGGVVKKGDVVKAVVVRTKSGVRRNDGSYIKFDENACVIIRDDKGPRGTRIFGPVARELREGNFMKIVSLAPEVLQFIQTISFKEVPTCISKKVTT

SEQ ID NO: 71485 - protein, 179 aa, Staphylococcus haemolyticus
MNRLKERYNTEVTENLVKKFNYSSVMEVPKIEKIVVNMGVGDAVQNSKVLDNAVEELELITGQKPLVTKAKKSVATFRLREGMPIGAKVTLRGERMYEFLDKLIAVSLPRVRDFQGVSKTAFDGRGNYTLGIKEQLIFPEIDYDKVSKVRGMDIVIVTTANTDEEARELLTNFGMPFRK

SEQ ID NO: 71486 - protein, 876 aa, Staphylococcus haemolyticus
MNMEPKYNPREVEAGRYEEWVKNDYFKPSEDKSKETYTIVIPPPNVTGKLHLGHAWDTTLQDIITRMKRMQGYDTLYLPGMDHAGIATQAKVDAKLKEQGISRHDIGREKFLEHAWSWKEEYASFIRQQWAKLGLGLDYSRERFTLDDGLSKAVRKVFVDLYNKGIIYRGERIINWDPEARTALSDIEVIHEDVQGHFYHFKYPYADGDGYIEIATTRPETMLGDTAIVVNPNDDRYKDVIGKKVILPIVGRELPILADEYVDIDFGSGAMKVTPAHDPNDFEIGQRHSLENIIVMDENGKMNDKADKYAGLDRFECRKQLVEDLKAQDLVIKIEEHVHSVGHSERSGAVVEPYLSTQWFVKMKPLAQRSLDNQKTDDRIDFYPPRFENTFNRWMEEIRDWTISRQLWWGHQIPAWYHKETGEIYVGEEAPKDIDNWVQDEDVLDTWFSSALWPFSTLGWPNIDADDFKRYYPTNALVTGYDIIFFWVARMIFQGLEFTDRRPFNDVLLHGLVRAEDGRKMSKSLGNGVDPMDVIEEYGADSLRYFLATGSSPGHDLRYSTEKVESVWNFINKIWNGARFSLMNIGDEFKFEDIDLTGNLSLADKWILTRLNETIETVTNLSEKYEFGEVGRALYNFIWDEFCDWYIEMSKIPMNGEDEAQKQTTRSVLSYTLDQIMRMLHPFMPFVTEKIWQSLPHEGETIVKASWPTVREELVFEESKQTMQQLVEIIKSVRQSRVEVNTPLSKAIPIYIQAKDENIKATLIENEDYIHKFCNPSDLTIDTHIDIPEKAMTAVVIAGKVVLPLEGLIDMDKEIARLEKELDKLQKELDRVDKKLSNENFVNKAPEKVINEEKEKQQRYQEKYDGVKNRIEQLKA

SEQ ID NO: 71487 - protein, 135 aa, Staphylococcus haemolyticus
  MISC_FEATURE (29)..(29): X=any amino acid
  MISC_FEATURE (122)..(122): X=any amino acid
VAHQYQDQHPQSILSSVYYERIRHGGRHXVGFKTAMTRVLIDYAIRVPELPDTDIYLDGHDIRDGITADYTVRVPDELLQFERHTNSTLGTSEARSAGDSVVSDKLAYDRDDKGQLSRSLVXQAIKARQAREAAR

SEQ ID NO: 71488 - protein, 532 aa, Staphylococcus haemolyticus
MNAIKRFGSAMIVPVLMVAFFGIVLGFATLFKNPTIMGGLANDHTFWFKFWSVIESGGWVIFNHMEIVFVVGLPLSLAKKAPGHAALAALMGYLMFNTFINAILTQWPHTFGANLEKGVENVTGLKAIAGIETLDTNILGGIIISAIVTWIHNRFYSKKLPEMLGVFQGLTFVVTISFFVMLPIAAITCVVWPTIQNGIESMQHFIIASGYIGVWLYHFLERVLIPTGLHHFIYAPIEVGPVVAKDGLKAEWFRHLNEFAESSKPLKEQFHYGFMLQGNGKVFGAIGIALAMYSTTPKANRKKVAALLVPATLTAVVVGITEPLEFTFLFIAPYLFVIHALLAATMDTIMYGFGVVGNMGGGLLDFIATNWIPLGQNHWLTYVAQVVIGLIFSGIYFVVFRYLILKFDIPLPGRRAEEEVKLFSKKDYKEKKGDGSTDNSGFQPSNEYEAKAHYYLEGLGGKENIKDVTNCTTRLRLTVNDETKVEDSGYFTHEQMSHGLVKSGKNVQVVVGMTVPQVREAFEHLVYDDSDK

SEQ ID NO: 71489 - protein, 97 aa, Staphylococcus haemolyticus
MNNHENAHHSDQIKMNLKSRLNRIEGQVRAINRMIEEDVYCDDVLTQIRATRSALNSVATKLLDHHMKSCIMDKVNNGAQEEAMEELLVTFQKLMKD

SEQ ID NO: 71490 - protein, 229 aa, Staphylococcus haemolyticus
MTFSTEIKEAAQPIIEEIYNDGFIQDLLKGDLDAQAVRQYLRADASYLKEFTNLYALLIPKAPSMKDVKFLVEQIEFMLDGEVEAHEILADYINEPYEEIVKEKVWPPSGDHYIKHMYYHAYAHENAAYTIAAMAPCPYVYEVVAKMALDDQNLNRDSVTSKWFDFYSTEMRPLIEVFDNLLDELTANCTEQEKKDIKESFLQSTIHERNFFNMAYINEQWNFGGDKNA

SEQ ID NO: 71491 - protein, 146 aa, Staphylococcus haemolyticus
MMNNLERLRQENPLVVCYTNDVVKNFTANGLLSIGASPAMSEAPEEAKEFYKVAGALLINIGTMTKANEQDILEIGKIANQQGTPIVFDPVAVGASSYRKAFCQKFLSEVKVSVIKGNASEILTLVDATTTMKGTDGKTDLDVVEI

SEQ ID NO: 71492 - protein, 113 aa, Staphylococcus haemolyticus
MKNKFLICDECQAVNIKTLKRKLEKLDPEAEIEIGCQSYCGPGRRKTFAFVNNRPLAALTEDELLEKVTAQLKKPRDPEEEERLRKRNEERKRRKEEQDRKLKEKLAKRKAIK

SEQ ID NO: 71493 - protein, 311 aa, Staphylococcus haemolyticus
MADLVQLGKSDVHVFPIALGTNAVGGHNLYPNLDEEQGKDVVRKAIDNGITLLDTAYIYGPERSEELVGQVVQEYPREQVQIATKGSHVIKENDEVVQNNDPDYLKQQVENSLKRLQVDYIDLYYIHFPDEDTPKDKAVAALKELKDEGKIKAIGVSNFSLEQLKEANKDGYVDVVQLEYNLLHRENEEVMKYAAENNITFIPYFPLASGILAGKYEENQTFDDHRAPRRDFQPEVFNDNVRRVKQLQGIAEAHNTSIANVVLAFYLTRPALDVVIPGAKRAEQVVQNIEAANIQLTDDELNKIDELFPIE

SEQ ID NO: 71494 - protein, 178 aa, Staphylococcus haemolyticus
MITVLFGGSRPEGNTAQLTKSAVEGLDYKWIDLTDYQFNPVRDFRHENRDITSYNDDYKQVIDQVLESDTVIFASPVYWYSVSASLKAFIDHWSETLIDDNYKDFKEKMAKKDFRLILVGGDCPKVKAKPCITQMKYTLDFIGAELNGYIIGTAERPGDISKDTFALERAKEWNETLA

SEQ ID NO: 71495 - protein, 470 aa, Staphylococcus haemolyticus
MRLLFNLLRICLTMGLLAFLFYELFYLATIGRSNIMTLSIKNLTKIYSGNKKAVDNISLDIESGEFIAFIGTSGSGKTTALRMINRMIEATDGTIEMNGKNVRNMNPVELRRSIGYVIQQIGLMPHMTIRENIVLVPKLLKWSKEKKDAKAKELIKLVDLPEDYLDRYPSELSGGQQQRIGVVRALAAEQDIILMDEPFGALDPITRDTLQDLVKDLQKKLGKTFIFVTHDMDEAIKLADRICIMSKGKVVQYDTPDNILRNPANDFVREFIGQNRLIQDRPNMRTVEDAMIKPVTVNANDTLNDAVNVMRQRRVDTIFVVNNHHHLLGFLDIEDINQGLRQRKELIDTMQRDVYKVHIDSKLQDSVRTILKRNVRNVPVVDNDNALIGLITRSNLVDIVYDSIWGEEDDEMTLSDSHMNDVERENELGNIEKNEHAEDRHNDATSKQKDVTDRLDTHDVKDSDHSGVDR

SEQ ID NO: 71496 - protein, 419 aa, Staphylococcus haemolyticus
MEKMNITNQEHDAFVKAHPNGDLLQLTKWAETKRLTGWYSKRVAVGEDGEIKGVGQLLFKKIPKLPFTLCYVSRGFVTDYSDKAALEQLLEETKKVAKAEKAYAIKIDPDVEVDKGIDALKNLNALGFKHKGFKEGLSKDYIQPRMTMITPIDKSDEEIFQSFERRNRSKVRLSLKRGTKVERSNREGLKNFAELMKITGERDGFLTRDLSYFQNIYDSLHEDGDAELFLVKLEPKPVLDDIDNELKELESEKTQLQNKYERKQDKKTKNKLNDVEAKIQKTIERKDDMTDLLAKHPNGIYLSGALLMFAGSKSYYLYGASSNDYRDFLPNHHMQYEMMKFAREHGAKTYDFGGTDNNPDKDSEHYGLWAFKRVWGTYLSEKIGEFDYVLNQPLYQLIEQVKPRLTKAKIKISRKLKGK

SEQ ID NO: 71497 - protein, 562 aa, Staphylococcus haemolyticus
MIKRMLTFSLGNKFAIFLMVVLVILGGVYSSAKLKLELLPDVENPVISVQTTMPGATPQTTQDEISSKIDNQVRSLAYVKSVETQSIQNASIVTVEYNNGTDMDKAEEVLKKEIDKLDFKDGVSEPELTRNSMDAFPIVAYSFTNKNDDLKTTTKEINDQLIPKLQTIDGVQNAQLNGQTTRQVTLKFKQNKLDEAGLTADDVENYIKTATRETPLGLFQFGKNEKSLVVDGQFKSVKALKDLEIPLTISGQSQSGSSDDQSGSEMSSTGDNASSSSSQSQMSNQSQASNGEMPSVPLSELATITVGDERESISKTNGKDAVNVQIMKAQDANTVQVAKEAQNKIDEFVKNNDDIKATKTMDTAKPIEDSLYTMVEKAALGTIVAIIVILLFLRNIRTTAISIVSIPLSILIALIALKLSDVSLNILTLGALTIAISRVIDDSIVVVENIYRRLSDPKEELSGNNLVISATREVVKPILSSTIVTIIVFLPLAFVSGSVGEMFRPFALAIAFSLLASLLVSITVVPALASTFFKKGIKLKRNSQHQNDRGLGVVSKSYRKIL

SEQ ID NO: 71498 - protein, 202 aa, Staphylococcus haemolyticus
MMIVVMLILSYLIGAIPNGYVIGKLFFKKDIRQYGSGNTGATNSFRVLGKPAGFIVTFLDIFKGFITVFFPIWFPVHADGPLSTFFTHGLIVGLFAILGHVYPIYLRFKGGKAVATSAGVVLGVNPILLLILAIIFFGVLYIFKYVSLSSIIAAICCVIGSLIIQDYILFGMSLLVSIILIVRHRTNIVRIFKGEEPKIKWM

SEQ ID NO: 71499 - protein, 666 aa, Staphylococcus haemolyticus
MATKNSNHYSDDSIQVLEGLEAVRKRPGMYIGSTDKRGLHHLVYEVVDNSVDEVLNGYGNEINVTINQDNSISIEDNGRGMPSGMHASGKPTVEVIFTVLHAGGKFGQGGYKTSGGLHGVGASVVNALSEWLEVEIHRDGNIYKQSFKNGGVPASGLVKSGKTKKTGTKVTFKPDPEIFKATTTFNFETLSERLQESAFLLKNLKITLKDLRNGKEREDVYHYEEGIKEFVSYVNEGKEVLHDVTMFTGASNGIEVDVAFQYNDQYSESILSFVNNVRTKDGGTHEVGFKTAMTRVFNDYARRINELKEKDKNLDGNDIREGLTAVISVRIPEELLQFEGQTKSKLGTSEARSAVDSVVSDKLPFYLEEKGQLSKSLVKKAIKAQQAREAARKAREDARSGKKNKRKDTLLSGKLTPAQSKNTEKNELYLVEGDSAGGSAKLGRDRKFQAILPLRGKVINTEKARLEDIFKNEEINTIIHTIGAGVGNDFKIEDSNYNRIIIMTDADTDGAHIQVLLLTFFFKYMKPLVQAGRVFIALPPLYKLEKGKGKSKQVEYAWTDDELEKLQKKLGKGFMLQRYKGLGEMNPEQLWETTMNPETRTLIRVQIEDEMRSSKRVTTLMGDKVAPRREWIESHVEFGMQEDQSILDNTEVQVLETEEYTEEETN

SEQ ID NO: 71500 - protein, 786 aa, Staphylococcus haemolyticus
MIGDRFGRYSKYIIQERALPDVRDGLKPVQRRILFAMHSSGNTYDKNFRKSAKTVGDVIGQYHPHGDSSVYDAMVRLSQDWKLRHVLIEMHGNNGSIDNDPPAAMRYTEAKLSQLSEELVRDINKETVAFVPNYDDTTLEPMVLPARFPNLLVNGSTGISSGYATDIPPHNLAEVIQATLKYIDNPDITVTQLMKYIKGPDFPTGGIIQGVDGIKKAYETGKGKIVVRSKVDEETLRNGRQQLIVTEIPYEVNKSSLVKRIDELRADKKVDGIIEVRDETDRTGLRIAIELKKDVNAEAIKNYLFKNSDLQIAYNFNMVAISDGRPKLMGIRQIIDSYLNHQIEVVANRTKYDLDHAEKRMHIVEGLMKALSILDEVITLIRNSKNKKDAKDNLVAEFEFTEAQAEAIVMLQLYRLTNTDIVALENEHNELANLIKEYRHILDNHDALLQVIKSELTDIRKRFKSERLSSIEAEIAEIKIDKEVMVPSEDVVLSITRQGYIKRTSTRSFNASGVTEVGLKDGDSLLKYQTVNTQDTVLVFTNKGRYLFIPVHKLADIRWKELGQHVSQIVPLDDYETVVDVYNEQSFKDDAFYVLATRNGMIKKSNVSLFKTTRYNKPLVAMKVKDNDELINVIRLNEDQLISVLTHKGMSLTYSSEELSDTGLRAAGVKSINLKDEDFVVMTDVVDSDSSIIMATQRGAVKRISYKILQQAKRAQRGITLLKELKKNPHRVVAGYVVKDESMYTLYSESHSEEGQITDIHLSEQYTNGSFVVDVKDFGDVLDMTI

SEQ ID NO: 71501 - protein, 229 aa, Staphylococcus haemolyticus
MKDVKEGYPEQWLGGMSKGEGVAAEIRLQIVSGEIEVDTLLTENQVAKQFDVSRSPVRDAFKLLQTDQLIQLERMGAKVLQFGDQEKKELYDLRLMLESFAFSKIKHIDRAPITKEMRKHLEMMKVAVKFEDAEAFTQHDIQFHEAMINASNHQYLQTFWNHLKPVIETLVLLSMRHRMEQDKADFERIHSNHEVFIEAVEQYDSTKLREAFHLNFDDVGEDIESFWLR

SEQ ID NO: 71502 - protein, 512 aa, Staphylococcus haemolyticus
MKYMIGVDIGTTSTKSVLYDENGQFIMKHNIGYPLHTPNVDVSEENPDELFDAVLMTVKYVVREANIKKEDIKLISFSAQMHSLIALDAEHHRLTESITWADNRASKYAELINKEHQGSDIYQRTGTPIHPMSPLSKIFWMKHEQSDIYKQTAMFADIKTYIFYQLFEKYVIDYSMASATGMFNLEKLDWDKEALELMGITEAQLPQLVPTTHILKGMKKRYATLMGIDENTPIIVGASDGVLSNLGVNSYKKGEVAVTIGTSGAIRTVINKPRTDYKGRIFCYVLDEDHYVIGGPVNNGGVVLRWLRDELLASEVETAKRLGVDPYDVLTKIASRVKPGAEGLIFHPYLAGERAPLWNADARGSFFGLTLSHQKEHMIRAALEGVLYNLYTVYLALIEVMNETPSTIKATGGFAKSEVWRQMMADIFDTDLIVPESFESSCLGACVLGLKALGEIDDFSIIEEMVGTTNAHQPDSETVQVYQQLVSIFINLSRSLEERYAEIADFQRKHME

SEQ ID NO: 71503 - protein, 398 aa, Staphylococcus haemolyticus
MPKRTFSKDDIRKFAKEENVRYLRLQFTDILGTIKNVEVPVSQLEKVLDNEMMFDGSSIEGFVRIEESDMYLCPDLDTWVIFPWTAGQGKVARLICDVYTTDGEPFAGDPRNNLKRVLKEMEDMGYTDFNLGPEPEFFLFKLDEKGEPTLELNDNGGYFDLAPTDLGENCRRDIVLELEDMGFDIEASHHEVAPGQHEIDFKYADAITACDNIQTFKLVVKTIARKHNLHATFMPKPLFGVNGSGMHFNVSLFKGKENAFFDPNGEMQLTEDAYHFTAGILNNARGFTAVCNPLVNSYKRLVPGYEAPCYIAWSGKNRSPLVRVPSSRGLSTRIEVRSVDPAANPYMALATILQAGLDGIKNKTKVPEPVNQNIYEMNREEREAVGIQDLPSTLYTAL

SEQ ID NO: 71504 - protein, 369 aa, Staphylococcus haemolyticus
NFNNQSNESEQLEQNEAIEQSNETSDENAQNVESTKTNDSHRLSTNSSENTYKLSIKDRVKEFNDNRKRKKHAKSTQFDHLSPQERKEQLRIQRRKRQKRIQYVIITFLVLLIILFLLYMFTPLSRISNIKISGNNNVSNSQVEKALDVKDNSRMYTYSKRKGIQNLKKNDLIKDVKIKKQLPNTLKVQITENQVVGVVKEKNKYVPIIEGNQELKNFDGNIAGSGPILEGFKGEEKSNMIKSLSKMSPEIRDMISEIKYAPKQNSPNRILLYMQDDMQVVGNIKTIANKIKYYPQMSQSLSKDDSGNLKTQGYIDLSVGASFIPYNENSSGDSKSDQNVRQKSQQETDAKDELQSALNKINEQSDSNN

SEQ ID NO: 71505 - protein, 477 aa, Staphylococcus haemolyticus
MEEHYYVSIDIGSSSVKTIVGEKFHNGINVIGTGQTYTSGIKNGLIDDFDIAKQAVKDTIKKASIASGVDIKEVFLKLPIIGTEVYDEANEIDFYEDTEINGTHIEEVLEGIRQKNDVADTDVIDVFPIRFIVDGDNEVSDPKELIARHSLRVEAGVIAIHKSILINMIKCVESCGVDVLDVYSDAYNYGSILTATEKELGACVIDIGEDLTQIAFYERGELVDADSIELAGRDITDDIAEELNTTYETAEKIKHQYGHAYANSASDQDVFSVDQVDSDELVEYTQKDLSAVIERTMQDIFDEVFDVLVDLGLTRVNGGFIVTGGSSNLLGVKELLNTMVNEKIRVHTPSQMGIRKPEFTSAISTISSSITFDELLDYVTMSYQDNDEFEEEVIEDNEREHTSKSGGFDWFKRKSNKNENTYEEDYNEPHERTDKVDDDDKYDSNESHHDTTEHYDDQEQPQKEEGKFKKLMKSLFE

SEQ ID NO: 71506 - protein, 393 aa, Staphylococcus haemolyticus
MLEFEQGFNHLATLKVIGVGGGGNNAVNRMIDHGMNNVEFIAINTDGQALNLSKAESKIQIGEKLTRGLGAGANPEIGKKAAEESREQIEDAIQGADMVFVTAGMGGGTGTGAAPVVAKIAKEMGALTVGVVTRPFGFEGRKRSTQAAAGVESMKAAVDTLIVIPNDRLLDIVDKSTPMMEAFKEADNVLRQGVQGISDLIAVSGEVNLDFADVKTIMSNQGSALMGIGVSSGENRAVEAAKKAISSPLLETSIVGAQGVLMNITGGESLSLFEAQEAADIVQDAADEDVNMIFGTVINPELQDEIVVTVIATGFEDKPTSQGRKASSTGFGTSATSSTSTQTSTPREESFSQSSSSSRSSESVSERSHTTKDDDIPSFIRNREERRSRRTRR

SEQ ID NO: 71507 - protein, 578 aa, Staphylococcus haemolyticus
MIRRYLEFVKPYKYRIIATIIIGIIKFGIPMLIPLLIKYAIDGVINNSALSTNEKFQHLSVAIGIALFIFLIVRPPIEYLRQYLAQWTSNKILYDIRKQLYNHLQALSARFYANNQVGQVISRVINDVEQTKDFILTGLMNIWLDCITIVIALSIMFFLDVKLTFAAIFIFPFYILTVYFFFGRLRKLTRKRSQALAEVQGFLHERVQGMSVIKSFAIEDNEAKNFDHKNQHFLNRAFQHTSWNAYSFAAINTVTDLGPIIVIGFGAYLAINGSITVGTLAAFVGYLEQLFGPLRRLVSSFTTLTQSFASMDRVFQLMDEDYDIKNGIGAQPIEIKQGHIELKNVSFKYNEDESTILKDINLNINKGDTVAFVGMSGGGKSTLINLIPRFYDVSEGEILIDDYNVKDFLTGSLRNQIGLVQQDNILFSDTVRENILLGRPDATEEEVIEAAKMANAHEFIMNLHDGYDTEVGERGVKLSGGQKQRLSIARIFLNNPPILILDEATSALDLESEAIIQEALDVLSKDRTTLIVAHRLSTITHADKIIVMQNGEIVETGTHKELIEKQGAYEHLYSIQNL

SEQ ID NO: 71508 - protein, 429 aa, Staphylococcus haemolyticus
MKFTESERLQQLSNEYILGGVNSPSRSYKAVGGGAPVVMCEGHGAYLYDVDGNKFIDYLQAYGPIITGHAHPHITKAIQDQAAKGVLYGTPTELEIEFSKKLREAIPSLEKIRFVNSGTEAVMTTIRVARAYTKRNKIIKFAGSYHGHSDLVLVAAGSGPSQLGSPDSAGVPESVAKEVITVPFNDIESYKEAMKHWGDEVAAVLVEPIVGNFGMVEPQPGFLEKVNEITHDYGALVIYDEVITAFRFHYGAAQDLLNVYPDLTAFGKIIGGGLPIGGYGGRQDIMEHVAPLGPAYQAGTMAGNPLSMRAGIALLEVLEQNGVYERLDQLGKRLEDGLLELIDKHNITATINRVYGSLTLYFTDEKITHYEQVENSNGEAFAKFFKLMLNQGINLAPSKFEAWFLTTEHTEEDIDETLKAVDYAFSQMK

SEQ ID NO: 71509 - protein, 322 aa, Staphylococcus haemolyticus
MKAVNWNTQEDMTNMFWRQNISQMWVETEFKVSKDIASWKTLTEDEKNTFKRALAGLTGLDTHQADDGMPLIMLHTTDLRKKAVYSFMAMMEQIHAKSYSHIFTTLLPSSETNYLLDTWVIEEPHLKYKSDKIIENYHKLWGKEASIYDQYIARVSSVFLETFLFYSGFYYPLYLAGQGKMTTSGEIIRKILLDESIHGVFTGLDAQSLRNELSENEKQKADKEMYKLLEDLYANEVSYTHMLYDDIGLSEDVLNYVQYNGNKALSNLGFEPYFEEKEFNPIIENALDTTTKNHDFFSVKGDGYTLALNVEALQDEDFIFDN

SEQ ID NO: 71510 - protein, 322 aa, Staphylococcus haemolyticus
MKFLFKGYVLLILLVCLTIVSLFVGVSQLSLSDIFHLSEEQQNILFSSRIPRTVSILLSGSSLALAGLIMQQMMQNKFVSPTTAGTMEWAKLGILISLIFFPKGHILIKLLFSVGLSLAGTYLFVKLINLIRVKEVIFVPLLGIMIGGIVSSFTTFIALRTNALQSIGNWMNGNFAIITSGRYEVLYLVVPLLIIAFIFANHFTIAGMGKDFSHNLGVSYEKIINIALFITAALTALVVVTVGTLPFLGLIVPNIISMYRGDHLKNALPHTLMLGSIFVLFADIIGRLIVYPYEINIGLTIGVFGTVIFLILLMKGRKHYAN

SEQ ID NO: 71511 - protein, 156 aa, Staphylococcus haemolyticus
MAKKKTKSPGTLAENRKARHDYNIEDTIEAGIALKGTEIKSIRRGSANLKDSYAQVKRGEMFINNMHIAPYEEGNRFNHDPLRSRKLLLHKKEIIKLGERTREIGYSLIPLKLYLKHGQCKVLLGVARGKKIHDKRQALKDKAMKRDVDRAIKDRY

SEQ ID NO: 71512 - protein, 397 aa, Staphylococcus haemolyticus
RSDERKLTFEAYGLDPEKRFNVPEEVYEIFQTTMLKRANEHEDAWKALLENYSKQYPELADEFKLAISGKLPKNYRDELPRFDSDHNAATRADSGEVIQALSKSVPSFFGGSADLAGSNKSNVKEATDYDRNTPEGKNIWFGVREFAMGAAVNGMAAHGGLHPYGATFFVFSDYLKPALRLSAIMGFNSTFIFTHDSIAVGEDGPTHEPIEQLAGLRSIPNMNVIRPADGNETRVAWEVALESEQTPTSLVLTRQNLPYLDVDEETVEQGVRKGAYVVFETETKPEYLLLATGSEVSLAIEAAKDLDKQGKGVRVVSMPNWFAFEQQPEEYKESVIPKEITKRVAIEMASPLGWHKYVGTEGKVIGIDQFGASAPGDLVVEKYGFTKENVLNQIRTF

SEQ ID NO: 71513 - protein, 374 aa, Staphylococcus haemolyticus
MKVIHTADWHLGKILNGKQFLEDQHYILNKLIDNLKEEKPDVLVISGDIYDTSYPSKETIRLFEETIKIINVNMKIPTIITNGNHDGRERLNYGSTWFEFSQLYIRTQLELMSTPITINNINFYTLPFATISEIKAYFDDDDIKTYEQATQKCINHISKIIDPNQINILIGHLTIKGGKTSESERPLTIGTVESVESANFNIFDKVLLGHLHHPFSITDNIVDYSGSLLQYSFSEVNQAKGYKKLMINSKGDINTKFVQLKPLRELEEIEGDYSAVIQGDVPVKNKDNYFHFKLKNMSHVTDPIIHLKQIYPNTLSLSNITFENHNKSTYADFKTTDDPTIIKNFYKTITDEDLTNYQEKKIHQLLNQVINRED

SEQ ID NO: 71514 - protein, 343 aa, Staphylococcus haemolyticus
MLFDGIVYALFGKASTEGRNEGELRSHFADGKSPMSVEYEFKINDKKFKISRQAGFIKEGNTSLTPGKLDVFEFDEESQLYELRESKISSGNGFIKDLLGINAEQFRQLFILPQGEFKKFLVSNSSDKQSILRTLFNSIRFEEMQNLLLNQVKDEKKQIESRYSRIQILWEDIETFENDELIQFKSLNSMQTKDIIKAIPQFELVGQHLNEEYEQLKSEHNDALEAIKRKIEENNKLIESLKELDRNKDKKVQLEKNKDSIEKLKAELRKIIEIKPLSQLYNQRNTKEQKYENTKVKLNSILEESNELNVKLEIFKKEKEILNEQLEDINIKSEYIDKTKQFY

SEQ ID NO: 71515 - protein, 276 aa, Staphylococcus haemolyticus
MNETQSNEQILKLFIVSDSIGETAQRMIHATLTQFPDLHNVEIKKFPYIKDEEEFLNILNLAREQHAIVATTLVSESFNALGHQFAHEHDIPYVDYMSDLISIIKKVTHSQPLMESGALRKLNDEYFKRIEAIEYSVKYDDGKHFTDIGAADALIVGVSRTSKTPLSMYLANKGYKIANIPLVPEIEIPDNVYKQKGLKVFGLTASPQYIANIRKNRAETLGLSSESRYNNLDRIKKELVYAEEVFKKLNATVINTEYKSIEESAFYIEKFLQPKL

SEQ ID NO: 71516 - protein, 234 aa, Staphylococcus haemolyticus
LTEQLAKRAKKVMSFEIDQRLIPVLKETLAPYDNVTIINEDILKADIGKAVKTYLNDCDKIMVVANLPYYITTPILLNLMQQDIPIDGYVVMMQKEVGERLNAQVGTKAYGSLSIVTQYYTETSKVLTVPKSVFMPPPNVDSIVVKLMQRETPLVSVDDEETFFKLAKAAFAQRRKTINNNYQNFFKDGKKHKESILKWLEQTGIDPKRRGETLSIQDFARLYEEKKNFPELEN

SEQ ID NO: 71517 - protein, 449 aa, Staphylococcus haemolyticus
QRNAVILAAGKGTRMKSNKYKVLHKVAGKSMVEHVLTNVKNAGVNQIVTIVGHGAEDVKETLGNQSLYSYQEEQLGTAHAVKMANEHLKEVEGTTLVVCGDTPLITAHTLQKLIEHHESTHAQTTVLSATAQIPFGYGRIVRDEQRRLQRIVEEKDASEAQKALTEISSGIFAFDNRVLFSKLEEVKNDNAQGEYYLPDVISLILAENGVAEVYHTDDFNEIMGVNDRVMLSNAEKALQQRINIEHMRNGVTIIDPTTTFIGPDVKIGMDTIIEPGVRINGETVIGEEAVIGQYSEINNSHIGSQVDIKQSVINDSIVGDKTKVGPFAQLRPGSNLGSDVKVGNFVEVKKADLKDGAKVSHLSYIGDAEIGERTNIGCGSITVNYDGVNKFKTVVGKDAFIGCNTNLVAPVTVGDGVLIAAGSTITDNVPNESLALARARQITKEGYLK

SEQ ID NO: 71518 - protein, 229 aa, Staphylococcus haemolyticus
MLNNEYKNSSLKIFSLKGNEPLAQEVADRVGIELGKCSVKRFSDGEIQINIEESIRGCDVFIIQPTSNPVNLHLMELLIMIDACKRASAANINIVVPYYGYARQDRKARSREPITAKLVANLIETAGANRMIALDLHAPQIQGFFDIPIDHLMGVPIIGQHFENDPNIDPEECVVVSPDHGGVTRARKLADILKTPIAIIDKRRPKPNVAEVMNIVCEIEGRTAIIIDD

SEQ ID NO: 71519 - protein, 126 aa, Staphylococcus haemolyticus
MKIILKNTSEQPIYEQIKQQIKENILKGYVEAGSHLPSMRELAKDLQVSLITTKRAYEDLEKEGFVTTVRGKGTFVKEQDSSILKEKQFFVIENLARLMIKEAKTIDMPLKELKEILALIYEEEEE

SEQ ID NO: 71520 - protein, 299 aa, Staphylococcus haemolyticus
MNVIEVKDVSFQSSAFSINNLSFSIPQGFVTGFIGANGAGKTTIIRMIMDIIEPKQGHISIFGEKIANKPKWIKNKIGFVYSEVYFNQQWTAKKLEKMVSPFYTDWDSQAFKNYLEKFNLPFDEKIKHFSTGMKMKLSLALALSHHAELFILDEPTAGLDPIVRNEVLEILQSELLDEHKTLFISTHIISDLEKIADYLVHIKDGEVIMQGFRHQLQEQYSIVQGDNQDLDEELNRLFLYKEVKSTGFVGFTKQAQVFKELFGKKVNIKQPTIEELMIYIEKSKSNDNQIDFQQSRLIK

SEQ ID NO: 71521 - protein, 263 aa, Staphylococcus haemolyticus
MIDNILLYIKLFPSLIKFTKQRIIDTWKRFAILFIAELVLVLIALITLSFIEIEDISKARWLYRIVAMITFATMFATIFKSFKEYSQDYLITKSFQSTPLITTVANALIGSSICCILSIITLLFKPVNFDASFTAFIVFYIMMILFIIFISVTLGLLDIIYKNMTMIFWLAVVINFFIVPIIFIPSANENLMIQLLKLNPLFYLIDGLATSTIYGVVNMYNISYHIYFILIIVTIGAINFMLMRYVAHSKYKYSSNIIATKNK

SEQ ID NO: 71522 - protein, 129 aa, Staphylococcus haemolyticus
MYKTGILNSDISKVLSDLGHTDQIVIADCGLPVPKDVKKIDLALTLGQPSFLEVYEVLKQHMEIEHVTIAEEMEVDNAPIFEQVTKDFSEIEQVNHETFKALTKNAKAIIRTGEATPYANIILQSGVIF

SEQ ID NO: 71523 - protein, 280 aa, Staphylococcus haemolyticus
MATLYLVGTPIGNLGDITFRAIETLKDADFIACEDTRVTKKLCNHYDIQTPLKSYHEHNKSQQTEYLIDLLNEGYNIALVSDAGLPLISDPGYELVVAAHSYDIHVETVPGPNAGLTALMASGLPSYTYTFLGFLPRKEKDKVAVLQERMFQDSTLIIYESPFRVVETLKAISKVDDTRRVAVGRELTKKFEQIVMQEVGHLINAFQNDEIMQKGEFVILIEGAKPLETEQWFQSLTISEHVEHYISEQNIKPKKAIKLVAEDRHMKTGEVYDIYHDVNQ

SEQ ID NO: 71524 - protein, 659 aa, Staphylococcus haemolyticus
MAKETFYITTPIYYPSGNLHIGHAYSTVAGDVISRYKRMQGYDVRYLTGTDEHGQKIQEKAQKAGKTELEYLDEMISGIKSLWSKLEISNDDFIRTTEDRHKQVVEKVFERLLKQGDIYLGEYEGWYSVPDETYYTESQLVDPIYENGKIVGGKSPDSGHEVELVKEESYFFNINKYTDRLLEFYDANPDFIQPPSRKNEMINNFIKPGLEDLAVSRTSFDWGVRVPSNPKHVVYVWIDALVNYISALGYLSDDDELFQKYWPADVHLMAKEIVRFHSIIWPILLMALDLPLPKKVFAHGWILMKDGKMSKSKGNVVDPNVLIDRYGLDATRYYLMRELPFGSDGVFTPEAFVERTNYDLANDLGNLVNRTISMINKYFQGELPAYEGPKHELDEDMEALAHETVKHFNESMESFQFSVALSTVWKFISRTNKYIDETTPWVLAKDDSQKDMLGNVMAHLVENIRFAAVLLRPFLTHAPKEIFKQLNINEPELFELESLEQYGALKQPIMVTEKPTPIFPRLDTEAEIAYIKESMQPPKSEESKDEVEEPSKAQIDIKDFDKVEIKAATITDAENVPKSDKLLKIQIDLGLEQRQIVSGIAKFYRPEDIIGKKVAVVTNLKPAKLMGQKSEGMILSAEKDGVLTLVSLPSAIPNGAVIK

SEQ ID NO: 71525 - protein, 255 aa, Staphylococcus haemolyticus
MLIDTHVHLNDEQYAEDLTEVISRAREAGVDRMFVVGFDTPTIERAMELIEQYDFIYGIIGWHPVGAIDFTDERLQWIEELSQHPKVIGIGEMGLDYHWDKSPADVQKDVFRKQIALAKRVNLPIIIHNRESTQDCVDILMEEHAEEVGGIMHSFSGSPEIADVVINKLNFHISLGGPVTFKNAKQPKEVAKHVPMDRLLVETDAPYLSPHPYRGKRNEPERVTLVAEQIAELRGMSYEDVCRQTTENAERLFKL

SEQ ID NO: 71526 - protein, 168 aa, Staphylococcus haemolyticus
MKINEFIVVEGRDDTERVKSAVECDTIETNGSAINKETLAVIQNAQETRGVIVLTDPDFPGDKIRHTITEHVSGVKHAYLDREKAKNKRGKIGVEHAHPKDIRDALMHVSSPFEEAEESIDKSVLIDLGLIIGKDARRKREILGRKLHIGHSNGKQLLKKLNAFGYTE

SEQ ID NO: 71527 - protein, 489 aa, Staphylococcus haemolyticus
MVNFNISNTVLNSEVFIIGLPDHINQLGYINYNNEDITKQIDTYRHHHLISSQLGKISSTLLPLKDSSKRLITVGLGNLKTLDYGTLLRAFGNLFQFLKEERVTEADVLFDTLISKKIEQTKVAEVMGLQSEQAVYSFDNYKSDKSAPYQLELNISTNKEDLHRYFINGAIIGQSVNVARDYSNMPPNILTPNYFAEQVTQHFDETSVKVDIKDGKQLLDEGFGLIHAVGKGSENPPVVITMTYNGGDSEDAPIALVGKGITYDSGGYSIKSKIGMQTMKFDMCGAANVVGMIDAISRLQIPINIVGVIASAENMISSNAMKPDDVLTALSGETVEMLNSDAEGRLVLGDAVFYANQFQPKIILDFATLTGAAVAALGEDKAALFNSNADKEIEEIRVSAKEMDEYAFELPMTQTEQRLIRQSDVADLVNHTNGHGKALFAATFITHFSGSTPHIHFDIAGPATTNKTSYKGPKGPTGSMITTVLNWLR

SEQ ID NO: 71528 - protein, 282 aa, Staphylococcus haemolyticus
MKDYAFQIENIETARKLSRHIEDKFANYAASKEKDDKDLAILVGGAGFTGIEFLGELTERIPELCNKYGVNQNKVRVTCVEAAPKMLPMFSDELVNYAVNYLEDRGVEFKIATPIVACNEKGFVVKINDQEQQLEAGTAIWAAGVRGSKLMEESFEGVKRGRIVTKQDLTIEGHDDIFVIGDVSAFIPAGEERPLPTTAQIAMQQGEHVAKSIKNILNGQAATDFEYVDRGTVCSLGAHDGVGIVYGRDITGKKAAFMKKVIDTRAVFKIGGVGLAFKKGKF

SEQ ID NO: 71529 - protein, 288 aa, Staphylococcus haemolyticus
  MISC_FEATURE (112)..(112): X=any amino acid
MFKDFFNRSSKKRKYLTVQDSKQNEVPAGIMTKCPKCKKIMYTKELNENLNVCFNCDHHIALPAYKRIEAITDENSFVEFDKGMTSANPLDFPGYQEKIEKDQQKTDLSEVXVTGTAKLDGVQFGVAVMDARFRMGSMGSVVGEKICRIIDYATEHRLPFILFSASGGARMQEGIISLMQMGKTSVSLKRHSDAGLLYISYLTHPTTGGVSASFASVGDINLSEPKALIGFAGRRVIEQTINEKLPDDFQTAEFLLEHGQLDKVVHRKEMKETLAQLLKLHQEVKKDA

SEQ ID NO: 71530 - protein, 315 aa, Staphylococcus haemolyticus
MLDFEKPLFEIKNKIESLKQSQEKNDVDLQDEIDLLEASLERETKKIYTNLKPWDRVQIARLQERPTTLDYIPYIFDSFIELHGDRNFRDDPAMIGGIGYLNGTPVTVIGQQRGKDTKDNIYRNFGMAHPEGYRKALRLMKQAEKFNRPIFTFIDTKGAYPGKAAEERGQSESIARNLVEMASLKVPVIAIVIGEGGSGGALGIGIANRIMMLENSTYSVISPEGAAALLWKDSSLAKMAAETMKITAKDLHHLNVIDSVIDEPLGGAHNNIEQQAIDIKQAFVDQLEQLQQQSADELVEDRFNKFRNIGAFIEK

SEQ ID NO: 71531 - protein, 499 aa, Staphylococcus haemolyticus
MHLKFKVTYTLTLLNPIAKQVRSKIMSENQYDLVILGGGTAGYVAAIRASQLGNKVAIVEKSLLGGTCLHKGCIPTKALLKSAEVLRTVKDSVHFGVNVGQYSFDLKSMMKRKDKIVNQMHQGIESLMQKNHIDIFNGTGRIMGTSIFSPQSGTISVEYDNVESELLPNQNVLIATGSLPTQLPFLPFNHNTVLSSNDILQLTDLPASIAIIGGGVIGLEFASLLIDLGVNVSVIEAGERILPNESAQIANFLKTSLIARGVTFYENCALNESAVKVNSNSVTIQVNKDKTIEVEKVLVSIGRKPNTDDIGLNNTKIKTDDNGNILVNDFLQTEDKHIYAAGDCIGKLQLAHVSSKEAILAVEHMFNGNGLPLNYDKMPKCIYTHPEVASIGYNKESAEAKNIKTKSFKVSFNAIGKAVIEETTNDRGFCEMIINDETNEIIGINMIGPQVTELINEASLLQFMNGSAIELGLTTHAHPSISEVLMELGLKVENRAIHV

SEQ ID NO: 71532 - protein, 333 aa, Staphylococcus haemolyticus
MIDYKSVGLSEEDLKEIYKWMDLGRKVDERLWLLNRAGKIPFVVSGQGQEATQIGMAYAMKEGDISSPYYRDLAFVTFMGISPYDTMLASFGKKDDINSGGKQMPSHFSHREKGILSQSSPVATQIPHSVGAALALKMDKKPNIATATVGEGSSNQGDFHEGLNFAGVHKLPFVCVIINNKYAISVPNTLQYAAEKLSDRALGYGIYGETVDGDDPIAMYKAMKEARERALNGEGATLIEAITHRMTPHSSDDDDTYRTKEEREALKTYDCNLKFKDYLLEKEIINQEWLDNIEQEHKEIINKATKDAEKAPYPSVEETYQFVYDPEGGMGNE

SEQ ID NO: 71533 - protein, 256 aa, Staphylococcus haemolyticus
MIQKEVWAMSKMSYIEAIQQAQDLAMEHDNNVFILGEDVGRKGGVFGATRGLQDKYGVERVIDTPLAESNIVGTAIGAAMIGKRPIAEIQFADFILPAVNQIISEAAKMRYRSNNDWQCPITIRAPFGGGVHGGLYHSQSIESIFASTPGLTIVIPSSPYDAKGLLLSSIESNDPVLFFEHKKAYRFLKEEVPEDYYTVPLGKADVKREGKDITVFTYGLCVNYCMQAADILAADGISVEIVDLRTVYPLDKETII

SEQ ID NO: 71534 - protein, 151 aa, Staphylococcus haemolyticus
  MISC_FEATURE (6)..(6): X=any amino acid
  MISC_FEATURE (13)..(13): X=any amino acid
AWMRLXLRQRPTXQQARINRFNDLESEVQDQHVQDKGQLNLAYSRLGKQVYELEKLSKQINGRTLFEDITEIIQSGQLIGIVGPNGAGKTTLLNILSGEDNDYTGTLKIGQTVKVAYFKQTEETLDRDIRMIDYLREESEVAKEKDGTSIS

SEQ ID NO: 71535 - protein, 185 aa, Staphylococcus haemolyticus
MTNVIIVHSQLGNSHNHWYKWLQHNLELEGYDVQLFHLDESKNDNIDNWVFELNQQIELLSKDTYFVTHGYGSLATLKYIEGLSIDGPFEGFFSIAGFKEDAKKIDDSINVGEFNVEDLIKTKVNHFYGLASKDDSYVSYIETQNLIDELGGKTKIVDEGGHFLEEEGLVSFTELQGKMQHFMTK

SEQ ID NO: 71536 - protein, 356 aa, Staphylococcus haemolyticus
MVKENICIVYGGKSAEHDVSKLTAQNVLNAIDKERYLVDIIYITNDGLWKKKENITEEIKEIESLNMTDIEAGEITILLKESRNGKPYDAIFPLLHGPNGEDGTIQGLFEVLDLPYVGNGVLAASSSMDKLVMKQLFEHRGLPQLPYISFLRSEYEKYEGNIIKLVKDKLTYPVFVKPANLGSSVGISKCNNEDELKSGIEEAFQFDRKLVIEQGINAREVEVAVLGNDYPETTWPGEVIKDVAFYDYKSKYKDGKISLQIPAELDEEVQMTLRNMALEAFKATDCSGLVRADFFVTEDNQIFINETNAMPGFTAFSMYPSLWENMGLSYSDLITKLIDLAKERHEDKKKNKYTID

SEQ ID NO: 71537 - protein, 451 aa, Staphylococcus haemolyticus
MIEVTLQQIQEWIPCDIDSQYLRQTIKGVTIDSRAIKTNMLFIPFKGENVDGHCFVSQALKDGAGASFYEKGHDIDDNVKGPIIWVDDTLIALQQLAKAYLKHVNPKVIGVTGSNGKTTTKDMIESVLHTEFKVKKTQGNYNNEIGLPLTILELDLDTEISILEMGMSGFHEIELLSNIAEPDIAVITNIGESHMQDLGSREGIAKAKSEITIGLKKEGTFIYDGDEPLLEPHVKKIKHAKCLSVGLKQDNALVCEVEHSENDGIAFSINGNEHYKLPILGIHNMKNAAIAIAIGHELGLKYETIQHNINHVQLTGMRMERHITDDDITIINDAYNASPTSMKAAIDTLSQMEGRKIIVLADSLELGENSRSMHEEVGAYLEGKNIHTLLTYGKDAKYISDIGGQFVDHVEYFIDKQQLTQYLINNLVANDKVLVKGSRGNKLEEVVNKLI

SEQ ID NO: 71538 - protein, 503 aa, Staphylococcus haemolyticus
MQNFKELGISDKTVETLEAMGFKEPTPIQKDSIPYTLEGKDILGQAQTGTGKTGAFGIPLIEKVVGQSGVQALILAPTRELAMQVAEQLREFSRGQNVQVVTVFGGMPIDRQIKALKRGPQIVVGTPGRVIDHLNRRTLKTNGIHTLILDEADEMMNMGFIDDMRFIMDKIPAEQRQTMLFSATMPKAIQTLVQQFMKSPQIVKTMNNEMSDPQIDEYYTIVKELEKFDTFTNFLDVHQPELAIVFGRTKRRVDELTSALLSKGYKAEGLHGDITQAKRLEVLKKFKNDQIDILVATDVAARGLDISGVSHVYNFDIPQDTESYTHRIGRTGRAGKEGIAVTFVNPIEMDYIRQIEDSNGRRMNALRPPHRKEVLKAREDDIKDKVKNWMSRESEARLKRISSELLEEYDSTELVASLLQELVEANDEVEVQLTFEKPLARKNRQGKGNGSRRGGKRNNKFDNKNKRSKGNFNKKKGKKPDRRERQDKGRSTMKGRTFADLQK

SEQ ID NO: 71539 - protein, 357 aa, Staphylococcus haemolyticus
MWYNNQLTQSLNIQYPIIQAGMAGSTTAELVATVSNKGGLGCIGAGYFTTKKLEQEIQKVQGLTSQPFGVNLFVPSHQSYTNEQVEHMNAWLKPYRKALNLEEPVVNISEEQQFKSAIQTVIKYRVPVCCFTFGIPSKEIIEQLKGAKITLIGTATTVDEAIANEHAGMDIVVAQGSEAGGHRGSFLTTNNQREPLIGTMSLIPQIVDHVSIPVVAAGGVMDGRGILASQILGAQGVQMGTAFLTTEESGANQLVKQAVLHSKETDTIVTDVFSGKSARGINNEFVETMKQYEGNIPPYPVQNQLTNSIRKTAASTGHREWTHMWSGQSPRLATSQHVNQLMDRLVEQVKTLLTVVR

SEQ ID NO: 71540 - protein, 232 aa, Staphylococcus haemolyticus
MKLTIFHTNDIHSHLNEYARITSYMAEHRPKLQHPSLYLDIGDHVDLSAPVTQATIGRKNIDLLNEAQCDIATIGNNEGMTISHEALNNLYNNATFNVICTNVIDEEGKLPHNIASSCIKEIEGVRILFVAATAPFTPFYRALDWIVTDPLEAIKDEIANQQGNYDVLIVMSHVGIFFDEKLCQEIPEIDVIFGSHTHHHFDEGEMNNGVLMAAAGKYGYYLGEVNLTIEIK

SEQ ID NO: 71541 - protein, 534 aa, Staphylococcus haemolyticus
MLQVTDVSLRFGDRKLFEDVNIKFTEGNCYGLIGANGAGKSTFLKILSGEIDSQTGHVSMGKDERLAVLKQDHFAYEEERVLDVVIKGHERLYEVMKEKDEIYMKPDFSDEDGIRAAELEGEFAEMNGWNAEADAASLLSGLGISADLHDKQMSELENNQKVKVLLAQSLFGEPDVLLLDEPTNGLDIPAISWLEDFLINFDNTVIVVSHDRHFLNNVCTHIADLDFGKIKLYVGNYDFWYQSSQLAQKMAQEQNKKKEEKIKELQDFIVRFSANASKSKQATSRKKQLEKIELDDIQPSSRRYPYVKFTPEREIGNDLLTVQGLSKTIDGEKVLDNISFTMNPNDKAILIGDSEIAKTTLLKILAGEMEPDEGTFKWGVTTSLSYFPKDNSEFFEGVDMNLVDWLRQYAPEYEQTETFLRGFLGRMLFSGEEVKKKASVLSGGEKVRCMLSKMMLSSANVLLLDEPTNHLDLESITAVNDGLASFKGSIIFTSYDFEFINTIANRVIDLNQSGGLSKEVPYEEYLQEIGVLQK

SEQ ID NO: 71542 - protein, 329 aa, Staphylococcus haemolyticus
MTRLAVVGATGLVGTKMLETIDRKNIKFDELVLFSSARSAGKEVQFQGQTYVVQELTEEAASEKFDYVLMSAGGGTSAQFAPIFEKAGAIVIDNSSQWRMTEDIDLIVPEVNQPEFKRGIIANPNCSTIQSVVPLKVLQDQFGLKRVAYTTYQAVSGSGIKGKRDLAEGANGKEPEAYPHPIYNNVLPHIDVFLEDGYTKEEQKMIDETRKILHEPELKVTATCARVPVQDSHSVEIDVTLDKEATVQEIKDLFDKDERVVLVDNPEKNEYPQALNSTGRDEVFVGRIRRDDSLDNTFHVWCTSDNLLKGAALNAVQVLEQVINLKGAR

SEQ ID NO: 71543 - protein, 241 aa, Staphylococcus haemolyticus
MKILLIGYGAMNQRVARLAEEKGHEIIGVIEPQKNETTPYTHYDHIADAQNEADVAIDFSNPNLLFPLLEEEFQLPLVIATTGEKEKLIEKLNELSHNMPVFFSANMSYGVHALTKILEAAVPLLQDYDIELTEAHHNKKVDAPSGTLVKLYDVIKDLRQNITTVYDRHELTEQRTKDEVGIHSIRGGTIVGEHDVLFAGTDETITISHKAQSKDIFANGAITAAEKLINQSNGYYTFDNL

SEQ ID NO: 71544 - protein, 239 aa, Staphylococcus haemolyticus
MVQHLSAEEIIQYISDAKKSTPLKVYVNGNFDGVTFPDSFKVFGSDNSKVIFCEADDWKPFYESNQSTITELEIEMDRRNSAIPLKDLTNTNARIEPGAFIREQAIIEDGAVVMMGATINIGAVVGEGTMIDMNATLGGRATTGKNVHVGAGAVLAGVIEPPSASPVVIDDNVLIGANAVILEGVHVGEGAIVAAGAIVTQDVPAGAVVAGTPAKVIKQTSEVEDSKREIVSALRKLND

SEQ ID NO: 71545 - protein, 372 aa, Staphylococcus haemolyticus
MAELQKGLEGVIAAETKISSIIDSQLTYAGYDIDDLAENALFEEVVFLLWNYRLPTQGELDALREKFYHYMTLNPRVYKHFEEYATDNVHPMTALRTSVSYIAHFDPDAENETEENRKERAIRIQAKIASLVTAFARVREGKEPVKPNPELSYAANFLYMLRGELPTDTEVEAFNKALVLHADHELNASAFTARCAVSSLSDMYSGIVAAVGSLKGPLHGGANEQVMSMLADVKSVDEVDAYLDEKFKNKEKIMGFGHRVYKDGDPRAKYLREMSRKITSETGRSELYDISIAIEKRMKKEKGLIPNVDFFSATVYHSMDIPHDLFTPIFAVSRTSGWTAHILEQYRDNRIMRPRANYVGETNRKYLPIEER

SEQ ID NO: 71546 - protein, 422 aa, Staphylococcus haemolyticus
MSAEKITRINDGLNVPNEPIIPFIIGDGIGPDIWKAASRVIDAAVEKAYNGEKRIEWKEVLAGQKAFDETGEWLPQETLDTIKEYLIAIKGPLTTPIGGGIRSLNVALRQELDLFTCLRPVRWFKGVPSPVKRPQDVDMVIFRENTEDIYAGIEFKEGTDEVKKIIDFLQNEMGATNIRFPETSGIGVKPVSKEGTERLVRAAIQYAIDNNRKTVTLVHKGNIMKFTEGAFKQWGYDVAHNEFADKVFTWQQYDEIVEKDGKDAANQAQEKAEQDGKIIIKDSIADIFLQQILTRPAEHDVVATMNLNGDYISDALAAQVGGIGIAPGANINYESGHAIFEATHGTAPKYAGLNKVNPSSELLSSVLMLEHLGWQEAADKITDAIEATIASKVVTYDFARLMDGATEVSTSEFADELIKNLK

SEQ ID NO: 71547 - protein, 450 aa, Staphylococcus haemolyticus
MGKYFGTDGLRGIANKELTPELAFKLGRYGGYVLAHNEGADRPKVLVGRDTRVSGEMLESALIAGLASIGAEVMRLGVISTPGVAYLTREMGAELGVMISASHNPVADNGIKFFGADGFKLSDAQEEEIETLLDQDNPDLPRPVGTDIVHFSDYFEGAQKYLSYLKSTIDVNLEGLKITLDGANGSTSALAPFLFGDLEADTETIGCSPDGYNINDNCGSTHPELLAEKVLETESDFGLAFDGDGDRLIAVDEKGNIIDGDQIMFVIGQEMHKNQELNNDMIVSTVMSNLGFYKALENEGIKSNKTKVGDRYVVEEMRKGNYNLGGEQSGHIVMMDYNTTGDGLLTGVQLAAVIKMSGKPLSELAAQMKKYPQSLINVKVTDKHHVEDNEDVKKVMDEVETEMNGEGRILVRPSGTEPLVRVMVEASTDEDAQRFAQRIADEVQSKMGLE

SEQ ID NO: 71548 - protein, 601 aa, Staphylococcus haemolyticus
MCGIVGYIGYDNAKELLLSGLEKLEYRGYDSAGIAVANDNGTTVFKEKGRIAELRKVADNNDTDGHVGIGHTRWATHGVPSTVNSHPHQSNNERFTLVHNGVIENYEELKSEYLSDVTFQSETDTEVIVQLVEHFSNKGLETEEAFSKVVSLLHGSYALGLLDNQDSDTIYVAKNKSPLLVGVGEGFNVIASDALAMIKVTNEYKEIHDHEIVIVKKDSVTIKDLDGNVQDRDTYTAQIDASDAEKGIYDHYMLKEINEQPAVMRRIIQEYEDEKGDLKIDPEIVKDVAAADRIYIIAAGTSYHAGLVGKEYLEKWAGVPTEVHVASEFVYNMPLLSEKPLFIYISQSGETADSRAVLVETNKLGYKSLTVTNVAGSTLSREADHTLLLHAGPEIAVASTKAYTAQIAVLSILSQVVAKAHGRDNDIDLLRELAKVTTAIETIVDDTPVMEQIAKDFLETTRNAFFIGRTMDYNVSLEGSLKLKEISYIQAEGFAGGELKHGTIALIEDGTPVIALSTQEKVNLSIRGNVKEVVARGAKPCIISMEGLEKEGDTYVIPHVHELLTPLVSVVTLQLIAYYAALHRGLDVDKPRNLAKSVTVE

SEQ ID NO: 71549 - protein, 492 aa, Staphylococcus haemolyticus
MVVSKSSPLIFERSREGRYAYSLPQSDIKTDSVESILDDKFIRKNKAEFPEVAELDLVRHYTELSNKNFGVDSGFYPLGSCTMKYNPKINEKVARIPGFAESHPLQEEEQVQGSLEIVYSLQEELKEITGMDEVTLQPAAGAHGEWTALMIFKAYHLDNGEGHRDEVIVPDSAHGTNPASASFAVFKAVTVKSNERGEVDIEDLKRDVNENTAAIMLTNPNTLGIFEKNIMEIREIVHEAGGLLYYDGANLNAIMDKVRPGDMGFDAVHLNLHKTFTGPHGGGGPGSGPVGVKKELASYLPKPMVIKDGDTFKYDNDIKNSIGRVKPFYGNFGIYLRAYTYIRTMGAEGLREVSEAAVLNANYIKASLKDHYEIPYEQYCKHEFVLSGSKQKEHGVRTLDMAKRLLDFGVHPPTIYFPLNVEEGMMIEPTETESKETLDYFIDAMIQIAEEAKNDPDKVLEAPHSTIIDRLDETTAARKPVLKFDNLHEEKE

SEQ ID NO: 71550 - protein, 128 aa, Staphylococcus haemolyticus
MNVSLIIALAIIVIIILYMLGNWFMNKRAVTELEQNEFHKGLRKAQVIDVREKVDYDYGHINGARNIPISMFSQRYQGLRKDQPIYLCDANGVAGYRAARILKKNGYKDIYMLKGGYKKWTGKIKTKK

SEQ ID NO: 71551 - protein, 352 aa, Staphylococcus haemolyticus
MNKLAKVQDLLDVQQLDALVILSDYNRRYLSDFTGTSGALIISKNNYQLITDFRYIEQATNQATKFNIIKRSGGLIEAIVEIINHEQFNHVGFEGHLVSYDTYQTLDQSKAKLISIGNEIEKIREIKTPEEIEKIKYAAKIVDDTYNYVLDIAKVGMTERELKSKLEAKMLELGADGPSFDTIVASGYRGALPHGVASDKVIEQGDMITLDFGAYYRGYCSDITRTFAIGEPDSKMKDIYNIVLNSQIKAINEIKAGMTVAEADALSRDYIESHGYREAFGHSLGHGIGLDIHEGPLLSKNAKGIIQVNNCVTIEPGIYVDGLGGVRIEDDILITENGCEVFTKCTKDLIIL

SEQ ID NO: 71552 - protein, 451 aa, Staphylococcus haemolyticus
MKKILIANRGEIAVRIIRACHDLGIQTVAIYSEGDKDALHTQIADEAYCVGPTQSKDSYLNIPNILSIATSTGCDGIHPGYGFLAENGDFAELCEACQLKFIGPSYESIQKMGIKDIAKAEMIAANVPVVPGSDGLVTTISDAKQIAKEIGYPVIIKATAGGGGKGIRVARTEKELENGYRMTQQEAETAFGNGGLYLEKFIENFRHIEIQIIGDQHGNVIHLGERDCTIQRRMQKLVEESPSPILSDEQREEMGNAAIRAAKAVNYENAGTIEFIYDLNDNQFYFMEMNTRIQVEHPVTEMVTGIDLVKLQLKVAMGEALPYTQEDITINGHAIEYRINAENPYKNFMPSPGKITQYLAPGGYGVRIESACYTNYTIPPYYDSMVAKLIVHEPTRDEAIMTGLRALSEYLILGIDTTIPFHLKLMNNDIFRSGSFNTNFLEQYNIMDDEE

SEQ ID NO: 71553 - protein, 128 aa, Staphylococcus haemolyticus
MSRKESRMQAFQTLFQLEMKDTELTINEAINFIKDDEPELDFDFIHWLVTGVKDHEPVLDDTIKPHLKDWSLQRLLKTDRIILRMATFELLHSDTPPKVIINEAVELAKQFSDDEHYKFINGVLSNIK

SEQ ID NO: 71554 - protein, 445 aa, Staphylococcus haemolyticus
MTMSEYLSVTTLTKYIKYKFDQDPHLQSILLKGELSNFKKHSSGHLYFNVKDKDSVISAMMFKGNANQLTFEPKEGDEVLLEARVSVYERRGNYQIYVNKMELDGIGNLYQKLEQLKQKLKKEGFFNNEHKKPIPRFPKKIAILTASTGAAIRDIQSTINSRYPLAEKIQISTLVQGTQAKEDIIKNIKYADSLGVDTIIVGRGGGSIEDLWNFNEEDVVKAIFECQTPIISAVGHETDFTLSDFVADVRAATPTQAAVMATPDQYELMQQIKQYQFSLSRYIKQYLEKQYKQLDHLASYYKFKQPSLLYDQQIQRKDDLERQLTQLLLSKIENKKYQLKVLHQNFNVKTLNQTILQNKRQLMNVKNRLSNLTMKNIHNNKLELKNKVELLNTLSPTNTMLRGYSIINKDDKVITSTQDLSKDDEITLAMKDGNVDAIVKKGRCE

SEQ ID NO: 71555 - protein, 172 aa, Staphylococcus haemolyticus
CDYSKSSNRDGFFYNTFVEPMSKVLHWLGHSVFNDDYGIAIIVLVLVIRIILLPFMLSNYKNSHLMREKMKVAKPEVDGVQEKVKRARTQEEKMAANQEMMEVYKKYDINPMKSALGCLPVLIQMPVVMGLYFVLRYRIGGGIAEHPHFLWVNLIHPDIWITIIARVLYFIQ

SEQ ID NO: 71556 - protein, 424 aa, Staphylococcus haemolyticus
MIKCTKTSLGEIVVYRYEDDSLMLHNDLYQINMAESYWNDGIHERNAVFDLYFRSMPFESGYAVFNGLKRVIQFIEHFHFSDSDIEYLQSIGYKNDFLNYLKNLKFTGNIRSMQEGELCFGNEPLLRVEAPLIQAQLIETVLLNIINFHTLISTKASRIRQVAPDDTLMEFGTRRAQELDAALWGARAAYIGGFDSTSNVRSGKLFGIPVSGTHAHALVQTYGDEYKAFKIYAERHKNCVFLVDTFHTLKSGVPTAIKVAKELGDKINFIGIRLDSGDIAYLSKEARRMLDEAGFKDAKIIASNDLDEQTIMSLKSQGAKVDSWGVGTKLITGYDQPALGAVYKLVAVVDDNGRYVDRIKLSNNAEKVTTPGKKKVYRIINTKTGKAEGDYITLEHENPNNEKPLKMFHPVHTYKMKHIKHFEA

SEQ ID NO: 71557 - protein, 255 aa, Staphylococcus haemolyticus
MTQTINEAKHILSEINSIEVLEKHELNQDVRKGIQQAITRRRKQLLKEQEILDHYNTMNKFESELLNNNPQALICGIDEVGRGPLAGPVVACAVILNEGHRYLGLDDSKKVTASKRQILNKKLKDGVLEYAYGLASPEEIDELNIYNATQVAMNRALSQLVNRPDHLLIDAMSLDTTIPQTSIIKGDAKSVSIAAASIMAKEYRDDLMKEIADEYPGYEFEKNVGYGTKAHLDGLNKLGITPYHRKSFEPIKSMT

SEQ ID NO: 71558 - protein, 294 aa, Staphylococcus haemolyticus
MAIQWYPGHMAKAKREVTEQLKKVDVVFELVDARIPYSSRNPMIDEVIKQKPRVVILNKKDMSNLNEMQKWESFFIDKGYYPVSVDAKHGKNLKGVETAAIAATKEKFEREKAKGLKPRAIRAMIVGIPNVGKSTLINKLARKNIAQTGNKPGVTKQQQWIKVGQSLQLLDTPGILWPKFEDEIVGKKLSLTGAIKDSIVHLDEVAIYGLQFLINHDLEGFKQHYKIDVSADAEILEWFDAIGRRRGLLQRGNEVDYEAVIELIINDVRNAKIGTYSFDLYSEMKSELDNDTNN

SEQ ID NO: 71559 - protein, 184 aa, Staphylococcus haemolyticus
MKIGVLALQGAVREHIRHIELSGHEGIAVKKVEQLDEIDGLILPGGESTTLRRLMDLYGFKEKLQQSDLPMFGTCAGLIVLAKDVEGETGYLKKLDITVERNSFGRQVDSFEAELDIKGIAEDIEGVFIRAPHIANVEEGVEILSTVGDKIVAVKQGKYLGVSFHPELTDDYRVTQYFIDHMVK

SEQ ID NO: 71560 - protein, 295 aa, Staphylococcus haemolyticus
MSKIVGSDRVKRGMAEMQKGGVIMDVVNAEQAKIAEEAGAVAVMALERVPSDIRAAGGVARSANPKIVEEVMNAVSIPVMAKARIGHITEARVLEAMGVDYIDESEVLTPADEEYHLRKDQFTVPFVCGCRNLGEAARRIGEGAAMLRTKGEPGTGNIVEAVRHMRKVNSEVSRLVVMNDDEIMTYAKELGAPYEVLKQIKDHGRLPVVNFAAGGVATPQDAALMMELGADGVFVGSGIFKSEDPEKFAKAIVQATTHYQDYELIGKLASELGTAMKGLDINQISLEERMQERGW

SEQ ID NO: 71561 - protein, 681 aa, Staphylococcus haemolyticus
MLKRLKEKSNDEKIKHTMNKRISFVFGAIVVIFGIIVLRLGYLQIAQGSQYSQLVKNDENITVNESVPRGRILDRNGKVLVDNASKLTITYTRSRKTSQKDMLDTAKKLSSLITMKTDKITERDKQDFWIQKHQDEVDKLMKKETSMLNEGSITQDQYDKQLYKKVGDKQINSLSKKDLRVLAIYREMSAGSTMNPQTIKNEDVSEKEYAAVSQQLDSLPGVNTTMDWDRRYPYGDTLRSIFGSVSTSSEGIPKELTEQYLAKGYSRNDRVGKSYLEYQYEDILRGKKKEMKYTTDKSGKVINSEVINPGSRGDDLQLTIDIDLQKKVESLLENQIKTLRSQGAKDMDNALIVVQNPKNGDILAMAGKQIDKNGKLTDYDLGNFTGQFAVGSSVKGGTLLAGYQNNAIKVGEEMIDEPLHFKGGLTKRSYFNKNDKVRINDKEALMHSSNVYMFKTALKLAGDPYYSGMGLPTDISEAGQKLRKGLNQVGLGVKTGIDLPNETIGQIEPLTNNSGNYLDLSIGQYDTYSPIQLSQYVSTIANDGYRIQPHIGLAIHDATNSDDIGPVKQKIKGNVLNKVNNSEDEIKEVQKGFEMAFNEKDGTGYSSFHKTKVPSAGKTGTAEVFQDGESRVNSTYIGYAPINNPKLSFSIVYTNQPVPPPWLNGGDLGRDVINYYFDDKK

SEQ ID NO: 71562 - protein, 179 aa, Staphylococcus haemolyticus
  MISC_FEATURE (81)..(81): X=any amino acid
MSKKEIRKEILSQMKQLDKEHKLRADAWLKNQLINNTEYKNAKRIGIVLSMTHEVDTYPIIETMLSDGKKVFVPNTNYKIXKEMNFKQLLSLNRLEKDEKGLLYVNDDTEITDQLDLIVVPGVAFRDDGYRIGYGGGYYDRFLSDSNANTISLIYDLQLTQFEIESHDQPVEKLIIFNT

SEQ ID NO: 71563 - protein, 230 aa, Staphylococcus haemolyticus
MPFTPSEIKNKEFTKVKNGLEPAEVSDYLNQLSNEIERLKEEKKQLEKVIEERDTNIKSYQQVHQSVSDALVQAQQAGEETKLAANKEAEAVISKAQAQADLIVNDAIEKARHLSFQTEDMKRQSKIFRSRFRMLVEAQLDLLKNDDWDYLLNYDIDAEKVTQENFQHLNSQDITPEEQLSAQSQQSESVLASESNNSKTNSLSTSDATSTSENVTSQSSVSQSESTSNK

SEQ ID NO: 71564 - protein, 911 aa, Staphylococcus haemolyticus
  MISC_FEATURE (772)..(772): X=any amino acid
YKDTLLMPKTDFPMRGGLPNKEPQIQEQWEANNQYQKALEKNKGNQSYILHDGPPYANGNLHMGHALNKIIKDIIVRYKTMQGFYAPYVPGWDTHGLPIEQALTKKGVDRKKMSIAEFREKCKEFALEQIELQKKDFKRLGVRGDFNDPYITLKPEYEAAQIRLFGEMADKGLIYKGKKPVYWSPSSESSLAEAEIEYHDKRSASIYVAFDVKDTKGVVDQDAQFIIWTTTPWTIPSNVAITVHPDLKYGQYNVNGKKYIIAQALSEDVAEALEWDKDAIQLEKEFTGKELEYVEAQHPFLDRISLVINGNHVTTDAGTGCVHTAPGHGEDDYIVGQKYDLPVISPLDDKGVFTEEGGQFEGMFYDKANKAVTDLLTEKDALLKLNFITHSYPHDWRTKKPVIFRATPQWFASINKVRQDILDAIEETDFKVDWGKTRIYNMIRDRGEWVISRQRVWGVPLPVFYAENGDIIMTKETVNHVADLFEEHGSNIWFEREAKDLLPEGFTHPGSPNGTFTKEMDIMDVWFDSGSSHRGVLENRPELSFPADLYFEGSDQYRGWFNSSITTAVATRGQAPYKFLLSHGFVMDGEGKKMSKSLGNVIVPDQVVKQKGADIARLWVSSTDYLADVRISDEILKQTSDVYRKIRNTLRFMLGNINDFNPDTDVIPEAELLEVDRYLLNRLREFTASTIEHYDNFDYLNIYQEVQNFINVELSNFYLDYGKDILYIEEKNAHKRRSMQTVLYQILVDMTKLLAPILVHTAEEVGHTHRMXKKKVFHLADMPKVVEVDQALLDKWNQFMALRDDVNRALEVARNNKVIGKSLEAKVVIGNNDNFKAAEFLQQFEDLQQLFIVSQVEVSDSVDNAEAYQHGDIRIDHAVGEKCERCWNYTEELGSVGELEHLCPRCQEVVK

SEQ ID NO: 71565 - protein, 152 aa, Staphylococcus haemolyticus
MNFEGKLVGTDLKVAIVVSRFNDFITNRLLDGAKDTLVRHGVEDSNIDVAYVPGAFEIPLVSKKLAQKGEYDAVITLGCVIRGATSHYDYVCNEVAKGVSKANDVSDIPVIFGVLTTESIEQAVERAGTKAGNKGAEAAVSAIEMANLLKQF

SEQ ID NO: 71566 - protein, 393 aa, Staphylococcus haemolyticus
MEFDEIKDALNALKRGESIIVVDDEDRENEGDLVAITQWMNDNTINFMAKEGRGLICAPISKDLALKFNLMPMVEHNTDGFGTNFTVSIDHATTSTGISAFDRMATARALINPESTPEDFHKPGHLFPLIAKENGVLERTGHTEAAVDLAKLTKAAPAGVICEIMNEDGTMAKGEQLEAFKHQHGLKMITIESLVNYQKDKDTSVELKAKVNMPTDHGAFEMYGFESSLTKEEIVVLAKGEPRVTENVRIHSACLTGDIFHSQRCDCGAQLESAMKYINEHGGMIIYLPQEGRGIGLINKLRAYELIEQGHDTVTANLALGFDEDLRDYHIAAQILNYFNVQQVNLLSNNPKKFEGLSEYGIKVADRTPIIVAETEHNHDYMNTKKIKMGHLI

SEQ ID NO: 71567 - protein, 210 aa, Staphylococcus haemolyticus
MFTGIVEEIGTVKNIRTHQSVRTLDIACQTITEDMHIGDSISVNGACLTVIDFTSNYFSVQVIKGTEDKTYLSQINKNDEVNLERAMSGNGRFGGHFVLGHVDDKGVITQVKETPNSRIVSIRASSTIINQMVKQGSITVDGVSLTIFDLRHDSFDIHLIPETRRSTILSSKQNGDQVHLETDVLFKYVERMVSRNESELTLDKLKAFGF

SEQ ID NO: 71568 - protein, 347 aa, Staphylococcus haemolyticus
MSNFMEYAIQLAQMVKGQTGINPPVGAVVVNNGRIVGLGAHLKQGEKHAEVQALDMAGKEAKGGIIYISLEPCTHFGSTPPCVNKIIEFGLSKVIYAVKDTTLPSEGDAILEQAGIDVEYQYSEEAAALYKDFFKAKSGQIPEITMKVSVSLDGKQATDLGQSKWITNSEVKQDVYHLRHTHDAVLTGNGTINADNPLYTTRIPNGKNPIRIVLAKSGNVDFTKQLFQDSSSEVWIYTENQTLESPNRNIKVICIDKCYLKDILKDIYKRGIGSLLIEAGPRITSKFLQTDFINQLIIYYAPKIIGGSGKNQFYQTADIIDLNETTQFEISSTELINQNLKMILRKK

SEQ ID NO: 71569 - protein, 119 aa, Staphylococcus haemolyticus
MIHGIGIDLIEIDRIKKAFEKQKDKLVKRILTQEEEQQFHSFKSEKRKFEFLSGRFATKEAFSKALGTGLGKTVAFKDINCYNDIKGKPCIDYNGFIVHVSITHTEHYAMSQVLLEKRD

SEQ ID NO: 71570 - protein, 382 aa, Staphylococcus haemolyticus
MSDKFYRSTYLNVDLSAILNNYNTVRTLHSDKTVIPVVKANSYGLGSVKIAQHLMKNGADFFAVATLDEAIELRMHGINAQILILGVIPLEDINKAIQHRVALTVPSLQLLQHAIELISDDNEKNLWLHVKLDTGMGRLGIKSLEEYKEVIDLIQSHPHLVFEGVYTHFANADEPGDSMDHQYEQFETLVTQAEKPKFIHSQNSAGSLLRNFELCNAVRLGISLYGYYPSAYVKEKVETELQPSAQLLTQVVQTKYLKVGESVSYGSTFTATEDIKIAILPIGYADGYLRSMQGAFVNVKGHQCEVIGRVCMDQMIIKVPDDVKEGDSVTLLDNAYDSPQSAETLAQKQDTISYEVLCNLGRRLPRIYQVDDEMHVTNELLK

SEQ ID NO: 71571 - protein, 121 aa, Staphylococcus haemolyticus
MIRRGDVYLADLSPVQGSEQGGVRPVVIIQNDTGNKYSPTVIVAAITGRINKAKIPTHVEIEKKKYRLDKDSVILLEQIRTLDKKRLKEKLTYLSDEKMQEVDEALDISLGLHDEVKTQNT

SEQ ID NO: 71572 - protein, 179 aa, Staphylococcus haemolyticus
MANVANKYAKALFDVVIDKDRLDLMYDELSEVSEATKNYGEDLRAIDSNPNQPASERRKFVGIVFGDANYYLKNMLMILANNRHLVLINSIFKEFKSLYNEYHNEDSAIVESVYQLSDEELDRIKDLILKQTNLSQVHITTKINPELIGGFRVKVGTTVLDGSVKKDLEQIERKFRRVN

SEQ ID NO: 71573 - protein, 502 aa, Staphylococcus haemolyticus
MAIKAEEISALLRSQIENYESEMSVTDVGTVLQIGDGIALIHGLNDCMAGELVEFSNGVLGLAQNLEESNVGVVILGPYTEITEGDEVRRTGRIMEVPVGEELIGRVVNPLGQPIDGQGPINTTKTRPVEQKATGVMARKSVDEPLQTGIKAIDALVPIGRGQRELIIGDRQTGKTTIGIDTILNQKGLDTICIYVAIGQKDSTVRANVEKLRQAGALDYTIVVSASASEPSPLLYIAPYSGVTMGEEFMFNGKHVLIVYDDLTKQAAAYRELSLLLRRPPGREAYPGDVFYLHSRLLERAAKLNDDLGGGSITALPIIETQAGDISAYVPTNVISITDGQIFLQSDLFFSGVRPAINAGQSVSRVGGSAQIKAMKKVAGTLRLDLASYRELESFAQFGSDLDEFTARKLERGKRTVEVLKQDQNKPLPVENQVLIIYALTKGYLDDIPVEDITRFEDELNSWTKSNGSDLLNEIRETGGLPSDDKFEATINEFKKSFSKSE

SEQ ID NO: 71574 - protein, 337 aa, Staphylococcus haemolyticus
MDKIVIKGGNRLTGEVKVEGAKNAVLPVLTASLLASEGQSKLVNVPDLSDVVTINNVLSTLNANVEYNKEEGAVLVDASTTLKEEAPYEYVSKMRASILVMGPLLARLGHAIVALPGGCAIGARPIEQHIKGFEALGAEIHLENGNIYASTKDGLKGTDIHLDFPSVGATQNIIMAASLAKGKTVIENVAKEPEIVDLANYINEMGGKVTGAGTDTITIHGVEKLRGVEHSIIPDRIEAGTLIIAAAITRGDVFVRDAVKEHMTSLIYKLEEMGVNLDFQEDGVRVTAEDELKPVDVKTLPHPGFPTDMQSQMMALLLTAEGHKVITETVFENRFMH

SEQ ID NO: 71575 - protein, 561 aa, Staphylococcus haemolyticus
MKRYLIPLLVLCFIVFGITTGTSYAAESQATQSTNITATEEASQTASKEASSANIESTNKPLSLESSNVSHNEQATPSSETTTHPSVETSTTQNTTSEKHSNSSQGSAFSQEKATPEPATNDDNTSSQEKASSESTSNENNTSQFHGTEVKPSPSTSEQSKSTQVEPTKESTSTKVKQTPQEPTQQQQKRNVPESQQSTPASKQVSKSSNTTSEQAAPKSQHVTVNKRMATTSDNTNKHTILHTNDIHGRFVEDDGRVIGMAKVKGLKDKYNPDLMVDSGDAFQGLPVSNNSKGEEMAKAMNGVGYDAMTVGNHEFDFGYDQLLKLQKQLNFPIVSSNIYKNGKRVFDPSTTVTKNNVRYGIVGVTTPETKTKTSPTAVEGVEFKDPLTSVKQAMNEIKNNVDVFVILSHLGVDKSTQKTWRGDYLIDQLTKDGSFKQPIFVLDGHSHTVIDKGEHYGTNNVLAQTGTALANVGRVDFTFQNQKASDINASLINVADAKDITPDPQIDAQTKKANDDFLKETSTVVIPNNTVTLNGERAQARTQETNLGNLITDAMEAYAS

SEQ ID NO: 71576 - protein, 358 aa, Staphylococcus haemolyticus
MSEKVKFEQRDSLKEKPEGNLGFGQYFTDYMLSFDYDVDKGWHDLKIIPYAPFEVSPAAQGLHYGQAVFEGLKAYKHEGEVVLFRPDQNFKRINDSLARLEMPKVDEELLLEGLKQLVDVERDWVPEGEGQSLYIRPFVFATEGILGVRASHQYKLLIILSPSGAYYGGDTLKTTKIYVEDEYVRAVRGGVGFAKVAGNYAASLLAQTNANNLGYDQVLWLDGVEQKYVEEVGSMNIFFVENGKLVTPALNGSILPGITRKSIIELAKELGYEVEERKVSIEELFEAYDKGELTEVFGSGTAAVISPVGTLKYEDREIVINNNEPGEITKKLYDIYTGIQSGKLEDTHGWRVVVPEYK

SEQ ID NO: 71577 - protein, 448 aa, Staphylococcus haemolyticus
MATHPFELFNLDSKLIEAIKDLKFDKPTEIQNRIIPRIKKGVNLIGQSQTGTGKSHAFLLPLIDKIDVENKEPQSIVVAPTRELAQQLYQAANHLATFKQGIKVSLFIGGTDIEKDRQRTSNKPQLVIGTPTRINDLAQSGHLHAHLASYLIVDEADLMIDLGLIEDVDLIASRLDENSHIAVFSATIPKSLQPFLNKYLSNPEYVEVDSKSQNKKNIEFYLIPTKGTEKVDKTLQLIDILNPYLCIVFCNSRDNADELANSLNAAGIKVGMIHGGLTPRERKQQMKRIRNLEFQFVIASDLASRGIDIEGVSHVINFDVPKDIDFFTHRVGRTGRGNYKGVAITLYSPDEEHLITLIEDKGYHFENVDVKNNELTPIKAHNTRRKRVRKDDHLTNEVKHKVRSKTKNKVKPGYKKKFKQEVERMKRQERKQFSKRQNRQQRKNNKKG

SEQ ID NO: 71578 - protein, 299 aa, Staphylococcus haemolyticus
MKAMLLGSHVSMSGKKMLEGSAEEAHKFGESTFMIYTGAPQNTRRKSIEDLNIEKGHEAMDKYGLSNLVVHAPYIINIANTTKPEVFQLGVDFLQNEIERTQALGAKDIVLHPGSHVGAGADKGIQQIIKGLNEVLTHDNDVRIALETMAGKGSEVGRTFEEIAQIIDGVTHNDRLSICFDTCHTHDAGYNIKEDFDGVLNEFDKIIGLDRIKVVHVNDSKNEQGAHKDRHENIGFGHIGFDALNYVVHHDVFKDIPKILETPYVGEDKKNKKPPYKFEIEMLKAQQFDSELKDKILQQ

SEQ ID NO: 71579 - protein, 140 aa, Staphylococcus haemolyticus
MNTNDAIKILKDNGLKYTKKREDMINIFVKEDKYINAKHIQQQLDKDYPGISFDTIYRNLHLFKDLKIIESTELDGEMKFRIACMNHHHHHFICENCGDTKVIDFCPIDQIKVYLPNVDIHTHKLEVYGVCEECQKQNSK

SEQ ID NO: 71580 - protein, 757 aa, Staphylococcus haemolyticus
MIKSKYNWLYEPPTEYINETLIKKYQLTPIIKKLLESKSITDDESIKALLDETIINHDPWLLSDMEKAVTRINEAIDKNERILVYGDYDADGVTSTTILVKTLQTLGAEVGWYIPNRFSEGYGPNELAFRNAYDEGVSLIITVDNGIQGHKEIEMVQKLGVDVIVTDHHEIGHTLPEAYAIVHPMHPEYEYPFHFLCGAGVAYKLSQVLLDNPPNYFVSLAAIGTIADLVSMTDENRSIVKQGLSFLNQSCPIQIKALLNQAGYNDTINEETVGFIIGPRLNAVGRLEDASLAAELLMTEDEEEAEFLAEQVEHFNVERKEIVAQITDEALAIAEEKVNNGNQFLLLAKENWHEGVLGIVASKIVETYALPTLILNIDLEQNHAKGSARSIEQVSMFEILSAHQDLISKFGGHHMAAGMTMEIDYIEALEQGLNDWMFKLSEHTSLEPTKHVSVKLEENDISINNIRDIQRLSPFGTDFEKPLLEIDDNEVVDVRAIGKDKNHLKLVTGQLQLQSIFWKNGQLATQIEPGQPINLLGNLQINEWNGNQSPQFIIQDIATNNEQILDYRSKRKQLNIDPNDTKVAFLIHPKKEKLNHNYYYYGDKIDQEHEVVILRDLPNDLDSLKDSLKNLNYSQLYLVLQHQQSIYFDGMPTSNQFKSCFKALMTKKETNLEQEGMLLCQHLNVKPNILKFMLKVFYELGFVTEENGIIKIVDNANKQNIETSRVYQLRQSRMEVEKLLLYDDFTQLKTWIKSQKG

SEQ ID NO: 71581 - protein, 632 aa, Staphylococcus haemolyticus
  MISC_FEATURE (616)..(616): X=any amino acid
  MISC_FEATURE (632)..(632): X=any amino acid
MNNEYPYSADEVLNKAKSYLSTDDYQYVLKSYHIAYEAHQGQFRKNGLPYIMHPIQVAGILTEMRLDGPTIVAGFLHDVIEDTPYTFDDVKDMFNEEIARIVDGVTKLKKVKYRSKEEQQAENHRKLFIAIAKDVRVILVKLADRLHNMRTLKAMAREKQVRISKETLEIYAPLAHRLGINTIKWELEDTALRYIDSVQYFRIVNLMKKKRSEREAYIANAIDKIQTEMIKMDITGEISGRPKHIYSIYRKMMKQKKQFDQIFDLLAIRVIVNSINDCYAILGLVHTLWKPMPGRFKDYIAMPKQNMYQSLHTTVVGPNGDPLEIQIRTYEMHEIAEHGVAAHWAYKEGKTVNEKNQDFQNKLNWLKELAEADHTSSDAQEFMESLKYDLQSDKVYAFTPASDVIELPYGAVPIDFAYAIHSEVGNKMIGAKVNGKIVPIDYVLQTGDIIEIRTSKHSYGPSRDWLKIVKSSSAKSKIKGFFKKQDRSSNIEKGKFMVEAEIKEQGFRVDDILTDKNIEVVNEKYNFANDDDLFAAVGFGGVTALQVVNKLTERQRIQDKQKALNEAQEVIKSLPIKDDIITDSGVYVEGIENVLIKLSKCCNPIPGDDIVGYITXGHGIKVHRTDCPNVKX

SEQ ID NO: 71582 - protein, 92 aa, Staphylococcus haemolyticus
MYVVRPNIEEDAKKAVVERFNGILASEGSEVLEEKDWGKRRLAYEIEDFKEGFYNIVRIKTDNNRATDEFQRLAKISDDIIRYIVIREDQDK

SEQ ID NO: 71583 - protein, 170 aa, Staphylococcus haemolyticus
MINRVVLVGRLTKDPEYRTTPSGVSVATFTLAVNRTFTNAQGEREADFINVVVFRRQAENVNNYLFKGSLAGVDGRIQSRSYENQEGRRIFVTEVVADSVQFLEPKNAQGGQRNQSNNNDFQDYGQGFGGQQSGQNTSYNNNNSSNNKQSDNPFANANGPIDISDDDLPF

SEQ ID NO: 71584 - protein, 80 aa, Staphylococcus haemolyticus
MAGGPRRGGRRRKKVCYFTANGITHIDYKDTELLKRFISERGKILPRRVTGTSAKYQRMLTTAIKRARHMALLPYVKDEN

SEQ ID NO: 71585 - protein, 494 aa, Staphylococcus haemolyticus
MNANELFEKIRVKQVIGTLDINVTDITTDSRTASEGSIFVASKGYTVDSHKFCQNVVDQGAKVIVVNHQQDINGDVTQVIVPDTLRVASLLAHTLYDFPSHQLTTIGVTGTNGKTSIATMIHLIYRGLGKGSAYLGTNGFQINEHKTRGANTTPETVSLTKKIKQAVDENAEAMTMEVSSHGLSLGRLRGVEFDVAIFSNLTQDHLDFHGTMEAYGHAKSLLFSQLGEDLSKEKYAVLNNDDDFSKYLASVTPYEIFTYGIDHDAQFMAKNIQESLQGVHFDFDTPIGTYSVKTPYVGKFNISNIMAAMIAVWSKGTSMEDIVRVVENLEPVEGRLEVLDPSLPIDLIIDYAHTADGMNELIDAVKPFVKQKLIFLIGMAGERDLTKTPEMGAVACRADYVIFTPDNPANDDPKMLTAELAKGATHNHYVEFDDRAEGIKHAIDIAEPGDTVVLASKGREPYQIMPGHIKVPHRDDLIGLEAAYKKFGGGPSEH

SEQ ID NO: 71586 - protein, 84 aa, Staphylococcus haemolyticus
MNIKQLSINDEIVNVYLYISEDKNQIMLAIPDIFWSIELDLNMDSNDVKEELVMQLFAFIEENEAIKIASNLTNWIVNDFKGDQ

SEQ ID NO: 71587 - protein, 625 aa, Staphylococcus haemolyticus
  MISC_FEATURE (608)..(608): X=any amino acid
RFIKFNDEQLDAKQVMMLQDLARLLLKNEQTQVKIQKFPYYDPINNTLITSWFWSHRPEHIEKAGLKTDVMLAAYGYQMMDESIVNEVLHDDEFEHPKFYQQIFRLLEDMRVFNHIRNERPSTSKLIDLRLQTRLSYTESQIKFYKTKTVYTDLLFLYLEKAFLSQNFFDIPMMHSQLDDILNSMFQYLPNFFQNETSEDNMYLAQRIMFQIDDMLTKDMLNEYYHLPRRVYEAIHEMTFDELKRTDASNVDGKDNTSEDTDSETAEAETNAQDSKSEGGAYLEMELHEGENSEVISDNDTAREGDSTDDMTDMMTKKGRGSDNTLNNDEGGSIGENTSFALKGINENVEIKWNVPDIEPDYLLEYQNVKNDVQFETKDLIQIIKRTIDREHVDERHNLTKGRLQRDLTNWFIDDQYKLFYKKQDLSKTFDATFTLLIDASASMFDKMEETIKGVVLFHETLKALNVKHEILAFNEDAFDSDDRKQPNIIDEIVHYDYSTMEKSGPRIMSLHPQDDNRDGVAIRIASERLLRRSHNQRFLIVFSDGEPSAYNYAQDGILDTYEGVEMARKYGIEVFNVFLSQDVITEDIEQTIHNIYGQYALFVEGVXNLPSHLSQLLKKLLLKS

SEQ ID NO: 71588 - protein, 692 aa, Staphylococcus haemolyticus
  MISC_FEATURE (470)..(470): X=any amino acid
VFKTEWAGRSLTIEIGQLAKQANGAVLVRYGDTVVLSTAVASKEPRDGDFFPLTVNYEEKMYAAGKIPGGFKKREGRPGDEATLTARLIDRPIRPLFPKGYRHDVQIMNTVLSADPDCSPEMAAMIGSSMALSVSDIPFQGPIAGVNVGYVDGKYVINPTVEEKEVSRLDLEVAGHKDAVNMVEAGASEITEKEMLEAIFFGHDEIKRLVAFQEEVVAHIQPVKKEFVPVERDEALVSRVKTLTEEKGLKETVLTFDKQQRDENLDTLKAEIATEFVDEADPENELLIDEVYAILNDLVKEEVRRLIADEKIRPDGRKPDEIRPLESEVGLLPRAHGSGLFTRGQTQALSVLTLGALGDYQLIDGLGPEQEKRFMHHYNFPNFSVGETGPVRAPGRREIGHGALGERALKYIIPDTTEFPYTVRIVSEVLESNGSSSQASICGSTLALMDAGVPIKAPVAGIAMGLVTRXDSNTDLTDIQGMEDALGDMDFKVAGTKEGITAIQMDIKIDGLTREVIEEALEQARQGRLAIMDHMLQTIDQPRKELSAYAPKVEIMHIKPEKIRDVIGPGGKKINEIIDETGVKLDIEQDGTIFIGAIDQDMINRAREIIEDITREAEVGQVYNAKVKRIEKYGAFVELFAGKDALLHISQISKERINKVEDVLSIGDSIEVKITEIDKQGRVNASHKALDE

SEQ ID NO: 71589 - protein, 568 aa, Staphylococcus haemolyticus
MDGDFIIGGNILSLVKKKNDDIRIIPLGGVGEIAKNMYIVEVDDEMFMLDAGLMFPEDEMLGVDIVIPDIQYVIENKEKLKGIFLSHGHEHAIGAVSYILEQIDAPVYGSKLTLALVKENMKSRNVKKKVRYYTVNHDSVMRFKNVNITFFNTTHSIPDSLGICIHTSYGSIVYTGEFKFDQSLQGHYTPDIKRMAEIGEEGVFALISDSTEAEKPGYNTPENVIESHIYDAFAKVKGRLIVSCYASNFIRIQQVLNTASKLNRKVSFLGRSLESSFNIARKMGYFDIPKDLLIPINEVGNYPKNEVVIIATGMEGEPIEALSQMAQQKHKIMNIEEGDSVYLAITASANMEVIIADTLNELVRAGAYIIPNNKKIHASSHGCMEELKMMINIMKPEYFIPVQGEFKMQIAHAKLANESGVAPEKIFLVEKGDVIHYDGKDMVLNEKVNSGNILIDGIGVGDVGNIVLRDRHLLAEDGIFIAVVTLDPKNRRIAAGPEIQSRGFVYVRESEELMKEAEDKVREIVEAGLQEKRIEWSDIKQNMRDQISKLLFESTKRRPMIIPVISEI

SEQ ID NO: 71590 - protein, 781 aa, Staphylococcus haemolyticus
RKSTKKKQQKKDSSIRYIVAIIIVILSVLGMFQLGIVGRMIDSFFNYLFGMSRYLTYILLSLITVYIAMQKKFPKTRRTFGLISLQFVLLITTQIIYHFQKGAASEREPVLSYVYKAYEHSHFPNFGGGLIGFYLLKIFIPLISIAGVIILTLILLSSSIILLLKLRHRDVVKASIDKMRNSSQSASSNFKVKREQNRLKKEERQREKEEERERLRQHQLEQEQLESEQIKDVSDFPEVSTEPEDIPIYGPSESQESKQTTTNKRKKRRFGLNSEDIDKENSSNDGTNLEDENLPESNSNDNHQMNGTISEAGEESNVAYHIPPLSLLNQPAKQQSTSKSEVQRKGQILESTMKNFGVNAKVKQIKIGPAVTQYEIQPAQGVKVSKIVNLHNDIALALAAKDVRIEAPIPGRSAVGIEVPNDKISLVTLKEVLESKFPASNKLEVGLGRDISGEPMTIQLNEMPHLLVAGSTGSGKSVCINGIITSILLNAKPHEVKLMLIDPKMVELNVYNGVPHLLIPVVTNPHKASQALEKVVAEMERRYDLFQHSSTRNIEGYNKFIRRQNEELDEKQAELPYIVVIVDELADLMMVAGKEVENAIQRITQMARAAGIHLIVATQRPSVDVITGIIKNNIPSRIAFAVSSQTDSRTIIGSGGAEKLLGKGDMLYVGNGESAQTRVQGAFLSDQEVQDVVNYVVEQQKANYVKEMEPDAPVDKSEMKSEDALYEDAIYVIEQQKASTSLLQRQFRIGYNRASRLMDDLERNQVIGPQKGSKPRQVLVN

SEQ ID NO: 71591 - protein, 475 aa, Staphylococcus haemolyticus
MHFETVIGLEVHVELKTDSKMFSPSPAHFGAEPNSNTNVIDLAYPGVLPVVNRRAVDWAMRASMALNMDIATNSKFDRKNYFYPDNPKAYQISQFDQPIGENGYIDIEVDGETKRIGITRLHMEEDAGKSTHKDGYSLVDLNRQGTPLIEIVSEPDIRSPKEAYAYLEKLRSIIQYTGVSDCKMEEGSLRCDANISLRPYGQEEFGTKTELKNLNSFNYVRKGLEYEEKRQEEELLNGGTIGQETRRFDESTGKTILMRVKEGSDDYRYFPEPDIVPLYVDEEWKERVRQTIPELPDERKAKYVNDLGLPEYDAHVLTLTKEMSDFFEGAIEKGADVKLTSNWLMGGVNEYLNKNQVDLQDTKLTPENLAGMIKLIEDGTMSSKIAKKVFPELAENGGDAKQIMEDKGLVQISDEATLTKFVTEALDNNPQSVEDYKNGKGKAMGFLVGQIMKASKGQANPQKVNQILKQELDKR

SEQ ID NO: 71592 - protein, 330 aa, Staphylococcus haemolyticus
MRKCARIIYNPTSGKELFKRTLPDVLIKLERAGYETSAYATEREGDATLEAERALKRDYDIIIAAGGDGTLNEVVNGIAEQPNRPKLGIIPMGTVNDFGRALHLPSDIMGAVDVIIDDHTTKVDIGKMNNRYFINLAAGGQLTQVSYETPSRLKSIVGPFAYYIKGFEMLPQMKAVDLRIEYDNQVFQGEALLFLLGLTNSMAGFEKLVPDAKLDDGHFTLIIVEKANLAELGHIMTLASRGEHIKHPKVIYEKAKSINISSFTEMQLNVDGEYGGKLPANFLNLKRHIEVCTPKDIYNEELTEDQQVEDGIIEEKPSNEEIIKNNEISE

SEQ ID NO: 71593 - protein, 91 aa, Staphylococcus haemolyticus
  MISC_FEATURE (27)..(27): X=any amino acid
MPKQSQMSNMAFGPFNLDADRNFHLIXGPMGKLTLPSSPVYGEVLDTQMFGLQKEVDFAVKLGLVDKEDGKNLMLRLEKELSKLHEAFTNV

SEQ ID NO: 71594 - protein, 288 aa, Staphylococcus haemolyticus
MKQIKKAIIPAAGLGTRFLPATKAMPKEMLPILDKPTIQYIVEEASRAGIEDIIIVTGKHKRAIEDHFDNQKELEMVLEEKGKDDLLEKVQYSTDLANIFYVRQKEQKGLGHAIHTARQFIGNEPFAVLLGDDIVESETPAIKQLMNVYEETGHSVIGVQEVPESVTHRYGIIDPLEKEGRRYEVKQFVEKPKQGTAPSNLAIMGRYILTPEIFDYLETQKEGAGNEIQLTDAIERMNSDIPVYAYDFDGDRYDVGEKLGFVKTTIEYALKDPKMKDELIKFIKELGF

SEQ ID NO: 71595 - protein, 295 aa, Staphylococcus haemolyticus
MEHLTTESRNTQTMHLDEMSILEALKTINKEDQLVAKAIEPILPQLNRVIEQTITRFRDGGRLIYIGAGTSGRLGVLDAAECVPTFNTHPNEVIGLIAGGQQAMTEAIEGAEDNYEMGMTDLKAIHLNEKDVVIGISASGRTPYVKRALTYANEISALTVALSCNTNSDISTVASHALEVNVGPEVLAGSTRLKSGTAQKLVLNMISTMTMIGVGKVYDNLMVDLKATNHKLEQRSIHIIEEICGLTFEEAQELYIKADNDIKIAIVMNLCNTTKSDAQSRLINNNDIVKKAIQS

SEQ ID NO: 71596 - protein, 450 aa, Staphylococcus haemolyticus
KDQQLAHHILDAVGGIDNVDNIIHCMTRVRLKINNETQVDYPKLKNIEGVLGVIQDERLQIVVGPGTVNEVSAEMVKLSGVQLGEDIPHRSNTSNIKNQAQQNKREFQQKRKQSKMNTILKSIANIFIPLIPAFIGAGLIGGIAAVLNNFITAGTITADWVKQLVAVLNVIKDGMLAYLAIFTGFNAAKVFGATPGLGGVIGGTTLLTGITEDNPIKNVFTGEPLIAGQGGIIGVILAVWLLSIIEKKLHKIVPNAIDIIVTPTISLLIIGLTTIFFFMPIAGFISDGLVGVVNWVIGVGGIFSGFIIGAFFLPLVMLGLHHIFTPIHIELINQSGATYLLPIAAMAGAGQVGAALALWVRCKNNTTLRTAIKGALPVGFLGIGEPLIYGVTLPLGRPFITACLGGGIGGAVIGGIGHIGATAIGPSGISLLPLIAHQKYLGYIIGLLSA

SEQ ID NO: 71597 - protein, 735 aa, Staphylococcus haemolyticus
MELLEAFLLFIFAVIISSIIYNRFPKIPTAFIQIALGVCLFVLPIPMHFEFESEVFMMAVIAPLLFVEGTHISRTKLLEYRKPIVLMAMALVFATVIGVGFFIHWIWADLPMPAAFAIAAILCPTDAVAVSAITKGKILPKGSMSILEGESLLNDAAGIISFKIAVTALVTGSFSAFDAIGQFIISTILGVLIGIIVSALVVTLRVYLTANKGMKDSNTLTFIQLLTPFAVYFIGEELHASGIIAVVVAGLIHGLERDRLIRAQTELQMNYNQIWNTLSYALNGFVFVVLGYIVPEVVMEIIHDEPQNIVFLITTALLIALAIYVFRFVWVYLLFKDFYYPNNVQSYLDDEEDAGPPKRNHYAFIMTMCGIHGTISLSMALTLPYMMDGNQEFIYRNDLLFIASFMVLTSLILAQVVLPFITPSEKISEFKGMSYQSAKIFMVQQVLDAFKKKNSEEKSMDYRPILNQYFNELSFLINMEPDNKNTKELRRLQEIAEEEETRTLERLIEKERITKKDLTDYRNITEFSQSYREMSIIRKISRFFKLIGLRFKARKESRKETHRIHKENRGLLKEEHHATPEQNKMDIKAKREEYKAERQKVKDEKKAQREECANSFNKVQQLMRVVNHNIIMKMRQEQNSSNVLEVSLIINQYHNLSRTIRHNKNRKQQKNQNKEVYELTTQQQQDVKLEALYIQRTILDELISRNKVTNEVATQLRENINYNEIVLAHEVSNAH

SEQ ID NO: 71598 - protein, 308 aa, Staphylococcus haemolyticus
MASETNVRDLIAKNNAKKGGFSDKIVPIILGIIAAISILTTIGILFTLITETITFFTRVSIVEFLFTKDWNPTGSDPKYGIWALVIGTLKITVIATIVAVPIGLGAAIYLSEYASDKARRIIKPILEILAGIPTIVFGFFALTFVTPVLRTIIPALDSFNSVSPGIVVGIMIVPVITSMSEDAMASVPNKIREGAYGLGSTKFEVATKVVLPAAASGVVASIVLGISRAIGETMIVSLAAGSSPTASLNLTNSIQTMTGYIVEVATGDATFGSDMYYSIYAVGFTLFIFTLIMNLISYWISKRFREEY

SEQ ID NO: 71599 - protein, 273 aa, Staphylococcus haemolyticus
QESISTVVSSNEVKHNKESDSNKKVVYSTQNLDLWYGDTHALQNINLDILENNVTAIIGPSGCGKSTYIKTLNRMVELVPSVKTAGKILYRDQNIFDENYSKEKLRTNVGMVFQQPNPFPKSIYDNITYGPKTHGIKDKKLLDEIVEKSLRGAAIWDELTDRLHTNAYGLSGGQQQRVCIVRCLAIEPDVILMDEPTSALDPISTLRVEELVQELKENYSIIMVTHNMQQAARVSDKTAFFLNVYVNEYDDTDKIFSNPSDKQTEDYISGRFG

SEQ ID NO: 71600 - protein, 604 aa, Staphylococcus haemolyticus
MRQKTLDVLEFDKIKSFVASETISDLGREKVSKMSPATDFETVEFQMNETDEISQIYNKHRLPSLSGLAKISPLIHRANIGGVLNVTELNLVKRLIQVQNQFKTFYNQLLEEDEQVVKYPILNDKMNQLPILSDLFQEINEKCDTHDLYDSASYELQGIRSKISSTNQRIRQNLDRIVKSQANQKKLSDAIITVRNDRNVIPVKAEYRQDFKGIVHDQSASGQTLYIEPSSIVEMNNQISRLRNDEAVERERILTELTGMVAAEADGCLIAESVMGQIDFLTAKARYARSIKGTKPTFYKDRTVYLPNAYHPLLNKDTVVANTIEFVDDIETVIITGPNTGGKTVTLKTLGLIIIMAQSGLLIPTLDGSQLSVFENVYCDIGDEQSIEQSLSTFSSHMKNIVEILQETDKNSLVLFDELGAGTDPSEGAALAMSILDHVREIGSLVMATTHYPELKAYSYNREGVMNASVEFDVNTLSPTYKLLMGVPGRSNAFDISRKLGLSLGIINKAKTMIGTDEQEINSMIESLEKNSKRVDEQRIELDRLLKEARKTHDDLEHQYEQYKSYEKKLMDEAKDKANQRVKSATKEAGSILKELRTLRDPKR

SEQ ID NO: 71601 - protein, 567 aa, Staphylococcus haemolyticus
MMKQSKVFIPTRRDVPAEAEALSHQLLLKAGLIKQSTSGIYSYLPLASRVLNNISKIIREEMESIDAVEILMPALQQAELWEESGRWGAYGPELMRLKDRNGREFALGPTHEEVVTSIVRDELKSYKQLPLTLFQIQSKFRDEKRPRFGLLRGREFIMKDAYSFHADEASLDETYQDMYNAYDRIFKRVGINARPVVADSGAIGGNHTHEFMALSEIGEDTIVYSEHSDYAANIEKAEVVYHPNEKHTEVAELEKVETPNVKTAQELADFLNRPVDEIVKSMIFKIDGEFIMFLIRGHHELNDVKVKAFFETDNVEMATQEEIVNLLGANPGSLGPVHDKDIRIFADNYVRDLNNLVVGANEDGSHYINANLDRDFKVDEFGDFRFILEGETLSDGSGEAKFAEGIEVGQVFKLGTKYSEAMNATFLDNQGKAKPLIMGCYGIGVSRTLSAIVEQNNDENGIIWPKSVTPFDLHLITINPKKDEQLELGDQLYKELQQQYDVLYDDRKDRAGVKFNDADLIGLPIRIVVGKNASEGIVEVKVRQTGESEEVHINDLNTHIATLYSNL

SEQ ID NO: 71602 - protein, 378 aa, Staphylococcus haemolyticus
MASNELLLATEYLEKEKKIPREVLIDAIEAALITAYKKNYDSARNVRVELNMDEGTFKVIARKEVVEEVFDDRDEVDLSTALVKNPAYEVGDIYEEDVTPKDFGRVGAQAAKQAVMQRLRDAEREILYTEFIDKEDDILTGVIDRVDHRYVYVNLGRIEAVLSEAERSPNEKYIPNERIKVYVNKVEQTTKGPQIYVSRSHPGLLKRLFEQEVPEIYDGTVIVKSVAREAGDRSKISVYSDNPDIDAVGACVGAKGARVEAVVEELGGEKIDIVQWNEDPKVFVRNALSPSQVLEVIVDEDNQSTVVVVPDYQLSLAIGKRGQNARLAAKLTGWKIDIKSETDARDAGIYPVIESEELAEDIGLSDQMMRILKLMMLI

SEQ ID NO: 71603 - protein, 324 aa, Staphylococcus haemolyticus
LSKHSKHIPCLITIFGATGDLSHRKLFPSLFHLFQQDNLDEHIAIIGIGRRDYTNEVFREQVKSSIQKHVKDTDQIDAFMEHVYYFKHDVSDEQSYDSLLSFSNELDSQYQLKGNRLFYLAMAPQFFGIISDYLKSSGLTDTTGFKRLVIEKPFGSDLKSAEQLNNQLRRSFKEEEIYRIDHYLGKDMVQNIEVLRFSNAMFEPLWNNKYISNIQVTSSEVLGVEDRGGYYESSGALKDMVQNHMLQMVALLAMEAPISLNSEDIRAEKVKVLKSLRQLDPQGVKQNFVRGQYDEGFVEGEKVIAYRDEDRVAEDSITPTFGSG

SEQ ID NO: 71604 - protein, 302 aa, Staphylococcus haemolyticus
MQKNILKSGIEISELGLGCMSLGTEYANAEPIIEKAIESGITYFDTADIYDKGTNEEIVGKALKKYQNRDDIVIGTKVGNRPTEDGGTTWDPSKKYIKESVKGSLKRLGLNHIDLYQLHGGTIDDPLDETISAFNELKQEGIIKAYGISSIRPNVIDYYLKHSEIETIMSQFNLIDNRPEQLLNDIHAKGVKVLARGPVFKGLLTSNSIDALDHKFSEGIFEYTHHDLGETIASVKEIESNLSALSFEYLKSHDALGAIIVGASSPQQLEENVNNYNKKVSLDQVKAARERVKNLEYTQHLK

SEQ ID NO: 71605 - protein, 295 aa, Staphylococcus haemolyticus
METIIEEYLKFIQIEKGLSENTIGAYRRDLKKYQLYMQEQKIAHIDFIDRQTIQECLGSLIDQGASAKSIARFISTIRSFHQFALREKYAAKDPTVLIETPKYEKKLPDVLDVEEVIQLLETPDLTKNNGYRDRTILELLYATGMRVTELIQIEIDDVNLIMGFVKVFGKGNKERIIPLGDTVIEYLDTYINNVRSQLLKKTVTNVLFLNLHGRPLTRQGIWKLIKQYGLRANINKSLTPHTLRHSFATHLLENGADLRAVQEMLGHSDISTTQLYTHVSKTQIRQMYNQFHPRA

SEQ ID NO: 71606 - protein, 938 aa, Staphylococcus haemolyticus
MKNALKLFITDLKRVAKTPAVWVILAGLAILPSFYAWFNLWAMWDPYSHTGHIKVAVVNEDKGDKVRGKKINVGNTLEDNLKKNDKFDWQFVSREKADHEIKMGKYYAGIYIPKEFSHQITGTLRKKPQKADIEYKVNQKINAVAPKMTDTGSTVIVDEANKQFNETVTKALLQEANKVGIQLEDEVPTINKIKNAVYAAHDSLPQINKIADRIEYLNDHQDDLDKYANQFRALGNYKGDILDAQQKLNDVNAAIPSLNEKAKLILALNEYMPNIEKLLDVASNDIPAQFPKINRGVDIASEGFDLANTRLNDAQGYLTSAQQRVGDYQEAAGRAQEVNNQANSALRQQSTSGLPQYQIQKLSTDNSQDTVNDNQIVSNNDVKSMNSALAEALLTLSSNSDNQAKATQSDIKALKDISYGVIGSNRPTEFNDMLRNLKTRLENSSKSNQQLIDVLKELEKREHVDLSSQIKQVESANNRISDSLRSTNQLIDALKNGSSGKAEAVNVLRSLPDLNKALGNYRDFIKNDLNNRLLVVSNQITQELNKGQNTLSDVQSKLNTINRVIIAGQDIVTDGQNRIANIQSELPALEQTYINAMQTAQKYFPTVKKDVANAADFVRNDLPDLEQQLANATATVNTNLPTLFNKYDNAVDLLNQNQPRAKEALANLANFSENRLPDIEKDLNKANKIFKKLDEDDAVDKVIDALKNDLKKQADVIANPIHKKQVDVFPVKDYGSGMTPFYTSLSIWVGALLLVSLLSVDNKHEALTDELTKRQIYLGKGAFFIMMGIIQTLIVTIGDLVILKAQVESPTLFILVALCGAIVFNTIVYTCVSLLGNPGKAIAIILLVLQIAGGGGTFPVVTAPKFFQTISPYLPFTYVIDSLRETVGGIVPEILITKMIILILFGLGFFILGILVKPVLDPIMRKISKRVDESKVTE

SEQ ID NO: 71607 - protein, 391 aa, Staphylococcus haemolyticus
MSVMRIATFIISVFIVGMVEMMVAGIMNLMSDDLGVSEAIIGQLVTLYALTFAICGPILVKLTNRYPARPVLLWTLVIFVVGNGIIAVAPNFTILVIGRILSSAAASLIIVKVLALTAMLTIPKNRGKMIGVVYTGFSGANVFGVPIGTMIGDWIGWRFTFVFIIVISLIAGLLMLKYLPTTTELNQANRMYNNVSDDNQVTSHIVRPVEIIKFLAITLLILIANSVTFVFINPLILENGHSMGYVSLALLVNGVAGVVGTSMGGVLADKLTSKRWLIIAFSVFIVVMLAINLILSTTVLLLVGLFIWNIVQWSTNPAIQSGIIEHVEGDTSQVMSWNMSCLNAGIGLGGIIGGLVVSNMNVEAVTFVSAFIGLLGLIIVLTLKNVHYAKN

SEQ ID NO: 71608 - protein, 57 aa, Staphylococcus haemolyticus
  MISC_FEATURE (11)..(11): X=any amino acid
  MISC_FEATURE (22)..(22): X=any amino acid
LTSYHHASYGXGHTRSTIDSTXGTATARSCKSHKVVLSSDCSLQLDYMKLESLVIVD

SEQ ID NO: 71609 - protein, 57 aa, Staphylococcus haemolyticus; identical to SEQ ID NO: 70614

SEQ ID NO: 71610 - protein, 879 aa, Staphylococcus haemolyticus
MSEMKNLKASEIRQKYIDFFVEKGHMVEPSAPLVPIDDDSLLWINSGVATLKKYFDGRETPRKPRIVNSQKAIRTNDIENVGFTARHHTFFEMLGNFSIGDYFKKEAIHFAWEFLTSENWMGMEPEKLYVTIHPEDSEAYRIWNDEIGLEESRIIRIEGNFWDIGEGPSGPNTEIFYDRGDEYGQDDPSEEMYPGGENERYLEVWNLVFSEFNHNKDNTYTPLPNKNIDTGMGLERMASVSQNVRTNYETDLFMPIINEVEKVADKKYLVNNEHDIAFKVIADHIRTIAFAIADGALPANEGRGYVLRRLLRRAVRFSQTLDINEPFMYKLVDIVAEIMEPYYPNVKEKADFIKRVIKSEEERFHETLQEGLAILNNLLAKAKSSNNEINGSDAFKLYDTYGFPIELTEELASQENISVDMATFEKEMDQQRTRAREARQSSQSMQIQSEVLKNITTESKFVGYETTDYQTTLTDLIYNGEKVESAEPGETVYFILKETPFYAVSGGQVADKGTVGNENFEIEVTEVTKAPNGQNLHQGVIQFGQVTINSDVDASVNRDERKDIQKNHSATHLLHAALKEVLGEHVNQAGSLVESERLRFDFSHFGPMTQDEIDQVERRVNEEIWRGISVNIQEMPINEAKQMGAMALFGEKYGDIVRVVNMAPFSIELCGGIHVDNTAEIGLFKIISESGTGAGVRRIEAFTGKSAFLHLEDIQNKFNSIKDQVKVKSDNQVFDKIVQLQEEEKNLHKQLEQRNKEITSLKMGNIEDQIEEINGFKVLATEVEVSNAKEIRQTMDDFKSKQQDAIIILASDLGEKVSLIATVPKEQTDKIKAGDIIKNMAPLVGGKGGGRPDMAQGGGTQPENISEALRFIKDYIKKI

SEQ ID NO: 71611 - protein, 86 aa, Staphylococcus haemolyticus
MDNIDKTMKFDYEEIPKDNVETVLNNVHRTLEERGYNAVNQIVGYLLSGDPAYIPRQNDARNQIRHIDRDVIMEELVSNYLKENKK

SEQ ID NO: 71612 - protein, 142 aa, Staphylococcus haemolyticus
MLTHKILGLDVGSKTVGVAISDLMGWTAQGLDTLRINEELEDYGIEQLVTIIKENNVGSVVIGLPKNMNNSIGFRGEASLRYKELLKESLPDIEIIMWDERLSTMAAERSLLEADVSRQKRKKVIDKMAAVFILQGYLDSIQ

SEQ ID NO: 71613 - protein, 104 aa, Staphylococcus haemolyticus
MTEHNHNHDVELDISNEEELLTLFDENGNEVLYRKMLEFYHPEFKKEYVILAEEGAQSDDDDMIELIPMINEPDESGDGGKLVPIETDEEWDMIEEVVNTNMEE

SEQ ID NO: 71614 - protein, 422 aa, Staphylococcus haemolyticus
MKTLTEIQTKVKSKIKKPELLAPAGNLEKLKIAVHYGADAVFLGGQEYGLRSNADNFTMAEIKEGVEFANQYNAKIYVTTNIIAHDENIKGLENYLIELEKTGATGIIVADPLIIETCKQVAPKLEIHLSTQQSLSNTKAVQYWKEEGLDRVVLARETGAMEMKEMKENVDIEIEAFIHGAMCIAYSGRCTLSNHMTARDSNRGGCCQSCRWDYDLLEVDNDGELDLYYQDGDTVPFAMSPKDLKLIESIPQMMEIGIDSLKIEGRMKSIHYIATVVSVYRKVIDAYAEDPENFKINPEWLKELDKCANRDTAPAFFEGTPGYEEQMFGVQQNKKSPYDFCGLVIDYDETTQIATIQQRNHFKPGQEIEFFGPEIQSFRQVIDAIYDEEGNSLDAARHPLQIVQIKVNHPIYPKNMMRKEIR

SEQ ID NO: 71615 - protein, 398 aa, Staphylococcus haemolyticus
MTYNKRLFTSESVTEGHPDKIADQVSDAILDEILKDDPNARVACETTVTTGMALISGEISTSTYVDIPKVVRETIKGIGYTRAKYGYDYQTMAVLTAIDEQSPDIAQGVDKALEYRNDISEEEIEATGAGDQGLMFGYATNETETYMPLPIFLSHQLAKRLSDVRKDGILNYLRPDGKVQVTVEYDESDKPKRIDTIVVSSQHADDIELEQIQSDIKEHVIYPTVPEGLIDNETKFFINPTGRFVIGGPQGDAGLTGRKIIVDTYGGYARHGGGCFSGKDPTKVDRSAAYAARYVAKNIVAAGLADQCEVQLAYAIGVAEPVSISIDTFKTGKVSEAQLVEAVRANFDLRPAGIIKMLDLKHPIYKQTAAYGHFGRTDVLLPWEKLDKVNVLKDAVQA

SEQ ID NO: 71616 - protein, 278 aa, Staphylococcus haemolyticus
METIEFYNGHTMPKVGIGTFRVENNDECKEAVKHAIVSGYRSIDTAKVYGNEEQVGLGIKEGLEATGLERKDLFITSKLYFEDFGRENVANAYETSINKLGLDYLDLYLVHWPGTNEAIMIDTWKGMEDLYKDDKVKNIGVSNFNAEHFEALLAQVSIKPVINQVEFHPYFTQNKLRKYLEVQNIHMESWSPFMNAQILGDETLNQIGKEVNKSAAQVVIRWNMQHGVIVIPKSVTPQRIEENINVFDFELTDEQMEQIDSLNKDQRIGPDPATFEGH

SEQ ID NO: 71617 - protein, 237 aa, Staphylococcus haemolyticus
MAKLNVEVFADGADIEQMKAAYKNKEVDGFTTNPSLMAKAGVTDYKSFAEEAVKEIPDASISFEVFADDLETMEKEAEILKQYGDNVFVKIPVVNTKGESTIPLIKKLSADNVRLNVTAVYTIEQVKEITEAVTEGVPTYISVFAGRIADTGVDPLPLMKESVDVAHSKEGVKLLWASCRELFNVIQADEIGADIITCPADVVKKVNTNLGRDINELSVDTVKGFAKDIQSSGLSIL

SEQ ID NO: 71618 - protein, 1069 aa, Staphylococcus haemolyticus
QELDDVFGHQNILVTGLSPSAKATIIAEKYLKDQKQMLLITNNLYQADKLETDILQYIDHSEVYKYPVQDIMTEEFSTQSPQLMSERVRTLTALAHNKKGLFIVPLNGLKKWLTPFELWKDHQITLRVGEDIDVDEFLNKLVNMGYRRESVVSHIGEFSLRGGIIDIYPLIGQPVRIELFDTEVDSIRDFDVETQRSNDNIEEVSITTASDYVITDDVIQHLQSELKTAYEATRPKIDKSVRNDLKETYESFKLFETTFFDHQLLRRLVAFMYEQPSTLIDYFAKDAIIVADEYNRIKETEKTLTTEVDDFIQNLIESGNGFIGQSFMQYDGFESLLKDYPVTYFTLFTSTMPVQLQHIIKFSCKPVQQFYGQYDIMRSEFQRYVHNDYHIVVLVETETKVERIQSMLNEMHIPTVTNVHNDIKSGQVVVTEGSLSEGFELPYMQLVVITERELFKTKQKKQRKRTKTLSNAEKIKSYQDLNVGDYVVHVHHGVGRYLGVETLEVGDVHRDYIKLQYKGTDQLFVPVDQMDQVQKYVASEDKSPKLNKLGGSEWKKTKAKVQQSVEDIADELIALYKEREMSVGYQYGEDTAEQSAFEMDFPYELTPDQAKSIDEIKGDMERERPMDRLLCGDVGYGKTEVAVRAAFKAVMEGKQVAFLVPTTILAQQHYETLIERMQDFPVQIELISRFRPTKEVKETKEGLKSGYVDIVVGTHKLLGKDIHYKDLGLLIVDEEQRFGVRHKERIKTMKTNVDVLTLTATPIPRTLHMSMLGVRDLSVIETPPENRFPVQTYVLEQNSNFIKEALERELSRDGQVFYLYNRVQSIYEKREQLQMLMPDANIAVAHGQMTERDLEETMLSFINGEFDILVTTTIIETGVDVPNANTLIIEEADRFGLSQLYQLRGRVGRSSRIGYAYFLHSANKVLTETAEERLQAIKEFTELGSGFKIAMRDLNIRGAGNLLGKQQHGFIDSVGFDLYSQMLEEAVNEKRGIKEEEPDAPEVEMELNLDAYLPAEYIQNEQAKIEIYKKLRKVETEEQLFDIKDELIDRFNDYPVEVERLLEMVEIKI

SEQ ID NO: 71619 - protein, 537 aa, Staphylococcus haemolyticus
MKMKTKSISESKSTQSLSSKSSNEFKHIEPSNYTAFNGVVILTLALIIVKILSAIYRVPYQNVLGDTGLYAYQQIYPIVALGMILSMNAIPSAVTQTLGINGQPSSFSKVLIRFQTLGIVIFLMLLLLAHPVAILMGDSRLAPMIRMASLSYLFIGILGVCRGYYQSQRRMNIPAISQVIEQIIRVGLIIVAIGLFMIKDWSIYQAGTIAILASALGFLGSSLFLIVMKPFSFKMQNLSANIPWKDLLMATLVFALSQLLVILWQFIDSFTIVHTLQSHGLHFKEAIMQKGIYDRGASFIQMGLIVTTTFSFVLIPLLTEAIEQRNQIKMNRYANASLKITILISSAAGIGLINLLPMMNAVFFKTNSLGFTLGFYMLTVICVSLIMMDIALLQVLNCIRPILIGVTIGLVVKAILNVLLIHHYGIAGASISTVLSLICFVIILHKEVLKQYHFSQMKPFILKMFTALVIMTIIIQIIMQILPQVGRIGGLIELVVVAIIGIAVLLILVIYMNILGYKELKHLPFGEKLYHIKKGRH

SEQ ID NO: 71620 - protein, 192 aa, Staphylococcus haemolyticus
MTEKEKMLAHQWYDANFDKDLETERVRAKDLCFDFNQTRPSDDSRRQAILTELFGYTLENVAINSPFDTDYGWNVKLGKNVFVNSNCYFMDGGGITIGNDVFIGPSCGFYTAHHPLTPKERNAGLELAQPITIGNNIWFGGNVVVTPGVTIGDGSVIAAGSVVTKDVPPNSLVAGVPAKVIREINENDAPKN

SEQ ID NO: 71621 - protein, 232 aa, Staphylococcus haemolyticus
MKSINFEEHYVVEEIQKETMKYMSSDPNGVPMKTMLEGLEQKSGFTDADEISYHDKRIDFMDKHDVEMQVLSYGNGAPSNLEGQRAIDLCKKANDTLAEYVEKYPDRFVGFATLPINEPEAAVEEFKRCINDLKFKGALIMGHPKNGFLDQEEYEPLFAAAEELNAPIYLHPSPIQSDVYQAYYKGNYPDVTAATFACFGYGWHVDVGIHAIHLVLSGVFDRHPNLNIIIGH

SEQ ID NO: 71622 - protein, 173 aa, Staphylococcus haemolyticus
MRQMEHIYRPGKDNAPTLILLHGTGGDETDLIPLGTALNPNYNLLSIRGEVNENGMNRYFKRLAEDVYDEEDLEYRGQRLLGFIYEAAEQYQFDLKRTALVGFSNGSNIAINLMLRDKAPFKKALLFAPLYPIDASTSKDMSDVDVLLSMGKNDPIVSIRSSRHVINLFRHQG

SEQ ID NO: 71623 - protein, 513 aa, Staphylococcus haemolyticus
MEMAQEQELILVLDFGSQYNQLITRRIREMGVYSELHDHEISVDEIKRMNPKGIILSGGPNSVYEEGSFTIDPEIYNLGIPVLGICYGMQLTTKLLGGKVERANEREYGKAIINAKSDELFFGLPAEQTVWMSHSDKVIEIPDGFEVIADSPSTNYAAIEDKKRRIYGVQFHPEVRHTEYGNDLLRNFVRRVCECTGEWTMENFIDIEVEKIRKRVGDRKVLCAMSGGVDSSVVAVLLHKAIGDQLTCIFVDHGLLRKGEGDMVMEQFGEGFDMNIIRVNAQERFMDKLKGVSDPEQKRKIIGNEFVYVFDDEAAKLTDVDFLAQGTLYTDVIESGTKTAQTIKSHHNVGGLPEDMEFELIEPINTLFKDEVRALGIELGIPEHLVWRQPFPGPGLGIRVLGEITEDKLEIVRESDAILREVVREEGLERDIWQYFTVLPGIQSVGVMGDYRTYDHTVGIRAVTSIDGMTSDFARIDWEVLQKISSRIVNEVDHVNRVVYDITSKPPSTIEWE

SEQ ID NO: 71624 - protein, 310 aa, Staphylococcus haemolyticus
MPLFLKPIFFEKIWGGNKLTQFNYDIPSESTGECWGISAHPNGKSMILNGPYAGQTLDQVWTQHRELFGDFPSKDFPLLCKIVDANEPLSIHVHPDDSYAYEFENGQYGKSECWYIIDAEEDAEVLIGTTVNSKEELENQINQDNLLESLKRVKVQPGEFYFIPAGTIHSIGSGITVYETMQSSDITYRLYDYNRQRENSSSLDVDKALDVIQYSQELPSIVPENEIIENHKCSHIVSNDFFTMVKWEVSGTLNYMKPREFCLVSVLNGDGQIIIDGEIFKIQKGSNFVLTSEDLDSVFEGDFTLIISYI

SEQ ID NO: 71625 - protein, 569 aa, Staphylococcus haemolyticus
MKVEVFESEQGNYNLQDYEKTYQDFDWDKVKKAFSWNETGKINMAYECIDRHVDNGKGDKIALNYRDEKRKEQYSFNELKVLSNKAANVLVDKANVQKGDRVFIFMPRTPELYFAFLGILKIGAIVGPLFEAFMEKAVTDRLENSEAKVIVTTNSLLGRIPKDKLPHLETIVVVDDEVDEQYVDFNKELNQASEEFDIEWLKEDDGLILHYTSGSTGQPKGVLHVQKAMLLHYISGKYVLDLKEDDIYWCTADPGWVTGTSYGVFAPWLNGVTNCIAGGRFSPEQWYSMIETFKVTIWYTAPTALRMLMSAGDDVVEKYDLSSLRSILSVGEPLNPEVIKWSKDVYDKRVLDTWWMTETGGHMIVNYPAVDVKLGSMGKPLPGIEAAIIDDSGNVLPPNRMGNLAIKKGWPSMMYSIWKNPEKYNSYFIGDWYVSGDSAYQDEDGYFWFQGRVDDVIMTAGERVGPFEVESKLVEHEAVAEAGVIGKPDPVRGEIIKAFISLRQGYEPSDELKADIRKFVKEGLSGHAAPREIEFKDKLPKTRSGKIMRRVLKAWELNLDAGDLSTMED

SEQ ID NO: 71626 - protein, 420 aa, Staphylococcus haemolyticus
MSNALIEELQWRGLIYQQTDESSIEELLNKEQISLYCGADPTADSLHIGHLLPFMTLRRFQEHGHRPIVLIGGGTGMIGDPSGKSEERILQTEDQVEANVEGISAQMHKLFEFGTDKGAILVNNKDWLSQISLISFLRDYGKHVGVNYMLGKDSIQSRLENGISYTEFTYTILQAIDFGHLNRELNCKLQVGGSDQWGNITSGIELMRRMYGQTEAYGLTIPLVTKSDGKKFGKSESGAVWLDADKTSPYEFYQFWINQSDDDVIKFLKYFTFLDKDEINRLEESKNQEPHLREAQKALAENVTEFIHGKEALDDAIRISKALFSGDLKSLSGKELKEGFKDVPQVELSTETSNIIDVLIETGIATSKRQAREDVNNGAIYINGERQQSVDYELSNEDKIDDEFTIIRRGKKKYFMVNYK

SEQ ID NO: 71627 - protein, 651 aa, Staphylococcus haemolyticus
GLSDAEYNKVCEILGREPNFTEVGIFSVMWSEHCSYKHSKPFLKQFPTTGEHVLMGPGEGAGVVDIGDNQAVVFKVESHNHPSAIEPYQGAATGVGGIIRDIVSIGARPINLLNSLRFGELSVKQNQRLLKGVVRGIGGYGNCIGIPTTAGEIEFDDRYDGNPLVNAMCVGVIDHDMIQKGTAKGEGNSVIYVGLKTGRDGIHGATFASEELTEESESKRPSVQIGDPFVGKKLMEATLEAITFDELVGIQDMGAAGLTSSSSEMAAKGGSGLELHLDQVPTREPGISPYEMMLSETQERMLLVVEKGTEQKFLDLFEKHELDSAVIGEVTNTDRFVLKYEDEVFADIPVQSLADEAPVYVLEGEEKEYNTSKNDYSSINVEETFKKLLIHPTIASKHYLYEQYDQQVGANTIIKPGLQSSVVRVEGTNKAVASTIDGEARYVFNQPYEGGKMVVAEAYRNLIAVGATPLAMTDCLNYGSPEKKEIYQQLIDSTKGMSEACEVLKTPVVSGNVSLYNETRGTSIFPTPVVGMVGLIEDIDYLKDFHPEAGHKLYLVGETRDDFGGSQLEKLLYGKVNHEFEAIDLSDEVNKGEAVKNTIRSGVASHVQTVGKGGLLITLARISAHYGLGLEASIDLSDAQLFSETQGRYII

SEQ ID NO: 71628 - protein, 238 aa, Staphylococcus haemolyticus
MRFIDMARKVVVVDDEKPIADILEFNLKKEGYDVYCAYDGNDAVDLIYEEEPDIVLLDIMLPGRDGMEVCREVRKKFEMPIIMLTAKDSEIDKVLGLELGADDYVTKPFSTRELIARVKANLRRHYSQPAQEVSGTTNEITIKDIVIYPDAYSIKKRGEDIELTHREFELFHYLSKHMGQVMTREHLLQTVWGYDYFGDVRTVDVTIRRLREKIEDDPSHPEYIVTRRGVGYFLQQHD

SEQ ID NO: 71629 - protein, 608 aa, Staphylococcus haemolyticus
MKWLKQLQSLHTKLVIVYVLLIIIGMQIIGLYFTNSLEKELTNNFMKNIKQYATQLEVNIERIYRDDPSNAQKEVQSLLNEYANRQEIEEIRFIDKDQIIMATAKISSHNMINQKVNDNSVQKALSLGESNSHNVLKDYGSGKERIWIYNLPVKNGNETIGNIYIESNINDVYNQLNNINQIFIIGTAISLFITVILGFFIARTITRPITDMRNQTVEMSKGNYTQRVKIYGNDEIGELALAFNNLSKRVQEAQANTESEKRRLDSVITHMSDGIIATDRRGRVRIVNDMAIKMLGMSKEDLIGYYMLSVLNLEDEFSLDEIQENNDSFLLDINEDEGIIARVNFSTIVQETGFVTGYIAVLHDVTEQQQVERERREFVANVSHELRTPLTSMNSYIEALEEGAWKDDNLAPSFLSVTREETERMIRLVNDLLQLSKMDNESEQITKEIVDFNMFINKIINRHEMAAKDTTFVREIPSETIFTEIDPDKMTQVFDNVITNAMKYSRGEKRVEFHVKQNALYNRMTIRIKDNGIGIPINKVDKIFDRFYRVDKARTRKMGGTGLGLAISKEIVEAHNGRIWANSVEGQGTSIFITLPCEVIDDGDWDEE

SEQ ID NO: 71630 - protein, 845 aa, Staphylococcus haemolyticus
MGFLSKIVDGNKKETKRLSKIADEVLSLEEDMAILTDEEIKNKTKQFQQEVQEIEDVKKQNDYLDKILPQAYALVREGSKRVFNMTPYKVQVMGGIAIHKGDIAEMRTGEGKTLTATMPTYLNALAGRGVHVITVNEYLSSVQSEEMAELYEFLGLTVGLNLNSKSTNEKREAYAQDITYSTNNELGFDYLRDNMVNYAEERVMRPLHFAIIDEVDSILIDEARTPLIISGEAEKSTSLYTQANVFAKMLKAEDDYKYDEKTKAVHLTEQGADKAERMFKIENLYDVQNVEVISHINTALKAHVTLQRDVDYMVVDGEVLIVDQFTGRTMPGRRFSEGLHQAIEAKEGVKIQNESKTMASITFQNYFRMYNKLAGMTGTAKTEEEEFRNIYNMTVTQIPTNKPVQRDDKSDLIYISQKGKFDAVVEDVVEKHKQGQPVLLGTVAVETSEYISNLLKKRGIRHDVLNAKNHEREAEIVANAGQKGAVTIATNMAGRGTDIKLGEGVEEIGGLAVIGTERHESRRIDDQLRGRSGRQGDRGDSRFYLSLQDELMVRFGSERLQKMMNRLGMDDSTPIESKMVSRAVESAQKRVEGNNFDARKRILEYDEVLRKQREIIYNERNNIIDSEDSSQLVNAMLRSTLQRGVTYHISEEDDNPDYAPFINYVNDVFLQEGDLKEEEINGKDSEDIFEVVWSKIEKVYESQKAKIGDQMAEFERMILLRSIDTHWTDHIDTMDQLRQGIHLRSYAQQNPLRDYQNEGHELFDMMMQNIEEDTSKFILKSVIQVDEDIEREKTTDFGTAQHVSAEDGKEKAKKQPIVKGDKVGRNDPCPCGSGKKYKNCHGKEE

SEQ ID NO: 71631 - protein, 332 aa, Staphylococcus haemolyticus
MTEPDFWDDQNKAQEVIDKNNALKSVVNGYHELEEEVEDMTATWELLQEELDDDVKSDLEQNVLDFKEKVDQFELQLLLDGPHDANNAILELHPGAGGTESQDWASMLLRMYQRYGEQQGFKVETVDYLPGDEAGVKSVTLLIKGHNAYGYLKAEKGVHRLVRISPFDSSGRRHTSFASCDVIPEFNNDEIEIEINPDDITVDTFRASGAGGQHINKTESAIRITHHPTGIVVNNQNERSQIKNREAAMKMLKAKLYQLKLEEQEREMAEIRGEQKEIGWGSQIRSYVFHPYSMVKDHRTNEETGKVDAVMDGEIGPFIESYLRYTMNQSDN

SEQ ID NO: 71632 - protein, 159 aa, Staphylococcus haemolyticus
MTLSILVAHDEQRVIGYNNDLPWHLPNDLKHVKKLSTGNTLVMGRRTFESIGKPLPNRRNVVLTSDTTFNVDGVDVIHSIDDIYKLEGHIFIFGGQSLFEEMIDKVDDMYITVVNGKHQGDTFFPPYTFEEWEVESSVDGELDEKNTIPHTFLHLVRKH

SEQ ID NO: 71633 - protein, 167 aa, Staphylococcus haemolyticus
MIRLGNMQDISQIETLVEEAKKLMKEFNNNQWDDKYPVTEHFEEDINTETLYVLEENDTIYGFIVVDQQQSEWYDELEWPIDREGAYVIHRLAGSQQYKGAATELFDFAVKLAEEHNIHVLLTDTFALNKPAQGLFEKFGFIKVGEAEIDYHPFDRGAPFYAYYKTI

SEQ ID NO: 71634 - protein, 348 aa, Staphylococcus haemolyticus
LDNDRQKALDTVIKNMEKSFGKGAVMKLGDNKGRRVSSVSSGSVTLDNALGVGGYPKGRIIEIYGPESSGKTTVALHAIAEVQKNGGVAAFIDAEHALDPVYAEALGVDIDNLYLSQPDHGEQGLEIAEAFVRSGAVDIVVVDSVAALTPKAEIEGEMGDTHVGLQARLMSQALRKLSGAISKSNTTAIFINQIREKVGVMFGNPETTPGGRALKFYSSVRLEVRRAEQLKQGQEIVGNRTKIKVVKNKVAPPFRVAEVDIMYGQGISKEGEVIDLGVENDIVDKSGAWYSYNGDRMGQGKENVKTYLKENPQVKEEIDRKLREKLGIFDGDVDEKEEDAPQTLFVEE

SEQ ID NO: 71635 - protein, 519 aa, Staphylococcus haemolyticus
MNLLNLLLILLGIILGVVVGYFVARNLLHQKQLQARQTADDIIKQGQKEADNIKKEKLLEAKEENQIIREQTESELRERRGELQRQEARLLQKEENLDRKSDLLDKKDEILEQKESKLEERQQQVDAKESSVQTLIMKHEQELERISGLTQEEAVNEQLQRVEEELSQDIAVLVKEKEKEAKEKVDKKAKELLATTVQRLAADHTTESTVSVVNLPNDEMKGRIIGREGRNIRTLETLTGIDLIIDDTPEAVILSGFDPIRREIARTALVNLVSDGRIHPGRIEEMVDKARKEVDDIIRDAGEQATFEINVHNMHPDLVKVLGRLNYRTSYGQNVLKHSIEVAHLSGMLAAELGEDVSLAKRAGLLHDVGKAIDHEVEGSHVEIGVELAKKYAENETVINAIHSHHGDVEPTSIISILVAAADALSAARPGARKETLENYIRRLERLETLSEGYDGVEKAFAIQAGREIRVIVSPDEIDDLKSYRLARDIKTQIEDELQYPGHIKVTVVRETRAVEYAK

SEQ ID NO: 71636 - protein, 264 aa, Staphylococcus haemolyticus
MRILFIGDIVGKVGRNAIAEYLPKIKQSYRPTVSIVNAENAAHGKGLTEKLYKQLLRDGVDFMTMGNHTYGQREIYDFIDDANRMVRPANFPSEAPGVGMRFIQINDIKLAIINLQGRSFMQDIDDPFKKADQLIEEAKKETNFIFVDFHAETTSEKNAMGWYLDGRVSAVVGTHTHIQTSDERVLPNGTGYITDVGMTGYYDGILGINRDEVIERFITSLPQRHVVPDDGRSVLSGVIIDLDKDGKTKQIERILINDDHPFNK

SEQ ID NO: 71637 - protein, 233 aa, Staphylococcus haemolyticus
MKWILFDKDGTLIEFDKSWEKIGIRLVDSLLDEYPVADKEVAHRQLGVLDNAIVPDSVMGSGSLDEMIKAFNNVVGKDVSTWTRNTSQELVDTRVPENNWIDGVYDMIQSLKKDGYKIGIVTSDSRKGVLQFLEDTNSKDAFDLVISTESHAAEKPNPAVLNPLFDSYDVEPEDVVIVGDTNNDMKTKVNAELGLAIGVLTGIAKKEELVDADVIIDTAVSVPEVLKQYIENK

SEQ ID NO: 71638 - protein, 143 aa, Staphylococcus haemolyticus
MFMGEYEHQLDAKGRMIIPSKFRYDLNERFIITRGLDKCLFGYTLEEWQQIEEKMKTLPMTKKDARKFMRMFFSGAIEVELDKQGRINIPQNLRKYASLTKECTVIGVSNRIEIWDRETWNDFYDESEESFEDIAEDLIDFDF

SEQ ID NO: 71639 - protein, 311 aa, Staphylococcus haemolyticus
MFHHISVMLNETIDYLDIKEDGIYVDCTLGGAGHALYLLNQLNDDGRLIAIDQDTTALDNAKEVLKDHLHKVTFVHSNFRELTDILKNLNIEKVDGIYYDLGVSSPQLDVPERGFSYHHDAKLDMRMDQTQQLSAYEVVNQWPYEALVKIFYRYGEEKFSKQIARRIEAHREHQPIETTLELVDIIKEGIPAKARRKGGHPAKRVFQAIRIAVNDELSAFEDSIEQAIELVKVGGRISVITFHSLEDRLCKQMFQEYEKGPDVPRGLPIIPEAYTPKLKRVNRKPITATDTDLDENNRARSAKLRVAEILK

SEQ ID NO: 71640 - protein, 133 aa, Staphylococcus haemolyticus
MAVEEIYEPYEDVQHNSIPKQQPQSEPQTRTVTKKVVVQLTRFEKYLYITLVTAIAVIAIYMLSLKMDAYDTNGKIADLDSKIEQQSSENSAIQSEIKKSSSYQRIYDKAKAQGMSLNNDNVKVVRTNGERRN

SEQ ID NO: 71641 - protein, 707 aa, Staphylococcus haemolyticus
RKNKLGAVLLVGIFGLLFFILVLRYSYIMITGHSDGQDLVMRANEKYLVQNNEQAERGKIYDRNGKILAEDVERYKVVAVVDKSAGKSGDKPRYVEDKKKTAKELSKIIDMKPEEIEKQLNQKKAFQVEFGQKGTNLTYQDKQKLEKMDLPGITLYPETERFYPNGNFASHLIGMAQKNPDTGELKGALGVEKIFDSYLSGTKGALSYIQDIWGYIAPNTKNEKSPKRGDDVHLTIDSNIQVFVEEALDDMVKRYQPKDLFAVVMDAKTGEILAFSQRPTFNPETGEDFGKKWANDLYQNTYEPGSTFKSFGLAAAIQEGKFNPKKKYESGHRDIMGSRISDWNKTGWGEIPMSLGFTYSSNTLMMHLQDLVGADKMKSWYERFGFSKPTGGLFDGEAEGNIAWSNELQQKTSAFGQSTTVTPVQMIQAQSAFFNKGNMLKPWFVDSIKNPISKKTFYQGEKEIAGKPITASTASKVETELDKVVNSKKSHAMNYRVDGYDIEGKTGTAQVADEKSGGYVKGENPYFVSFIGDAPKKNPKVIVYAGMSLAQKNDQEAYEMGVSKAFKPIMENTLKYLNVGSKKDETKSAQYSKVPNVTGQSTDKAKESLKSEDLQATVIGNGDNVKSQSIKANKKLLPNSKVLLLTDGDITMPNMKGWTKDDVLAFQELTGINVTTKGSGYVTKQSVNNGTTLKDNSKVEIELSPED

SEQ ID NO: 71642 - protein, 321 aa, Staphylococcus haemolyticus
MLFILAVIALLITFILVPILIPTLKRMKFGQSIREEGPQSHMKKTGTPTMGGLTFLISIIITSIIAIFFVDNSNPIILLLFVTIGFGLIGFIDDYIIVVKKNNQGLTSKQKFLAQIAIAVVFFLLSDVFHLVEFSTNLNIPFTNISIPLSFAYVIFIVFWQVGFSNAVNLTDGLDGLATGLSIIGFTMYAIMSFVLDSPAIGAFCIIMIFALLGFLPYNLNPAKVFMGDTGSLALGGIFATISIMLNQELSLLLIGLVFVIETASVMLQVASYKLTKKRIFKMSPIHHHFELSGWGEWKVVTVFWTAGLISGLIGLWIGVH

SEQ ID NO: 71643 - protein, 269 aa, Staphylococcus haemolyticus
MLNYTGLENKDVLVVGLAKSGYEAAKLLIKLGANVTVNDGKDLSQDPHAKDLEALGVKIVDGGHPLSLLDNEPIIVKNPGIPYTVSIIQEAYQRHLKILTEVELSYLISEAPIIAITGTNGKTTTSSLIGDMFKKSRLTGRLSGNIGYVASKVAQETSPNEYLITELSSFQLLGVEQYRPHIAIITNIYSAHLDYHETLENYQNAKKQIYKNQTENDYLICNYHQRHLIESENLKAKTLYFSTQQEVDGIYIKDGFIVYQGIRIINIDD

SEQ ID NO: 71644 - protein, 173 aa, Staphylococcus haemolyticus
MSYSMLYKSPVQNLELISDGESLTHVLYKYNDTTVTHPTNPDLDIFKKVVEWLNEYFSGNRPQIDFSLKPEGTDFQKSVWRKLQEIEYGQLKTYGDLANLVGEERNKPNMSAQAIGGAVGSNPISIIIPCHRVVGKDGSLTGYGGTINHKIKLLELEQVDMNNLYRPKNSTKP

SEQ ID NO: 71645 - protein, 383 aa, Staphylococcus haemolyticus
MKKIAIVSAKRTPIGRYKGKLRNYSAVELGTTALKGAIDSANIDPNIIQQVIFGNVLQSGVGQNPARQIAIKAGVPDTTPAMTINEVCGSGLKAIILGKQLIQLGEADVVAVGGVESMTNAPQLILKEGQEPVESFMHDGLTDAFHYVPMGVTAENIAEKYDITREMQDEFANHSQAKAAKATQDGKFNNEIIGMTDAEGEQMTSDEGVRPNSSVEKLATLKTIFKEDGTVTGGNASSINDGSSALILMEESYAKAHGYDILGIVGDYAEVGCDPQYMGYAPFYAVEKLLDKTDSKIDDVDIVEMTEAFAAQSIPVKDNLHIPDEKLNIYGGAIALGHPIGASGARLVTTLVNALEQENKRTGIATACIGGGLGIALMIDKGE

SEQ ID NO: 71646 - protein, 425 aa, Staphylococcus haemolyticus
MKSLDKTFRHLSREDKLKQLVDYGWLTDESYDVLLKNPLINEEVANSLIENVIGQGTLPVGLLPKIIVDDKEYVVPMMVEEPSVVAAASYGAKLVNNTGGFKTVKSERLMIGQIVFDDVSDTDALAQAIYDLEPQIKQIAAEAYPSIIERGGGYRRIEIDTFPENQLLSLKVFVDTKDAMGANMLNTILEAITAHMKNEFPNRDVLMSILSNHATASVVRVQGEIDIKDLNKGDRSGEEVAQRMERASVLAQVDIHRAATHNKGVMNGIHAVVLATGNDTRGAEASAHAYASRDGQYRGIATWKFDKERGRLVGTIEVPMTLAIVGGGTKVLPIAKASLELLNVQSAQELGQVVAAVGLAQNFSACRALVSEGIQKGHMSLQYKSLAIVVGAQGDEIARVAEALKAAPKANTATAQQILKDLRQQ

SEQ ID NO: 71647 - protein, 416 aa, Staphylococcus haemolyticus
MYQTIIIGGGPSGLMAAVAASEQSQNVLLLEKKKGLGRKLKISGGGRCNVTNRLPYAEIIKNIPGNGKFLYSPFSVFDNESIIDFFESRGVKLKEEDHGRMFPVSNKSQDVVDTLVNTIKQNKVDIKEETIVNEINVEDNGTFEVTTDKGIFSSKSVIIATGGTSVPQTGSTGDGYKFAKKLGHSITELFPTEVPITSAEHFIKSKELKGLSLKDVELSVLKKNGKKRISHKMDMIFTHFGISGPAALRCSQFVYKEQKNQKTKEINMQLDVFPEYKNHVLEEKITSILNEEPDKYIKNSLRGLIEERYLLFMLNQAQIDENTTYHHLSNQQLKQLVDCFKAFTFKVNGTLPIDKAFVTGGGVSLKEIWPKTMMSKLQPGLFLCGEVLDIHGYTGGYNITSALVTGHVAGYEAGKF

SEQ ID NO: 71648 - protein, 545 aa, Staphylococcus haemolyticus
MSENKEMVRGTFLITLSILITKILGVLVVIPFYAIMGANAEEKLAPFNYAYVPYNIAIAVATAGIPLAASKFVAKYNALGAYKVGQKLYKSSFIVMSISGIIGFLILFFLAPDIAALTLGRKEGKGGWTIDDITWIIRVISMVVMFIPLLATWRGVFQGYESMGPTAVSEVTEQIARIVFILIGSFLVLNVFHGSYLQANGIATFAAAIGAIAGLLTLWYYWRKRKPHIQKMVASDHTGLDVPYTKMYKEIISYSVPFVIVSLNFPLFNLVDQFTHNNALDAAGFHANKDYFFTILNFTTNKIVMIPTSLAAGFAVSLIPFITKTFAEGRLNEMHRQIKTSIGVLMYITVPASLGIMALSSPLYTVFYQYNPDGNKILFYYAPVAILISLLSVTASMLQGINKQKLTVFVILGSVFVKLILNIPLIMIFHTSGAVLSTAIALMVANVANLMILKVYAKFHFTDTLVQVAKIFIYSLIMMISVEVVYFLLSLFISVDRKSGAFIILIIGVIVGGLIYGTITIKNRLADEFLGDLPGKIRRKVGFLR

SEQ ID NO: 71649 - protein, 230 aa, Staphylococcus haemolyticus
MRLDKFLANMGVGTRTEVKHLLKKGKVTVNTSVEKSPKSHINPTEDIVHVNGKQVEFVNNVYIMLNKPKGYISATHDESNRTVIDLIPEYQHLNIFPVGRLDKDTEGLLLITNDGQFSHDLMSPSKHVSKTYEVTSKKPVTKVDIDAFKKGIILSDGPVKPAQLTRINETISHVTIYEGKYHQVKRMFHAIENEVLELKRLKIANLALDENLKSGEYKLLSDKELKLLQH

SEQ ID NO: 71650 - protein, 469 aa, Staphylococcus haemolyticus
MWKEKVQEYEGQIIDDLKGLLSIESVRDDSKASDETPVGPGPRQALDYMYEIAQRDGFSTHDVDHIAGRIEAGKGDDVLGVLCHVDVVPAGDGWDSDPFNPVVTDDAIIARGTLDDKGPTIAAYYAVKILNDMKVDWKKRIHIIIGTDEESDWKCTERYFQTEEMPTLGFAPDAEFPAIHGEKGITTFDLVQNSTSEDQDEPDYELISFESGQRYNMVPDHAQARVFVKENMTDVVQHFEHYLDQHKLQGESVVDSGELVLTLEGKAVHGMDPSLGVNAGLYLLDFISTLNLNQTAREFVDFSNRYLHESHFGEKMGMKFHTDVMGDVTTNVGIISYDNKQGGRFGINLRYPQKFEFEEAIQRFTKEIKAYGFDLELGKVQQPHFVDKNDPFVQKLVKAYRNQTGDMSEPYTIGGGTYARNLDKGVAFGAMFEDSEDLMHQKNEYITKKQLFNATSIYLEAIYSLCVEG

SEQ ID NO: 71651 - protein, 263 aa, Staphylococcus haemolyticus
MEQFYQLGWTLDSAGGASGEAYMAEQDGQKLFLKRNSNPFIAALSAEGIVPKLVWTKRIETGEVVTAQHWKNGRELEPDEMYQSRVAALLKKIHGSKPLLNMLKRMEMEPITPNIMLKKINASLSREVLTHHIIRKSLTYLEEHIPNLDSRFFTVVHGDVNHNNWLLSDRDELFLVDWEGAMIADPAIDIGMLLYNYVPEKNWSDWFKTYGVEENIELNKRMKWYTVIQSIGMVQWYEEQKRFKDMNNWLKFLNEVMNSNLFI

SEQ ID NO: 71652 - protein, 157 aa, Staphylococcus haemolyticus
MILKDSYKTYVVEEKGDNTISIKKNNDEHQYDVLEVIDDLSNDSFCVLNHLFVNEGMEDAFEKKFLERPKYLQNVPGFKALRFLRPQVAGRHYIILTLWEERQAFYDWQNSNEYSQTHKHRGTEGGVDRNIVNRDLSYNVRIELSGLESKLDLSHIF

SEQ ID NO: 71653 - protein, 341 aa, Staphylococcus haemolyticus
MNKETLILAIETSCDETSVSVIKNGNSILSNIVLSQIESHKRFGGVVPEVASRHHVEGITTTIEEALTTANISMNDIDAIAVTQGPGLIGALLIGINAAKALAFAYDKPLIPVHHIAGHIYANHLEEPLTFPLIALIVSGGHTELVYMKSHMHFEVIGETRDDAVGEAYDKVARTIDLPYPGGPQIDKLAQYGKDTYDFPRVWLEKESYDFSFSGLKSSVINKLHNLRQKNEEVVKEDVATSFQNSVVDVLSTKAINACKAYKVNRLIVAGGVASNKGLRYRLQQLCEDNNIHLSIPSPKLCTDNAAMIGAAAYYYYQSGITAKLDLNGENNMDIEEATIE

SEQ ID NO: 71654 - protein, 562 aa, Staphylococcus haemolyticus
MRSDMIKKGDHQAPARSLLHATGALKNPTDMNKPFVAICNSYIDIVPGHVHLRELADIAKEAIREAGAIPFEFNTIGVDDGIAMGHIGMRYSLPSREIIADAAETVINAHWFDGVFYIPNCDKITPGMLLAAVRTNVPAIFCSGGPMKAGLSAQGKALTLSSMFEAVGAFKEGKLSKEAFLDMEQNACPTCGSCAGMFTANSMNCLMEVLGLALPYNGTALAVSEQRREMIREAAFKLVDNIKKDIKPLDIVTREAIDDAFALDMAMGGSTNTVLHTLAIANEAGIDYDLERINEIAKKTPYLSKIAPSSSYSMHDVHEAGGCPAIINELMKKEGTLHPDRLTVTGKTLRENNEGKEIKNFDVIHSLDDSYDKQGGLSILFGNIAPKGAVIKVGGVDPSIKTFTGKAICFNSHDEAVEAIDNKIVREGHVVVIRYEGPKGGPGMPEMLAPTSSIVGRGLGKDVALITDGRFSGATRGIAVGHISPEAASDGPIGLIKDGDEVTIDLINRTLNVNQTKEELNHRKEALQPFKAKVKSGYLARYTALVTSANTGGIMQVPENLI

SEQ ID NO: 71655 - protein, 591 aa, Staphylococcus haemolyticus
MTSKKESSVVSPDAMDYSKQTSLKEDSDLDANNNFRSGSELLVEALLHEDVDFIFGYPGGAVLPLYDTFYDGKIKHILARHEQGATHAAEGYARVSGKTGVVVVTSGPGATNAITGITDAYCDSLPLVVFTGQVATPGIGKDTFQEADLLSMTTPITKANFQVKNVNDIPRIVHEAFYLANSGRKGPVVIDFPKDMGVLKTSAPLVNEVDLPAYDVTVNPKDKDISQLIQYLDNAKQPLILAGAGINHSQSNELLTQFVTKHQIPVATTLLGLGAIPYDNPLFLGMGGMHGSYASNMALTECDLLINLGSRFDDRLASNPNEFAPHATVVHVDIDESEINKVISTDLGIVADCKKVLEALSQRFTNKTSHEHWVNHCIENKHKHPFKYKKTDDTFCKPQEAIEYIGKITNGEAIVTTDVGQHQMWAAQFYPFKHHGQWVTSGGLGTMGFGIPSAIGAQLAEPDKTVICFVGDGGFQMTNQEIALLPEYGLNVKIVLINNGTLGMVKQWQDKFFNHRFSHSVFNDQPDFMKMAEAYGVKGFLIDHPNKLTKTLDSAFNYSGPALIEVRISPTEPVNPMIPSGKANHEMEGLE

SEQ ID NO: 71656 - protein, 334 aa, Staphylococcus haemolyticus
MTKVYYDQSVEKDALQGKKIAIIGYGSQGHAHAQNLKDNGYDVIVGIRPGHSFDKAKEDGFDVYPVAEAVKQADIIMVLLPDEIQGNVYKNEIEPNLEAGNALAFAHGFNIHFEVIKPPKDVDVFLVAPKGPGHLVRRTFVEGTAVPALFGVQQDATGQARDISLSYAKGIGATRAGVIETTFKEETETDLFGEQAVLCGGIHKLIQSGFETLVEAGYQKELAYFEVLHEMKLIVDLMYEGGMENVRYSISNTAEYGDYVSGPRVITPDVKDNMKSVLKDIQNGNFANSFVKDNENGFKEFYKLREQQHGHEIEAVGRELRKMMPFIKSKSIQK

SEQ ID NO: 71657 - protein, 681 aa, Staphylococcus haemolyticus
  MISC_FEATURE (627)..(627): X=any amino acid
  MISC_FEATURE (631)..(631): X=any amino acid
  MISC_FEATURE (658)..(658): X=any amino acid
SLEIYGYGQFVHRKIEFNREFTEIFGENEAGKSTIQAFIHSILFGFPTKKEKEPRLEPRMGNQYGGKLTLILDDQSEIVVERVKGNISGDVKVYLENGLIRDETWLKKKLNYISKKTYQGIFSFNVLGLQDIHRNLDEDQLQSYLLEAGALGSSEFTMMNKMVSQKKTTLYKKAGKNPILNQQLDELKSLEAQIREEESKLDEYHRLVDDRDKSQRHLEHLKANLNQLSKMHESKQKQLAIHEQAQEWKDLEQKLNIEPLSFPEKGIERYETASNYKQSLARDISLREEKLKQLENEFNAIPALNEDTANHIYHLTRDENEIQQAEMKSSSLKQEIDDYERQEADLKTSIGWQEVYHNTDTSESMKNYVSKTIKTRNEQKVLKQQIERAIDENQIEQNTLSQEIENLEKDLVSEDSLDKKKHYNQQKLELHEKENLYNKLKDTFNSDKERKQKRNWWLRLSFIVLSIVGLGLTLFSFVTQNLIFGVIFAILTVIFIVGTFLVKTKEIDYSESISEEINDLEQQINDLESNYDLNFDLDQQFQLRERWSNASNNKSVLANKLNHQENLLQNTEQQINDLTQKLNAVKENVKVPNEMTDDLLIDSFKTMNQLKSNDSYRSKLLININKXIKNXRIFMIKRLKILKMRSHHLIKLHYLMIXRTGFLNTKVIKRRKNNLKVKLSY

SEQ ID NO: 71658 - protein, 390 aa, Staphylococcus haemolyticus
MKIATLNRGKESKYLNQYPLVDEDDIYKNDHLKEGDLFYLMNGQEQYIATAYVGRQHKGLGWVLSYDQNEAINTSFFEKQFQIALQERDYYYHIEGTNAFRLFNAEGDGVGGLTIDNYDGHLLIQWYSKGIYKFRYNVIEAIQQVFPFKSIYEKMRFKDSEYTGGHVIGEAPDFPIVIEENFTFYNVDLDDGLMTGIFLDQKEVRKKLRDHFAKEKDILNLFSYTGAFSVVAAQNAKSTTSVDLANRSRSLTEENFGLNGIDPKSQYIYVMDTFDFYNYAARHGKVFDTIVIDPPSFARNKKKTFSVQKNYDDLINGALSILAPNGSLLLCTNSSTFSLKAFKNVIKTTLNEAGVTYEIEEVMGLPKDFKTHPHYKPSKYLKAVFINIKY

SEQ ID NO: 71659 - protein, 88 aa, Staphylococcus haemolyticus
MEQKSYVIIDETGIHARPATMLVQTASKFDSDIQLEYNGKKVNLKSIMGVMSLGVGKDAEITIYADGSDEADAIQAISDVLSKEGLTE

SEQ ID NO: 71660 - protein, 534 aa, Staphylococcus haemolyticus
MSKLINGIAASDGVAIAKAYLLVEPDLSFTNEKVTDTDAEIQKFKNALEASKIELTKIRNNAEKQLGPDKAAIFDAHLLVLDDPELIQPIEDKIANEKVSAPEALDEVTSQFITIFESMDNEYMRERAADIRDVSKRVLAHLLGVELPNPSMIDESVIIVGNDLTPSDTAQLNKEFVQGFVTNIGGRTSHSAIMSRSLEIAAVVGTKSVTKEVKQGDMVIVDGITGDVIVDPTEDELIAYQNKRERFFEDKKELQKLRDAETVTIDGEHAELAANIGTPDDLYGVMENGAEGIGLYRTEFLYMGRDQMPTEDEQFEAYKKVLETMKDKRVVVRTLDIGGDKELPYLNLPKEMNPFLGYRAIRLCLDQQDIFRTQLRALLRASAYGKLNIMFPMVATINEFRDAKAILLEEKENLKNDGHDVSDEIELGIMVEIPSTAALADIFAKEMDFFSIGTNDLIQYTMAADRMSERVSYLYQPYNPAILRLVKQVIEASHKEGKWTGMCGEMAGDETAIPLLLGLGLDEFSMSATSIIKS

SEQ ID NO: 71661 - protein, 228 aa, Staphylococcus haemolyticus
MIGIIGAMEEEVAILKDKLTDMNEISVAHVKFYRGKLNSKEVVLTQSGIGKVNAAISTTLLIEKFNPKLIINTGSAGALDESLSVGDMLISNDVVYHDVDATAFGYKLGQIPQMPLEFKSDQELLKSVETVINKKNYNAKIGQIVSGDSFIGSVDQRLTIKRQFPEAMAVEMEATAIAQTCHQFHVPFIVTRAVSDLANGKADISFEEFLGEAAKSSSSIVESLIKVL

SEQ ID NO: 71662 - protein, 366 aa, Staphylococcus haemolyticus
MDDTLKCIGCGAPLQSEDKSAPGYVPEHNLFREDVICQRCFRLKNYNEIQDVGMDSEDFLNLLNELSDRKGIIVNVVDIFDFEGTFINALKRIVGNKKIILAANKLDLLPKQINKRRVKDWLKKTARKYGLDADDVILISAQKGWGIDDLLTSIEQNRNKQDVYIVGTTNVGKSTLINKLIEQSVGEKDVVTTSRFPGTTLDLIDIPLDEKTFMYDTPGIIQSHQMTHYVSEKELKTIVPKNEIKQRVFQLNEGQTLFFGGLSRIDYVSGGKRPLVCYFSNDLNIHRTKTEKANDLWRNQIGNVLTPPNNPDHFDMSDTKAVRLETGKEKKDIMISGLGFITIEAGAKVIVRVPKNVDVILRNSIM

SEQ ID NO: 71663 - protein, 268 aa, Staphylococcus haemolyticus
MKYAVIGDPVSHSLSPVMHQVNFKSLNMEDTYEALHIPTQDFHDIRHIIEDNHINGFNVTIPHKERIIPYLDEINDQAKAVGAVNTVKIINNKWIGYNTDGIGYVMGLKQVYPDLENAYVLILGAGGASKGIANELSKIVQPKLTIANRTMSRFETWDMDINAISLEQSEQYLDEFDIIINTTSAGLNNNDDIVISLDNLSSSTLVSDIIYIPYKTKFLKEAEFKGNTVYNGLDMFINQGAESFKIWTGKQPNILEMKYAVLNKLKGV

SEQ ID NO: 71664 - protein, 194 aa, Staphylococcus haemolyticus
MKIDKAIELVKDKLPEKRFKHSLRVAETAVKLAEIYDGDKDKANLAGVLHDYCKYDDLSTMYQIVRQHDLDSELLSYGGEILHGPVCAAIMQSEFGIEDEEVLLAIKNHTTGRKEMTKTEKLVFIADYIEPGRKTPGVEEIRDMAYNQGSLDKTIYEISKRTVLFLISKDITVYGTTISCLNYYNYSDQRIKDD

SEQ ID NO: 71665 - protein, 188 aa, Staphylococcus haemolyticus
IREHVGMVFQNPENQFVGSIVKYDVAFGLENHAVPTEKMKEIVAQSISDVGMTDYADSEPHSLSGGQKQRVAIAGVLALSPSVIILDEATSMLDPQAKKSLMSLIQEVKATKDVTIISITHDLTEALEGDHVIVMNQGTVYKEGNPQTIFKDIKMLQEIGLDLPFSMKINQLLGFDDHFITYEGLVEK

SEQ ID NO: 71666 - protein, 187 aa, Staphylococcus haemolyticus
MLCENCHLNEAEVKLTVKSKEGTSEKWVCSICAQGENPWQQNETPSPHSQFQDDIEEAFVVKQILQHLATKHGINFHEVAFQEEKRCPTCKMTLKDIAHVGKFGCANCYATFKDDIVDIVRRVQGGQFEHVGKTPRSSHKKLAIKKQIEEKTKYLNVLIDEQNFEEAAIVRDEIKALKDESGVERNE

SEQ ID NO: 71667 - protein, 335 aa, Staphylococcus haemolyticus
MSDMNAHISEWMKETEESPIVMSSRIRLARNLENHVHPLMFPSEQDGFRVINEVQDVLPDLDLMRLDTMDQQNKMKLVAKHLISPELIKQPASAVLLNKDESISIMINEEDHIRIQAMGTDLSLQDLYNIASEIDDTLDQSLDISYDEHLGYLTTCPTNIGTGMRASVMLHLPGLSIMKRMNRIAQTINRFGFTIRGIYGEGSQVYGHIYQISNQLTLGKTEDEIIDNLTEVVQQIINEEMQIRERLTQYNELETLDRIYRSLGILQNSRIISMEEASYRLSEVKLGIDLGYLTLSDFKFNELMVSIQSAFIYNDEDETISVNEKRANILREYTQ

SEQ ID NO: 71668 - protein, 824 aa, Staphylococcus haemolyticus
MLFGRLTERAQRVLAHAQEEAIRLNHSNIGTEHLLLGLMKEPEGIAAKVLESFNITEDKVIEEVEKLIGHGQDQTGTLHYTPRAKKVIELSMDEARKLHHNFVGTEHILLGLIRENEGVAARVFANLDLNITKARAQVVKALGSPEMSNKNATANKSNNTPTLDGLARDLTVIAKDGTLDPVVGRDKEITRVIEVLSRRTKNNPVLIGEPGVGKTAIAEGLAQAIVNNEVPETLKGKRVMSLDMGTVVAGTKYRGEFEERLKKVMEEIHQAGNVILFIDELHTLVGAGGAEGAIDASNILKPALARGELQCIGATTLDEYRKNIEKDAALERRFQPIQVDEPTVEDTIAILKGLRDRYEAHHRINISDEALEAAAKLSDRYVSDRFLPDKAIDLIDEASSKVRLKSHTTPNNLKEIEQEIEKVKNEKDAAVHAQEFENAANLRDKQTKLEKQYEDAKNEWKTTQGDQSTSLSKEDIGEVIAGWTGIPLTKINETESDRLLNLEQTLHDRVIGQNDAVTSISKAVRRARAGLKDPKRPIGSFIFLGPTGVGKTELARALAESMFGEEDAMIRVDMSEFMEKHAVSRLVGAPPGYVGHDEGGQLTEKVRRKPYSVILFDEIEKAHPDVFNILLQVLDDGHLTDTKGRQVDFRNTVIIMTSNVGAQELQDQRFAGFGGGSEGHDYETIRKTMMKELKNSFRPEFLNRVDDIIVFHKLSKDELKEIVTMMVNKLTQRLSEQDINIVVTDKAKEKIAEEGYDPEYGARPLIRAIQKTVEDNLSELILDGNQIEGKEVVIDHDGDEFKYNINEKNNGISDEGNEVTETEA

SEQ ID NO: 71669 - protein, 454 aa, Staphylococcus haemolyticus
MAKKKVIFECMACGYQSPKWMGKCPNCGSWNQMEEIVEKASNPKHGVKTSTSSAKVQKLNDIKNEVTPRVQTESKEFNRVLGGGIVSGSLVLIGGDPGIGKSTLLLQICASLSQKLNVLYITGEESLNQTKLRADRLDEDSSNLNVLAETDLEVIHQTVQQAQPDILVVDSIQTIYHPEISSAPGSVSQVRESTQSLMNIAKQMNIATFIVGHVTKEGQIAGPRLLEHMVDTVLYFEGDEHHAYRILRAVKNRFGSTNEMGIFEMKQSGLKGVHNPSEMFLEERSTNVPGSTIVATMEGTRPLLIEVQALVTPTTFNNPRRMATGIDHNRLSLLMAVLEKKENYLLQQQDAYIKVAGGVRLTEPAVDLSVIVATASSFKDKAVDGLDCYIGEVGLTGEVRRVSRIEQRVQEAAKLGFERVIIPQTNIGGWQFPEGIKVVGVSTVHDALKYAFKS

SEQ ID NO: 71670 - protein, 313 aa, Staphylococcus haemolyticus
MNVGIKGFGAYAPEKVVDNAYFESFLETSDEWISKMTGIKERRWASEDQDTSDLAFEASKKAIEDAGITPADIDMIIVATATGDMPFPSVANILQEKLGTRKVPTMDQLAACSGFMYSMITAKQYVQSGDYKNILVVGADKLSKITDLTDRSTAVLFGDGAGAVVIGEVSEGRGIISYEMGSDGNGGKYLYLNKDTGKLVMNGREVFKFAVRIMGEASTRVVDKAGLQSDDIDMFIPHQANIRIMESARERLGIEREKMSVSVNRFGNTSAASIPLSISQELENGRIKDDDTLVLVGFGGGLTWGAMVIKWGK

SEQ ID NO: 71671 - protein, 359 aa, Staphylococcus haemolyticus
MSERVLEVNDLHVSFDITAGEVQAVRGVDFYLNKGETLAIVGESGSGKSVTTKAITKLFQGDAGRIKKGAIDFLGEDLANKSEKELIKLRGKDISMIFQDPMTSLNPTMQIGKQVMEPLIKHRNYSKSEAKKRALEILNLVGLPNAEKRFKAYPHQFSGGQRQRIVIATALACEPKVLIADEPTTALDVTMQAQILDLMKDLQKKIDTSIIFITHDLGVVANIADRVAVMYGGQMIETGDVDEIFYDPKHPYTWGLLSSMPDLTTSNDTELIAIPGTPPDLLHPPKGDAFARRSQYALDIDFKQEPPWFKVSPTHFVKSWLLDKRAPKVKPPEMVVKRQRQMPNNYDKPRQVERVSFDG

SEQ ID NO: 71672 - protein, 314 aa, Staphylococcus haemolyticus
MDKNNEVLLEIKNLKQYFNEGKRNEVRAIEDISFDIYKGETLGLVGESGCGKSTTGKAIIKLNDITSGEILYEGQDIQKISKRKDLLKFNKKIQMIFQDPYASLNPRLKVMDIVAEGIDIHKLASSKKDRKRRVYDLLETVGLSKEHANRYPHEFSGGQRQRIGIARALAVEPEFIIADEPISALDVSIQAQVVNLMLKLQKERGITFLFIAHDLSMVKYISDRIAVMHFGKIVELGSADEIYYHPLHDYTKSLLSAIPQPDPDSERTRKRVAYQEDESKNSERKLQEIRPDHYVFVTDEEAAQLKQEHQTQSV

SEQ ID NO: 71673 - protein, 394 aa, Staphylococcus haemolyticus
MAKEKFDRSKEHANIGTIGHVDHGKTTLTAAIATVLAKNGDTVAQSYDMIDNAPEEKERGITINTAHIEYQTDKRHYAHVDCPGHADYVKNMITGAAQMDGGILVVSAADGPMPQTREHILLSRNVGVPALVVFLNKVDMVDDEELLELVEMEVRDLLSEYDFPGDDVPVIAGSALKALEGDAQYEEKILELMQAVDDYIPTPERDSDKPFMMPVEDVFSITGRGTVATGRVERGQIKVGEEVEIIGIHDTSKTTVTGVEMFRKLLDYAEAGDNIGALLRGVAREDVQRGQVLAAPGSITPHTKFKADVYVLSKDEGGRHTPFFTNYRPQFYFRTTDVTGVVNLPEGTEMVMPGDNVEMTVELIAPIAIEDGTRFSIREGGRTVGSGVVTEIIE

SEQ ID NO: 71674 - protein, 398 aa, Staphylococcus haemolyticus
MNMVQSLHNFLEENIQYLKDNGLYNEIDSIEGANGPEITINGKQYINLSSNNYLGLATNEDLKSAAKHAIDSHGVGAGAVRSINGTLDLHDELEETLAKFKGTEAAIAYQSGFNCNMAAISAVMNKNDAILSDELNHASIIDGCRLSKAKIIRVNHSDMDDLRAKAKEAVESGQYNKVMYITDGVFSMDGDVAKLPEIVEIAEEFGLITYVDDAHGSGVMGKGAGTVKHFGLQDKIDFQIGTLSKAIGVVGGYVAGTKELIDWLKAQSRPFLFSTSLAPGDTKAITEAVKKLMASTELHDQLWDNAKYLKDGLEKLGFNTGESETPITPVIIGDEKETQEFSKRLKDEGVYVKSIVFPTVPRGTGRVRNMPTAAHTKEMLDKAIAAYEKVGKELGTIK

SEQ ID NO: 71675 - protein, 324 aa, Staphylococcus haemolyticus
MEVSDMLVLNEQDQQSLLDMKEVIDEVANSLKAFSEEKTDTPLRYVLPFNEGNRYLVMPALSDDLKMVGIKTVTFAPDNPKKGKKTITGSVLLSDYETGETLAVLDGSYLTKIRTGAISGVATKYLAREDAKTLCVIGSGDQAQGLIAAVMAVRNIDTIHFSSRTKENAERLAQEVANNYNVSTKVFEEADDAMEEADVVVTATNSNHPVYSHSLHPGVHLNAVGSFKPDMQELPSESMLVANKIVVESVEAAMEETGDLKVPQEEGIITKDSLHGELGDIVAGKVSGREDDKEVTLFKSVGLAIVDIVVANYFYKKAVANKEV

SEQ ID NO: 71676 - protein, 321 aa, Staphylococcus haemolyticus
MRLNLAERILNQDVLSKDEALALFEDETIDTFELLNEAYIIRKHFFGKKVKLNMILNAKSGICSEDCGYCGQSVKMKEKQRYALVEPDKIKAGAQVATENHIGTYCIVMSGRGPTNREVDHICETVHDIKVLHPQLKICACLGLTNEEQAEKLKEAGVDRYNHNLNTSERYHNEVVTTHTYEDRVRTVEIMKANHISPCSGVICGMGETNEDIIDMAFALREIDADSIPINFLHPIKGTKFGGLDLLSPMKCLRIIAMFRLINPSKEIRIAGGREVNLRSLQAIALKAANSIFVGDYLITGGQPNELDYQMIEDLGFEIDG

SEQ ID NO: 71677 - protein, 396 aa, Staphylococcus haemolyticus
MSKFAPLLEPITLSNGITLANRFVLSPMTTNSSTKEGHITEEDIRYAKRRANSAGLQVTGASYIEPYGQLFEYGFNISDDACIPGLRKVAQTMKQEGNKAIIQLAHAGRFSNTAIMNYGEVYGPSPMTLHSPIKHDVLEMSVEKIHDVIQQYADATSRAIQAGFDGVEISVAQRLLIQTFFSTFSNQRHDQYGVDSLENRARFGLEVMQAVQKVIDEEAPSDFIFGYRATPEETRGSDLGYTVDEFNQHLDWVMEVANIHYVAIASWGRNIYQNKTRTPGDNYGRRVNQVVYEYLNGHVPLIASGGINTPETALDALNNADMVGMSSPFVTEPDFVHKLAEGREDDIDLHVHPDELDELAIPHAAFKDIVQMMDYGEGLQKKTRDELRKLEKNYDE

SEQ ID NO: 71678 - protein, 333 aa, Staphylococcus haemolyticus
MDFNILDYAMIDEGKDATQALQDTTRLAKLADDLGYKRFWLTEHHDVPAFASGSPELLMMHLLGETKRIKLGSGGVMLPHYSPFKVAENFKMLEALHPGRVDLGIGNNPGTAVVKRAMDEDKRDYLDYAQSIEDIRHYLTQAPEEQRVGQVISQPHLSRHPEMWLLSASQRSAKLAATQGMGYTLGTFLLPSQDKIDAAKASVETYREHFQQTALNMSPTVMLTTFAIVTDTEEEAQDLLHALDVWLLGKRQFAEFDRFPSIETAQQYNLSDRDKRVIAQHRARILAGTIEQVKPRLDAMIQEFKADEVLVVPLLPGIDQRCRTIERIAQAYL

SEQ ID NO: 71679 - protein, 113 aa, Staphylococcus haemolyticus
MAKLANYLYVEKVGNQYIYRMTPELQDDVGTVGYVEFMGPDDVNVNDEIVSIEASKTVLDVQSPLAGKIVERNTKAEDEPAILNSEKPEENWLVKLENVDEAAYDALPDPDED

SEQ ID NO: 71680 - protein, 265 aa, Staphylococcus haemolyticus
MSVNQQERLAYLIETMWKEQYGDKPLDLPHTDTEQWELYRGLANVRPPEPVSSEYLDIQDAYLSTLNNQQDITHIDDLTPVSDEPLYLWLGDITTLDIDGIVNAANSRFLGCMQANHECIDNIIHTKAGVQLRLDCAHIIEQQGRKEGVGKAKVTSAYNLPAKYVIHTVGPQIRKQPVSQMNRDLLARCYRSCLALADEKGLRHLAFCCISTGVFGFPQDEASRIAIETTRQYLHETGSELKVLFNVFTDRDLELYKEAFNDNNR

SEQ ID NO: 71681 - protein, 218 aa, Staphylococcus haemolyticus
MDLINIALDGPAAAGKSTIARQVASKLSMIYVDTGAMYRAITYKYLQNDKPEDFKTLVNQTTLELTYDKSKGQRILLDNQDVTDFLRENDVTQNVSYVASKEPVRTFAVEKQKDLAAKKGIVMDGRDIGTVVLPDAELKVFMIASVEERAERRQKENEQRGIPSTLSQLKKEIEERDHYDMNRDISPLKKADDAVTVDTTGKTIEEVTEEIMTLVNNI

SEQ ID NO: 71682 - protein, 392 aa, Staphylococcus haemolyticus
MTEEFNESMINDIKEGDKVTGEVQQVEDKQVVVHINGGKFNGIIPISQLSTHHIENPSEVVKQGDEIEAYVTKIEVDEENDSGVYILSKRQLETEKSYEYLQEKLDNDEIIEAKVTEVVKGGLVVDVGQRGFVPASLISTDFIEDFSVFDGQTIRIKVEELDPENNRVILSRKAVEQAENDVKKASLLESLNAGDVIKGKVARLTNFGAFVDIGGVDGLVHVSELSHEHVDSPEDVVSVGQEVDVKVKSVEKDAERISLSIKDTLPTPFESIKGQFHEDDVIEGKVVRLANFGAFVEIAPGVQGLVHISEIAHEHIGTPGEKLEPGQQVNVKILGIDEENERISLSIKATLPKEDVVESDDATTQSYLSNDSIEDNPTLGDVFGDKFKDLKF

SEQ ID NO: 71683 - protein, 436 aa, Staphylococcus haemolyticus
MTKPIVAIVGRPNVGKSTIFNRVVGERVSIVEDTPGVTRDRIYSSGEWLTHEFNIIDTGGIEIGDAPFQTQIRAQAEIAIDEADVIIFMVNVREGLTQSDEMVAQMLYKSKKPVVLAVNKVDNPEMRNDIFDFYSLGFGDPYPISGSHGLGLGDLLDEVVKHFDEETEDSYDEDTIRLSIIGRPNVGKSSLVNAILGEDRVIVSNVAGTTRDAVDTEYSYDGQDYVLIDTAGMRKKGKVYESTEKYSVLRALKAIERSNVVLIVIDAEEGIIEQDKRVAGYAHEEGKAVVIVVNKWDTVDKDSNTMKKFADDVRNQFQFLDYAQIAFVSAKEGTRLRTLFPYINEASENHKKRVQSSTLNEVVTDAISMNPTPTDKGRRLNVFYTTQVANEPPTFVVFVNDVELMHFSYKRYLENQIRHAFGFEGTPIHIIPRRRN

SEQ ID NO: 71684 - protein, 332 aa, Staphylococcus haemolyticus
MTKITVFGMGSFGTALANVLAENGHTVLMWGKNEDSVKELNDHHQNKRYLKDVVLDSRIKATSDIKEAANFTDIYLMALPTKAMREVTSEIDSLIDSKKTFIHVAKGIENDTFKRVSEMIEDSISEDHNGGIGVLSGPSHAEEVVIKQPTTVAASSKDEKVSKLIQDLFMNDYLRVYTNNDLVGVELGGALKNIIAVASGIVAGMGYGDNAKAALMTRGLAEISRLGEKLGADPMTFLGLGGIGDLIVTCTSTHSRNYTLGFKLGQGQTMDEALNEMNMVVEGIYTTNSVYHLAKQQNVDMPITNALYKVLFEDNPVKDSVKDLMGRDKKSE

SEQ ID NO: 71685 - protein, 90 aa, Staphylococcus haemolyticus
MNKTDLINAVAEQADLTKKEAGSAVDAVFESIQQSLSKGEKVQLIGFGNFEVRERAARKGRNPQTGKEIEIPASKVPAFKAGKALKDAVK

SEQ ID NO: 71686 - protein, 239 aa, Staphylococcus haemolyticus
MTENNAKKEQVHTVFQNISSKYDRLNNIISFEQHKVWRKHVMKDMHVKVGSKALDVCCGTADWTIALSKAVGAHGEVTGLDFSENMLEVGKEKTKHMNNIHLVHGDAMNLPFEDNSFDYVTIGFGLRNVPDYLVALKEMNRVLKPGGMIVCLETSQPTMPVFKQVYKLYFKFVMPVFGKLFAKSKEEYEWLQQSTFDFPDKDKLKQLFEQAGFNKIKIRSFTGGVAAMHLGYKQKSSTK

SEQ ID NO: 71687 - protein, 317 aa, Staphylococcus haemolyticus
VAKLNMNSEIKNVEKRLQKAIESNDPILREASSHLLSSGGKRVRPAFVILSSQFGPQKKTEDTYRVAVALELIHMATLVHDDVIDKSDKRRGRLTIVKKWDVTTAILTGNFLLALGLEHLSEIRDNRIHHIISNSIVNVGLGELFQFQDQFNSEQSITNYLRRINRKTALLIQLATEVGAITSEANDETIRKLKMIGHYIGMSFQIVDDILDFTSTEKKLGKPVGSDLMNGHITLPVLLEMKKDTSFKKKIAALNHQSESQEFKPLIEQIRNSYSIKESKAISDKYLAKALKLIDELDEPNAQSFLLNLIKKMGSRS

SEQ ID NO: 71688 - protein, 452 aa, Staphylococcus haemolyticus
MSIFSKLLKKSSPQQGIVLYYLIAIVVAFLLLNLPFVHKHGVDVSPIDTLFVAVSGISVTGLSPVNIVDTYSTFGQIIILIILNIGGIGVMAIGTVLWVVLGKHIGIRERQLIMLDNNKDTMSGTVKLILEIIKTILTIEFIGALLLAFYFYRDNPDLKNALMQGLFVSVSATTNGGLDITGQSLIPYAKDYFVQTIVMFLIVLGSIGFPVLLEIRAYVRNRVSHFRFSLFTKITTCTYLFLFVFGVLAILALEHHHAFKGLSWHQSLFYSLFQSATTRSAGLQTIDVTNFSDATNVIMSILMFIGSSPSSVGGGIRTTTFAILILFVINFNNNAEKTAIKVFNREIHVVDIQRSFAVFTMASILTFVSMIVILATEKTNLTFLQVFFEVMSAFGTCGLSLGVTDDISGLTKVILMILMFIGRVGLISFIIMIAGRKEPDKYHYPKERVQIG

SEQ ID NO: 71689 - protein, 506 aa, Staphylococcus haemolyticus
MCKLEKNEHINIDILATSDMHSHFMNGDFGSNIYRAGTYVKNIRENNDKVILLDSGGSVAGSLAAHYYAIVAPYKRHPMIKLMNAMQYDASGISPDDFKFGLSFLTKAVSLSRFQWLSANIEFALTKEPYFSTPYIIKEYDNVRIAIVGLTADGLMKNEFAEMEKEVSIEKALLSAKRWIRYIHESEHPDFLIVIYHGGLYKINQTNTRHRKGSHEAEKIMKEIGVIDLMITAHQHQTIIGNDFETVYVQAGQDAQELVHVKIKFKKRTNSFEKEDIESTVINLSEFPEDQELLETTYYDRKALEHWSKDIVSENKVDLQVNGLEDLLSSPHPFIQLLHDSLHLAYVNNITCINVPKNGEKGLKGIVTNEDVYNAYPHPDKAIDITLRGHQIKKMLEYTYSYIQFEQNQLSMTIIDETLCTLWQGFDYEVDMSAPRFDRVNIKNIELDEKYRVTMTDYCYRNYRQYLEDESILHSTYDRPMSSLIAEKLNQPDYYLKLDSNFSVAY

SEQ ID NO: 71690 - protein, 1665 aa, Staphylococcus haemolyticus
IYQDIDVTPGSELQFHFIGTSMGNISGFNSARLFVYDANNPSTLLYKGTPKTSSQPFGIFKGVFNVPDNISRIRVQFESLVNVSHDTYSGHRLLKGPNNFGGGVVADVSVNTGAYLKVSPAQTEYQANSTSATSPNVNAKLNFSIENKGHSSSNKTQYKVVLPEGATFVTAENATGSFNEDTRELTLSINPIDAGTTRDVSYTVSLPTSVPIKKDFNANLIYQTEGINMNRKNGSRDLATQTPGDNNYLRYGGNNEFIIAESDQRQGTTNAPTQSVTVFMYKDAINNKISEIETELAQANQNDYSVEAWNNLQTALTNAKVVKNETDATPITDRKNQAEINNLLLNLEKAKAKFDVDKAAKARENVINNNTEATTEEKQVALTKLQNKYNEKKGEIDNLISSSDIAPLKESSIAQINSINVRATKKAAAKQAIEAALTDRKVFIDSHYDATQEEKDVAMAKVTEEANKAKALIDQSTSNNDVDQAQTNGINIINSIDADVIKKANAKKAIEQAAEAKKALINQNSDATQEEKDAAIQRVTDEVRNADRLIDQSTNNDGVDEVQAHSISSINNIQPEIVKKSDAKQAIDTAVLNQKSLVNNNNEATQEEKDVALAKIDEAAKQAKAAIDAATTNNAVDEATNNNTTIISGILPDTVKKAAARKAIDDAATAKKEAINNTSDATQEEKDAAIAKVDAAVTAAKQAITQATTNDNVDQEQNSGTSTITGIQPEVTKKAAARKAIDDEVVAKKAAIDTVADATDEEKQAAKDKVDAEATKAKAAIDQATTNNDVEQAKSSGVTTIEGIQPDTIKKSSAKQAIDDSANAKKAAIDNNSDATQEEKDVAKAKVDVEAAKAKTAIDQATTNDGVDQTRDLGNNSISVIQPDIVKKAAARKAIDDAATAKKQEIDQHPTATQEEKDAAKAKVDAEVQKAKDAITQANSNNDVDQVQNSETATIAGIQVDAVKKANAKQAIDDAAAKKNEIDQHPTATQEEKDAAKAKVDEEVAKAKRAIDSSTTNDAVDQAKDSGVTTINNIQPESIEKIKAKQAIDDTVTAKKNAIDQDGTTTQEEKDAAKAKVDEEATKAKQLIDQASTNDAVHETRDNEITAINKIQPEAIKKAESKQAIDDAATAKKAAIDQVSDATQEEKDAAKAKVDEEVTKAKSAIDKANTNNDVDQAKTNGTTIISSIEPEAIKKAEAKQAIDVAVSAKKQEIDNNENAIQEEKDAAKTKVDEEATKAKAAIDQASTNNGVDQAKTSGETTISSIQPEVVKKAEAKQAIDDAVTAKKAEIDQNQEATKEEKDAAKAKVDEEATKAKNNIDQSTTNNDVDQAKTDGASAITKIQPDVVKKSEAKRAIDDEVIAKKAEIDQNQEATKEEKDAAKAKVDEEATKAKQSIDNATTNEAVDQAKTQGVTTITAIQPDTIKKAEAKRAIDEVAKAKKQEIDNNTNATKEEKDVAKSKVDEEVTKAKSAIDQATTNDQVDQGNNNGHTAIAPIQPETIKKPEAKQAIDEVAKAKKDLIDQTPNATKEEKDAAKSKVDEEVTKEKKEIDQASTNSDVDQVKDKGTNGINSVVVEVVKKDAAKKAIDELVKAKKSEIDNNHNATREEKDSAKSKVDEEAKKAKDNIDKGATNNDVDQAKNSSSNIIKKIQPDTTKKTVVKQTLL

SEQ ID NO: 71691 - protein, 198 aa, Staphylococcus haemolyticus
MNLFYNKDGVGDVAFLQIEPTDGPFEYKKQGDIVEISKEGTIVGFNIFEFSRYNKISGNGHIKLTSELVDAVQKAINKSGLDYQLNADLSPKFVVGYVETKEKHPDADKLSVLKVNVGNEHLQIVCGAPNVEAGQKVVVAKVGAVMPSGMVIKDAELRGVASSGMICSMKELNLPNAPQEKGIMVLSNDYEIGQAFFD

SEQ ID NO: 71692 - protein, 1297 aa, Staphylococcus haemolyticus
MSWFDDLFSNKENSDEELLRRKSKRRNGDLTQNKDDSLLPENNDIYDRPRGKFRFPIDVGQDENYEEAIYRDSNDDIGSYRPHSSNDHSSYDSFDYEGHTNQSNNYAKYDSSEDSRRRRRRNHINQDDTGIPSIKSRSPKSSNKYIDTRESQRFNKHQNNYSSTNVSNYSKANSNHQSRVKLQSERFKSNYHLSSEPTYHRSSFKTSEVPSAIFGTKKRRPIENGVIPPVKDDEDSKESITKYSSSTVEHVPHESNHAIADNSNKEDTKRSSQLDSSITIENESTIESSSNTSNNNERTPNYSKRDNTVNIENIYASQIVEEIRKERERKVQQKRKFKEALQNKRQQTDEEDSIQRAIDEMYAKQAEQYTGESSLNQGDNVSNKSNESEIDKSKHSYHSKDKSLADEHNRLVQNQTDEQTNSDNVDNQTEVSNESLEPYNYEEIDLNQVSSVQQVRQDDVQVKDVLEEQSSKINNNKVESYSNEKFDDYLEDTNSHEEMLHDDDLHEQVMDDDENEGISNKTTDENNDEKIDDANYREINESESLMQDKANDLKFNDEVNNSENQQNSSENNINNAVRNAVSSDIEYATNEDEENDERLAQDTNKEDQKLSQSEDIQHESLNNEDVSLTSNKTDDSEHLEKDSLNEDKKAEPSFNKTNKAPQKMSIKPGSKPFNVVMTPSDKKRVMDAKKNSVSRNKVNVPELKPETKKEAQDEKMNAEFDNHLNESQLNSDESSDFNVASLEYNESSEHSVEKDNIINDENTRENEHQDVDNSQNNDMPKGNQFSKVQNSNNQNDNKHDINEFVSKEGYSEVTSTKNHKDGDDANHKAPIRRGPNIKLPSLDLLEDHEEHEIDESWIEEKKQELNDAFYYFNVPAEVQNVTEGPSVTRFELAVEKGVKVSRITALQDDIKMALAAKDIRIEAPIPGTSLVGIEVPNLNPTKVNLKSILESPKFKNAESKLTVAMGNRINNEPLLMDIAKTPHALIAGATGSGKSVCINSILMSLLYKNHPEELRLLLIDPKMVELAPYNDLPHLVSPVITDVKAATQSLKWAVDEMEKRYKLFAQFHVRNITAFNKKAPYEQRMPKIVIVIDELADLMMMAPQEVEQSIARIAQKARACGIHMLVATQRPSVNVITGLIKSNIPTRIAFMVSSSVDSRTILDSGGAERLLGYGDMLYLGSGMNKPIRVQGTFVSDDEIDDVVDFIKDQREPDYLFEEKELLKKNQTQAQDELFDDVCEFMVKEGHISTSLIQRHFQIGYNRAARIVDQLEQLDYISGANGSKPRDVFITEADLKKE

SEQ ID NO: 71693 - protein, 675 aa, Staphylococcus haemolyticus
MGKIKELQTSLANKIAAGEVVERPSSVVKELLENAIDAKSTEINIEVEQSGISSIRVVDNGTGIEQDDLDLVFHRHATSKLDADDDLFHIRTLGFRGEALASISSVAKVTLKTCTDSENGHEIYAENGEILSRKPAKAKKGTDITVSSLFYNTPARLKYIKSLYTELGKITDIVNRMAMSHPYIRISLISDGKTLLKTNGSGKTNEVMSEIYGIKVAKDLVHIQGDTSDYHLEGFVAKPEHSRSNKHYISIFINGRYIKNFVLNKAIIEGYHTLLTIGRYPICYLNIEMDPILVDVNVHPTKLEVRLSKEEQLYQLIVEKIRYAFKDRILIPQNDLDRTPKKNKVLNQFEQQKLDFERRQQNSNQDKTNSHYYGMSESKLQNPNLEKNDLDNNELINESTENFVHNNKRSDDKDYFQIQKEILNDLDNGDASLLNDESTNDSEEVVTEQSNNDEASSKTYQTLYSKQDNNDIKGKVSNTPSRRVPYMEVVGQVHGTYIIAQNENGMFMIDQHAAQERIKYEYFREKIGEVTNEVQDLLIPLTFHFSKDEQMIIDQYQDELDKVGVHLEHFGGHDYIVNSYPVWFPKAEAEEIIQDMVELVLNDKKVNVKKMREDAAIMMSCKKSIKANHYLKNNEMADLIDQLREAEDPFTCPHGRPIIINFSNYELEKLFKRVM

SEQ ID NO: 71694 - protein, 139 aa, Staphylococcus haemolyticus
MIQQLYPSVAHPYSFELNKDFNFSAAHYIPSEDAGKCMRTHGHTYFVNLTIAGDKLDHNGFLINFSDLKKLIHDQFDHYLLNDLPQFKDKSPSTEVVAQTIYKMVQTHLQNCDNQPECVQVYLRETPTSYVVYRPKEYK

SEQ ID NO: 71695 - protein, 203 aa, Staphylococcus haemolyticus
MSAFITFEGPEGSGKTTVLQRVSEKLAQDYQLIATREPGGVPTGEEIRKVVLEGANMDIRTEAMLFAASRREHLVEKVVPALNDNKIVLCDRYIDSSLAYQGYARGIGIEEVKQLNDFAINGLYPDLTIYLDITAEVGRDRILKNQRDQNRLDKEDIAFHEKVIEGYRQIIQETPQRFAVVDATRNIDDVVNETYEIILNFLK

SEQ ID NO: 71696 - protein, 308 aa, Staphylococcus haemolyticus
MDEQQKLANAYHSNKLSHAYLFEGDDAQSMKHVAMEFAKLILCNGNQQCEMKVGTFNQPDFMYVSSEENSIKKEQIEQLVHRMNQLPIEGTHKVYIIEDFEKLTVQGENSILKFLEEPPENTIAILLSTKPEQILDTIHSRCQHVYFKPSDKQDFIDRLVDEDINRAVAEMLSTYTTQLETAIDLNEEHDLVTLRKVILHWCDLLLTNKPMALIGIIDLLKNAKNRKLQLLTLAAVNAFFEDIMHAKIGIERDFTYTDLKGNIEKYANQLSLNKVMTMYDQITEAHKKLMQNVNPTLVFEQIVIKGVS

SEQ ID NO: 71697 - protein, 241 aa, Staphylococcus haemolyticus
  MISC_FEATURE (203)..(203): X=any amino acid
MTNVEVAATVAPNQLLDTVTLDNIKEYSDDIDIIELRIDQWEDRHLELLKSNLERLQELNINVNVLVTYRTVSQGGKGEMKYEAYMTLLKEIIKNHHCQMIDIEWDSDFDVFAHRDLINLAHRYNKQVVISYHNFQETPDIDILKFTYYKMNQLNPDYVKIAVMPQDKEDVATLLEAVATSADTLDAKVIGISMSKVGLVSRXAQGVFGGTVSYGCLGEPQAPGQIHVKTLKQQLLFYSNH

SEQ ID NO: 71698 - protein, 134 aa, Staphylococcus haemolyticus
RGEEKTLGTVNGDIISEQISIPAPLGGNGVGTNPDELLVSAASSCYIISLAATLERAKFTDINLINNSVGTALFENGKFKMVTITHYPKISVTAEDKENLEKRLPKLLEIADNNCMISNSIRNNVEIKIQASIQ

SEQ ID NO: 71699 - protein, 253 aa, Staphylococcus haemolyticus
  MISC_FEATURE (246)..(246): X=any amino acid
MPAVTYEHIKTCKQSGARLGIVHTPHGSFETPMFMPVGTKATVKTMSPEELRQIEAKIILGNTYHLWLQPGNDIIKQVGGLHNFMNWDGPILTDSGGFQVFSLSNLRKITEEGVEFRHHTNGLKLFLSPEKSMEIQNDLGSDIMMAFDECPPMPSEYKYVKDSIERTTRWAERCLNAHKRPEDQALFGIIQGGEYKDLREQSAKELVALDFPGYAIGGMSVREPKPVMYEMVEHTVQICPDDKPRXLMGVGPP

SEQ ID NO: 71700 - protein, 465 aa, Staphylococcus haemolyticus
  MISC_FEATURE (11)..(11): X=any amino acid
GNARTALFNYXFAKHYDGDSVVRIEDTDSKRTLEDGESSQFDNLKWLRLDWDESIDKDKGYGPYRQSERGDIYNPLIQQLLDEDKAYKCYMTEEELEKEREDQIARGEMPRYGGQHAHLTEEERQQFEAEGRRPSIRFRVPQDQTYTFNDMVKGEISFDSNNIGDWVIVKKDGIPTYNFAVAIDDHYMEISDVIRGDDHVSNTPKQLMIYEAFGWEAPRFGHMSLIVNEERKKLSKRDGQILQFIEQYRDLGYLPEALFNFITLLGWSPEGEEEIFSKEEFIKIFDEKRLSKSPAMFDRQKLAWVNNQYMKTKDTDTVFELALPHLIKANLIPESPSEDDKEWGRKLVALYQKEMSYAGEIIPLSEMFFHEMPELGEEEQEVINGEQVPELMTHLYGKLEALEPFEAADIKKTIKEVQKETGIKGKQLFMPIRVAVTGQMHGPELPNTIEVLGKDKVLSRLKKFV

SEQ ID NO: 71701 - protein, 213 aa, Staphylococcus haemolyticus
MIKRMRDDVKMVFEQDPAARTTFEVITTYAGLHAVWSHLIAHKLYNKKRYVLARIISQVSRFFTGIEIHPGAKIGKRLFIDHGMGVVIGETCTIGDNVTIYQGVTLGGTGKEKGKRHPDIGDNVLIAAGSKVLGNIQIDSNVNIGANSVVLQSVPSYTTVVGIPGHIVKQEGKRIGKTFDHRNLPDPLYEQIKQLEKQLEKAKNGEIKDDYII

SEQ ID NO: 71702 - protein, 466 aa, Staphylococcus haemolyticus
MITLYNTLTRQKETFEPIEPGKVKMYVCGPTVYNYIHIGNARPAINYDVVRRYFEYKGYEVIYVSNFTDVDDKLINRSKELNESVPDIADRYIKAFYEDVGALNVKKATSNPRVMNHMDEIIDFIKELVDEGYAYESDGDVYFRTRKFEGYGKLSHQSLDDLKVGARIEAGEQKEDALDFTLWKKAKPGEISWESPFGEGRPGWHIECSVMAFHELGKTIDIHAGGSDLQFPHHENEIAQSEAHNHAPFANYWMHNGFINIDNEKMSKSLGNFILVHDIIKEVDPDVLRFFMISVHYRSPINYNLELVNAAKSGLERIRNSYQLIEERETIATDIVDQSKYIEQIDAIIEQFETVMDDDFNTANAVTAWYDLSKLANKYVLENNTSTQVISRFKEVYQIFSDVLGVPLKGNKSDMLLDEDIEKLIEERNEARKNKDFARADEIRDMLKEQNIILEDTPQGVRFKRG

SEQ ID NO: 71703 - protein, 175 aa, Staphylococcus haemolyticus
MKDKYLIIDGYNMIGQSPELGKIAKDNLQEAREQLLDAIANYNAVVADEIVCVFDAYEQSGIEREYIYHGVKTVFTKEKETADSYIERYVYNLYNKHTTHITVVTSDMSEQHAIFGAGAYRVSSREMWRDLRENEITVSKSLDDFTESKPRTRISLSNDVLAEFEKIRRGNHNKD

SEQ ID NO: 71704 - protein, 73 aa, Staphylococcus haemolyticus
MSMEVILMAKDKGTNKEKDSFFQGVKSEMEKTSWPTKEELFKYTVIVVSTVIFFMVFFWVLDIGIGNLIELFR

SEQ ID NO: 71705 - protein, 182 aa, Staphylococcus haemolyticus
MSEEVGAKRWYAVHTYSGYENKVKKNLEKRVESMNMTEQIFRVVIPEEEETQVKDGKAKKQLKKTFPGYVLVELVMTDESWYVVRNTPGVTGFVGSAGAGSKPNPLLPEEMRFILKQMGLKEKTIDVELDVGEQVRIKSGPFANQVGEVQEIEPDKFKLTVLVDMFGRETPVEVEFDQIEKL

SEQ ID NO: 71706 - protein, 141 aa, Staphylococcus haemolyticus
MAKKVEKVVKLQIPAGKANPAPPVGPALGQAGVNIMGFCKEFNARTQEQAGLIIPVEISVYEDRSFTFITKTPPAPVLLKKAAGVEKGSGEPNKTKVATVTKDQVREIAQTKMQDLNAADEEAAMRIIEGTARSMGITVHN

SEQ ID NO: 71707 - protein, 231 aa, Staphylococcus haemolyticus
MAKKGKKYQEAANKVDRTKHYSVEEAISLAKETSIANFDASVEVAFRLGIDTRKNDQQIRGAVVLPNGTGKSQRVLVFAKGDKITEAEEAGADYVGESEYVQKIQQGWFDFDVVVATPDMMGEVGKLGRVLGPKGLMPNPKTGTVTMDVKKAVEEIKAGKVEYRAEKAGIVHASIGKVSFSDEKLVENFKTLQDVLAKAKPSSAKGTYFKSVAVTTTMGPGVKIDTSSFKL

SEQ ID NO: 71708 - protein, 944 aa, Staphylococcus haemolyticus
MKGPSIIVKGARAHNLKDVDIELPKNKLIVMTGLSGSGKSSLAFDTIYAEGQRRYVESLSAYARQFLGQMDKPDVDTIEGLSPAISIDQKTTSKNPRSTVATVTEIYDYIRLLYARIGKPYCPNHNIEIESQTVQQMVDRILELEERTKIQILAPVVSHRKGSHEKLIADIGKKGYVRLRVDGDIVDVNEVPELDKNKNHTIEVVVDRLVVKDGIETRLADSIETGLELADGNITVDVIDGEDLKFSENHACPICGFSIGELEPRMFSFNSPFGACPTCDGLGQRLTVDLDLVVPDPNKTLNEGAIEPWEPTSSDFYPTLLKRVCEVYKINMDKPYKKLTDRQKNILMNGSGDKEIDFSFHSRNGGTRHRRMKFEGVVANIDRRYHESPSEYTREVMSKYMTELPCETCHGKRLSKEALSVYVGGYNIGEVVEYSIKNALNYYENIELSEQDRAIANQILKEIISRLSFLNNVGLEYLTLNRASGTLSGGEAQRIRLATQIGSRLTGVLYVLDEPSIGLHQRDNDRLISTLKEMRDLGNTLIVVEHDDDTMRAADYLVDVGPGAGNHGGEIVSSGTPSKVMKDKKSLTGQYLSGKKRIDVPEHRREVTDRKISIKGARSNNLKGVDVDIPLSVMTVVTGVSGSGKSSLVNEVLYKSLAQKINKSKVKPGAFDSIEGIDQLDKIIEIDQSPIGRTPRSNPATYTGVFDDIRDVFAQTNEAKIRGYQKGRFSFNVKGGRCEACKGDGIIKIEMHFLPDVYVPCEVCDGKRYNRETLEVTYKGKNIAEVLEMTVEEATYFFENIPKIHRKLQTLVDVGLGYITLGQQATTLSGGEAQRVKLASELHKRSTGRSIYILDEPTTGLHVDDISRLLKVLNRLVENGDTVVIIEHNLDVIKTADHIIDLGPEGGDGGGTLVATGTPEEIANVESSYTGKYLKTVLERDKVE

SEQ ID NO: 71709 - protein, 311 aa, Staphylococcus haemolyticus
MLTTEKLVKLLKLELFTGEKGLHKPIKNTDISRPGLEMAGYFSHYAADRIQLLGTTELSFYNLLPDEERHGRMRKLCRPETPAIIVTRGLEPPQELIDAAQEMDTPLIVSKDATTSLMSRLTTFLEHELAKTTSLHGVLVDVYGVGVLITGDSGIGKSETALELVKRGHRLVADDNVEIREITKDELIGTPPKLIEHLLEIRGLGIINVMTLFGAGSILTQKQIRLNINLENWDKDKLYDRVGLNEETLQILDTEITKKTIPVRPGRNVAVIIEVAAMNYRLNIMGINTAEEFNQRLNEEILKKGHQSKEN

SEQ ID NO: 71710 - protein, 891 aa, Staphylococcus haemolyticus
  MISC_FEATURE (560)..(560): X=any amino acid
VTLDGTDYLVEPGTSLLEVYKSRDTFVPSICYNESMGPIQTCDTCMVEIDGKIERACSTVVNRPMTVNTQNNDVKASQKEALDRILEKHMLYCTVCDYNNGDCEIHNAMDAWGLEEQSYEYKTKPYEKDYGPFYRYDPDQCILCGRCVEACQDIEVNETISIDWNREHPRVIWDNDVPINESSCVSCGQCATVCPCNAMMEVNMEGNAGYMTDTEPGSLAAMIDLTKKAEPGDGLLFAVSDSEAEMRKERIKKTKTVCTYCGVGCSFDVWTKDREVLKVQPSHDSPANKIATCVKGKFSWGHINSDQRLTKPLVRKDGEFHEVEWDEALDVIETNFKRIKNEYGGDHLAFIASSKGTNEESYLMQKLSRQVFGSNNVDNCSRYCQAPATKGLFRTVGHGGDSGSIEDLERAAMTVLIGTNTAEAHPVIASRMKRAQKLFGQKMHVFDIRKHEMAARADAFYQPKPGTDLVWLGAATKYIIDNDLHDKAFLNDWVDNYEDYYKSLELFTMDFAEETTGIPKEQIISFAEEAAKAESMSICWAMGVTQQDIGSDTSTAISNXLLVTGNYRKPGSGAYPLRGHNNVQGASDMGSMPDQFPGYQKVADDEVRAKFEKEYGVELNPTPGRDNHQMMEGIHNGDIQSLYLYGEDTGIVDSNINFVQSALEKVDFLVVQDEFLTFTATYADVVLPASPSLEKDGTFTNTERRIQRINKALQPLGDSKPDWEIFQLIAQRMGADWNYKHPSEIMDEIAGLTPSYSGVNYERLQGFNSLQWPVAPDGTDQPTLYMDGFNFENGRAKLFPLTFDNFFKEDEVYDLHVNNGRLLEHFHEGNMTYQTEMIKYKVPNAFVEISPELAKDRDIHEGAELRLISETGEATLIATVTDRVKGREIYI

SEQ ID NO: 71711 - protein, 157 aa, Staphylococcus haemolyticus
MAERITKIKRLEKSEEQIKIESINEVTDAIAENKDSILKAIRLVKALDEAKILDLMNGGIRGRQVIINKFMTELNKDLYAGLITNLAPMVFMLGELNVQELSQFLNKLNKGLHVANQANPNAKTSIRSLMGVLKDDDMNRSLTYILNLLKGMSREDK

SEQ ID NO: 71712 - protein, 182 aa, Staphylococcus haemolyticus
MTIEPKGKYMESRGIFLYINHNTRTTKGYYYVRKTTDDSKGRLKDDEKRYPVKMEHNQIIPTKPIPNDKLKKEIENFKFFVQYANFKDINDYKNGDISYNPNIPSYSAKYQLNNNDYNVKQLRKRYDIPTNQAPKLLLKGDGDLKGSSVGSKNLEFTFVENKEEDIFFTDAVQFTPSEDDES

SEQ ID NO: 71713 - protein, 272 aa, Staphylococcus haemolyticus
MKNLAKLVEMKQDKTKISMITAYDFPSAKQAQDANIDMILVGDSLGMTVLGYETTTQVTLEDMIHHGKAVRRGADDTFVVVDLPIGTVGVSDEHDLKNAITLYQETNANALKAEGAHLVNFIKKSTQIGIPIVAHLGLMPQSVGVMGYRLQGSTKDAAEQLIQEAHAVQEAGAVALVLEAIPSDLAGLISEQLDIPVIGIGAGKDTDGQVLVYHDMLNYGVDRYAKFVKQFGDFSVGIDAIKHYDEEVKAGTFPAEAHTYKKKILNEVNSND

SEQ ID NO: 71714 - protein, 496 aa, Staphylococcus haemolyticus
MELVEKLSNRQYIDGEWVESSNKNTRDIINPYNQEVIFTVAEGTAEDAERAILAARRAFEDAEWSLETSEVRGKKVRAIADKITENRDELAKLETLDTGKTLEESYADMDDIANVFTYFAGLADKDGGEMINSPIPNTESKVVKEPVGVVTQITPWNYPLLQASWKIAPALATGCSLVMKPSEITPLTTIRVFELMEEVGFPKGVINLVLSSGEEIGDTLSGHEEVDLVSFTGGIETGKHIMKNAANHVTNIALELGGKNPNIIFDDADFEVAVDQALNGGYFHAGQVCSAGSRILVHNDIKADFEKALIDRVGKIKLGNGFDDDTEMGPVISTEHRNKIEGYMEIAKEEGATIAIGGKRPEREDLQAGLFFEPTVITDCDTSMRIVQEEVFGPVVTIEGFDSEEEAIKLANDSIYGLAGAVFTKDIGKAQRVANKLKLGTVWINDFHPYFAQAPWGGYKQSGIGRELGKEGLEEYLTSKHILTNTNPEPVNFFSK

SEQ ID NO: 71715 - protein, 568 aa, Staphylococcus haemolyticus
MSKKNSYDYVIIGGGSAGSVLGNRLTEDKDKEVLVLEAGRSDYPWDLFIQMPAALMFPSGNRFYDWIYQTEEEPHMGRKVDHARGKVLGGSSSINGMIYQRGNPMDYEGWAEPEGMESWDFAHCLPYFKRLEKTYGATPFDQFRGHHGPIKLKRGPATNPLFKSFFDAGVEAGYHKTKDVNGYRQEGFGPFDSQVHNGRRVSASRAYLHPAMKRKNLTVKTRAFVTKIHFDGNKATGVTFKRNGRYHTVDAGEVILSGGAFNTPQLLQLSGIGDAEFLKSKGIEPRMHLPGVGENFEDHLEVYIQHECKEPVSLQPSLDVKRMPWIGLQWIFARKGAAASNHFEGGAFVRSNNQVAYPNLMFHFLPIAVRYDGQKAPVAHGYQVHVGPMYSNSRGSLKIKSKDPFEKPSIVFNYLSTKEDEQEWVEAIRVARNILAQKAMDPFNGGEISPGPSVQTDEEILDWVRRDGETALHPSCSAKMGPASDPMSVVDPLTMKVHGMENLRVVDASAMPRTTNGNIHAPVLMLAEKAADIIRGKKPLEPQYVDYYKHGVSDENAGAMEFDPYYQH

SEQ ID NO: 71716 - protein, 553 aa, Staphylococcus haemolyticus
MNIIEKVKSTLIEEIKASIEKANLAEDIPEIKVEIPKDTKNGDYSTNIAMVLTKIAKRNPREIAQAIVDNLDTSKANVKQVDIAGPGFINFYLDNQYLTTVIPEAINKGDKFGYAEESKNTNILLEYVSANPTGDLHIGHARNAAVGDSLANILIAAGYNVTREYYINDAGNQITNLARSIETRFFEALGDTSHEMPADGYNGKDIIEIGKDLADKHPEMKDYSDEERLKTFRKLGVDYEMDKLKKDLADFNVHFDNWFSETSLYENGAIDNTLAKMNELGYTYEADGATWLRTSDFKDDKDRVLIKKDGNYTYFTPDTAYHYNKINRGNDILIDLMGADHHGYINRLKASLETFGVDSDRLEIQIMQMVRLMQDGVEVKMSKRTGNAITLREIMDEVGIDAARYFLTMRSPDSHFDFDLELAKEKSQDNPIYYAQYAHARICSILKQAKEQGVEVTADADFSTITNEKAIDLLKKVAEFEPTIESAAESRAPHRLTNYIQDLASAFHKFYNAEKVLTDDAEKTKAHVALVDAVRITLHNALSLVGVSAPETM

SEQ ID NO: 71717 - protein, 227 aa, Staphylococcus haemolyticus
MRVLLCEEWSESMPTLTTEALYKILLDNMGPQHWWPAKSPEEMMLGAILVQNTNWKNADMALMRLREETQFDPQKILSLPLAELQEIIRSSGFYKNKGKAIHALFQWLNQFNFDYENIAQHYGDNLRRELLKIRGIGSETADVLLVYIFEGIEFIPDSYTRRLYSKLGYAHTESYDKFKKQISLPPHFTNQDANEFHALLDNFGKNYFNGKGTQKYTFLEDYFNKND

SEQ ID NO: 71718 - protein, 259 aa, Staphylococcus haemolyticus
MENKIMLNHGYFTPNEVSKVTSVSTRTLRYYHEIGLLVPSYIDTNGYRYYHSQDITKLQTILFLRQLNLSLENIQDYFQQSITDKNAILEENYAQIIHQRNHLNQIIDYLNHHLINHRNEEINMDKFNQFDVNEQYDKEAALKYGDTDYYQSYKDNRTQFNDSEKQDNDDHTNEQFNQFFNEMNQLLEDGYSADDAYTYQNIETLKKILQRQVPNADNQFLNYMALTYENDERFAKNINKGRNDNLNKFIADAIQAYIK

SEQ ID NO: 71719 - protein, 303 aa, Staphylococcus haemolyticus
MNVLNKKLWILLSLVMLILVACGQNDQHKQEDKQSNQSDSNSKEHSYKRIVSLMPSNTEILYELGLGKDIVGVSTVDDYPKDVKKGKKQFDTMNLNKEALLKVKPDLILAHESQKGTSKKVLDSLEKNGVKVVYVKDAQSLDQTYETFKQIGKVTGREHEANELVDETKHNVEKVIKSVPRHHRSQSVFMEVSSKPEIYTAGKHTFFDDMLAQLDAKNSFSNIEGWKPVDKESIIKKNPDILISTEGLSKSDYYKVIKKRDGFRQIKAVKNGRIETVNGDEISRPGPRIDEGLKQLRDAIYKR

SEQ ID NO: 71720 - protein, 283 aa, Staphylococcus haemolyticus
MKSYYQYYRFILNKEEIHKMDLFTRKGGLSLHYNTMGEGYPVVLVHTAYENASIFQNLAKELAKSFQVVLLDLRGHGYSDKPRQIDFKEFADDIIQLLDYLYIDESALIGHEMGAAIIADLAERYPNYVSSLIMVTPTSIEGELPEERLFRKYSHKIRNWDDEKQNKFLEKHRYYKPRKVDKFLKHVEDTNVISTKEETQAIEDVFKETAISSIFKHVTKPTLIIAGEHGERITTLESKEVADLVKESQFDVYAQSSLYPFEEEKDKFIKDVTPFIKKYMPEH

SEQ ID NO: 71721 - protein, 264 aa, Staphylococcus haemolyticus
MNIKHFMAVIVTLVIILAGCSNSGSNDSGNKSSDSNKKDNDKKQELQISAAASLGDVSKALEKEFKKDHKNVDVSFNYGGSGALRQQIEKGAPADVFMSANTKDVDMLKDKDKAHDTYKYAHNKLVLVGDKNSDKSSVKDLKDNEKLAIGEVKTVPAGKYAKQYLEDQGLYGEVKDNLVYAKDVKQVLNYVEKGNAEMGFVYETDLYTDKKKTDKVNEIKEAKLKKPITYEAGATSDKKLAKEWMDFLKSKKAKDILKEYHFEI

SEQ ID NO: 71722 - protein, 334 aa, Staphylococcus haemolyticus
MTSERYSRQTLFKGIGYEGQQKISQKHVLIVGMGALGTHVAEGLVRAGIKTLSIVDRDYIEFSNLQRQTLFTEEDANTMLPKVVAAERHLKALRHDLKLNTFITHVDYYFLDKYAKHVDLIIDATDNFETRQLINDFAFKEKVPWIYGGVVQSTYIEAAFIPGETPCFNCLMPQLPAINLTCDTVGVIQPAVTMTTSFQLRDAFKLLTEQSVPTKLTYGDIWDGQHFTFGFSRMFRKECPTCGSNPSFPYLNKQHTLYATLCGRDTVQYDNDKISQEMVREFLKQHHLNYRENKYMIMFEYKGHRIVSFEGGRMLIHGTTKTLDAIHLINQLFG

SEQ ID NO: 71723 - protein, 171 aa, Staphylococcus haemolyticus
MELMHQHDHAKVDRMIQCAVLTVSDTRDKETDKGGQLVQTLIQDINVEVLNSNYAIVKDDKVAIQSQIEQWLASDIDVIITTGGTGIAQRDVTIEAVKPLLDKEIEGFGELFRYLSYTEDVGTKALLSRAVAGSVKNKLIYTLPGSTGAVKLAIEKLIKPELNHMLHELNK

SEQ ID NO: 71724 - protein, 419 aa, Staphylococcus haemolyticus
MSVEKRNPIPVKEAINRVVQQDIYLNTAEVKLEDSLGYVLAEDIVATYDIPRFNKSPYDGFAIRSKDSAGAYSENRKQFKVIDHIGAGSVSEKILGQNEAVRIMTGAQIPEGADAVVMFEQTVEDGDTFTIRKSFEANENVSLKGEETTTGDIVLKKGQVINPGAIAVLATYGYSKVPVTQRPSIAVIATGSELLDVDDELQPGKIRNSNGPMIKALSEKAGLNVEAYKIQQDDLQSSISVVKDAMSKHDIVITTGGVSVGDFDYLPEIYKAVNAEVLFNKVAMRPGSVTTVAVANGQYLFGLSGNPSACFTGFELFVKPAIQHMMGATAYYPQVVKATLMEDFTKANPFTRFIRASATFSQSGATVVPSGFNKSGAVVAIAHSNSMIMLPGGTRGFKAGHTVNVILTESNVYETEMTL

SEQ ID NO: 71725 - protein, 340 aa, Staphylococcus haemolyticus
MVAQIKDKLGRPIRDLRISVTDRCNFRCDYCMPKEIFGDDYVFLPKDELLTFEEMVRIAKVYAELGVKKLRITGGEPLLRRNLYQLIAELNQIDGIEDIGMTTNGLLLKKHGQKLYDAGLRRINVSLDAIDNEVFQAINNRNIKATTILDQIDYAVSIGFHVKVNVVIQKGINDDQIIPMVDYFKDKNIEIRFIEFMDVGNDNGWDFSKVVTKNEMLDMIESHFDIEPVPPKYFGEVAKYYKHKDNGAQFGLITSVSASFCSTCTRARLSSDGKFYGCLFSTVEGFNIKSFIRSGVTDDELREQLITLWNVRDDRYSDERTEQTVKNRQRKKINMNYIGG

SEQ ID NO: 71726 - protein, 443 aa, Staphylococcus haemolyticus
MTHIQLDYGKALEFFGQHEIDQQQDIVKTIHKTIHEGTGAGSDFLGWVNLPEDYDKKEFSRIVEASKRIKSNSDVLVVIGIGGSYLGARAAIEMLTSSFRNSNEYPEIVFVGNHLSSTYTKELVDYLSDKDFSVNVISKSGTTTEPAVAFRLFKQLVEDKYGKAEAKKRIFATTDKAKGALKQLADNEGYETFVVPDDVGGRYSVLTAVGLLPIATAGINIESIMIGANKARKELSSDKLDENIAYQYATIRNILYSKGYTTEMLINYEPSMQYFNEWWKQLYGESEGKDFKGIYPSSANYTTDLHSLGQYVQEGRRFLFETVVKVNNPKHDITIEEDSDDLDGLNYLAGKTIDEVNTKAFEGTLLAHTDGGVPNVVVNIPRLDEETFGYVVYFFELACAMSGYQLGVNPFNQPGVEAYKQNMFALLGKPGFEDKKKELEERL

SEQ ID NO: 71727 - protein, 469 aa, Staphylococcus haemolyticus
MHIFMEVIVMSSKAWGGRFQQQPEDWVDEFNASIDFDQTLLDEDVQGSIAHATMLANQNIISQDDKDAIINGLKEIQQDFHNGKLAFKKSLEDIHLNIEHELIQRVGDAGGKLHTGRSRNDQVATDLHLYVKKEVLEIQDLIRSFQTSILKLAQSHVDTIMPGYTHLQRAQPISFAHHVMTYFWMLERDYSRFVDSMKRIDISPLGAAALSGTTHPIDRHETQQLLEFSSVYENSLDAVSDRDYIIETLHNISLTMIHLSRFAEEIIFWSTDEAKFITLSDAFSTGSSIMPQKKNPDMAELIRGKVGRATGHLMSMLVTLKGLPLAYNKDLQEDKEGLFDSVRTIKGSLRIFEGMLDTMTVNTDRLNETVHQDFSNATELADYLVAKDVPFRKAHEIVGKIVFECIQQGIYLLDVPLERYKELNSNIDQDVYDYLKPENCLSRRKSYGSTGQDAVRHQLKVAEKLLNND

SEQ ID NO: 71728 - protein, 323 aa, Staphylococcus haemolyticus
MSLLKASNKGIISCLTVASLSLAIIHTPVEASGGESSNTTTTNLTNASKTQNNHTNWSRNLTGERHTTIAHRGASGYAPEHTFAAYDKSHNELGASYIEIDLQRTKDGHLVAMHDETVDRTTNGSGRVEDYTLAELKKLDAGSSFNEQNPQLAKDSYKGATVPTLDEILTRYGTDANYYIETKQPDVYPGMEQQLLDTLNRHNMLTSNSLENGHVLVQSFSEASLLKMHQLNSNVPLIRLLDKGELAQQSEADLQRIRSYAIGVGPEYSDLNAQNTAHLKDLGFLVHPFTVNETADMQRLNQYGVDGVFTNYADQYKAISSQK

SEQ ID NO: 71729 - protein, 416 aa, Staphylococcus haemolyticus
MIMTENNNLVTSTQSIIKEALHKLGFDDGMYDLIKEPLRFLQVRIPVRMDDGTVKTFTGYRAQHNDAVGPTKGGVRFHPEVDEEEVKALSMWMTLKCGIVNLPYGGGKGGIVCDPRQMSIHEVERLSRGYVRAISQFVGPTKDIPAPDVFTNSQIMAWMMDEYSALDKFNSPGFITGKPIVLGGSQGRDRSTALGVVIAIEQAAKRRGKEIKGSRVVIQGFGNAGSFLAKFLYDMGAKVVGISDAYGALHDPEGLDIDYLLDRRDSFGTVTNLFDNTISNKELFELDCDILVPAAISNQITEDNAHDIKADIIVEAANGPTTPEATRILTERGILLVPDVLASAGGVTVSYFEWVQNNQGYYWSEEEVNDKLREKLVDAFDTIYELAQNRKIDMRLAAYIVGIKRTAEAARYRGWA

SEQ ID NO: 71730 - protein, 396 aa, Staphylococcus haemolyticus
MTKSEQIIELTNHYGAQNYVPLPIVVAEAEGIWVTDPEGNKYMDMLSAYSAVNQGHRHPKIIQALKDQADKVTLVSRAFHSDNLGEWYEKVCKLSGKDKALPMNTGAEAVETALKAARRWAYDVKGLEPDKAEIIAFNGNFHGRTMAPVSLSSEAEYQRGYGPLLDGFRKVDFGDVDKLKEAINENTAAILVEPIQGEAGINIPPEGYLKAIRELCDEHNILFIADEIQAGLGRSGKLFATDWDNVKPDVYILGKALGGGALPISVVLADNEVLDVFTPGSHGSTFGGNPLACAVSIAALDVILDEDLPGRSHELGEYFKSELQKINHPAIKEVRGRGLFIGVELHENARPFCEALKEKGLLCKETHDTVIRFAPPLVISKEELDDALDRIRSVFN

SEQ ID NO: 71731 - protein, 299 aa, Staphylococcus haemolyticus
MKQFLITGGTGMVGSQLVNELKNRDVHITILTRSDKQSDDPKISYVNWSKDGWMSLVPDIDVVINLAGATLNKRWTPSYKQLIMTSRIQSTQALVDLFSDREHKPEVLFNASAMGYYPPSLYHTYTEKYQTHPFDFLSDVVYQWERFAKRFESFGTRVILGRFSMILSDDGGALQTMKLPYKFFVGGKLGSGFQWYSWIHINDLVRAILFTIDNPKAKGPFNMAAPIAERQNLFGYTLARVMHRPHETWVPSFLMRLALGEMSTVVLDTQKVLPNKLDALGFTFNYPNLKIAFEDLIDA

SEQ ID NO: 71732 - protein, 377 aa, Staphylococcus haemolyticus
MRRSNMSDPTLFDYSMIKGTVDAILFQNNDNFYTVIKVETIETNESFGNLPTVVGFFPNIVEGDVYTFKGQVVEHPRYGKQLKADTFEKEVPQTKDAIITYLSSDLFKGIGKKTAQNIVNTLGENAINDIMTDASVLEKVSNLPKKKQKQIADQINANQESEKIMIRLHDLGFGPKLSMAIYQFYQSETLNVLENNPYQLVYDIKGIGFNKADTLARNNGISFNDPERLKAGLLYTLEEECIKQGHTYLSLDYAIEVTLDMLMDAHSSDSIDSKQLENILELLNEEQKIIVNNERVAIPSLYYSELKSVQNLYRIKTYKHKLKEIEQSDLQIHIGDIETSNNVHYAPSQEEALQTAINSKIMLLTGGPGTGNNTVIK

SEQ ID NO: 71733 - protein, 337 aa, Staphylococcus haemolyticus
MKDLIKIQQKLIPDLIDKMYRRFSILTTISNNQPVGRRSLSEHMDITERVLRSETDMLKKQDLIQVKSTGMEITEEGKSVLNQLNEYFNIYTDDNQLADQIKSTFGIKEVHVIPGDADAQENVKSEMGRQAGQLLENILYEDAIVSVTGGSTMANVSRAMHLLPFNVFFVPARGGLGENVIYQANTISASMAQQTGGYYTTLYVPDNVSESTYNTLLMEPSVVHTLDKIKQANITIHGIGDALKMAYRRQSSEQVIESLQHHQAVAEAFGYYFDTQGNVVYKVKTIGLQLEDLETKDFIFAVAGGQSKGEAIKAYLSIAPKNTVLITDEAAAKVILN

SEQ ID NO: 71734 - protein, 335 aa, Staphylococcus haemolyticus
MAVKVAINGFGRIGRLAFRRIQDVEGIEVVAVNDLTDDEMLAHLLKYDTMQGRFTGEVEVVDGGFRVNGKEVKSYEEPDASKLPWGDLDIDVVLECTGFYTDKEKAEAHINAGAKKVLISAPAQGDVKTIVFNTNHNDLDGSETVVSGASCTTNSLAPVAKVLSDEFGLVEGLMTTIHAYTGDQMTQDGPHKKGDKRRARAAAQNIVPNSTGAAKAIGKVIPEIDGKLDGGAQRVPVATGSLTEVTVVLEKDVTVEDVNKAMKNASNESFGYTEDEIVSSDVVGMTYGSLFDATQTRVMSVGDRQLVKVAAWYDNEMSYTAQLVRTLEYLAELSK

SEQ ID NO: 71735 - protein, 396 aa, Staphylococcus haemolyticus
MAKKIVSDLDLKGKVVLERADFNVPLKDGKITNDNRIVQALPTIKYIIEQGGKLVLFSHLGKVKQESDKEGLTLKPVADALSEKLGKEVTFVPETRGEKLESAIKNLSEGDVLLVENTRFEDLDGKKESKNDSKLGKYWASLGDVFVNDAFGTAHREHASNVGISTHLETAAGYLMEKEIKFIGGVVNDPHKPVVAILGGAKVSDKIGVIKNLVNIADKILIGGGMAYTFLKAQGKEIGLSLLEEDKIDFAKELLESNGDQIVLPVDAKVAKEFSNDAEITEVSIDNIPSDQEAMDVGPKTVELFSKELEGAHTVVWNGPMGVFEFSNFAQGTIGVCKAIANLKDATTIIGGGDSAAAAISLGFEDDFTHISTGGGASLEYLEGIELPGIKAINDK

SEQ ID NO: 71736 - protein, 174 aa, Staphylococcus haemolyticus
MPIITDVYAREVLDSRGNPTVEVEVLTESGAFGRALVPSGASTGEHEAVELRDGDKSRYSGKGVTKAVENVNEIIAPEIVEGEFSVLDQVSIDKMMIQLDGTPNKGKLGANAILGVSIAVARAAADLLGQPLYKYLGGFNGKQLPVPMMNIVNGGSHSDAPIAFQEFMILPTGA

SEQ ID NO: 71737 - protein, 722 aa, Staphylococcus haemolyticus
MNKLSIIITYFNNEDYISECIHSLKSQRNQDFDIIVVDDGSTDRSTEILQEALKSYDKDVHFIQLQENTGHAHARNVALEQAHGQYVLFLDADDQLASYAVDYYLQHVNGLDTLIAPIHKFRSQRPQYVDKDKVRLQYASHQKSPNAILRKESACNILFKNAIIKAHQIQFNESLDIYADTSFVLEYLKYAERFVRITNFPFYYRGEVYDPFYGNTLSDQDFTNKFEDHVNSFFDAMQRTNDKRIKNFLIQRMKNEIKSGFDPALRDIKSRYVSLEDALIKIVKALKWNILKDGKVLYNLEILFLSMDDVENAKYVNDLRNKTRLVKNIVLNSKMKERSKYQLSDNEDLVDPNTIVFEAFGGKNYSDSPKYIYEYMQKHYPHLNYIWVFSKPENNNIPGNATKVKKGSQAYYDAYAKAKYWVTNARLPLYLNKKENQMYIQTWHGTPLKRLANDMKVVRMPGTTTANYKKNFYAEASRWDRLVSPNRYSSDIFKSAFWMDEDRIWEIGYPRNDVLVNRQNDTEYIEQIKRDLNLPADKKVIMYAPTWRDDEFVKKGQYLFDLKINLANLQKEIGDEYVILLRMHYLIANALDLHGYDDFAIDVSNYNDISELYLISDALITDYSSVMFDFGILKRPQFFFAYDIEKYDKGLRGFYMDYMNDLPGEIITDEFKLAEELKQIDQHKVKYQDKIEAFYNDFCSIENGKASQYIGDYIYNDIEKNS

SEQ ID NO: 71738 - protein, 265 aa, Staphylococcus haemolyticus
MNRLKAQQVEIGYGDHSIINNLDVEIPDGKVTSIIGPNGCGKSTLLKALSRLLTIKNGEIQLDGQNIHTQSTKEIAKKIAILPQTPEVADGLTVGELVSYGRFPHQKGFGRLSAEDKKEIDWALNVTGTSEFRHRSINDLSGGQRQRVWIAMALAQKTDIIFLDEPTTYLDISHQLEILELVQQLNKEQGCTIIMVLHDINQAIRFSDHLIAMKKGEIIACGATEDVLTKDILEKVFNIDVVLSTDPRTGKPLLVTYDLFERNYS

SEQ ID NO: 71739 - protein, 338 aa, Staphylococcus haemolyticus
MIHPKLRRKQIVTLVIFSILLLAACTWSVSSGEYKIPVDHFFKTLIGQGEYYDQLILMEFRFPRMLITILAGAALSLSGAIIQSVTKNPIAEPGILGINAGGGFAIALFISIGQINPDNFVYVLPVISVIGGVATAIVIFLFSVNKKDGITPSSMVLIGVGMQTALYGGSITLMSKFNEDQSEFIATWFAGNIWGDDWTFVIATIPWLIIIIPFLLYKSNVLNLINTHEHIAKGLGVKIEKERVVLFFIAVVLSSIAVAVAGAIAFIGLMGPHIAKSIIGPRHQLFLPISIIVGAFLLVLSDTIGKVILEPTGVPAGIVVAIIGAPYFIYLMYKSKSI

SEQ ID NO: 71740 - protein, 455 aa, Staphylococcus haemolyticus
  MISC_FEATURE (36)..(36): X=any amino acid
  MISC_FEATURE (56)..(56): X=any amino acid
ETITSISTPLGEGAIGIVRLSGPQAVEIGDKLYKGXKKLEDVDSHTINYGHIVDPXKNEVVEEVMISVLRAPRTFTRGHIEINCHGGILTINRILELTMTHGARMAEPGEYTKRAFLNGRIDLSQAEAVMDFIRSKTDRASKVAMNQIEGRLSDLIKRQRQSILEILAQVEVNIDYPEYDDVEDATTEFLLEQSKKIKNEINLLLETGAQGKIMREGLSTVIVGKPNVGKSSMLNNLIQDNKAIVTEVAGTTRDVLEEYVNVRGVPLRLVDTAGIRDTEDIVEKIGVERSRKALSEADLILFVLNNNEPLTQEDRTLYEVIKNEDAIVIVNKTDLEQNLDINEVKEMIGDTPLIQTSMLKQEGIDQLELQIRDLFFGGDVQNQDMTYVSNSRHISLLKQARNAIQDAIDAAESGIPMDMVQIDLTRTWELLGEIIGESASDELIDQLFSQFCLGK

SEQ ID NO: 71741 - protein, 625 aa, Staphylococcus haemolyticus
MVQEYDVIVIGAGHAGIEAGLASARRGAKTLMLTINLDNIAFMPCNPSVGGPAKGIVVREIDALGGQMAKAIDKTHIQMRMLNTGKGPAVRALRAQADKVLYQQEMKRVIEDEDNLDIMQGMVDELIIEDNEVKGVRTNIGTEYRAQAVVITTGTFLRGEIILGNMKYSSGPNHQLPSITLADNLRELGFEVVRFKTGTPPRVNAKTIDYSKTEIQPGDDVGRAFSFETTEYILDQLPCWLTYTNDRTHKVIDDNLHLSAMYSGMIKGTGPRYCPSIEDKFVRFNDKPRHQLFLEPEGRNTNEVYVQGLSTSLPEHVQRQMLETIPGLEKADMMRAGYAIEYDAIVPTQLWPTLETKMIKNLYTAGQINGTSGYEEAAGQGIMAGINAAGKVLGTGEKILSRSDAYIGVLIDDLVTKGTNEPYRLLTSRAEYRLLLRHDNADLRLTDVGYELGMISEERYARFNEKRQQIQDEIQRLTDIRIKPNEHTQSVIEANGGSRLKDGILAIDLLRRPEMTYNTILEILEESHQLPEAVEEQVEIQTKYEGYINKSLQQVEKVKRMEEKKIPEDLDYSKVDSLATEAREKLAEVKPLNIAQASRISGVNPADISILLVYLEQGKLQRVKN

SEQ ID NO: 71742 - protein, 240 aa, Staphylococcus haemolyticus
MNGIEWLAKELSEHGIELSDKQKEQFQTYYRLLVEWNEKMNLTSITDEHEVYLKHFYDSITPSFYYDFNQPLTICDVGAGAGFPSIPLKIVYPELKVTIVDSLNKRIQFLNHLAAELGLTQVSFVHDRAETFGKGVNRETYDVVTARAVARLTVLSELCLPLVKKGGQFIALKSSKGEEELEEAQFGISILGGVFSDSYTFDLPEDAGERQMIIIDKRRQTSKKYPRKPGTPNKSPLLEN

SEQ ID NO: 71743 - protein, 71 aa, Staphylococcus haemolyticus
MESVNVIKKHQKPTQLNPEGGILETEAAIHVSNVQLLDPKTNEPTRVGYKFVDGKKVRIAKKSGEEIKTNN

SEQ ID NO: 71744 - protein, 238 aa, Staphylococcus haemolyticus
MVANILVAHGMRKGDQNKALGEFLDRLLSDESYEYELAFIESEEKSIEKTIGRLIKQGETQFKVVPLLIFSAMHYIVDVPEILSNIKKDHPEISYEISEPLGTHDYMVDLVEKRIQDVEISTSSNYAIVLIAHGSFSYTKAHDELKEFSEKMNQPVPIYCRTLYGDITFRNDLDQLSNEYDELIVVPMFLYDGRLVNKVKRLISEMDIQGTLHITPSINFDNILKRIISERLKQLTFN

SEQ ID NO: 71745 - protein, 801 aa, Staphylococcus haemolyticus
KQKLVMIGNGMAGLRTIEEILERSDSQFDITIIGKEPYPNYNRIMLSNILQKKMTVEETIMNPYEWYEENNIQLIVNDPVETVDRSAQTVTTSKGVEVNYDICIFATGSSAFVLPIPGSDLPSVIGWRTIEDTERMIEIAKTKKKAVVIGGGLLGLECARGLMDQGMEVTVLHLAEWLMEMQLDRKAGGMLKADLERQGMNIELQANSKEIIGKDDVEAIKLADGRIIETDLVVMAVGIRPFTQVARDAGLEVNRGIVVNDYLQTSDPNIYAVGECSEHDGKVYGLVAPLYEQGKVLADYLTGKETEGYKGSTTFTSLKVSGCDLYSAGQIVENENVHGIEIFNSVDNIYKKVYLSDGQVVGAVLYGDTDDGSRFYNMMKKHESLEDYTLVSLLYKGGEEAVTSIADMPDDETICGCNGVDKGTIVNAITTKGLTSVEEVTKATKAGNSCGKCKGQIGELLQCTLGDDFVAAKPTGICACTDLTRDQIVTQIRAKGLKTSKEVRHVLDFKDKNGCPKCRPAINYYLNMVYPHDHQDEKESRFANERYHANIQNDGTFSVIPQMRGGVTDADQLIRLGEVAKKYNVPLVKVTGSQRVGLYGLKKEELPKVWEDLGMRSASAYGKKTRSVKSCVGKEFCRFGTQYTTRLGIRLEKTFEYIDTPHKFKMGVSGCPRSCVESGVKDFGVISVENGYQIYIGGNGGTDVTVGKLLTTVETEDEVIQLCGALMQYYRETGIYAERTAPWLNRLGFENVKEVLLDPERQKELFDRIMDAKKAIDGHGEPWEAIVEDKEARKIFEVERV

SEQ ID NO: 71746 - protein, 104 aa, Staphylococcus haemolyticus
MKSMEKVKVTTLEELTPLIGKKVIVDGKEIGIFLTESGDIHAINNICPHKQGPLSEGTVSGDYVYCPLHDQKVDLRSGEVQEPDTGCVETYQVEVIDGDVYVCL

SEQ ID NO: 71747 - protein, 314 aa, Staphylococcus haemolyticus
MSVDEKSKVYLIGAGPGNPNLLTKKAERCIKKAEVILYDRLVNPLILQYAPADAEFIDVGKKPYAKHIQQDEINLKIVEAAKKYQTVIRLKGGDPAIFGRVTEEVNTLKDYGIEYEIVPGVTSASAAVATMDLGLTMRSVAPSVTFSTGHFKDSINQETDIRNLINGGTLAIYMGIKRLGRIIDQITAYTSEDYSIAIVFNATCHNQRVIIGKLSTIEHQLQQHELEGEPGICILGAIVDYIDKDKVLKQEHERNLDDSLYVIKGSKEDALLKAEELSETGYRCIVHVDESYHPSQQQLYTQIINNNKIKYINL

SEQ ID NO: 71748 - protein, 1227 aa, Staphylococcus haemolyticus
MGKFGLNFFKPTETFNGNWSVLESKSREWEKMYRERWSHDKVVRTTHGVNCTGSCSWKVFVKNGVITWENQQIDYPSCGPDMPEFEPRGCPRGASFSWYEYSPLRVKYPYIRGKLLDLWNTALEENNGNRIAAWASIVEDEEKAKAYKQARGKGGHVRANWKDVTDIIAAQILYTIKKDGPDRIAGFTPIPAMSMISYAAGARFINLLGGEMLSFYDWYADLPPASPQIWGEQTDVPESSDWYNASYIIMWGSNVPLTRTPDAHFMTEVRYKGTKVVSVAPDYAENVKFADNWLAPNPGTDAAVAQAMTHVILQEYYQDNPSEMFINYSKQYSDMPFVIMLDEDDNGYKAGRFLRASDLGMESENSEWKPVIHDMNSHQFVVPNGTMGQRWEEGKKWNLKLENEDGSKIDPAMSMADDTYELKTIQFPYFDSQGDGIFERPIAARKVTLADGKEVYVATVYDLMTSQYGIKRFNHELEATSYDDAESKYTPAWQQRVTGIKPELVTQVAREFAQNAIDTKGRSMIIMGAGINHWFNSDTIYRAILNLVLLCGCQGVNGGGWAHYVGQEKCRPIEGWNTVAFAKDWQGPPRLQNGTSWFYFATDQWKYEESNVDKLKSPLANNIKHQHPADYNVTAARLGWLPSYPQFNKNSLLFGEEAKDAGDDSNEAILNRAIESVKNRETQFAIEDPDLRKNHPKTLFVWRSNLISSSAKGQEYFMKHLLGTRSGLMAEPNEEDKPEEIQWREDTEGKLDLLVSLDFRMTATPLYSDIVLPAATWYEKHDLSSTDMHPFIHPFNPAIDPLWESRSDWDIYKTLSKAVSEMAKDYLPGTFKDVVTTPLGHDSKQELGSEYGIVKDWSKGEVEAIPGKTMPNFAVVDRDYTKIYDKYVTLGPLLEKGKVGAHGVSFSVKDEYEELKSMIGTWNDEDPESVRNNRPRIDTARKVADAILNVSSATNGKLSQKSYEDLENQTGMELKDISKERASEKISFLNITSQPREVIPTAVFPGSNKNGRRYSPFTTNIERLVPFRTLTGRQSYYIDHEVFQQFGESLPVYKPTLPPMVFGTRDKQVKGGQDALVLRYLTPHGKWNIHSTYQDNERMLTLFRGGPVVWLSNEDADEHGINDNDWLEVYNRNGVVTARAVTSHRMPRGTMFMYHAQDKHIETPGSEITDTRGGSHNAPTRIHLKPTQLVGGYAQISYHFNYYGPIGNQRDVYVAVRKMKEVNWLED

SEQ ID NO: 71749 - protein, 96 aa, Staphylococcus haemolyticus
MTMTDPIADMLTRVRNANMVRHEKLELPASNIKKQIAEILKSEGFITNVEYVEDDKQGVIRLFLKYGQNNERVITGLTRISKPGLRVYAKGNGVPK

SEQ ID NO: 71750 - protein, 476 aa, Staphylococcus haemolyticus
MNESDTNKLGKTSLIGLVIGSMIGGGAFNIISDMGGQAGGLAIMIGWIITAIGMISLAFVFQNLTNVRPDLEGGIYSYAQAGFGDFIGFSSAWGYWFAAFLGNVAYATLLMSAVGNFFPIFKGGNTLPSIIVASFLLWGVHFLILRGVETAAFINSIVTVAKLIPIFLVIICMIVVFNFDTFKAGFYGMTSGGTGIFSWGDTMSQVKSTMLVTVWVFTGIEGAVVFSGRAKSKKDVGTATVIGLVSVLVIYFLMTVLAQGVIQQNQIADLASPSMAQVLEHIVGHWGSVLVNIGLIISVLGAWLGWTLLAGELPFIVAKDGLFPKWFAKENKNKAPINALLITNILVQIFLISMLFTDSAYQFAFSLASSAILIPYMFSAFYQLKYTIEHKGHATVKQWAIGIIASIYAIWLVYAAGIDYLLLTMLLYIPGLFVYRFVQRNNHKPLTKGDYILFAVIIILAIIGITRLAMGSVSVF

SEQ ID NO: 71751 - protein, 464 aa, Staphylococcus haemolyticus
MESSKQFRGDNKLLIGIIIGVLTFWLFAQSLVNVVPTLQSSFNTDMGTINIAISLTALFSGLFIVGAGDIADKLGRVKMTYIGLALNIIGSLCLIIAPVAWLLLVGRALQGLSGALIMPSTLAIINEYYIGKERQRAVSYWSIGSWGGSGICSLFGGFMASTIGWQWIFIVSIALSILAFFLIKHTPETKVEPSVDETKTKFDVTGLILLVITLLSVNVMVTQAADRGLFSPMILSLGAVFLVAGILFIIRELKTENPLVDFHIFKNKGYSGATLSNFMLNGVAGGTLIVVNTYYQSQLGFSSLQAGLISITYLVAVLIMIRVGEKLLQKLGAKKPLLVGSGFAFLGLLLLSLTFLPNVAYIISSIIGYLLFGIGLGTYATPSTDTAVAEAPDDKVGVASGLYKMASSLGNAFGVAMSSTIYGFGASFMNLQLGGAAGVLFNAGIALTAFIVILILVPKKLRTN

SEQ ID NO: 71752 - protein, 584 aa, Staphylococcus haemolyticus
MFNLFILLLERVGLIIIIAYMLMNINHFKTMMGEREKLRSQWQLTILFALFAITSNFTGIEIENGHIVSSNIYYHLNDDASMANTRVLTIGMSGLIGGPFVAIIVGIVSGLSRLYIGGANAYTYLISSIFIALISGFYGYRTMRRYTYPTVLMGAIIGAINEAIQMACILIFANDTASAWSLVQFIALPMILINSIGTAIFLSIILSTLKQEEQTRAIQTHDVFEIANKTLPYFRSGLTEQSARSVAEIILKLMNVSAVAITNRTDILTHVGAASDHHVAKKAIITDLSKEVIKTGHLKEAHSKEEIGCNNPNCSLTSAIVIPLMINQEVAGTLKFYFTNEYENTTSTKQLARGLADIFSSQLELGQAEMQSKLLKDAEIKSLQAQVNPHFFFNAINTISALVRIDSEKARKLLLQLSQFFRSNLQGARNNTITLEKELQQVEAYLALEQARFPDRFTIQYHIDSSCKHVLIPPFVIQILVENAIKHAFKHRRKDNIIDVVAHHDNEELTLTVRDNGSGIDDDKLPLIGQMSVDSETGTGSALENLNRRLIGLYGTKAALHFESTEIGTTVSCHIPSHTIKEDI

SEQ ID NO: 71753 - protein, 256 aa, Staphylococcus haemolyticus
MKTLIVDDEPLARNELHYLLNEISGFNVIDEAENIEETLEKLLSETYDLVFLDINLMDESGIDLAQKIKKMKQPPHIIFATAHDTFAVKAFELDAIDYILKPFELERIEQAVNKVKHQISNSNEIDHITSEPSTLSMQQDDRQENEDQTVLPIEMNERIYVIRKDDITAVSVNNGITTINTTHRTYQTNEPLNYYEKKLSNNTFIKIHRATIINKTHIDSVEHWFNYTYQVTMTSGDKFQVSRSFMKAFKHEIGLA

SEQ ID NO: 71754 - protein, 166 aa, Staphylococcus haemolyticus
MSAIIEAKKQQVDVIAEQLKNSVSTVIVDYRGLTVAEVTELRSQLREAGVEYKVYKNTMVRRAAEQAGIEGLDEFLTGPTAVATSTEDVVAPAKVIAGFAKEHEALEIKTGVMEGSVISAEEVKTVGSLPSHDGLVSMLLSVLQAPVRNFAYAVKAVGEQKEESAE

SEQ ID NO: 71755 - protein, 122 aa, Staphylococcus haemolyticus
MANQEQIIEAIKEMSVLELNDLVKAIEEEFGVTAAAPVAAAGAAGGGDAAAEKTEFDVELTSAGSSKIKVVKAVKEATGLGLKDAKELVDNAPKVIKEGVAKEEAEKLKEQLEEVGATVELK

SEQ ID NO: 71756 - protein, 202 aa, Staphylococcus haemolyticus
MGHYYDENPDVQSDERVIQYHYHSHQLNLTTDAGVFSKAQVDFGSDTLVQTFLNEHPPGPSKTIADVGCGYGPIGLMIAKVSPHHQITMVDVNKRALNLAEKNKKANQIDNVIIKESDGLSQLKDSHFDYVLTNPPIRAGKEVVHRIFEEAYQQLNSQGELYVVIQKKQGMPSAKKKMEEIFNNVEVVNKNKGYYILKSRKG

SEQ ID NO: 71757 - protein, 1133 aa, Staphylococcus haemolyticus
  MISC_FEATURE (258)..(258): X=any amino acid
  MISC_FEATURE (272)..(272): X=any amino acid
  MISC_FEATURE (281)..(281): X=any amino acid
  MISC_FEATURE (301)..(301): X=any amino acid
  MISC_FEATURE (306)..(306): X=any amino acid
  MISC_FEATURE (313)..(313): X=any amino acid
  MISC_FEATURE (324)..(324): X=any amino acid
RHRKRRNYARISEVLELPNLIEIQTKSYDWFLKEGLLEMFRDISPIEDFTGNLSLEFVDYRLGEPKYDLEESKNRDATYAAPLRVKVRLIIKETGEVKEQEVFMGDFPLMTDTGTFVINGAERVIVSQLVRSPSVYFNEKIDKNGRENYDATIIPNRGAWLEYETDAKDVVYVRIDRTRKLPLTVLLRALGFSNDQEIIDLLGDSEYLRNTLEKDGTENTEQALLEIYERLRPGEPPTVENAKSLLYSAFSTLNVMIXQVLVVTKLIKNYTXNTAYLIKDXQNQSLIAKLVKLLPKKVQFXTVANXTKLWKFXKQMLIVKCLNXKVQLLMNLLRFNQSKFTYQMDEEGRTTTVIGNALPDSEVKCITPADIIASMSYFFNLLNGIGYTDDIDHLGNRRLRSVGELLQNQFRIGLSRMERVVRERMSIQDTDSITPQQLINIRPVIASIKEFFGSSQLSQFMDQANPLAELTHKRRLSALGPGGLTRERAQMEVRDVHYSHYGRMCPIETPEGPNIGLINSLSSYARVNEFGFIETPYRKVDLDTNSITDQIDYLTADEEDSYVVAQANSRLDENGRFLDDEVVCRFRGNNTVMAKEKMDYMDVSPKQVVSAATACIPFLENDDSNRALMGANMQRQAVPLMNTEAPFVGTGMEHVAARDSGAAITAKYRGRVEHVESKEILVRRLVEENGTEHEGELDRYPLAKFKRSNTGTCYNQRPIVSVGDVVEYNEILADGPSMELGEMALGRNVVVGFMTWDGYNYEDAVIMSERLVKDDVYTSIHIEEYESEARDTKLGPEEITRDIPNVSENALKNLDDRGIVYVGAEVKDGDILVGKVTPKGVTELTAEERLLHAIFGEKAREVRDTSLRVPHGAGGIVLDVKVFNREEGDDTLSPGVNQLVRVYIVQKRKIHVGDKMCGRHGNKGVISKIVPEEDMPYLPDGRPIDIMLNPLGVPSRMNIGQVLELHLGMAAKNLGIHVASPVFDGANDDDVWSTIEEAGMARDGKTVLYDGRTGEPFDNRISVGVMYMLKLAHMVDDKLHARSTGPYSLVTQQPLGGKAQFGGQRFGEMEVWALEAYGAAYTLQEILTYKSDDTVGRVKTYEAIVKGENISRPSVPESFRVLMKELQSLGLDV

SEQ ID NO: 71758 - protein, 1206 aa, Staphylococcus haemolyticus
MIDVNNFHYMKIGLASPEKIRSWSYGEVKKPETINYRTLKPEKDGLFCERIFGPTKDWECSCGKYKRVRYKGMVCDRCGVEVIKSKVRRERMGHIELAAPVSHIWYFKGIPSRMGLLLDMSPRALEEVIYFASYVVVDPGPTGLEKKSLLSEAEFREYYDKYPGQFVAKMGAEGIKDLLEEINLDEELKSLRDELESATGQRLTRAIKRLEVVESFRNSGNNPAWMILDVLPIIPPEIRPMVQLDGGRFATSDLNDLYRRVINRNNRLKRLLDLGAPGIIVQNEKRMLQEAVDALIDNGRRGRPVTGPGNRPLKSLSHMLKGKQGRFRQNLLGKRVDYSGRSVIAVGPSLKMYQCGLPKEMALELFKPFVMKELVQREIATNIKNAKSKIERMDDEVWDVLEDVIREHPVLLNRAPTLHRLGIQAFEPTLVEGRAIRLHPLVTTAYNADFDGDQMAVHVPLSKEAQAEARMLMLAAQNILNPKDGKPVVTPSQDMVLGNYYLTLERKDAMNTGTIFNDTNEVLKAYANGYVHLHTRIGVHAKSFNNPTFTEAQNNKILATSVGKVIFNEIIPDSFAFINEPSQTNLEGKTPDKYFIDSTQLGEGGLKAYFEEQELIEPFNKKFLGNIIAEVFNRFSITDTSMMLDRMKDLGFKFSSKAGITVGVADIVVLPDKQDILDEHEKLVERVSKQFNRGLITEDERYNAVVEIWTDAKDQIQGELMQSLEKTNPIFMMSDSGARGNASNFTQLAGMRGLMAAPSGKIIELPITSSFREGLTVLEYFISTHGARKGLADTALKTADSGYLTRRLVDVAQDVIVREEDCGTDRGLLVSDIKEGAEMIEPFIERIEGRYSKETIRHPETDEIIIRPDELITAEIAKKITDAGIEQMYIRSAFTCNTRHGVCEKCYGKNLATGEKVEVGEAVGTIAAQSIGEPGTQLTMRTFHTGGVAGSDITQGLPRIQEIFEARNPKGQAVITEIEGVVEDIKLAKDRQQEIVVKGANETRSYLASGTSRLKVEVGQSVERGEVLTEGSIEPKNFLAVAGLNATESYLLKEVQKVYRMQGVEIDDKHVEVMVIQMLRKVRIIEAGDTKLLPGSLVDIHSFTDANREAFKERKRPATAKPVLLGITKASLETESFLSAASFQETTRVLTDAAIKGKRDDLLGLKENVIIGKLIPAGTGMRRYSDVKYDKAETPVTETEEAEIIE

SEQ ID NO: 71759 - protein, 137 aa, Staphylococcus haemolyticus
MPTINQLVRKPRQSKSKKSDSPALNRGFNSKKKQFTNLNSPQKRGVCTRVGTMTPKKPNSALRKYARVRLSNNIEINAYIPGIGHNLQEHSVVLVRGGRVKDLPGVRYHIVRGALDTSGVDGRRQGRSLYGTKKPKN

SEQ ID NO: 71760 - protein, 58 aa, Staphylococcus haemolyticus; identical to SEQ ID NO: 70357

SEQ ID NO: 71761 - protein, 229 aa, Staphylococcus haemolyticus
MNIGIIIFIISIIVTGISAMRDKSHEHRKNQRPPHPKKSTSDKKETHEKGFFEQIEEAFSELEKEFTNEDKTTNQQKKDKQTNTKRVYQDQKLEKEIEKESVPEELERSARQRGRVERETRQSANSRESNRDSNKLQKELEKQLVDDLYNVRTEIDREKEKQLSRIENNARAIINDKNLSERTKRYRLKQLLNSKAIEQDMTHQSFQFDNDPVVNGILWQEILNKPKQL

SEQ ID NO: 71762 - protein, 72 aa, Staphylococcus haemolyticus
MSAIEWLFILLAIFLVLTLEAVNTAIECVVDLVTMDYHELAKQAKDIAAFSVMLVSIFALITGLVVFLPHIF

SEQ ID NO: 71763 - protein, 299 aa, Staphylococcus haemolyticus
MTEHKSGFVSIIGRPNVGKSTFMNRVIGHKIAIMSDKAQTTRNKIQGVMTRNDAQIIFLDTPGIHKPKHKLGDYMMRVAKNTLSEIDAIMFMVNVNEEIGRGDEYIMEMLKNVKTPVFLVLNKIDLVHPDALMPRIEQYQKYMNFTEIVPISALEGLNVDHFIDVLKTYLPEGPKYYPDDQISDHPEQFVVSEIIREKILHLTSEEIPHAIGVNVDRMIKENDERVRVEATIYVERDSQKGIVIGKGGKKLKEVGKRARHDIEMLLGSKVYLELWVKVQKDWRNKVNFIRQMGYIEDQD

SEQ ID NO: 71764 - protein, 463 aa, Staphylococcus haemolyticus
MVKDMETIVSLAKHRGFVFPGSDIYGGLSNTWDYGPLGVELKNNVKKAWWQKFITQSPFNVGIDAAILMNPKTWEASGHLGNFNDPMIDNKDSKIRYRADKLIEDYMQKEKGDENFIADGLSFDEMKRIIDDEGIVCPVSGTANWTDIRQFNLMFKTFQGVTEDSTNEIFLRPETAQGIFVNYKNVQRSMRKKLPFGIGQIGKSFRNEITPGNFIFRTREFEQMELEFFCKPGEEIEWQNYWKTFASQWLKDLNINEENMRLRDHDEEELSHYSNATTDIEYRFPFGWGELWGIASRTDFDLKKHSEHSGEDFKYHDPETNEKYVPYCIEPSLGADRVTLAFLCDAYEEEGVEGSKDARTVMHFHPALAPYKAAVLPLSKKLSEEAIKIFEQLSSKFAIDFDESQSIGKRYRRQDEIGTPYCITFDFDSLEDNQVTVRDRDSMEQVRMPISELETFLAEKVAF

SEQ ID NO: 71765 - protein, 571 aa, Staphylococcus haemolyticus
RIEQSVINEIKDKTDILDLVSEYVKLEKRGRNYIGLCPFHDEKTPSFTVSEDKQICHCFGCKKGGNVFQFTQEIKDLSFVEAVKELGERINISVDIGNSSDYTSQIASNDLTMIEMHELMHEYYQYALLKTVEGEEALNYLTKRGFTEELIKSRGIGYAPNHTHFCHDFLQQKGYDIELAYEAGLLSRNEENFSYFDRFRDRIMFPLNNAQGRIVGYSGRTYNNQEPKYLNSPETPIFQKRRLLYNLDNARKHIRKNDEAILLEGFMDVIKSDSSGLKPVIASMGTAISDEHITVLKKLTSHITLMFDGDFAGQEATIKTGQHLLQQGFNVFVVQLPKDMDPDEYITKYGNEKFLEYVNNEKKSFIIYKVNKHKDEIANNDLAYERYLKEVTQDIALMNSQILQNKIIKDVAHLFNVDSNTLNSNVLNQQQYIPSEPYINDYQSYDIEIQNNSNNLFSHLSKHESAERALLKHFMECKDLFLNYHKQLESDDFDNQFFKRIYSVLEDFYAENDSYTISDMITYTDNDNLRDAIIALDNYDINQEPYDSEIEDYMNVINESKYGDTLEELNH

SEQ ID NO: 71766 - protein, 778 aa, Staphylococcus haemolyticus
TPMMQQYLKIKSQYQDCLLFFRLGDFYEMFFEDAKEASRVLEITLTKRDAKKENPIPMCGVPYHSANSYIETLINNGYKVAICEQMEDPKQTKGMVKREVVRVVTPGTVMEQGGMDENQNNYILSFIKQDSNYALSYCDISTGELKATQIEDEDTLINEICNYNPNEIVVNQEIDENLKKQIYLTTETITIRESISDASYEVNQLTNNHMYLATQLLLDYVYHTQKRDLSHLETAITYAAVDFMKMDYYAKRNLELTESIRLKSKKGTLLWLMDETKTPMGARRLKQWIDRPLINKERIEERLSIVESFMNHFIERDTLRGYLNQVYDIERLVGRVSYGNVNARDLIQLKHSISEIPNIKSLLESMNDVASNQFSSLEPLEDLLQVLEDSLIEEPPISIKDGGLFKQGFSKQLDEYLEASKNGKDWLAQLQAKERERTGIKSLKISFNKVFGYFIEITRANLQGFEPSKFGYHRKQTLSNAERFITDELKEKEDIILGAEDKAVDLEYQLFVRLREHIKTYTERLQKQAKIISELDCLQSFAEIAQKYNYVKPEFSDNKTLSLENSRHPVVERVMDYNDYVPNDCKLDKDNFIYLITGPNMSGKSTYMRQVAIISIMAQMGAYVPCNKAELPIFDQIFTRIGAADDLVSGKSTFMVEMLEAQKALTYATEDSLIIFDEIGRGTSTYDGLALAQAMIEYVAQTSHAKTLFSTHYHELTTLDQELPSLKNVHVAADEYQGELIFLHKVKDGAVDDSYGIQVAKLANLPDEVINRAQVILD

SEQ ID NO: 71767 - protein, 190 aa, Staphylococcus haemolyticus
MKKEIVEWIVAIAVGLLLVWVMVNFVAKSYTIKGDSMDPTLKDGEHVMVNILGYKVGDIKKGNVIVFHANQQDDYVKRVIGVPGDNVIYKNDKLYVNGKKINEPYLDYNEKRKQGEYITGSFETKDLLNANPKSNIIPKGKYLVLGDNREVSKDSRAFGLIDRDQIVGKVSFRFWPFSEFKFNFNPDNEK

SEQ ID NO: 71768 - protein, 1165 aa, Staphylococcus haemolyticus
MGIMELNAYIGRAGTGKSHHMIDNIKQQMKEDPLGDPIVLIAPTQSTFQLEQAFVNDKELNGSLRTEVLHFERLSYRVFQEVGGLTEERLTQAATEMMIYDLVQQHKSELKLYQSQVNYYGFSEKLSEQIQDFKKYSVTPEHLHTFLQDNDLKTRTRHKLEDISLIYQYFEERINGEFITSEDSLNHFIDILSQSEWIKRAEVYIDGFHNFSTLEYQIIKALVQSAKKVTVLLTTDGNEDPFSLFRKPSEVLTHLKEIAKDLNIELQQQFFKQQYRFNNKDLIQLEQQFDALQINPIAYDGSINILESSSIREEVNEVARQIIKDTRDKQYRYQDIAILYRDEAYAYLFDSVLPQYDIPFNIDTKRSMTHHPIMEMVRSLLEVIQTNWNISPMMRLIKTNILTNHFKDSAYLIDLLENFVVERGVYGKRWLDEKLFSIDNFTKMGRKEHKLTTEEREDFEQVVHLKNDIIDKILTFEKAMNEAENVRGFATAFYETMEAFDLPKYLMTHRDQLDVDGRHEEAEEIDQIWNGLIQILDDLVTVFDNEEMTLKRFLEVFDIGLEQLEFVMIPQTLDQVSIGTMDLAKVDNKKHIYMVGMNDGAMPQPVSSSSLITDEEKKVFEQQAQVELSPTSDILQMDEAFVCYIAMTRGSEQVTFSYSLMGAQGEDKEKSPFIDQIQGLFNGLEVMNIHYQHNAQPLSLMEHPHQTKVVLFESLKAWLEAEMVADVWVDAYQVMRDNDKLNNGLEYLLTALTYDNETVKLDEPLAASLYGSTINASVSRFEGYNDCPFKHYANHGLRLNERTKYKLENFDLGNIFHTALKYISDKVDGDFKNLDNKKIHALTVEALENVLPQVQFNLMDSNAYYRYVSKRIGVIVESTLKALRYQNKNTKFKPQRFEAGFRKTPNNSEELIAQPLITKQGIPVNIRGQIDRIDAYTKDDKSYINIIDYKSSNPSAKLDLKKVYYGKQMQMMTYMDIALQNAQRLGLSNEIKPGGLLYFHVHDERLSFKDWGELEDDALTQDKLEQAFLKEYKLRGLVNSDMDVVDALDIRLEEIGKSDIVPVSLKKDGSIGSRGSSVADETTIHKFIKHNKDNFIKTATNIMEGHTEVAPLKFDDQLPCQFCNFQSVCHVDTIIDSKHYRHVDETIDPIKAIQDVELESGDHNE

SEQ ID NO: 71769 - protein, 1228 aa, Staphylococcus haemolyticus
MIIMNNIPIKPKDAQWTDAQWKSIYANGQDILVAAAAGSGKTAVLVERIIQKIIRDEIDVDKLLVVTFTNLSAREMKHRVDQRIQQAAIENPNNEHLKNQRIKIHQAQISTLHSFCLKIIQQHYDVIDLDPNFRTISDVENVLLLEQSIDEVLEKHYDTPDIEFLTLVEQLSSDRNDDNFRDLLKRFYNFSIANPSPFEWLDSLVEIYTDDNKHKLYLDELERLSKIYIKAAYHTLLEAENNFLNCIEAEKHLDVIKLEKFKCEKMIEGNVINFEEIINYTSEKLPTITKKLKDTNEDEGISSQFLTNAKDFYDDYKKLLSEVKNKYLMRSYEDLKVDMKRLAPRIQYLVQIVKDIINGFAEKKRSRNVLDFSDYEHFALQILTDQEGNASPIAKEYRSQFEEILVDEYQDTNQVQEAIISKIKRGDESNGNLFMVGDVKQSIYKFRQADPTLFMDKYHRFTKDGDQSGLRIDLSKNFRSRKEVLATTNYLFDHMMDEEVGEIEYDADARLYFGATKYSDKSMPLELHALIQDKSSDNDLEKSEQEARYIAEQVKYIIEHKQVYDMKSETYRQATFKDIVILERGLKNARNLQHVFKDYNIPFHVNSKEGYFEQTEVRLVLSFLRTVDNPLQDIYLVGLMRSVIYQFTEDELANIRVQSMNDDYFYQSILHYMKDQEANPLLVEKLEHFMDDINMYQEYSQSHPVYQLIDKFYNDHYVIQYFSGLIGGKGRRANLYGLFNKAVEFENSSFRGLYQFIRFIDELIERNKDFGEENVIGPNDNVVRMMTVHSSKGLEFPYVIYSELSKNFNKGDLRKPLILNQKYGLGIDYFDLEQNVTYPSLSSVVIKSITEKELISEEMRLMYVALTRAKEQLILIGTIDKEETLEKLERLPISGNQIALHKRLSADRPFDLIYSILAKYQSTSLLPEYQFEKSIDNLDESLRPTVDIKIAQFEELSIEDSESEQESRDVSDLEVEGSHDKTLKQQINDQLSFKYPYLKDTEKPSKQSVSELKRQLETEESGTSYERVRQYRIGVSTYERPKFLRENKKRKANEIGTLMHTVMQHLPFKETRITETELNDYINELIEKHIIEEDAKKDIQFEAVMNFIRSDLYMTITQADKVYRELPFVVNQARVDEMPESDEDVSIIQGMIDLIFLKDDQYYFVDYKTDAFNKRRGMTDEEVGIQLRDKYKIQMKYYKNTLETILNSKVYGYLYFFQFGQMSIEEDV

SEQ ID NO: 71770 - protein, 301 aa, Staphylococcus haemolyticus
MKFLSFNYKDAESYGVKVKREDAVWDLKKVFAEFGEGDFHPQTLLEGLQQNQTLDFQEQVRKAVVAAEDSGKADEFKIAFNDIEFLPPVTPPNNVIAFGRNYQDHASELNHEVQRLYVFTKAASSLTGDESTIPNHKDITDQLDYEGELGIVIGKSGEKIPKALALDYIYGYTIINDITDRKAQNEQDQAFLSKSLTGGCPMGPYIVTKDELPTPENVNIVTKVNNDIRQDGNTSQMINKIDDLIEEISKYVALHPGDIIATGTPAGVGAGLQPPQFLQPGDEVKVTIDNIGTLTTYIAKD

SEQ ID NO: 71771 - protein, 645 aa, Staphylococcus haemolyticus
MSLHKKKISLFAFFLLTVFTVTLKTYFSYYVDFSLGVKGLVQNLILLMNPYSLIALILSVFLFFKGKKAYWFIFIGGFLLSFLLYANVVYFRFFSDFLTFSTLNQAGNVESMGGAVGASFKWYDFVYFIDTIVYLFILIFKGSWLDKRVFSKKFVPVVMAASVALFFLNLAFAETDRPELLTRTFDHKYLVKYLGPYNFTVYDGVKTIQNNQQKALASEDDLTKVLNYTKQKNTTPNSEYFGAAKKKNIIKIHLESFQTFLINKKVNGKEVTPFLNKLSTGNEDFRYYPNFFHQTGQGKTSDAEFTMDNSLYGLPQGSAYSLKGDNTYQSLPAILDQKQGYTSDVMHGDYKTFWNRDQVYKHFGIDKFYDATYYDMSDDNIVNLGLKDKPFFKESAEYQSKMKGPFYSHLITLTNHYPFTLSEEDADIDKPNTGDSTVDGYIQTAHYLDQALEEYVTDLKKKGLYDDSVIMIYGDHYGISENHNNAMEKLLGEKITPAKFMDLNRTGFWLKIPGKEGTVDKTYAGQMDVMPTILHLVGIDSKNFLMFGTDMLSKDHNDVIPFRNGDFITKDYKYVNGKAYSNKTNELLETQPKDLDKNKKQVEKDLEMSDNVLNGDLFRFYKNPDFKKIDPSKYEYKTGPKGNQK

SEQ ID NO: 71772 - protein, 626 aa, Staphylococcus haemolyticus
MEAYKIEHLNKSYADKIIFDDLNLSISEHERIGLVGINGTGKSTLLKVIGNIDDDYTADITHPNQYRIRYSSQKQDLDGDMTVFQAVLSSDTSTLQIIKAYEEAVNAYSQQQDDAHFQKMMKAQEAMDQNSAWDYNAEIKTILSKLGINDTTKKVNELSGGQQKRVVLAKTLIEQPDLLLLDEPTNHLDFESITWLINYVKQYPHTVLFVTHDRYFLNEIASRIIELDRGKLKSYPGNYEDYIAMRAENEIIEQKQQEKQKALYKQELAWMRAGAKARTTKQQARINRFNDLESEVQDQHVQDKGQLNLAYSRLGKQVYELEKLSKQINGRTLFEDITEIIQSGQLIGIVGPNGAGKTTLLNILSGEDNDYTGTLKIGQTVKVAYFKQTEETLDRDIRMIDYLREESEVAKEKDGTSISVTQLLERFLFPSSTHGKKIYKLSGGEQKRLYLLRLLVHQPNVLLLDEPTNDLDTETLTILEDYISSFGGSVITVSHDRYFLNKVAQEYWYIHDGKMERIVGTFEDYETYKKEQDKLAALEKQAQQPKQKTTARKKSGLSYKEKREYETLMERIEQTETRLEEIDEEMIEASADYGKIKELNEEKEHLELTYETDITRWSELEELKEQ

SEQ ID NO: 71773 - protein, 592 aa, Staphylococcus haemolyticus
MEATLSHYFGYDKFRPGQKEIITKIMDHHNVLGVLPTGGGKSICYQVPGLMLGGTTIVISPLISLMKDQVDQLKAMGIKAAFLNSSLTKKQQKEIEDDLRKGHIQFLYVAPERFDNQYFLSLLSRIDIHLIAFDEAHCISKWGHDFRPSYQSVIKKVFTLPQNFTIVALTATATAEVQQDIMEKLNIDRRDEVKTSTKRRNLIFKVNPTYQRQKFVVDYVQKHKEQAGIIYCSTRKQVEELQEALDVINVSSAIYHAGLTNKEREAAQNEFVYDKVKVVIATNAFGMGIDKSNVRYVIHYNMPGDLESYYQEAGRAGRDGLESECILLFSERDKGLHEYFITVSQADEDYKDKMGEKLTKMIQYTKTKKCLEATVVHYFEPNEKLEECGQCSSCIQQNKTYDMTQEAKMIISCIARMRQKESYSVIIQVLRGETSDYIKYNDYDKLTTHGLMKDYTTSELNHLIDELRFKGFLNENDEILICDESVKKLLNNKEKVFTTPFKQKSKEKVYINTVEGVDRALYSELVEVRRKLSEKLNIAPVSIFSDYTLEEFAKRKPESKQEMISIDGVGSYKLKHYCPKFLEIIHSYKASI

SEQ ID NO: 71774 - protein, 356 aa, Staphylococcus haemolyticus
  MISC_FEATURE (352)..(352): X=any amino acid
MSELFSTLNDRKGEVLTTILEHIQISFIALLIAILIAVPLGIALTKTKRLSEVVMNIAAILQTIPSLALLGLMIPIFGIGRVPAIIALVVYALLPILRNTYTGIKEVDPSLIEAAKGIGMKPMRRLTKVELPIAMPVMMAGIRTAMVLIIGTATLAALIGAGGLGDLILLGIDRNNTSLILIGAIPAALLAIMFDLILRYMEKLSYKKLLITVGAMILIILLVIVVPLFGKKGDTITLAGKLGSEPSIITNMYKILIEDETDDTVDVKDGMGKTSFLFNALKSDDIDGYLEFTGTVLGELTKEDLKSKKEDAVYQQAKQSLEKKYDMTMLKPMKYNNTYALAVKRDFAKENXIKTI

SEQ ID NO: 71775 - protein, 346 aa, Staphylococcus haemolyticus
MMTQKVLKTIKELTEINSPSGNATEAINYVKNKVEALGYDTKTTNKGALIIEVQGENDEQQRCINAHVDTLGAMVKEIKEDGRLSISLIGGFTYNAIEGEYCEIQTDSGQVYTGTICLHETSVHVYRNNHEIPRDGEHMEIRIDEKTTSDQETRDLGIEVGDFVSFDPRTEITSSGFIKSRHLDDKASVAMILELLEKLKQEETQLPHTTQFYISNNEEIGYGANASISDKIVEFIAFDMGALGDGQTSDEYTVSICAKDGSGPYHKELKSHLINLCKINDIPYKVDIYPYYSSDASAALKAGADIRHGLFGAGIESSHALERTHIESIDATQNLLYAYCLSPINL

SEQ ID NO: 71776 - protein, 338 aa, Staphylococcus haemolyticus
MRLLKQLDNNITLTQSETTQFITYLTNPEINVEDKVDLLTQFTKKEIKQQELTYVVNSLIQTMYPNQPTYEGSICVCGTGGDKSNSFNISTTVSFIVASAGIPVIKHGNRSITSHSGSTDLLNELGIKTTKVSEVPLQIEEQGLAFISAMESYPIMKYIQPVRKMISTPTIFNIVGPLINPFKLTYQVLGVYDPSRLYMIAQTLKDLGRRRAIVLHGANGMDEATLSGNNEVYELNENGDITHYFINAKDYGLKVASNQDLQGGSPKENKMITLDILSGDDKTCRRDVVVLNAALALYVSEKVDTIASGISLATILIDSGRAMVQFMKMRGDICDDIK

SEQ ID NO: 71777 - protein, 260 aa, Staphylococcus haemolyticus
MTILSEIVDYKEQLLKDGYYHDKLQNLKGVKHKNKSRLTDALIKNDNLTLIAEIKSKSPSVKAFQQTNIIKQVSDYERYGANAISVLTDERYFGGSFERLQQISETTQLPVLCKDFIIDPLQIDVAQKAGASIILLIVNILTDEKLRQLYQYASSKGLEVLVEVHDGIELQRAYQLNPQIIGVNNRDLKSFNTDVKHTNQILKCKKENYLYISESGIHSQQEVKQIVKSGIDGLLVGGALMNCNELEHFIPSLKLKKVKQ

SEQ ID NO: 71778 - protein, 403 aa, Staphylococcus haemolyticus
MYNIQTEADELGFFGEYGGQYVPETLMPAIIELKQAYNKAKQDQSFQDELTYYLKEYVGRETSLTYAKSYSEALGGAQIYLKREDLNHTGAHKINNAIGQALLAKRMGKNKLVAETGAGQHGVASATVAALFDMELIVFMGREDIKRQQLNVFRMELLGAKVEAVDEGQGTLSDAVNKALQYWVSHVEDTHYLLGSALGPDPFPTMVRDFQSVIGQEIKEQLLQKTGRLPDAVVACIGGGSNAIGTFYPFIKDKVKLYGVEAAGQGIDTVKHALAIGKGRPGVLHGSKMYLIQDENGQVELAHSISAGLDYPGIGPEHSYYHDIGRVQYKHATDTEAMEALIRFSKMEGIIPAIESAHALSYVEKLAPKMNKDEILVVTISGRGDKDMETIRHYMQTRGESHD

SEQ ID NO: 71779 - protein, 393 aa, Staphylococcus haemolyticus
  MISC_FEATURE (369)..(369): X=any amino acid
  MISC_FEATURE (389)..(389): X=any amino acid
MKFTELTVKEFENFVQNPSLESHYFQMKENIQTRENDGFEVVLLGVKDESNKVLAASLFSKIPTMGSYVYYSNRGPVMDYSDLGLVDFYLRELEKYLHQHQCLYVKIDPYWIYQIYDKDINPLEDREKNDAIINLFKSHGYEHHGFTTEYDTSSQARWMGVSYLKGETPASLRKQFDSQRKRNINKAINYGVKVRFLGRDEFHIFLDLYRETEARTGFVSKTDEYFYNFFDTYGDKVLVPLAYIDLDEYIKSLQDALNDKENRRDQMMAKENKNDKQLRKIAELDKQIEHDKKELLQASELRQTDGQILNLASGIFFANSYEVNYFSGGSSEKYNNYMGPYMMHWHMMNYCFDHGYDRYNFYGLSGDFXEVSEDLWCYRFKRGFNVYIXELIG

SEQ ID NO: 71780 - protein, 329 aa, Staphylococcus haemolyticus
MSSLLDVLQEKLSGKNVKIVLPEGEDERVLTAATQLQATDYVTPVVLGDYDKINLLAKDKGLDVSDIEVINPSTSELKPELVKSFVERRKGKATEEQADELLNNVNYFGTMLVYAGHADGLVSGAAHSTGDTVRPALQIIKTKPGVSKTSGIFFMIKDDQQYVFGDCAINPTLESSDLAEIAVESAKSAKSFGMDPRVAMLSFSTKGSAKSDDVDKVANAVKLAQEKVESEGLTDVVIDGEFQFDAAIVPSVAEKKAPGAKIQGNANVFVFPSLEAGNIGYKIAQRLGGFDAVGPVLQGLNSPVNDLSRGCSTEDVYKLSIITAAQTLQ

SEQ ID NO: 71781 - protein, 280 aa, Staphylococcus haemolyticus
MDLASKYFNDIDWRYVDHSSGLAPMQSFAFDDTFSESVGKDLSCNVVRTWIHQHTVILGIHDSRLPFLKDGIRYLTDEIGYNAIVRNSGGLGVVLDQGVLNISLIFKGQTETTIDEAFTVMYLLICKMFENEDVEIDTREIEHSYCPGKFDLSIDGKKFAGISQRRVRGGIAVQIYLCVEGSGSERAEMMRVFYEHALKGEVTKFKYPDIQPECMASLETLFGREIKVQDVMFQLLHAIKDLGGNLNMDPITEDEWTRYEGYFDKMIDRNEKMNRSIEAD

SEQ ID NO: 71782 - protein, 327 aa, Staphylococcus haemolyticus
MKKSGKARAHTNIALIKYWGKADEALIIPMNNSLSVTLDRFYTETRVTFDETLTEDQLILNGEAVNAKESAKIQRYMEMIRKEAGISEHALIESENFVPTAAGLASSASAYAALAGACNEALQLGLSDKDLSRLARRGSGSASRSIYGGFAEWEKGNDDETSFAHRVEADGWENELAMVFVVINNKSKKVSSRSGMSLTRDTSRFYQYWLDNVEPDLKETKEAIAQKDFKRMGEVIEANGLRMHATNLGAQPPFTYLVPESYDAMRIVHECREAGLPCYFTMDAGPNVKVLIEKKNQQAIVDKFLQEFDQSQIITSDITQSGVEIIK

SEQ ID NO: 71783 - protein, 214 aa, Staphylococcus haemolyticus
MIQVKAPGKLYVAGEYAVTEPGYKSVLIAVDRFVTASIEASNAVTSTIHSKTLHYEPVTFNRNEDKIDISDANAASQLKYVVTAIEVFEQYARSCNVKLKHFHLEIDSNLDDASGNKYGLGSSAAVLVSVVKALNEFYDMQLSNLYIYKLAVISNMRLQSLSSCGDIAVSVYSGWLAYSTFDHDWVKQQMEETSVNEVLEKNWPGLHIEPLQAP

SEQ ID NO: 71784 - protein, 378 aa, Staphylococcus haemolyticus
LFGLIMVYSASMVAATKGTLTGGLEVSGTYFYNRQLIYVIMSFIVVFFIAFMLNIKILQQPNIQKWIMIIIFILLFLTLIIGKNINGSKSWINLGFMNLQASELLKIAFILYISYVISRKLPQVREKIKVIAAPLFLIGVCLFLVLLQGDIGQTLLIMIIIVSMFIFAGIGVQKLVRGPVLLIAGSFIAIASLFIVSGMMPHYLKARFSTLMNPFSSEAGTGYHLTNSLMAIGNGGLFGRGLGNGIMKLGYLPEAHTDFIFAVICEELGLVGGLFVICLLFFIVYRAFVLATKTPSYFYKLICVGVASYIGSQTFVNLGGISATIPLTGVPLPFISFGGSSMLSLSIAMGLLLLVAKQIKIDEKRSQKARKQKLGITR

SEQ ID NO: 71785 - protein, 611 aa, Staphylococcus haemolyticus
VTDTTFRDAHQSLLATRVRTKDMMNIASKTAEVFKDSFSLEMWGGATFDVAYNFLKENPWERLERLRKAIPNILFQMLLRASNAVGYKNYADNVIEKFVKESANAGVDVFRIFDSLNWVDQMKVANEAVQNAGKISEGAICYTGDILNPERSNVFTLEYYVKLAKELEREGFHILAIKDMAGLLKPKAAYELIGELKSAINLPIHLHTHDTSGNGLLIYKEAIDAGVDIIDTAVASMSGLTSQPSANSLYYGLNGFNRNLRADIEGLEELSHYWSTVRPYYSDFESDIKSPNTEIYHHEMPGGQYSNLGQQAKSLGLGERFHEVKDMYRRVNFLFGDIVKVTPSSKVVGDMALYMVQNDLDEQSASKEGHKLDFPESVVSYFKGDIGQPVNGFNKELQDVILKGQQPLTERPGEYLDPVNFDEIRQELEAKDYGEVTEQDVISYVLYPKVFDQFMQTKQQYGDLSLLDTPTFFFGMRNGETVEIETDTGKRLIIKLETISEPDENGYRTIYYVMNGQARRISIKDENIKTNTNLKPKADKSNPSHIGAQMPGSVTEVKVTVGEEVKVNQPLLITEAMKMETTIQAPFNGTIKQVTVVNGDAIATGDLLIEI

SEQ ID NO: 71786 - protein, 526 aa, Staphylococcus haemolyticus
MISILTVMQFIVNIMIFIVILSIIGLVLVLLFKDKGQNQHSVLRNYPVLGRVRYFAEKIGPELRQYLFANDTEGKPFSRNQYTNIVLAGKYNSRMSSFGTQREYKDGFYIRNTMFPLQRNELQIDNQTMISTFIYKVDNERLFQRDEHRDQTDIDPYYLTDDNAIILGNNLRHPYKIKRLVGQSGMSYGALGGRAITALSQGLARAGTWMNTGEGGLSEYHLKGGGDIIFQIGPGLFGVRDKDGNFSDEQFLKTANHKEVKAFEIKLAQGAKTRGGHMEGNKVTEEIAKIRNIEPYKTVNSPNRFDFIDSPEDLLQFVDKLRQLGQKPVGFKIVVSKVEEIEALVQSMVDMNIYPDFITIDGGEGGTGATFQELQDGVGLPLFTALPIVSGMLEQHQIRDKMKIFASGKLITPDKVAIALGLGADLVNIARGMMISVGCIMSQQCHLNTCPVGVATTDPKKEKALIVDEKQYRVTNYITSLHEGLFNIAAAVGVKSPNEITSDHIVIKRIDGSIENIIDYKLKLIR

SEQ ID NO: 71787 - protein, 272 aa, Staphylococcus haemolyticus
MKRLENKIAVITGASTGIGQASAKALANEGAHVLALDISDELEKTVEEINHNGGKATAYKVDISDDKQVQDFADKARDEYGRVDVIFNNAGVDNSAGRIHEYPVEVFDKIMAVDMRGTFLVTKFLLPLMMEQGGSIINTASFSGQAADLYRSGYNAAKGAVINFTKSIAIEYGRENIRANAIAPGTIETPLVDNLAGTSEDEAGKTFRDNQKWVTPLGRLGKPEEVGKLVAFLASDDSSFITGETVRIDGGVMAYTWPGEMLSDDRWKNSVE

SEQ ID NO: 71788 - protein, 514 aa, Staphylococcus haemolyticus
MTTNTKERTSLVNKFLNGVEKAGNKLPDPAMLFFLMCVGLAVITWIVSLFDVSVKHPGNGETIHIKSILSTEGIAMIMNDAVKNFSEFPALGLVLAVMIGVGAAEKSGYFDKLMISVVNRASNQIIVPTIILIGILGSLAGDAATVILPPLAAMIFIKIGYHPIAGLAMAYASSLGGFGANFLIGMQDALVYAFTEPATKIVSDSVKINVAMNWYFIAASVILVLPVIYFTTTKVVIPRLGEYDASQANYDEEEETSSHITPTEKKALFWANMSFLLLIVALIICCIPEGSWLRNAKTGSLIDDSPLINGVGLVILVIFLIPGMVYGILSKQIKNSKDLGSMISDSLGSMGSFILIVFFAAQLLAFLQWSNLGIIVSVYGAKLLQHQNGIVLIIGIIILSGLINLIIGSASAKWGILAPIFVPMMILLGYHPAFTQMIYRVGDSITNPITPMMPYMPLVLSYAQKYDKNMKLGSLLSSLMPYTFALGVVWTLFVIAWYLLGIPLGPGGPVKIPK

SEQ ID NO: 71789 - protein, 312 aa, Staphylococcus haemolyticus
MVRMSKVAIIFPGQGAQKVGMASDLFNEDKKATNILNSAQEAMDFDLLETMFTDNENKLGETEHTQPALLTHSIALYSALDNINADYTMGHSLGEYSSLVAAGVLKFEDAVKIVRKRGQLMAQAFPNGVGSMAAVLGLSYEEVDRICKELSTNDELVEPANINCPGQIVVSGHKSLIDKFVEEGKSLGAKRVLPLAVSGPFHSSMMQVIEKDFESFINQFEWHDASFPIVQNVNAQGETDATTIKSNMIKQLYSPVEFIDSAEWLIAQGVDHFIEIGPGKVLSGLIKKINRDVKLTSIQTLEDVKGWNNHDE

SEQ ID NO: 71790 - protein, 245 aa, Staphylococcus haemolyticus
MTNKNALVTGASRGIGRSIALQLAEDGFNVAVNYAGNKEKAEAVVSEIKAKGVESFAIQANVAEGDEVKAMIKEVVSQFGSLDVLVNNAGITRDNLLMRMKEHEWDDVINTNLKGTFNCIQKATPQMLRQRGGAIINLSSIVGAMGNPGQANYVATKAGIEGLTKSSARELASRGITVNAVAPGFIVSDMTDALSDDLKSQMLEQIPLSRFGEDTDIANTVAFLASDRAKYITGQTIHVNGGMYM

SEQ ID NO: 71791 - protein, 77 aa, Staphylococcus haemolyticus; identical to SEQ ID NO: 70919

SEQ ID NO: 71792 - protein, 1188 aa, Staphylococcus haemolyticus
MYLKSIDAIGFKSFADHTDVQFDKGVTAIVGPNGSGKSNITDAIKWVLGEQSAKSLRGSKMEDIIFSGAEHRNAQNYAEVQLKLDNKARKLQVDSDDIVVTRRLYRSGESEYYLNNDKARLRDITELFLDSGLGKEAFSIISQGRVDEILNAKPIDRRQILEESAGVLKYKKRKAESLQKLDHTEDNLTRVEDILYDLEGRVEPLKAEASIAKEYLKLSEEMKQSDVIVTVNDIDQYSEDNRQLDQKLNDLKSQQADKEAKQAQINKYIQKQKSQRQQIDNDIEQLNYNLIKATEEYEKFTGRLNVLEERKRNQSETNARFEEELDNLHQELKNAHNEKADITQQITALKEKQKELNSSIHQLESQLYVSDEQHDEKLESIKNEYYELMSEQSDVNNDIRFLEHTIKENEAKKSRLDSRLVEAFNQLKALQSEISNTERNHQATVKQLSDIETQISQLEQQLSKAKQTQTEYEDKLYQAYRYTDKMRARIESLETQEEDYTYFFNGVKHVLKAKNDNLQGIHGAVAEVINVPSELTQAIETALGASLQHIIVDSEKDGRQAIQFLKQKGLGRATFLPLNVIKSRQLSNNIRHIAENTNGFINVASDAIKVNSQYQAVVENLIGTTIIVDNLKHANELARAIQYKTRIVTLEGDIVNPGGSMTGGGARKTKSILSQKDELTTMRNQLKDYESQTQDFEKQLQKHKNEVEHLSETYFKMSQQYNEVKEQSHNEALELDRLKTQEAHIKDEHEEFEFEKNDGYQSENSRITLTEKQERLTIIQGKLKQLETDIERYTQLSKEGKENTTQVQQQLNQKRSDLAVIKERINAQKASLERTDKQIETINKQLTNVDDKIKLFNSDEMMGEQAFEKLQQQIKSKENDRQSITDQLKQLKKERIDVNEDVESHEATLQECHQDLLSIESFYQDIKAQQSKLDVLINHAIDHLNDEYQLTVERARSEFSSETPIDALRKKVKLTKMSIEELGSVNINAIEQFEELNERYTFLDEQRTDLREAKQTLEQIISEMDQEVKGRFKETFLQVQAHFTTVFQSLFGGGHAKLELTDDDYLSAGVDIIVQPPGKKLQHLSLLSGGERALSAIALLFAILKVRSAPFVILDEVEAALDEANVIRYAQFLKELSIQTQFIVITHRKGTMEYSDRLYGVTMQESGVSKLVSVNLNTIDEVMKEEQA

SEQ ID NO: 71793 - protein, 407 aa, Staphylococcus haemolyticus
MSFFKRLKDKFSTKSTEDIEQELSEEEGNQSSTIHDDNDEAQIEPKKKPRKLSEADFDDDGLISIEDFEEIEAQKMGAKFKAGLEKSRQNFQEQLNNLIARYRTVDEDFFEALEEMLITADVGFNTVMQLTEELRTEAQRRNIQETEDLREVIVEKIVEIYHQEDDQSEAMNLEDGRLNVILMVGVNGVGKTTTIGKLAHRYKMEGKKVMLVAGDTFRAGAIDQLQVWGDRVGVEVIRQSEGSDPAAVVYDAINAAKNKGVDILICDTAGRLQNKSNLMQELDKMKRVISRAVPDAPHEALLCLDATTGQNALSQARSFKEVTNVSGIVLTKLDGTAKGGIVLAIRNELHIPVKYVGLGEKLDDLQPFNPESYVYGLFADMIEQNEDIPDEVAELDFNNEDNPNGEK

SEQ ID NO: 71794 - protein, 110 aa, Staphylococcus haemolyticus
MGKNDLVKTLRMNYLFDFYQTLLTEKQRNYLELFYLRDYSLSEIAETFDVSRQAVYDNIRRTGDLVEDYEAKLNLYEKFEQRRKIYDDMKQTLNDSKKLEQYINQLEELE

SEQ ID NO: 71795 - protein, 700 aa, Staphylococcus haemolyticus
MTCMKKLRQHSKFNSYLKVSCSVLLMSGTLVGYGFTKDGFAQSNDRIDNVSSEMTSVQNKLDKAIDKAKAKIDRLKYLQATDIKSYKEDIEDARNQSEIDQILRDAQEEDRISNEESTKETGEKASTSNESSLSTAKQSSTNEENKLDELDKVIADLDSLSEKVDTHQQNGDMKSEQDSTNNNENSQISSGQSASSQNNKNQINDKNDDTSILDEMDNVKNDIESTKESAHSSVEDIRDQTDSSIQDDNSTESQSKNNTNTASDKSILSGIKQIDKDEDSHKSNKIDSKEGHVDALTDELSANQKIDQAITKVENQQDNTSKRYSDHKLEQLRQLEQQVKQNNNLTNEQKQNVEKDIKIVRQNVKANRDEISGRLEQSSNKQATVEQILGSVFSKNEAQKIAKKIKTNGQSDKQITDQMMKHIDNLKTTTSDDILASMFDQAPDKEALIKTLLSTRLGNNEASQIAKQLAKENLSSSELVNQVKQKINANQKITADDILKDVLDKSSDPKQTIETLLATKLNQTQAKALADLIARAQNDKANALDLVKNALNGTASDLLQLQNKLDTAKNNLSYILDPITNRPSLFDRINGSASSSNSLNQGSHLLDGLTGSSLLDGLNSGGSLLDNIEDIPNPVQGLSLGQLGDDDGFLSGLFDDEGNLSLPNTGEVVKKSWLPVTVLLVIAGGTLIGLGRRKQQKTKQ

SEQ ID NO: 71796 - protein, 388 aa, Staphylococcus haemolyticus
MRYLTSGESHGPQLTVIIEGVPANLEIKAEDINKEMFKRQGGYGRGRRMQIEKDAVEIVSGVRNGYTLGSPITIVVTNDDFTHWRNIMGIEPISDEERDNMKRTITKPRPGHADLIGGMKYNHRDLRNVLERSSARETAARVAVGAVSKILLEQLDIHMYSRVVEIGGIKDEGLYDTETFKQNIDKNDVRVIDETIAQKMRDKIDAAKKDGDSIGGVVQVMVENMPVAVGSYVQYDRKLDGRIAQGVVSINAFKGVSYGEGFKAAEKPGSEIQDEILYDNEIGFYRGSNHLGGFEGGMTNGMPIIVNGVMKPIPTLYKPLNSVDINTKEDFKATIERSDSCAVPAASVVCEHVVAFEVAKAITEEFQSNHIDQLKAQIDERRRLNIEF

SEQ ID NO: 71797 - protein, 376 aa, Staphylococcus haemolyticus
MKIGITCYPSMGGSGIIATELGIKMAERGHEVHFITSNIPFRIRKPLPNITFHQVEVNQYAVFQYPPYDITLSTKISEVIKEYDLDVLHMHYAVPHAVCGILARQMSGKDIKIMTTLHGTDITVLGYDHSLKGAIKFGIEQSDIVTSVSHSLAHQTKSIIETEKEIVPIYNFVRENEFPTRHDETLKEVYGIKPDEKVLIHVSNFRKVKRIDTILETFAKVRKNIPSKLILLGDGPELLDMRKLARHLGIDSDVLFLGKQDQVSEFYQMSDLVLLLSEKESFGLTLLEAMKTGVVPIGSNAGGIKEVIKHDETGFIVDIGDSTSASEYALQLLSNKELYNKMQTAMLKDIDERFGSELITDQYEHYYRKMLNQKED

SEQ ID NO: 71798 - protein, 400 aa, Staphylococcus haemolyticus
MGTELFNQAKPILEKIEQHGFEAYFVGGSVRDYLMNRHIHDIDITTSATPDEIESIFEKTIPIGREHGTINVVYQGTNYEVTTFRAEAEYVDHRRPSEVYFVRDLKEDLQRRDFTINAIAMDKNFNIYDYFEGDVALNQHIIKTVGDAKERFKEDALRILRGLRFQSQLNFTIEGDTFEAMKHQIADVEHLSIERIVVELKKLIKGQNVSQSYLNLIDLNFFNYVPFFRSLDMKQTKVNSPISFELWIAILLTVEQTNTSLSDLKISNNEKTKINQYHKIMIEMPQVSSKEQLKLFVYDYGINNIIDIIAINSILEDNNIKIASPLIFNLQSIKEIDQHLPIRSRRELNINGGDILRITSKKSGPWLKEVLRQIEIDVLTNKVPNLKDELLKWVKENVKI

SEQ ID NO: 71799 - protein, 202 aa, Staphylococcus haemolyticus
MKFDRHRRLRSSESMRNLVRENHVRKEDLIYPIFVVEKDNVKSEIKSLPGVYQISLNLLDDEINEAYELGIRAIMFFGVPNAKDDVGSGAYDHNGIIQEATRKAKELHKDLLIVADTCLCEYTDHGHCGVIDDHTHDVDNDKSLPLLVKTAISQVEAGADIIAPSNMMDGFVAEIRKGLDNAGYYNIPIMSYGIQYASSFFG

SEQ ID NO: 71800 - protein, 187 aa, Staphylococcus haemolyticus
MKQFIKIVMTILICVGIGVSVTYLIREIDIQPSQMTLNDDNQFGDWKRDGRLTHGYGTYNHGLEFEGNDKHYGNDYDLPENTEVLAATDGVVTRLFEDELGGKVIQISESNGQYHQWYMHLNDFKVTQGQKVKAGDVIALSGNTGEQTTGSHLHFQRMKGGIGNDYAEDPQPFINQLPEKEKSLFNI

SEQ ID NO: 71801 - protein, 502 aa, Staphylococcus haemolyticus
MSQKKIIIIGGGLGGISAAIRLAQSGFDVSLYDKNNHIGGKVNRLETEGFGFDLGPSILTMPYIFENLFNYSDKQMKDYVTIERLPLQWRSFFTNGEVIDLYEDLSQMLNANTYLNNDDIQQLHQFLNYAEKIHRFTEKGYFALGLDKVSEIIKYQGLLRSLKGVDYFSTMQQAINRYIEKQKLRDMLGYFIKYVGSSSYDAPAVLTLLIHMQYEQGLWYVKGGIHKLAQALEQLAIEEGVAIHTGMDVCSIDTYFNHITGVRLDDGSHVSADYIVSNREVIPTYRDLLHFSNKKIAQLEKVYEPAASGYVMHLGVDKEYAQLAHHNFLFSNDSKRNYREVFHDKVLPQDPTIYLVNSNKSDPTQAPEGHENLKVLPHIPYIQNQPFTEEQYSDFRERVLDKLEKMGLTDLRQHIIYEDIWTPHDIERTYGSNKGAIYGVVADKKKNKGFKFPKQSEYFDNLFFVGGSVNPGGGMPMVTLSGQQVADKINALECKVTTDSRE

SEQ ID NO: 71802 - protein, 386 aa, Staphylococcus haemolyticus
MTISNKLANIPDSYFGKTMGRKVEHGPLPLINMAVGIPDGETPKGIVDHFADAVRIPENQKYGAFHGKESFKEAIVNFYQRQYGVELHKDDEVCILYGTKNGLVALPTCIVNPGENVLLPDPGYTDYLAGVMLADANPVPLNLEPPHYLPDWSKVDAQTLARTSLVYLTYPNNPTGSTATKAVFDEAIQRFKGTHTKIVHDFAYSAFGFDAKNPSILASKDAKEVAIEIFSLSKGYNMSGFRVGFAVGNKDMIQALKKYQTHTNAGMFGALQDAATYALNHYDDFLDQQNETFKRRRDTFEKQLKDANLPFVHSKGGIYSWLQTPPGYDSESFEQYLLKEQSILVAPGIPFGENGRHYVRISLALDDQLLTEAAKRLASLSYLYNE

SEQ ID NO: 71803 - protein, 68 aa, Staphylococcus haemolyticus
MINKVINVEGMSCDHCRNAVESALAKLNGVTSAEVDLDKNQVRVDYDENRVSVEQMKEAIEDQGYDVK

SEQ ID NO: 71804 - protein, 426 aa, Staphylococcus haemolyticus
MVQRQKKSSIRWFFALAFFIIGVIAYMDRSNISYIAPQMMEDLHMTKQQFGLLASFFSLGYALMQVPSGMLAEKFGPRKMITIALVWWSAFTIFTGMIKHHGLLYLVRFLFGIGEAPMYPSNAVFNANWFSKDEKGRASSMLLAGSYFGPVLAPVITIAIVNAFNWQAVFYIFGAVGILIAILWGIIAKDLPEQHRMVNDAEKHFIMENRDLVQTSKSLPPWNQFFRRVSFYAIAGQYFVVQFVISLFLIWLPTYLTEQYHVEFKDMTISSLPWFIMFILILSAGAISDKILRSGQSRFVSRGLIAIVGFIVFAVSIFFAVHTENLYVTIFWLSLGLGGMGVSMGMSWAAANDIGRNFAGTVSGWMNLWGNIGALLSPFLAGALVASLGWTMTFQLLIIPAVIAAILWLFVSPDKPLIKDESRELK

SEQ ID NO: 71805 - protein, 530 aa, Staphylococcus haemolyticus
MKGVRQGLLLIIPALLGYFLGNFALGLLVSTGTLAHIYVFKSSPRSMIRTVILCSISFAICMILGTLTVTEPILYGVTLLLVTVIPYYIFSALKIAGPSSTFFLVTFCLPSNLPIAPNEALYRGLAILVGGAIATLVVILTILFQKQKIENRAINSDFNMIKELMHNYNDVDKFKESAKTAVTQFKNSDELLITATAGVNQKLSPRFQRLLLLHTSAQGLYSELLELHEKGIRPIPNELVEMMDVAIRNAYRTTASREKWIKEVHVDEAFDDLLQYILKIDEITNLDSSQIEHEASVRKPLYSQRIIHNLTLDSIVFRNTLIYAVIMAVAIFISLAFNIQKSYWIPLTAHTVLLGMTTRRMLNRSVARGLGTILGTLVLSTILYFNPHLIIAVIIMGIAAMVTETFVGSNYAFAVIFITIQVILLNGLASDNLSISIAYTRIFDVLIGIVIAVIGILLINRQTASAMLPRTIAEVVRKEAVIFQYLFSENHYQDDLRERDESLALSVKMSNMTQINNSASGELFSNQEVI

SEQ ID NO: 71806 - protein, 292 aa, Staphylococcus haemolyticus
MTEFDLSTREGRWKHFGSVDPIEGTKPTTKNEMTDLQSTHKNFLFEIEEVGIKNLIYPVNIDRFQTAGRFSFSTSLNKDEKGINMSRILESVEKHYNNGLELNFDTLYQVLRTLQTNMKQNSSGVDVSGKWFFDRFSPVTNIKAVGNADVTYGLAIEQDQITRKEITIEATVTTLCPCSKEISEYSAHNQRGVVTVKVYLDKNNQVVDDYKDKILDAMEANASSILYPILKRPDEKRVTERAYENPRFVEDLIRLIAADLVEFDWIDGFDIECRNEESIHQHDAFAKLKYRK

SEQ ID NO: 71807 - protein, 497 aa, Staphylococcus haemolyticus
MAKVNVRDFLDEQYDLFINGEFQPSESGETLTVTNPANGEELAKVAKANEKDVDKAVQSAHEAFDSWSKISKAERADYLLEISRRIEENKEHLATVESLQNGKPYRETSTIDVPQVAEQFKYFAGVLTTDEGSVNQIDHNTMSLVVNEPVGVVGAVVAWNFPILLASWKLGPALAAGNTVVIHPSSSTPLSLIELAKILQDVLPKGVVNVITGKGSESGDAIFKHEGVNKLSFTGSTSVGYGVAKVGAERIVPTTLELGGKSANIIFDDANLDQVIEGVQFGILFNQGEVCSAGSRLLVQSSLYDKLLPKLKEAFENIKVGDPFAEDTKMGAQTGPEQIEKIESYIKLAEEDDKANILTGGHRITDNGLDKGYFFEPTIIELSDNSHKLAQEEIFGPVIVVEKFEDEEEAINIANDSEYGLAGGVFTTNLLRALNVAKAIRTGRIWVNTYNQIPSGAPFGGYKKSGIGREVYKDAIKNYQQVKNIFIDTSNETKGLY

SEQ ID NO: 71808 - protein, 86 aa, Staphylococcus haemolyticus
RILEDARVQARKHHEEIIHEANIRANGMIETAQSAINSEKERALADINNQVSELSVLIASKVLQKEISEQDQKELVDKYLKEAGDK

SEQ ID NO: 71809 - protein, 131 aa, Staphylococcus haemolyticus
MNKEQLEKMTNGKGFIAALDQSGGSTPKALKEYGVNEDEYSNDDEMFQLVHDMRTRVVTSPSFSPDKILGAILFEQTMDREVEGKYTGDYLADKGVVPFLKVDKGLAEQQNGVQLMKPIDDLDDTLDRAVE

SEQ ID NO: 71810 - protein, 271 aa, Staphylococcus haemolyticus
MKKWLSVISILVLVIVLAGCGKDKEGNKKITVAASPAPHGDVLKKAKEQLKKKGYDLEIKEVNDYKVPNKLLDKGDIDANFFQHVPYLKAEKKSHGYKIEELGKVFTTPMGVYSKKYKNLKDIPEGSTIYVSNNPAEEGRFLSFFVDEGLIKLKKGVKIEDAKFEDIAENKKNLKFNHQQGAEFLPKTYKNGEGAAVIMNSNYAIDNGLKPSKDAIVMEGKSSPFANIIAVQEGHKKDKKFQELLKVMQSKEIKDYIKKEYGDDVIPYESK

SEQ ID NO: 71811 - protein, 483 aa, Staphylococcus haemolyticus
MASFFKNLTRKEDPTIYQNKDGHLKRTLRVRDFLALGVGTIVSTAIFTLSGVVAAEHAGPAVALSFLLAAIVAGLVAFSYAEMASTMPFAGSAYSWINVLFGEFSGWVAGWALLAEYFIAVAFVASGFSANLRGLVSPLGIVLPKALSNPFGADGGVIDIIAAVVIIITAIILSRGMTEAARVENVLVILKVFAIVLFIIVGLTAIQASNYVPFIPEHKVTENGDFGGWQGIYAGVSMIFLAYIGFDSIAANSAEAINPQRTMPRGILGSLAVALVLFVGVALVLVGMFHYSKYAGNAEPVGWALRQSGHGIIAAVIQAISVIGMFTALIGMMLAGSRLLYSFGRDGLLPPWLSKLNHKHLPNRALLILTIIGVLIGSMFPFAFLAQLISAGTLVAFMFVSLAMYRLRKREGKDLPEPSFKVPFFPVLPIITFILVLLVFWGLSFDAKLYTLIWFVVGIIIYLSYGVRHSKKNEEEDYVVPKD

SEQ ID NO: 71812 - protein, 554 aa, Staphylococcus haemolyticus
MTKENYSAANMVIDTLKNNNVDYVFGIPGAKIDYLFNALEDDGPELIVTRHEQNAAMMAQGIGRLTGKPGVALVTSGPGVSNLTTGLLTATSEGDPVLAIGGQVKRNDLLRMTHQAVDNASLLRSSTKYSAEVQDPESLSEVMTNAIRTATSGKNGASFISIPQDVIESPVTSNAIDLCEQPQLGVPNSEDIQDVIKAIKHAKFPVLLVGMRSSSEKETEAIRQLVAKSNLPVVETFQGAGVLNRELENHFFGRVGLFRNQVGDELLRKADLVVAIGYDPIEYEASNWNKELDTEIIVIDEVQAEITNFLRPKKELIGNIAGTIQLLSENVHEPIINQNRLDDLERLRAEVIEATGIKYTHEDGVMHPLEIIETMQKTLTDDTTVTVDVGSHYIWMARKFRSYNPRHLLFSNGMQTLGVALPWAIAAALVRPNTQVVSVAGDGGFLFSGQDLETAVRKNLNIIQLIWNDGKYNMVEFQEEMKYKRSAGVEFGPVDYVKYAESFGAKGLRVTNQEELEAALKEGYATEGPVLIDIPVNYKDNIKLSTNVLPDSLN

SEQ ID NO: 71813 - protein, 234 aa, Staphylococcus haemolyticus
MSHVLYQHGTLGTLMAGLLEGTASIDELLEHGDSGLATLTGSNGEVIFLDGEAFHANEHKEFKKLNGDEMTPYATITRFEADQTYQTSNKDSETVLNEVKEHMLSDNLFSAVKISGTFKKMHVRMMPKQEPPYTRLIDSARRQPEETREDIKGTVIGFFTPELFHGIGSAGFHIHFANDDRNFGGHVLDFEVDDVTVEIQNFETFEQHFPVNNKTFTETEIDYADVDAEIREAE

SEQ ID NO: 71814 - protein, 450 aa, Staphylococcus haemolyticus
MDSVEISRFLTGMTLAVHIIFATVGVGMPLMFAIAEFLGIKNKDPKYIALAKRWSKGYTITVAVGVVTGTIIGLQLSLIWPTFMKMGGHVIALPLFMETFAFFFEAIFLSIYLYTWDRFKNKWTHFIISIPVIIGGSFSAFFITSVNSFMNTPAGFEMKDGKMVNVQPLEAMFNSSFLVRAFHVVATAGMTMAFILASIAAFKLLKNKYNKDAEYHKKALKMTMIVGFISTLLSMLAGDLSAKFLHQVQPEKLAAYEWHFDTQSKADLVFFGVLNEKTQEVEGAIKIPGMLSFLADNNVNTKVEGLNDFPKNELPPLIVHYFFDLMVTMGVLCFVISGAFILTLMIKKLRKYVTHKGMLYAVLLTGPAAMLAIEFGWFLTEVGRQPWIVRGYMRVSEAATQAGGITLVTILFGLLYLVLLFTSAYVLIRMFKDKPAQDDVDKVIEKGGHA

SEQ ID NO: 71815 - protein, 414 aa, Staphylococcus haemolyticus
MTENKRVVITGMGALSPIGNDAQTSWENALKGVNGIDTITRIDTEDYNVHLAGELKDFNIEDHIEKKEARRMDRFTQYAVVAARQAVEDAKLEINDETANRIGVWIGFRIGGMETFETAHTTLQNKGPRRVSPFFVPMLIPDMATGQVSIDLGAKGPNGSTVTACATGTNSIGEAFKIIQRGDADAMITGGTEAPITHMALAGFSASRALSTNDDKETACRPFQEGRDGFVMGEGAGILVIESLESAQARGAQIYAEIVGYGSTGDAYHITAPAPEGEGGSRAMQAALDDAGIEAKDVQYLNAHGTSTPVGDMYEIRAIKNTFGDAANQLKVSSTKSMTGHLLGATGGLEAIFSALSIRDSKVAPTIHANTPDPECDLDIVPNEAQDLEITYAMSNSLGFGGHNAVLVFKKFED

SEQ ID NO: 71816 - protein, 803 aa, Staphylococcus haemolyticus
MSLLHIAVILPLIFALIIPILYRFFKKIHLGWFVLPIPVVLFIYFSSLISTTQSGNTVIKTLNWMPHIGMNFDLYLDGLSILFSLLITGIGSLVVLYSIGYLSKSEQLGNFYCYLLLFMGAMLGVVLSDNLIILYLFWELTSFSSFLLISFWREKKASIYGAQKSLIITVFGGLSLLGGFILISLAGDSLSLHELIANASEIQHSPLFIFAMVLIMLGAFTKSAQVPFYIWLPDAMEAPTPVSAYLHSATMVKAGLYLVARVTPLFAISQGWIWTITLVGLITLFWASLNATKQQDLKGILAFSTVSQLGMIMSMLGIGAVSYHFEGSQSQLYIAGFTAAVFHLVNHATFKGALFMITGAVDHVTGTRDVKKLGGLLTIMPISFTITVITALSMAGIPPFNGFLSKEKFLEAMIEISHANVFSLDTLGIVFPILAIVGSIFTFVYSIKFIMYIFFGKHQPNALPKKAHEASILMLLSPIILAVLVVVFGLFPGLLTQSIVEPATTAISGMSNVNAEFHLFHGITPAFISTLIIWILGILLLLTFSYWIRLLHAQPTRLTLNHWYDSTGKYLPNYSANMTNSYVNGYVRDSLVIIFGMLIVVTIVTLLSVPFDFNFKDINNIHIYEIAILILLIIAAFMVVIAKSRLFSVIMLGVVGYSVSVLFVFFKAPDLALTQFVVESISTALFLLCFYHLPNLNRYNETRSFKLTNALISIGVGLVVIILGLIAYGNRHFTSIGEYYKAHVYDLAHGKNMVNVILVDFRGMDTLFESSVLGIAGLGVYTMIKLRRKHQSSEVKSDEQTEQ

SEQ ID NO: 71817 - protein, 143 aa, Staphylococcus haemolyticus
MMNRQNNNLMFQYAAVIIAFLIALFGVTLFFAGHYTPGGGFVGGLLLSCALTIIAIAFDIKTMEKVFPWDFKILIGIGLLFCVGTPLASWFYGENFFTHTEFNIPLPLLQPVHMNTPMFFDFGVLCAVVGTIMTIIITIGESE

SEQ ID NO: 71818 - protein, 149 aa, Staphylococcus haemolyticus
MDSNKNDYEHMLFYFAYKTFIKTADEIIEKYDMSRQHHRFLFFINKLPGITIKQLLKTLEISKQGSHATLRKLKEEGLIVEQTSEEDRRVKQLFPTPKGSKLVDKLNKAQNELMQSTFQKVGHDWYDIMEELSNYREGFQDIQHLKDEK

SEQ ID NO: 71819 - protein, 255 aa, Staphylococcus haemolyticus
MIDIHNHILIDVDDGPKNKEEMLKLLKQAKGEGVTKIIATPHHLSPTFNNEYQIVESKLHELLDLKEVKELGIKIYPGQEIRISDQIILQLEKDEAIGLNHSKYLLIEFPSGGVPHYTNRLFFELQSKGYVPIIAHPERNKEISQNLDVLFDLVNGGALSQLTSASLIGKHGKKLQKVSIQMIENNLVHFIASDAHHDTNRPFILESLFNDKKLDKYQEQIKQLINNAQQVIENKEIRKKQPTQDYKQKKLFGLF

SEQ ID NO: 71820 - protein, 603 aa, Staphylococcus haemolyticus
MDKLSARGRLLILIIIDSLIVAFSVFICYTILQPYFEGYSHKILILTSLILLVSHHVFAYIFNLYHRAWEYASVNELLLIVEAVTCSILATIVLIPIFTGHPPFFRLYLITWMMHLILIGGSRISWRIGRSFVVGKQKKKKPTLIVGAGRGGSLLIRQMLRSPEMGLEPVLAVDDDPQKRKLTIAEGVKVQGKVDDIPNLVNKFRIKRIIIAIPTLSPTRLKEINDICNSTGIELFKMPSIEQVLSGELEVNQLKRVEVEDLLGREPVELDMAMISKELTHKTILVTGAGGSIGSEICRQVCKFQPERILLLGHGENSIYLIHQELSNMYKDKIEIIPLIADVQNSTRMSEIMNEYKPYAVYHAAAHKHVPLMEYNPPEAFRNNVLGTRNTAYAAKKAGVRKFVMVSTDKAVNPPNVMGASKRMAEMVIQNLNEENGYTDFVAVRFGNVLGSRGSVIPLFKKQIAAGGPVTVTHPDMTRYFMTIPEASRLVLQAGALAQGGEVFVLDMGEPVKIVDLARNLIRLSGKSEEEIGIQFSGIRPGEKLYEELLNENEIHPEQVYEKIYRGKTTTPPKEEIDEAIDYLETHNTEIKDKLINLANGKY

SEQ ID NO: 71821 - protein, 161 aa, Staphylococcus haemolyticus
MNFKEIKELIEILDQSSLTEINIEDNKGSVVNLKKQKETEIITPQYTQQAPLAPATSTMATPNQSATESPVPQNNDQIDKDDSSYQTINAPMVGTFYKSPSPEEDAYVQVGDKVTNESTVCILEAMKLFNEIQAEVSGEIVEILVEDGQMVEYGQPLFKVK

SEQ ID NO: 71822 - protein, 430 aa, Staphylococcus haemolyticus
MKTTIKQAKQHLNQEVTIGAWLTNKRSSGKIAFLQLRDGSGFMQGVVVKSEVSDETFQLAKEITQESSLYVTGVITEDNRSDLGYEMQVKSIEVIHEAHDYPITPKNHGTEFLMDHRHLWLRSKKQHAVMKIRNEIIRATYEFFNENGFTKIDPPILTASAPEGTSELFHTKYFDEDAFLSQSGQLYMEAAAMAHGRVFSFGPTFRAEKSKTRRHLIEFWMIEPEMAFTNHVESLEVQEQYVSHVVKSVLKNCQLELKALDRDTSKLEKVSAPFPRISYDDAIKFLKEEGFNDIEWGEDFGAPHETAIANHYDLPVFITNYPTKIKPFYMQPNPENEETVLCADLIAPEGYGEIIGGSERINDLELLEQRIDEHQLDAESYNYYLDLRRYGSVPHSGFGLGLERTVAWISGVEHVRETAPFPRLLNRLYP

SEQ ID NO: 71823 - protein, 759 aa, Staphylococcus haemolyticus
MTENKGSSQPKNGKNGKSKAKKNKNVKRTIIKIIGFLLIAFIVLVLLGILLFAYYAWKAPAFTESKLQDPKPAEIYDRNGDLVKKLDNGARREHVELKDVPKNMRNAVLATEDNRFYDHGAIDYKRLFGAIGKNLTGGFGSQGASTLTQQVVKRAFLSEEKSIGRKAQEAYLSYRLEQEYSKDEIFQMYLNKIYYSDGVYGVKAAAKYYFNKDLKDLNLAEEAYLAGLPQVPNLYNIYDNPKQAENRKNTVLYLMHYHNRISDKEYNAAKKINLKANLVDRTAKERQIGTDNSDSEYDSYVNFVKSELMNNKEFKNKNLSDVLQSGIKIYTNMDKDVQKTLQDRIDNGNYYKNEDQRVGSTILDSKTGGLVAISGGRNFKDVVDNNAATDAHLTGSSLKPFLAYGPAIENMQWATNHAIQDESSYSIDGGTFRNYDGNGHGTVTAYDALRQSFNIPALKTWQQVNSQAGDNAVKKFASKVGLDYQSDIGPSDVLGGGASEFSPTQLASAFAAIANGGTYNNAHSIQKVVTADDDTIEFDHTSHKAMKDYTSYMLAEMLTGTFKAYGSAYGHGVSGVTMGAKTGTSTYGTEINQQYNLPDNAAKDVWINGFTPKYTMSIWMGFSEIKEGGVNSFLGHSEQEYPQYLYEDVMSDITSSDDGDFKKPDSVNGSSADNLSVSGHPDNNTTNREVNGSSGSSSSNSSNNSNNSSNSNTSNTNNSGNTNSGTTNNNSTTQGTNTVGSTLSNIFNLNSIFDFKKSS

SEQ ID NO: 71824 - protein, 343 aa, Staphylococcus haemolyticus
MQDVTIIGGGPAGLFASFYAGLRGMSVRIIDVQDKLGGKMQIYPEKIIWDIGGVAPKPCNEIIKDMINQGLHFNPKVNLNERVTDIRKIAERHFEVETDSGQIYESKAVIFAVGGGIINPKPLQIKDAERYRLTNLHYVVQSFSKFKGKDILISGGGNTALDWARDLANIANSITLVYRKSDIKGYEAMISVLKALNVNLLPKTQIKELIGDNKCECIKEVKLENIETGEVTTQAFDDVIVSHGFDHENPLLKDCTSKLDLYDEYRVKGFGNTTTNIPGIFACGDIVHHDAKVHLIASAFSDAGNAANLAKTYINPDAYKEGYVSSHNDVFKESNKKVINQYI

SEQ ID NO: 71825 - protein, 133 aa, Staphylococcus haemolyticus
MIRYSNEPPEVQAYCDLRVKAGMSPKSVAAARNGLPNGCFNITIYEDQQLIGMGRVIGDGGTTFQIVDIAVDPDYQGQGYGRVILEKIMEYINSIAEKGTYVSLIADYPADKLYEKFGFKTTEPKSGGMYIVF

SEQ ID NO: 71826 - protein, 408 aa, Staphylococcus haemolyticus
MSKVDNNQNDQVSRRSFLKMLGIGGAGVVIGASGAGSIFSFKSMFDTPENEDKDAFEFYGRVQAGITTPTQKNCNFVALELKTKDKQAIKDMFKKWTQMSVNMTDGAPAEKDSQNALLPPVDTGESIGLGASKLTLTYGISKSFLKKIGMSSKIPSGFKDLPHFPNDQLDDEYSDGDIMIQACSNDPQVTFHAIHNLIRPFRDVVKMKWSQNGFVSGKLEETPRNLMAFKDGTVNPRKNDELKKYVFIDDGWAKNGTYCIIRRIQIHIETWDRTSLEEQEATFGRKRASGAPLTGKKEFDNIDLDAKDSSGQYVIDPNAHARLAREVKTSIKRRAYNYNDGTNAKTGALETGLMFICFQKSTQQFIDIQNNLGHSDKLNEYITHRGSASFLVLPGVKKGGYIGETLFN

SEQ ID NO: 71827 - protein, 581 aa, Staphylococcus haemolyticus
MKPYLTKLVVVLVLILTVIRIVPAHQVNAADDSKISDVYVAITDAKSTIEDKNKSNKEKQSALADIKEKVKSLNIKDNKEGKDVKSKLEAVDKASSMNAKADKLSQLTKSLIAYEDAVSTKDISGEIKTLKQQVDAKDDSIKKAIKSKNESELQSINNSLNQIWTTHETAIRNYDEGKYGQIEVNLMQLRVAIQKEPLDTKKVDNAWTTFKSSIDTVDQKQSSSDNGKYKVTQLNDELDKAIKGIEDNNLDQTDAALSKFVQIWPYVEGKIQTKNGSLYTTIEDKIPYYQSILDQSNKDRVKDGLNDINNDIKDTVGQDGYTFVDVMIIFLREGLEVLLVIMTLTTMTRKVKDNKGTASVIGGSILGLILSITLAVGFIQTLGNNGLLREGMEATLGIIAVVLMYIVGIWMHRRSSAKRWNDMIQNMYQNAISNGNLVLLGTIGLISVLREGVEVIIFYMGMIGSITSMDFVIGIALAIVILIIFALLFRFIVKLIPIYYIFRVLSILIFIMAFKMLGVSIQKLQLLGTLPQHGIEGLPTIGFIGFYPNIESIVAQLIYIVFIVFFILKNRQNKQKNTNLK

SEQ ID NO: 71828 - protein, 146 aa, Staphylococcus haemolyticus
MSQQDVVKELNQQVANWTVAYTKLHNFHWYVKGPNFFSLHEKFEELYNEASQYVDDLAERILAIGGNPVGTLKESLEISIVDEAGKNYSAEQMVEAFSNDLTHISEQLVKSIEVAGEAGDDVSEDMFIGMKNSVDKHNWMFKSYLV

SEQ ID NO: 71829 - protein, 220 aa, Staphylococcus haemolyticus
MNYAKFIDHTLLKPESTRQQIDQIIDEAKEYNFKSICVNPTHVKYAAERLNDSDVLVCTVIGFPLGATTTATKIFETEDAIKNGATELDMVINIGALKDGRFEDVQKDIEGVVGAANGKTVKVIIETVLLSDEEKVKASELAKAAGADFVKTSTGFAGGGATPEDVKLMKDTVGDELEVKASGGVRSLEDFNKMIDAGATRIGASAGVQIIQGLESDSDY

SEQ ID NO: 71830 - protein, 394 aa, Staphylococcus haemolyticus
MSNKQGILDYIENNKYDYVEISHRIHERPELGNEEIFASRTLIDKLKENDFDIETDIAGHATGFIATYDSGQEGPVIGYLAEYDALPGLGHACGHNIIGTASVLAGSALKQVIDRIGGKVVVLGCPAEEGGENGSAKASYVKAGIIDDIDIALMIHPGNATYPTIDTLAVDVLDIKFYGKSAHASENADEALNALDAMISYFNGVAQLRQHIKKSQRVHGVILDGGKAANIIPDFTHARFYTRATTRKELDILTEKVNQIARGAAIQTGCDYEFGPIQNGVNEFIKTPKLDELFEKYALEVGEDVSHDDFGFGSTDTGNVSHIVPTIHPHVKIGSRNLVGHTHRFREAAASVHGDQALIHGAKIIALMGLELIENKGMFDEIVQQHSHIKGQSK

SEQ ID NO: 71831 - protein, 535 aa, Staphylococcus haemolyticus
MTKFIFVTGGVVSSLGKGITAASLGRLLKDRGLKVTIQKFDPYLNVDPGTMSPYQHGEVFVTDDGAETDLDLGHYERFIDINLNKYSNVTAGKVYSHVLKKERRGDYLGGTVQVIPHITNEIKERLLLAGESTNADVVITEIGGTTGDIESLPFIEAIRQIRSDLGRENVMYVHCTLLPYIKAAGEMKTKPTQHSVKELRGLGIQPDLIVVRTEYEMTQDLKDKIALFCDINKESVIECRDASSLYEIPLQLSAQDMDDIVIKRLDLDAKYETQLDEWQYLLDTVNSLDGTITIGLVGKYVSLQDAYLSVVESLKHAGYPLKKDVVVKWIDSGEVNDNNVEDYLKDVDGILVPGGFGFRASEGKIAAIKYARENNVPYFGICLGMQLATVEFARNVLGLEGAHSAELNPSTPYPIIDLLPEQKDIEDLGGTLRLGLYPCKIKENTLAHQIYDAVNIEERHRHRYEFNNEFREQLEANGMVFSGTSPDGRLVEMVEIPENDFYIACQFHPEFLSRPNRPQPIFKSFVEAAYKHQNK

SEQ ID NO: 71832 - protein, 350 aa, Staphylococcus haemolyticus
MLGFSVYLGQPLNKSYILNMVDLGYDIIFTSLQIPEENDQTKLTYLGELCQLLKDKSVTYIIDINPSLLNQNVYRFFDQFSNGDFVIRIDDHFNYDLIADLFHHNLQCCLNASTITTEILDTLYNQKSLSKVYFCHNYYPRPDTGLALNLFEQRNNLIRKYDEHASIMAFIPGTTLRGPLYKGLPTIEQHRHMTLLQSAHSLLKYNLDYILIGDTAINYAEAVALQQMIYHRHFKLRLSYFDKSYEQLIFKQHTSRLDAPENVIRSKYSRLTKVNIPPTNNFNQYRYKGDVTVDNSLNQRYEGELQVIKADLPNHKAINHVASICDEDKVVIDLIQPGDTFEFITEKEKR

SEQ ID NO: 71833 - protein, 285 aa, Staphylococcus haemolyticus
MPLVSMKEMLIDAKENGYAVGQYNLNNLEFTQAILEASQEENAPVILGVSEGAARYMSGFYTVVKMVEGLIHDLNITVPVAIHLDHGSSFEKCKEAIDAGFTSVMIDASHSPFEENIEITSKVVEYAHQHGVSVEAELGTVGGQEDDVVGGIIYADPKECQELVERTGIDTLAPALGSVHGPYKGEPKLGFKEMEEIGASTGLPLVLHGGTGIPTKDIQKAIPYGTAKINVNTENQIASAKAVREVLNNDQDVYDPRKYLGPAREAIKETVKGKIREFGTSNRAK

SEQ ID NO: 71834 - protein, 423 aa, Staphylococcus haemolyticus
MTQEVIKIRGGQTLKGDVTISGAKNSAVAIIPATLLAQGQVKLDGLPQISDVETLVSLLEDLNIKAHLNGKTLEVDTSEIENAPLPNNKVESLRASYYMMGAMLGRFKKCVIGLPGGCPLGPRPIDQHIKGFKALGAEIDESNDTSMKIEAKELHGANIFLDMVSVGATINIMLAAVHATGQTVIENAAKEPEVVDVANFLNSLGADIKGAGTSTLKINGVDSLHGSEYQIIPDRIEAGTYMCIAAAVGEEITINNIVPKHVEALTVKLKELGVDIQVDGDAEKAIIKRKSSYKNVDIKTLVYPGFATDLQQPITPLLFMADGPSFVTETIYPARFRHVDELKNMGANIEADMETGTATIKPSSLNGAEVYASDLRAGACLIIAGLLAEGVTTIYNVRHIYRGYTDIVKHLKELGANIWTEEV

SEQ ID NO: 71835 - protein, 499 aa, Staphylococcus haemolyticus
MLSSGFLLTLFFVTLVIAVLSGLIFLVPSVPVKYIRLHLTLLLLPVIVGVIGLITINGREVIGIFALDKLAWLVGAFVLALGFIIQKFSARYLLGDRNYRKYFPLYTFTTVFASIGWLSNDLRLMVICWGLTLFCLTQLIRLNRSWKVPAEAAKVSARSFIIGWVALLLAVVVFFIGTGDWVIDPSQDYDVSMSYGLKLIVDLLLVIAVIIPAAQYPFQSWLIESVVAPTPVSAIMHAGIVNAGGIILTRFSPVFDNNIALTLLLIISSISVLIGSGISLVHVDYKRQLVGSTMSQMGFMLVQCALGVYSAAIIHLILHGIFKATLFLQSGSIVKRFNIPTPPNVKRSYAWTVLGRTLAVVIAIIFFLTSSHTPYTLISAFILAWSLSVSWNQMVALNRGMMGRVIGIAMLIIVALVYVVTHEVFVNILNSVYMVTPHPPLISVIICVAILVLGSIFSIWVARRRSSTAFAKVYLWLVKIGEAKFKSVESHPNYLKNYL

SEQ ID NO: 71836 - protein, 860 aa, Staphylococcus haemolyticus
MKSNMTITKHNIEETVKSARRVITPLSPISIFAARNPWEEMEHGTFDQVAQWFKHVRDIDLYPSHASVMTALENGEIDQKLVETEVQQAIKDYDTSVPKSHIDIYCKNAMRIKDLPTNLITKEAYLKIEVSKLKRVFENEPFKYARSKSANAFNAKGESLMDELNTHIIKWSKLYLDNFQSSWTMPKREEGFYISWLHLAQHDPMLTKTQRKMIKTLPQDYREALIMALNHLDIAEDERESYLTGHFLSLPGWAGMMYYRAEQHEHEADLLTQYLAIRLTMECILLDTEKMSRPAVLNVERRIKELVSKWLYYGEMSIDDWASMSIEDQLEHLRFAHDFNPLYFKKLWLEAWEETHERELVEAIYDKSVKPVEQETQVQLAFCIDVRSEPFRRHLESEGPFETIGIAGFFGLPIRKEVLDEQFTHNSLPVMVPPAYAIKEYADRHDLNTYNQQQHSVTSMFYTFKLMKHNVLPSLLLPELSGPFLSLNTIASTLMPKKTGHFVRNFTKNWLKKPEAKLTIDREHEIYSDLPIGFTEEEQVAFTRQALQLMDLTTNFAPLIVLGGHGSVSNNNPYHASLECGACGGASSGFNAKLLAMMCNLPHVREALKNEGIVIPDSTVFVAAEHKTSIDELEFIYMPELTKEAQNALDMLNEAMPRISYKANSERLANLPGLDQDDLKDPVAEAHRFANDWSEIRPEWGLARNAEFIIGQRNITAGTNLEGRAFLHNYDWKKDTDGQLLNTIISGPALVAQWINLQYYASTVAPHFYGSGNKTTQSVTSGVGVMQGNSSDLLAGLPWQSVMAADNKIYHSPIRLLVVIQAPDQYIKDLLENNIKFKQKVDNQWVRLASIDENGSWKDW

SEQ ID NO: 71837 - protein, 228 aa, Staphylococcus haemolyticus
MYINQRTKGLSAMLTKEFAQRVELSEKQVRKIVQHLEERGYQLSKTEYRGREATDFKEEDIELFQDIAEKVKQTNSYDLAFEELEKEKDFLQVIVKEDNEQLPADQGATQLVEELRTEIQKMREERQMLGQMISQVHQQQTELKELQNQITEKLDTHNQSLLAIQNSQEAIQTAQKEQSEYTKNNLVKEINDNNQQSIDTLKEDIKTQSSLNRPNDEKKGFFARLFNL

SEQ ID NO: 71838 - protein, 189 aa, Staphylococcus haemolyticus
MSLINKEILPFIAQAYDPKKDEFKEVSQDDLKGSWSVVCFYPADFSFVCPTELEDLQNQYDKLQDLGVNVFSVSTDTHFVHKAWHDHSDAISKIQYQMIGDPSQTITRNFDVLDEEAGLAQRGTFIIDPDGVVQAAEINADGIGRDASTLVNKIKAAQYVRQHPGEVCPAKWEEGSESLQPGLDLVGKI

SEQ ID NO: 71839 - protein, 492 aa, Staphylococcus haemolyticus
MSSEHSKTDVILIGGGIMSATLGTLLKELSPDKEIKIFEKLEQSGEESSNVWNNAGTGHSALCELNYTKEGKEGSVDITKAIKINEQFQVSKQFWAHLVRTGQLENPSNFIQSVPHMSFVKGIFNVKFLKNRVAALKENILFEKMGITEDREKIKEWVPLMVEGRTSHVPIALSRDESGTDVNFGALTKKLISNLKERNVEVSYKQEVENIEKLDNGNWKVTVKDLNSGQSHTYESEFVFIGAGGASLPLLQKTGIKQSKHIGGFPVSGLFLRCTNKDVIEKHHAKVYGKASVGAPPMSVPHLDTRFVNGERALLFGPFAGFSPKFLKTGSNLDLIRSVKPNNLLTMLSAGVKEIDLTKYLVSQLMLKHEDRMNDLRVFVPNAKDEDWEVIVAGQRVQVIKDTEDSKGNLQFGTEVITSDDGSLAALLGASPGASTAVDIMLDLLQRCYGNEFKNWIPKIKEMVPSFGLKLTEHEDVYRAVNKEIQKYLNVK

SEQ ID NO: 71840 - protein, 221 aa, Staphylococcus haemolyticus
MALQLKHITKTFGNGDAQTEVLKNINFSVNQGEFIILSGASGSGKSTLLNILGGLLSPSSGDVLYKGENLFSKEVDKTSLRLNDIGFIFQSSHLVPYLTVREQLMIVAKEAGIKRKEAKDKAQRLLNEIGLSHRLDVYPHLLSGGEKQRVAIMRAFMNEPKIILADEPTASLDADRATSVVQMIKAHVQTKNMIGIMITHDKRLFEYADRVIEIQDGKIEL

SEQ ID NO: 71841 - protein, 402 aa, Staphylococcus haemolyticus
MDIEQKQKKNSPLFIIILGALTAIGALSIDMFLPGLPELKNDFNTTTANAQLTLSLFMIGLGLGNLFVGPISDSIGRKKPLVISMIIFALASLGIVFVENIWIMVFLRFVQGFTGGAGAVISRAIASDRYRGNELTKFLALLMLVNGVAPVIAPALGGLILSFAVWRMVFVILTLFGVLMVLGSLFKVPESLSVKNRDSSGVNVIFSNFKSLLTTPRFVLPMLIQGVTFIMLFSYISASPFLVQKIYGVSPLHFSWMFAGVGITLIIASQIAGKLVDYFHPQVLLRAFTIIQIIGVVIVSLTLINHWHFALLVIGFIVLVAPVTGVATLGFSIAMEERTTGSGSASSLLGLLQSLLGGLVTPLVNLKGEYNSMPYIIIISLTAILLIILQLLNIKVFKHDKV

SEQ ID NO: 71842 - protein, 215 aa, Staphylococcus haemolyticus
MKKMVLINIITIVVLVVVGIVGFYLYHNATSFVTTDNAKVDGEQIQISSPTSGQVKSLDVKQGDKVKKGDKVAEVSGQSQSGESQTMDIKMPQNGTIVKTSGIEGSVAQAGSPIAYAYNLDDLYITANIDEKDVSSVEKGDKVDVTIDGEDSDVDGKVEEVGQATAASFSLMPSSNTDGNYTKVSQVVPVKISLDSAPSKNVVPGMNAEVKIHKD

SEQ ID NO: 71843 - protein, 647 aa, Staphylococcus haemolyticus
MILLQLNDISKSFDGEDIFTRVNFEVKTGERIGVVGRNGAGKSTLMKIIAGVEDYDSGHISKIKNLRMGYLTQQMTLNSSASVFEEMSKPFEHLKKMELLIREETNWLADHASNYYSEEYQQHMERYESLTNQFEQLDGYQYESKIKTVLHGLNFNEDDFDKPINDFSGGQKTRLSLAQMLLNEPDLLLLDEPTNHLDLETTKWLEDYLKYFKGAIVIISHDRYFLDKIVTQIYDVALGDVKRYVGNYEQFIEQRDKYYESRMQEYERQQDEIKRLETFVEKNITRASTSGMAKSRRKTLEKMERIDKPMLDARSANIQFGFNRNTGNDVMNIRNLKIGYDSPITSPINIEVSKGDHIAIIGPNGVGKTTLIKTIAQRQNQLEGEITFGANLQIGYYDQKQAEFKSNKTIIDYVWDQYPTMNEKDIRAILGRFLFVQDDVKKVINDLSGGEKARLQLALLMLQRDNVLILDEPTNHLDIDSKEMLEQALKDFEGTILFVSHDRYFINQLANKVFDLNYDGGQMYLGDYQYYIEKTEEAAALEAFKNERNDFSKEDTSNQNEANENVNTYDSQKQQRREQRKLERLIENCEAKIEAFENEIARIDEQLTQPDVFNNPEKASSLANQKLETEQMLEQVMSEWENLQENI

SEQ ID NO: 71844 - protein, 319 aa, Staphylococcus haemolyticus
MKNISDIANLAGVSKSTVSRFLNGGSVSPQTKEKLSRIIEEHDYQPNQFAQSLRAKHTNLIGAIIPRMNSHAVDETVKGIVSVCHQHQYQLLLNYTGLDIRAEIEALETFSRSKVDGIILMATTLTDEHLEVIEKLNVPVILVGQSYPNLHSIIHDDYQAGFIVGEQIGSKKHKNVVFFGVSEEDVAVGVKRKQGIIDGLKKYDVYPEIYLTSFKYEEAKNDVSEKLKNASGIDALIGATDPIALAIHKFYSQQNNATGNYQIFGFGGDPMTQLVTPAITTVKFNYFKAGTYAMNQLNELIFSKNAVSKTVIPVEIENF

SEQ ID NO: 71845 - protein, 318 aa, Staphylococcus haemolyticus
  MISC_FEATURE (242)..(242): X=any amino acid
MLNSFDSAYHALCEEILEIGNQRDDRTHTGTISKFGHQLRFDLSKGFPLLTTKKVSFKLIATELLWFIKGDTNIQYLLKYNNNIWNEWAFEKYVQSNDYHGPDMTNFGHRALQDDEFNELYKEEMSKFKQHILNDDSFAKKYGDLGNVYGKQWRDWVDKEGNHFDQLKTVIEQIKNSPNSRRHIVSAWNPTEIDSMALPPCHTMFQFYVQDGRLSCQLYQRSADIFLGVPFNIASYALFTHXIAEECNLEVGEFVHTFGDAHITSNHIEAIKTQLSRNSFDPPTLKINSNASIFDINYEDLELIGYNSHPAIKAPIAV

SEQ ID NO: 71846 - protein, 1924 aa, Staphylococcus haemolyticus
MNLFKKQKFSIRKFSVGIFSTVIATLTFLSHPGHAATQEEESNSSQATSQNVKSQTDDKSIHNNDNYIENEKNSNDSIKEIATAIKINNSEINSKVDNANGTYRIDNEEIKENSIETNQDEKTIEPELSHQNISKNDSNNTFNENKSIHKRTKRSTDNNVDNNQDQMSINETNSGQIINGTFTDTSNGAVIPTNQTVSEMNQAGKITGWHVKDNDQTEIPLVWGPKALPPYNPYVFDKTNNKIAAVLSKYPNNLGGVAGDKTVGPIYQDVDVTPGSEVQLYFIGTSMGNTNGINGVKVSIYDSNNPTDLLYSGRPNTASKSFGVFTGVFNVPNNVSRLRFMFETFEKRSYESANGGRILKGKNNFGGSGLADVKVNSGAYLKATTTQTKYTVTSPSTSTSLINATLEVSLENKGHSRSNKTQYKVVLPEGVQFISAQNARANYNSSNRLLTLNVDRIEPGTIKNITYTVSLPTSEPIKKDFDATLVYVTDGINMNRRNGSRDFGSNADDNYFRYGGYNEYVKTESNQRRGNVTVATQSVTVEMYKTDLQQKYNQISAQIEHLNPSDYSQEAWSSMQNVLNASRQILNENDNTPINDRKNQATINDLTLRLDKERAKLDVDQAAKSRKEVINNNNDATREEKDTALTLLKATFDEKVRDIESATNINEISERKKQAIVDISPIDVIPTIKQQAIQSLNDKADEKLIEIENDTNATFEEREEAKTSVNEALTNAKNAVRNATTNQLVETVLTSNSNNISQISTHAIARDKARQELDRVIASKMSEIDNDHSATIEEKNETKAKIDEIAKQARLNIERGVHNDDVKVAKDKALNQLHNVQVDAIKKNQAKQIITDQANSKKAEIDQTPNATDEEKAAAKAKVDEAVTTAKNAIDQATNNDGVDTAKTNGVDTINNVQPTVVKKDEAKTAIDKAAEAKKAEIDQTPDATDEEKAAANANVDEAVNNAKRSIDQATNNNGVDTAKSEGTDAINHVQPVVVKKDEAKVAINKAAEAKKTEIDQTPNATDEEKAAAKAKVDEAVTIAKNAIDQATNNNGVDTAKTNGVDAINNVQPTVVKKDEAKTAIENAARAKKAEIDQMPNATDEEKAAAKAKVDEAVNNAKVSIDQAINNNGVDTTKSNGVDSINNIQPTVVKKDEAKTAIDKAAEAKKAEIDQTPDATDEEKAAAKAKVDEAVNNAKASIDQVTNNNGVDTAKSEGSDAINHVQPVVVKKDEAKTAIDKAAEAKKAEIDQTPNATDEEKVAAKAKVDEAVTTAKNAIDQATNNAGVDTAKSNGLDSINNIQPTVVKKDEAKAAIDKAAEAKKAEIDQILNATDEEKAAAKAKIDEAVNNAKASIDQATNNAGLDTAKTNGVGTINNIQPVVVKKDEAKTAIDKAAEAKKAAIDQTLNATDEEKAAAKAKIDEAVNNAKASIDQATNNAGLDTAKTNGVGTINNIQPVVVKKDEAKTAIDKAVEAKKAAIDQTLNATDEEKAAAKAKVDEAVNNAKASIDQATNNNGVDTAKSEGTDAINHVQPVVVKKDEAKVAINKAAEAKKAEIDQTPNATDEEKAAAKAKIDDAVNNAKASIDQATNNAGVDTAKTNGVDTINNIQPTVVKKDEAKTMIDKAAEAKKAEIDQTPNATDEEKAAAKAKVDEAVNNEKASIDQATNNDGVDTAKSNGLDSINNIQPTVVKKDEAKAAINKAAEAKKAEIDQTPNATDEEKVAAKAKVDEAVTTAKNAIDQATNNNGVDTAKTNGVDAINNVQPTVVKKDEAKTAIDKAAEVKKAEIDQTPNATDEEKAVAKAKVDEAVTTAKNAIDQATINHGVDTAKTNGVDAINNVQPTVVKKDAGTTAIDNAAGAKKAEIDQMPNATDEEKAAAKAKVDEAVTTAKNAIDQATNSNGVDTAKTNGVDAVNNVQPMVVKKDEA

SEQ ID NO: 71847 - protein, 399 aa, Staphylococcus haemolyticus
  MISC_FEATURE (196)..(196): X=any amino acid
  MISC_FEATURE (197)..(197): X=any amino acid
KRLFDIAVSGSGLILSAPITLTAAIVIAKKLGKPVLFRQTRPGQYGEPFEIYKFRTMSDKRDENGELLPDDQRMTPVGTFIRKSSIDELPQLINVLKGDISLIGPRPLLMEYLPLYNDEQKKRHNVKPGITGWAQVNGRNAITWDAKFKLDVLYAENQSFKLDMYIIYKTIINILKRKDINAPNHVTAEKFKGNVXXVNQLIIIGKGGHSKVIKDIIETTNQYHVAGYLDNAIDEYYTDNDIFYDNLDNMKQYKDLYSFIIAIGSNHIRQKLFHKLEVKIDQYATLIHPTAVVSPSAKIGYGTVVMPNAVINADSIIGKHVIINTGAIVEHDNQIGDYVHISPNATLAGGVKVGEASHIAINAAVIPLIEIGERCIVGAGATVINNVKTESTVIGTPAK

SEQ ID NO: 71848 - protein, 311 aa, Staphylococcus haemolyticus
MKKKKSTTFKVIITILIILLVLIVAAAIFVFTKLHSLNNSINESLDRDHSQLRKKAAKEGDPMTVVLYGIDDDAERQQENLGQRSDSIVLMSINPEDKKTVMVSVPRDTRAKIVGHGTTEKINHAYAYGGPKMAVNSLEELMDVPVDHYIAINMDGVKTVVDELNGVDITSNATFTFHGYKFEKGQKYHMDGDKALTYMRSRKEDGAGGDEGRQLRQQQVITAVAREAFSVNSVTKLNGIFKAAQDNLKTDLSFVQLNRFKSDYDKAQDNVERLTINGQNALGDDNLYYFYPDKNSLKEVNEKLKENLNLN

SEQ ID NO: 71849 - protein, 491 aa, Staphylococcus haemolyticus
MSFINKFGKTTVASSILAASVLGTTHVSFASGSGEGNQGQQGQNEDYMAIGNTKNPKNVIFMVGDGMGPAYNSAYRYYADNPNTKELDQTAFDKYLKGTNRTNPNDPKENVTDSAAGGTAFATGYKTYNGAISVDNNKKPLKSVLEKAKELGKSTGIVTTAEVTDATPAVYAAHVDDRDKKDEIAQQFYNDKINGQHKADVILGGGSKYFGKENGNLTDKFQKDGYDYVTNKDELANSQSDQVLGLFSEKNMPLQIDAPQSNPLLVDMENSALSKLEKNDKGFFLMVEGASIDKSGHPNDITGVMSEMGGFEKAFQNAIDYSNKHKDTLVVATADHSTGGLSIAKGKDYVWNPEAIHKMKHSGSYMTKQIADGKDPEKVINDGYGFEFPSKQMDKVKDAAKELKEAQDKAKSEDDEKVAAATTKLQDAIQKPINDESHTGWTTYGHTGEDVNTYAHGPSENKFAGNNDNTDSAKNIFDFFNNDVTSNQNQQ

SEQ ID NO: 71850 - protein, 104 aa, Staphylococcus haemolyticus
MPKVYGSLVDNETRCTHYHTFLDVIAIKFKCCNKYYPCYQCHEEHETHPIKRWSEQEFDEKAIMCGVCKHEMSIQDYMMTELCPKCQAHFNSRCKFHYHLYFEL

SEQ ID NO: 71851 - protein, 307 aa, Staphylococcus haemolyticus
MLKQEDILQDLKSLIPEDIIKVNEPLKRYTYTETGGNADFYLSPTKNEDVQAIVRYAKEKDIPVTYLGNGSNIIIREGGIRGIVISLLSLNHINVSDDAIIAGSGSAIIDVSRAARDHVLTGLEFACGIPGSVGGAVYMNAGAYGGEIKDCIDYALCVNEEGDLIQFTNKELELDYRNSIVQKQHLVVLEAAFTLEPGKLDEIQAKMDDLTERRESKQPLEYPSCGSVFQRPPGHFAGKLIQDSDLQGYRVGGVEVSKKHAGFMVNVDNGTATDYEDLIHHVQKVVKEKFDVELHREVRIIGEHPKE

SEQ ID NO: 71852 - protein, 40 aa, Staphylococcus haemolyticus
  MISC_FEATURE (31)..(31): X=any amino acid
MPRKGSVPKRDVLPDPIHNSKLVTKLINKIXVDGKRGTAQ

SEQ ID NO: 71853 - protein, 373 aa, Staphylococcus haemolyticus
MKILVAMDEFNGIISSYQANRFVEEAVASQIEDADIVQVPLFNGRHELMDSVFLWQSGTKYRVNVHDADMKEVETVYGQTEQGLTIIEGNLFIKGQKPVEQRSSYGLGEVIIDALNNGADNIVISLGGIDSFDGGIGMMQALGAQFYNDEGELLDAREGAQVIKFIRRIDFSAIPQNFKDAHIQLMSDFSSKLYGKHSEIMKTYETHQLTREKAAEIDNLIWYFSELVKNEMKIAMGPIERGGAGGGIAALLNGLYDAEILTSHELVNQITHLDDLVSQADLIIFGEGVKEEDHLLETTTLTIAELAQKHDKPAIAICATDDKFDVFDQYHVTAMFNTFVEMPERYTDFKMGIQIRHFTVQALRLLKTTLNNA

SEQ ID NO: 71854 - protein, 409 aa, Staphylococcus haemolyticus
MKAQLIDRLSRYVKIDTQSNPESSTTPSTEKQWDLLRLLQQELEGFGLETNLDDNGYLFATLESNVSFDVPTVGFLAHVDTSPDFNASNVNPQIVEQYDGKTIKLGDTGRVLSQETFPELKKLIGHTLMITDGTSLLGADDKAGVVEIMEAVKYLIEHPEIKHGRIRIAFTPDEEIGRGPHKFDVERFNADFAYTMDGSEFGELQFESFNAAEAKITTHGVNVHPGSAKNIMVNAISLGHQFHSLLPAGEVPERTEDYEGFYHLMKFEGNVEKATLQYIIRDHDRESFELRKTKLLEIRDDINVHYEDFPVKVDIEDQYYNMAEKIEPHPYIIDIPKKVFNDLNIEPNTAPIRGGTDGSQLSFKGLPTPNIFTGCGNFHGPFEYASIDVMEKAVQVIIGIAQEVTHHHK

SEQ ID NO: 71855 - protein, 361 aa, Staphylococcus haemolyticus
MYTLLLIAVTLVISLILTPMIIKVSIKFDLVDRPNFRKVHTKPVSVLGGTVILLSFLIGIWLGHPIEREVKPLVMGAIVMYLVGLIDDIYDLKPILKLIGQIVAASIVAFYGITIDFISFPMGPTIHFGILSIPITIIWIVAITNAINLIDGLDGLASGVSAIGLITIAFIAILQANVFIIMICSVLIGSLLGFLCFNFHPAKIFLGDSGALLIGFIIGFLSLLGFKNITFISLFFPIVILAVPFIDTLFAMIRRMRNGQHIMQADKSHLHHKLLALGYSHRQTVLLIYSIAILFSLSSIILYLSQPLGVLLMFILIVITIELIVEFTGLIDDSYRPILNLITKKNEQHHGDNGVDQHDKK

SEQ ID NO: 71856 - protein, 142 aa, Staphylococcus haemolyticus
MTVIIGSDVDGKRLKEVVKAFLKENNHEVVDVTEGKDVDFVDSTLAIAQEVQKNDENLGIAIDAFGAGSFMVATKVKGMIAAEVSDERSAYMTRGHNNARMITMGSEIVGDTLAKHVAKEFVNGHYDGGRHQIRVDMLNKMC

SEQ ID NO: 71857 - protein, 171 aa, Staphylococcus haemolyticus
MKIAIGCDHIVTDTKMAVSKHLKEQGHEVIDVGTYDFTRTHYPIFGKKVGEAVTSGEADLGVCICGTGVGISNSANKVPGVRTALVRDMTTALYSKEELNANVVSFGGKIVGELFIFDIVDAFIKAEYKPTEENKKLIAKIEHLEAHNEKQADPHFFDEFLEKWDKGEYHD

SEQ ID NO: 71858 - protein, 325 aa, Staphylococcus haemolyticus
MTKSQQKLASIEQLSTKDGVISALAFDQRGALKRMMAEHQTEEPTVEQIEQLKVLVSEELTKYASSILLDPEYGLPASDARNKDCGLLLAYEKTGYDVNAKGRLPDCLVEWSAKRLKEQGANAVKFLLYYDVDDAEEINIQKKAYIERIGSECVAEDIPFFLEVLTYDDNIPDNKSAAFAKVKPRKVNEAMKLFSEERFNVDVLKVEVPVNMNYVEGFAEGEVVYTKEEAAQYFRDQEASTQLPYIYLSAGVSAELFQETLKFAHEAGAKFNGVLCGRATWSGAVKVYIEQGEEAAREWLRTTGFKNIDDLNKVLETTATSWKSK

SEQ ID NO: 71859 - protein, 104 aa, Staphylococcus haemolyticus
MNREEVQLLGFEIVAYAGDARSKLLEALTAAKNGELDKAEELTEEANECIANAHKAQTSLLAKEAQGEDIAYSVTMMHGQDHLMTTLLLKDLMKHLLELYRRES

SEQ ID NO: 71860 - protein, 572 aa, Staphylococcus haemolyticus
MNKLIAWIEKGKPFFEKISRNIYLRAIRDGFIAAIPIILFSSIFILVTYVPNVFGFTWSKTMEGILMKPYNYTMGIVGFIVAGTTDKSLTDSFNRKLDKTNQINFISTMMAAMCGFLFLAADSAKDGGFLSAFMGTKGLLTAFLSAFITVIVYNFFIKRNITIKMPKEVPPNISQVFKDIFPLSAVIIILYALDLIVRSTAHTNVANGILKLFEPLFTAADGWVGVTIIFGAFAFFWFVGIHGPSIVEPAIAAITYANLEANLHLIQAGEHANNVITPGTQMFVVTMGGTGATLVVPFMFMWLTKSKRNKAIGRASVVPTFFGVNEPILFGAPLVLNPVFFIPFIFAPIANVWIFKFFVDVLGMNSFSIFLPWTTPGPLGIVMGTGFAFWSFVLAIVLIVVDVIIYYPFVKVYDEQILEEELGNKEANNELQDKVAANFDTKKADAILASAGASEASHSQTDQGKEVAQQSNITEQTNVLVLCAGGGTSGLLSNALNKAAEEYNVPVKAAAGGYGAHMDIMKDYHLIILAPQVASNYEDIKQDTDRLGIKLAKTQGVEYINLTRDGKAALDF

SEQ ID NO: 71861 - protein, 469 aa, Staphylococcus haemolyticus
MKKLPEDFIFGGATAAYQAEGSTQTDGKGRVAWDTYLEENYWYTAEPASDFYNKYPIDLELSEKFGVNGIRISIAWSRIFPKGYGEVNPKGVEYYHNLFKECHRRHVEPFVTLHHFDTPETLHSDGDFLNRKTIDYFVEYAKFCFEEFEEVNYWTTFNEIGPIGDGQYLVGKFPPGIKYDFAKVFQSHHNMMVAHAKAVKLFKDNGYSGEVGVVHALPTKYPYDPTNPEDVRAAELEDIIHNKFILDATYLGKYSRETMEGVQHILSVNGGKLDIPEEDYKVLEAAKDLNDFLGINYYMSDWMRGYDGESEITHNATGDKGGSKYQLKGVGQREFDVDVPRTDWDWMIYPKGLYDQIMRVVKDYPNYHKIYITENGLGYKDQFDEERKTVDDDARIDYVKKHLEVISDAIRDGANVKGYFIWSLMDVFSWSNGYEKRYGLFYVDFETQERYPKKSAYWYKELAESKEIK

SEQ ID NO: 71862 - protein, 336 aa, Staphylococcus haemolyticus
MKAIGFEQPFKLSDGNLFKTFNLDIPEPKVHEILVKIQSISVNPVDTKQRLMDVSKAPRVLGFDAIGVVESVGNEVTMFNQGDIVYYSGSPDQNGSNAEYQLINERLVAKAPKNISAEQAVSLPLTGITAYETLFDVFGISRNRNENEGKTLLIINGAGGVGSIATQIAKAYGLRVITTASRNETIEWTKKMGADIVLNHKESLLNQFKTQGIELVDYVFCTFNTDMYYDDMIQLVKPRGHIATIVAFENDQDLNALKPKSLSFSHEFMFARPLNQTDDMIKHHEYLEDITNKVEQNIYQPTTTKVIEGLTTENIYQAHQILESNTMIGKLVINLN

SEQ ID NO: 71863 - protein, 178 aa, Staphylococcus haemolyticus
MKRLKNFILGLLIVAIVGFLLFMYIKDSRISKYQDFFLQFNWFQPLLIGLAALLILIGLILVFSIFKPTYRKPGLYKDYDDGHIYVSRKAVEKSAYDTLTKYDQVRQPNVVAKLYNKKSKSYIDIKADFLVPNDVQVKSLTESIRSDIKHNVEYFTELPVRKLEVNVRDQKTAGQRVL

SEQ ID NO: 71864 - protein, 649 aa, Staphylococcus haemolyticus
MDNLISIDNIDLHLTDEELGALSFLKQEMPHLVNYFKNELLVARDKISQRLITSLYRENLVNAKSNSTFVSSCDIKNFPINGEHQIMRVHFPESDKYLFAKVSSTHAFGRVDVEGPFYYCDSDGRQCVRILHPNEVLADILKENPELDNEASSQFKDDMENSVANMALALSYQAYEMQHSKEPLLEIIINEQDSYLRSEQAVIEGHPLHPGAKLRKGLNANENIKYSSEYNKEIHLKCVLIHQSIARTQSLSFTYDAELEAQFPELYSQIKTECDNLSNLSEYHLMIVHPWQLDNVLLSQYEEEINNNLMIPLKIEIPYYAGLSFRTLMPKFPSTLPHIKLSTNVHITGEIRTLSDQTTHNGPLVTQILNDILKQDKNFTHYRVGILNEFAGIHFYNSNDEEAIQTDLSEQLGTLFRDNVYNLTEKDSIPMIPSSLVVTYKYNEEPPIISLIQRYKHHYDKSNLDIAAQEWLSDYISQLLGIVIPLYAKYGIALEAHLQNSISTFNADGRLNTIYIRDFEGLRIDEQLLNEAGYTTKHFHEKSRILTDSKTTVFNKVFYSTVQNHIGELILTVSKFIEDEEFESKLWDSVSEIIHNILNSLTDINTSRISEIKQIMFDRDIDYKCVTTMRLEDEAHHYTYIKVSNPLHG

SEQ ID NO: 71865 - protein, 586 aa, Staphylococcus haemolyticus
MTQNAWQNADTNIQYRILNALIKENIWQEQTIITTKDDQLDIQYHGCILSTHFNHNSVMSRYEFVGPITFRCGTNIMEVSTVEALLDMLSNHFDINIHQQLIDEIIHSRDSFVEIYKQFYQRQHNVQSSMQFSGMPTTLNFFAWLQHLNDANEINDLLYSESLVLEGHPTHPLTKTKLPLTMDEVKMYSPEFEKVIPLKIMLIHKDCAQATCIDNDEDFILKKVIPEYQTRIRKYAQSIHISLEDYFVILVHPWQYNHTIYDKFANWIANKFLLTTPFDVDSKATLSFRTMALINKPYHIKLPVNVQATSAVRTVSSVTTVDGPILSSALQNVLNQYPQLNVALEPYGLCAKTNDEDARQLACIVRETPYIANNGVTIVTGALVNPNPIDRHITVDSYIEWVNGELNNRGILTFIQNYSRQLITPLINLIQEYGIALEAHMQNTIVNLGPNYQMNFIVRDLGGSRIDLNTLTHKLKNINVSNQSLLANSIEEVIAKFQHAVIQNQLAELIHHFSKTEFVTEEELFTLVQDEVKLAINDNKPHAQALKDVLFGSKITVKALLRMRMSNRVKKYLNIELDNPIRDEVR

SEQ ID NO: 71866 - protein, 1509 aa, Staphylococcus haemolyticus
MGIMFDERLKRGLYDYREEHDACGIGFYANMNNLRSHDIIEKSLEMLRRLDHRGGVGADGITGDGAGIMTEIPFQFFKAHVNLDLPNEGDYAVGLFFSNEKIQGTKHETQFNDYFQSEGLKVIGYRDVPVDVNAVAPHVASTMPHIQQVFIDIRLIETPAKPLYIARKQIEQYAERQDLGLYFTSLSHKTIVYKGWLRSDQIKKLYLDLNHEDYQSKLGLVHSRFSTNTFPSWKRAHPNRLLMHNGEINTIKGNVNWMRARQRQLIQTLFGEEHTKIQNIVDEDGSDSAIVDNALEFLSLAMEPEEAAMLLIPEPWLYNKENDDNVRAFYEFYSYLMEPWDGPTMISFCNGDKIGALTDRNGLRPGRYTITKDNFIVFSSEVGVVDVPEVNVAYKGQLNPGKLLLVDFDSHKVVENNELKARIANQYPYKEWLDNHKVDLNLEGQTYHQPLLNSETLFELQRQFGYTKEDIYKYMAELVKGKKDPIGAMGYDAPLAVLNERPESLFNYFKQLFAQVTNPPIDAYREKIVTSELSYLGGEGNLFHPDETVLDRIQLAKPVLTLTQLDKIKQSKFNVKHLSTLYQDNLKEALERLGEAAIQATRDGHTILVLDDSELIDNDDESKLKEQRYAMPILLAISHIHQLLIREGLRMDTSLVALSGETREVHHVACLLGYGANAVIPYLAQHTIAHLTETHRLEGTVSDNVETYTRVLSEGVIKVMAKMGISTVQSYQGAQIFEAVGLSQEVIDDYFTGTQSKLSGLSIQQIDTENKMRQQRHNEYLDSGSVFQWRQQGQHHVFNPTTIHLLQHACRENDYTQFKTFSNAIHEQRNDHLRDLLEFKAQQSIHISEVESVESIVKRFNTGAMSYGSISEEAHQTLAQAMNKIGGKSNSGEGGENPKRYEIQEDGTVLSSAIKQVASGRFGVTSNYLQHAKELQIKVAQGAKPGEGGQLPGTKVYPWIAETRGSTPGIGLISPPPHHDIYSIEDLGQLIHDLKNANRSADVAVKLVSKTGIGTIASGVAKAFADKIVVSGYDGGTGASPKTSIQHAGLPWELGLAETHQTLKLNHLRSRVRLETDGKLMTGRDVALACALGAEEFGFATAPLVVLGCIMMRVCHNDTCPVGIATQNKDLRALFRGKADHVVNFMHFIAEELREVLASLGIRTVEELVGRTDLLQRSSRIDEQSKAATLDIEKLLDSDDGPNSKEINQNHHLDIGFDLNYLYKDAKQSIEDGKLFKGNYVINNEQRDVGVITGSYITQCHGIKGLPEGTIVAKTHGHAGQSLAAFAPSGLLVQHTGDANDYVGKGLSGGTVVIKAPNKQREREIIAGNVCFYGASKGKAFINGSAGERFCIRNSGVDVVVEGIGDHGLEYMTGGHVVNLGDVGKNFGQGMSGGVCYVFPSNLELFKRKNQLPTLAFERVTHKEEKALLKTMLEEHYRYTQSTKAASILNDFEHVADKVIKVIPKDYELMMQKIELQSRHLPQLDDAKLAAFYDERTTIEQELQPAVIY

SEQ ID NO: 71867 - protein, 241 aa, Staphylococcus haemolyticus
MATQKFITIYEQLKQRIHEGEYTYGQQLPSEHELLTLYGASRETVRKALDLLANDGMIQKIRGKGSVVIDQGITEFPFSELISFKEVQEELGLKHETEVLINELVKASSVLHVKKQLNISNDDVLIHVVRTRNVNQKVKILDEDYFLTSIVSNISDSVAKDSIYHYLETQLGLDISYSSKSITFEPFTEREYNVFGKIQPPYTATVRSVVYLKNTMPFQYNVSKHLATEFKFQEFSRRHKL

SEQ ID NO: 71868 - protein, 571 aa, Staphylococcus haemolyticus
MNYQALYRMFRPQSFQDVVGQEHVTKTLRNAISKGKQSHAYIFSGPRGTGKTSIAKVFAKAINCLNPQDGEPCNECAICKGITQGTNGDVIEIDAASNNGVDEIRNIRDKVKYAPSESKYKVYIIDEVHMLTTGAFNALLKTLEEPPAHAIFILATTEPHKIPPTIISRAQRFDFKAIGTEQITDRLRFVAEEQQLDYDNEALEFIAKASEGGMRDALSIMDQAIAFGDEHLTLQDALDVTGSVDEAALNELFKDVIDGNVKNAFTRYHQFISEGKEVNRLINDMIYFVRDTIMNKTVNNHAEFDALMNFDLDMLYHMIDIINDTLVSIRFSVNQNVHFEVLLVKIAEMVKSQPDTVTNVATTQVASQPNNEVLLQRMEQLENELKTLKAQGIAQASSKQQSSQSNTRGKRQNKGTFSMTNIAKVLDEANKEDIQLLKKHWLEVVDYAKKNDKKSLVSLLQNSIPVAASEKRVLIQFDEEIHCEIVNRDDEKRTSIENVVRNIINKNVEVVGVPSDQWMRVRTEYINSRKQHDKEENQTPSNEGEEQQDTDVAQKARDLFGEETVHLIDEE

SEQ ID NO: 71869 - protein, 105 aa, Staphylococcus haemolyticus; identical to SEQ ID NO: 44473

SEQ ID NO: 71870 - protein, 198 aa, Staphylococcus haemolyticus
MHYPEPISKLIDSFMKLPGIGPKTAQRLAFHTLDMKEDDVVQFAKALVDVKRELTYCSVCGHITENDPCYICEDKQRDRSVICVVEDDKDVIAMEKMREYKGLYHVLHGSISPMDGIGPEDINIPTLIDRLKDEEVKELILAMNPNLEGESTAMYISRLVKPIGIKVTRLAQGLSVGGDLEYADEVTLSKAIAGRTEM

SEQ ID NO: 71871 - protein, 201 aa, Staphylococcus haemolyticus
MLELKLQYQLKKTFIDININDTVPKIYAIRGPSGIGKTTVLNMIAGLRTPDKAYIKINDRLITDTEHKVNLKIQNRKIGYLFQDYQLFPNMTVYKNITFMSKPSVHIDDLMDRLNIHHLKEQYPSTLSGGESQRVALARTLSTKPDLILLDEPFSSLDDATRGEGIKLIKRTFKEWKIPIIFVTHSNFEAEVLADKIIKIG

SEQ ID NO: 71872 - protein, 349 aa, Staphylococcus haemolyticus
MSDFQREQRKNEHVEIAMAQSDAPQSDFDRVRFVHHSIPNINVDEVDLTSRTTDFDMTYPIYINAMTGGSEWTKQINAKLAVVARETGLAMAVGSTHAALRNPKMAESFSIARQTNPEGIIFSNVGADVPVDKAVEAVSLLDAQALQIHVNAPQELVMPEGNREFSTWLDNVAAIVQRVDVPVIIKEVGFGMSKELYKDLIDVGVTYVDVSGKGGTNFVTIENERRSNKDMDYLANWGQSTVESLLESSAYQDSLNVFASGGVRTPLDVVKSLALGAKAVGMSRPFLNQVENGGITTTIEYVESFIEHTKSIMTMLNARDISELKQSKFVFDHKLMSWIEQRGLDIHRG

SEQ ID NO: 71873 - protein, 311 aa, Staphylococcus haemolyticus
MYTQGNPKLWTGRLDSETDPKQFRHFQTVKFANLENMENVSDKTGVGLLGYAVDKGVENNKGRIGSRKGPDIIKHEFAKLPDLSECEMLIDYGNVEHTSNHLRETQQEMARLSAKVIKQHKQAFLIGGGHDIAYAQYLATREVYSDASIGIINIDAHFDTRPDEPPTSGTMFREILDNDENVDYLVLGLAQGGNTRALYDYAKDNNIIYVYADELLHQVSPTIKDKIERFIHDHDTIMFTICMDVIDSAFAPGVSSPSVLGLYPHSVFEISKRVILSDKVSSISIAETNPDYDVDNRTSKLAANLIHHFLV

SEQ ID NO: 71874 - protein, 388 aa, Staphylococcus haemolyticus
  MISC_FEATURE (385)..(385): X=any amino acid
LSYKQQWLGEISQNIMAGILMGLALLPVAIAFSFIVHISPTIGLMSCGLMMLFISFLGERISMVSGPSSGISIVGAPLVEQYNIHYLIMATLIMGIILIIFGMCHIDKILNHIPDTVVIGFMNALGILLLTTQIKYIFGITTATYLVAIATFLIIYLSSIFIRFMPAPLIAIIVVTIASYFLKPNVQLVHDLAEIRLTFPKISVYTELLNLHALSIITLYALTMSIISVVQTNLTNEMMDVITQSHSNKDREVIGQGLANLIVGLLGGYGSSALVGQSKFNFKMGTTTRLATFVTGLFLLSCVVILGPIVGFIPMAVLASVLITISLNTFDRRTFKHLKEAPIKHSIVMFITIILILMSHNLAIGVVIGTLIYYVIHFIFTKYGXLSL

SEQ ID NO: 71875 - protein, 645 aa, Staphylococcus haemolyticus
MFKERCIMSNQQINIQFPDGSNKAYQAGVLASDVAKSISQSLYKEAVVCRMNDRLVDLTHPLQEDCELTFYTLKDQEGLNVMRHSAAHVLAQALTRLYPDVKLTIGPVIEHGFYYDIDLDESISEADLNKIEKEMKKIHSENLKFERQNLSYAEAKNIFKDNPYKLELTEEHKDDQLSLYQQGEFIDLCVGPHVPSTKFVNHFKLTKVSGAYWRGNSDNKMLQRIYGVAFRSKDQLDDYFEFLREAEERNHRRLGKQLKLFMFSEEAPGMPFYLSNGQFIRNQMESFLREVQLKHDYDEVRTPLMMNKRLWEESGHWDHYHENMYFTKVDENDYALKPMNCPGHMLIFKNELRSYKDLPLRIAEFGQVHRHEFSGALNGLLRVRTFCQDDAHIFIMKSQIKSEVQEILKLIDYIYSVFGFEYSIELSTRPDDYLGDLDLWNEAEQSLAHVLDDLGLDYSINEGDGAFYGPKIDVHIKDALNRSHQCATVQLDFQMPEKFELTYINEQNEKERPVVLHRAVFGSLDRFFGILIEHFKGAFPLWMAPVQVNLIGVSDNNDDYVRTVAEVLRDENIRVAIDDRDEKLGKKIRESQMNKIPYTLVLGDDEQQHHTVSVRKYAHDDNETMDIQAFIEKLKHEIESKELLV

SEQ ID NO: 71876 - protein, 152 aa, Staphylococcus haemolyticus
MKSIETMQSYHLLKLLFSNSEVSYVLEEWNQQYEAVEIKTRNGHFKSRLAQKTPNKKGYFFAMWKKDENNTNVPFTEDDLENQLIVNIVDDNWRGQFIFPKDILIKKGILKSDESKGKMALRVYPPWETELNKTATKTQAWQCAYFNEITHE

SEQ ID NO: 71877 - protein, 680 aa, Staphylococcus haemolyticus
MEIFETILIFLAVVIVSSFVHTFLPKVPLAFIQIALGMLLFLTPVPVEFNFDSELFMVATIAPLLFVEGVNVSRAHLRRYIKPVMLMALGLVITTVIGVGLFIHWIWPTLPIGAAFAVAAILCPTDAVAVQAITKGKVLPKGAMTILEGESLLNDAAGIISFKIAVGVLITGSFSLFEAVQQFLIASIGGAIIGLLIGIALVRFRLTLTRRGIENINMFTFLQLLTPFVTYLVAEMFHASGIIAAVVAGLVHGFERDRIAQTRTRLQMSYNHTWNILGYALNGFVFSILGFLVPEVIGNIVKTEPHNLLFLVVITALVALAVYLFRFIWVYVLYPLFYLSVSPFQKLMNEEGEDKKKEKPPKRSMYALIMTLCGVHGTISLAIALTLPYFLADHHAFTYRNDLLFISSGMVIISLVIAQVVLPFVTSSAPKAKIGSMNFKEARIYILEHVIDYLNHHSSFETSYRYGNVIKEYHDKLTFLKSVEKDDENSKELERLQSLAFKVETKTLERLADDGEITASVLENYMRYAERTQVYRQASLIRRMIVGARAVLLKRRIRTRTNAASSLSVTDNLMELSKINKIVHYNVVSRLVDEANEDNKLEVGMICDGYLMRIDNLSPSNFFNTRAEDSITKIKLNALREQRRVLSSLTDDGEITESTALKLREAINYDEMVIVDSLTD

SEQ ID NO: 71878 - protein, 424 aa, Staphylococcus haemolyticus
MKLIKNAQILDNGELKQASILIDGQHIKEINNNIEVDENVEVIDAQGHFVAPGLIDVHVHLREPGGEHKETIKTGTKAAARGGFTTVCPMPNTRPVPDSVEHMDRLQQLIQDNAQVRVLPYASITVRQAGKEHVDFDALAKQGAFAFTDDGVGVQESAMMYEAMQQAAKVNKAVVAHCEDNSLIYGGAMHQGKRSEELGIPGIPNICEAVQIARDVLLAEAANCHYHVCHVSTKESVRAIRDAKAAGIHVTAEVTPHHLLLTEDDVPGDNAIFKMNPPLRSKEDRDALLEGLLDGTIDCIATDHAPHAKEEKAQPMTKAPFGIVGSETAFPLLYTHFVKNGDWSLQQLVDYLTIKPAQTFDLPYGKLEEGCFADLTIINLDEEREIKGEDFLSKADNTPFIGYKVYGNPILTMVEGEVKFKEDK

SEQ ID NO: 71879 - protein, 366 aa, Staphylococcus haemolyticus
MLERRYLVLEDGTYYEGYKLGSNDLSVGEIVFNTAMTGYQETISDPSYTGQIITFTYPLIGNYGINRDDFEALTPTLNGVVVKEASTHPSNFRNQKTLHDVLVQYKIPGISGVDTRSITRKIRQHGVLKAGFTDNRDDIDSLINTLKSTELPRDEVETVSTKTPYVSTGSDLSVVLLDFGKKQNIVRELNMRGCNVTVVPYNTTAEEILAMSPDGVMLSNGPGDPDVVEVAIEMIKGILGKIPFFGICLGHQLFALSQGGTSFKMKFGHRGANHPVKDLRSGKVDITSQNHGYAIDKNSLVNTDLEVTHIALNDGTVEGLRHKTLPAFSVQYHPEARPGPSDSNYLFDEFMTMMKEFKEKEQTANA

SEQ ID NO: 71880 - protein, 1057 aa, Staphylococcus haemolyticus
MPKRDDIQTILVIGSGPIIIGQAAEFDYAGTQACLALKEEGYRVILVNSNPATIMTDKEIADKVYIEPLTHDFIARIIRKEQPDALLPTLGGQTGLNMAIQLHDSGVLEANNVKLLGTELKSIQQAEDRELFRSLMNDLNVPVPESDIVNTVEQAFAFKDEVGYPLIVRPAFTMGGTGGGICYNDEELKEVVSNGLHYSPATQCLIEKSIAGYKEIEYEVMRDKNDNAIVVCNMENIDPVGIHTGDSIVVAPSQTLSDVEYQMLRDVSLKVIRALGIEGGCNVQLALDPHSFNYYIIEVNPRVSRSSALASKATGYPIAKLAAKIAVGLTLDEMLNPVTGTSYAAFEPTLDYVISKIPRFPFDKFEKGERELGTQMKATGEVMAIGRTYEESLLKAIRSLEYGVHHLGLPNGESFDLDYIKERISHQDDERLFFIGEAIRRGTTLEEIHNMTQIDYFFLNKFQNIINIEHELKNHPGDLDYLKYAKDYGFSDRVIAHRFGMTESEVYQLRQDNNIKPVYKMVDTCAAEFESTTPYYYGTYETENESIVTDKEKILVLGSGPIRIGQGVEFDYATVHAVWAIQNAGYEAIIVNNNPETVSTDFSISDKLYFEPLTEEDVMNIINLEQPKGVVVQFGGQTAINLADKLAKHGVKILGTTLENLNRAEDRKEFEALLHTIDVPQPKGKTATSPKEALENAREIGYPVVVRPSYVLGGRAMEIVNSDAELENYMEQAVKASPEHPVLVDRYLTGKEIEVDAISDGETVIIPGIMEHIERAGVHSGDSIAVYPPQTLSQEDIDTLEDYTIKLAKGLNIVGLINIQFVIAHDGVYVLEVNPRASRTVPFLSKITDIQMAQLAMQAIMGTRLKDLGYKQGVQPYSEGVFVKAPVFSFNKLKNVDVTLGPEMKSTGEVMGKDLTLEKALYKGLTGSGVEVKDHGTVLMTVSDKDKDEIVKIAHRLNEVGYKILATQGTAEKLKEDNIPVEVVGKIGGDDDLLTRIQNGEVQIVINTMTKGKEVERDGFQIRRTTVENGVPCLTSLDTANALTNVIESMTFSMRTM

SEQ ID NO: 71881 - protein, 202 aa, Staphylococcus haemolyticus
MAKEIAKSLLDIEAVTLSPNDLYTWSSGIKSPIYCDNRVTLGYPEVRRAIRDGLSQMIIEQFGNVDIVSGTATAGIPHAAYISEKLNLPMNYVRSKSKSHGKQNQIEGAVSKGKKVVVVEDLISTGGSSITAVEALKDAGADVLGVVAIFTYGLKKADDMFNEIDVPFYTLSNYNELIEVAREEGKISENDIQTLVEWRDNL

SEQ ID NO: 71882 - protein, 134 aa, Staphylococcus haemolyticus
MEIPKITTFLMFNNQAEEAINLYTSLFENSEILTMVKYGEEGPGVPGTVQHSIFTLNGQVFMAIDADNGEDLPMNPSISLYITVDNAMEMERLFNGLKKEGAILMPKTAMPPFREFAWVQDKFGVSFQLALPEK

SEQ ID NO: 71883 - protein, 565 aa, Staphylococcus haemolyticus
MAYDGLFTKKMVESIQFLVSGRIHKINQPENDTILMVIRQNRKNHQLLLSIHPSFSRMHITTKKYDNPFEPPMFARVFRKHLEGGIIKAIRQIGNDRRIEIDIESKDEIGDTIYRTVILEIMGKHSNLLLVDDNYKIIEGFKHLTPNTNQYRTVMPGFKYEAPPTQNKLNPFNITGEEALKYVDFNSGKIAKQLLNTFEGFSPLITNEIVNRYQFMTTETLPKAYDEVINQTLKTPVPIFHKNHETGKEDFYFMKLKQFHDDMVEYASLHELLDRYYDARGERERVKQRANDLVRFVQQQSQKYQHKLSKLIDEYESAKDKDKQQLYGELITANIYRINQGDDAVTVLNYYTNEEITIPLNPTKSPSVNAQYYYKQYNRMKTRERELDHQIHLTRENIDYFANIEQQLEHITVDEIDDIRDELAEQGFMKQRKNIKKKKNDKIQLQTYISTDGDTILVGKNNKQNDYLTNRKAQKSHIWFHTKDIPGSHVVILNDAPSEETIKEAAMLAGYFSKAGNSGQIPVDYTEIRNVHKPSGAKPGFVTYDNQKTLFATPDYDKIQSMKVK

SEQ ID NO: 71884 - protein, 675 aa, Staphylococcus haemolyticus
MIGKIVSERYKIVDKLGGGGMSTVYLAEDTILNREVAIKAISIPQNEKEETMKRFEREVNNATQLSHENIVEVYDVQEDEECFFLIMEYIDGPTLSEYIHSHGPLSVDTAIDFTNQILKGVAQAHEKLIIHRDIKPQNILIDKNKTLKIFDFGIAKALSETSMTQTNHVLGTVQYLSPEQAKGETTNEATDIYSIGIVLYEMLVGEPPFNGETAVSIAIKHIQDSIPNVTELRSEIPQSLSNVVLRATEKKASDRYQSVKDMKEDLSSVLVSSRANEKKHSIEEDETNTVSIDRQDIKSKIKEENEQKQIAQTMQIPIVNEHHFQTSEDQIYEPPKKKRSKKKKFAIALILLLLVASLFGFIAMGMFGSKYAEVPDLKGKTEKEAEKILRQSHLEIGNISRDYSDDYPENKIIKTKPKQGERVNQHEKVDIVLSKGPERAKMPNVIGMKKVDALDKLKQSKLDHVTVNQEYNNQVPKGAIAKQSVNPDSYVRINDHQITLTESLGVKKVYVKNYENKNYQTAKKELEKNGLKVQMTTESSNNVKKDNIISQSPKNTEVEEGSTVQFIVSKGKTSSKDEDKDSEKSKSSSEDKSDDTQKVKNYTETYHIPYTGDDESQKVQVYIRDKDNSGTSASQTFSIKDDKTITIPLKIEQGSDAGYTIRVDGDVIADKDIEY

SEQ ID NO: 71885 - protein, 385 aa, Staphylococcus haemolyticus
MTQQVQDTSLSASTSTSVSDSTSTSTSLSASTSTSVSDSTSASTSLSASTSTSVSDSTSTSTSLSASTSTSVSDSTSMSTSLSGSTSTSVSDSTSASTSLSGSTSTSVSDSTSTSTSLSASTSTSVSDSTSTSTSLSGSTSTSVSDSTSASTSSSESTSTSVSDSTSASVSTSISTSISMSESSSTSASTSDSTSTSASTSESRSASHSMSGTDSNNTSSSDSKSHSISNSDSNTTSDSASASTSISDSSSTSTSDSNASHSFSTSHSVSESNSMSTSHSQFDSISTSESMSGTDSTSLSTSLSHSASTSNSTSMTTSESQSNNDSQMHSNSLHHDAKDELPDTGDSDSNSTGLVSAVAAMLAGLGLFGKSRKNKKDKKNKGSEQ

SEQ ID NO: 71886 - protein, 524 aa, Staphylococcus haemolyticus
MKQFIPAWYDSNNWWDSAVVPFYIKRKTTEFDDMVSLMLMHHKNNEPFNTIILNYNPLLRLFLHRHELYEMNYWSLFDEIQGATHGTPVAIDYRELSWPEDTEFIYTPFQVLAIKSDNQFSKMIFSQEGYLICIEDYEHKTLSRKLIFDDRGFVSSIEIYHDGQSPMKRYYLAVKGQIIMTQDFMTEKITIQPEFYDLFQKKSYGNMDELIFEKIQQYNTSTLADDDKVIIAADKRHNYVLTDTFKPENMCFSLFSQRNAYIDATLLETIGKANQCIVDTQANATKLNQFITQNPEYQPFKIMRVTPFDAQMLPNISSQLYETNIGVWIDSLSEEDLKTVIDQLSQYVSQHEQTIIHLLTRLNENDIQQWLRDEIDQLNALLNVEEEEFSPEVQDILQTELEEDEIEKVKLIYVPFEEDLMKELSQLRVIVDLNQEPDLYLQISSISAGVPQINRRETDYVDDKLNGLIIDNIQQLRVALNYFINNLKNWNYSFAHSIKLSDEFSSEKIIQRLNSVIEGEIHGT

SEQ ID NO: 71887 - protein, 520 aa, Staphylococcus haemolyticus
MARKFRILQVGGKDLEPLFDSKKGVEWDYLDDALFTFDSGYIEAVKSIIKAFGNFDLVFVQSAYSPELMDLLRVVATPHNTVIDAQMWSPNYDAEPLIQHKFVKKLNYQTEEDLHHQLLAVTFPGQYGDRVSPIKTTVNPHFQGTYKYEGNKSLVLEGDFGTSFKPIVTWTQSLVSDEDKVNELWPEYSLEGDVEIEYTFRLSPFGSTEYPDTTLRFEHKDLNQPIQLPLRTTQMNVSVSLKAKGKGKLRIGAIHKRWSRLEMGQFIMGGQRFTDEKRDEFIHYFNPGDMKPPLNVYFSGYRPAEGFEGYFMMNKMNAPFILIGDPRLEGGSFYLGSETFEQGIINVIQNALDFLGFKHDELILSGLSMGSFGALYYAAQLEPAAVVVGKPLLNIGTIADNMKLLRPNEFGTANDVLLANTGGISTSDVQHLDSRFWEKLKNSNLTNTIFAIAYMYNDDYDATAFQNLSPVLSQQGSHVMSRGVPGRHNDDSPTITSWFVNFYNIILKDQFGRDSDVSIK

SEQ ID NO: 71888 - protein, 796 aa, Staphylococcus haemolyticus
MANQVSNVINSMRLKRLQKQLTAVNRLSDQMRDYSDEALQAKTAEFKQRLEKRETTLDKLLPEAYATIREASKRVLGMYPKDVQVMGAIVMHQGNIAEMQTGEGKTLTATMPLYLNALTGKSAFLITTNDYLANRDFQEMRPLYEWLGLTASLGFVDIPDYEYADNEKQMLYNHDIIYTTNGRLGFDYLFDNLADHINAKYLPELNFAIIDEVDSIILDAAQTPLVISGAPRVQSNLFHIIKMFVETLVEDEHFKLNVNKKEVWLTDKGIDVANHYFKVNNIYLPQYFDLVRVINLSLRAKYLFKDNLDYFIYNGEVVLIDRITGRMLPGTKLQSGLHQAIEAKEGVELSQDLSVMATITFQNLFELFNGFSGMTGTGKLGEKEFFDLYSKLVVEIPTNHPIIRNDKEDRVYAKSDEKNKAILEKVKEIHATKQPVLLITRTAEAAEYFSTQLFKDNIPNNLLIAQNVAKEAQMIAEAGQLGAVTVSTSMAGRGTDIKLGSGVYELGGLAVIINEHMENSRVDRQLRGRSGRQGDPGVSQIYVSLDDYIVKRWSNSKLAENEKIKDVDPDKLQDSPFFRRRVRGIVSKAQRVSEETSMMAREMANEFEKSIGIQRDRVYEERNRILETSDFSAFDFDSLARDVFDYDLRTKHIHNKDDIINYIYEQLSFSFKDDTISQQIQTREQTIDYLVQQFNKQLKENMKIANNDYFKLRFLQKAILKAIDVEWINQVDQLQQLKASVNNRQNGQRNAIFEYHKVALETYEMMLINIKRATIRNLCLSILTFDKDQDLVVHFP

SEQ ID NO: 71889 - protein, 441 aa, Staphylococcus haemolyticus
MFKKKNQIILFIILFSYFLILMDNSIIFTSTVKIAQSLHMDKASLSWVSNAYTITFGGFLLLAGRLGDLLGRKRIFLSGLVLFGISSLCIGLAQNSIQIITFRAIQGIGSAIIAPTTLALLMDHFEGKERSKAISYYGATAGIGSSIGLLLGGWLTSTISWRSGFLINVPFTIILIILTLLFVKSTTVHRVRIDFIGAILSVIAIMTLVYGMTNESIIAVIIGFILLIIFVIFERKLPFALMPMSLFKNKVRTGAYVGRFIFMMAMLSYWFILPQMMQHLYHYTPLQAGIAFLPLTIINFIAALYLPYFTEKLGNTNVLLLGQIILTLGLIVTTSLNPLHGYWLAIGIPMLLVGLGQGWLLAPITSAGIHEVDASLSGAASGMTNTMHQLGGPIGLSIIVFFTSNITHIIHYYHVVMWLIVIYMIIGFIVLWMTQRQTKSI

SEQ ID NO: 71890 - protein, 253 aa, Staphylococcus haemolyticus
MSSTLEIKDLHVSIEDKEILKGVNLTINTGEIHAIMGPNGTGKSTLSSAIMGHPSYEVTQGEVLLDGVNILELEVDERAKAGLFLAMQYPSEITGVTNADFMRSAINAKREEGQEINLMQFIKKLDKEMDFLDIDKDMAQRYLNEGFSGGEKKRNEILQLMMLEPKFAILDEIDSGLDIDALKVVSKGINEMRGEEFGALMITHYQRLLNYITPDKVHVMYGGKVVKSGGPELAKRLEEEGYEWVKEEFGAKE

SEQ ID NO: 71891 - protein, 153 aa, Staphylococcus haemolyticus
MNFNNLDQLYRSVIMDHYKNPRNKGVLDNGSMTVDMNNPTCGDRIRLTFDIENGIINDAKFEGEGCSISMSSASMMTEAVKGHSLGEAMQMSQEFTKMMLGEDYEITEEMGDIEALQGVSQFPARIKCATLAWKALEKGTVEKEGKAEGTTEE

SEQ ID NO: 71892 - protein, 273 aa, Staphylococcus haemolyticus
MYLISQYGVDFGTGYAIEFTGETIRSLSMEARMTICNMAIEAGAKYGLMQPDEMTFAYVKDRKYARNFDRSINDWRQLYTDADAKFDKVIKLDVTNLEPQVTWGTNPEMGVSFNTPFPKIKNINDERAYQYMGLKPGQKAEDIDLGYVFLGSCTNARLSDLVEASRIVKGKQVHPKITAIVVPGSRSVKKEAEALGLDKIFKDAGFQWREPGCSMCLGMNPDQVPEGIHCASTSNRNFEGRQGKGARTHLVSPAMAAAAAIEGRFVDVRKVVV

SEQ ID NO: 71893 - protein, 579 aa, Staphylococcus haemolyticus
MAKIKANEALVKALEAWDIDHLYGIPGDSIDAVVDSLRTVRDSFKFYHVRHEEVASLAAASYTKMTGKIGVALSIGGPGIVHLLNGMYDAKMDRVPQLILAGQTNSTLLGTKAFQETNITDMVSDVLYYNHQIQKGDNVFEIVNEAIRTAYEKRGVAVVVCPNDLLTQKIKDTNSSCYRHSKPKAPTPTLRSIKKAAKLIDKSKKPVMIIGVGAQNAKDELREFVEAAKIPVIHTLPAKTIIPDDHPYSIGNLGKIGTKTSYQTIQDADLLIMAGTNYPYVDYLPKKNIKAIQIDTNPDVIGHRFSVNVGIVGDAKLAFHQLTDAIKHVPQRPFLEKTLERKAVWDKWMEQDMNQESTPIRPERLMKSISKYSDDDAVFSIDVGTSTVWSTRYLNLSVNNKFIISSWLGTMGCGLPGAIASKIAFPKRQAISISGDGAFQMVMQDFATAVQYDLPMTIFVMNNKQLSFIKYEQQAAGELEYAIDFSDMDHAKFAEAAGGKGYVLKDPSRIDEVVEAALNENVPTIVDVHVDPNAAPLPGKIVNEEAINYGKWAYRSITEDKKLDFDEIPPISVAAKRFL

SEQ ID NO: 71894 - protein, 657 aa, Staphylococcus haemolyticus
MFKKLFGQLQRIGKALMLPVAILPAAGLLLAIGTAFQGEALQQYLPFIKNGVIQNIANMMTGAGGIIFDNLPIIFALGVAIGLAGGDGVAAIAAFVGFIIMNKTMGAFLNVTPAQLEDPSKGFANVLGIPTLQTGVFGGIIIGALAAWCYNKFYNISLPSYLGFFAGKRFVPIMMATTSFILAFPMAWIWPFIQNGLNAFSTGLLDSNTGLAVFLFGFIKRLLIPFGLHHIFHAPFWFEFGSWKNAAGEIIRGDQRIFIEQIREGVHLTSGKFMQGEFPVMMFGLPAAALAIYQTAKPENKKVVGGLMLSAALTSFLTGITEPLEFSFLFVAPLLFFIHAVLDGLSFLTLYLLNLHLGYTFSGGFIDFVLLGILPNKTPWWLVIPVGLVYAVIYYVVFRFLIVKFNFKTPGREDKQASVANTSASKLPFDVLDAMGGKENIKHLDACITRLRVEVNDKSKVDVEGLKALGASGVLEVGNNMQAIFGPKSDQIKHDMARIMNGDITKPSETTVTEDTSDEPVQLEEVKETDIYAPGTGHIIPLSEVPDKVFSEKMMGDGIGFVPEKGGIVAPFDGTIKTIFPTKHAIGLESDTGIEVLIHIGIDTVKLNGEGFESLVDVNEPVTQGQPLMKINLAYLKEHAPSVVTPVIITNQGDKTL

SEQ ID NO: 71895 - protein, 504 aa, Staphylococcus haemolyticus
MRRSNIYLKGPVSMNIYNKVTLSVILVITILISFVFYYFNKEDRPDKDTLFENKIADHKSSGSNKKYGVASNNAIATRVGNKIIEDGGNAVDAAMGVSYALAVTEPHSSGLGGGGATLTYNGNEGEEPKVYEYKTLSSYNYKKGDEIGTPGFVQGIHDMHQREGKMDEKKIFSYIVPLAEDGFEVDSELERSLKIYGSDIDRNSPFFKGKRTVREGDVVKQPALAKTLKGIRDKGPKYFYKDIAKSVSKQVDSELIEKDFSTFKTEEKKPVSTKYLNNTIYSASNPLGGVLMLQGLKIDESANSNNDRTDYINGIIKSRDVMYRNRDIVNGQEANNDSHLSENYLLDNLNNVNSGGNEMNSDFDTSLDTTSTTHFVVIDKNGKLASTTNTLSSFFGSGKFVKQGFYMNNSLTNFSSDPNSPNYGGKHKAPRSYTSPSIVVGPDFYMGIGTPGGNKIPTILNEVLIDYLRGDGTLQDSIDKPRIYNDGGTVMMRCDSDDVSFIQR

SEQ ID NO: 71896 - protein, 254 aa, Staphylococcus haemolyticus
MATSIGALNANASEQTEGSQKGTMGYGYQKYLKNHPNEQSNATSNRSTFSTKSKVITTQNGDRVLDISEWQGNLTDSQVKQLKKDYNFIIIRGQYGSEYVDQCLENNSALLDKNNMKFGVYSYSLYENADDARNEAQTLYSRAPKASFYVNDFEQNSITSGDADTATKAWADEMKQLAGNKKVLFYSYENFMTNNVPNAVSAYDGYWLAAYQEQEPNREKVLWQYTDSYYAPELNQNVDANYIDANVTADWFTS

SEQ ID NO: 71897 - protein, 365 aa, Staphylococcus haemolyticus
MALTAGIVGLPNVGKSTLFNAITKAGALAANYPFATIDPNVGIVEVPDSRLNKLTEMVKPKKTIPTTFEFTDIAGIVKGASKGEGLGNKFLSHIREVDAICQVVRAFDDENVTHVSGRVNPLDDIEVINMELVLADLESVEKRLPRIEKMARQKDKTAEMEMRILSRIKEALENGDPVRSLDFNEEDQRYVNQAQLLTSKKMLYIANVGEDEIGDEDNDKVKAIREYAAKEDSEVIVISAKIEEEIATLDDEDREMFLEDLGIEEPGLDVLIRTTYDLLGLSTYFTAGVQEVRAWTFRQGMTAPQCAGIIHTDFERGFIRAEVTSYDDYVEHGGEQGAKEAGKQRLEGKEYIMQDGDIVHFRFNV

SEQ ID NO: 71898 - protein, 67 aa, Staphylococcus haemolyticus
MTSNYGINDIVEMKKQHACGTNRFKIIRMGADIRIKCENCQRSIMIPRQTFNKKLKKILVSNQDTEG

SEQ ID NO: 71899 - protein, 293 aa, Staphylococcus haemolyticus
MNQVKNVLSSLFEPLTKIETYENLSIKIALIIIYIIVALIVIAILNKVIEQAFKIQNRSSKGNKKRSRTLISLVQNVVSYIVWFIVITTILSKFGISVEGIIASAGVVGLAVGFGAQTIVKDIITGFFIIFENQFDVGDYVKINSGGTTVAEGTVKSIGLRSTRINTITGELTILPNGSMGEITNFSITNGFSIVEIPVSVEENLDKVEKRLNKLFTAMRSKYYLFITDPVVEGIDSLDETKVTFRISAETIPGEGVSGSRILRKEIQRVFVQEGIKLPQPIYIKNNNQQGKS

SEQ ID NO: 71900 - protein, 464 aa, Staphylococcus haemolyticus
  MISC_FEATURE (16)..(16): X=any amino acid
KDKVHRYLLHFLVKLXTTVIGMKSKEHIKSIILFLLVMMSVVLTFMVWNFSPDLNNIDSTDSKKSNTKTIGKPMSANIENVISPYQIVEVKGDKVKGLAPSRAQLSQVTGTLKNHEVSKVEHIHRDYNLNIPMLNDHFTVLDFTYDMPLTTYLGQVLNSSAKVPKNFKFNRIIVSQNPKENLELYAISEDRHEVMKVTLTTKANHFIKVMDHLNKEMQKYSEVITNKDTIDKATHIFAPNRPKDMRSYRMVYDTIPVETMNAILFDDSVIIRSGKSGSTTYNNNTGVTNYNDESKKYHYKNLSEDESSSSDMDSTIPSTFEYINGHGGFFNDDFRLFNTDNSSGELTYQLFLNGHPTFNDQQLNVIEVTWGDKGIYDYKRALLRSSVPLEGKTKSLDSVESVRSSLANNHTIDFEKVTNMVIGYKEDDQPDKDDIEVQRNSEFVPTWYIQYDGDWYAYEDGRLE

SEQ ID NO: 71901 - protein, 389 aa, Staphylococcus haemolyticus
MHIGFKGRELFLLDKKLNGGFDMKDTQLAQISLTKDITGAIANPIYLSTAYQHPHLGQSTGYDYTRTKNPTRSAFEESFAKLEGGIASFATSSGMAAVQLICNLFQPGDEILVAFDLYGGTFRLFDFYEKQYGIKFKYVDFLNYEEVVNAITPNTKALFIEPISNPQMIEIDVDPYYILSQQHNLLTIIDNTFLTPYLSTPLEDGADIVLHSATKYIGGHNDVLAGVVTVKDGSLAEQLGQLHNMIGATLSPIDSYLLQRGLKTLHLRIERSEANAKKLAERCKVSSAIDEVLYSGKTGMLSLRLNKDFSVAKFLENLEICIFAESLGGTETFITFPYTQTHVDMPDEEKDKRGIDEHLIRLSIGIEDYNDIESDILRALENSKVGVIS

SEQ ID NO: 71902 - protein, 612 aa, Staphylococcus haemolyticus
MSRLLNQLQNNVLVADGAMGTILYSEGLDTCPEAYNLTHPEKVESIHRSYIEAGADIIQTNTYGANFEKLRRFGLEHKVKDIHKAAVAIAKRAARPDTFILGTVGGFRSLQQEELPLSTIQYHAENQIDTLVEEGVDGLLFETYYDLEELTNIVTTTRRKYDIPIIAQLTASNTNYLVDGTEINKALQQLVACGANVVGLNCHHGPHHMQRSFSHIELPETAYLSCYPNASLLDIENSEFKYSDNAQYFGDVAQELINEGVRLIGGCCGTTPQHIAYIKSSVKDLKPVKNKNVIPINRQTNRAVTHTYKHNLTTKVKNGPTVIVELDTPKHLDTDLFFENIGKLDEANIDAVTLADNSLATVRVSNIAAASIIRQRYNIEPLVHITCRDRNLIGLQSHLLGLSLIGVNEILAITGDPSKVGHLPGATNVYDVNSKGLTELALRFNQGINTDGDALKKHTNFNIAGAFDPNVRKLDGAVKRLEKKVAAGMNYFITQPVYSKEKIKEVYEATKHLNVPLFIGIMPIASYNNALFLHNEVPGIKMSEDVLSQFKAVKDDKEKTKALSLRLSKELIDTVHEYFNGLYIITPFQRIDYSLELAAYSKAITQNKEAIS

SEQ ID NO: 71903 - protein, 355 aa, Staphylococcus haemolyticus
MGLNKEAVKIGFAYVGIVVGAGFSTGQEVMQFFTPYGLWSYIGVLISGLILGFIGRQVAKIGTAFEATNHESTLKYLFGEKFSKIFDYILVFFLFGIAVTMIAGSGSTFQESFGIPTWLGALIMTIVIYLTLLLDFNKIVSALGIVTPFLIIMVILIAVYYLFAGSVPLNEVNSTVDKTSVFWGIVRGLMYGGLAFAVGFSTVVAIGGDASKRKISGGGATFGGVIYTILLALINFALQSEYPKIKDVEIPTLTLANAIHPWIGLVLTVIMLTVMYNTILGLCYSFAARFIEPYSKKYHIFIIIMMIAAFILSFVGFADLINFLYNIMGVVGLFIVVAVLIKYYVRKSDNKDHIA

SEQ ID NO: 71904 - protein, 334 aa, Staphylococcus haemolyticus
MEYVLIITIAIVIFSLIFDFINGFHDTANAIATAVSTRALTPRTAIFLAAIMNFIGALTFTGVAGTITKDIVDPFKLHNGLVVVLAAILAAIIWNLLTWFYGIPSSSSHALIGSIAGAAIAAQGFGVLHYQGFTKIIIVLIISPIIAFCVGFIMYTIVKIVFKNANLTRANRNFRFFQVFTAALQSFSHGTNDAQKSMGIITLALIVANIQDPTNVEPALWVKVACATAMGLGTAIGGWKIIKTVGGNIMKIRPANGAAADLSSALTIFVASSLHFPLSTTHVVSSSILGVGASNRAKGVKWNTAQRMIITWVITLPISALLAALIFWVMNIFL

SEQ ID NO: 71905 - protein, 55 aa, Staphylococcus haemolyticus
MRQGIHPDYHKVIFLDTTTNIKFLSGSTTTSSETMEWKHGNEYPVIRLDVSSDSH

SEQ ID NO: 71906 - protein, 238 aa, Staphylococcus haemolyticus
MGRKWNNIKEKKAQKDKNTSRIYAKFGKEIYVAAKSGEPDPESNQALRLVLERAKTYSVPNHIIDRAIDKAKGAGDENYDHLRYEGFGPSGSMLIVDALTNNVNRTASDVRAAFGKNGGNMGVSGSVAYMFDHTATFGIEGKSADDILEALMEQDVDVRDVIEDGDLTIVYAEPDQFAHVQDALRQTGVEEFKVTEFEMLPQTDIELSEDDQATFEKLIDALEDLEDVQNVFHNVDLK

SEQ ID NO: 71907 - protein, 451 aa, Staphylococcus haemolyticus
MSEQEIWKKVLEVAESEISKSTFNTFLKDTELKEIRDNVAIIFVIHEFYAEWLNSNYKEVIQTIMKDVIGYEVEPKFFTAEQLAELDETSRKSNTPSEPQRQIIEDGHEGTDQFNTHNTFDTFVIGPGNRFPHAASLAVAEAPAQAYNPLFIYGGVGLGKTHLMHAIGHHVLSNQPNAKVLYTSSEKFTNDFIKSIRNNEPEAFREKYRNIDVLLIDDIQFIQNKEQTQEEFFHTFNELHQNKKQIVISSDRPPKEIAKLEDRLRSRFEWGLIVDITPPDYETRMAILQKKIEEENLEIPAEALNYIANQIQSNIRELEGALTRLLAYSKLQGRPITTELAAEALKDIIQVPKSKKITIQDIQKVVGHYYNVRIEDFSAKKRTKSIAYPRQIAMYLSRELTDFSLPKIGEEFGGRDHTTVIHAHEKIAKDIKADTIFKQEVEDLEKEIRNQ

SEQ ID NO: 71908 - protein, 377 aa, Staphylococcus haemolyticus
MMEFTIRRDYFINQLNDTLKAISPRTTLPILTGIKIDAKDNEVILTGSDSEISIEITIPKQVDGEDIVTISETGSVVLPGRFFVDIIKKLPGKDVKLSTNEQFQTLITSGHSEFNLSGLDPDQYPLLPQVSRDDAIQLSVKVLKNIIAQTNFAVSTSETRPVLTGVNWLIQDNELICTATDSHRLAVRKLKLEDDSENKNVIIPGKALSELNKIMSDSDEEIDIFFASNQVLFKVGNVNFISRLLEGHYPDTTRLFPENYEIKLGLDNGEFYHAIDRASLLAREGGNNVIKLSTGNDVVELSSTSPEIGTVKEEVTATDVEGGNLKISFNSRYMMDALKAIDNDEVEVEFFGTMKPFILKPKEDDSVTQLILPIRTY

SEQ ID NO: 71909 - protein, 645 aa, Staphylococcus haemolyticus
MMVNTLSDVNNTDNYGAGQIQVLEGLEAVRKRPGMYIGSTSERGLHHLVWEIVDNSIDEALAGYANQIEVIIEKDNWIKVTDNGRGIPVDIQEKMGRPAVEVILTVLHAGGKFGGGGYKVSGGLHGVGSSVVNALSEDLEVYVHRNDTIYHQAYKKGVPQFDLKEVGSTDKTGTVIRFKADGEIFTETTVYNYETLQKRIRELAFLNKGISITLRDEREDVEQREDTYHYEGGIKSYVELLNENKEPIHEEPIYIHQTKDDVEIEIAMQYNSGYATNLLSYANNIHTYEGGTHEDGFKRALTRILNSYGTQSKIIKDDKERLSGEDTREGLTAVVSIKHGDPQFEGQTKTKLGNSEVRQIVDRLFAEHFERFLYEHPNVARIVVEKGIMASRARVAAKKAREVTRRKSALEISSLPGKLADCSSKKPEESEIFLVEGDSAGGSTKEGRDSKTQAILPLRGKILNVEKARLDRILNNNEIRQMITAFGTGIGGEFDISKARYHKIVIMTDADVDGAHIRTLLLTFFYRFMRPLIEAGYVYIAQPPLYKLAQGKQKYYVFNDRELDKLKSELSPTPKWQISRYKGLGEMNADQLWETTMNPENRMMLQVKLEDAIEADHTCEMLMGDVVENRRQFIEDNAVYANLDF

SEQ ID NO: 71910 - protein, 899 aa, Staphylococcus haemolyticus
MADLPQSRINERNITSEMRESFLDYAMSVIVSRALPDVRDGLKPVHRRILYGLNEQGMTPDKPYKKSARIVGDVMGKYHPHGDSSIYDAMVRMAQTFSYRYPLVDGQGNFGSMDGDGAAAMRYTEAKMTKITLELLRDINKDTIDFLDNYDGTEREPEVLPSRFPNLLVNGASGIAVGMATNIPPHNLTEVINGVLHLSKNPDVTIAELMEDIQGPDFPTAGLILGKSGIRRAYETGRGSIQMRARAEIEERGGGRQRIVVTQIPYQVNKARMIEKIAELVREKKIEGITDLRDETSLRTGVRVVIDVRKDANANVILNNLYKQTPLQTSFGVNMIALVNGRPKLINLKQALVEYLEHQKTVVRRRTEYNLKKAKDRAHILEGLRIALDHIDEIITTIRESETDKVAMETLQERFKLSERQAQAILDMRLRRLTGLERDKIENEYNELLGYISELEEILADDEVLLQLVRDELTDIKERFGDERRTEIQLGGLDDLEDEDLIPEEQIVITLSHNNYIKRLPVSTYRSQHRGGRGVQGMNTLEEDFVSQLVTLSTHDHVLFFTNKGRVYKLKGYEVPELSRQSKGIPVINAIELDNDETISTMIAVRNLEDEDSYLVFATKNGIVKRSALSNFSHINKNGKIAIGFKEDDELIAVRLTDGNQDILIGTSHASLIRFAETSLRPLGRTAAGVRGISLREDDVVVGLDVAHADSEDEVLVVTENGYGKRTPVSEYRLSNRGGKGIKTAKITERNGNIVCITTVNGEEDLMIVTNSGVIIRLEVEDISQNGRATQGVRLMKLGDDQFVSTVAKVIDKTEDEDATEAAQTENGESNAESTESPSEEVIDDDTPGNALHTEADEETTVSSEDDSTDERIEVRQDFMDRVNEDIENASNNDEDDEN

SEQ ID NO: 71911 - protein, 428 aa, Staphylococcus haemolyticus
MLDIRLFREQADTVKSKIELRGDDPKVVDEVLELDNERRQLIGKTEEMKARRNKVSEEIAEKKRNKENADDVIKEMRELGDEIKENDAKLNEVDNKVRDILIRIPNLIAEDVPQGDSDEENVEVKKWGTPREFDFEPKAHWDLVEELKMADFERAAKISGARFVYLTKDGALLERALMNYMLTKHTTQHGYTEMMTPQLVNADTMFGTGQLPKFEEDLFKVEKEGLYTIPTAEVPLTNFYRDEIIQPGVLPEKFTAQTACFRSEAGSAGRDTRGLIRLHQFDKVEMVRIEKPEDSWDALEDMTQNAEAILEELGLPYRRVILCTGDIGFSASKTYDLEVWLPSYDNYKEISSCSNCTDFQARRANIRFKRDAASKPELAHTLNGSGLAVGRTFAAIVENYQNADGSITIPEALVPFMGGKTEIRPVNG

SEQ ID NO: 71912 - protein, 661 aa, Staphylococcus haemolyticus
MNRGGIMNRQSTKKALLIPFILMVLTSIALVVVWFIFKPLVATIAAAILVVMIIISIVLVRQALLKMDNYVDNLSGHISAGSNRAIKRLPIGMVVLDADDHIEWINQYMSEHLETNVISEPVNEVFPNILKQLEKVQEVEIEHGQYHYHVRHSEEESCLYFFDITDEVQTNELYEESKPIIATLFLDNYDEITQNMNDTQRSEINSMVTRVISRWASEYNIYFKRYNSDQFVAYLNQKILAEIEESNFEILSQLREKSVGYRAQLTLSIGVGEGTENLIDLGELSQSGLDLALGRGGDQVAIKNMNGNVRFYGGKTDPMEKRTRVRARVISHALKDILTEGDKVIIMGHKRPDLDAIGAAIGVSRFALMNNLEAYVVLNEEDIDPTLRRVMDEIDKKPELKERFVTSDEAWDMMTSKSTIVVVDTHKPEMVLDENILNKANRKVVIDHHRRGESFISNPLLVYMEPYASSTAELVTELLEYQPTEQRLTRLESTVMYAGIIVDTRNFTLRTGSRTFDAASYLRAHGADTILTQHFLKDDVDTYINRSELIRTVEVQDNGIAIAHGSNEKIYHPVTVAQAADELLSLEGIEASYVVAKREDNLIGISARSLGSINVQLTMEALGGGGHLTNAATQLKGLSIEEAIEQLQQAITEQMSRSEDA

SEQ ID NO: 71913 - protein, 148 aa, Staphylococcus haemolyticus
MKVIFTQDVKGKGKKGEIKDVPVGYANNFLIKNNYAVEATPGNLKQLEQQNKRAEADRQKEIDDAKALKAKLEEIEVEVSAKTGEGGKLFGSVSTKQIAEALKTQHDIKIDKRKMDLPQGIHALGYTNVPVKLDKEVEGTIRVHTVEK

SEQ ID NO: 71914 - protein, 466 aa, Staphylococcus haemolyticus
MDNMYEQKQMPHNNEAEQSVLGAIILDPQLINSTQEVLLPESFYRGAHQHIFRAMMNLNEDGDEIDVVTLMDQLTKEGTLSEAGGPQYLAELSNNVPTTRNIQYYTNIVANHALKRRLIQTADSIANDGYDNELELDAILSDAERRILELSSNRQSDGFKDIRDVLGQVYETAEELDQNSGQTPGIPTGYRDLDQMTAGFNRNDLIILAARPSVGKTAFALNIAQKVATHEGNYTVGIFSLEMGADQLATRMICSSGNVDSNRLRTGTMTEEDWNRFTIAVGKLSRTKIFIDDTPGIRITDLRSKCRRLKQEHGLDMIVIDYLQLIQGSGSRASDNRQQEVSEISRTLKAIARELECPVIALSQLSRGVEQRQDKRPMMSDIRESGSIEQDADIVAFLYRDDYYNRGEGEDDDDGGNFEPQSNDENGEIEIIIAKQRNGPTGTVKLHFMKQYNKFTDIDYAHAEMS

SEQ ID NO: 71915 - protein, 395 aa, Staphylococcus haemolyticus
MSSIVVVGTQWGDEGKGKITDFLAEQADVIARFSGGNNAGHTIQFGGETYKLHLVPSGIFYKDKLAVIGNGVVVDPVALLKELDGLNERGVSTSNLRISNRAQVILPYHLAQDEYEERRRGDNKIGTTKKGIGPAYVDKAQRIGIRMADLLEKETFERRLKENIEVKNAYFKGMFNETCPRFDEIFDEYYAAGQRLKEFVTDTSKILDDAFVAEEKVLFEGAQGVMLDIDHGTYPFVTSSNPVAGNVTVGTGVGPTFVSKVIGVCKAYTSRVGDGPFPTELFDENGHHIREVGREYGTTTGRPRRVGWFDSVVLRHSRRVSGITDLSINSIDVLTGLDTVKICTAYELDGEEITEYPANLDQLRRCKPIFEELPGWEEDITGCRTLEELPDNARK

SEQ ID NO: 71916 - protein, 289 aa, Staphylococcus haemolyticus
MRKLFIFALAGFLAQLVDGSLGMGFGASSSSILLTYGIAPAIVSATVHFSEIATTAASGTSHWKFENVHKPTMLKLAIPGAISGFIGAGLLTQIHGDYIKPYIALFLLSMGIYILYQFLFKRNREIHTHVGKLSGFKLVPQGAIAGFLDAIGGGGWGPVNTPLLLASHKIQPRYAIGTVSASEFFVTLSTSLSFIIFLGITQINWWFVIALSVGGMIAAPISAYLTKILPINILAICVGGLIIFTNSNALMTYFVHDDTISNIVRFAIICAIVILVIITVIRNKKLSFS

SEQ ID NO: 71917 - protein, 199 aa, Staphylococcus haemolyticus
MSQSSNITWHDSEVTKSDRQQRNGHKSVVIWFTGLSGSGKSTVSVELEKALFQLGKHSYRLDGDNVRHGLNKNLGFSPEDRKENIRRIGEVSKLLVDAGTIAITAFISPYRADRDEVREILEDGEFIEVYTECSVEACEQRDPKGLYKKARSGEIKEFTGISAPYEAPHQPEITINTEHQSVEESVSTIIEYLKNKEII

SEQ ID NO: 71918 - protein, 83 aa, Staphylococcus haemolyticus
MPNIKSAIKRVRTTENAEARNISQKNAMGTAVKNAKTAINNNADNKAELVNFAIKSVDKASQSNLIHSNKADRIKSQLMSSSK

SEQ ID NO: 71919 - protein, 105 aa, Staphylococcus haemolyticus
MSYKELSLQLKILSDPSRLEILDLLSCGELCACDLLAYFQFSQPTLSHHMKILVDNELVSTRKDGTKRMYRLNHKSLDSINNELTYISSPTQQCMCKKIKTGECT

SEQ ID NO: 71920 - protein, 252 aa, Staphylococcus haemolyticus
MPILNVNHLSKVYGSKQKYKALHDINFSVDKGEFVAIMGPSGSGKTTLLNVISSIDSISGGTVEVSGNEINQLKDKQLAQFRKKELGFIFQDYSVLPTLTVKENIMLPLSVQKVSKDEMEQNYKEVTEALGIYELSDKYPSEISGGQQQRTAAARAFVHKPAIIFADEPTGALDSKSAQDLLNRLEDMNERFNSTIIMVTHDPSAASFAQRVIMLKDGNIHSEIHQEDKSKREFYNEIIQLQSALGGVANDV

SEQ ID NO: 71921 - protein, 517 aa, Staphylococcus haemolyticus
MKKRVLITMAASATLLLAGCGNDQKEDKNITVSLPTGAKADKLDAQGYDAAMPVYSAVYDALVKYDKDKGVKAGLAEKWHFDESGKVYEFHLKKNVKFSDGSALDAKAVKFSIERAKAMNKDTTVETLKKLDKVVVKSDHVVQIRLKSPSNQVLNELTQVRPLRIMSPHSVENGKVNGKFEKAIGTGAFVVDKTGKEKTTMKPNKYFNHSHPVNYNLAFQTIEDGDSRNSAVQSGSVDISGGALGMLSDQQIKQDKKNKNLTVEDKPSTVSHFMAFNPDNDVLKQRTIREAISKSIDTKDIAGKSVNGLFQKNVQFVNKDNQQAHDYDVKEAEKLLKEAGYHKNSDGIFEKTGKPLTFNLVIQTAEFPSWKDKAEKVQRQLKKAGIKLNVKTLDSQSYYDTLWTKKDYDLIFYRTYSDALMPYNFMSSVFKNNDGKSGVLANDKTLTQQLDDFPTTVSKKEQQRSFDEIFKHFNQQYYGVPIAYPNESFVVSDKVKQFKFSGLTDAPIDYKALKVNE

SEQ ID NO: 71922 - protein, 574 aa, Staphylococcus haemolyticus
MARVDLKAKPYFLNDEQIQWVEETLSHLTDEEKIGQLFFNLFSLEEDGDFNDSEYTNKDILNRYHIGGARYQGGNKQQVQALLNDLQQHSKVPLLVAANCDSGGNGACKDGTYIASAAQCEAAQDSKVAYNAGYVSGRESQALGVNINFDPCVDILKNWRNTIVNTRAYGTTAETVIKYTNAFINGFNETQDMITCIKHFPGDGTEERDQHLVLGVNEMTTDEWDQSFRKVYENHINNGVEMIMSGHIALPHYSKKLNPELADKDILPATLSKELITDLLKDDLAFNGLVVTDASHMLGMTAAMKREDYVPQAIAAGCDMFLFFNDLEEDFHFMLKGYQDGVITDDRLNDAVRRILGLKAKIHLPKKQAQGTLLKNEDQLSVIGCDEHLTMQQEAADLSITLVKNTLDQLPIRPETHKNIRLYIIEGEKNGIYKSDDTVEHNLVSILEDRGFNVTVNDGSTRVKGKTLEYRDNVDAALVFANIVGYAAENNYRIRWSTAMSNEIPWYVHEVPTVFTSLNFTTHLHDATMVKAYINAYHSNKTTLETVVDKIMGESDFKGVPNDLVWTDKWQAKL

SEQ ID NO: 71923 - protein, 109 aa, Staphylococcus haemolyticus
MSAKMDGRELFHPERMASRILGMGDVLSLIEKAQQGVDQEKAKDLEQKMRNSTFTLADFLEQLDQVKNLGPLDDIMKMIPGMNKMKGMDKLNMDEKQIDHIKAISESMT

SEQ ID NO: 71924 - protein, 390 aa, Staphylococcus haemolyticus
MKKQLFTLYFNIFLIFVGIGLVIPVLPVYLKDLGLKGSDLGILVAVFALSQMIISPFGGTMADKLGKKLIICIGLVLFAISEFLFAIGHHFPVLIASRILGGFSAGMVMPGVTGMIADISPAKDKAKNFGYMSAIINSGFILGPGIGGFLAEFSHRAPFYFAGTLGVLAFIMSLLLIHNPRKETTEGFHSLEPEVFTKINWKVFITPIILTLVLAFGLSAFETLFSLYTAEKANYTPRDISIAIVGGGVAGAVFQVFFFDKFMKYMTELTFIIWSLLYSAIVLGLLILSHSYWTIMFISFIVFIGFDLIRPALTNYYSNIAGNRQGFAGGLNSTFTSMGNFVGPLVAGALFDVNVEFPLYMAIIVMLFGIVIIFVEKALQATRRRKHTTK

SEQ ID NO: 71925 - protein, 306 aa, Staphylococcus haemolyticus
MIYTVTFNPSIDYIMFTNGFEIKGLNRATSTYKFAGGKGINVSRVLKTLGVPSTALGFAGGFPGEFIAQTLEESQIKTDFIKVDEDTRINVKLKSGDETEINAPGPSITDDQFQALLNQIKQTTKEDTVIVAGSVPKSIPSDAYAQIAEITQSTGAKLVVDAEKDLVNTVLKYQPLFIKPNKDELEEMFDMTVESDQDVVKYGREILKEGAQSVIISLGGDGAIYIDKTRSIKAQNPKGQVVNTVGSGDSTVAGMVAGLESGLSLEDAFQQAVASGTATTFTEDLATIEDIEKIKSQVTITVLDGE

SEQ ID NO: 71926 - protein, 642 aa, Staphylococcus haemolyticus
LMRITELLTKDTIAMDLSASDKNGVIDELVNQLDKAGKLSDIAQFKEAIHNRESQSTTGIGEGIAIPHAKVAAVKSPAIAFGKSKEGVDYQSLDGQPAHLFFMIAAPEGGAQTHLDALAKLSGILMDDKVRESLLHANSPEEVLQIIDNADDEATKEEEKEAQEQEAAAAGATSGSANTTDANEPYVLAVTACPTGIAHTYMARDALKKQADKMGVKMKVETNGSGGIKNHLTQQDIERATGVIVAADVHVETDRFDGKNVVEVPVADGIKRPEELINTALDTSRKPFVARGGNSKSTDSESNEKQSFGKAFYKHLMNGVSNMLPLVIAGGILMAIVFLFGANSFDPKSSEHNAFAEQLWNIGNKSAFALIIPILSGFIARSIADKPGFAAGLVGGMLAISGGSGFIRGIIAGFLAGYLTQSIKYITRGLPQAVEGLKPTLIYPLLSVTITGLLMIYAFNPPAAWLNNLLLNGLNSLSGSNIVLLGLVIGAMMAIDMGGPFNKAAYVFATAALTEGNAAPITAAMVGGMIPPLAIATAMIFFKRKFTKEQRGSIVPNYVMGLSFITEGAIPFAAADPLRVISSMMVGSGVGGAIALALGSRINAPHGGIIVIAATDFSHILQTLIALIVGTLVSAIMYGLLK

SEQ ID NO: 71927 - protein, 458 aa, Staphylococcus haemolyticus
MDTVTIINLVIFFLLIALTTVFVGSEFALVKVRSTRIEQLAEEGNRSAKIVKKMIANLDYYLSACQLGITVTSLGLGWLGEPTFEKLLHPLFNLLQLPDALTTTISFVISFIVVTYLHVVLGELAPKSIAIQHTEKLALTYARPLYYFGNIMKPLIWLMNGSARVIIRMLGVDPDAQTDAMSEEEIKIIINNSYNGGEINQTELNYMQNIFSFDERHAKDIMVPRTQMVTLNEPFNVDELLETIKEHQFTRYPITEDGDKDHIKGFINVKEFLTEYASGKPIKINNYIHELPMISETTRISDALVRMQREHVHISLIIDEYGGTAGILTMEDILEEIVGEIRDEFDDDEVNDIVKLGEDTYQINGRVLLDDLNEKFNIEFEDSEDIDTIGGWLQAHNTNLQVEDHIDTQYDRWIVSEMDNHQLVWVVLKYEFIDNRPTFGEDQDENEDKKDNNDESRE

SEQ ID NO: 71928 - protein, 233 aa, Staphylococcus haemolyticus
MKSLIVYAHPEPKSFNGALKDKAVETLEAQGYEVKVSDLYAMDFDPVARKEDFKNLTDPEFFKYAVEQKNAYDNDELTSVIKEEFEKLLWADLVIFQFPLWWFSVPAILKGWFDKIFMFGGIYGGEYDRYDKARLTDKIAMISTTTGSPEGSYAANGFSGDIYEQVLFHINHGMIYFSGMTPLEPFIAYQVSHSEEVRRDYLEQLAEKLKHIDDIPRIQYHKLEDFDDNGQLK

SEQ ID NO: 71929 - protein, 464 aa, Staphylococcus haemolyticus
MEEKKHKKFKFKTPHTYALLMFVIFLAWLLTYIIPAGEYAREKKGDQTLVVSGTYHTVESVNVNFLEIFRSIPEGLISGGEIVFYIFLVGGAFGIIHKTGAFENGVNKAMRMLGKANFLMIPLTMTIFSILGFTIGLAEETIIFVPIGIIIARTLGYDALTGAAMVILGAASGFSGGMLNPFTVGVAQTVAELPMFSGWGLRTIIYLFILTAAISTVMLYARKVKKDKSKSIVYELEKEEGHITQEITYQHFSKRQAASLLIIVATILFNVFGIFVFDWTFNEMSANFLLAGIVAGLVSGLGLNGTFDALIEGMQNILFGAMIVGFAKGIVVILENGKIIDTIVHGMTTLLSDVPASFVIIAMFILQFLLNFFIPSGSGQALTTMPLMVPISDLLHINRQLTVLAFQYGDSISNILFPTSAILMGALAVGRITYTQWIKFVWKLILLWVIICAVAMSIALIIGY

SEQ ID NO: 71930 - protein, 462 aa, Staphylococcus haemolyticus
MNMASLEVLNPATNEVIETLEYTSETTAKQQIEKAHKAFKSWREVDAHERADKLYKWFSLINEHKDELAELITKEGGKPLKEAQGEVDYANSYVSWYAEEAKRIYGRTIPANTPNKNIIVKKFPVGVVGAITPWNFPAAMITRKIAPALAAGCTIVCKPATQTPLTTIRLIELAHEAGIPEDAVQYVIMPGKDAGELFTKHPVMQKVTFTGSTNVGKKLIAQAAESVENVTMELGGLAPLIVHEDADIEYAVDQTIASKFRNAGQTCICANRVYVHEAVEAEFVQQLTQKVHELKVGNGMDEDVTIGPLINEDGVKKVVNQLKDAESKGAKLSRSLDEAQEMGGNFLKPVVVSNANQDMLAMQEETFGPIVPIATYSDLEDAIQMANDTQFGLAAYFFTNDYRTGFHLYNSLDYGVIGWNDGGPSAAHAPFGGMKESGYGREGGTEGIEPYLETKYLSIGNM

SEQ ID NO: 71931 - protein, 357 aa, Staphylococcus haemolyticus
MSETIPEKMNVALMHEPYDIEIVERDMPKVGPKDVLIKMMAVGVCGSDVHYYAHGRVGEFVVEKPIVLGHECAGMVAQVGDEVTDFKVGDRVAIEPGEPCRECEYCKSGQYNLCPHMEFMATPPYDGAFCEYVSHPADFLYHLPDSVTYEQATLVEPFSVGLQACKRADIKPGSTVVIMGMGPVGLMAVVAAKAYGATNIIVSDLEDNRLEAAKRLGATTAINIKNEDVVERIKELTDGQGVNYAIETAGNPIALRSALNSLKDGGTLAIVGLPQEDMNEINVPFIANHEINIVGVFRYANTYPQGIQILSTTDADIDSLFTHQFELNDTKEAMELTRTSKGDALKVMVYPNGFLDK

SEQ ID NO: 71932 - protein, 228 aa, Staphylococcus haemolyticus
MNTKRALVVVTSVTKYPDMNRPTGLWFGEVVHFADVLYKNGYKVHYISPEGGYTAIDPQSLQEDMMTDLDWEYYQNKDFMTRLGHTVTPDAVKAENYDVIYFAGGHGTIWDFKDNEDLQKLTQEIYENNDVVASVCHGAIGLLNVKDAEGKHIIDGKTVTGFSNSEEQAVGLADVVPYLTEDELKNRGANYEQGDNWTEFAVADGRIITGQNPQSGKAVAEKFLESQK

SEQ ID NO: 71933 - protein, 63 aa, Staphylococcus haemolyticus
MESCSPRKLFNADDYVKDMRLDVPDIVKLQRDIDAKHQCKFERTALTESEFTEMYKEWQQHES

SEQ ID NO: 71934 - protein, 102 aa, Staphylococcus haemolyticus
  MISC_FEATURE (82)..(82): X=any amino acid
MAKQKIRIRLKAYDHLVIDQSAEKIVETAKRSGAEVSGPIPLPTEKSVYTIIRAVHKYKDSREQFEQRTHKRLIDIVNPTPXTVDALMGLNLPSGVDIEIKL

SEQ ID NO: 71935 - protein, 80 aa, Staphylococcus haemolyticus
MKRILHLKVTDQVSTLNRITSAFVRLQYNINELTVKPSQEKGISDMQITADIEDEAIFKILIAKLKKQVSVLEVQDISQN

SEQ ID NO: 71936 - protein, 483 aa, Staphylococcus haemolyticus; identical to SEQ ID NO: 70454

SEQ ID NO: 71937 - protein, 200 aa, Staphylococcus haemolyticus
MNILIVYAHPEPQSFNSKLKDIAQTVLKENGNNVVVSDLYKMNFNPVAQKSDFKYLKNNNFFKYPIEQEHSYKNNILSKEIKSELSKLLWADIIIFQFPLWWSSVPAILKGWFDKVLIYGGIYGGAYGKFKNARLSNKKAIISTTTGSSGDIHKQVLFHISHGIVEYTGMQCLDTLIAYEIDKDQNSRDEYIEFFKNKIK

SEQ ID NO: 71938 - protein, 468 aa, Staphylococcus haemolyticus
MSSNIGILGLGVMGKNLAWNIEDKKYSVSIHSRDNNEINDTIQKSHYQKIYPAYNLKEFVDSLEKPRKILLMIKAGSPTDNMINALLPLLDDEDILIDGGNTNYQDTIRRNKTLAESGVNFIGMGVSGGEVGALTGPSLMPGGQEAAYNKVSDILDAIAAKAQDGASCVTYIGPNGAGHYVKMVHNGIEYADMQLIAESYTMMKDLLGMSHTEISQTFKDWNAGELESYLIEITGDIFTKLDENNEPLVEKILDTAGQKGTGKWTSINALELGIPLTIITESVFARFISSIKEERVNASKSLNGPQASFDGNKEEFLEKIRKALYMSKICSYAQGFAQMRKSSEDHEWNLKLGELAMIWREGCIIRAQFLQKIKDAYDNNPELENLLLDPYFKNIVTDYQDALRDVVATGVKNGVPTPGFSASVNYYDSYRSEDLPANLIQAQRDYFGAHTYERKDREGVFHTQWDEE

SEQ ID NO: 71939 - protein, 443 aa, Staphylococcus haemolyticus
MTHIQLDYGKTLEFFGEHELEQQKDIVKTLHKTIHEGTGAGNNFLGWVDLPVDYDKEEFSRIIEASKRIKANSDVLVVIGIGGSYLGARAAIEMLTSSFRTNNDYPEIVFVGNHLSSSYTKELVDYLADKDFSVNVISKSGTTTEPAVAFRLFKQLVENKYGKEEAKKRIFATTDKQKGALKQLATNEGYETFVVPDDVGGRYSVLTAVGLLPIAAAGINIEAMMIGAAKARKELSSDKLEENIAYQYATIRNLLYSKGYTTEMLINYEPSMQYFNEWWKQLFGESEGKDFKGIYPSSANYTTDLHSLGQYVQEGRRFLFETVVKVNHPKHDLTIEEDSDDLDGLNYLAGKTIDEVNTKAFEGTLLAHTDGGVPNIVVNIPQLDEETFGYVVYFFELACAMSGYQLGVNPFNQPGVEAYKQNMFALLGKPGFEDMKKDLEARL

SEQ ID NO: 71940 - protein, 591 aa, Staphylococcus haemolyticus
MYYSNGNYEAFARPKKPENVEVKSAYLIGSGLASLAAACFLIRDGQMDGSKIHVLEELSKPGGSLDGDELPLKGYVVRGGREMENHFECLWDLFRSIPSLEMDNASVLDEFYWLNKEDPNYSRCRVIEKRGHQLSTDGDFTLTPQAIKEIIHLCLMKEETLNDVKITDVFSNDFLHSNFWIYWKTMFAFEPWHSAMEMRRYLMRFVHHIGGLADFSALKFTKYNQYESLVLPMIAYLESHGVQFQYDVQVLNIKVDITTKEKVAREIQLKRSGKDDIIPLTPDDLVFVTNGSITESSTYGDNNTPAPPTKEIGGSWTLWRNLAKQSPEFGCPEKFYHRLPDKSWFVSATATTNNMTIINTIEQICKRDPLAGKTVTGGIVTVNDSKWQMSFTVNRQQQFKSQPEDEVSVWIYALYSNVNGDYIHKPITECSGNEICQEWLYHMGVPINQIEDLAKTQCNTIPVYMPYICSYFMPRSIGDRPLVVPENARNIAFIGNFAETERDTVFTTEYSVRTAMEAVYQLLDIDRGVPEVVATEFDLRILMDALYELNDGKNLSELSEHNKIQKLALNAFLKKIKGTYIEELLHQHKLL

SEQ ID NO: 71941 - protein, 549 aa, Staphylococcus haemolyticus
MMKDNWMKYKDDSLVASFYDSQTTTFQEQGFETELAFGTAGIRGQFGLGPGRLNRYTIQRLALGIANYLKDKEDNPSIVIHYDIRHLSSEFAHIITQILTSNGIKVYLADVYKTTPQLSFAVRYLQTSAGIMITASHNPKDYNGIKVYGADGAQLDEGTSLEVAQYINNLGNPLKLNINLNQELIEKNTFDLPESVYDSYINELTNLTGDIPQSDLKVVYTSLHGTGVPIIPDVLKHLNFQNVSLVKSQCELDPNFSSVKSANPEEREAFDLAIQQAHDLEANLVIATDPDVDRMGFVERNADGQTYYFGGSEIGALLIKYLLEYTNVPNHSFVIQSIVSGELGKRLAQQHGVTVKEVLIGFKHIAKAIRELDDTESFLFAYEESYGYLADDFVRDKDAIQIVPLIIKYASILKNEGKTLHDALKEIHREVGLYRDKPMSKVFEGIEGQQQINALMDKLRRNIPDVIAGLKVIAIEDYETLKRIYKEDNTEEAISLPQANVIRIIFKEGFIALRPSGTEPKLKFYLSLNVDNFEQVSQDIYNYIFGDTE

SEQ ID NO: 71942 - protein, 320 aa, Staphylococcus haemolyticus
MDYRVLLYYKYTTIDDPETFAAEHLEFCKSNNLKGRILVSTEGINGTLSGTKEDTDKYIEHMHSDERFADMTFKIDEAEGHAFKKMHVRPRNEIVALGLEDDVDPRVTTGKYYSPSEFKEALEDEDTVILDARNDYEFDLGHFRGAIRPDITRFRDLPDWIRENKDQLDGKNIVTYCTGGIRCEKFSGWLVKEGFENVGQLHGGIATYGKDPETKGQYWDGKMYVFDERISVDVNQVEKTVIGKEHFDGTPCERYINCSNPECNKQILVSEENEDKYLGACSYDCAKHERNRYVAKNNISDEEWNRRLENFKDVPEHAHA

SEQ ID NO: 71943 - protein, 324 aa, Staphylococcus haemolyticus
MCTGFTFQAKNGDVILGRTMDYDYPLTGHPAVQPRHYYWESRVDYKGTTTYGFTGAGSDMEGFIFGDGVNEHGLAISNQYDRGYASYANKIHDGYINISQTEVLTWVLGYNKTIEELIEQADQVNVVAHTLNDINEAPPLHYHVSDATGRTAEITFVEGRIVLHDNPVGVLTNSPDLNWHYENLKNYANVTPYKPQYKRYKNLYIGNESGTSGLPGGYTSAERYVRAAYLVSNMLPDDGDDAVLDAFRILDSVSIPKGAVRPSEDEFHYTLYQTVFNLTSRTLYVKYYNSNRIAELQLTEELLNSDDLVIFDPITQGLSTDKVN

SEQ ID NO: 71944 - protein, 520 aa, Staphylococcus haemolyticus
MKKRIFYSLSMCAMLMLSGCAQHHNDNKEVKVSLPREFNTNQLDAQGFDAPMPVYNAIYQPLVTYGKNGKIEPGLATSWEASEDGKHYLFHLKKNVKFNDGSDFDASAVKFSIERAKATDTTDPMETLDKLKSITIKDKHTVEIELKSPSNQVLNELSQVRPLRIMSPHAVKGGNTTGKFEKAIGTGPFKVADSTNETVSFQPNTYYRNGHPLNYNLTFQSIEDSDSRHLAIESHSIDITGGSLGQMTPQQVKESHRNKALSVHTSPSTETQFMGFNPQHKILQDKTMREAISKAINTDDLSSDKKLKGLFQQNVQYVNAHNQPDHVYSPSTSKSLICSLGYKMNNDGYFEKDDHILSLKLALQTDEFPEWKTKAEIMQQDLKKVGIKLDINILDSQTYYETLTVRKDFDLIYYRTYTNALMPYNFLNARFKQDGSRPGVFANDTTLTSMIKQFPTMINMHDRQRAFNKLSSYIDQQYLIVPISYPNETFVTSPKIRQFEFSGQTDAPINYDKLKVSNND

SEQ ID NO: 71945 - protein, 200 aa, Staphylococcus haemolyticus
MKNWINRLMTILGVILILVAVYLFAKPHIDNYLHEKDNDNKIEQYDKQDKSSNKQTPTIPKDKTKMAGYISVPDAEIKEPVYPGPATPEQLNRGVSFAEKDESLSDQNISIAGHTFTDRPHYQFTNLKAAKKGSKVYFKIGNETREYKMTSIRDVNPDEVEVLDEHKGEKNQLTLITCDDYNEQTGVWEKRKIFVAKQVN

SEQ ID NO: 71946 - protein, 288 aa, Staphylococcus haemolyticus
MYKIAVDIGGTNIKVAVINDDLEMIDYKKIKTPDNFHIRIVDETYKLVEGFVNQYQLKNPFIGISSAGVVDSDLGQIIYTGPTIPNYDGTQFFDVFKDLSDDIAVYNDVDAALLGELKLHRYEEDHIFCLTLGTGIGGAFYSEASGIYQGSRHRANEIGYLLYREEDGKTYEQRASTSALKNLMTKYQFEYGTDVPKIFDLAEEGNEEALNILNEWSNYVAEGIAQIQIIYDPGLILIGGGISSQGETLLKYIEPKIHHYLPSDYGIAKIQTTQTKNHAALFGAITKQ

SEQ ID NO: 71947 - protein, 268 aa, Staphylococcus haemolyticus
MKFENRIQRSRHVLTKMDKKIIEYIQTHELDENFSTINSLAYAIGTSPATITRFSGKLNYANFQDMKFNLQHEKSEKVVENAPLVQLIHRYHQNIIQQTGEFISEEKIKRLAHNLKTCRQVNFAGLGSSGLTTSEFYYRTMRMGIKGSVSTDAHQMKISASLLSSRDMFVAISNSGETLELIEAAKIARNQGAYVVVITNFEGSALTKNADLVLITTAQSSNNDSKFINSQIATLFLLDIVSYLLLNDTHMHHVYQQTRDVILGNEKE

SEQ ID NO: 71948 - protein, 242 aa, Staphylococcus haemolyticus
MKITNLVDKKLASDYVAIELLKLIKDKPDAILGLATGGTMTDVYPRFSELLSANHVDLANVQTFNLDEYVGLEPEHAQSYHTYMHQLLFDHNASWNADNIHIPQGHVDDLEREARRYENQLKQIGQPDIQLLGIGENGHIGFNEPGTSFESETRVVDLTESTINANSVHFDHIDDVPKQAVSMGLNSIMRAKRIILLAFGERKRDAIHQLLNGETNESLPASILHQHPNVEIIVDDTIFNRL

SEQ ID NO: 71949 - protein, 385 aa, Staphylococcus haemolyticus
MSTNYVITNGKIYTEKQVIENGYLVVEDGKISDIQQGTYTGELEQIDVKGQNVLPGFIDIHIHGGYGEDAMDASYDGLKHLAEQLLSEGTTTFLATTMTQSDANIEKALKNIVAYQADQQRGEAAEVGGVHLEGPFISEHKVGAQNPKYVQRPSASKIQHFQEVANQQIKIITFAPEVEGAHDTLNQLHEDIIFSMGHTVATFDEANEAVDHGAKHVTHLYNAATPFEHRDPGVFGAAWTNEQLNTEIIVDGIHSHPASVHIAYKQKGNEHMYLITDAMRAKGMEDGEYDLGGQNVIVKGKEARLASGALAGSILKMNDGLYNLIEYTHDSLENLWRVTSLNQAIALKIDDHKGSLAIGKDADIVVVDDTIRVDKTIKSGVVHQY

SEQ ID NO: 71950 - protein, 51 aa, Staphylococcus haemolyticus
MAVKIRLTRLGSKRNPFYRIVVADARSPRDGRIIEQIGTYNPASVNAPEVK

SEQ ID NO: 71951 - protein, 126 aa, Staphylococcus haemolyticus
ISLAKREGQGCVSLKSIAEENSLSDLYLEQLVGPLRNAGLIRSVRGAKGGYQLRVPADEIKAGDIIRLLEGPITIVESIESEPPAQKQLWLRMRDAVREVLDNTTLKYLADYAKTDDKLDGYMFYI

SEQ ID NO: 71952 - protein, 155 aa, Staphylococcus haemolyticus
MGNVMFASIYLATDILNDIYGRKVAKRAVWLGFSSTLVMIIVMQMSLHFIPAPEDMAQKSLSTIFDLVPRIAVGSIIAYIIGQHVDVFIFSTIKKVFSSDKTFIIRAYGSTMLSSIIDTALFVTIAFAGTLPNMVVFEIFITTYLLKLISTIFNV

SEQ ID NO: 71953 - protein, 143 aa, Staphylococcus haemolyticus
AINQDPNDGFTLLDGTALTEQLLNVRTHTLITQVYSAMVAADIKITLMEHYPDDFPVKIVTGAHSTGASVLEVPLFELDHHEDAFNNLTSVYVPKVTNDEVLYRNFDYAVEIIDRLVDDETGCPWDRVQTHASLKRYLLEESF

SEQ ID NO: 71954 - protein, 153 aa, Staphylococcus haemolyticus
MPEEKDKTVYRRQADAQTPSKRRNQKKLRKLPFIILIILILLIAAIIYIVHGYRSGVNYAEKHAKDIKVHKFNGPVKNDGKISVLVLGADKASGGKSRSDSIMVVQYDYIHKKMKMMSVMRDIYAEIPGYQNYKINAAYSLGGPELLRKTLNK

SEQ ID NO: 71955 - protein, 150 aa, Staphylococcus haemolyticus
  MISC_FEATURE (62)..(62): X=any amino acid
  MISC_FEATURE (67)..(67): X=any amino acid
  MISC_FEATURE (112)..(112): X=any amino acid
GSFRPVAGNLHLHRTMISPSLSLRQCPNRYAFRAGRNLPDKEFRYLRTVIVTAAVYWGFDSXLRRSXPLLLTFQHRAGVSPYTSPYGLAETCVFDKQSLGPIHCGSSGLAPXRAPLLPKLRGHFAEFLNESSLAHLRILILTTCVGLRYG

SEQ ID NO: 71956 - protein, 422 aa, Staphylococcus haemolyticus
MIKDIKNVLNLIKMKNSEDVRTNKDWDLSDKYSSIIEELLPKQLENLSYNKDLSTTGSVGKGNYSMVPWVTTFNTNITKSTQKGYYIVYLFHPEGKEVYLSLNQGWSEIKEKTLGVKKAKEKALALSKYLASYLDDNNFEVGRFYYSNNKDSKYDKSDLPSGYAHGSIIYKYYDFETEVYTEDMMISDYKEMIKLLNGLVNKININEYNALLLNINEIVTIIETKELNESINENKNIQMSQIDKPKASTYAKKYKTSTKKQTDDDIEKAHKENKITGQIGEKLAYQYFMNLIEKNISDKNLQEQFINTIDTSMGELHGYGYDMTAFDPQNLDSPVEKYIEIKATKSKKEDEPFYLSLNEIYAMYENPQKYLIFRIIGLNSKTPKFYIIDPYENHDEFESVEDLIEKVFNAECIQFKIFNVKP

SEQ ID NO: 71957 - protein, 351 aa, Staphylococcus haemolyticus
MNLAWKEIKFYRFRYTLIMLIIFLLGSMVLFISGLAQGLARENISYLNNMPAEHYIVEDNKEPKLESSQLNQSQQNKIEKIIHENATQMGTQTLKINQQDQDVITLNTPKHLTPKLVSGNYPKKQNEIAISEKLTGNDLKVGDTVTFKGHHHNYKISGIMNESMYSHSSMILMNKEAFKSLNKQVSTFYPVDKINKDNKESLKQIKGIKVVNEKALTDNIASYQAEQMPLNLMIISLFVITAIVLSAFFYVMTIQKIPQIGILKAIGIKTKHLLTALLLQIILTTMVGVILAFSVILILNAFMPVTMPFYLSYSQVLLMIVVFLIVGLIGALLSFIKVLKVDPIEAIGGME

SEQ ID NO: 71958 - protein, 112 aa, Staphylococcus haemolyticus
MADVSLKLSAKDIYEKDFEKTMARGYRREEVDAFLDDIITDYQKMADMNNEVVKLSEENNKLKKEVEELRLRVATSRPSDNKSFSSNNSSSSNNNVDILKRISNLEKAVFGK

SEQ ID NO: 71959 - protein, 134 aa, Staphylococcus haemolyticus
  MISC_FEATURE (22)..(22): X=any amino acid
  MISC_FEATURE (107)..(107): X=any amino acid
  MISC_FEATURE (127)..(127): X=any amino acid
GTGISTCYPSPTPVGLSLGPDXPRADEPSSGNLSQSVDGILTRLFATHTGILTSKRSTCPCDHASTPLERSPTIVYGQSTASVICLAPVHFRRSVTRLVSYYALFKXWLLLSQHPSCLGNATSFSTXHIFWDLS

SEQ ID NO: 71960 - protein, 309 aa, Staphylococcus haemolyticus
MINNKNEKVSITIVNGFLGSGKTTFLKHYIEQLLKKDEKITIIMNEFGSFDVDSLLLGNDVSIHSLINGCVCCDLNNDLVNQLKQLIDQTDTSHILIEATGLAHPFEIYSACQDPTIIKNVHEPTIIGIVDAQRFTKKEVYSPSTTQLLEEQLRYSDTIILNKTDLIGEEALNEVKENLNKLNPQAPIIITTYSQFNDEQINGKVIQHNEIQHKHIHHHGIQSMQYTFTAAIDRQLFYQFIMRLPDSVLRLKGFVKFRDLPEVTYEFQYAMGLPDYGIIYKDVPMTIVIIGESLDTDRLRNQLDMIQFT

SEQ ID NO: 71961 - protein, 55 aa, Staphylococcus haemolyticus
MLSALIPSIHSYPAMPLARQLVHQRYVHPGPLVLRTAPLKFPYATTDRGRTVSRR

SEQ ID NO: 71962 - protein, 79 aa, Staphylococcus haemolyticus
MADNNNQNGQDASQQIIDFIKSYKWRIIGFFAFLIIAILFLTLGFWKTILVIVLCLIGIGVGYIKDRTQDFMNFLNRWS

SEQ ID NO: 71963 - protein, 754 aa, Staphylococcus haemolyticus
MNTNYEITFDTKKEDIASDYLSLNLILTGNVTCQSDNQNKHYHVGDLILINSYQNFLILEDSDVSYMSLRLSNNYFSHYIEDKNIYFHFEEVSKKIHDDIKTLLAKIGITYLRKGKFHQLHMDQMMIQLIEMLVKFIPYQSRQELIHEHNKDDVFASLASEFINQHFMERIGLDDLSDYINLSSSYTSRLFTKKLGTSFNSYLNKVRTRNAEHDLKYSDISITDIAMKNGFSNSTSLAKHFKLWYHMTPGDYRKEFQVKDLNQLKMKPLNKQSIKRYIQYLSSYVNNQMDVVIHSAEPQKEIDIQLEDRLGYLNKYNHIVQIGSIVNMRVHRYREQILEVKDRVGLDTVLVQDLVNDTSWREHVVASDEIIPHSHQYMTLDECLLFLMNHQIHLSIRLRPPHSATAFQAYCDTWVQILKHFINMTTHSSRMQLSVIIDAIDLKQYIQLYEVFNRYISNVKFIVNYQDFSNQKNNLKLLFKDHSEKVNMLAFEANQNDVVNLEVSEDIQYQYAKNHINETVEALVEWLPKKQKDMPLMLLNWNTLTGNSNLTNGEYFRAGIIFKQLLDINEKVCTVGYWLNYELHQKYGVMNEHQLMGIDLYHQFDGKRPAFFTSNFFRMLQNNVRFRNEECMVVGDDTHLQIVVWDADHYNPYYTISEQPNVMEKRNFKIEINQLQSGLYKIKHYTLDKENGALYRVWQQHNTTYGMDQETIDYVNRISYPKLDIAEVEVEETLTYHLKVMTNSIHIIEVNKYV

SEQ ID NO: 71964 - protein, 115 aa, Staphylococcus haemolyticus
MSDITSSDDGDFKKPDSVNGSSADNLSVSGHPDNNTTNREVNGSSGSSSSNSSNNSNNSSNSNTSNTNNSGNTNSGTTNNNSIFIYLLFRVGCLSKKFKCNESLRNIKKTLTKLI

SEQ ID NO: 71965 - protein, 122 aa, Staphylococcus haemolyticus; identical to SEQ ID NO: 70609
  MISC_FEATURE (106)..(106): X=any amino acid

SEQ ID NO: 71966 - protein, 256 aa, Staphylococcus haemolyticus
MFKKLIKRNKTKISHNDDLDLHNLPEHVAIIMDGNGRWAKKRKMPRIKGHYEGMQTIKTVTREASDLGIKYLTLYAFSTENWSRPENEVNYIMNLPVNFLKTFLPELIEKNVQIETIGFLDAVPKSTIEAIEHAKDKTRNNTGLKLIFAINYGGRAEIVQSMKSIYDELQRNGQDSKDIDESMINKHLMTHSYPDPELLIRTSGEQRISNFLIWQSSYSEFIFNEKLWPDFDGEEFKNCLKIYQSRQRRFGGLSKE

SEQ ID NO: 71967 - protein, 386 aa, Staphylococcus haemolyticus
MAYQIKHEKLLSLKHQFETLINEFKSYTNYDETNKFEQCFKQYEQIVTDYVSKSEVLEKEINQTKQQIEIETNNLNNNKLAIKELEQEISGHSDEINQEMKRIGLNSYKDVEILLSKLENKEQIEMKIQQYEHDHQKLTLEIERLSKLTKDNKSESVEKLEATKTEIESNYNKYVEASATIQYQVQNNKDKFNSIMDHINYLEKELKEQQEIFELSEVLSGKNSKKLTLENYVLIYYLERIIHQANIRLERMSGERYQLKRRESISHGYSGLEIEVFDFHSNKSRHISSLSGGETFQASLALALGLSEVVQQESGGITLESMFIDEGFGTLDQETLETALDTLVKLKTSGRMVGIISHVSELKQRIPLILEVTSNQYQSHTRFKWN

SEQ ID NO: 71968 - protein, 268 aa, Staphylococcus haemolyticus
MKRSLGAKMGEISSLIYLIFSYYGLYLTWQDDSFLLNLFIVIIFTFAYASLILFHEALSHRINLMLFFIHFLAIIYFVYAYNPTLSLFFFFSAFAIPFLFKRGVKSIEFMLLISSMITCIIITIIQTNHFYVVSIIIYYIVILAILFGNFKIMKERQYRQQIEEKNKYINILIAEQERNRIGQDLHDTLGHVFASLSVKSELAAKLIDKDPIAAKKEILNINEISKDTLEKVRHIIENLKVQTFEEEIQSIEQFLKDANIHFNFENIR

SEQ ID NO: 71969 - protein, 378 aa, Staphylococcus haemolyticus
MSKNNFRDDFEKNRQSINSDDQFEDNTNEFDENSNESNDFDNQSDQQFPPRNAQRRQRRRNQATNKNRKFDNQNSDSNANGSLDDRHDEDSFNELQHNQQENHLDNEPIHKDDKRSSEKDFNNDASRRNNRHEASNRKHDKDYDNGSLNDDDRHRRNHEEGIDERQDNRNHKDQQNKKSRHGKDAAIAGGAGVAGAAGAKAAKDKRKKDEHHDSKYNEHKDDRDLNNDNQFDQNRKHDKDLHDDHRDAKDNHSKEEPKKGNKGKKAAVGAGAAGAAGAAGVAGVAAAKHKKDHKNNNHKDNHSHNRDHQDDHRNHKHEDGNDGFQAHNGKKKRGLAGILLPLIALLLILAALAIFIGMYLNNDKKDSNQADNKTGQTC

SEQ ID NO: 71970 - protein, 670 aa, Staphylococcus haemolyticus
RKKLFDTLAHVEGSEKYLHKNFVGAKRFSIEGVDTLVPMLQHTLKRAAEIEINNIQIGMAHRGRLNVLTHVLEKPYEMMISEFMHTDPMKFLPEDGSLELTAGWTGDVKYHLGGVKTTSSYGIEQRISLANNPSHLEIVAPVVIGKTRASQDDTKHAGKPTTDFHKGMPIIIHGDAAYPGQGINFETMNLSNLDGYSTGGALHIITNNRIGFTTEPVDGRSTTYSTDIAKGYDVPILHVNADDVEATIEAIDIAMEFRKEFHKDFVIDLVGYRRYGHNEMDEPSITNPLPYHNIRKHDSVEIIYGNKLVEDGVISKEQMEDVMDKVQKEMRAAKTKLINQIKWIIQIWKDLSHCKNLYKVMIRDFSVDHLKEINDAMLTYPEDFHVLKKLNKVLEKRREPFESENGLVDWAQAEQLAFATIVQDGISVRLTGQDSERGTFSHRHAVLHDEENGDTFTPLHHVPNQKATFEVHNSPLSEAAVVGFEYGYNVENKNSMNIWEAQYGDFSNMAQMMFDNFMSSARAKWGERSGLTLFLPHAFEGQGPEHSSARLERFLQLAAENNSTVVNLSSSSNYFHLLRAQAKSLGTEAMRPLIVMSPKSLLRNKTVAKPIDQFTSGGFKPIIVEDGNKEKVTKLVLASGKMFIDLKEHLAKNPDDSILLVAVDRLYPFP

SEQ ID NO: 71971 - protein, 62 aa, Staphylococcus haemolyticus
MSKYDEQIIVVPRDILFEQESNAFNGFLTKNDPQGEAIFNTFSNYEVKRRGDMEEEPSYKQF

SEQ ID NO: 71972 - protein, 169 aa, Staphylococcus haemolyticus
MRVFLYLIVGVVLFYIDSIIGLLIPMHFGHFEFNFIPHLILLYILLITIYRGFGIGLIFAILFGIVTDIYVGSVYGLYMFGYLALVVIFDKFLKVFYRDYTMICILSIISIIVFEIYVAIIYGVIGFANIDIINFTLLRMIPTIILNVILLIILFPAFIKFMKKTHIQD

SEQ ID NO: 71973 - protein, 93 aa, Staphylococcus haemolyticus
MTLFLIIGILIPVVYVLRLTIKEHTIGLKEMFTTIVLSMIGIVIFTVIGVLISGQNINIASLIFASLITGVIWGLLLSGVYKLFNYLTHTFKK

SEQ ID NO: 71974 - protein, 276 aa, Staphylococcus haemolyticus
MTVAEKKEWYLEYEITVNRAGLLGDISSLLGMLGISIVTINGVDQGRRGLLIKTDSLEKVNRFEHIINELSEIEITKLRVPELRDRLAVRHGRYIEQDADDKKTFRFEREDLGLLVDFLAELFKEEGHKLIGIRGMPRVGKTESIVAGSVCAHKRWLFISSTLIKQTVRSSLIKGEYDSNHVYIIDGAVTARESNPKHQELVREVMTLPSIKVVEHPDLFVESGNYSMDDFDYIIELRENENQEIEYDQMKQQTVKSKNSLDFGEDMFGGGFGFFE

SEQ ID NO: 71975 - protein, 307 aa, Staphylococcus haemolyticus
MSQQSFKITVEDGTMIEVKVDKAKIATFGVVHIFHGMAEHMDRYEALVQALTHQGYDVIRHNHRGHGIDIDENERGHYDDMNIIAQDAYEIAQTLHGSNNNIPYIVLGHSMGSIIARLFVEKYPDIAQGLILTGTGQYPKYKGIPAIIVLKLITLIFGKRSRLEWVNQFVYKSFNKKIDQPETSSDWLSSKRDEINKFVKDDYTGFLVSNQLIYQTVKNMIRTANNNQLKKMNEQLPILLISGKDDPFGDYGKGIRKLGKKFKRAGINHITVQLYANRRHEILFEDEKEMIWSHMFEWIQKQVLKKK

SEQ ID NO: 71976 - protein, 176 aa, Staphylococcus haemolyticus
MTSKADLSLSVFTNEHYKSIKYTNSTFRNAMYDDLEINKSYFKNCDFSEGIFKNVHTVSNTKLINCDFSSSIFVNINFFKTLMSKVNYSVTTFDDSQFNVLTIEQTSFKDCSLRNVTFNDVVLKKVVFENVALDLCSLDNVKIKDCVFKNVSINNSAISEKVMKELRKQDVRFENM

SEQ ID NO: 71977 - protein, 129 aa, Staphylococcus haemolyticus
MIKCVCLVEETENQILLVQVRNREKYYFPGGKIDEGETQLEAIQREVKEELQLEFPQEDFTYIGTVIGDAYPQTNMLTELNGFKLQQEIDWNNVEIDNEITDIRWFDKSDTTLIAPAVIKWIETFSERK

SEQ ID NO: 71978 - protein, 133 aa, Staphylococcus haemolyticus
LTAGQGFYSLINNHENLLKDNKYFNINEQMTDEFSLNAEHMIYYIYGVLHSEKYLEKYGSDLSKVLPKIPNLVNKELVVDIGKYLFTLHSNYEEAPIYKGVDVNISGKANYQVKSMKFENREKKDTIIFDETI

SEQ ID NO: 71979 - protein, 347 aa, Staphylococcus haemolyticus
MNHYLRAIGSLLILVYSILTAYSSIDQVFVNIILLLGMDYTQIFGIPVFLFLNLVIILLCIIVGSILAYKINQQNQWIKSQIEHAIEGETVGINDQNIELYNETIDLYQTLVPLNQELHRLRMKTQNLTNENYNMNDVKVKKIIENERQRLARELHDSVSQQLFAASMMLSAIKETKLEAPLDQQIPVLEKMVQESQLEMRALLLHLRPLGLKDKSLGEGIKDLVIDLQKKVPMKVIHDIQDFKVPKGIEDHLFRITQEAISNTLRHSNGTKVTVELFNQQDYLLLRIQDNGKGFNVDEKLEQSYGLKNMRERALEIGATFHIVSLPDSGTRIEVKAPLNREDDNND

SEQ ID NO: 71980 - protein, 212 aa, Staphylococcus haemolyticus
EVNDDNLFMHSLSSESVKRIVSLAQQQEIYYEVFPFNGSRIALNEDKAWMQEMIKGDTPPNRVSESEWKSRLDAMSGKIDWKEDIPEDDYAKIYLFTPNLEKITTFRDELIQNQVLLNISVSNSSRFNAETMAYHTDKGTGIKEMIEHFNIKQEDTLVIGDSDNDRAMFAFGGYSVAMKNARQEIQEITNEVTQFTNEEDGAALFLESKFLK

SEQ ID NO: 71981 - protein, 272 aa, Staphylococcus haemolyticus
MKIGTISDLHIDRHPKLEPQAYLDALVYIVEQRNIELLLIAGDMSNDYLQSYQFIQDLKEKCRIPILFVPGNHDYWTSEASLSSKQIYEFYASKPDCLIGKPYVVNDHWAIVGHTAWYDYSYADDKFDLDRIKRGKYYGATWQDKVKIDWDIDDRVLSKEAAKQIQEDLDQVKDKHIILMTHIVTHPKFIVPMPHRIFDFFNAYIGTKDFDEFYSTYSIRYSIMGHVHFRKMINENGITYICPCLGYQRQWRTSDINQEINNALVSFDISDE

SEQ ID NO: 71982 - protein, 278 aa, Staphylococcus haemolyticus
METLELQGAKLRYHKVGNGPVIIFIPGANGTGDIFMPLAQQLKDKFTVVAVDRRGYGQSELTEPLPEEAINPDSRYRVKRDAQDIAELAKSLSDEPVYVLGSSSGSIVAMHVLKEHPEVVKKIAFHEPPINTFLPDAKYWQDKNAEIIDIAINEGMPQAMKLFGETLQISKLDQQYMSKPAEAENDADSKKRFDEMLGWFKYEIRQYTESDISIDGFKKHKDIITLLNGTASKGSFPQEVNFFISEETGTKIIDIPGGHLGYVQDSEGFAKVLLEMWA

SEQ ID NO: 71983 - protein, 77 aa, Staphylococcus haemolyticus
MTELVIYTQNDCPPCTFVKNYLTEHKVDYIEKNISNNEYRSEMIDYDAFATPFILLDGEPMYQVDLYKINTKCHIKS

SEQ ID NO: 71984 - protein, 461 aa, Staphylococcus haemolyticus
EQERGISVTSSVMQFDYDDYKINILDTPGHEDFSEDTYRTLMAVDSAVMVIDCAKGIEPQTLKLFKVCRMRGIPIFTFINKLDRVGKEPFELLDEIEETLNIDTYPMNWPIGMGQNFFGIIDRDSKSIEPFRDEENVLHLNDDYELQEEHAIRNDSAFAQAIEEFMLVEEAGEEFDNDALLNGELTPVFFGSALANFGVQNFLNAYVDHAPMPNARQTNEEVEVSPFDDEFSGFIFKIQANMDPKHRDRIAFMRVVSGAFERGMDVTLQRTSKKQKITRSTSFMADDKETVNHAVAGDIIGLYDTGNYQIGDTLVGGKQKYSFQDLPQFTPEIFMKVSAKNVMKQKHFHKGIEQLVQEGAIQYYKTLHTNQIILGAVGQLQFEVFEHRMKNEYNVDVVMEPVGRKIARWIENEDDIQDKMNTSRSILVKDRYDNFVFLFENEFATRWFEEKFPEIKLYSLL

SEQ ID NO: 71985 - protein, 202 aa, Staphylococcus haemolyticus
MSKTLYLMRHGQTMFNLRGKVQGASDSPLTSLGISQAKQAGQYFNEHNISFGNLYSSSSERACDTLECVAPNQDYNRLKGLKEWHFGILEGESNDLLNANYDIKDAFGDRLVVFDGESKNEVEERFIGTLTEIMRTSDSDSNLVVSHGTTIDVFLRKVIGDTEAINYFIGNCHILKFEYRNNEFRFIEKIDPENEEITKYEN

SEQ ID NO: 71986 - protein, 283 aa, Staphylococcus haemolyticus
MTKIFITGATGLIGTRLTKRLVEEGHEVAGFTTSERGKEKLERLNAKAYIGDILKADTIDAAIGDFRPEIIINQITDLKNVDMAANTKVRIEGGKNLTDAALKFDVKKVVAQSIGFMYEPGEGLATEETPLDNHSDGDRKITVDGVVGLEKETARMDQYVVLRFGWLYGPGTWYGKDGMIYNQFKDGEVTLSDGVTSFIHLDDAVEVSIQAMNFDTGIYNVADDEPVKGSDFAAWYSKEVGVDPKVTIQPAQPFERGITNDKFKEQGGTLIYNTWKDGMHPLK

SEQ ID NO: 71987 - protein, 256 aa, Staphylococcus haemolyticus
MTFTILTRGIDLSVGSILALSSAFIALMITSGVDPIIALIIGVLIGFVLGAVNGLLVTKGNMAPFIATLATMTIFRGLTLVITDGNPITNLGDSYLFQLFGKGYFIGIPVPAVTMIIVFVILLIILQKTTFGRHTYAIGGNEVAAKISGIKVNKIKILIYGISGLMSALAGGILTSRLNSAQPTAGTSYELDAIAAVVLGGTSLTGGKGRIVGTLIGVLIIGVLNNGLNLLGVSSFYQQVVKGVVILIAVLIDRKK

SEQ ID NO: 71988 - protein, 266 aa, Staphylococcus haemolyticus
MKVGIDAGGTLIKIVQESQQGRSYETKLTTNISEVIAWLNANTFESISLTGGNAGVIAENLNVDATIFVEFDASSKGLGMLLKEQGHHIDEYIFANVGTGTSLHYFDGKQQRRVGGVGTGGGMIQGLGYLLSQITDYEALTNLAQSGDRDTIDLKVKHIYKDTEPPIPGELTAANFGNVLHNLDVDFSPANKLASVVGVVGEVITTMAITVARENKTENVVYIGSSFNNNPLLREVIEDYTVLRGFKPYYIENGAFSGALGAIYLN

SEQ ID NO: 71989 - protein, 428 aa, Staphylococcus haemolyticus
MQNRYSDGIMRTNLEGVTITTPQADLIDDVEVTKQPIPHKTIREFDPTLEPGSPDVIVQKGEDGEKTTTTPTKVDPDTGDVVERGEPTTEVTKNPVDEIVHFAPEEVPQGHKDEFDPNLPIDGTEEVPGKPGIKNPETGEVVTPPVDDVTKHGPKAGEPEVTKEEIPFEKKREFNPDLKPGEEKVTQEGQTGEKTTTTPTTINPLTGEKVGEGEPTTEVTKEPVDEITQFGGEEVPQGHKDEFDPNLPIDGTEEVPGKPGIKNPETGEVVTPPVDDVTKHGPKAGEPEVTKEEIPYETKRVLDPTMEPGSPDKVAQKGENGEKTTTTPTTINPLTGEKVGEGEPTTEVTKEPIDEIVNYAPEIIPHGTREEIDPNLPEGETKVIPGKDGLKDPETGEIIEEPQGGSNHPWWLKMIQMRTAIQTAIDFR

SEQ ID NO: 71990 - protein, 277 aa, Staphylococcus haemolyticus
  MISC_FEATURE (240)..(240): X=any amino acid
  MISC_FEATURE (268)..(268): X=any amino acid
KLDFLPNKLNKYSIRRFTVGTASILVGATLIFGVANDQAEAAENNTTQKQDDSSDASKVKGNVQTIEQSSANSNESDIPEQVDVTKDTTEQASTEEKANTTEQASTEEKADTTEQASTEEKANTTEQASTEEKADTTEQASTEEKADTTEQASTEEKANTTEQASTEEKANTTEQASTEEKADTTEQASTEEKADTTEQASTEEKADTTEQQQQKKRQKLKKQKKQQQKKHQKLKKQTKXKQKKRQKLKKQAKQQQKKHQKLKKQTKXKQKKRQQLK

SEQ ID NO: 71991 - protein, 379 aa, Staphylococcus haemolyticus
MIKKYLLSVFTVLIAIVLCACQSTSQTHEKKAKEETHNKEENIYAKKRSSGQNDWVEYKGDVAHIFFHPLITDPKVAFTGEANQAKGNNDWMITVEEFKRSLDELYKHHYILIDPHDAYDFNSKPIKKKSLKLPKGKKPLILSIDDMNYYEYMRENGYADRLVLDKYNHVVSQTKGKDGKFTQSESNDIVPILNRFVKEHPDFSLNGQKGVVGLTGYNGVLGYRTNELDSKDYSKRKEQAIKVANAMKRDGWTFASHSWGHIDFANSSYDRIVKDTERWKKEVTPIIGKTDLFIFPHGAQDRGSAGYQYLENKAGFKFLAGVGPNNFTDIGEDSVYQDRVAIDGLNLYDFKYKLKPFVDSDKVYSKEDRSYFKGEKGYK

SEQ ID NO: 71992 - protein, 182 aa, Staphylococcus haemolyticus
MNDKDLRVIKTKKALTDSLYSLLEQEMFTPLTVNKICKHASVHRTTFYKHFYDKYELLKYLLKLTHDDYFATDIKERLNNPFQTLANSFNKEEVSRIELKQYNDKEFEDVRNKYLIEIMQKDFKTNMHRITVDNVVPKSLVFYVFGSVLNAFIDWKKNENVEIKPKQMDQIFHKLINIKAHD

SEQ ID NO: 71993 - protein, 239 aa, Staphylococcus haemolyticus
MKIMKLGTGKRMNKQISEISPKMTLPMFMIGLIIFVVVAINVIHDTLLVQNVDIGSLHWLTDYFGEPERKYGDGIWHNFMTFCAEIGEVKSVIYITLFLAIVLLFKHYKLSIWMVLTITSGTLLNYLIKQLIERQRPFNHLMRDHGYSFPSGHSNASTLLALILLIILIPLIKLKAIRIIANTITIIIWIGVLCCRLYFHAHYITDVVGGVTLGIIWVALFLMILPLFYLNLRNKPNNK

SEQ ID NO: 71994 - protein, 487 aa, Staphylococcus haemolyticus
MGEFKGFMKYEKQSLSELSLVERLKNHDAFQQRFSRDEASVQGARCMDCGTPFCQTGLPFGRETIGCPIGNYVPEWNDLVYRQDFKAAYQRLSETNNFPEFTGRVCPAPCEQSCVMKINRESVAIKGIERTIIDEAYDNGWVKPKYPKQRLEQSVAIVGSGPAGLSAAEELNYMGYQVTVFERAAEAGGLLMYGIPNMKLDKDVVRRRITLMTEAGITFKTNTNIGVDISREELEQTYDAIILCTGAQKARDLPLEGRMGQGIHFAMDYLTEQTQLLNGEIDEPTITAKGKNVIIIGAGDTGADCVATALRENCKSIVQFNKYTKAPEEIAFESNTSWPLALPVFKMDYAHKEYEARFGREPRAYGVQTMRYDVDHIGNVRGVYTQILEETPEGMVVVDGTERHWPADLVLLSIGFEGTEPTVPRSFDIATQQNKIIANDKDYRTNKEKIFAAGDARRGQSLVVWAIKEGRAVAQSVDKFLKQKVFV

SEQ ID NO: 71995 - protein, 49 aa, Staphylococcus haemolyticus
MKEKNHKMMKYYEKAKPYLLTLLYLAIFIALYLIYGSGDTHNNFIYNEF

SEQ ID NO: 71996 - protein, 41 aa, Staphylococcus haemolyticus
DEPTAGLDPKSRNQIMEMLKKLQLEQNKTIILVTHEMNDVA

SEQ ID NO: 71997 - protein, 192 aa, Staphylococcus haemolyticus
NQFLWIIFPYLCVAIFIVGHIARYKYDQFSWTAKSSEFLEKKQLKWGSLLFHLGIIPVFFGHVVGLAIPAKWIDGLGVSEEMYHFGAVYIGSIFGIMTFIGMLLLTARRITIKNVRKLSSASDIFVNFLLILIIFMGCYSTLVTNAMVSDFDYRQTISIWFRHLFTFSPDASLMTSVPLSFKIHILLGIYNF

SEQ ID NO: 71998 - protein, 61 aa, Staphylococcus haemolyticus; identical to SEQ ID NO: 44021

SEQ ID NO: 71999 - protein, 164 aa, Staphylococcus haemolyticus
MIGVIGVTICLGLDRSLLGWGACVALLGSLCWSCNTVVTKQFKFDKGAWVLTGWQLLFGGIIMFLISQLLGERYHIGQLNGWGWVWFWWLVFPASIGSFGLWFSSLNLRGATISSSFLFLVPLFSTIFSIIGLGEPFTLHIMIGGLCVVVALIAINYSPHHLSN

SEQ ID NO: 72000 - protein, 475 aa, Staphylococcus haemolyticus
MNKGVALKRYSLILVVFLIMMCLSFHFQFNEANASTKSDKLDVQQTSQQPVVKQQNKSVNVSKDKVVATQTKVQTPSKVTNRNQASLQKTMAPSKRAHVTSTHVTPKSTKVKPSSQNFSKQKQPTKVNKKVVSTNKKPQKASKVTRTQSARPQLLAQTTKTKSKPTSSKVSASKPSTKVAVVTKSKTAKPSAQTTVKASKKASSTTKKNYYNQAPKRWPSNVPGGDNVRDFGQTTKESGIDDALKIMKKSGNKGVTIEHAKAKDANIATVYNWNPKAKQLTYGTGTAIGKHTILTANHVVNDQSAHKPLTPSQPQNMRINILQEGSKIVRTLEVFGVQMLQYGDVSLVYTYEDISKYMKIRKIASESSIKAMKANTPIHMYHYGKPTGKYKNDPAGTMYHSKGKYTMPARNVNPIGYYQMMAEPGSSGGAVLNSKNEVIGVHAFRLNSGDYKKYNLNTMAEIRGKLRKEIIDNIV

SEQ ID NO: 72001 - protein, 1438 aa, Staphylococcus haemolyticus
MAMTNQEKFKVLADQIKVSNQLDQTIIEKGELTRVDVSNKNRTWEFQITLPYFLSHEDYLIFTNAITEEFKEIAKVDWHFTIQDTSNQDEHAIKYFGHCIEHTALSPKVKGQLKQKRLIMSGNVLKVMTSNDIERNHFDKVCNGSLVKAFRKCGFDIDKVVFETDDSSSYDDLASLEAHIQEEDEKSAREATEKIEKIKAEKAKQQDNNESNVDKCQIGKPIQIDNIKPIESIIEEEFKVAIEGVIFDINLKELKSGRHIVELKVTDYTDSLVLKMFTRKNKDDLDHFKALSVGKWVRAQGRIEEDTFVRDLVMMMTDIEEIKKTPKQDKAEEKRVEFHLHTSMSQMDGIPNISAYVNQAAKWGHKAIAVTDHNVVQAFPDAHGAAEKNGIKMIYGMEGMLVDDGVPIAYKPTDRDLKEATYVVFDVETTGLSNQYDQIIELAAVKVKDGEIIDKFERFSNPHEKLSETIINLTHITDDMLTDAPEIEEVLTEFKEWVGDAIFVAHNASFDMGFIDTGYERLGFGPSTNGVIDTLELSRTINTEYGKHGLNFLAKKYGVELTQHHRAIYDTEATAYIFIKMVQQMKELGVTNHKDINQKLSNEDAYKRARPTHVTLIVQTQEGLKNLFKIVSASLVKYYYRTPRIPRSLLNEYREGILVGTACDEGELFTAVMQRDQSEVEKIAKYYDFIEVQPPKLYQDLIDRELIRDTETLYEIYERILKAGESTGIPVIATGNAHYLYEHDAIARKILIASQPGNPLNRSTLPEAHFRTTDEMLDEFHFLGEEKAHEIVVKNTNELADRIEKVIPIKDQLFTPRMDGANEEIRELSYTNAKKLYGEDLPQIVIDRLEKELASIIGNGFSVIYLISQRLVKKSLDDGYLVGSRGSVGSSFVATMTEITEVNPLPPHYICPNCKTSEFFDDGSVGSGFDLPDKQCSTCGAELIKEGQDIPFETFLGFKGDKVPDIDLNFSGEYQPNAHNYTKVLFGEDKVFRAGTIGTVAEKTAFGYVKGYLNDQGIHKRGAEIDRLVKGCTGVKRTTGQHPGGIIVVPDYMDIYDFTPIQYPADDQSASWMTTHFDFHSIHDNVLKLDILGHDDPTMIRMLQDLSGIDPKTIPVDDKETMQIFSSPESLGVTEEEILCKTGTFGVPEFGTGFVRQMLEDTKPTTFSELVQISGLSHGTDVWLGNAQELIRSGICDLSSVIGCRDDIMVYLMYAGLEPSMAFKTMESVRKGKGLTEEMIDAMKENNVPDWYLDSCLKIKYMFPKAHAAAYVLMAVRIAYFKVHHPLYYYASYFTIRASDFDLITMIKDKESIKNTVKDMYSRYMDLGKKEKDVLTVLEIMNEMAHRGFRMQPISLEKSQAFDFIIEGDTLIPPFISVPGLGENVAKRIVEAREDGPFLSKEDLNKKAGLSQKIIEYLDDLGSLPNLPDKAQLSIFDM

SEQ ID NO: 72002 - protein, 141 aa, Staphylococcus haemolyticus
MIRYGYHFLSALLISILLLLIMFTMDVVTHTTHLTLLLINIDFIADPNQTPLILELLIHIVIGFLIYITFLIIYKFFKPFYKISYLLLIIIFLILYPLLILLAQRSFFQFSWTEYGLWMIAHLIFTVCMAWSIPYFSKKKW

SEQ ID NO: 72003 - protein, 77 aa, Staphylococcus haemolyticus
MILEMRRAELVHWLSMIPIVVFIKAPKYILFINVCYVISANLPIILTQRYNRPRLEHYYQLRMKRDERTCRKRKSSL

SEQ ID NO: 72004 - protein, 603 aa, Staphylococcus haemolyticus
LQVRSTSIANSQSASTSTSTSTANSQSTSTSTSTSTANSQSASTSTSTSTANSQSTSTSTSTSTANSQSTSTSTSTSTANSQSASTSTSTSTANSQSASTSTSTSTANSQSTSTSTSTSTANSQSTSTSTSTSVSDSTSASTSLSGSTSTSVSDSTSASTSLSDSASTSVSDSTSASTSLSASTSTSVSDSTSASTSLSESTSTSLSDSLSASTSLSDSASTSVSDSTSASTSLSGSESASLSDSASASTSVSASTSTSVSDSTSASTSLSESTSTSLSDSLSASTSLSASTSTSESDSTSTSTSLSESTSTSLSDSASASTSLSDSASTSVSDSTSASTSLSGSTSTSVSDSTSTSTSLSESTSTSLSDSTSASTSLSASTSTSVSDSTSASTSLSGSTSTSVSDSTSASTSLSASTSTSESDSTSTSTSLSGSTSTSVSDSTSASTSLSGSTSTSVSDSTSTSTSDSASTSTSVSDSTSASTSLSASTSTSVSDSTSASTSLSASTSTSVSDSTSASTSLSASTSTSVSDSTSASTSLSASTSTSVSDSTSTNTSLSASTSTSVSDSTSASTSLSASTSTSVSDSTSARYIIKCIYINKRE

SEQ ID NO: 72005 - protein, 266 aa, Staphylococcus haemolyticus
  MISC_FEATURE (251)..(251): X=any amino acid
MHLNEVFTYLSAFLIGGVNMSKKYNRDAFETTNSGNDLHGKGANQQDNTSQSNATKHYDRDSFATSNTGSDLHGQGANQQDSAAQSNATKHYNRDEFEKNNFGHDLHDNGPNQKNGKSRQGLNTEHYNRDEFVTNNTGKDLHGQGENQNSNNYDVSNSQYSHNKFSSHPSRKDFVISFITGALIGSAVGLFYKNKAEEKIDGAKTKEKELRNRYQNIKQQTESNIENVKQKIDDFKNRDNSEVSNDELVAXTNAIKAETSNNLADQ

SEQ ID NO: 72006 - protein, 47 aa, Staphylococcus haemolyticus
MAYQSEYALENEVLQQLENLGYKRVNIRNIKSEINDYLKELGVLKHD

SEQ ID NO: 72007 - protein, 205 aa, Staphylococcus haemolyticus
MEEKFNNEQEERQFRQFQEYQKQQEEEKKKKRKKSWLFGCGGCLVLLILIIIGVTACTGSFVNEVDKEINEEGKLDKDKDTKIKSVGETTEIDGVSFTLDSASYTDERNEFAEVQADKVLKVDMTIKNNSKEEIPVGGDVKVYVDGKQAKSYPITDGLMDSLSPNREISGSEGFAINGNPEKIELEFQPLTSFSNKRYIYDVKPE

SEQ ID NO: 72008 - protein, 363 aa, Staphylococcus haemolyticus
MKSNRISGFQWALTIFVFFVVTMALSLILRDFQASVGIKRFVFDITDLAPFIAAIVCIIAFKDKRTQLAGLKFSVDIRVIERILLALILPLVIFMIGMFSFNTFADSFILLQATDLSVSVPTIIIGHILMAFFAEFGFRSYLQNIVENKVNTFFSSIIVGLIYSIWAANTTYGMEYAGYHFLYTFMFSIIIGELIRATKGHTIYIALVFHASMSFAQVFLFSEETGDLFSMKVIALSTTLVGIVFIILSLIIRFIVYKTTNRSLDEVEPNNYLDHMNDDDTTTSNETKSEDHEHNDKKDSFTESQLNEDHVELKSQSENQTDSSNEKLKENTSYKEDRRSSVVDDAKDEIDQMKDTSSHKTEK

SEQ ID NO: 72009 - protein, 631 aa, Staphylococcus haemolyticus
MAKLVSIIVSVYNKEQFLEKCIESLIDLKMDKNNIEAIFVDDCSTDESVNIIKHYEKDYDFIKLIQLPENTGSPSEPRNIGMREAQGKYITLLDADDWLDKEGFPQVIEKVNKDDADLGFGQSFKHKSKNVKYHARFTSYKEASHLKPQDISKIFRAVGPPGKVFKRSLVMDHHIEFEHMKYGEDKLFFFQLFGKVDDITMSTIPMYHVNRYDENKSLVQQTSMLDKANSNLEVLDRTCHMDMSSELKHMALARMVEVDFISRFLRTKTFIKSADKEKFYAVIEKVERKIKEQGIDINTLITNPVFKQIYTLYHHADESVFVNFTKDVVNDQWRYIIQDDIVFRDFVHQYDMIKPTVVDCYPVYEGTQMMGENKYEVIRVMKPDDINIQSVSLVEINNAANEYEVTYKYSDDRIYVPHEEFEKLNKDININFNVNYGESGRSLVYASYPSFNDVFKMKRQNFKVEFVHKKNENKAQQVTNRKSEYFKRITNPMMTLKKIKIYKDVSFKEEVGSLEAGTRVEASDIQYTSKGTPRLVLDDGSIITANKDFITLINTSGLNKYITEVPKKVKVVKACKLYDSRDFKDNTVRKLKKGDVLTIRDIIYTNNSTPRLVTQEGLFLTANKDFIKIIK

SEQ ID NO: 72010 - protein, 69 aa, Staphylococcus haemolyticus
MKAKEIRDLTTSEIEEQIKSSKEELFNLRFQLATGQLEETARIRTVRKTIARLKTVAREREIEESKANQ

SEQ ID NO: 72011 - protein, 333 aa, Streptococcus mutans
MAVQVGLGVMIMKLMITKQFQSFLQELGIDIRLVLQKAQLPNKLWQEELTYNAQEYYCFIATLDKLITDEALLALSRIENIKKFVPAFFAALASPDGLTALQRFSKYKSLIGPVKVQLEDSEDEISVSYAYRSSQLPLPRMLLLQEQLLLLSLLRTGTGTCILPYEISSPYDYGRLLEKEVGILPKKTDYNRLVLSKADLEKPFITENNVMWYHLKLSLNQQLSQLHSDDNFTQAVQTELLSAIPSGQFSLAMIANRLGLSARTLQRKLAAEDTTFNEEVLHMQKLMTFSYLDLSMSVDEIAYLVGYSEKSSFLRAFKKWTGKTLKKYKETAL

SEQ ID NO: 72012 - protein, 878 aa, Streptococcus mutans
MTNKKKLLLIDGSSVAYRAFFALYNQIDRFKNPAGLHTNAIYGFHLMLDHMMKRVEPTHVLVAFDAGKTTFRTEMFADYKAGRAKTPEEFREQLPYIREMLTALGVSYYDLENYEADDIIGTLDKLAENEDEYDVTIVSGDKDLIQLTDSNTTVEISKKGVAEFEEFTPDYLMEKMGLTPKQFIDLKALMGDKSDNIPGVTKIGEKTGLKLLHEHGSLEAIYEHIDSFKTTKMKENLINDKEKAFLSKTLATIDTQAPITITLDDIDYSGPQLDALAKFYDEMDFRQFRSQLDSSPKTENFEVSYTEVTELKPDMFAPDQFFYFEILNDNYHTQEMIGLAWGDDQAIYATTDTSLLTHDLFKEALSKPIKTYDFKRGKVLLSHLGIDLPTASFDSRLAKYLLSTVENNNISTIARLYTDLPLETDDDVYGKGAKRAIPEKNVLLSHLAKKISVLLASEEPMRQKLSANDQLDLLFEMELPLANVLAKMEIAGISVRKETLQDMERANEIELQALTQEIYDLAGEAFNINSPKQLGVILFEKLGLPLSATKKTKTGYSTAVDVLERLAHRSPIVAKILEYRQIAKLQSTYIIGLQDSISFDGKIHTRYLQDLTQTGRLSSVDPNLQNIPVRLEQGRLIRKAFVPEWKESVLLSSDYSQIELRVLAHISGDEHLIAAFKEGADIHTSTAMRVFGIERPEDVTPNDRRNAKAVNFGVVYGISDFGLANNLGISRKAAKNYIETYFERYPGIKNYMDRVVREARDKGYVETLFHRRRELPDINSRNFNIRSFAERTAINSPIQGSAADILKVAMIHLDQALKKGDYQSRMLLQVHDEIVLEVPNAELEAIQKLVKETMESAIELSVPLVADENAGQTWYEAK

SEQ ID NO: 72013 - protein, 498 aa, Streptococcus mutans
MGLFNRLFGKKRQEEKSTTDSIEEAAEQEVTQEKPALLAETAETAESQQSVYEKDVTESQAEQVSDARIIEDGQNSKEPAASGHSVQEHKQQPVQHQQEVFHSENSVAAVQNNTETMPSQQKKDEKPNQSPDFMAEYYARKAELAQKVESQKPAETAEQESQTTLSDQKETETAVNQSEEEASSQIAESVESEEEKYNRSLKKTRTGFGARLNAFLANFRNVDEEFFEDLEEMLILSDVGVQVASTLTEDLRYEAKLEKAKKPEALRRVIIEKLVDIYDKDGQFNEKINFQNDLTVMLFVGVNGVGKTTSIGKLAYKYKHQGKKVMLVAADTFRAGAVAQLAEWGRRVDVPVVTGPKNADPASVVYDGVERAVAADVDILMIDTAGRLQNKDNLMAELEKIGRVVKRVIPDAPHETLLTLDASTGQNALVQAKEFSKITPLTGLILTKIDGTAKGGVVLAIRQELAIPVKFIGFGEKIDDIGEFHSEDFMRGLLEGLL

SEQ ID NO: 72014 - protein, 708 aa, Streptococcus mutans
MEIIEKIAEDLHLKESQIQKVLDLAAQGNTIPFIARYRKEMTGNLDEVEIKSIIDLDKNLTALAERKATVLAKIEGQGKLTAELQEAIEAASKLADVEELYLPYKEKRRTKATIARENGLFPLARLILQNVSDLEKQAETFVNKTFPTAEKALTGAIDILIEALSDDTKLRSWTYNEIWTNSFILSKVKDQELDEKKVFQIYYDFSEKVAKIQDYRVLALNRGEKLGVLKVYFEHNLDKMARFFEARFKEKSSRIEQVVQAALKKKILPAMERRIRAELTEEAEDGAIKLFSDNLRNLLMIPPLKGKVVLGFDPAFRTGAKLAVVDQTGKLIMTQVIYPVPPASQSKINQAKSELAELIKRYAIEIIAIGNGTASRESEAFVAEILKDFPQVSYVLVNESGASVYSASELARHEFPDLSVEKRSAISIARRLQDPLAELVKIDPKSIGVGQYQHDVGQKKLAENLDFVVETVVNQVGVNVNTASPALLSHVSGLNKTISENIVKYREEKGKIQSRQEIKEVPRLGDKAFEQAAGFLRIPNAKNILDNTGVHPESYAAVEKLFALLEITELDESARSKLRSVAIEKVATEVNLGQETLKDIIADLLKPGRDLRDDFAAPQLRQDVLELSDLKIGQQLEGTIRNVVDFGAFVDIGLHEDGLIHISQMSKNFVKHPSQIVAVGDVVTVWVSKIDIERGKVNLSLVALNEFN

SEQ ID NO: 72015 - protein, 443 aa, Streptococcus mutans
MKESLRILHINDLHSHFEAYPKIKRFFAEHSKTQREVLRFDIGDNVDKSHPLTDVSAGRVNVDLMNDLGIDFATIGNNEGIGLAKAEINQLYHKADFQVILGNLRDKKGRPTWAQPYVIYETKAGTKLALLAYTFPYYWTYVPNGWQVLDAISSLKKDLENPEVAAADFRILLSHLGIRLDEKIARQVPEIDLIIGAHTHHVFEEGEVVNGTYLAAAGRYGDHVGQIDLDFEDHSLTNIAIEAVPTSDLDSEKEDAAFVAHLFEEGEKLLAENLICKLSRQPSLKECADLVMEAMKKSAAADLAIINTGLVVEPFSQNLTKADLHKSLPHQMRLVKFQVTQTELLEICHDIFSQADLLANQQIRGMGFRGKQFGKVVTSGFTYKNGKIVYNNKAIGRKDKMSLVLVDQYYFAPYFNSLTSRKGQLLFPDLLRQTVEKYLRGDL

SEQ ID NO: 72016 - protein, 182 aa, Streptococcus mutans
MRKDITPEMYNYNKFPGPQFVTFDNHVKSDDIDLLLLENVKNAFDVTVFTQRFSDILLKYDYIVGDWGNEQLRLKGFYKEEMQRETKNPYIGYLDDYLKEYCNFGCAYFVLENPNPKEIKSEEDNSQRRKRRDNRRKKRFNKNNAKMNLQEKLRREKIKERQAMREIQDAKNNFVIRKKEVK

SEQ ID NO: 72017 - protein, 452 aa, Streptococcus mutans
MTENEQIFWNRVLELAQSQLKQATFDFFVSDAKLLKVEGNIATILLDDMKKLFWEKNLQPVVLTAGFEVFNTEISIEYVFEETQSTSNSPQISQNKTAELATETLPFVQNDLNPKYSFDNFVIGDENRWAFTASVSVADLPGTTYNPLFIYGGPGLGKTHLLNAIGNSVLASNPKARIKYISAENFINEFVVHIRLQNMDELKKKFRNLDLLLIDDIQSLAKKSLAATQEEFFNTFNALHDNNKQIVLTSDRTPDDLNDLEQRLVTRFKWGLTVNITPPDFETRVAILNNKIQEYNYSFLSETIEYLAGQFDSNVRDLEGALKDISLVANFKKLDVITVEVAAEAIRARKQDSSPKMIVIPIEDIQKQVGKFYGVTVKEIKSTKRTQNIVLARQVGMYLAREMTDNSLPKIGKEFGGRDHSTVLHAYNKIKNMLAQDDSLKIEMETIKNKIK

SEQ ID NO: 72018 - protein, 378 aa, Streptococcus mutans
MIKFSINKVFFLQALNATKRAISSKNAIPILSSLKIEVNSQSITLTGSNGQISIENTISAEEENAGLLVTSSGAILLEANFFINIVSSLPDITLDFEEIEQHQVVLNSGKSEITLKGKDVEQYPRLQEVGTNNPLILETKLLKTIISETAFAASTQESRPILTGVHLVLTNHKEFKAVATDSHRMSQRKLTLDHSSDDFDVVIPSRSLREFAAVFTDDIESVEVFFSNSQILFRSEYISFYTRLLEGNYPDTDRLLGNNFETEVVFNTNALRYAMERAHLISNATQNGTVKLEIINNQVTAHVNSPEVGKVNEELDIESLSGNDLTISFNPTYLIEALKALKSETVTIRFISPIRPFTLTPSDNSENFIQLITPVRTN

SEQ ID NO: 72019 - protein, 63 aa, Streptococcus mutans
MYELGSLVEMKKPHACTIKTTGKKANCWEVVRIGADIKIKCTNCDHVVMMSRHDFERKIKKVL

SEQ ID NO: 72020 - protein, 371 aa, Streptococcus mutans
MALTAGIVGLPNVGKSTLFNAITKAGAEAANYPFATIDPNVGMVEVPDIRLQKLTELIVPKKTVPTTFEFTDIAGIVKGASKGEGLGNKFLANIREIDAIVHVVRAFNDENVMREQGRESDFVDPIADIETINLELILADLESINKRYARVEKIARTQKDKDSVAEFNILQKIKPVLEDGKSARTIDFTEDEAKIVKGLFLLTTKPVLYVANVDEDKVADPDSIDYVQQIREFAATENAEVVVISARAEEEISELDDEDRAEFLEAMGLNESGVDKLTRAAYHLLGLGTYFTAGEKEVRAWTFKRGIKAPQAAGIIHSDFEKGFIRAVTMSYDDLIKYGSEKAVKEAGRLREEGKDYIVQDGDIMEFRFNV

SEQ ID NO: 72021 - protein, 1166 aa, Streptococcus mutans
MNLIDLFKQNQKIKEWTEHLSAPTRQLVMGFSSSSKALAIAAAYKQQKGKIVIVTSTQNEAEKLATDLISLIGEEEVYQFFADDVAAAEFIFASQDRTNSRVESLNFLLDKEKSGILMTSIVGIRILLPSPQNYQAAQFKLKVGEEYNLDNIIKQLSNIGYQKVAQVYNPGEFSKRGDILDIYEINQPYPYRLEFFGDEIDGIRTFDPDDQRSLSNLDSFILIPSDDIILTDSDFDQACYNLEKALITANDSLQPYLKEVLSVTKDHYRHQDVRKFLSFFYQKEWTLLNYLPEQTPLFFDDFQRIIDRNSHFDLDIANLLTEDLQNSKAVSSLSYFANNYKDLRHYQPATFFSNFHKGLGNLKFDYLYNFTQYPMQEFFNQFPLLIDEIRRYQKSEMTVLLQTDSQQSQGRLQKALQGYNFNLPISQVDNLLKKQAQLTIGNLSTGFYFADEKLVLITEREIFHKKVKHKRRRSYISNAERLKDYNELEKGDYVVHNVHGIGRFLGIETIEVSGVHRDYLTIQYQNADRISIPIEQIELLSKYVASDGKEPKINKLNDGRFQRIKQKVSKQVEDIADDLLKLYAERSQLKGFAFSPDDKNQEEFDNDFAYVETEDQLRSIKEVKKDMEKDQPMDRLLVGDVGFGKTEVAMRAAFKAVNDDKQVAVLVPTTVLAQQHYNTFKERFENFPVNVAMMSRFKTKTEQSETLTKLAKGQVDIIIGTHRLLSKDVTFKDLGLLVIDEEQRFGVKHKETLKELKTKVDVLTLTATPIPRTLHMSMLGIRDLSVIETPPSNRYPVQTYVMETNASVIREAIMREIDRGGQIFYIYNRVDTIDKKVAELRELIPEANIGFVHGKMSEIQLENTLLDFISGEYDLLVTTTIIETGIDISNVNTLFIENADYMGLSTLYQLRGRVGRSNRIAYAYLMYHPDKILTEVSEKRLEAIKGFTELGSGFKIAMRDLSIRGAGNILGSSQSGFIDSVGFEMYSQLLEEAIAAKQGQRKTRSKGNAEINLQIDAYLPTNYISDERQKIEIYKRIREIESKTDYQALQDELIDRFGDYPDQVAYLIEIGLLKAYLDDAFVESLDRKQNSVVVCFEKISLKFYLTQDYFEALSKTNLKARISENKGKIEIVFDVRAKKEYEILEELIKFGKILKKLKIRKSNNLL

SEQ ID NO: 72022 - protein, 90 aa, Streptococcus mutans
MRLDKYLKVSRIIKRRSVAKEVSDKGRIKVNGILAKSSTDLKINDTIEIRFGNKLLTVRVLEMKDSTKKEDAVKMYEIISETRIDLNGET

SEQ ID NO: 72023 - protein, 311 aa, Streptococcus mutans
MSVTVQMLVDKVKLDVIYGTQELLQKEIATADISRPGLEMTGYFDYYAPERIQLLGMKEWSYLTQMTSHNRYSVLKEMFQTETPAIIVARDLTIPEEMLLAAKEEGIAVLQSHVPTSRLSGEMSWYLDSCLAERTSVHGVLMDIYGMGVLIQGDSGIGKSETGLELVKRGHRLVADDRVDVFAKDEETLWGEPAEILRHLLEIRGVGIINVMSLYGASAVKDSSQVQLSIFLENFEKDKMFDRLGNGNEDIELSGVKIPRIRIPVKTGRNVSVVIEAAAMNYRAKQMGYDATETFEKRLTNLIDQNEASHD

SEQ ID NO: 72024 - protein, 335 aa, Streptococcus mutans
MKDIFEKLAAQENLTEAEITAVAEKIFKGELSEAQIAAFLMALKIKGETPEEILGLVKTIKKNAAVIPSQTSDAMDNCGTGGDKSFSFNISTTCSFVLAAGGIHIAKHGNRSISSKSGSADVLEELGINVVLAPEKLAQVLDETGIVFLFAQKMHPAMRYISPARQALGIPTVMNLIGPLTHPMDLETQLLGLYQADLQDDLAQVLKLLGRKRAVIITGPDNMDEAALYGKNHYTLLDNGQISQGSFTFEDFDMPKVTLEDIKGGDAKENAQILVSVLKNEPSPYLETTLLNAGLGFYANGKVDSIKEGIDLAREVIASGKAYAKLKALQEAQVD

SEQ ID NO: 72025 - protein, 428 aa, Streptococcus mutans
MTKQLKRPEVLSPAGTLEKLKVAVNYGADAVFVGGQAYGLRSRAGNFSMEEMAEGINYAHDHGVKVYVAANMVTHEGNEIGAGAWFRELRDLGLDAVIVSDPALIAICATDAPGLEIHLSTQASSTNYETFEFWKELGLTRVVLAREVTMAELAEIRKRTSVEIEAFVHGAMCISYSGRCVLSNHMSHRDANRGGCSQSCRWKYNLYDMPFGQERRSLKGEVPEEFSMSAVDMCMIENIPDMIENGVDSLKIEGRMKSIHYVSTVTNCYKAAVNAYLESPQAFEAIKQDLIDELWKVAQRELATGFYYQTPTENEQLFGARRKIPQYKFVGEVVDFDEPSMTATIRQRNVINEGDRVEFYGPGFRHFETFITDLHDADGQKIERAPKPMELLTITVPQEVKAGDMIRACKEGLVNLYKEDGSSLTVRT

SEQ ID NO: 72026 - protein, 255 aa, Streptococcus mutans
MTKEFLPTILKQKQEELASLIMEEVKPLRLTYRLFDFLKEHHDQLQIVAEVKKASPSMGDINLDVDIVKQAQMYEAAGAAMISVLTDQVFFKGNIDFLAEISGSVSIPTLAKDFIIDEKQIVRSRNAGATVILLIVAALPEKRLKELYDFAAGLGLEVLVETHNLSELEIAHRIGAQIIGVNNRNLVTFEVDINTSLELSTHFRDDKVYISESGIFTGQDSKLVAPYFNAILVGTALMQADNVADKVKELAIDKG

SEQ ID NO: 72027 - protein, 186 aa, Streptococcus mutans
MSLVGKEMVEFSAQAYHQGEFVTVNNEDVKGKWAVFCFYPADFSFVCPTELGDLQEQYATLQSLGVEVYSVSTDTHFVHKAWHDDSDVVGTITYTMIGDPSHVLSQGFEVLGEDGLAQRGTFIVDPDGIIQMMEVNADGIGRDASTLIDKVRAAQYIRQHPGEVCPAKWKEGAETLKPSLDLVGKI

SEQ ID NO: 72028 - protein, 403 aa, Streptococcus mutans
MTYNQPNNNGFYGNFGGQFIPETLMTAVIELDEAYREAKADPSFHEELDALLKDYVGRETPLYFAKRLTDYIGGAKIYLKREDLNHTGAHKINNALGQVLLAKRMGKNKIIAETGAGQHGVATATAAALFDMECTIYMGEEDVKRQALNVFRMELLGAKVHSVTDGSRVLKDAVNAALRAWVTNIEDTHYVMGSALGPAPFPEIVRDFQSVIGREAKRQFATVSNGQLPDAVLACIGGGSNAIGLFYPFVNDESVAMYGAEASGLGLDTDKHAATFAKGRPGVLHGALMDVLQDEHGQIMEAFSISAGLDYPGVGPEHCYFNEIGRATYDSITDEEALESFKLLSRLEGIIPALESSHAIALTQKVAKELGADKSIIVCLSGRGDKDVAQVKERLKQEAKEGK

SEQ ID NO: 72029 - protein, 306 aa, Streptococcus mutans
MMLNEMNKSLEGVDIRINEPLKKYTYTKVGGPADFLAFPRNRYELARIVKFANQNNLPWMVLGNASNLIVRDGGIRGFVIMFDKLNAVTVDGYVIEAEAGSNLIETTKVAQYHSLTGFEFACGIPGSIGGAVFMNAGAYGGEISHILISAQVLTRDGEIKTIEARDMRFGYRHSVLQDNQEVVVSAKFSLKPGDYTIISQEMQRLNHLRALKQPLEHPSCGSVFKRPLGHFAGQLIMEAQLMGHRIGGVEVSTKHAGFMVNVANGSAKNYEDLIADVIHRVKENSGVTLEPEVRIIGEKEVQMEDS

SEQ ID NO: 72030 - protein, 357 aa, Streptococcus mutans
MHKLYSFIGSIFLIILLLIGLNFYMNQQIEGKGASDKLVIYNWGDYIDPELLTKFTKETGIQVQYETFDSNEAMYTKIKQGGTTYDIAVPSDYMISKMKAEHLLVKLDKSKIKGLTNLDQQFLGKSFDKDNTYSIPYFWGTVGIVYNSKMLTKVPQHWNDLWNKAYTNKIMLVDGAREVLGFSLNSLTYSLNTKNRAELERAERKLNQLTPNIKAIVGDEMKGYLIRGDAALGVTFSGEAREMLDTNKDLRYLVPGEGSNLWFDNLVIPKTVKHKKSAYTFINFMLKPENAAQNAEYIGYATPNAKAKDLLPADIKNNKSFYPSKETIGHLEVYDNLGKKWLGIYNDLYLQFKMYRK

SEQ ID NO: 72031 - protein, 446 aa, Streptococcus mutans
MKTHPKKQSLSEVNQSVRVPKNASFLTTLRAFLGPGALVAVGYMDPGNWITSVVGGASYKYLLLSVVLLSSLIAMQLQQMAGKLGIVSRQDLAQATASHLPKRLRYLLFIVIELALMATDLAEVIGSGIALHLLFGWPLLFSIFITILDVFLLLSIMKLGFRKIEAIVSTLILTILVIFVYLVVISHPSFSGIIKGYIPQFAIFDSAQAATNSRLTLALGIIGATVMPHNLYLHSSISQTRQVDYKQKSSIAQAVKFMTWDSNLQLSLAFIVNSLLLILGASLFYGHASEISAFSQMYNALANNHIAGAVASSFLSTLFAIALLASGQNSTITGTLTGQIVMEGFLHLKMPQWLIRLVTRLLALLPVLIAAILYGSQEKILDQLIVYSQVFLSVALPFSIFPLVYFTSQKKIMGEFVNAKWNTYLAYGVATVLTILNLQLIINTIF

SEQ ID NO: 72032 - protein, 175 aa, Streptococcus mutans
MTNTITENIYASIIHQVEKKENSGNEKTKAVLNQAVADLSKATSIVHQVHWYMRGSGFLYLHPKMDELMDALNGHLDEISERLITIGGAPFSTLKEFDENSRLEETVGTWDKSITDHLKRLVQVYDYLSSLYQVGLDVTDEEGDAVSNDIFTAAQTEAQKTIWMLQAELGQAPGL

SEQ ID NO: 72033 - protein, 726 aa, Streptococcus mutans
MTFEKQKHFSLRKLKFGLVSVAIIAFLFAVTKTAEADETVITEQRQTSKINASSQKVENQTSNQVEAKTDSANKDPQEKTGSVATDAPSMNSANNMSQSDKQNTVNEISSDSQQTKTDEQTDLPQNSFKQQSAHVKMTTEAEKTPSHSINTFVNDGNGNWYYLGADGRNVTGSHTIGGKTMYFAQDGKQVKGAFAQDSDGNKHYYDRDSGEMWTNRFVNDQGNWYYLNNDGVPVTGSITVNGQSLYFNSDGSQVKGNFVEEDGSLRYYDKNSGDLLRKTSRTINGVNYQFDNDGNARAIDKIEVVKTSLVVDSYEFGPSVSKIILEFNHKVTPAVVHAGAMVTTAGVQRKILNSYVSNASGHVVYFDSSHYVTLELDIPYDPNDSSRNASPFIFDSAAFRNNWVNSYTVKVDNLQVQADGSNSSQIISSEQDAINNRFLPTTDRFSERGSYGNFNYAAYQPEAAIGGEKNPLIVWLHGIGEVGTDINIPLLASNVARLTEDPIQSHFTSTGSGGQKGAYVLVPQSSIPWSQNQTASLMALIKAYVASHPDIDSRRIYLAGVSNGGGMTLDMGVAYPNYFAALVPIAASYSNQLTDNQITAAALKALKGQPMWLIHTRTDKTISADSSVLPFYKELLQAGAQNKWLSYYETNVGKHHSGVTYNGHWSWIYFLNDQVTGTQNTDNAKNWSGLSGMVATNPTYGGDAKATVNGRTYSNVFDWLNGQRRR

SEQ ID NO: 72034 - protein, 323 aa, Streptococcus mutans
MAKKLLGIDLGGTSIKFGILTLDGQVQEKWAIETNILEDGKHIVPDIVSSIKHRLELYNLTKEDFVGIGMGSPGAVDRNLKTVTGAFNLNWAATQEVGTIIEAELGIPFAIDNDANVAALGERWVGAGNNNPDVVFVTLGTGVGGGIIADGNLIHGVAGAGGEIGHIIVEPDTGFECTCGNKGCLETVASATGVVRVARHLAEEYEGISSIKAGIDNGDDVSSKDIFVAAQAGDKFANSVVEKVTFYLGLATANISNILNPNTVVVGGGVSAAGEFLRSHIESYFKLYAFPQVKQSTKIKIAELGNDAGIIGAASLAHQFLES

SEQ ID NO: 72035 - protein, 500 aa, Streptococcus mutans
MEENMSHQHTEELNDQQIVRREKMEALTEQGIDPFGKRFERTATSGQLKEKYADKTKEELHDINETATIAGRLMTKRGKGKVGFAHLQDREGQIQIYVRKDTVGDDNYQIFKKADIGDFLGVEGEIMRTDMGELSIKATHITHLSKALRPLPEKFHGLTDVETIYRKRYLDLISNRESLERFITRSKIISEIRRYLDGLGFLEVETPVLHNEAGGAAAKPFTTHHNAQDMDMVLRIATELHLKRLIVGGMERVYEMGRIFRNEGMDATHNPEFTSIEVYQAYADFEDIMDLTEGIVQHAATAVKGDGPITYQGTEIKINEPFKRAHIVDLIKEVTGVDFWKEMTLAEAQALAQEKNVPLEKHYTSVGHIINAFFEEFVEETLIQPIFVYGHPVEVSPLAKKNADDPRFTDRFELFIMTKEYGNAFTELNDPIDQLERFKAQAAAKELGDDEATGIDYDYVEALEYGMPPTGGLGIGIDRLVMLLTDTTTIRDVLLFPTMK

SEQ ID NO: 72036 - protein, 129 aa, Streptococcus mutans
MSIISIISWVIIFAFVAWFVWNYFRVRRAAQYISNAEFESMMRGAQIVDLRSPNEFRRKHILGARNLPSEQFKASVSALRKDKPVLLYDNTRGQLVARAVLTLKKAGYKDLYVLKNGLDNWNGKVKEKN

SEQ ID NO: 72037 - protein, 614 aa, Streptococcus mutans
MTNFREDIRNVAIIAHVDHGKTTLVDELLKQSHTLDEHKKLEERAMDSNDLEKERGITILAKNTAVAYNGVRINIMDTPGHADFGGEVERIMKMVDGVVLVVDAYEGTMPQTRFVLKKALEQNLVPIVVVNKIDKPSARPAEVVDEVLELFIELGADDDQLEFPVVYASAINGTSSLSDEPADQEHTMAPVFDTIIEHIPAPIDNSDQPLQFQVSLLDYNDFVGRIGIGRVFRGSVKVGDQVTLSKLDGTTKNFRVTKLFGFFGLERREIKEAKAGDLIAVSGMEDIFVGETITPTDAVEPLPILHIDEPTLQMTFLANNSPFAGREGKFVTSRKVEERLLAELQTDVSLRVEATDSPDKWTVSGRGELHLSILIETMRREGYELQVSRPEVIIKEIDGIKCEPFERVQIDTPEEYQGAVIQSLSERKGEMLDMQATGNGQTRLIFLAPARGLIGYPTEFLSMTRGYGIMNHTFDKYMPVINAEIGGRHRGALVSIDTGKATTYSIMSIEERGTIFVNPGTEVYEGMIIGENARENDLTVNITKAKQMTNVRSATKDQTAVIKTPRILTLEESLEFLNDDEYMEVTPESIRLRKQILDKNARAKAAKKKKSAED

SEQ ID NO: 72038 - protein, 717 aa, Streptococcus mutans
MKKIAKFLLSAVNTRLGFILTLVFIYWLKTIWAYNVDFSLDLDKSYQFFLTLINPIPISLLLLGLALYIKNTRIFYFTAIVIYTLLNILLIANSIYFREFSDFLTVSAALASSKTSAGLGASALNLLRPWDAIYILDYVILITLFSLKKLSFDQRPFNKRASFAISALSGLLFSVNLFMAEIDRPELLTRGFSNIYVVRALGLPAFSAYSANQTYQTQKVRSEATASEFNTVKKYVKEHYAAPNPKYYGLAKGKNVIVLHLESFQQFLIDYKLNIDGKQYEVTPFLNSLYHSKETFAFSNFFHQVKAGKTSDAETLMETSLFGLNQGSFFVQYGGDNTQQAAPHILKDTNNYSSAVFHGNIGTFWNRNNAYKQLGYQHFFDQSYMSKMTKDNSFQYGLNDKVMFADSIKYLEHMQQPFYTKFITVSNHYPYQSLDGDDTGFPLAKTEDKTINGYFATANYLDAAIKDFFDYLKASGLYKNSIIVMYGDHYGIANSRNTDLAPLLGKDSQTWTEYNNAMLQRVPYMIHVPGTDKGFISNTYGGEVDALPTLLHLLGIDNKNYIELGQDLLSPNNKQLVAFRSEGNYITPNYTSYSGRVYDTKTGVEITNPDEATTAKLKELRDAADKQLNTSDNIQTGDLLRFDKDSGLKPIDIGSISYKKDSLKKLKKIEKKLDKNSTSLYSKNGNKSTQDLYKAPSYKELHPEESPKESSTTTSSK

SEQ ID NO: 72039 - protein, 451 aa, Streptococcus mutans
MKHVKNFENKKVLVLGLARSGEAAARLLAKLGAIVTVNDGKPFDENPSAQALLEEGIKVICGSHPLELLDEAFAYMVKNPGIPYTNPMVVRALEKNIPVITEVELAYLISEAPIIGITGSNGKTTTTTMIADVLNHAGQSARLSGNIGFPASEVAQPVTEKDILVMELSSFQLMGTESFHPHMAVITNLMPTHIDYHGSFENYIEAKWNIQKNMTKEDFLVLNFNQDLAKDLANQTQAKIIPFSTKEKVDGAYLDGQMLCFKGQAIMSASELGVPGSHNVENALATIAVAKLSGVSNEAIRETLIHFGGVKHRLQSLGNIAGVKFYNDSKSTNILATQKALSGFDNSKVILIAGGLDRGNEFDELVPDIKGLKKMIILGESAPRLKHAAVQAGVTYLNAKDVAQATRIAFQEASPGDVVLLSPANASWDMYKNFEVRGDEFITTFKSLKGE

SEQ ID NO: 72040 - protein, 428 aa, Streptococcus mutans
MISLPFSRDKILLFDYNIILFLADDRNVFLREKFSEFFVIMIDMIKLMVGSFAEKKLKRGVQLLSSRDYPNLNLDNQVVQLYSDADIFLGTAYLSKQNKGVGWLISPKKVSLNVTYFIKLFQWSKDKRKNFAHSKLTTAYRLFNQDGDSFGGVTIDCYGDFVLFSWYNSFVYQIRDEIVAAFRQVYPNFLGAYEKIRFKGIDNVSAHLYGQEAPEQFLILENGISYNVFLNDGLMTGIFLDQRQVRNELINGSAAGKTVLNLFSYTAAFSVAAAMGGAMATTSVDLAKRSRALSLAHFEANHLDMANHQLVVMDVFDYFKYARRHHLTYDIIIIDPPSFARNKKEVFSVSKDYHKLIRQGLEILSENGLIIASTNAANMTVSQFKKQIEKGFGKQKHTYLDLQQLPSDFAVNVQDESSNYLKVFTIKV

SEQ ID NO: 72041 - protein, 361 aa, Streptococcus mutans
MAKKKIIFTGGGTVGHVTLNLLLIPRFLKDGWEVHYIGDKHGIEHEQIEQSDFDVIFHSIATGKLRRYFSLKNVLDVFKVGWGVLQSLTIMVKVRPQVLFSKGGFVSVPPVVAANLLRIPVFVHESDLSMGLANRIAYKFATTMYTTFEQSDNLTKTKHVGAITKVNQTISSSDDNTEIKTIKEYFDPRLKTLLFIGGSAGAKVFNQFISDTPELTKHYNVINISGDKTLNNLSQNLYRVDYVTEMYQPLMDLADVVITRGGSNTIFELLAMAKLHIIVPLGKEASRGDQLENAAYFEEKGYAQQLSEENLNFAELDKVIKDLLENQTVYQDKMTSSSEIKTPNDFYNLLLTDITSKSKGK

SEQ ID NO: 72042 - protein, 227 aa, Streptococcus mutans
MYMKIVVPVMPQNIEEANQLDLTRIDSTDIIEWRADYLVKDDILTVAPAIFEKFSGHEVIFTLRTEKEGGNISLSNEDYLAIIRDIAALYQPDYIDFEYFSYRDVLEEMYDFSNLILSYHNFEETPENLMEVFSELTALAPRVVKIAVMPKNEQDVLDLMNYTRGFKTLNPNQEYVTMSMSKLGRISRLAADLIGSSWTFASLEQESAPGQISLADMRKIKEVLDAN

SEQ ID NO: 72043 - protein, 374 aa, Streptococcus mutans
MAKDKDTEKQEIPLTEWQQRNLEFLKKKQEEKREKEKLNEKKMAEKKAQFQTDKEADSKESDKQPSSLFDDKKQEEPKKKPATPKKIKKEKKVPKLPRKDYWQAAMVIIISSIVLIASLFMISPLSRQKEITVSGNKNAIESQLIEELGIKKSDYLTTLLFQANRFERNLKSKDKWVKEAKLVYHFPNHFTLRVKEYRIIAYRQTDKGYVPILENGTRVDTVNASELPGSFVTINLDQEKEVRELVQKLAKLDKSLVGSIKVISSVNSSSTKDLLLLEMKDNNSVRVPLSEIDTKLPYYSKIKKNLTDGSIVDMEVGIYSTTADIEASIAEHKTTATTESSENSSNAENTDSTQSSEANSQEGSQSVTQATVSQ

SEQ ID NO: 72044 - protein, 453 aa, Streptococcus mutans
MARDGFFTGLDIGTSSIKVLVAEFINGSMNVIGVSNVKSSGVKDGIIIDIDTAAEAIKSAIKEAEEKAGMSISKVNVGLPANLLQIEPTQGMIPVPSESKEIKDEDVDSVVRSALTKSITPEREVISLIPEEFIVDGFQGIRDPRGMMGIRLEMRGLIYTGPSTILHNLRKTVERAGIEVENIIISPLALTKSVLNEGEREFGATVIDMGGGQTTVASMRAQELQFTNTYAEGGDYVTKDISKVLKTSHQVAEALKFNFGEANVAEASSTETVQVEVVGERNPVEITERYLSEIISARVRHLLDRIKQDLERGRLLDLPGGIVIVGGAAIMPGVVEIAQEIFGFNVKLHVPNQVGIRNPMFANIISIVEYVGTLTEVDILAQGAVSGDEKLRRKPIDIKPSGVAPKTRSFAQPQESTTLESQLEQLPPQQKEANEPKQKVGDRLRGIFGSMFD

SEQ ID NO: 72045 - protein, 434 aa, Streptococcus mutans
MAFSFDAASVQGAVIKVIGVGGGGGNAINRMIDEGVAGVEFIAANTDIQALSSSKAETVIQLGPKLTRGLGAGGQPEIGRKAAEESEEALTEALTGADMVFITAGMGGGSGTGAAPVIARIAKGLGSLTVAVVTRPFGFEGSKRGNYAIEGINELRDEVDTLLIISNNNLLEIVDKKTPLLEALSEADNVLRQGVQGITDLITSPGLINLDFADVKTVMASKGNALMGIGIGTGEERVVEAARKAIYSPLLETTIDGAEDVIVNVTGGLDMTLTEAEEASEIVNQAAGHGVNIWLGTSIDDSMKDEIRVTVVATGVRPDKADQVSGIRRQASSYTQPRAQQQAPSSNSAQPNFERRQNFDFDLNESPEMPAAEPQQTQSSSEPQQSAFGDWNLRRENIARPTEGEIDSQLKMSSFSADSDDDDELETPPFFKNR

SEQ ID NO: 72046 - protein, 289 aa, Streptococcus mutans
MQIDGYTRLAAVVATPIKHSISPFIHNYAFEKTGINGVYVAWDIPESELQVTLKNIMRYDMFGINISMPYKQAVIPYLDEVTKAADLIGAVNTIVNRDGRLIGYNTDGFGFFKSLGTFADFDVADKVITILGGGGAATAIIAQAAINGAKKINIFNQTAFLEETKEKAKQISSKTGAAIEVFPVEDLNMIQKKVLVSDLFVNATNVGMDGKSMIINDSFEFPPNLMVADVIYQPFETPFLRLVRSRGLKAVNGLGMLLFQAAAAFELWTGKEMPSQEIWQALEKKYKSK

SEQ ID NO: 72047 - protein, 358 aa, Streptococcus mutans
MGYTVAIVGATGAVGTRMIQQLEQSTLPVDKVRLLSSSRSAGKVLQYKDQDVTVELTTKDSFEGVDIALFSAGGSVSAKFAPYAVKAGAVVVDNTSHFRQNPDVPLVVPEVNAYAMDAHNGIIACPNCSTIQMMVALEPIRQKWGLSRVIVSTYQAVSGAGQSAINETVREIKEVVNDGVDPKAVHADILPSGGDKKHYPIAFNALAQIDVFTDNDYTYEEMKMTNETKKIMEEPELPVSATCVRVPILFSHSEAVYIETKDVAPIEEVKAAIAAFPGAVLEDDIKHQIYPQAANAVGSRETFVGRIRKDLDIENGIHMWVVSDNLLKGAAWNSVQIAESLHERGLVRSTSELKFELK

SEQ ID NO: 72048 - protein, 388 aa, Streptococcus mutans
MRYFTAGESHGPRLTAIIEGVPAGLPLTADYINAELRRRQGGYGRGGRMKIESDQVEITSGVRHGLTMGSPITLNVTNRDFKNWTEIMSAADIEDKKKSIRKLTKPRPGHADLVGGMKYRFSDLRNSLERSSARETTMRVAVGSVAKRLLEELEITIASHVVVLGGIEVDVPENLTVAEIKERASQSEISVVNQEHEQEIKDYIDQIKKEGNTIGGIIETVVGGVPVGLGSYVQWDRKLDAQIAQGVVSINAFKGVEFGLGFKDGYLKGSYVMDEITWSKEDGYRRKSNNLGGFEGGMTNGQPIVVRGVMKPIPTLYKPLMSVDIETHEPYKASVERSDPTAVPAAAVVMEGVVATVLATEILNKFSSDNMEELKEAVKSHQKFIKEF

SEQ ID NO: 72049 - protein, 223 aa, Streptococcus mutans
MDLQANKEHVFQEVAAYAQKSGRSKDDVTVIAVTKYVDSDTAEKLVEAGVKHIAENRVDKFLDKYRALKSYDLTWHLIGSLQRRKVKDVINFVDYFHALDSVKLAAEIQKRADHQIKCFLQVNISEEASKHGFRLSEVDKALEEIQHFDKIKVIGLMTMAPIDASEQELTDIFQKANALRKNLKERKLKNMPFDDLSMGMSGDFPIAIRNGSTFVRIGSAFFK

SEQ ID NO: 72050 - protein, 191 aa, Streptococcus mutans
MALRDSFNKIISYFDTDEVSEVEEPAVASVKRQQDAAQPASQQQKAQSHQYHQSASRPSQQQVQSGQNRRSGEENIHSLPTRRQSHNQQPAQEKTTIALKLPRKYEDAEEIVDLLIRNECVLIDFQYMLEAQARRCLDFIDGASKVLAGNLQKVGASMYLLTPINVIVDAEEMTLAANGQDVSFNYDMKRR

SEQ ID NO: 72051 - protein, 283 aa, Streptococcus mutans
MSKIQWFPGHMSKARRQVQENLKFVDFVTILVDARLPLSSQNPMLTKIIGDKPKLIILNKVDLADSTCTAEWCNFFEKQGIKALAVNSKEQSAVKKVTEAAKGLMTDKLVKLRERGIQKENLRTMIVGIPNVGKSTLMNRLAGKKIAIVGNKPGVTKGQQWLKSNKNLEILDTPGILWPKFEEEAVGLKLAMTGAIKDNLLPMDEITIFGLDFFKRYYPERLLERYKGIDLEEEAPEIIMSMTQKLGFRDDYDRFYQVFIKDVRDGRLGCYTLDRLAELDGND

SEQ ID NO: 72052 - protein, 260 aa, Streptococcus mutans
MATIKEIKEQLAAISDLLDPHWTEFEADARSGVQAAVRQRKKIIQADLDEEVRLENMLRYEKDLYLQGYQAIAGIDEVGRGPLAGPVVAACVILPKNCKIRHLNDSKKIPKKKHEEIYKQVVKVALAIGIGRISSEMIDQVNIYEATKMAMLQAIDDLQGLVSRPDYLLIDAMNLGISIPQSSIIKGDAHSLSIAAASIVAKVTRDRMMIGYDEIYPGYGFAQNVGYGTKQHLEGLETLGVTPIHRRTFEPIKSMLKEKN

SEQ ID NO: 72053 - protein, 320 aa, Streptococcus mutans
MKKVLTVPVLGAAAVFLSLVSIFIGVKSLSLFELGSLDDSQLNILLSSRIPRTVSILIAGSSLAVCGLIMQQLTQNKFVSPTTAGTMDWAKLGVVVTIILFSKSSLLLQLIISSVFVIFGSLFFIYLLKVIKFKDDVFIPLVGLMLGKVVSAISTFLGVQFQILQSVNSWLEGHFSIMTSHRYEILFLVLPCMVLIYLYAHQFTIAGLGEDFSKNLGLNYQFIINLGLVLVSVMTAIIVTVVGSLPFLGLIVPNSISAIKGDNMKNNLILTSFLGAVIVLICDIFGRLIIFPYEVSIGLTMGIIGSIFFLYFLMKGRRRS

SEQ ID NO: 72054 - protein, 271 aa, Streptococcus mutans
MAITALEIKDKTFGTKMFGYNTQEVEEFLDIVVDDYEELVRTNREKDNRIKELEDKLGYFDEMKESLSQSVILAQETAEKVKLSANTESTNILNKATYESQQLVDAAKSKANQILRDATDEAKRIAVETEELKRQSRVFHQHLLSVVEGQLTLANSPEWTELLQPTAVYLQNSDAAFKEVVEQVLGEHVPDAADTEPIEVTRQFTPEEMEELHRRVSESNKELEETKAGQSTVDDQQPLIIEAADETKVNESADEQPNLNETQTFKLNINE

SEQ ID NO: 72055 - protein, 930 aa, Streptococcus mutans
MKLKETLNLGKTAFPMRAGLPNKEPQWQKQWDEANIYAKRQELNANKPAFFLHDGPPYANGNIHVGHALNKISKDIIIRSKSMSGFRAPYIPGWDTHGLPIEQVLAKKGVKRKEIDLADYLDMCRQYALSQVDKQRQDFKRLGVSGDWENPYITLVPKYEAAQIRVFGAMADKGYIYHGAKPVYWSWSSESALAEAEIEYHDIDSTSLYYANRVKDGKDILDTDTYIVVWTTTPFTITASRGLTVGPDIDYVVVKPANDERKFLVAQALLSELAERFAWDNPQVLATHKGIELDRIVTIHPWDDNVEELVMNGDHVTLDSGTGIVHTAPGFGEDDYNVGVKYGLDVVVTVNERGIMMENAGPDFEGQFYDKVLPTVKEKLGDLLLASEVITHSYPFDWRTKKPIIWRAVPQWFASVSKFRQDILDEIDKVHFYPAWGKTRLYNMIRDRGDWVISRQRAWGVPLPIFYAEDGTAIMTKEVTDHIANLFEEHGSVIWWQREAKDLLPEGFTHPGSPNGEFTKENDIMDVWFDSGSSWNGVLNTREDLGYPADLYLEGSDQYRGWFNSSLITSVAVNGHAPYKSVLSQGFVLDGKGEKMSKSKGNIISPNDVAKQYGAEILRLWVASVDTDSDVRVSMEILGQVSETYRKIRNTLRFLIANTTDFNPYINKIAFEDLRSVDKYMLIKFNQLVSVINRAYSHYDFMTIYKAVVNFVTVDLSAFYLDFAKDVVYIEAADDLARRQMQTVFYEILVNITKLLTPILPHTSEEIWSYLEHEEEAFVQLAEMPEAQEFANQDEILDTWSAFMSLRDQAQKALEEARNAKIIGKSLEAHLTVYASEEVKTLLTALDSNIAQLLIVSQLTVTQEQAPKNALVFEDVAFSVEHARGHVCDRCRRIDETVKERPYHVTICNHCAAIVENHFPEAVRQGFESK

SEQ ID NO: 72056 - protein, 462 aa, Streptococcus mutans
MSRNNKGKVSRHEQLRYEYLLRNIAYLSPREQAEFDYLKKKVEIQETPSYYYDEPGDNYYQDYEQSYDNNYEDDYQDADQWDDYYANSHYTDQGLPVYPEQQSTRSQRKSHQGKRKDSVSATKPKKRRRWTVKRTLKAVCLLLLVIFAGMIVMFIKGMNDISSGKNKNYKPAVVEKFNGKNTKDGTNILVLGSDQRITQGSSEARTDTIMVLNVGNKDKKIKMVSFMRDTLVNIKGVSADNYSYDNKLNSAFNIGEQDNNQGAELMRQTLKRNFDIDIKYYVMVDFQTFAEAIDTLFPNGVEINAKFATVGGEAVDSVEVPDDLNMKDGVVPNQTISVGKQKMDGRTLLNYARFRKDDEGDFGRTKRQQQVMSAIMSQIKDPTKLFTGSAALGKIYALTSTNISYGFLLSHGLSVLTNGKKVEQVTVPDNGDWIDDYDIYGGQALSIDFDKYKKKLAHLGVR

SEQ ID NO: 72057 - protein, 268 aa, Streptococcus mutans
MISVKNIIKHYQRKPVLNDLTVNIEKGKITAIIGSNGSGKSTFLSIMSRLIEGDSGQVLLDKKALKSFNNNDLAKRLAILRQTNYINLKIRVAELVAFGRFPHHQGRLTQNDQDKITQALAYMELEEIKDRFLDELSGGQLQRAFIAMILAQDTDYILLDEPLNNLDMKHSVQIMQILRRLVKDFNKTIILVIHDINFASCYADNIVALKEGKIIANGNVDEVVKEEVLSKIYDMPIKIETYQGRKICNYFDPQEQIHCETAHKLLSK

SEQ ID NO: 72058 - protein, 705 aa, Streptococcus mutans
MTSKTTTTVKKTSKKRATPKKNLVIVESPAKAKTIEKYLGRSYKVVASVGHIRDLKKSSMSIDFDNNYEPQYINIRGKGPLINSLKKEAKNAKQIFLASDPDREGEAISWHLAHILDLDLKGKNRVVFNEITKDAVKNAFVEPRQIDMDLVDAQQARRVLDRIVGYSISPILWKKVKKGLSAGRVQSVALKLIIDRENEIKAFKPEEYWSIDGFFKKGNKKFQANFYGLDNKKTKLKSNDDVKKVLTRIKNDDFLVDKVEKKERKRNAPLPYTTSSLQQDAANKINFRTRKTMMVAQQLYEGIRLGSNGQQGLITYMRTDSTRISPVAQNDAANYITEHFGAEYSKHGNHVRNASGAQDAHEAIRPSNVNHTPESIAKYLDKDQLKLYTLIWNRFVASQMTAAVFDTVKVNLTQNGVLFIANGSQIKFKGYMAVYNDSDKTKVLPEMIKGETVKKISANPEQHFTQPPARYSEASLIKTLEENGVGRPSTYAPTLETIQKRYYVRLVSKRFEPTELGEIVNSLIIEFFPDIVDVKFTAEMESKLDEVEIGKEEWQKVIDQFYKPFEKEVIKAEEQMEKIQIKDEPAGFDCDVCGHPMVIKLGRYGKFYACSNFPDCHNTKAITKEIGVICPICQKGQVIERKTKRNRIFYGCDRYPDCDFTSWNKPIGRDCPKSGDFLVEKKIRGGGKQVVCSNEECDYKEKAVK

SEQ ID NO: 72059 - protein, 444 aa, Streptococcus mutans
MSQSYINVVGAGLAGSEAAYQIAKRGIPVKLYEMRGVKRTPQHKTSNFAELVCSNSFRGDSLTNAVGLLKEEMRRLDSIIMRTGEAHRVPAGGAMAVDRSGYAQAVTAELENNPLIQVIRNEVTEIPDDAITVIATGPLTSDSLAKKIYKLNGGEGFYFYDAAAPIVDQSSIDMDKVYLKSRYDKGEAAYLNCPMTKEEFIRFYEALINAEEAPFNSFEREKYFEGCMPIEVMAKRGIKTLLYGPMKPVGLEYPQDYKGPRDGDYKAPYAVVQLRQDNAAGSLYNIVGFQTHLKWSEQKRVFSMIPGLEQAHFVRYGVMHRNSYIDSPNLLAPTFATCKNPNLFFAGQMTGVEGYVESAASGLVAGINAVRRFKDEEAVIFPQTTAIGALPYYITHTKSKHFQPMNINFGIIKDLGGPRIRDKKKRYEKIAERSLKDLQQFLTV

SEQ ID NO: 72060 - protein, 120 aa, Streptococcus mutans
MSIYSKSYVTTPQHSAMNWGSGSLNVLSTPSMIAFIENAAFLYCEEDLDVSKTTVGAQITVQHLAATKIGQTVEVKILAVEKDGHHTHFQIEVYEGDKLIGKGEHTRVTINIKRFLDKLE

SEQ ID NO: 72061 - protein, 436 aa, Streptococcus mutans
MSMFLDTAKVSVKAGRGGDGMVAFRREKYVANGGPWGGDGGRGGDVIFVVNEGLRTLMDFRYNRHFKAKAGEKGMTKGMHGRGAENLYVSVPQGTTVRDAQTGKVIADLVKNGQEFIVAHGGRGGRGNIRFATPRNPAPEISENGEPGEERELALELKILADVGLVGFPSVGKSTLLSVITAAKPKIGAYHFTTIVPNLGMVRTKSGDSFAVADLPGLIEGASQGVGLGTQFLRHIERTRVILHVIDMSASEGRDPYEDYLAINKELETYNLRLLERPQIIVANKMDMPQAAENLEQFKEKLDANYGEFDDKPQIFPISGIAHQGLDALLDATAQLLAQTDDFLLYDESDMQEEAYYGFEEEEKAFDISRADDAAWVLSGEKLEKLFVMTNMERDEAIMKFSRQLRGMGVDQALRERGAKDGDIVRIGKFEFEFVD

SEQ ID NO: 72062 - protein, 667 aa, Streptococcus mutans
MFYLKLALNNIKQSFKHFTPFFLVSVTTFIFSTITVLLMTSPSAKSMGAGVYALGLATIVLDILAAILCLYSYNFLLKQRNKEFGLYNILGMNKKHIIWVSTLELIVAYLVTIILGTFLSAVLSNFFYLIFVNIIQYEDLNFQLTLPAFVINLILFAVIFLFLELVNIIKISKTSALNLFSNQSQGEREPRGNIVLAFIAILAIGYGYYLSVTSGNVNAIFGITRFFQAILAVILGTYLFYISFTTWYLKRRRKNKSYFYQPEHFVTTSQMIFRMKQNAVGLANITLLAIMAFVTIFSTVALYTSSENMVKMAYPKNAQIEMKHISNRQQAEEIFQKQVLAPLKRAGYNSKAKFSAYLDISYPVLFTQKQNLVLDKSIATNRTFYKNNHAGTMEIITQDDFRSIGNKVPQLSAGEVAFYSYSQNTTVKPFKTLTWFGQTYKNVYHIKSIKNMVISNSATPAGILVVPDDATMEAMRKPYDDASKYDYTYTFLAFANLTNKEKQVLNRMSQAKHGLLYGDDDIAVLYSTAANYRTEGLRMTGGFLFTGFLLGIAFLLGAALIIYYKQLSEGTQDKRSYKILQEVGMSLKQIKKTINSQIILVFFLPLLMAIVHFVFALPILKKLLFLFGVQGDKFLYTVSALTVVGILIIYFIIYKLTSRTYYKIIER

SEQ ID NO: 72063 - protein, 246 aa, Streptococcus mutans
MTDLKIDVQDLHKSFGKNEVLKGIDVQFNEGDVVCIIGPSGSGKSTFLRTLNLLETVTSGKVIVDGYKLSDPSTNVDKARENIGMVFQHFNLFPHMTVLDNVTFAPIELGRESKEEAQKHGMELLEKVGLSDKAQAYPNSLSGGQKQRVAIARSLAMNPDIMLFDEPTSALDPEMVGDVLNVMKDLAEQGMTMLIVTHEMGFARKVANRVIFTDGGQFLEDGSPEEIFDNPQHPRLKDFLDKVLNV

SEQ ID NO: 72064 - protein, 229 aa, Streptococcus mutans
MNASVITAVKNNLDLSQNVPLKVAFYEALRKTIILSEIPAGCRINEKELASALNISRTPIRYALGVLEEEKLVEHIPKRGIIVRGISLKDAIEIFDIRKALDTLAATKAMYLMTDKDFADMKKILTDCEDFIEDGDIETILDNFNQFNDLIYRKSQMLRLREIVTELQTYLRYFREISIASVERRKRALKEHWIIYRGMRNKDVEQITLITHEHLNASLDFILQQMESK

SEQ ID NO: 72065 - protein, 154 aa, Streptococcus mutans
MSRTSQVILTNMCLIEDGNGNIVMQIRDPKRYSWSGAALPGGHIEEHEGLVESVIREVKEETGLTIHHPQLVGMKHWYTKEDVRYLVFLYRTSDFEGDLQSSAEGQVRWVARKELAELDLAYDMLNLLRVFEEKNLSELFYRERLADDFVKEFW

SEQ ID NO: 72066 - protein, 467 aa, Streptococcus mutans
MLLTILAYAMIIVFMYVVMKKKMSPFTALIIVPLVAVIIVILTNSANFTADKSFVEFLGGDKISHNLTAIGPMVLYGINNTAQTGIMLLFAILYFSLMLDAGLFDPITEKMIRFAKGDPMKVLIATAIVSAAVSLNGDGTTTTLICCSAFLPIYKKLNMKIMNLGVLIILQNTIMNLLPWGGPTARAMSVLNVGSEILGYLAPGMILSLLYVIFFVARSMGKKERKRLGVTELSDKEITELITVNDPDTLKIRRPQNFWFNGILTLILIAWLVAGSFISAIEMPSLLLFALGTCIALMVNYPNLKEQSKRISENAGDAVQVVILVFAAGIFMGLFQGSGMAGALAQSFTTIIPKQLAGFWGLVIAFISAPGTFFLSNDGFYYGIMPVLAEAGAKYGFDNVAMALASLMGQAFHLLSPLVAFIYLLLRLTGLDMGEWQRESAKYALVVFIIFVVTILIVGRLPFYIPQ

SEQ ID NO: 72067 - protein, 300 aa, Streptococcus mutans
MERLRRTMMFVPGANAAMLRDAPLYGADSIMFDLEDSVSLKEKDASRTLVHFALKTFDYSKVETVVRINSLDSCGALDIEAVIIAGVDVIRLPKTETAKDIREVEDVIERVERNNDIEIGRTKMMAAIESAQGVLNALAIAKASDRLIGIALGAEDYVTNMRTRRYPDGQELFFARNMILHAARAAGIAAVDTVYSDVNNPEGFQNEVRLIKQLGFDGKSVINPRQIPLVNAIYAPNEKEIQKAKEVVWAIHEAESKGSGVVSLQGKMVDKPIVERAQRVIALAKAAGLLTGEDISNGRK

SEQ ID NO: 72068 - protein, 511 aa, Streptococcus mutans
MAENKLGRDIPRKYANQYGVFEGELAHIKSYKESSRQVKPVKPSDDKLLSSIHEAIEKTRLKDGMTISFHHHFREGDYVMNMVLDEIAKMGIKDISIAPSSIANVHEPLIDHIKNGVVTNITSSGLRDKVGAAISEGIMENPVIIRSHGGRARAIATDDIHIDVAFLGAPSSDAYGNANGTRGKTTCGSLGYAMIDAKYADQVVIVTDTLVPYPNTPISIPQTDVDYIVVVDAIGDPEGIAKGATRYTKNPKELLIAEYAAKVITSSPYYKEGFSFQTGTGGASLAVTRFMREQMIKDDIKANFALGGITNAMVELLEEGLVDKILDVQDFDHPSAVSLDRNAEKHYEIDANMYASPLSKGSVINQLDICVLSALEVDTNFNVNVMTGSDGVIRGASGGHCDTAFAAKMSLVISPLVRGRIPTFVDKVNTVITPGTSVDVVVTEVGIAINPNRPDLIEYFKDLKVPQLTIEELKEKAYAIVGNPQPIQYGDKIVALIEYRDGSLIDVVRNV

SEQ ID NO: 72069 - protein, 447 aa, Streptococcus mutans
MTDELITYFKIGLAPNEYDYLYQAMLKKYDEDTIINSGLFNLSDSNSIYDAFRNRIMFPLTDEFGHIIGFSGRIWTEEDTSKKLAKYKNTRSTIIFNKSYELYHLDKARTAAKKEHELYLMEGFMDVIAAYRAGIPNAVASMGTALTPEHVKHLRKFTKKVILTYDGDKAGQNAIAKSLNLLSNMAVEIVRIPGQMDPDEFIKENSEEELEKLLKQARISSAEFWIEHLKPENIDNLQAEIDYVEKIAKVIAASPSITAQNTYINKVAEFLPDFDYLQVEQAVNNERLQMRSQISEQESANQQVLIDLPVTKQLTALTKAESQLFHRLLHHDYLLNEFRNRAHFKFTTPELQELYQILKTNGEINAYDLSQLSNQLQETYYRVLEENLPEEIAEDEIRQIEDQIDKCLQRQEMRKQSKAIRESSNHGDVDTAVEGLAALIAQKRNME

SEQ ID NO: 72070 - protein, 371 aa, Streptococcus mutans
MVNNKKKTSSTFNVQVADFIRNHKKEGVAVDDEVTEKLVIPFELEAEQIDDLLERLTDGGISITDREGNPSTKYAVEEIKPEELTDEELLGSNSAKVNDPVRMYLKEIGVVPLLTNEEEKELAIAVENGDLEAKQRLAEANLRLVVSIAKRYVGRGMQFLDLIQEGNMGLMKAVDKFDYSKGFKFSTYATWWIRQAITRAIADQARTIRIPVHMVETINKLVREQRNLLQELGQDPTPEQIAERMDMTPDKVREILKIAQEPVSLETPIGEEDDSHLGDFIEDEVIENPVDYTTRVVLREQLDEVLDTLTDREENVLRLRFGLDDGKMRTLEDVGKVFDVTRERIRQIEAKALRKLRHPSRSKQLRDFVED

SEQ ID NO: 72071 - protein, 455 aa, Streptococcus mutans
MITNEFDTITAIATPLGEGAIGIVRISGSKALAIIKKIFKGKNLDDVPSHTINYGHIVENGAIIDEVMVSVMRAPKTFTREDVIEINTHGGVAVTNEILQLVLRSGARMADPGEFTKRAFLNGRVDLAQAEAVMDLIRAKTDKAMAVAVQQLDGSLSNLINNTRQEILNTLAQVEVNIDYPEYDDVEEMTTALMREKTQEFETLLTNLLKTARRGKILREGLSTAIIGRPNVGKSSLLNNLLREEKAIVTDIEGTTRDVIEEYVNIKGVPLKLIDTAGIRETDDLVEKIGVERSKKALEEADLVLLVLNSAEKLTDQDRTLLEISQNSNRLILLNKTDLPEQIETDQLPEDCIKISVIKNQNIDVIEERINKLFFDNAAIVEKDATYLSNARHISLIEKALKSLQAVNDGLELGMPVDLLQVDMTRTWEILGEITGDAAPDELITQLFSQFCLGK

SEQ ID NO: 72072 - protein, 463 aa, Streptococcus mutans
MTKIHIMETVLRDGQQSQIATRMTTKEMLPVLKTLDEAGYRALEMWGGATFDSCLRFLNEDPWERLRTIRKHVKKTKLQMLLRGQNLLGYRNYADDVVCSFIQKSVENGIDIVRIFDALNDPRNLQTAVSATKEAGGHAQVAISYTTSPVHTVDYFVHLSKEYAEIGADSICIKDMAGVLTPQTGYDLVKRIKEAVDLPLEVHTHATSGISEMTYLKVAEAGADIIDTAVSSFAGGTSQPATESIVIALEELGFETGVDLQKVETAAAHFNTIRDHYRAEGLLNPKVKDVEPKTLIYQVPGGMLSNLLSQLTEQGLANRYEEVLAEVPRVRADLGYPPLVTPLSQMVGTQSLLNIISGERYKVVPNEIKDYVRGLYGRPPAAIADDIKEKIIGDEEVITVRPADLIEPQLPKLRQEIAEYARSEEDVLSYASFPQQAKDFLGRREDPFYDVPVQNVSVTIDFD

SEQ ID NO: 72073 - protein, 311 aa, Streptococcus mutans
MKVNILMSTYNGQEFIAQQIQSIQKQTFENWNLLIRDDGSSDETPKIIADFAKSDARIRFINADKRENFGVIKNFYTLLKYEKADYYFFSDQDDVWQPQKLELTLASVEKENNQIPLMVYTDLTVVDRDLQVLHDSMIKTQSHHANTSLLEELTENTVTGGTMMVNHCLAKQWKQCYDDLIMHDWYLALLAASLGKLIYLDETTELYRQHESNVLGARTWSKRLKNWLRPHRLVKKYWWLVTSSQQQASHLLELDLSAANKAIIQAYVTLLDQSFLNRIKWLKQYGFAKNRAFHTFVFKTLIITKFGYRRK

SEQ ID NO: 72074 - protein, 470 aa, Streptococcus mutans
MFVDFQKEVDKRRGDILADLFRILQINSERDDSKADKKHPFGPGPVQALEHFLKMAERDGYETKNVNNYAGHFEYGQGDEVLGIFAHLDVVPAGSGWKTSPYLPEIINGKLYARGASDDKGPTIACYYGLKIIKELGLPVSKKVRFVVGTDEESGWADMDYYFEHVDMPEPDFGFSPDAYFPIINGEKGNITEYLHFGNSNGGSFILKSFKGGLRENMVPESATAVFSATICLAELQESLTAFTEQHALTADLKEEAGNFVLTLHGKSAHGSTPEAGINGATYLARFLSQFDFAGDAKAYLDLAANVLLDDHAGEKLGVAYKDEKMGSVSMNPGVFSFDSQSEDNSIALNFRYPQGTDAQTIKASLEQLSVSGVREVTLSEHEQKPHYVPMDDPLVATLLAVYEKHTGDKGHEWVIGGGTFGRLLKRGVAFGAMFPHSTDTMHQANEFVEVNDLYKAAAIYAEAIYELIK

SEQ ID NO: 72075 - protein, 344 aa, Streptococcus mutans
MNYKNPYEQLSGKLNNRKLINAGFSEKTYDTRSVKLNYVVGPNNGPSLLLIPAQMGIWESYKKVLLPLSKHFQVYAIDVRGHGKSSWTPGHYSWKIVGEDIKTFIENVIKQKVIISGNSSGGIVALWCSANIPEYVSGIIIEDAPIFSAEMPRFKERDKFVYNGLKHLVNQIGNIPDRDLANYFKDMEVPATDKRIKRIPDWFVSWLSQKIKKFQNKHPDSPVEIGFPNSLRLLIKSLSMFDPDFARAFVDGRFYDGIDHAEAFKKAKCPILLIQANWKRYENYGLVGAFDDDDAQHAISLAPQIIYKKVSANHVIHAFKPKEYIKLLLEFKKIVPDSSICDGK

SEQ ID NO: 72076 - protein, 405 aa, Streptococcus mutans
MTKNNIAVKVDHVSKYFKLPVESTQSLRTALVNRFKGIKGYKKQHVLRDIDFEVEKGDFFGIVGRNGSGKSTLLKIISQIYVPEQGKVTVDGKLVSFIELGVGFNPELTGRENVYMNGAMLGFTTEEVDTMYQDIVDFAELQDFMNQKLKNYSSGMQVRLAFSVAIKAQGDVLILDEVLAVGDEAFQRKCNDYFLERKNSGKTTILVTHDMAAVKKYCNKAVLIDDGLIKAIGEPFDVANQYSLDNTDQIVEDKQEEEAAVQEEEQIVVDNLEVKLLSANRMTPRDSIRFEISYNVLADVGTYIALSLTDVDRNIWIYNDNSLDYLSSGSGKKRVFYECHLKSLNDIKLKLEVTVRDKQGQMLAFSSATNTPIISINRDDLEGDDKSAMDSASGLIQRNGQWQFS

SEQ ID NO: 72077 - protein, 465 aa, Streptococcus mutans
MVKVSIICTNYNKGSWIGEAIDSFLKQETSFPYEIIIVDDASTDHSVHIIKTYQKQYPDLIRAFFNQENQGITKTWSDICKKARGQYIARCDGDDYWIDPFKLQKQIDLLETSPESKWSNTDFDMVDSKGNIIHKDVLKNNIIPFMDSYEKMLALKGMTMASTWLVETKLMLEINDRINKDAVDDTFNIQLELFKKTKLAFLRDSTTVYRMDAESDSRSKDSEKLAQRFDRLLETQLEYIEKYPDSDYKKVLEYLLPKHNDFEKVLAQDGKNVWDNQQITIYLAKGDDQEFSEENCFQFPLQHSGNIQLTFPENIRKIRIDLSEIPSYYRQVSLVNTTVNTELLPTWTNAKVFGYSYYFIAPDPQMIYDLTAQEGQDFKLTYEWFNVDRPSQPDFLANHLVKELDQKKVELKMLSPYKYQYQKAVAERDLYLEQLNEMVVRYNSVTHSRRWTIPTKIINLFRRKK

SEQ ID NO: 72078 - protein, 846 aa, Streptococcus mutans
MKQLKKIWDMLGKQKLLIFIFIFALNVTLRNYDLLIGRRANSSLSFKVISKNFDIMIEHWEALPSHFKIIGGVCLVIYVLSILGLSFYLSKNLKKTFFIELLLGYGLYIVISYFLAVTRELNNESFKIWDLAKNHFFQPYFLPTLVLIIVCTLALNYLIRVKMKRSHLSRKMTLLLENFSETEFLLTGLIVSFILSDTLYVKLLQESLRAYYHKPLAYESLLFLYTLLTLILFSVIVEACFNAYRSIKLNRPNLSLAFVSSLLFATIFNYAFQYGLKNDADLLGKYIVPGATAYQILVLTAAGFFLYLIINRYLLVTFLIVILGSIITVVNVLKVGMRNEPLLVTDFAWVTNIRLLARSVNANIIFSTLLILAALILLYLFLRKRLLQGKITENHRLKVGLISSICLLGFSIFIIFRNEKGSKIVNGIPVISQVNNWVDIGYQGFYSNASYKSLMYVWTKQVTKSIMDKPSDYSKERILKLAKKYNNVANKINKVRTENISNQTVIYILSESFSDPDRVKGVNLSRDVIPNIKQIKEKTTSGLMHSDGYGGGTANMEFQSLTGLPYYNFNSSVSTLYTEVVPDMSVFPSISNQFKSKNRVVIHPSSASNYSRKYVYDKLKFPTFVASSGTSDKITHSEKVGLNVSDKTTYQNILDKINPSQSQFFSVMTMQNHVPWASDEPSDVVATGKGYTKDENGSLSSYARLLTYTDKETKDFLAQLSQLKHKVTVVFYGDHLPGLYPESAFKKDPDSQYQTDYFIWSNYNTKTLNHSYVNSSDFTAELLEHTNSKVSPYYALLTEVLDNTTVGHGKLTKEQKEIANDLKLIQYDITVGKGYIRNYKGFFDIR

SEQ ID NO: 72079 - protein, 432 aa, Streptococcus mutans
MSIITDVYAREVLDSRGNPTLEVEVYTESGAFGRGMVPSGASTGEHEAVELRDGDKSRYGGLGTQKAVDNVNNIIAEALIGYDVRDQQAIDKAMIALDGTPNKGKLGANAILGVSIAVARAAADFLEIPLYSYLGGFNTKVLPTPMMNIINGGSHSDAPIAFQEFMIVPAGAPTFKEALRWGAEIFHALKKILKERGLETAVGDEGGFAPKFDGTEDAVETIIKAIETAGYKPGEEVFLGFDCASSEFYDNGVYDYTKFEGEKGAKRSAAEQIDYIEELVNKYPIITIEDAMDENDWDGWKALTARLGDRVQLVGDDFFVTNTDYLARGIKEGAANSILIKVNQIGTLTETFEAIEMAKEAGYTAVVSHRSGETEDSTIADISVATNAGQIKTGSLSRTDRIAKYNQLLRIEDQLGEVAEYRGLKSFYNLKK

SEQ ID NO: 72080 - protein, 356 aa, Streptococcus mutans
MRRELLLEKIDELKELMPWYVLEYYQSKLTVPYSFTTLYEYLKEYRRFFEWLIDSGVSNANKLADIPLETLEHLSKKDMESFILYLRERTLLNTKNKRQGVSQTTINRTLSALSSLYKYLTEEVENADGEPYFYRNVMKKVSTKKKKETLAARAENIKQKLFLGNETMEFLEYVDCEYEHKLSKRALSSFRKNKERDLAIIALLLASGVRLSEAVNLDLKDVNLNMMIIEVTRKGGKHDSVNVAGFAKPYLENYITIRRGRYKAKKTDLAFFLSEYRGVPNRMDASSIEKMVAKYSQDFKIRVTPHKLRHTLATRLYDATKSQVLVSHQLGHASTQVTDLYTHIVNDEQKNALDKL

SEQ ID NO: 72081 - protein, 450 aa, Streptococcus mutans
MTKQYDYIVIGGGSGGIASANRAAMHGAKVILFEGKQVGGTCVNVGCVPKKVMWYGAQVAETINNYAADYGFDVTTQAFHFDVLKQNRQAYIDRIHDSYERGFDSNGVERVYGYATFVDAHTVEVAGEHYTAPHILIATGGHALLPDIPGSEYGITSDGFFELDAIPKRTAVVGAGYIAVEISGILHALGSETHLFVRRDRPLRKFDKEIVGTLVDEMKKDGPHLHTFSVPKEVIKNTDNSLTLILENGEEYTVDTLIWAIGRAANTKGFNLEVTGVTLDSRGFIATDAFENTNVEGLYALGDVNGKLELTPVAVKAGRQLSERLFNHKPQAKMDYKDVATVIFSHPVIGSIGLSEEAALDQYGEENVTVYRSTFTSMYTAVTSHRQACKMKLVTVGEDEKIVGLHGIGYGVDEMIQGFAVAIKMGATKADFDNTVAIHPTGSEEFVTMR

SEQ ID NO: 72082 - protein, 331 aa, Streptococcus mutans
MGIRSLFGSLREKIVSKNVRIVFPEGNDERVVRAAARLKFEGLIEPIILGDATEVRNLLTKLGFADQDYTIINPEDYTDFEHMKQEFVEIRKGKATIEDAEQLLKDVNYFGVMLVKLGLADGMVSGAIHSTADTVRPALQIIKTKPEISRTSGVFLMNRETTDQRLIFADCAINIEPDEQELAEIAINTADTAKIFDIDPKIAMLSFSTKGSAKASQVEKVQEATRIAKELRPEITLDGELQFDAAFVPTTAKIKAPESDVAGQANVFIFPDLQSGNIGYKIAQRLGMFDAIGPILQGLNMPVNDLSRGSSAEDIYKLAIITAAQTLDNTK

SEQ ID NO: 72083 - protein, 296 aa, Streptococcus mutans
MRFEFIADRKVKVKTFLKSHDISKTLLAKIKFKGGQILVNDQEENAIYLLDIGDRVTIIIPDEEALETLQPIKHDLNIVYEDEHFLILDKPAGYASIPSILHTNTIANFVKYYYLKKDYPNKQIHIVTRLDKDTSGLMLLAKHGYAHARLDKQLQKKTIKKRYYALVSGQGQLPDQGEIIAPIARPEDSIITRCVHPSGKYAHTSYKVLARYGDIALVDIQLHTGRTHQIRVHFAHIGFPLLGDDLYGGEMGYGLKRQALHCHFLSFVDPFSKEHKQYNSSLTEDLDSVIIDLQKH

SEQ ID NO: 72084 - protein, 176 aa, Streptococcus mutans
MTLTQQKVKFFSKAYHDVKRLYLSAFPPRERFPYFCLLLNSLRSLVTCYAYYDKERFVGFAYIIESKEQVFILFLAVNGSVRSKGYGSMILAQIREYAGRKPLILTIEPVEKDSPNSEQRRQRLSFYERNGYQLTSHYYYEGQERYQILTTEQSIDLERFQKLVKRAVLGLVLITV

SEQ ID NO: 72085 - protein, 104 aa, Streptococcus mutans
MSTYAIIKTGGKQVKVEVDQAIYVEKLDVEAGAEVTFDQVVLVGGDKTVVGTPIVQGATVVGTVEKQGKQKKVVTYKYKPKKGSHRKQGHRQPYTKVVIKAINA

SEQ ID NO: 72086 - protein, 277 aa, Streptococcus mutans
MTQMNFTDKIKVAIIANGKYQSKRLTAKLFAILRNDDRFYLTKKNPDIVITIGGDGMLLSAFHMYEKCLDHVRFVGIHTGHLGFYTDYRDFEVDKLLENLHSDKGEKASYPILKVTATLADGRQLTSRALNEATIRRIEKTMVADVVINKVHFERFRGDGISVSTPTGSTAYNKSLGGAVLHPTIEALQLTEISSLNNRVFRTLGSSIIVPKKDKIEIVPKRLGSYVLSIDNKTYTHRNVAKIEYEIDRKKISFVSTPSHTSFWERVKDAFIGDFDS

SEQ ID NO: 72087 - protein, 221 aa, Streptococcus mutans
MNWEEFLDPYIQAVGELKIKFRGIRKQFRKQKRHSPIEFVTGRVKPIESIKEKMVLRGIKKENLTQDMQDIAGLRIMVQFVDDVNDVLELLRQRKDMKVIQERDYINNLKPSGYRSYHVIVEYPVDTISGQRIIMAEIQIRTLAMNFWATIEHSLNYKYHGEFPEDIKRRLELTSKIAFQLDEEMRQIRDDIKEAQLLFDAETRKLNDGVGNSDDTDELYR

SEQ ID NO: 72088 - protein, 326 aa, Streptococcus mutans
MLKLGIIGTGSISHQFIEAAQLSQHYQLTAVYSRKLETAEAFSARYQNIACYDMLDDFFNDAFDVLYIASPNALHFEHAKLALEAGKHIIVEKPAFSTPEELSNIIHSAEKKQLFFFEAARNYHEESLLLIKEFLSHKTVIGADFSYAKYSSKMKDLLAGKLPNVFSDKFSGGALVDLGIYPIYAAIKLFGKPKSVNYTATQLENTIDLNGNGNLIYPDFHVSIRAGKNYNTLEYAEIYTSEGTLRLNHIQGISSAIFQKHDGSREKLALPDIEHLMLEEAKHFAEMMNNKNEVIYQTWLEDAKTASQILYQMRQSAGIVFEADKK

SEQ ID NO: 72089 - protein, 215 aa, Streptococcus mutans
MTKQLTIALTKGRIEKDTVKLLERAGFDMSFMADKGRNLIFESPDKSFRFLLVKAPDVTTYVRHGVADIGVVGKDVLIEHPTGYLEMLDLNFGLCKFSVASTPDYNPSDHKRKRIATKYPTVARDFFNQKGEDVEIISIQGSVEIAPVIGLADAIVDIVETGNTLVANGLEVFEDICRISARMIVNKASLKNKPELLAFIKKMENLVGDREVAFK

SEQ ID NO: 72090 - protein, 583 aa, Streptococcus mutans
MKSKTAKITLLSSLALAAFGATNVFADEASTQLNSDTVAAPTADTQASEPAATEKEQSPVVAVVESHTQGNTTTTTSQVTSKELEDAKANANQEGLEVTETEAQKQPSVEAADADNKAQAQTINTAVADYQKAKAEFPQKQEQYNKDFEKYQSDVKEYEAQKAAYEQYKKEVAQGLASGRVEKAQGLVFINEPEAKLSIEGVNQYLTKEARQKHATEDILQQYNTDNYTASDFTQANPYDPKEDTWFKMKVGDQISVTYDNIVNSKYNDKKISKVKINYTLNSSTNNEGSALVNLFHDPTKTIFIGAQTSNAGRNDKISVTMQIIFYDENGNEIDLSGNNAIMSLSSLNHWTTKYGDHVEKVNLGDNEFVKIPGSSVDLHGNEIYSAKDNQYKANGATFNGDGADGWDAVNADGTPRAATAYYGAGAMTYKGEPFTFTVGGNDQNLPTTIWFATNSAVAVPKDPGAKPTPPEKPELKKPTVTWHKNLVVETKTEEVPPVTPPTTPDEPTPEKPKTPEDPQSPVVAKSVSFRTARKGEMRVRERDYQPTLPHAGAAKQNGLATLGAISTAFAAATLIAARKKEN

SEQ ID NO: 72091 - protein, 226 aa, Streptococcus mutans
MYSIHSAKEALLPRERLMTYGPESLSNQELLAILLRTGTKKEHVLNLSIKILNGLDSLADFRSLSLEELQEIEGIGQVRSVEIKAMLELSKRINQAEYNFKERILSSERLAKIMMSELGDKRQEHLIAIYLDTQNRVIKKQVIFIGSVRRSVAEPREILHYACKSMATSLIIVHNHPSGSTYPSENDLRFTEKIKRSCDDLGIVFLDHIIVGKKEYYSFREETDLV

SEQ ID NO: 72092 - protein, 650 aa, Streptococcus mutans
MTEENKNLDQLAQEYDASQIQVLEGLEAVRMRPGMYIGSTSKEGLHHLVWEIVDNSIDEALAGFASHIQVFIEEDNSITVIDDGRGIPVDIQQKTGRPAVETVFTVLHAGGKFGGGGYKVSGGLHGVGSSVVNALSTQLDVRVHKNGKIHYQEYHRGVVAEDLKVIGDTDITGTIVHFTPDPEIFTETTEFDFDKLAKRIQELAFLNKGLKISITDKRSGQERKEEFHYEGGIVSYVEFINENKEVIFDKPIYTDGSLDGISVEVAMQYTTGFHENIMSFANNIHTHEGGTHEQGFRTALTRVINDYAKKNKILKENEDNLNGDDVREGLTAIISVKHPNPQFEGQTKTKLGNSEVVKITNRLFSDALNRFLLENPQIAKKIVEKGILASKARIAAKRAREVTRKKSGLEISNLPGKLADCSSNDPIQNELFIVEGDSAGGSAKSGRNREFQAILPIRGKILNVEKATMDKILANEEIRSLFTAMGTGFGAEFDVSKSRYQKLVIMTDADVDGAHIRTLLLTLIYRFMRPVLEAGYVYIAQPPIYGIKVGSDIKEYIQPGNDQEEKLQEALEKYSQGRSKPTVQRYKGLGEMDDHQLWETTMNPDNRLMARVSLDDAAEADKIFDMLMGDRVEPRRGFIEENAVYSTLDV

SEQ ID NO: 72093 - protein, 516 aa, Streptococcus mutans
MAFESLTERLQGVFKNLRGKRKLSEKDVQEVTKEIRLALLEADVALPVVKEFIKRVRKRAVGHEVIDTLDPSQQIIKIVNEELTAVLGSETAEIEKSSKIPTIIMMVGLQGAGKTTFAGKLANKLVKEENARPLMIAADIYRPAAIDQLKTLGQQINVPVFDMGTEHSAVEIVSQGLAQAKENRNDYVLIDTAGRLQIDEKLMTELRDIKALANPNEILLVVDSMIGQEAANVAREFNQQLEVTGVILTKIDGDTRGGAALSVRQITGKPIKFTGTGEKITDIETFHPDRMSSRILGMGDLLTLIEKASQDYDEQKSAELAEKMRENSFDFNDFIEQLDQVQNMGSMEDILKMIPGMANNPALANVKVDEGEIARKRAIVSSMTPEERENPDLLTPSRRRRIASGSGNTFVNVNKFIKDFNQAKKMMQGVMSGDMNKVMKQMGINPNNMPKNMDSSALEGMMGQGGMPDMSELSGTNMDVSQMFGGGLKGKVGEFAMKQSMKKMAKRMKKAKKRKK

SEQ ID NO: 72094 - protein, 392 aa, Streptococcus mutans
MKENQFKINEISLAILLFWCGLIVVASNYITIPLMSAFTQQFHVSAEQTAWLGTSFSFAYALSCLLVGVLSDRFGRKRIMVGGLILLSVITLIIPFGNQLSWLIMGRIMQGIAASSFAPVAVVYISEKFSKEIKGTVVGLVSASFLISAIVGQIMSAYISRLLNWQAVFCTFGIIYLLTALILYSYASPVSNQSKGILFSQLFRHYWEILRKKNLIKLYLIALTLLFAFVAFYTVLEGYSVHTFHLSKDNIFKIRALGVIGMLFAPFADKLARKFDIKCLLILSLLFSFVSLFIIAFCPYLNVLIIMSLLFVAGISIIVPTLIILVGRFGQNQAGIAVSFYTFILFLGASFGPIAGVQLLTVLGAKATFLTLALLLLFSMLVAFTLDIKGEQ

SEQ ID NO: 72095 - protein, 110 aa, Streptococcus mutans
MEIEKTNRMNALFEFYAALLTDKQMNYIELYYADDYSLAEIAEEFDVSRQAVYDNIKRTEKILEDYEMKLHMYSDYVVRSEIFDAIMKKYPNDPYLQNKISILTTIDNRD

SEQ ID NO: 72096 - protein, 115 aa, Streptococcus mutans
MNPLIQSLTESQLRTDIPNFRPGDTVRVHAKVVEGNRERVQIFEGVVISRKGQGISEMYTVRKISSGVGVERTFPTHTPRVEKIEVTRHGKVRRAKLYYLRALQGKAARIKEVRQ

SEQ ID NO: 72097 - protein, 535 aa, Streptococcus mutans
MIMSFTSKFSKTVEEREIMTDIKDIQKIIVLDYGSQYNQLIARRIREFGIFSELRSHKVTADEVRAINPIGIVLSGGPSSVYAEDAFDIDKEILDLGIPVLGICYGMQLLTEKLGGKVVPAGQTGNSEYGQSTLHLTENSELFKETPAEQTVLMSHGDAVTEIPEGFQLVGKSSDCPYAAIENVEKKIFGIQFHPEVRHTEYGNAILRNFAFNVCKAKGDWSMDSFIDMEIEKIREQVGNRKVLLGLSGGVDSSVVGVLLQKAIGDQLTCIFVDHGLLRKGEGDQVMEMLGGRFGLNIIRVDASKRFLDLLAGIDDPEKKRKIIGNEFVYVFDDEASKQKGVDFLAQGTLYTDVIESGTETAQTIKSHHNVGGLPEDMQFELIEPLNTLFKDEVRTLGTALGMPDEIVWRQPFPGPGLAIRVMGEITAEKLETVRESDAILREEIAAAGLNRDIWQYFTVNTGVRSVGVMGDGRTYDYTIAIRAITSIDGMTADFARIPWEVLQKISVRIVNEVEHVNRIVYDITSKPPATVEWE

SEQ ID NO: 72098 - protein, 286 aa, Streptococcus mutans
MEHSSKATVLEIEHLQKYYKKNIGVKDISLSVKKGEIFGFLGSNGAGKSTTIRCLLGLIKPSGGQMTLFGGRYGSLTESLHHIGYMPSEAMFYPTMKVKDVIAFAAKVRKKDCSQEAKRLSELLEVPSDKKIEELSLGNRKKVSIVCALQHQPDLIILDEPTSGLDPLMQERFFKLIKEACSKGATCFLSSHVLSEIKNYCDRVAILKNGEIVTVDAIHHLTHSMLRKVSVWKGGKLKTFNYSGSMKDLLKQLEEMNPDDLLIEEPSLESLFLHYYEEKDNDHTIS

SEQ ID NO: 72099 - protein, 80 aa, Streptococcus mutans
MKKDIHPEYRPVVFMDTSTGYQFLSGSTKTSKETVEFEGETYPLIRVEISSDSHPFYTGRQKFTQADGRVDRFNKKYGLK

SEQ ID NO: 72100 - protein, 343 aa, Streptococcus mutans
MARELLFMKAINEALDMAMAKDDKIILLGEDIAGGVKVKHLEEQNEEAWGGVMGVTSGLMAKYSRDRVIDTPLSEHGYMSASVGMALTGLHPVPELMFNDFIGFCFDALIGQGSKMRYMFGGKAKVPMTVRTMHGAGASAAAQHSGSYYGIFGSIPGIKVVVPATPYDAKGLLLSALEDDNIVIFSEDKTLYGFKGEVPEDYYTVPIGKAVVRREGNDLTIVTIGKMLYVAYEVADRLAKDGISVEVIDLRTVAPWDQETVLNSVKKTGRLIVIDESNPHNNTATDIASVVNDKAFDYLDGPIKCVCAPNVPVPFAINLEQLYIPNADRVIEAAAELIDDLKA

SEQ ID NO: 72101 - protein, 571 aa, Streptococcus mutans
MVYQENYQKWLAYAKLPDYLHQELLAMDEKTKEDAFYTNLEFGTAGMRGYIGAGTNRINIYVVRQATEGLAQLIETKGDDVKKRGVAIAYDSRHFSQEFAFESAQVLAKHGIKAYVFESLRPTPELSFTVRHLGTFAGIMVTASHNPAPFNGYKVYGEDGGQMPPFDADALTDFIRAINDPFSIELADLEESKASGLIEVIGEAVDTDYLKEVKDVNINQKLIDEYGKDMKIVYTPLHGTGEMLARRALAQAGFDSVQVVEAQAVPDPDFSTVKSPNPENQEAFRLAEELGRQVDADVLVATDPDADRLGVEIRQADGSYKNLSGNQIGAIIAKYILEAHKTAGSLPTNAALCKSIVSTELVSKIAESYGATMFNVLTGFKFIAEKIQEFEEKHNHTYMFGFEESFGYLIKPFVRDKDAIQAVLIVAEIAAYYRSRGLTLADGIDEIYKEYGYFAEKTISVTLSGVDGATEIKKIMDKFRGDAPKQFNATDVVKLEDFQAQTATTADGIEKLTTPPSNVLKYILSDASWIAVRPSGTEPKIKFYIATVGNNSEDAQVKIANIEKEINDFVG

SEQ ID NO: 72102 - protein, 357 aa, Streptococcus mutans
MPNYKDLPQELTRTRTNEAVSELVDLKVHTATDIEAQEVSKEQAKDMYKTMWDIRNFEENARRFFAAGQIPGFVHLYAGEEAVAAGVCANLTDKDYITSTHRGHGHCVAKGGDLKGMMAEIFGKETGLGKGKGGSMHIADLDKGILGANGMVGGGFGLATGAAMRNKYLKTDDVAVCFFGDGAANEGLFHECLNMASIWKLPVIFVNENNLFAESTPQWYSSASATIAERALAYDMPGVRVNGKDLFAVYQVAKEAVERARSGQGPTLIEAVTYRDHGHFEGDEQKYKAPDGEEKDWADVDPLEVFRNYTIEHELLTEEELDEILEESKKDVDDAIKYAQDSPIPKAESLLEDVFAE

SEQ ID NO: 72103 - protein, 445 aa, Streptococcus mutans
MAKYDLLIIGAGPGGYIAAEEAARLGKKVAVVEKKDIGGTCLNVGCIPSKAYLQHSHWLLSMQEANKYGISTNLESVDFAKLVNRKDQVVSTLQGGIHTTFKSLKIDYYEGQAQFLKDKSFMVNGEKISGKDVILATGSHPFIPQIHGINSVNYLTTDSFFNLKVLPEKLVIIGGGVIAIELAFAMQPLGVNVTVIEIAPQILLTEDKAARAIIRKKLKTMGAHIFEAAKIEEVHAQSVILEGDGAQEFDQLLVATGRKPNTELAQEMGLKLTERGFVKVDDYYETSTPHVYAIGDLTESYMLAHVASMEGIKAVRAICRQAQDPVDAQGVPRSLYTNPEVASFGLSEEEAKEQGYDVLVEQLPFSFNGRAIASTETQGFVKLISERRYHQILGAVIVGEHGTDLLQQLILLRQAEGTFDQVVDAVYAHPTISELIQEVAKRIVQ

SEQ ID NO: 72104 - protein, 860 aa, Streptococcus mutans
MIDKMTQLVEDSLEEAKELAIAHRNYQLDIPHLWAVLVKPDQFAFQFYQSLEINTNQLIEIINKEIDKIPVLSSTEKSSYARLYSQRLKNLLDDAHQEMIDLKDQVLTVEHLILALFNQQRNPITVFLLEQGLNKEKLYQKMHRIRKGKPAISSSQETIYDALEKYAVNLNQRALDEPVNKIIGRQDEMNDIIRILSRKNKNNAVLVGHSGVGKTAIIEGFVQRLVKNQVPKNLQGKVIYSLDIGALLAGTKYRGEFEERFKALLNDIIDSNGQIILFIDEIHSIVSAGRTEGSVDAASILKPLLARGKIRIIGSTTHAEYRESIEYDRALERRFQRILVHEPDLDYTMEILKGLKPIYENFHGVRLEEDGLEAAASLSKRYISDRFLPDKALDLIDEACAAKRLASHAYPVQMTNLSQQLISEKIRLLRLTDSDTDDKFKLNNHLEQLEEQKSQLLANWQRERELLDQVQELRSHLTALEEQANLALENNQVADYVRLEDEEIRKCHQKMTALEKERLDSQKIINVTVTREDIAAVVERLTGIKVQGVMENERDRLLHLEELLHQKIVGQDQAVQKVSQAIIRSRAGIQNPKRPIGSFLFLGPTGVGKTALAKRLAEVLFGSELEMVRLDMSEYMEKHAVSRLVGPPPGYVGYEEGGQLTEAVRQRLYSIVLLDEIEKAHPDVFNTLLQVLDEGRLTDSKGRTIDFKNTILIMTSNIGSTNILQSLQDSGCITSEVRYKVLDELNHSFRPEFLNRIDETVLFNALSEKDMTGVVKVMVSDLQARLLEQDIHLTLTESVYILLAKEGFDAAFGARPMQRTIMQKLENPLALYLIQNQKNKEKETFVTVSVKDKKLKFTFS

SEQ ID NO: 72105 - protein, 449 aa, Streptococcus mutans
MGKYFGTDGVRGEANVELTPELAFKLGRFGGYVLSQHEPDRPRVFVARDTRISGELLESALVAGLLSVGIEVYKLGVLATPGVSYLVRTEQASAGVMISASHNPALDNGIKFFGGDGFKLADEQEAEIEALLDAKEDDLPRPSAQGLGMVVDYPEGLRKYEKFLVSTGSDLEGMKIAIDAANGAASYSARQVFLDLNADITVIGEEPDGLNINDGVGSTHPEQLQNLVKGSDFVIGLAFDGDSDRLIAVDENGEIVDGDKIMYIIGKYLSEKGRLSKNTIVTTVMSNLGFHKALDRENINKKITAVGDRYVVEEMRRSGYNLGGEQSGHVIIMDYNTTGDGQLTAIQLTKVMKETGKTLSELANEVTIYPQKLVNIYVKNDMKNKAMEVPMIAQIIEKMEAEMAGNGRILVRPSGTEPLLRVMAEAPSTEEVNYYVDTIAKVVKTEIGI

SEQ ID NO: 72106 - protein, 318 aa, Streptococcus mutans
MFKRFFTKRLWLTLVSIFFAILLFLTANSVNYGSRNQTTGLLQTYNHTLENVPIDIKYDSNKYFISGYSYDTEVYLTSTNRVKLDSEINNDTRHFKVVADLSNAKEGTNKVPLEIKDLPSGVSAEASPTTINVTVGKKKTKTFKVVGKVSDNQIADGYKLKKISTSASEVEVTSDESTIEQIDHVVAVLPENQVLSKDYSGSVTLQAVSENGKILPSIIDPTKTDLEVEVEELSKKVPIIVELTGQINSSLSDIRYELATKEVLIYGKQENLEKISYIKAKVNISDVTKDTTKTIPLAADNLKISPAKVTVKLTAKKK

SEQ ID NO: 72107 - protein, 447 aa, Streptococcus mutans
MTLKSRIGILAGKTAHFFLSKIGRGSTLPGKIALKCDKDILDTLAKDYDIVVVTGTNGKTLTTALTVGILKEAYGQVLTNPSGANMITGITSTFLTAKKSRNGKKIAVLEIDEASLPKITDYLKPSLFVFTNIFRDQMDRYGEIYTTYQMILDGAAKAPKATILANGDSPLFNAKTVVNPVRYYGFDTKKEAAHLAHYNTEGIVCPKCEYILQYKLNTYANLGDYICPNCGFHRPHLDYSLTQLTKISNTQAEFIIDGQDYKINVGGLYNIYNALAAVAVAEFLGVTPEQIKAGFDKSRAVFGRQETFKIGDKSCTLVLIKNPVGASQALEMIKLAPYPFTLSVLLNANYADGIDTSWIWDANFESILDMNIPQIFTGGVRHSEIARRLRVTGYNETKIEQAEKLEDILSMIEKQEADHAYILATYTAMLEFRELLASRHAVRKEMH

SEQ ID NO: 72108 - protein, 303 aa, Streptococcus mutans
MSFTTQVKEEILNLDSADKNELSAIIKMSGSLGLADKKLSLSIITENAKIARHIYALLERLYRINPEIKYHHKTNLRKNRVYTVFLDDNVEQILADLQLSDSFFGIETGIEQQILSDDNAGRSYLKGAFLSTGSIRDPESGKYQLEIFSVYLDHAEDLAKLMQKFMLDTKVIEHKHGAVTYLQKAEDIMDFLIIIGSMEGMEAFENIKVMRETRNDVNRTSNAETANIAKTINASIKTINNINKIKETVGLESLPIELQRIAQIRAAHPDFSIQQIADSLAVPLTKSGVNHRLRKINKIAEDL

SEQ ID NO: 72109 - protein, 325 aa, Streptococcus mutans
MRKPKITVIGGGTGIPVILNSLRHEEVDITAIVTVADDGGSSGAIRHVMQLTPPGDLRNVLVAMSDMPKFYERIFQYRFNAEDGALAGHPLGNLIIAGISEMQGSTYNAMQILSKFFHTTGKIYPSSEKALTLHAVFQDGQEVVGESQIAKHKGMIDHVYVANSYDDAKPTASRKVVDAIMESDMIVLGPGSLFTSILPNLVIDEIGKALCETEAEVAYVCNIMTQYGETEHFTDADHVRVLNRHLGQNFIDTVLVNVEKVPQDYMNSNQFDEYLIQVEHDFAGLQEQVPRVVSSNFLCLENGGAFHNGKSVVDELMNLIKVKEL

SEQ ID NO: 72110 - protein, 296 aa, Streptococcus mutans
MSEKKIDLVIVTGMSGAGKTVAIQSFEDLGYFTIDNMPPALVPKFLELVESSGENDKVALVVDMRSRLFFKEVSSILDKIDLNETINFRILFLDATDSELVSRYKETRRSHPLATTGRVLDGIALERELLAPLKNLSQNVVDTTDLTPRQLRKTISDQFSVEKSQTSFRLEVVSFGFKYGLPLDADLVFDVRFLPNPYYKPELRDKTGLDKDVSDYVMQHQESEEFYQHLLALLAPILPGYQKEGKSVLTIAIGCTGGQHRSVAFAHRLAQDLGQNWTVNESHRDKNRRKETVNRS

SEQ ID NO: 72111 - protein, 420 aa, Streptococcus mutans
MIFDKDNYEEYDREVWEAIHAEEKRQQNNIELIASENVVSKAVMKAQGSILTNKYAEGYPGRRYYGGTDYVDVVESLAIERAKKLFGAKYANVQPHSGSQANAAAYMALIKPGDTVMGLDLAAGGHLTHGSPVSFSGQTYNFIAYNVDPETEVLNYEQILKQAEEVQPKLIVAGASAYSHIIDFKKFRDIADQVGAKLMVDMAHIAGLVAAGLHPNPLPYAHITTTTTHKTLRGPRGGLVLTNDEDLAKKINSAIFPGLQGGPLEHIVAAKAITFKENLDPAFKVYAQKIIENCQAMVEVFNAHEKFRVVSGASENHLFLVDVTQVVENGKVAQNILDDVHITLNKNSIPFEKLSPFKTSGIRIGTAAVTARGFGPEECRKVAELIVKTLENTENEAVLEEVRQEVKLLTDAFPLYENLV

SEQ ID NO: 72112 - protein, 278 aa, Streptococcus mutans
MMNYGQVFAQYESELEALGEEKESLAYVFKDCKGWNQTDFILQQPQEIAEADLTKLEEIMQQLRQHIPAQYITGKAYFADLILSVDERVLIPRPETEELVKLILKENQHRSSAKLLDIGTGSGAIALALAKAQPDWQVWASDISEDALNLAQENATVNQAAVTFLQSDIFSHISDKYDIIVSNPPYISLRDQDEVEQNVLAHEPHLALFADNDGLAFYQKLALEAEHYLKLTGKIYLEIGYKQGEAVSQLFERQFPNKRVRLLQDSFGKDRMVVVDDG

SEQ ID NO: 72113 - protein, 262 aa, Streptococcus mutans
MTYTSLQSPADKDYLYDIRVAHLYGNLLNTYGDNGNVLMLKYVGEKLGIRMTFDIVSIGDDFDANKYDMVFFGGGQDYEQSIVAKDLPNKRSAIASFIQNNKVVLAICGGFQLLGQYYVQANGVRIDGIGVMGHYTLNQKDNRYIGDIKIHNDEFNETYYGFENHQGRTFLSDDEKPLGRVIYGNGNNKEDGSEGVHYKNVFGSYFHGPILSRNANLAYRLVTTALHNKYGIDIQLPRYEDILSLEVAEEYGDVKSKAEFEK

SEQ ID NO: 72114 - protein, 359 aa, Streptococcus mutans
MNIYDQLQAVEDRYEELGELLSDPDVVSDTKRFMELSREEANSRETVAVYREYKQVVQNIADAQEMIKDASGDPELEEMAKEELKNSKVAKEEYEEKLRFLLLPKDPNDDKNIILEIRGAAGGDEAALFAGDLLNMYQKYAENQGWKFEVMEASANGVGGLKEVVAMVSGQSVYSKLKYESGAHRVQRVPVTESQGRVHTSTATVLVMPEVEEVEYEIDPKDLRVDIYHASGAGGQNVNKVATAVRIIHLPTNIKVEMQEERTQQKNRDKAMKIIRARVADHFAQIAQDEQDAERKSTVGTGDRSERIRTYNFPQNRVTDHRIGLTLQKLDSILSGKLDEVIDALILYDQTQKLEELNK

SEQ ID NO: 72115 - protein, 637 aa, Streptococcus mutans
MIILQGNKLERSFSGDVLFDNINLQVDEHDRIALVGPNGAGKSTLLKILVGEETATSGEVTLKRDVTLSYLAQNSRFKSDNTIYDEMLHVFDDLRATERHLRSMEGQMAELVGNDFDKLMADYDRLSESFRQQGGFTYESDIKAILNGFKFDESMWQTKIAELSGGQNTRLALAKMLLEKPELLVLDEPTNHLDIETISWLENYLVNYQGALIIVSHDRYFLDKVATVTLDLTPHSLDRYVGNYSKFMDLKAEKIAMKEKNYEKQQKEIAKLEDFVQRNIVRASTTKRAQARRKQLEKMERLDKPDASKKSANMTFHVDKASGNEVLKVTDAAIGYDDKILAQPIDLDVRKMDALAIVGPNGIGKSTLLKSIMGQIPFIHGSSVYGSNVQVGYYDQTQSNLTASNTVLEELWSAFPRTAEVDIRNRLGAFLFSGDDVKKSVAMLSGGERARLLLAKLSMENNNFLILDEPTNHLDIDSKEVLETALIDFDGTLLFVSHDRYFINRVATKVLEISQNGSTLYLGDYDYYLEKKAEREAKTEFLQPMQSGSPSSSLAAATNYQAQKANQKEERKLKRRIAEIEERLETIEARETEINEAMLTTNDFTQLADLQKELESVQTEQLELLEEWEELSRQLED

SEQ ID NO: 72116 - protein, 448 aa, Streptococcus mutans
MSKDYISIIDVKNHVGEEVTIGAWVANKSGKGKIAFLQLRDGTAFFQAVAFKPNFIEKFGEEAGLEKFNTIKHLNQETAIEIKGIVKEDKRSKFGYELDATDLKVIGTSDNYPITPKEHGTDFLMDHRHLWLRSRKQMAIMQIRNAVIYASYEFFDQNGFVKFDSPILSGNAAENTTDLFETDYFGEPAFLSQSGQLYLEAGAMAFGRVFDFGPVFRAEKSKTRRHLTEFWMMDAEYPFMSHEQSLDLQEAYVKTLIQGVLDRAPQALGILERDTDLLRKYIAQPFKRVSYDDAITLLQEHEEDEDTDYEHIEHGDDFGSPHETWISNYFGIPTFVVNYPASLKAFYMKPVPGNPDRVLCADLLAPEGYGEIIGGSERETDYNTLLAKIKENGLNPDDYAFYLDLRQYGSVPHCGFGLGLERMVTFVAGTKHIREAIPFPRMLHRIEP

SEQ ID NO: 72117 - protein, 196 aa, Streptococcus mutans
MGMTVLAQLYYKYGTMNSGKTIEILKVAHNYEEQGKPVVIMTSSLDTRDGFGVVASRIGMRREAVTITDDMDIFAYIENMFKKPYCILIDESQFLSQKNVYDLARIVDELDVPVMAFGLKNDFQNHLFEGSRELLLLADKIEEIKTICQFCSKKATMVLRTENGRPVYKGNQIQIGGNETYIPVCRRHYFHPPIKA

SEQ ID NO: 72118 - protein, 369 aa, Streptococcus mutans
MKKKKLKYIWLILLLATLAVGFYFIRVKSTNDMQRNTYKNWSKYYVVTHGKSAYIKTATSDEGTTALSEGQGYGMYIAIKAAKKGITTKSQFAKLYKYYMNHRTANTQLMSWKQNIKTDGSIEDLSNSATDGDLYIAYALIKASELWSDQADTYKKQARLLLKDILTYNYNSETKSLTVGNWAVKGTDYYDLVRTSDILPEQFDVFYQFSKDETWKTIKTSMLASLEKMSRQHKTGLLPDFMWVRESGEIKAAKANLIASKYDGDYYYNACRMPYNLAKSNDKKSQKILKKMMNFFMTEKTIYAGYKLNGERLDSHQSASFDAPIFYAAKKLNHKYERLHQQEKKVFVKGLSSTNYYDSALTTMAVLDQ

SEQ ID NO: 72119 - protein, 436 aa, Streptococcus mutans
MMSQILMIISLISIWSSLAMALIILMSAVHFWFKHSDFDVDTSPLPEYPMVTVVVPAHNEDVVIAQTAKAILDMKYPRDKLEIILFADNCEDNTYQEMQSIKALPQYADRDLTLINRSGTGGKAGVLNDALKIAKGDYICVYDADAMPEKNALYFLVQKVMEDPERHVAAFGRNKTRNANQNFLTRCINQEIVVTQRIQHVGMWHLGKIGRIPGTNFIINTEFVKSIGGWRNGALTEDTDISFKIMQSGKLIALAYNSEAFQQEPETLKSYYLQRKRWAKGNYEVVIANFKHLFGRGNWRVKWEVFYYTCTFFWFNAAIVLSDILFFSNLIALIIGLFKPGVQVPFAFDANNIYMAQLLLFNWFLMILLYLLQISISQATQYGQATVKQIWIALLAYFTYTQLFIIVSISSVASVMMDKILHREGTKWVKTKRFAG

SEQ ID NO: 72120 - protein, 382 aa, Streptococcus mutans
MKKIKVMLVFGTRPEAIKMAPLIISLKEQTERFETVTVVTAQHRQMLDQVLETFKIRPDYDLNIMSKQQTLSTITTNVINKLDEVLKSEKPDIILVHGDTTTTLAASISAFYNQIKIGHVEAGLRTWNKYSPFPEEVNRQITDVVSDLYFAPTNQSRDNLLKENHPAQHIFITGNTAIDALDLTVKENYHHDVLTKIKSDNRIILVTMHRRENQGEPMRRVFKTLKSVLADYPDVELVYPVHLSPAVQKAAKDILANTERIHLIEPLDVMDFHNLANKSYFIMSDSGGVQEEAPSLGKPVLVLRDTTERPEGVAAGTLRLVGTQEDSVKNAMISLLDNKEEYDKMAQTQNPYGDGQASKRILEAISYYFNNGARPDDFGTGE

SEQ ID NO: 72121 - protein, 103 aa, Streptococcus mutans
MVMIYGDLIDKETRCIDYHGPTDIVALKCFACQKYYPCFLCHNRHETHNFQAYPEKLKKDKVVFCGSCQRELTIEAYKEKGTCPFCHHLFNPNCKVHYNHYFR

SEQ ID NO: 72122 - protein, 554 aa, Streptococcus mutans
MSDIKIIALGGVRENGKNFYVVEVNDAIFILDAGLKYPENEQLGVDVVIPNLDYLIENKKRVQGIFLTHGHADAIGALPYLLSDVKAPVFGSELTIELAKLVVKNNDATKKFHNFHVVDAQTEIEFDDAIISFFKTTHSIPESLGIVVGTKEGNIVYTGDFKFDQAASKLYQTDLARIAEIGREGVLALLSDSANADSTVQIASEAEVGIEMEQVISNWEGRIIVAAVASNLVRIQQVFDSAANNGRRVVLTGYDVENIVRTAIRLKKLSLVDEKLIVKPKDMHKFEDHELIILETGRMSEPLNGLRKMAIGRHRYVEIKDGDLVYIVTTPTVSKEAVVARVENMIYKAGGDVRLITQDLRVSGHANGRDLQLMINLLKPKYLFPIQGEYRELAAHADLALEIGMFPENIYIMKHGDIMVYDKEDGFLHEGGIPAGDVMIDGNAIGDVGNIVLRDRKVLSEDGIFIIALTVNKKEKKIISRAKINTRGFVYVRKSRDILRESADIVNKAVENYLQQDTFDWGELKSIVRDEIGKFLFEQTKRRPAILPVVMEVR

SEQ ID NO: 72123 - protein, 291 aa, Streptococcus mutans
MELEKLQPKIFQEFQRILQSGKLSHAYLFSGDFASFEMAVLLAQSRFCDSPIDALPCGQCRSCRLIAENDFSDVKVIEPEGQMIKTATIRDLLREFSSSGFEGQSQVFIIRDADKMHTNAANSLLKFIEEPQSDTYMILLTQDESRILPTIKSRTQIFYFPKNRAYLIQQLEQEGLLKSQAEILADLSKDPTQAKEFAQNNKLLDLLKACERFTAILFDSKNLAYLEVSRLAQLASEKSEQEWVFQLLTFFLSKNYDKRETLSYLEAIYQAKKMWFSNVSFQNALEYMVIT

SEQ ID NO: 72124 - protein, 212 aa, Streptococcus mutans
MTKGIFISFEGPDGAGKTTVLEAILPQLKKLVAKEVITTREPGGVAIAESIRDLILDVNHTNMDDKTELLLYIAARRQHLVERILPELKKGNLVLVDRFIDSSVAYQGYGRGLDADAVTWLNNFATDGLQPDLTLYFDVDSQIGLTRIEKNKEREVNRLDLEQLDMHRRVRSGYLKLAQENPDRIVTIDAARPLEEVITDALFIIKQRCLEK

SEQ ID NO: 72125 - protein, 549 aa, Streptococcus mutans
MSFDGFFLHHLTKELQEQILWGRIQKVNQPFEQELVLTIRNNRQNYKLLLSAHPVFGRVQLTKTDFQNPQSPNTFTMIMRKYLQGALIENIEQIENDRILEMSISNKNEIGDQIKVTMIIEIMGKHSNIILLDKNEGKITESIKHIGFTQNSYRTILPGSRYLAPPKIQAQNPFTISDETLFEILQTEDLAANNLQKLFQGLGRDTAAELSQRLKTDTFKNFKLFFDSPTSPTLTEKSFTAITFSNSQETFGSLSDLLDYFYQDKAERDRIAQQASDLIHRIQNELEKNKKKLKKQEQELQDTDKAEEFRQKGELLTTYLNQVPNNQDSVELDNYYTGQKVSIPLNKALTPSQNAQRYFKKYQKLKEAVKHLGSLISETKATIQYLESVDNALNQASLSEISEIREELVQTGFVKRRHREKIQKRKKPEPYLASDGKTIILVGKNNLQNDELTFKMSKKGELWFHAKDIPGSHVLIKDNLNPSDEIKTDAAELAAYFSKARLSNLVQVDMIEAKKLNKPSKAKPGFVTYRGQKTLRVTPNEAKIKAMKM

SEQ ID NO: 72126 - protein, 325 aa, Streptococcus mutans
MTEPDFWDDNIAAQKTSQELNELKLKYETFNSMQELSDETELLQEMLEEDDSLQGELEEDLVKLDKIMTSYEMTLLLSEPYDANNAILEIHPGSGGTEAQDWGDMLLRMYTRFGNAKGFKVDVLDYQAGDEAGIKSVALSFEGQNAYGLLKSEMGVHRLVRISPFDSAKRRHTSFASVEVMPELDDTIEVDIRDEDIKMDTFRSGGAGGQNVNKVSTGVRLTHIPSGIVVASTVDRTQYGNRDRAMKMLQAKLYQMEQEKKAQEVDALKGDKKEITWGSQIRSYVFTPYTMVKDHRTNYEVSQVDRVMDGELDGFIDAFLKWRME

SEQ ID NO: 72127 - protein, 238 aa, Streptococcus mutans
METNKLFQYNTLGALMAGLYDGSLTVGELLEYGDLGLGTLDSIDGELIVLDGKAYQAKGSGDKPEVVEVPDDMKVPYAAVIHHEAEVIFKQRFEMTDKELQERIESYYDGENLFRSIKIHGTFAKMHVRMIPRSTPDEKFAEVATHQPEYRAENITGTIVGIWTPEIFHGVSVAGYHLHFISDDHTFGGHVMDYVISEGQVEVGAVDQLDQRFPVQDRQYLFAKFNAKDIRGDIDKAE

SEQ ID NO: 72128 - protein, 318 aa, Streptococcus mutans
MKKNLKANITWLALVLIIFFLLFGLISAGIIDIYYTQILMGIGISIIMALGTNLVLGFSGQLSLGQAGFMAIGAYATAILTTQNPTYAGFYLSIIVGMIVTATVALVVGIPTLRLKGDYLAIATLGVAEIIRKLIENGGDLTNGSRGIMGILKYTTWPVVFVFVVLITIFVLNYLRSPMGREVLAVREDEIAAEAMGVNTTKIKVLTFMIAAVISSIAGSLYVGYIGTVAPKDFTIMKSIDFLIVAVLGGLGSVTGTIVAAVVLGILNMFLQNVSDIRMIIYSLALILVMVFRPGGLLGTWEFSFSRLFAKKAKEGDK

SEQ ID NO: 72129 - protein, 559 aa, Streptococcus mutans
MTEINKEGYGADLIVDSLINHDVNYVFGIPGAKIDRVFDTLEDKGPELIVARHEQNAAFMAQGIGRITGEPGVVITTSGPGVSNLVTGLVTATAEGDPVLAIGGQVKRADLLKRAHQSMNNVAMLDPITKYSAEIQDPATLSENIANAYRLAKAGKPGASFLSIPQDITDSPVTVKAIKPLTDPKLGSASVADINYLAQAIKNAVLPVLLLGNGASTAAVTASIRRLLGAVKLPVVETFQGAGIVSRDLEEDTFFGRVGLFRNQPGDMLLKRSDLVIAIGYDPIEYEARNWNAEISARIIVIDVAPAEIDTYFQPERELIGDIAETLDLLLPAISGYSLPKGSLDYLKGLRDNVVEDVKFDKTVKSGLVHPLDVIDVLQKQTTDDMTVTVDVGSHYIWMARYFKSYEARHLLFSNGMQTLGVALPWAISAALVRPNEKIISISGDGGFLFSGQELETAVRLHLPIVHIIWNDGKYNMVEFQEEMKYGRSAGVDFGPVDFVKYADSFGAKGYRADSKEKFDQVLQTALKEAANGPVLIDVPMDYKDNVKLGETILPDEFY

SEQ ID NO: 72130 - protein, 209 aa, Streptococcus mutans
MGKFQIISHPLIQHKLSILRRKDTSTKHFRELVNEIAMLMGYEVSRELPLEEVEIETPITKTVQKQLTGKKLAIVPILRAGIGMVDGLLSLVPAAKVGHIGMYRDEETLEPVEYLVKLPEDIDQRQIFVVDPMLATGGSAVLAIDSLKKRGAANIKFVCLVSAPEGLKKLQEAHPDIDIYTAALDEKLNEKGYIVPGLGDAGDRLFGTK

SEQ ID NO: 72131 - protein, 364 aa, Streptococcus mutans
MTEDYKLDTILAHAGINTDKTTGALTAPIHLSTTYQHPQFGQSTGFDYTRTKNPTRTVLEETLAKIEKAKYALVTSSGMAALVLLFTGFPIGSKVVAARDLYGGSFRWFNEQEKAGRFSFVYTNTETDMIAAISDETDYVFIETPTNPLMIEFDISKVAQAAHKHGAKVIVDNTFYSPIYQNPLVLGADVVLHSATKYLSGHNDVLAGVLMTSDQEIYDKLFYDQNTTGPTLSPLDTYLLMRGLKTLKLRMEKATQNAKTVVAYLEKSPAVKEVLYTGKGGMISFKVVDEKKIPQILNHLQLFTFAESLGGVESLITYPATQTHLDIPEEVRHSYGLTDDLLRLSIGIEDAEDLIDDLKAALEA

SEQ ID NO: 72132 - protein, 2046 aa, Streptococcus mutans
SKQEKLASIPHLEESQVYRLSPEQERMYFLQQFDLKSTLYNIPFIFKIKGFLDSNKLAIAFHKLVSTNDIFRTTYHVVGNEVVQTVNKTANYNIALEDLSDLGSLEEAEKSFIRPFDLSKDLLIRMGLYSEQNSQYLFIDMHHISSDGFSMNLIMNKLSNFYLGEDDKQVSRITYGDYAEYTKTDEFEKILQEQEEYWRKEFANYSHSNQLPHSQQSYSGDIQEFSFEEGDLLRIDEFAKRLNITRYVFLFSVFAKLINTLEFPVDIIGTPVSGRNLSELQNVVGLFVNTVPIRIPKEDDFNSYLMEFNNKIKMALLNQNYPFDRLIRILRSSGQLNSSGLFNFMFAYQIYESPLKLGDIELVEQKKNILIEKYDLTANVVDFGNNIKIQISFNTDKYSHEDIKQLLQKYVEFINNILDGEGIMMEQQKKFKNNQFDYDNYLTIINEFEKQVERFPDKIAIIHNDTRITYKELNILANKVGNILISSGVDNGDKVAIDMKRGISYIAAILGILKIGAIYVPLDFDFPQSRKEYILNDCRSKIIITESDIEYKNYKKVNWNQIIEGSSSKDLVTDHYVKESLDEIVYIMYTSGTTGFPKGVQVGGRGIIRLIKDNKSLTMKNTEVMLHGSSLAFDASTLEIYAALLNGACLSIIDKEDLIDSQTLKEKLKNDHVNRAFFTTPLFNSLCEQDPSVFNELEQVIIGGDRASNKHLKIVMKNSKKTQFYNGYGPTENTVFTTMHNIQYSELEGDIPIGKAINDTGILIVNENFEEVKKGEVGELVVTGGGLAIGYLNQKDASQGSFISLPNLGIKRAYKTGDYVRENNDGDLIFIGRRDSQIKYRGFRIELREIESIAKKIDHIREAICLLIGEKSNSKLVLFAESNSSVSEASIIETLHVELPEYMVPNDLILLDNMPLKLNGKVDSDKLKQIYLEKIQSQVEKPSESNTERFFIEILEDVLKKPNLNLEMNFFEIGGHSLNATIISTRLSEAFHKKISVRDVMLNPNLKDLFHLTKVTEDDAGSNLEVLSKADNYDCSPTQSRLFLLNKSRSDTSYNIPYFIKVSSNIDMEQLKKAIWKELKENEILRTIYTFNNSKIVQKVLPFEKKLLNISVEYEPIIDFEYLQKYLIQPFDLEKSIPFRASIIKSNSDIILFLDIHHIAIDGFSLNQLLKNIEKNYFEIKFTRPKFTYKDYSNWINKQISNGKYMQKKQYWQEQLKGYQENIFLGIEKTIKPNSKRTIYYNREISSQLYEQLRDYIVTNNISLNILFMTALYILIAKYSSINDIVIGSPVSGKVLADLEEMIGSFINSLPIRYKVDPSKTILETIEDVKKQVMDALENQEYPIDSIVSDKNKENTEIASLFDIMFVMQTNFKQGEQEKSNQIFLDYQEIPIDSKMNLIVEGIDFGNTVKFQITYPVELYDDDSIIQLMDSFLQVIESIIQNDRRCVKEIEIISQDQKDFIDLNYNKTAKDFKFDNQCLKQLIERNVAKMPNKIAIACDEENISFEQLNMRSNFMANKLKDLGLQVGDVVGVMKDRNIEAIIIILALIKLGVTYVPLDSGTPIERVKKIFVKSGMKFVITDLVPLQKDILIIDTNAPDFQGLSKQNPKTEINLDQMLYIIFTSGSTGEPKGVAISNKQCINTILDINHKFTLSPKDNILLISSFAFDLSVYDIFGALVSGATLTIASQNKDTNYLKKVVQNNPITVWNSVPAYMELICNVLADQKPILSIRNIILSGDWIPLELPLKIKKIFPNANLFSAGGATEGSIWSIYYPIVKVEPEWKSIPYGMPLANQQMYILNNMGNELPIGVMGNIYIGGVGVAMGYINDIEKTNDSFINHPKLGRIYKTGDLGRLTSQGYMEFCGRKDIQVKVNGNRIELGEIQAILQSFETIQNAIVTVGQNDYQKQLLAYYKSDNEIEKDVLNQFMKQYLPNYMIPSHYIYMSEFPLTSNGKIDKKQLPDPKKIESIKEVKDVKPKNQLEETVLTIWENVLEHQVLSVTDSFFSEGGNSLMATVIIGQIKDQCNVDLSLEEFYENDSIEALGNLI

SEQ ID NO: 72133 - protein, 544 aa, Streptococcus mutans
MSDKETKMTQQEQMVRGTAWLTAGNFISRLLGAVYIIPWYAWMGKYAAEANALFGMGYEIYALFLLISTVGIPVAVAKQVSKYNTLGDPKKSTYLVRKILHFMLGLGAIFAVIMYMGSPVFASMSRGGQDLVPVLRSLTLAVLVFPSMSVLRGFFQGFNNLKPYAISQIAEQVVRVIWMLLTAFFIMKMSSGDYVDAVTQSTFAAFVGMFAGIAVLIYFLWENDLLDALFGKKPEKVDIDTKDLLIETVKEAIPFIVTGSAIQVFKLIDQFTFGNSMALFTHYSDRELKVMFAYFSTNPGKVTMILIAVATAIAGVGIPLLTENFVKKDKKAAARLVVNNLQMLMIFIIPAIIGAVILAKPLYTIFYGLPQGQALGLFIVSLLQTIILAIYTVLAPMLQALFENRKAIRYFIYGVIAKFVLQVPLIYFLQAYGPILATTFALFIPIILMYLQIQKITGFNRTAIRRTSLLVLILTAIMTVVVVLATWLLGLILSDNSRIASLIYITVIGFIGIVVYGILALATHLLDKMLGTKAVSLRRKLHMN

SEQ ID NO: 72134 - protein, 2575 aa, Streptococcus mutans
MFHLIKTVISELPQNINQKIKDIALITNEEKESILKISRGKELSIEAPTFLKLFQKVTDRLKNKVAISSDDWYLTYEQLNQESEKLSLYLSKLFEPKSIVPLVMDNSSEMFIVIFAILKSGFAFSPISLDYPPERIEHIIKETHLNSVIVPEEANLQISKEIKQYVAKDLLNKAPVEVDQFSNAVNVRGDDIAYVIFTSGTTGTPKGVKVSHQSLMNLITWHNDNFSITSETIAAKYAGVAFDASIWELFPYLSIGAKVYVVSEKDRFDVKKLNQKFIENKVSIAFLPTVVFEKFSKVQNPYLKILLTGAEKLHYFSEQAYEQYNNYGPTEYTVVATSFKLEKHMDNIPIGKPIANTTALVMSNDRHFLPIGFKGELYLGGDSLSSGYLNDSKKTKNSFIELEQIMGQVFYKTGDLVAYTDSGELLYYGRIDNQIKINGYRIELQDIEKNILEIIGQDSDCSVVVIPVSINGLISLHAFYEGVTGFDSNPNQVLKQLTNKLPSYMVPSTIESLSQFPLTSNGKVDRKYLEKIVLNKSTSVKEINNDNPLLVKVMKIITEILKGRQINPDEDFFQMGGNSLTAIELANKLQEELNKKVTIDDIFKFRNAINLVDNLTNRENLKPLETSIQSSEEISYESSPSQKAIFIEQKIDEKSLAYNMPIVYKINGEIDFEKLESSLDKVVKNNELLRSHFYLKDERVMVKTPKVKDYYHVMERKELSEKSFDLTKEFKKFVRPFNLEKDVLIRAKIIKTSSQKYLFLDSHHISFDGGSLNPFINDFKKAYAGVELERKASYSQYALQTLSPHFLKASHSHFEKEFGTLVEPLKLSDFGTIDHQKKAGVSFDSEFSYKIRNIALKNKVTVFNLLFSIVGYLLSCFSNQKDICIGVPVTNRNRSQYKNIIGMFVNTLPVRLNYENLHTVEEMNKYVNNQFIEALKYKEFSLEEIIKISRDKTENDISQLFNVLFVMNEIEDFNFSIDNTTFEKMSADNKDVKYDLLFEVLDNTKDNTFSISLEYDNKKYSNQLANRLLQSLQKILMEVVDKQKNNLSDIKIISEIEEQTLQSFLTWKQFTGKQQKLHEPFENLVKQFPNKIVVKDKNTSMTTTELMQKSNIVGNFLQRQGVNNNKKVAIIVNKSVNMMVTILGVLKSGAAYVPIEPSLPEERVKYILDDSCCDFIISEEPFYNGKINSETISNILNEEPDISKVESDSTYKDLCYIIYTSGSTGDPKGVMLTHEAVMNRLLWMQNAYPITKNDIILQKTSFGFDVSIWELFGWTFEGAVLYFLENGEEKDPQRIIELINSQNISKLHFVPSMLNVFLEFCERENKDSLKSLSIVFSSGEALTKEQVIKFYSIFDNDKPQLINLYGPTETAIEVTYFDCSNLDYKSEDVPIGEPLDNVEAYVLNDKKQKCPIGVVGELYIGGIQVAQGYINKEDATKKSFVRLPKISNSRLYATGDLVKWTSEGKLIFIGRSDDQVKIRGYRIELGEIEKYLKKVSQKNCLVSLQNKLSKNNKSLIAYIESSTTIDESKIKEELKTLLPQYMVPSHIYIVPEFPINKSGKVDRKLLDSMYSSKHIAPKEGLIKSSNLTEDIKSVWSNILDYSIDSFSEDDNFFSLGGDSIKAISMASKLISKGYKVSVKEILKNPTIAQLTKIVVKSNQIEEDSELDNSVPLTPISQWFWKQNFQVRTHWNQAVVLVSKDKINDEFLRIAIEKIIDEHTILRSQLDNNSLSIDNQKDAQRFYDYQEIDICGWDDKAKIINSYVYNILSKSSKLINIVKFICDDCERIVLSIHHLLIDTISWKILIEDFCSYYGQLRNGQSLNSSFKTTSFITWANRINTLSVKFSESNMEKKYWDNIVQTPVDLINQDGVINPGSIKDRKHSRIKLEKEISSQLSDISVSNSHVTQEHILLTSVLMALKKSYSISNIPILMEGYGREEYLTQTTLARSIGWFTNTYPLVFKVKDDVLQTLIQVKDIINRVPHNGIGYGLLHLVNSNLQDLDPEISFNFLGEISSESSTQFMTLDNIELDCLINKSNSNPYLIEFSVFFLKGELFVDVYFDSTLISQEDVEIMNQNFVQTINELINCSEDISTMRSISDVTNETFKYESNNLPIVNDKNIDKIRKTLPMQSNILFLEQFQKNRNIYHEQFKVDFKGRLNKKIFDKAVQFVVDQYEALRTSFDLTTFGEPAQIIKQNNTISIDAYTFESPRQDSEAAVKKLENEFLDIPFDTQESDLFRITILEFKDQEVSLIFDYHHIILDGWSMLIVLRKIFTCYTKLLKDATYINEEENINIDDYFDYKDLFETESAKRYWKNFLENIGENLNLENYFDRNLEGKTIEHNIGEYRFSISKQQDKQIRQFCENLNCTTNDFAHLIWSTILYKYLKSQSQVFFYTVSGRDGDINIENEVGLFINTIPQVTNINDDSSISSIVESIHLNISNAFGYSQLPLSEILQQSQVSHDQINTLLVYENFPIHKDDFIAELSDSQLEFQTYKATEATTYDLTLIFSEEEEKISIRILYNPHKYSNQYISILGKNIQGIIDDLVTKNYFREITLPDNTFNEALQSVEDKLDFNF

SEQ ID NO: 72135 - protein, 483 aa, Streptococcus mutans
MITIETVLTILKNNANFREIIDGKHYQYKYSNPEVAFHHISYDSRDIKASTLFFVKGATFKKEFLEKAIESGLTFYVAEKDYQVGIPLILVNNIKNAMCLIAKEFYDNPQDKLKTLAFTGTKGKTTAAYFAYHILKQGYRPAMISTMNTTLDGKTFFKSKLTTPESLDLFKMMAQAVANGMTHLIMEVSSQAYLVGRVYGLTFDVGVFLNISPDHIGPIEHPTFEDYFYHKRLLLKHSRYVIVNSQMNHFALIKEQVADQPHDFYGKYSDNQIINSKAFSFDLTGKLAGHYDIQLTGSFNQENAVAAALACLQLGASQTDIQKGIVQTTVPGRMEVLIQKNGAKVFVDYAHNGDSLEKLLSVVEEHQKGTLILILGAPGNKGESRRADFGYVINAHPELQVILTADDPNNEDPQLISQEIAHHIKRPVNIIVDRKQAIQKAMSLTQSENDAVIIAGKGADAFQIIKGKRTAYAGDIEVARKYL

SEQ ID NO: 72136 - protein, 239 aa, Streptococcus mutans
MNKTKKVVLFCIPHAGGNSSIFNKWSGYMPDNIIFKPIELSGRGKRLNEKLDASFEDMIDDVFNSIKKIMVNFDMDYYIFGHSMGAWIVLELLYYFKEYHLPYPKGVIFSGNIPPCFYHKSDPPLHLLPDKIFLEEVSKLGGIPGKIIKEKQFVEYFVPIIKNDFKLIENYYFQQKQEKFPVKSLICSGKDDKFRVKDLVQWENYFIDKCSISLFKGGHFYIDDNIASLCNQIKDFIYM

SEQ ID NO: 72137 - protein, 734 aa, Streptococcus mutans
MITSKYAWKINEKKPDDGFFELAKKENLNPTAAQILYERGFKTSKDIEAFLRPDLSQLHDPFLLNDMDKAVTRIRRAIETNERILIYGDYDADGMTSSSIAKEALEMLGAEVEAYLPNRFTDGYGPNLSVYKYFIEQQDISLILTVDNGIAGHDAIAYAQGQGVDVIVTDHHSMPAELPSAYAVVHPEHPDANYPFKCLAGCGVAFKLACALLESIPTEMLDLVAIGTIADMVSLTDENRVMVKYGLEILKQTERVGLQELIALAGVDFADINEETIGFKLAPQLNALGRLDDPNPAVELLTGFDDEEAKTIAAMINEKNEERKTIVQAIFEEAMTLVDENKSVQVLAKEGWHAGVLGIVAGRIMEQINQPVIVLNIENGLAKGSARSLESVNIFNALDAHRDLFMAFGGHAGAAGMTLEADKLEELSQVLNDYIQEHAIDLSQKSALVIDEELYLPELSLDTLKGLETLAPFGMNNKKPIFLLRDFTVKQVRTMGQNGAHLKLKVAQEQAVFDLLAFNYGSLVTEFQQAQHLELAVTLSVNRWNGNTSLQLMLVDARVEGIQLLDIRARNSALPDGVPFLEDQTDSKAVVLFEIPEKEEDLLALFENRDFEVIYFKNRIKHQYYLTGSGTREQFAKLYKTIYQFPEFDVRHKLKELSQFLKIPDILLVKMIQIFDELDFVSIDDGIMTVNKDAQKREISDSHIYQDLKKLVKFQELMALGTPQEIYEFLKRDR

SEQ ID NO: 72138 - protein, 310 aa, Streptococcus mutans
MSKILVFGHQNPDSDAIGSSMAYAYLKRQLGVDAQAVALGNPNEETAFVLDYFGIQAPPVVKSAQAEGAKQVILTDHNEFQQSIADIREVEVVEVVDHHRVANFETANPLYMRLEPVGSASSIVYRLYKENGVAIPKEIAGVMLSGLISDTLLLKSPTTHASDPAVAEDLAKIAGVDLQEYGLAMLKAGTNLASKTAAQLVDIDAKTFELNGSQVRVAQVNTVDINEVLERQNEIEEAIKASQAANGYSDFVLMITDILNSNSEILALGNNTDKVEAAFNFTLKNNHAFLAGAVSRKKQVVPQLTESFNG

SEQ ID NO: 72139 - protein, 514 aa, Streptococcus mutans
  MISC_FEATURE (392)..(392): X=any amino acid
MANKKIKDMIATIENFAQEQAEFPVYNILGEIHTYGELKADSDSLAAHLDQLDLTAKSPVVVFGGQEYAMLASFVALTKSGHAYIPIDHHSALERIEAILEVAEPSLVIAVDDFPIDNLQVPVIQYSQLEEIFKQKLSYQINHAVKGDDTYYIIFTSGTTGKPKGVQISHDNLLSFTNWMINAEAFATPHRPQMLAQPPYSFDLSVMYWAPTLALGGTLFALPKEITADFKQLFTTITNYPWCVDINTFLCDMAMLSDDFNAQQLPHLTHFYFDGEELTVKTAKKLRSVFRKQELSTLMGQQKQLLLYQLWLSLIKCLKHANVCQLAIQNQIRQPLLLMSQVINWQMVSKERLLFPVRQSLRGISIILNEQQQLSLNLKVCQLIILVIWEVXQMEGLLLYGGRMDFQIKFNGYRIELEEVSQNLNKSQYIASAVAVPRYNKDHKVQNLLAYVVLKDGVEEQFERALDITKAIKADLQDVMMDYMMPSKFLYRKDLPLTPNGKIDIKGLMSEVNK

SEQ ID NO: 72140 - protein, 445 aa, Streptococcus mutans
MEDPGSQSLILQFLLLLILTLCNAFFSATEMALVSLNRARVEQKAEEGEKKYIRLLKVLENPNNFLSTIQVGITLITLLSGASLADSLGREIAVWFGNSATARTAGSLISLAFLTYISIVLGELYPKRIAMNLKENLAVLSAPVIIFLGKVVSPFVWLLSVSTNLLSRLTPMTFDDADEKMTRDEIEYMLTNSEETLDADEIEMLQGVFSLDELMAREVMVPRTDAFMVDINDDSSDIIQTILNERFSRIPVYDDDKDKIIGIIHTKNLLNAGFKEGFDHINLRRILQEPLFVPETIVVNDLLTALKNTQNQMAILLDEYGGVAGLVTLEDLLEEIVGEIDDETDKTAISVREIADNTYIVLGTMTLNDFNEYFETDLESDNVDTIAGFYLTGVGTIPSQEEKEHFEVESNGKHLELINDKVKDGRVTKLKILVSEVEEKEDEKD

SEQ ID NO: 72141 - protein, 461 aa, Streptococcus mutans
MSGKSIFDKLWDRHVITGKEGEPQLMYVDQHYIHEVTSPQAFQGLRDAGRKVRRPDLTFGTFDHNVPTVNIYDIRDVISKAQMDALARNVIEFNIPHADHGSENQGIVHMVGPETGRTQPGKFIVCGDSHTATHGAFGAIGFGIGTTEVEHVFATQTIWQVKPKKLLVKFTGKPQKGVYSKDYILALIAKYGVALGVGYVVEYIGDAVDALSMEERMTICNMSIEFGSKMGIMNPDQKTFDYLKNKACVPEDFETAVADWKTLVSDEDAHYDKVIELDVSQLAPMVTWGTNPSMGVAFGQAFPDIRDMNDKRAYDYMDMKPGQTAEDIELGYVFLGSCTNARLSDLKVAAKYVAGKHIAPNLTAIVVPGSRPVKQAAEKIGLDKIFLDAGFEWRDPGCSMCLGMNPDKVPEGMHCASTSNRNFEDRQGVGAKTHLCSPAMAAAAAIAGRFIDVRQLPEAQV

SEQ ID NO: 72142 - protein, 298 aa, Streptococcus mutans
MVIELKNEKVTVQFKEFGGALSSIKDQDGIEYLWQGNPAYWSSQAPVLFPICGSLRNDKGIYTSKKHSHRYGSIPRHGLVRKKNFRFEQLGKDSVVFTITPDKEMLMQYPYHFELKIIYTLKHTTIRTEYQVINKEKESIMPYFIGGHPGLNCPLFAGDRYEDYYLEFEKEETCTVPKSFPDTGLLDLQDRKIFLKGQKYLDLDYSLFTHDAITLDNLQSRSVSLRSKNHGGGLRLDFADFPYLILWSTANKSPFIALEPWSGLSTAVDESDYFEEKRNVSFVEPGQFDRNYFDITVL

SEQ ID NO: 72143 - protein, 473 aa, Streptococcus mutans
MRGHTMSKTLPKDFIFGGATAAYQAEGATHADGKGPVAWDKYLEDNYWYTAEPASDFYHQYPVDLKLAEEFGVNGIRISIAWSRIFPKGYGAVNPKGLAFYHNLFAECHKRHVEPFVTLHHFDTPEALHSNGDFLNRENIEHFVNYAEFCFKEFPEVNYWTTFNEIGPIGDGQYLVGKFPPGIQYDLAKVFQSHHNMMVAHSKAVKLFKDGGYSGEIGVVHALPTKYPYDPNNPADIRAAELEDIIHNKFILDATYLGKYSEKTMEGVNHILAVNGGQLDLREEDFAALEAAKDLNDFLGINYYMSDWMRAFDGETEITHNAKGEKGSSKYQIKGVGRREAPVNVPKTDWDWIIYPQGLYDQIMRVKQDYPNYKKIYITENGLGYKDEFVNHTVYDDARIDYVKKHLEVLSDAIADGANVKGYFIWSLMDVFSWSNGYEKRYGLFYVDFDTQERYPKKSAYWYKKLAETQIID

SEQ ID NO: 72144 - protein, 216 aa, Streptococcus mutans
MKIKQTYLLRASFAFLLLMFLGYLVKFYPDNLTGIDTNIQSAMRGDFPSVETCFFTTITNFGNELFLFIFCIFLFFLFYIKNWKAEAGFILANFATVGLLSTALKYLYQRPRPKIKWLIQTTGPSFPSWHAASTLLIAAAIVVIIQQRMKSSVLKLLLQILLIVIAILVGISRIYIGVHHPTDVLGGWLLALGLSQMIYPYYDEWRFKWRFSGKQK

SEQ ID NO: 72145 - protein, 568 aa, Streptococcus mutans
MNTLIAQIEKGKPFFEKISRNIYLRAIRDGFISAMPVILFSSIFLLIAYVPNIFGFTWPKGIENMLMTPYNYTMGIIGFLVAGTTAKSLTDSMNRQLEKTNQINFISTMLASMAGFLIMAADPAKEGGFLSAFMGTKGLLTAFIAAFITVNVYKICVKNNVTIRMPEEVPPNISQVFKDIFPFAFSIIILYAIQLAIKAVIGVNVAQSIGTLLAPLFSAADGYLGITIIFGAYALFWFVGIHGPSIVEPAIAAITYSNVELNAHLIHAGQHADKVITSGTQMFIVTMGGTGATLVVPFMFMWLCKSKRNKAIGRASVVPTFFGVNEPILFGAPIVLNPVFFIPFILAPIVNVWIFKFFVDTLGMNSFFANLPWTTPGPIGIVLGTGFAVLSFVLAALLILVDTVIYYPFVKVYDEQILAEEAEGKSSSDALKEKVAANFDTKKADAILEGAESKEEPATHAITEETNVLVLCAGGGTSGLLANALNKAAEEYGAPVKAAAGSYGAHREILDQYQLVILAPQVASNYEDMKAETDKLGIKLAKTEGAQYIGLTRDGKGALAFVEEQFKD

SEQ ID NO: 72146 - protein, 104 aa, Streptococcus mutans
MNREEATLLGFEIVAYAGDARSKLLEALNAAQAGEYDRAEELVAAADDCIVDAHKAQTSLLAKEAQGDDIELSVTLMHGQDHLMTTILLKDLMKHLIELYKRGS

SEQ ID NO: 72147 - protein, 198 aa, Streptococcus mutans
MTRTEYLNQLKHYLKRLPHTDYEEAMDYFKEYFEEAGPENEAQVIQDLGNPKEAAYEILSQLLDKKVEEECGPSTKSKHIVWITILAILAAPIALPLTIAALALALAIIILALSSIVVTVSIGVSAFTSAFVLIWEAIFKLSGSFSTFSLGLGAGLLSLGLSLIFFVFTLLLAQWFKFAFIKWSQWIVKQGYKRGYRV

SEQ ID NO: 72148 - protein, 171 aa, Streptococcus mutans
MKIAIGCDHIVTDVKMELSKHLKEEGYEVLDVGTYDFTRTHYPIFGKKVGEAVSSGEADLGVCMCGTGVGISNAANKVPGVRTALVRDMTSALYSKEELNANVVSFGGAIIGKLLLFDIVDAFIKAQYKPTEENKKLIAKIKHLEAHNDKQADPHFFDEFLEKWNRGDYHD

SEQ ID NO: 72149 - protein, 142 aa, Streptococcus mutans
MAIIIGSDAAGKRLKDVIKTFLKDNNHEVLDVTERKDLDFVDSTLAVVHEVQKNDKNLGIAIDAYGAGSFMVATKVKGMIAAEVSDERSAYMTRGHNNARIITLGAEIVGDELAKNIVKDFVEAKYDGGRHQIRVDMLNKMC

SEQ ID NO: 72150 - protein, 182 aa, Streptococcus mutans
MNIEQLEKENKLLTLGRNHVVLFQPQIPANTGNIARTCAATNTSLHIIRPMGFPIDDKKMKRAGLDYWDKLDVHFYDSLNDFMNICSGKLHLITKFANKTYSDENYDDSEHHYFLFGREDKGLPEEFMRQHSEKALRIPMNDQHVRSLNLSNTVCMIVYEALRQQDFIGLELSHTYAVDKLK

SEQ ID NO: 72151 - protein, 237 aa, Streptococcus mutans
MTPEEFYQALAKHHINLSAKQKEQFDLYFKLLVEWNDKINLTAITEEKEVYLKHFYDSIAPLLSGYIPNESLKLLDIGAGAGFPSLPMKIIYPQLDVTIIDSLNKRIKFLNLLADALELDKVHFYHGRAEVFGQDKNFRAHFDLVTARAVARLQVLSELTIPFLKVGGQLLALKASAADEELKTAQNALNLLFSQTTSSDNYQLPNGDGRNLTIITKKKETPNKYPRKAGMPNKKPL

SEQ ID NO: 72152 - protein, 451 aa, Streptococcus mutans
MKIIVVGGGKVGKALCRSLVEEEHDVILIEENESVLNHVTKRLDIMGIVGNGANFRILEQADVQHCDIFIAITDKDEVNMVAAVLAKRMGAKETIVRVRNPEYSNTYFKDKNFLGFSLVVNPELLTARYIANMVDFPNARSVEHFVNGRVMLMEFKIVDGNNLCQMSLNQFRKRFNNIVICAIERGNELIIPDGDAVIQSGDKIFVTGKRMEMIHFHNFVKNKVIKHLMIIGAGRISYYLLNILKTTNRHLQVKVIELNPKKAELFSQEFPHIHVVQGDGTAKDILLEESAANYDAIATLTGVDEENIIASMFLETLGVQKNITKVNRTSILEIINPEQFSSIITPKSIAVDSMMHFIRGRVNAQDSNLDAMHHVANGRIETLQFEIRQTNKMAGKTLSELHFKTNVLIAAIIRNGKTIFPTGDDILEVGDKIVVITLLTNITHIYDLLKR

SEQ ID NO: 72153 - protein, 1212 aa, Streptococcus mutans
MTFKPFLTDQEIASLQIQEAQSDKKQKRTPEQIEAIYTSGTNILVSASAGSGKTFVMIERIMDKILRGVTIDQLFISTFTVKAAGELKERLEKKITEQLRLTNDTALKQFLSEQLLGLQTADIGTMDAFTQKLVTQYGYTLGISPNFRILQDKSEQDLLKNDVFDDLFTDYRTGDQAELFTKLVRNFAGNRKDSSNFRQIIYKIYDFSQATDNPQRWLLENFLKGANTYKDFSAIPEQEVKDFLNTLQETALALRDVTDLEDYKQVTAKGTPTAAYQRHLKMIEQLQDWVLHFDSLYGRDGLGKLANDIATLIPSGNDVTVAGVKYPVFRSLHSRLRGLKHLETIFKYQDQSLPLLQVLQSFTLDFSKQYLQAKMQENAFEFSDIAHFAIQILEENDAIRQLYIDKYHEVMVDEYQDNNHTQERMLELLSNGRNRFMVGDIKQSIYRFRQADPQIFNQKFKDFQEHPEHGKLILLKENFRSQSEVLDATNSVFTHLMDEAVGEILYDDTHQLVAGSSAQKIPYPQNETQVLIYDTKDQQNQDLAVEDDSNQISLGEVKLVAKEIIRLHNEEKVQFEDITLLVSSRTRNDGILQTFDDYGIPLVTDGGEQNYLKSVEVMVMLDTLRSIDNPLNDYALVALLRSPMFAFDEDDLARLALQNLPDQHKQNLYEKMENARNGQGQQVQLITEALSAKLDAFFETFLSWREFSLLNSLYDLIWKIYNDKFYYDYVGSLPKSEQRQANLYALALRADNFEKTGFKGLSRFIRMIDKILENQNDLADVEVALPKNAVTLMTIHKSKGLEFKYVFILNIDKKFSIQDMTSPLILSRQNGVGIKYIADMKEELEEKLLPTVKVSMDTLPYQLNKRELRLATLSEQMRLLYVAMTRSEKKLYLVGKGSQEKLGDQYDGKSENNHLPVADREHYLTFQDWLLAIEAAYAADELHFKTSFITDEDLTEDKMGSLEAEQAYDADNLKDNRQSDDITRALDMLEAVEKLNQHYKAAIHLPTVRTPSQIKKFYEPVMETEGVEVMQTSYQTKPKFELPQFSKKAKQDPTALGSSVHELMQRLHLSEQVSLEDILTALAELSVEENVKKAIQVDKILHFFQTSQLGKLIQANADKVYREAPFAMLQADPASGEDYVVRGIIDGYILFDNRIVLFDYKTDKFTNSQAIKERYRGQMTLYAQALSQSYNIQQVDSYLILLGGEKLEVVEI

SEQ ID NO: 72154 - protein, 240 aa, Streptococcus mutans
MRINKYIAHAGVASRRKAEELIKQGLVTLNGQMVTELATTVKSGDRVEVEGQPIYNEEKVYYLLNKPRGVISSVRDDKGRQTVVDLLPEVKERIYPVGRLDWDTSGLLILTNDGDFTDKMLHPRHEIDKVYVARVKGLASKDNLRPLTKGIVIDGKKTQPARYRIVKTDREKNRSVVELTIHEGRNHQVKKMFEAVGLMVDKLSRTRFGTLDLSGLNPGEARRLNKKEISQLYNAAVNEN

SEQ ID NO: 72155 - protein, 1092 aa, Streptococcus mutans
MITNDFNLIEAIMKLLYTDIQYNMIDILAGEAQLAAKAGKRVFYIAPNSLSFEKERAVLETLPERASFAITITRFEQMARYFVLNDIHQGETIDDNGLVMVFYRVLSSFSDQDLRVFGRLKQDAHFINQLVDLYKELKASNLTVLELNQLNSAEKQEDLIKIFTEVETILSAGHFDNQSKIAFFAQQIKFGHLDTALQDLTIVIDGFTRFSAEEENLIGLLHEKGVDIIIGTYISQKAYRSTFSNGNVYQASLDFIRGLAGKFQTKPEYVVSKQEALPAFTKLSQLFESCHDFSDSQLVLTDKDKEHVTIWDVINQKEEVEHVAKSIRRKLYEGHRYKDILVLLGDADAYKLQIGKIFDKYEIPYYFGKAESMSSHPLVHFVDSLERVKRYNFRAEDVMNLLKSGLYGKIRQNQLDKLEQYVIYADIKGKTKFFKDFTLDNHGQFDLKALNKLRAEVMSPLQELIKIQAQKGDSILQKLTNFLEAISLTNNFSKLIQGVSDTEQEKNEQVWKTFTVILEQFHTIFGQEKMKLADFLALLRSGMLAADYRTVPASVDVVTVKSYDLVEPHSNKFVFALGMTQSHFPKIVQNKSLISDEERAKINEATPDNRRFDIVTKENLKKNHFTALSLFNAATQELVLTLPQILNEAEDNTSSYLLELQDMGVPVVEKGGNRLAADPEDIGNYKALLSRVIELNRSAIDQELSKEEQTFWSVAVRYLRQKLAKEGLTIPEVNDKMQTKQVAAEVMAARFPIDQPLNLSSSALTTFYNNQYLYFLQYILGLQELETIHPDARNHGTYLHRVFELVMQDQSTDDFDSKLNRAIDITNHEDSFHLVYNEDEESRYALGILEDIARSTATVLKGDNPVQAESEEEAFELMLDQAVKIRGVIDRIDRLSDGSLGIVDYKSSKNTFDLQKFYNGLSPQLVTYIEALRSCKNLNDTDKIFGAMYLHMQEPKTDLANMKSIEKIPETVHKNLSYKGLFLEDEKAHLANGKYHLHDAVYSQKEVDLLLDYNKRLYRSAAKQIRKGNFLINPYSQDGKSVQGEQLKAITHFEADRHMPYARKLYQLPRKEKRQGFLALMQSKKEEEGNDL

SEQ ID NO: 72156 - protein, 281 aa, Streptococcus mutans
MSNNLLVLQSDFGLVDGAVSAMIGVALQEAPTLGIHNLTHEITPYNIFEASYRLFQTVEYWPQGTTFVSVVDPGVGSDRKSVVALTSRNQYIVTPDNGTLSYIKKHVGIKAVREISEIENRRRNTELSYTFHGRDVYAFTGAKLASDHISFEEVGPELAIESIVELPVVETVIEDNLVRGAVDILDVRFGSLWTSITREEFYTLKPEFNDRFEVTIYNNDMLVYQNQVTYGKSFAAVRIGQPIIYINSLYRVGVAINQGSFANAYNVGVGPQWRIEIKKLN

SEQ ID NO: 72157 - protein, 46 aa, Streptococcus mutans
MGQGKKSMAYSLTFQNPNDNLTDEEVAKYMEKITKALTEKIGAEVR

SEQ ID NO: 72158 - protein, 229 aa, Streptococcus mutans
MHFIQTYLPNAYELGLTGDAGWLTAILNTLYMTIVPFVIGGGVGLVFGLLLVLMGPEGVIENKVVCWIIDKVTSVFRAIPFVILIAVLAPLTMLLMQTNLGATAALVPLSFATFPFFARQVQVVFSELDRGVIEAAQASGATFWDIVKVYLSEGFPDLIRVSTVTLISLVGETAMAGAIGAGGLGNVAISYGYNRFNNDVTWVATLLILLLIFTIQFIGDTLTRKVSHR

SEQ ID NO: 72159 - protein, 371 aa, Streptococcus mutans
MRDYSPYPLLVDVCVTNRCNLSCSYCSAEAGPFASKKGEMSVEKLDSIFRELNLMGVPRVGVTGGEPFIRDDILDILKAFDKYHFAKVLNTNGNLITDSVAKELSKLHLDRICVTVDGSCSKVHDSQRGKGSFKKAIEGIKNLQRYNLPVSTLFTLGRHNVDDLINTIRLNDMLRIKYMSVMIICPTGRANNGSILADKKHWYPVFLDLTERLSRGEFKVKFKIVPPNESDVFWTHYFPLAFYNRLDLLESVWHQSLNFNSNKKREISCQAGVRACSINHKGDVYGCDLMNGIDELVAGNVKEKSFYEIWHNSSIFHKLRNITFDDISGKCAGCPLPWCGGGCRCSALELDGTLLGSDLACFYDEEESVLV

SEQ ID NO: 72160 - protein, 153 aa, Streptococcus mutans
MIAQEFKDFLKPLLKDALTPAEELAIFIDTHKTDHVMLLLANNGFSRVPVLTKDKKYVGTISMSDIVKYQKEEGVDNEKLAALDISYMTNGSYATVSPNADLTEVMHKLVDANFLPVVEADGTFLGIITRKTILKALNNLLHEFTNDYTLTKK

SEQ ID NO: 72161 - protein, 801 aa, Streptococcus mutans
MLVSYKWLKELVDIDVPSHELAEKMSTTGIEVEGVDVPAEGLSKLVVGHVLSCEDVPETHLHLCQVDTGEEESRQIVCGAPNITAGIKVIVALPGARIADNYKIKKGKIRGMESLGMICSLQELGLPDSIIPKEYSDGIQILPEDAVPGESIFPYLDLDDEIIELSITPNRADALSMRGVAHEVAAIYDKSVHFEDKVLTESDKKAADLIKVAIASDKVLTYKARVVENVTIKPSPQWLQNLLMNAGIRPINNVVDVTNYVLLYFGQPMHAFDLDKFEGKDILARQAKAGEKLVTLDGEARDLIEEDLVITVADKPVALAGVMGGAATEIDASSKNVVLEAAVFDGKSVRKTSSRLNLRSESSSRFEKGVNYADVVKALDFAAAMLTELADGTVLAGQVSAGAVPTDDIQVSTSLDYVNVRLGTDLVFSDIESVFARLGFGLSGNDEKFTVSVPRRRWDISIQADLVEEIARIYGYDKLPTTLPEAAGTVGELTKTQKLRRKIRNLAEGSGLSEIISYALTTPEKAVAFTPNPTKITELMWPMTVDRSALRQNIVSGMLDTIAYNVARKSNNLALYEIGKVFEQTADPKKDLPKEIDTFAFALTGLVTEKDFQTAATPVDFFYAKGVLEAILAKLEITVQFVATKEMANMHPGRTALIERDGQVIGYLGQVHPQTAKLYDIPETYVAEVNLNALEAALKSDLVFEDITKFPAVSRDIALLLSEKVSHQDILDAIAASGVKRLIKVKLFDVYAGEKLGVGKKSMAYSLTFQNPNDNLTDEEVAKYMEKITSALTEKVGAEVR

SEQ ID NO: 72162 - protein, 173 aa, Streptococcus mutans
MSQVEIRKVNQDELSLLQKIAIQTFRETFAFDNTAEQLQNFFDEAYTLSVLKLELDDKESETYFILMSGKAAGFLKVNWGSSQTEQVLEDAFEIQRLYILKAYQGLGLGKQLFEFALERAQISGLSWVWLGVWEKNVKAQLLYAKYGFEQFSKHSFFVGNKVDTDWLLKKSLS

SEQ ID NO: 72163 - protein, 347 aa, Streptococcus mutans
MDLQAQLEELRKSTQATLKEMSGNHSKELQDLRVKVLGKKGSLTELLKGLKDLPNELRPVVGKQVNEVRDVLTKAFEEQAKIVEAAKIQAQLESETLDVTLPGRQIHLGNRHVLSQISEEIEDIFLGMGFQVVDGYEVEQDYYNFERMNLPKDHPARDMQDTFYISEDILLRTHTSPVQARTLDKHDFSKGPLKMISPGRVFRRDTDDATHSHQFHQIEGLVVGKNISMGDLKGTLEMISKKMFGEDRKIRLRPSYFPFTEPSVEVDVSCFKCGGKGCNVCKKTGWIEILGAGMVHPSVLEMSGVNSEEYSGFAFGLGQERMAMLRYGINDIRGFYQGDSRFTEQFN

SEQ ID NO: 72164 - protein, 280 aa, Streptococcus mutans
MKLKKILGLLGLALAAAFVLTACGQKNDKNTLTVGVMTMTDSDKERWDKIEELLKKENIKLKFKEFTDYSQPNKALKNGEIDINSFQHYNFLNNWNKENKGDLVTVAETYISPINLFSGTENGKAKYSSAKEIPNGGQIAIPNDATNESRALYVLQDAGLIKLNVSGDELATVKNIKSNPKNLDIKEVDASQTARNLASVDAAVVNNSYAVPAKIDFKTSLYKEKVNEGSKQWINIIAAQKNWKKSKKAAAIKKLIKAYHTDAVKKVIKKTAKGVDEPVW

SEQ ID NO: 72165 - protein, 325 aa, Streptococcus mutans
MKEKIYEYKDDHNWFISQWSKVGSSTYYEEEAEETYSSIEQSLRGLLDEGNSFILTVIKINSNIALVRFILKMLNEEQQDNFKVSSHKGAILVTQGQQLLLVCLPKKGITITDFFEKEKKVSELGDTILIATRNEGKTKEFSQMFAQLGIKVENLNQYPDLPEVEETGLTFEENARLKAETISHLTGQMVLADDSGLKVDVLGGLPGIWSARFSGLDATDQSNNAKLLHELAMVFDIKDRSAQFHTTLVVAAPDKESLVVEADWSGYIDFAPKGNNGFGYDPLFLVGETGKTAAELSNHEKNIISHRGQAVKKLMEVFPAWQNAH

SEQ ID NO: 72166 - protein, 264 aa, Streptococcus mutans
MDNRPIGFLDSGVGGLTVVRELMRQLPHEEVIYIGDSARAPYGPRPAKQIKTYTWELVNFLLTKKVKMIVFACNTATAVVWEEVKEKLDIPVLGVILPGSSAAIKSTISGQIGIIGTPMTIKSNIYEQKIRDLSPQMKVRSLACPKFVPIVESNKMNSSVAKKIVYESLSPLVGKIDTLVLGCTHYPLLRPIIQNVMGPDVELIDSGAECVRDISVLLNYFDLNRSRTSKVLHHRFYTTASVASFKEIASDWLPLAIEVEHVTL

SEQ ID NO: 72167 - protein, 833 aa, Streptococcus mutans
MVYYNHKAIENKWQKFWEDNHTFKTGTASSKPKFYALDMFPYPSGAGLHVGHPEGYTATDILSRFKRAQGYNVLHPMGWDAFGLPAEQYAMDTGHDPADFTAQNIATFKRQIKSLGFSYDWDREINTTDPNYYKWTQWIFTKLYEKGLAYEAEVPVNWVEELGTAIANEEVLPDGTSERGGYPVVRKPMRQWMLKITAYAERLLEDLEDLDWPESIKDMQRNWIGKSTGANVTFKVKDTDEEFTVFTTRPDTLFGATYAVLAPEHDLVDIITTAGQAQAVADYKHQASLKSDLARTDLAKEKTGVWTGAYAINPVNGKEIPIWIADYVLASYGTGAIMAVPAHDERDWEFAKQFNLDIIPVLEGGNVAEAAYTDDGLHINSGFLNGLDKAAAIDKMVTWLETEGVGNKKVTYRLRDWLFSRQRYWGEPIPIIHWEDGTSTALPENELPLVLPVTKDIKPSGTGESPLANLTDWLEVTREDGVKGRRETNTMPQWAGSSWYFLRYIDPHNDQKLADEDLLKQWLPVDVYVGGAEHAVLHLLYARFWHKFLYDLGVVPTKEPFQKLFNQGMILGTSYRDHRGALVATDKVEKRDGSFFNIETDEELEQAPAKMSKSLKNVVNPDDVVEQYGADTLRVYEMFMGPLDASIAWSEEGLEGSRKFLDRVYRLITTKEIAAKNNGHLDKVYNEVVKTVTEHLEAMRFNTAISQLMIFVNAANKEEQLFLDYAKGFIQLLAPFAPHLAEELWQFLTQSGQSITYVAWPSYDESKLVEDEIEIVLQIKGKVRAKVVVSKDSSREDLEKIALANDKIQAEVAGKDIVKVIAVPNKLVNIVIK

SEQ ID NO: 72168 - protein, 1178 aa, Streptococcus mutans
MFLKEIEMQGFKSFADKTKVEFDRGVTAVVGPNGSGKSNITESLRWALGESSAKSLRGGKMPDVIFAGTENRKPLNYAQVTVILDNSDAFIKDAQEEIRIERHIYRNGDSDYLIDGKKVRLRDIHDLFMDTGLGRDSFSIISQGRVEEIFNSKPEERRSIFEEAAGVLKYKTRKKETQSKLTQTQDNLDRLDDIIYELETQIKPLERQAKTAKEFLVLETERKEKQLDLLVYQILHHKEALVKNQAELEKVKQNLAAYYQERDLLETKNQTLKEKRHQLSRQMDQKQADLLEMTRLISDYERQIERIHLEVSQKTEKKQSTQKSLEQLSEQKASLKTELAQKEVDLEQLEEDLKQKNQEIKNVETELSRFATDPDHIIESLREDFVRLMQKEADTSNQLAVLKAEMDSRKQESESKTAEIKQVQADLEKAKDREQRESANFETAKTKVQELLKDYQKTAQLVQNLEAAYAEQQEAMFQLLDDVKDKKARQSSLKSILKSHSNFYAGVRSVLQQADKIKGIVGAVSEHLTFDKKYQTALEIALGASSQNIIVEDEAAAKRSIDFLKKNHQGRATFLPLTTIKPRRLSESNQSLLTSSQGFLGLARDLVSFEPRLQTIFGNLLGVTAIFDTVGHANQAARQLRYQVRLVTLDGTEIRPGGSFSGGTSRQNNTTFIKPELDHLTQELALLEEKQVEQERIVEKTKQDLEVKKADLLELREKGNQARLAEQKAEMEYQQSESHLQELVLLYTQLKQTNQADLNRDLEKDQALLQEKLYKIADDKEKLNQEIAQIKEDKDSIQQKTAALSQRLSSLQLSERDLANTQKFERTNLKRLAEELAELEQNEAGMMQLLDSQEEDLDEKRLPSLKRQLANAQARKTESDQELVRYRFELEDCEAQLEEVETNLLKTNQKNEEFIRQQTQLEAKRDHLSNQLRRFANNLAEDYQLSLDDAKQEAGPIENLEAAQAHLSQLEKQIKGLGPVNLDAIGQYDEVSERLHFLNSQKDDLVHAKELLLNTIHDMDDEVKARFKTTFEAIRDSFKTTFTQMFGGGSADLLLTEGDLLMTGVEISVQPPGKKIQSLNLMSGGEKALSALALLFAIIRVKTIPFVILDEVEAALDEANVKRFGDYLNRFDKSSQFIVVTHRKGTMSAADSIYGVTMQESGVSKIISVKLKEVEKIS

SEQ ID NO: 72169 - protein, 178 aa, Streptococcus mutans
MDSFDKGWFVLQTYSGYENKVKENLLQRAQTYNMLDNILRVEIPTQTVNVEKNGKTKEVEENRFPGYVLVEMVMTDEAWFVVRNTPNVTGFVGSHGNRSKPTPLLEEEIRSILLSMGQTVDIIDTNIKEGDVVQIIDGAFVGQEGRVVEIENNKVKIMINMFGAETQAELELYQIAEL

SEQ ID NO: 72170 - protein, 400 aa, Streptococcus mutans
MITGHYTDKLKVEDNSDLSELVNNVNDLSEVFRLTHENLAQEKNRLTSILSYMTDGVLATDRSGKITVINDMAQKQLNVTREQALECNILDILDDDSYTYNDLITKTPEIVLTRRDEYDEFITLRIRFALNRRESGFISGLIAVLHDATEQEKEERERRLFVSNVSHELRTPLTSVKSYLEALDDGALTESVAPSFIKVSLDETNRMMRMITDLLSLSRIDNQTSHLDVELTNFTAFMNYILDRFDQIQSQQSTNKVYEIIRDYPDKSVWIEIDTDKMTQVIDNILNNAIKYSPDGGKVTITMQTTDTQLILSISDQGLGIPKKDLPLIFDRFYRVDKARSRAQGGTGLGLAIAKEIVKQHKGFIWANSEEGEGSTFTIVLPYENDNDAIDEWEEDEDES

SEQ ID NO: 72171 - protein, 218 aa, Streptococcus mutans
MIEGWHLFAEAQANNADIINIFVLECYASRVSEFPNVVLVSEDILKDLSASKTPQGIVAEIAFPKQVIPQQFFGKYLLLEDVQDPGNVGTIIRTADAAAFDAVFVSEKTADIYNSKTLRSMQGSHFHLPIYRVNLLSLVNDLKNADVTTIATTLSDHSCDYKSLKKVENFALIMGNEGQGITSEMTEQADVLTHITMPGRAESLNVAAAAAIFIFSLI

SEQ ID NO: 72172 - protein, 235 aa, Streptococcus mutans
MKKILIVDDEKPISDIIKFNLAKEGYDTITAFDGREALSKYEEENPDLIILDLMLPELDGLEVAKEVRKNSHVPIIMLSAKDSEFDKVIGLEIGADDYVTKPFSNRELLARVKAHLRRTENIESAVAEENASGIPEIIIGDLQILPDAFVAKKRGTEVELTHREFELLHHLATHTGQVMTREHLLETVWGYDYFGDVRTVDVTVRRLREKIEDTPSRPEYILTRRGVGYYMKSYD

SEQ ID NO: 72173 - protein, 542 aa, Streptococcus mutans
MAKDIKFSADARSSMVRGVDILADTVKVTLGPKGRNVVLEKSFGSPLITNDGVTIAKEIELEDHFENMGAKLVSEVASKTNDIAGDGTTTATVLTQAIVREGLKNVTAGANPIGIRRGIETAVATAVDELKAIAQPVSGKEAIAQVAAVSSRSEKVGEYVSEAMEKVGNDGVITIEESRGMETELDVVEGMQFDRGYLSQYMVTDNEKMVADLENPYLLITDKKISNIQDVLPLLEEVLKTNRPLLIIADDVDGEALPTLVLNKIRGTFNVVAVKAPGFGDRRKAMLEDIAVLTGGTVITEDLGLELKDTTIDALGQAARVTVDKDSTVIVEGSGGKEAVANRVNLIKSQIETATSDFDREKLQERLAKLSGGVAVIKVGAATETELKEMKLRIEDALNATRAAVEEGIVAGGGTALINVIEKVAALDLTDDAATGRNLVLRALEEPVRQIAKNAGYEGSVIIDKLKNSSAGTGFNAANGEWVDMIDAGIIDPVKVTRSALQNAASVASLILTTEAVVADHPAPEAPAAAPAMDPSMMGGMM

SEQ ID NO: 72174 - protein, 310 aa, Streptococcus mutans
MKKIYKRLLFSGLALSMLFFLSGCVQMKNGKPTGEGWVYKFFAAPMGSVIQYLANNLGLGFGFAIIIVTVIVRLLILPLGLSQVRKMTYQSEKMAYLKPVFDPIQERMKNAKTQEEKMAAQTELMQAQRHYGMSMFGGLGCLPLLIQMPFFSALYISTRYTKGIASASFLGIKLGSPNMIITVIIGILYLVQSWVSTLSVPEAQRQQTRNMMFMMPIMMVMISIGAPAGGALYWLVSGIFGLIQQLITNHIIKPKLRKQIDEEFKKNPPKPFKSNARKDITPQANNDKKLITSKKQKSNRNAGKQRHHKQ

SEQ ID NO: 72175 - protein, 423 aa, Streptococcus mutans
MDRIIIEGGNTQLKGEVVIEGAKNAVLPLLAAAILPTEGQTLLKNVPILSDVFTMNNVVRGLNVAVDFDEERNQILVDATGDILDVAPYEYVSQMRASIVVLGPILARNGHAKVSMPGGCTIGSRPIDLHLKGLEAMGAKIQQTGGDITATADRLKGANIYMDFPSVGATQNLMMAATLADGTTIIENAAREPEIVDLANLLNKMGARVIGAGTETLTIIGVDKMHGTDHSVVQDRIEAGTFMVAAAMTNGNVLVKNAVWEHNRPLISKLREMGVQVTEEERGIRVISDVTKLRPVTVKTMPHPGFPTDMQAQFTALMAVVKGESTMIETVFENRFQHLEEMRRMGLTSEILRDTAMIHGGEQLQGAQVMSTDLRASAALILTGMVADGKTTVGKLNHLDRGYYQFHEKLTKLGATISRVNGE

SEQ ID NO: 72176 - protein, 440 aa, Streptococcus mutans
MNSYKYLKYSQYAKQALIFINFLAVTYYVFVYLFASKYIVAKNLSHVLLDKLDIVPIAPENIFFTTLFFFAIFLIVMFYRESILNKKEEINDWLIVAEIVLMILTFISLQFSYNGLFLLVFADIFYSYANFYNVKEQKYWLLFIILGFSMLLISNFDLLSLVMRLPSLDVYISFFPSGSRLIVMFIKNFLYSLNIIVFLISLVAYIMYSVAENHKIEEELRMAARANIELNDYVSLAEKIAEDKERKRIAREIHDTLGHALTGISAGIDAVTVLVDFDPNHAKSQLKNVSDVVREGIQDVRRSLEKMRPGALEKGSLKEALLKMIADYEKLSKLQVSLHYDWDNIDLDITKEDIIFRVIQETITNSLRHGHARHVSIDMLNEDFYIIKIKDDGIGCEDFKLGYGLTQMQERLAIIGGYADFESDDGFQTMVRIPKKKGEE

SEQ ID NO: 72177 - protein, 314 aa, Streptococcus mutans
MKSLACLFVVLIISSLFFYYKEEPVFPRQTKIGATYMTMNNDFYKYLNAEVEKNVNEQHDLLYTRDPALSIKKQVEQIRFFIKERVDVIIINPVDGNSKLLINSLKRARKQGIKVIAVDSQFKDNSAINTTIVSDNYKAGVLCAQEMIRKQKGAKILLLEHRNALSATSRIQGFLDTIKTHKDYQVVARIDSLGQTEIAMPKVKKLIENGLTFDTVMALNDRAAIGALAAVKGEKLPTNPYIYGIDGSPDMKNLLSATSEVQATVAQSPYTMGQEVTKASLKLSKNQTYPKRIVVPVELITKKTIGKYDLTGWQ

SEQ ID NO: 72178 - protein, 208 aa, Streptococcus mutans
MIFTYNKEHVGDVLMVIVKDSKGAKLNCERKGKVTRIFLEKNKETVAWNIFAVSNLLDLNGNGQVFLTDEELAVLNAELAKEGFEEKLENNAAAKFVVGEIVEMVAHPDSDHLNICQVKIAEDKTVQIVAGAPNARVGLKTIVALPGAMMPSGGLIFPGNLRGEKSFGMLCSPRELALPKAPQKRGIIELSTDAVIGQAFDAGKHWKG

SEQ ID NO: 72179 - protein, 443 aa, Streptococcus mutans
MSKTIHFIGIKGSGMSALALLLHQMGYKVQGSDVDKYYFTQHGLEKAGIPILPFAESNITNDMEIIAGNAFRKDNNIEVAYALENGYHFKRYHEFLGEFMNQFTSLGVAGAHGKTSTTGLLAHVLKNITDTSYLIGDGTGRGLANSQYFVFESDEYERHFMPYHPEYSIITNIDFDHPDYFTGVDDVFAAFNDYAKQVKKGLFVYGEDPYLRKLTSSAPIYYYGFKDNDDFVAYDIMRSTNGSDFKVRHGQNELGSFHVPAFGRHNVLNATAVIANLYIAGVEMDLVRQHLKTFSGVKRRFSEKLINDVTIIDDFAHHPTEIIATLDAARQKYPSKEIVAIFQPHTFTRTIALLDEFAQALNEADSVYLAQIYGSAREVDHGDVKVEDLADKIVKPAKVITVDNVSPLLDHHNAVYVFMGAGDIQLYERSFEELLSNLTKNTR

SEQ ID NO: 72180 - protein, 256 aa, Streptococcus mutans
MSDVSRILKEARSQSRLTTLDYAEQIFDDFMELHGDRHFADDGAIVGGIGLLDGQAVTVIGVQKGKNLQDNLNRNFGQPNPEGYRKALRLMKQAEKFKRPVVTFINTAGAYPGIGAEERGQGEAIARNLLEMSDLKVPIIAIIIGEGGSGGALALAVADKVWMLEHTMYAVLSPEGFASILWKDGSRSIEAAELMKITAGELLKMEVVDKVIPEHGYFSSEIIQMLKTNLIEELKNLDQYPLNDLLEKRYQRFRKY

SEQ ID NO: 72181 - protein, 288 aa, Streptococcus mutans
MALFERKNKYIRINPQRSMKKTKERETPEVPDELFAKCPACKHMIYQKDLGLEKICPKCFYNFRISAKERLAITVDGDSFQEMFTGIKSKDPLNFPAYQEKLAATQSKTGLDEAVVTGTAEFTGQKAALAIMDSNFIMASMGTVVGEKITRLFEYAREERLPVVIFTASGGARMQEGIMSLMQMAKISAAVKRHSNAGLFYLTVLTDPTTGGVTASFAMEGDIILAEPQTLIGFAGRRVIETTVRETLPEGFQKAEFLLEHGFVDAIVKRTELKKTIAKLLAFHGGSK

SEQ ID NO: 72182 - protein, 451 aa, Streptococcus mutans
MIANRGEIAVRIIRAARELGIVTVAVYSEADKESLHTLLADEAVCVGPAKSTDSYLNMNAILSAAIVTGAEAIHPGFGFLSENSKFATMCEEMRIKFIGPSASVMDKMGDKINARSEMLKAKVPVIPGSDGEVFTAQEALEIAQDIGYPVMLKASAGGGGKGIRKVDKKEDLTAAFESASQEALSAFGNGAMYLEKVIYPARHIEVQILGDSFGNIIHLGERDCSLQRNNQKVLEESPSIAIGKTLRGKMGDAAVRAAKAVAYENAGTIEFLLDEASGQFYFMEMNTRVQVEHPVTEFVTGIDIVKEQIKIAAGQELTYQQKDIVISGHAIECRINAENPKFNFAPSPGKVEDLFLPSGGVGLRVDSAMYNNYTIPPYYDSMIAKIIVHGENRFDALMKMQRALYEFEVTGVVTNAEFQLDLISNPNVIAGDYDTSFLMETFLPAYANDKE

SEQ ID NO: 72183 - protein, 140 aa, Streptococcus mutans
MIDISKIREALPHRYPILLVDRVLEVSDDEIVAIKNVTINEPFFNGHFPQYPVMPGVLIMEALAQTAGVLELSKKENTGKLVFYAGMDKVKFKKQVVPGDQLVMTAKFVKRRGTIAVVEAKAEVDGKLAASGTLTFAIGN

SEQ ID NO: 72184 - protein, 162 aa, Streptococcus mutans
MNISEIKDLMAQFDTSSLREFSYKNGTDELSFSKNRQGSISSVQTVPVPAANSVSTVASVDAEAVPAISKNEESTVAAPVAETAEGEIVESPLVGVAYLASAPDKPAFISVGDSVKKGQTLLIIEAMKVMNEVPAPKDGVVTEILVANEEVVEFGKGLVRIK

SEQ ID NO: 72185 - protein, 317 aa, Streptococcus mutans
MDFEKIEAAYNLLLDNCQRLETQLHTHLYDALIEQNACYLGAEGADDFIKENNKKLRQLNLSKEEWRRSFQFIFIKATQSQQLQSNHQFTPDSIGFIILYLLEGLTNKSQLDIIEIGSGTGNLAETIVNNSSKSIDYMGIEVDDLLIDLSASIADVLDSSVHFVQEDAVRPQILKESDIIISDLPVGFYPNDKIAQRYQVAAKLGHTYAHHLLMEQSLKYLKKEGLAIFLAPVDLLTSEQSPLLKKWLQNNVTILAVISLPEAIFKQKSNIKSIFVLKKQSQQSLESFVYPLTDLQDPEVLRRFMKNFKKWKEDNVF

SEQ ID NO: 72186 - protein, 410 aa, Streptococcus mutans
MTLKRVVVTGYGVTSPIGHTPEDFWNSLHDGKIGIKPITKFDASEIPVFNAGEIQDFPFDKYFVKKDKNRMDTYSLYAIYAAMEAIENAALDMAQEIRDRVGVIVSSGIGGLQELEDQIIRMHERGMKRIKPMFIPKALSNMGAGNIALKIGAQGVCKSITTACASANDAIGEAFREIKYGFHDVILAGGSEASITKIGIGGFNALTALSTTEDPARSAIPFDKDRNGFVMGEGAAVLILESLEHAQKRGARILAEVVGYGSNCDAYHMTTPTPDGSGAAKAIKLAINEAGISPEEVNYVNAHGTSTQANEKGESKAIVAVLGKDVPVSSTKSFTGHLLGAAGGVEAIATIEAIRNHFVPMTAGTKELSEDIEANVVYGQGQEAVIKYAISNTFGFGGHNAVLAFKRWED

SEQ ID NO: 72187 - protein, 244 aa, Streptococcus mutans
MEIKNKNVFITGSTRGIGLAIAHKFAQAGANIVLNGRSEISQDLVAEFKDYGVKVATISGDVSHFEDAKRMVDEATEALGSVDILVNNAGITNDKLMLKMTEEDFERVLKINLTGSFNMTKAVLKPMTKARQGAIINMSSVVGLAGNVGQANYAASKAGLIGFTKAVAREVAARNIRVNAIAPGFIESDMTERIPNKMKDAMLNQIPMKTFGKTENVAEVAMFLAQQDYLTGQVIAIDGGMTMQ

SEQ ID NO: 72188 - protein, 306 aa, Streptococcus mutans
MTKTAFLFAGQGAQKLGMASDLYEIYPVVKETFKTAHSILGYDVRALIDNDEEKLNQTRYAQPAILTTSVAIYRLLKEKGYQPDIVAGLSLGEYSALVAAGAISFEDALALVAKRGEFMETAAPAGVGKMVAVMNTDPRLIEEICQKASSKGIVSPANYNTPTQIVIGGEVAAVDYAVELLKGAGSKRLISLKVSGPFHTALLKSASQKLAQALENIKFSDFMLPLVGNTKAEIMKEQEIKPLLARQVKEPVRFYESIAVMQKFGVNNYVEIGPGKVLSGFVKKIDKSAKISAVEDLASLQAFLDN

SEQ ID NO: 72189 - protein, 321 aa, Streptococcus mutans
MKTRITELLDIEYPIFQGGMAWVADGDLAGAVSKAGGLGIIGGGNAPKEVVKANIDKIKAVTNKPFGVNIMLLSPFADDIVDLVIEEGVKVVTTGAGNPGKYIERFHEAGITVIPVVPSVALARRMEKLGADAVIAEGMEAGGHIGKLTTMTLVRQVVDAVNIPVIGAGGVADGRGAAAVFMLGAEAIQVGTRFAVAKESNAHANFKKKILKAKDIDTVISASIVGHPVRAIKNKLSSAYATAEKEFLRGEKSQEDIEVLGAGALRNAVVDGDVDNGSVMAGQIAGFVTKEETCEEILKDLYYGAAKVIKAEAARWADVEK

SEQ ID NO: 72190 - protein, 313 aa, Streptococcus mutans
MVQKLGRKIIAEAVQNKAQDIYIIPKKESYELYMRIGNERRFIDVYDHHFMANLISHFKFVAGMNVGEKRRSQLGSCDYSYDEGKVISLRLSSVGDYRGYESLVIRLLFSGRHDLKFWFNSMDLILNEIKGRGLYLFSGPVGSGKTSLMYQLVKLRFETKQVITIEDPVEIKQDNMLQLQLNESIDMTYDNLIKLSLRHRPDILIIGEIRDKETARAVIRASLTGAMVFSTIHAKSIPGVYARMLELGTSSEELQNALRGIVYQRLIGGGGIIDFAKGDYQNHSAKKWNKQIYDLFTAGYITEGEAQAEEIED

SEQ ID NO: 72191 - protein, 74 aa, Streptococcus mutans
MAVFEKVQEIIVEELGKDTDEVKLETTFDELDADSLDVFQVISEIEDEFDIQIESEDGLNTVGDLVAFVEEKTK

SEQ ID NO: 72192 - protein, 325 aa, Streptococcus mutans
MTFAKISQAAYYVPSQVVTNDDLSKIMDTSDEWITSRTGIRERRISQSEDTSDLASQVAKELLKKASLKAKEIDFIIVATITPDAMMPSTAACVQAKIGAVNAFAFDLTAACSGFIFALSAAEKMIKSGQYQKGLVIGAEVLSKIIDWSDRTTAVLFGDGAGGVLLEADSSEHFLFESIHSDGSRGESLTSGEHAVSSPFSQVDKKDNCFLKMDGRAIFDFAIRDVSKSISMLIRKSDMPVEAIDYFLLHQANIRILDKMAKKIGADREKFPANMMKYGNTSAASIPILLAECVENGTIELNGSHTVLLSGFGGGLTWGSLIVKI

SEQ ID NO: 72193 - protein, 1209 aa, Streptococcus mutans
MVDVNRFKSMQITLASPNKVRSWSYGEVKKPETINYRTLKPEREGLFDEVIFGPTKDWECACGKYKRIRYKGIVCDRCGVEVTRAKVRRERMGHIELKAPVSHIWYFKGIPSRMGLTLDMSPRALEEVIYFAAYVVIDPKETPLEAKSLLTEREYREKLQEYGSGSFIAKMGAEAIQDLLKRVDLDAEIAELKEELKTASGQKRVKAIRRLDVLDAFQKSGNKPEWMVLNILPVIPPDLRPMLQLDGGRFATSDLNDLYRRVINRNNRLARLLELNAPGIIVQNEKRMLQEAVDALIDNGRRGRPITGPGSRPLKSLSQMLKGKQGRFRQNLLGKRVDFSGRSVIAVGPTLKMYQCGVPREMAIELFKPFVMREIVDRDIVQNVKAAKRLIERGDDRIWDILEEVIKEHPVLLNRAPTLHRLGIQAFEPVLIDGKALRLHPLACEAYNADFDGDQMAIHVPLSEEAQAEARLLMLAAEHILNPKDGKPVVTPSQDMVLGNYYLTMEGADREGEGMVFKDRDEAVMAYRNGYVHLHSRVGIAVDSMPNKPWTDEQRHKIMITTVGKILFNDIMPADLPYLQEPNNANLTDKTPDKYFLAPGSNIQEAIKNLDLNIPFKKKNLGNIIAEIFKRFRTTETSAFLDRLKDLGYYHSTLAGLTVGIADIPVIDNKQEIIDAAHHRVEEISKAFRRGLMTDDDRYEAVTATWRDAKEQLEARLVETQDAKNPIVMMMDSGARGNISNFSQLAGMRGLMAAPNGRIMELPILSNFREGLSVLEMFFSTHGARKGMTDTALKTADSGYLTRRLVDVAQDVIIREDDCGTDRGLTITAITDGKEVTETLEERLVGRYTKKSVRHPETGEIIASPDTLITEDMAHYIAEAGVSEVTIRSVFTCNTRHGVCRHCYGINLATGDAVEVGEAVGTIAAQSIGEPGTQLTMRTFHTGGVASNADITQGLPRIQEIFEARNPKGEAVITEVKGQVTDIEEDAATRTKKVYVKGATGEGEYTVPFTARMKVQVGDEVHRGAPLTEGSIQPKHLLEVRDTLSVETYLLAEVQKVYRSQGVEIGDKHVEVMVRQMLRKVRVMDPGDTGLLPGILMDIADFTDANRDIVIAGGIPATSRPVLMGITKASLETNSFLSAASFQETTRVLTDAAIRGKKDHLLGLKENVIIGKIIPAGTGMARYRNLEPLAVNEIEVIEDSEEQEDTVEE

SEQ ID NO: 72194 - protein, 263 aa, Streptococcus mutans
MDFKEILYNVDNGVATLTLNRPEVSNGFNIPICEEILKAIDIAKKDDTVQILLINANGKVFSVGGDLVEMQRAVDADDVQSLVRIAELVNKISFALKRLPKPVVMSTDGAVAGAAANIAVAADFCIASDKTRFIQAFVNVGLAPDAGGLFLLTRAIGITRATQLAMTGEALNAEKALEYGIVYKVCEPEKLEKITDRVITRLKRGSVNSYKAIKEMVWQSSFAGWQEYEDLELELQKSLAFTNDFKEGVRAYTEKRRPKFTGK

SEQ ID NO: 72195 - protein, 452 aa, Streptococcus mutans
MKVVKFGGSSLASATQLEKVLNIIKSDEERRFVVVSAPGKRDAQDTKVTDALIRYYRSYTSDKDVTADQSWIINRYRAIIDELGLGQNILEKITKAIVDLANLPIEDNDFLYDTFLAAGEDNNAKLIAEYFRKNGLSARYIHPKKAGIIVTSEPGNARIIPSSYDKLEELRDSDEVLVIPGFFGVTIDNQICTFSRGGSDITGSIVAAGVKADLYENFTDVDGIFAAHPGVVHKPHSISELTYREMRELAYAGFSVLHDEALIPAYRGKIPLVIKNTNNPEHPGTKIVLAHTGATIPVVGIAGDDDFVSINLSKYLMNREIGFGRKILQVLEELNIRWEHIPTGIDDMSIILRGRELTPIKEQEIISQLTRKLEVDEVEIERNLSIIMIVGENMKNHIGVTAKAAEAFSKKHINLEMISQGSSEVSVMFVIKTEQEKQAVRALYQTFFMKDE

SEQ ID NO: 72196 - protein, 1187 aa, Streptococcus mutans
MAGHEVQYGKHRTRRSFSRIKEVLDLPNLIEIQTDSFKDFLDTGLKEVFEDVLPISNFTDTMELEFVGYELKEPKYTLEEARAHDAHYSAPIFVTFRLINKETGEIKTQEVFFGDFPLMTEMGTFIINGAERIIVSQLVRSPGVYFNDKVDKNGKIGYGSTVIPNRGAWLELETDSKDIAYTRIDRTRKIPFTTLVRALGFSGDDEIIDIFGDSELVRNTIEKDIHKNPNDSRTDEALKEIYERLRPGEPKTADSSRSLLIARFFDARRYDLAAVGRYKINKKLNVKTRLLNQVIAENLVDPETGEILVEAGTEMTRSVIDSIADYLDGDLNKIVYTPNEYAVLTEPVVLQKFKVMAPNDPDRTVTVIGNASPDDKVRHLTPADILAEMSYFLNLAEGLGKVDDIDHLGNRRIRAVGELLANQFRIGLARMERNVRERMSVQDNEVLTPQQIINIRPVTAAIKEFFGSSQLSQFMDQHNPLSELSHKRRLSALGPGGLTRDRAGYEVRDVHYTHYGRMCPIETPEGPNIGLINNLSSYGHLNKYGFIQTPYRKVDRETGKVTNEIEWLTADEEDEFTVAQANSKLNEDGSFAEEIVMGRHQGNNQEFPASSVEYMDVSPKQVVAVATACIPFLENDDSNRALMGANMQRQAVPLIDPKAPFVGTGMEYQAAHDSGAAIIAQHNGKVVYSDADKIEVRREDGSLDVYHVTKFRRSNSGTAYNQRTLVRVGDSVEKGDFIADGPSMEKGEMALGQNPVVAYMTWEGYNFEDAVIMSERLVKDDVYTSVHLEEFESETRDTKLGPEEITREIPNVGEDALKDLDEMGIIRIGAEVKEGDILVGKVTPKGEKDLSAEERLLHAIFGDKSREVRDTSLRVPHGGDGVVCDVKIFTRANGDELQSGVNMLVRVYIAQKRKIKVGDKMAGRHGNKGVVSRIVPVEDMPYLPDGTPVDIMLNPLGVPSRMNIGQVMELHLGMAARNLGIHIATPVFDGATSDDLWETVKEAGMDSDAKTVLYDGRTGEPFDNRVSVGVMYMIKLHHMVDDKLHARSVGPYSTITQQPLGGKAQFGGQRFGEMEVWALEAYGASNVLQEILTYKSDDVTGRLKAYEAITKGKPIPKPGVPESFRVLVKELQSLGLDMRVLDKDDKEVDLRDLDEGEDDDVMHVDDLEKAREKQALEAAEFANSDEK

SEQ ID NO: 72197 - protein, 418 aa, Streptococcus mutans
MTIFEELKARGLVFQTTDEEALKKSLDDGQVSFYTGYDPTADSLHLGHLVPILVMRHLQLAGHKPYALVGGATGLIGDPSFKDDERSLQTKETVKNWVQSIRSQLERFIDFKHGDNKAQMVNNYDWMGKITFIDFLRDVGKYFTVNYMMSKESVKKRIETGISYTEFAYQIMQGYDFYVLNQEHAVTLQVGGSDQWGNMTAGTELIRRKANKTAHVITVPLITDATGKKFGKSEGNAVWLDADKTSPYEMYQFWLNVMDADAIRFLKIFTFLSLDEIEDIRVKFEAAPHERLAQKILAKEVVTFVHGQTAYQEAVKITEQLFAGHIKSLSAKELKQGLSNVPNYAVKSNDNHNIVELLVTAGIVNSKRQAREDLQNGAIYINGERIQDLTYNLSQQDKIDNELTVIRRGKKKYFVLTY

SEQ ID NO: 72198 - protein, 122 aa, Streptococcus mutans
  MISC_FEATURE (26)..(26): X=any amino acid
  MISC_FEATURE (106)..(106): X=any amino acid
MLSAFIPSLLSYPAMLLAEQLVHQRXVHSGPLVLGADPLKFPSPATDRDRTVSRRSEPSSRAALMGEQPNPWDRLQPQDATSRHRGAKPPRRCELLGEISLLSPGXLLSVERWPFHTVPPDH

SEQ ID NO: 72199 - protein, 150 aa, Streptococcus mutans
  MISC_FEATURE (73)..(73): X=any amino acid
  MISC_FEATURE (108)..(108): X=any amino acid
MGSFRPVAGNLHLHRTKISPSLSLRQCPNHYAFRAGRNLPDKEFRYLRTVIVTAAVYWGFNSHLRQTSKRSSXTFQHRAGVTPYTSSYDFAESCVFDKQLLGPFHCGXTYRQRPFLPKLRGHFAEFLNESFARSPEATRPRLPVSVCRYG

SEQ ID NO: 72200 - protein, 131 aa, Streptococcus mutans
  MISC_FEATURE (20)..(20): X=any amino acid
  MISC_FEATURE (104)..(104): X=any amino acid
  MISC_FEATURE (110)..(110): X=any amino acid
  MISC_FEATURE (124)..(124): X=any amino acid
GISTCCPSDTPIGLSLGPDXPRADEPSPGILSLTVDRILTCLTLTHTGILTSMHSSAPCGTPSAHIERSPTIPKGSTASVNCFSPGTFRRRVTRLVSYYALFEXIAASSXHPSCLCNPTSFSTXQLFGDLS

SEQ ID NO: 72201 - protein, 883 aa, Streptococcus mutans
MSTQLSPKYNPAEVEADRYQKWLDADVFKPSGDQKAKPYSIVIPPPNVTGKLHLGHAWDTTLPDIIIRQKRMQGFDTLWLPGMDHAGIATQAKVEARLAEDGISRYDLGREKFLDKVWEWKDEYAATIKEQWGKMGISVDYSRERFTLDEGLSKAVRKVFVELYKKGWIYRGEFIINWDPKARTALSDIEVIHKDVEGAFYHMNYMLEDGSRALEVATTRPETMFGDTAVAVNPNDDRYKDLIGQNVILPIVNKLIPIVADEHADPEFGTGVVKITPAHDPNDFLVGQRHNLPQVNVMNDDGTMNELAGEFAGMDRFEARKATVKKLEEIGALVEIEKMTHSVGHSERTGVPIEPRLSTQWFVKMDQLAKNAIANQDTDDKVDFYPPRFNDTFLQWMENVHDWVISRQLWWGHQIPAWYNADGDMYVGEEAPEGDGWKQDEDVLDTWFSSALWPFSTMGWPDTDSEDFKRYFPTSTLVTGYDIIFFWVSRMIFQSLEFTGCRPFQNVLIHGLIRDEQGRKMSKSLGNGIDPMDVVDKYGADALRWFLSNGSAPGQDVRFSYEKMDAAWNFINKIWNISRYILMNNEGLSLDQASKNVVLVTNGKAGNVTDRWILHNLNETIAKVTENFDKFEFGVAGHILYNFIWDEFADWYVELTKEVLYSEDEAEKVITRSVLLYTLDKILRLLHPIMPFVTEEIFGQYADGSIVTAAYPTVNPAFENQTAHSGVESLKDLIRAVRNARAEVNVAPSKPITILVKTSDSNLEDFFKANVNYIKRFTNPETLEISSAIATPELAMSAVITGAEIFLPLADLLNVEEELARLNKELAKWQKELDIVAKKLSNDRFVQNAKPEIVQKERDKQIDYQTKYDATVERIKEMEKLIK

SEQ ID NO: 72202 - protein, 128 aa, Streptococcus mutans
MAYRKLGRTSSQRKAMFRDLTTDLLINESIVTTEARAKEIRKTVEKMITLGKRGNLHARRQAAAFVRNEIASESYDEAKDEYTSTTALQKLFSEIAPRYAERNGGYTRILKTEPRRGDAAPMAIIELV

SEQ ID NO: 72203 - protein, 312 aa, Streptococcus mutans
MIEFEKPIITKIDENKDYGRFVIEPLERGYGTTLGNSLRRVLLSSLPGAAVTSIKIDGVLHEFDTIPGVREDVMQIILNIKGLAVKSYVEEEKIVELDVEGPAEITAGDILTDSDIEIVNPDHYLFTIAEGANLKATMTVATNRGYVPAEKNKRDDAPVGTLAIDSIYTPVKKVNYQVEPARVGSNDNFDKLTIEIMTNGTIIPEDALGLSARVLIEHLNLFTDLTEVAKATDVMKETEQVSDEKVLDRTIEELDLSVRSYNCLKRAGINTVYDLTEKSESEMMKVRNLGRKSLEEVKVKLADLGLGLKNDK

SEQ ID NO: 72204 - protein, 153 aa, Streptococcus mutans
MTKTITLIYISLSGNTKSFVARLTNYLQSKTDLTIHSVNVKDLIKDQADYFALSDYFVAFLPTYLEGGNGLDSGDIEILTTPLREFIAFADNYRYCYGIVGSGNKNFNNQYCLTAKQYAEQFGFPVLDNFELRGLADDVERIGDKILALYAAN

SEQ ID NO: 72205 - protein, 127 aa, Streptococcus mutans
MAKPTRKRRVKKNIESGIAHIHATFNNTIVMITDVHGNALAWSSAGALGFKGSRKSTPFAAQMAAEAAAKSAQEHGLKTVEVTVKGPGSGRESAIRALAAAGLEVTSIRDVTPVPHNGARPPKRRRV

SEQ ID NO: 72206 - protein, 121 aa, Streptococcus mutans
MARIAGVDIPNDKRVVVSLTYVYGIGLPTSKKILAAAGVSEDIRVKDLTSDQEDAIRREVDAIKVEGDLRREVNLNIKRLMEIGSYRGIRHRRGLPVRGQNTKNNARTRKGKAVAIAGKKK

SEQ ID NO: 72207 - protein, 38 aa, Streptococcus mutans
MKVRPSVKPICEYCKVIRRNGRVMVICPTNPKHKQRQG

SEQ ID NO: 72208 - protein, 72 aa, Streptococcus mutans
MAKEDVIEIEGKVVETMPNAMFTVELENGHQILATVSGKIRKNYIRILVGDKVTVEMSPYDLTRGRITYRFK

SEQ ID NO: 72209 - protein, 212 aa, Streptococcus mutans
MNLLIMGLPGAGKGTQAAKIVEKFGLAHISTGDMFRAAMANQTEMGTLAKSFIDKGELVPDEVTNGIVKERLSESDITKKGFLLDGYPRTIEQAHALDEILSKLNLKLDGVINIDVDPACLVERLSGRIINRKTGETYHKVFNPPADYNEDDYYQREDDKPETVKRRLDVNIAQGHPIIEYYRNKGLVYDIEGNQDINLVFETIAKVLANLS

SEQ ID NO: 72210 - protein, 434 aa, Streptococcus mutans
MFFRLLKDALKVKSVRKKIFFTIFIIFVFRVGTHITVPGINAKSLEQLSDLPFLNMLNLVSGNAMSNFSVFSMGVSPYITASIVVQLLQMDILPKFVEWGKQGEVGRRKLNQATRYISLVLAFFQSIGITAGFSALSSVSLVKTPNVQTFLLIGAILTAGSVVVTWLGDQISDKGFGNGVSMIIFAGIISSIPGTIKSVYEDYFVNIRSSEMKNSLIFVGLLILASLIIIFFTTFVQQAEYKIPIQYTKLAQGAPTNSYLPLKINPAGVIPVIFASSITTIPSTILPFFQHGRDIPWMTTLQEWLSYTNPTGMAVYAVLIVLFSFFYTFVQVNPEKTAENLQKNASYIPSVRPGRETEEYLSSLLKKLATIGSIFLAFVALSPIVAQQQFDLSSSVALGGTSLLIVISTGIEGMKQLEGYLLKRKYVGFMNVTE

SEQ ID NO: 72211 - protein, 146 aa, Streptococcus mutans
MKLHELKPAQGSRKTRNRVGRGSSSGNGKTAGRGQKGQKARSGGNIRSGFEGGQTPLFRRLPKRGFTNINAKEYALVNLDQLNVFEDGAEVTPVVLVETGIVKAEKSGIKILGNGELTKKLTVKAAKFSKSAEAAIIAKGGSIEVI

SEQ ID NO: 72212 - protein, 164 aa, Streptococcus mutans
MAFKDNAVELEERVVAINRVTKVVKGGRRLRFAALVVVGDRNGRVGFGTGKAQEVPEAIRKAVEAAKKNMIEVPMVGTTIPHEVRSEFGGARVLLKPAVEGAGVAAGGAVRAVVELAGVADITSKSLGSNTPINIVRATVEGLKQLKRAEEVASLRGVSVSDLA

SEQ ID NO: 72213 - protein, 118 aa, Streptococcus mutans
MISKPDKNKIRQKRHRRVRGKLSGTADRPRLNIFRSNTGIYAQVIDDVAGVTLASASTLDKEVSKGTKTEQAVVVGKLVAERAVAKGISEVVFDRGGYLYHGRVKALADAARENGLKF

SEQ ID NO: 72214 - protein, 178 aa, Streptococcus mutans
MSRIGNKVITLPAGVEVTNKDNVVTVKGPKGELTREFPKVIEIKIEGTEVTLHRPNDSKEMKTIHGTARANLNNMVIGVSEGFKKELEMRGVGYRAQLQGKKLVLSVGKSHPDEVEAPEGITFEVPTATAIVVNGINKEVVGQTAAYIRGLRVPEPYKGKGIRYAGEYVRRKEGKTGK

SEQ ID NO: 72215 - protein, 132 aa, Streptococcus mutans
MVMTDPIADFLTRIRNANQANHSVVEAPASNIKRGIAEILKCEGFVKDVEVIEDDKQGIIRIFLKYGQNGERVITGLKRISKPGLRVYTKREDVPKVLNGLGIAIISTSEGLLTDREARQKNIGGEVITYVW

SEQ ID NO: 72216 - protein, 180 aa, Streptococcus mutans
MANRLKEKYLNEVVPALTEKFNYTSVMAVPKVDKIVLNMGVGDAVSNAKNLEKAAAELALISGQKPLITKAKKSIAGFRLREGVAIGAKVTLRGQRMYEFLDKLVTVSLPRVRDFHGVPTKSFDGRGNYTLGVKEQLIFPEINFDNVDKVRGLDIVIVTTANTDEESRELLTGLGMPFAK

SEQ ID NO: 72217 - protein, 101 aa, Streptococcus mutans
MFVKKGDKVRVIAGKDKGVEAVVLKAFPKINKVVVEGVAIVKKHQKPNNENPQGAIVEKEAPIHVSNVQVLDKNGVAGRVGYKVVDGKKVRYNKKSGEVLD

SEQ ID NO: 72218 - protein, 122 aa, Streptococcus mutans
MIQSESRLKVADNSGAREILTIKVLGGSGRKFANIGDVIVASVKQATPGGAVKKGDVVKAVIVRTKSGARRADGSYIKFDENAAVIIRDDKTPRGTRIFGPVARELREGNFMKIVSLAPEVL

SEQ ID NO: 72219 - protein, 86 aa, Streptococcus mutans
MERKQRRTLVGRVVSDKMDKTITVVVETKRNHPVYGKRINYSKKYKAHDENNIAKAGDIVRIMETRPLSATKRFRLVEVVEEAVII

SEQ ID NO: 72220 - protein, 137 aa, Streptococcus mutans
MLVPKRVKHRREFRGKMRGEAKGGKEVAFGEYGLQATTSHWITNRQIEAARIAMTRYMKRGGKVWIKIFPHKSYTAKAIGVRMGSGKGAPEGWVAPVKRGKIMFEIADVPEEVAREALRLASHKLPVKTKFVKREAE

SEQ ID NO: 72221 - protein, 217 aa, Streptococcus mutans
MGQKVHPIGMRVGIIRDWDAKWYAEKEYADYLHEDLAIRKFIQKELADAAVSTIEIERAVNKVNVSLHTAKPGMVIGKGGANVDALRAQLNKLTGKQVHINIVEIKSPDLDAHLVGENIARQLEQRVAFRRAQKQAIQRTMRAGAKGIKTQVSGRLNGADIARSEGYSEGTVPLHTLRADIDYAWEEADTTYGKLGVKVWIYRGEILPARKNTKGGK

SEQ ID NO: 72222 - protein, 114 aa, Streptococcus mutans
MAEITSAKAMARTVRVSPRKTRLVLDLIRGKNVADAIAILKFTPNKAARIVEKTLNSAVANAENNFGLEKANLVVSETFANEGPTMKRFRPRAKGSASPINKRTTHVTVVVEEK

SEQ ID NO: 72223 - protein, 208 aa, Streptococcus mutans
MTKGILGKKVGMTQIFTESGEFIPVTVIEATPNVVLQVKTVETDGYEAVQVGFDDKREVLSNKPAKGHVAKADTAPKRFIREFKNIEGLEVGQEITVEQFEAGDVVDVTGTTKGKGFQGAIKRHGQSRGPMAHGSRYHRRPGSMGPVAPNRVFKGKNLAGRMGGNRVTVQNLEVVQVVPEKNVILIKGNVPGAKKSLIIIKSAVKAAK

SEQ ID NO: 72224 - protein, 103 aa, Streptococcus mutans
MANKKIRIRLKAYEHRKTMDTAADKIVETATRTGASVAGPVPLPTERSLYTVIRATHKYKDSREQFEMRTHKRLIDIVNPTQKTVDALMKLDLPSGVNVEIKL

SEQ ID NO: 72225 - protein, 380 aa, Streptococcus mutans
MTHSPIQYRLIKKEKHTGARLGEIITPHGVFPTPMFMPVGTQATVKTQSPEELKEMKAGIILANTYHLWLRPGDDLVARAGGLHKFMNWDQPILTDSGGFQVYSLAEKRNITEEGVTFKNHLNGARMFLTPEKAISIQNNLGSDIMMSFDECPQFYQPYDYVKASIERTSRWAERGLKAHRRPQDQGLFGIVQGAGFEDLRRQSTADLVSMDFPGYSIGGLAVGESHEEMNAVLDFTTPLLPENKPRYLMGVGAPDSLIDGVIRGVDMFDCVLPTRIARNGTCMTSRGRLVVKNAQYAEDFTPLDHDCDCYTCQNYTRAYIRHLIKADETFGLRLTSYHNLYFLLNLMEKIRQAIMDDNILEFREDFIEKYGYGRSERNF

SEQ ID NO: 72226 - protein, 795 aa, Streptococcus mutans
METKVRKKMYKKGKFWVVATITTAMLTGIGLSSVQADEANSTQVSSELAERSQVQENTTASSSAAENQDKTEVKETPSTNPAAATVENTDQTTKVITDNAAVESKASKTKDQAATVTKTSASTPEVGQTNEKAKATKEADITTPKNTIDEYGLTEQARKIATEAGINLSSLTQKQVEALNKVKLTSDAQTGHQMTYQEFDKIAQTLIAQDERYAIPYFNAKAIKNMKAATTRDAQTGQIADLDVWDSWPVQDAKTGEVINWNGYQLVVAMMGIPNTNDNHIYLLYNKYGDNNFDHWKNAGSIFGYNETPLTQEWSGSATVNEDGSLQLFYTKVDTSDKNSNNQRLATATVNLGFDDQDVRILSVENDKVLTPEGGDGYHYQSYQQWRSTFTGADNIAMRDPHVIEDENGDRYLVFEASTGTENYQGEDQIYNFTNYGGSSAYNVKSLFRFLDDQDMYNRASWANAAIGILKLKGDKKTPEVDQFYTPLLSSTMVSDELERPNVVKLGDKYYLFTASRLNHGSNNDAWNKANEVVGDNVVMLGYVSDQLTNGYKPLNNSGVVLTASVPADWRTATYSYYAVPVAGSSDTLLMTAYMTNRNEVAGKGKNSTWAPSFLIQVLPDGTTKVLAEMTQQGDWIWDESSRTTDTVGTLDTAYLPGENDGYIDWNVIGGYGLKPHTPGQYQPTVPSTPIHTDDIISFEVSFDGHLVIKPVKVNNDSAGRIDQSRNSGGSLNVAFNVYAGGNISVKPSQKSINNTKETKKAHHVSTEKKQKKGNSFFAALLALFSAFCVSIGFK

SEQ ID NO: 72227 - protein, 813 aa, Streptococcus mutans
MTDYSLKMQEVFRLAQFEAARFESSYLESWHVLLAMVEIDSSVAGLSFAEFEADVRFEDYQAAAILAIGKKPKSSSNDIMLLEQSHALKRTLAEAAAISQVTHAKEVGTEHVLFAMLLNPNLLATRILELVGFHAKDDGESIRLLDLRKVIERYAGFSKEDIKAIFEMRKPKKVKNSSSFSDLMKPPSVTGELADFTRDLTELARQGRLEPVIGREQEISRMVQILSRKTKNNPVLVGDAGVGKTALAYGLAQRIVDSAVPFELADMKVLELDMMSVVAGTRFRGDFEERMNQIIADIEADGHIVLFIDELHTIMGSGSGIDSTLDAANILKPALARGSLRTIGATTQEEYQKHIEKDAALSRRFAKVTIEEPSEEEAYQILLGLKKSYETYHHVIISDAAVMAAVKGAHRYLSGKNLPDSAIDLLDEASATVQGLVKKKAPAYLTDLDHALITNDYQLAKRLLKKEKKPLLKKRAEVKEEDILATLSKLSGIPVKKLTQADSKKYLNLERELHKRVIGQDDAVSSISRAIRRNQSGIRVGKRPIGSFMFLGPTGVGKTELAKALAEVLFDDESALIRFDMSEYMEKFAASRLNGAPPGYVGYEEGGELTEKVRNKPYSVLLFDEVEKAHPDIFNILLQVLDDGVLTDSRGRKVDFSNTIIIMTSNLGATALRDDKTVGFGAKSFSQDYKAMESRILEELKKVYRPEFINRIDEKVVFHNLGQEDIRHIVKIMVAPLIAHLADQGITLKFQPSALKHLALAGYDAEMGARPLRRTLQTEVEDKLAELILSGKLASGQTLKIGIQKEKLKFDIV

SEQ ID NO: 72228 - protein, 449 aa, Streptococcus mutans
MTHIKFDYSKVLGKFLASHELDYIQMQVTAADEALRKGTGPGAEMTGWLNLPQNYDKEEFARIKKAAEKIKSDSEVLVVIGIGGSYLGARAAIDFLNSSFVNLENKEERKAPQILYAGNSISSNYLADLVDYVADKDFSVNVISKSGTTTEPAIAFRVFKDLLVKKYGQEEANQRIYATTDRVKGAVKVEADANGWETFVVPDSVGGRFTVLTAVGLLPIAASGADLDQLMAGAEAARQDYSSAELSENEAYQYAAIRNILYRKGYVTEVLANYEPSLQYFSEWWKQLAGESEGKDQKGIYPTSANFSTDLHSLGQFIQEGNRNLFETVIRVEKARKNILVPEAAEDLDGLAYLQGKDVDFVNKKATDGVLLAHTDGGVPNTFLTIPEQDEFTLGYVIYFFELAIGLSGYLNGVNPFDQPGVEAYKKNMFALLGKPGFEELGAELNARL

SEQ ID NO: 72229 - protein, 162 aa, Streptococcus mutans
MNFMIIFGLFALAAYAVQIILGLKQIKHFNSIYRQLRRLGRVAIGRRSGKIRAGTIVMFAIDKDGKVLAAKKMQGITMAARFKDMSDYIGQDIHYFDSYNPLIRKENKLLRIAIEDARAVFLKTEAGIYKESPKQTPLLDIRLQTKFLLSRFKLKKRHETKI

SEQ ID NO: 72230 - protein, 348 aa, Streptococcus mutans
MANITAALVKELREKTGAGVMDAKKALVEVEGDMGKAIELLREKGMAKAAKKADRVAAEGLTGVYVDGNVAAIVEVNAETDFVAKNAQFVDLVNETAKVIAEGKPANNEEALALKTAAGDTLEAAYVNATATIGEKISFRRFALVEKADKQVFGAYQHNGGKIGVITVLEGENTDEALAKQLAMHVAAMNPSVLSYKELSEEFIHDELAQMNHKIEQDNESRAMVDKPALPLLKYGSKGQLTDEVVAQAEEDIKAELKAEGKPEKIWDKIIPGKMARFFLDNTKVDQQYTLLSQVYIMDDSKTVEAYMESVNGKVISFVRFEVGEGIEKAANDFENEVAATMAAALNK

SEQ ID NO: 72231 - protein, 261 aa, Streptococcus mutans
MAVISMKQLLEAGVHFGHQTRRWNPKMAKYIFTERNGIHVIDLQQTVKLADQAYDFVRDAAANDAVILFVGTKKQASEAIKEEAERAGQYYINHRWLGGTLTNWDTIQKRIARLKEIKQMEVDGIFDVLPKKEVALLNKQRARLEKFLGGIEDMPRIPDIIYIVDPHKEQIAVKEAKKLGIPVVAMVDTNADPDDIDVIIPANDDAIRAVKLITSKLADAVIEGRQGEDSVEAVEAELAAGETQADSIEEIVEVVEGANEN

SEQ ID NO: 72232 - protein, 237 aa, Streptococcus mutans
MKKYEIIFKKLEEDILKGHYQMGDYLPPEMELSQTYASSRDTVRKALQLLTKAGFIKTVQGRGSQIIKRERINFPVSQLTSYQELVKQLQMNVKTNVIAIDKLIVDEKLTKLTGFENKGLVWRITRQRVIDGVASILDTDYLDKALIPHMTREIAEHSIYDYLENQLKLDIAYAQKIITIDQVSQKDKILLDLDSENHVVSVKSKVYLSNQQQFQFTESRHKLEKFRFVDFARRHRD

SEQ ID NO: 72233 - protein, 232 aa, Streptococcus mutans
MTAQKMSAQEIIAFIGNAEKKTNVKVTFEGALAAALPENVVKLGNVLFGDWKDIEPLLANLTENKDYVVEQDGRNSAVPLLDKRNINARIEPGAIIRDQVTIEDNAVVMMGAIINIGAEIGEGTMIDMGAILGGRATVGKNSHIGAGAVLAGVIEPASADPVRIGDNVLVGANAVIIEGVQVGSGSVVAAGAIVTQDVPDNVVVAGVPARVIKEIDEKTQQKTALEDALRNL

SEQ ID NO: 72234 - protein, 178 aa, Streptococcus mutans
MMKKDYRTQVIEDLKKQDKAKKVLRDEQLLEELIQLEAYQKAHVIATYLAFPFEFDTSLLIEQAQRDNKSIVVPKTYPQGKMIFVVYDEADLQITKFGLKEPRSEEALEKSAIDLIHVPGLAFNNEGYRIGFGAGYYDQYLADFQGDTVSTIYSFQKFTFEPSFFDIPVKEVLVSGDL

SEQ ID NO: 72235 - protein, 306 aa, Streptococcus mutans
MPSKKVRKAVIPAAGLGTRFLPATKALAKEMLPIVDKPTIQFIVEEALKSGIEDILVVTGKSKRSIEDHFDSNFELEYNLEQKGKTDLLKLVNDTTAINLHFIRQSHPRGLGDAVLQAKAFVGNEPFVVMLGDDLMDITDDKAIPLTRQLMNDYEETHASTIAVMEVPHEDVSAYGVIAPQGEGVSGLYSVDTFVEKPAPKEAPSNLAIIGRYLLTPEIFTILETQEPGAGNEVQLTDAIDTLNKTQRVFAREFKGKRYDVGDKFGFMKTSIDYALKHPQVKEDLKAYIIELGKKLDQKSTQKNSD

SEQ ID NO: 72236 - protein, 339 aa, Streptococcus mutans
MIRQKIAVLGPGSWGTALSQVLNDNGHEVRIWGNIPEQLDEINEHHTNKRYFKDVVLDEKIKAYHDLEDALKDIDAVLFVVPTKVTRLVAKQVSQILDHKAVVMHASKGLEPGTHERLSVILEEEIPNHLRSDIVVVSGPSHAEETIVRDITLITAASKDLEAAKYVQKLFSNNYFRLYTNPDVIGVETAGALKNIIAVGAGALHGMGYGDNAKAAVITRGLAEITRLGVKLGADPLTYSGLSGVGDLIVTGTSIYSRNWRAGDALGRGEKLEDIERNMGMVIEGISTTKVAYELSRELNVYMPITCAIYQSIYEGKNIKEAITSMMSNEFRAENEWSK

SEQ ID NO: 72237 - protein, 740 aa, Streptococcus mutans
MAKDANLTGQEVIDICSMYMNKADIAFVQKALDYATECHSGQFRKSGEPYIIHPIQVAGILADLHLDAITVSCGFLHDVIEDTEATLDHLEAKFGSDVKNIVDGVTKLGKVEYKSHEEQLAENHRKMLMAMSKDIRVILVKLADRLHNMRTLRHLRKDKQERISRETMEIYAPLAHRLGISRIKWELEDLAFRYLNEVEFYKISHLMNEKRREREALVDDIVDKIKAYTAEQGLHGEIYGRPKHIYSIYRKMRDKKKRFDQIYDLIAIRCILDTQSDVYAMLGYIHELWRPMPGRFKDYIANPKANGYQSIHTTVYGPKGPIEVQIRTHEMHQVAEYGVAAHWAYKKGIKGKVNSQESALGMNWIKELVELQDASNGNAVDFVDSVKEDIFAERIYVFTPNGAVQELPKDSGPIDFAYAIHTQVGEKATGAKVNGRMVPLTAKLKTGDVVEIITNSNSFGPSRDWINIVKTNKARNKIRQFFKNQDKELSITKGRDLLVDYFQEQGYVANKYLDRKHIEAVLNRLNYRNEGALYAAVGFGELSPVTVFNKLTEKERREQERAKAKAEAEELMKGGEVKHDNKKEVLKVKSEGGVIVQGSSGLLMRIAKCCNPVPGDPIEGYITKGRGVAIHRADCHNIKSQEGYEERLIDVEWEDDYSTKEYMAEIDIYGLNRAGLLNDVLQILSNQTKNISTVNAQPTKDMKFANIHVTFGIPNLTVLTAVVDKIKVIPDVYSVKRTNG

SEQ ID NO: 72238 - protein, 709 aa, Streptococcus mutans
MVVIAVMPAAGLMVSIGNSLALIDPKSTLLVTVANIIAQIGWGVINNLHILFAVAIGGSWAKERAGGAFAAALAFILINLITGNFYGISLEMIADKTSYVHNIFGGKMHVADYFINVLGQPALNMGVFVGIISGFVGATAYNKYYNFRKLPDVLSFFNGKRFVPFVVIVRSTIVALILSVFWPIVQSGINGFGMWIASSQHTAPFLAPFLYGTLERLLLPFGLHHMLTIPMNYTQLGGTYVVLTGAQAGKHVLGQDPLWLAWVQDLIHLKGAGHMSQYHHLLTSVTPARFKVGQMIGSSGILMGLTLAMYRNVDPDKKEKYKGMFLSAAVAVFLTGVTEPLEYMFMFAALPLYLVYAVVQGLAFASADLIHLRVHSFGNIEFLTRTPMAIKAGLAMDIVNFIVVSVVFGVAMYFITNFMIKKFNLATSGRNGNYDTGDDASDETASNSNAGTANANSQIVKIINLLGGKENISDVDACMTRLRITVTDVAKVGDEAAWKKAGAMGLIVKGNGVQAVYGPKADVLKSDIQDLLDSGVDIPKTDVTALEEDKTADVSFKGVTEEIATVADGQVLPITQVHDPVFSQKMMGDGFAVEPENGNIYSPVAGLVTSVFPTKHALGLLTDDGLEVLVHVGLDTVALNGAPFSAKVKDGQRVALGDLLLVADLEAIKSADRETTVIVAFTNTAELKSVTLEKTGQQAAKTVVAKVEL

SEQ ID NO: 72239 - protein, 247 aa, Streptococcus mutans
MQQYFVNGKADKLVTITDKDTIKHMFNVMRLTEDDEVVLVFDDGIKRLARVTNVQEHTFEIVDELSDNVELPVQVVIASGFPKGDKLEFLAQKTTELGAHALWAFPADWSVVKWDSKKLLKKADKLTKIAQGAAEQSKRNIIPQVKFFEKKSDFLTQLAVFNKIFVAYEESAKIGESAALARELAQLSADQQILFIFGPEGGLSPAEIAAFEKAGAVKVGLGPRIMRTETAPLFALSSISYVLELAK

SEQ ID NO: 72240 - protein, 466 aa, Streptococcus mutans
MADCWNSNERRITIAKKKTTFVCQECGYNSPKYLGRCPNCSSWSSFVEEVEVAEVKNARVSLTGEKTRPVKLNQVTSSQATRVKTNMEEFNRVLGGGVVPGSLVLIGGDPGIGKSTLLLQVSTQLANKGTVFYVSGEESAEQIKLRSERLGDIDNEFYLYAETNMQSIRAEIEKIQPDFLIIDSIQTVMSPEISSVQGSVSQVREVTAELMQLAKTNNIATFIVGHVTKEGTLAGPRMLEHMVDTVLYFEGERQHTFRILRAVKNRFGSTNEIGIFEMRSGGLVEVLNPSQVFLEERLDGATGSAIVVTMEGTRPILAEVQALVTPTVFGNAKRTTTGLDFNRVSLIMAVLEKRCGLLLQNQDAYLKSAGGVRLDEPAIDLAVAVAIASSYKEKPTTPQECYIGEIGLTGEIRRVNRIEQRLNEASKLGFTKIFVPKNSLSGLTIPQGIQVIGVTTVSEVLKKVFN

SEQ ID NO: 72241 - protein, 421 aa, Streptococcus mutans
MPNNLALRMRPRDISEVIGQKHLVGQGKIISRMVTANRLSSMILYGPPGIGKTSIASAIAGTTKFAFRTFNATTDTKKRLQEIAEEAKFSGGLVLLLDEIHRLDKTKQDFLLPLLENGQIIMIGATTENPFFSVTPAIRSRVQIFELEPLSNEDIKKAMQAALTDTERGFDFEVKLDDDALDFIAQATNGDLRSAYNSLDLAIMSTQPDDNGSRHITLDTVENSLQRSYITMDKDGDGHYDVLSALQKSIRGSDVNASLHYAARLIEAGDLPSLARRLTIIAYEDIGLANPDAQIHTVTALEAAQKIGFPEARILIANVVIDLALSPKSNSAYVAMDKAIADLHKSGTIPIPRHLRDGHYAGSKELGNAQDYLYPHAYPEKWVKQQYLPDKLKGANYFTANETGKYERALGANKDKIDKLS

SEQ ID NO: 72242 - protein, 485 aa, Streptococcus mutans
MTNKIRVRYAPSPTGLLHIGNARTALFNYLYARHHGGDFIIRIEDTDRKRHVEDGERSQLENLRWLGMDWDESPETHENYRQSERLALYKKYIDQLLAEGKAYKSYVTEEELAAERERQEAAGETPRYINEFLGMSADEKAAYIAKRQAAGIVPTVRLKVNEAGIYKWHDMVKGDIEFEGGNIGGDWVIQKKDGYPTYNFAVVVDDHDMQISHVIRGDDHIANTPKQLMVYEALGWEAPAFAHMTLIINSETGKKLSKRDTNTLQFIEDYRQKGYLPEAVFNFIALLGWNPGGENEIFSRQELIELFDENRLSKSPAAFDQKKLDWMNNEYIKNADFDTIFALAKPYLESAGRLTDKAKKLVELYQPQMKSIDEIVPLTDLFFEEFPELSEEEKEFMAGETVPIVLQAFKAKLEAMSDEDFKSENIFPQIKAVQKETGIKGKNLFMPIRIAVSGEMHGPELPDTIFLLGKEKSIQHLEDMLEKLK

SEQ ID NO: 72243 - protein, 460 aa, Streptococcus mutans
MTTKNHKLWGGRFEAGLAQWVEEFGASISFDQKLAEFDLKGSIAHVTMLGEKGIISQEDAATIKAGLEDLLEEYKAGQLKFDVSNEDIHMNMESLLTAKIGPVAGKLHTARSRNDQVATDMHLYLKAKLDEVIEKLANLRTVLVDLADKHVHTIMPGYTHLQHAQPISFGHHLMAYYNMFTRDSERFIFNVKHTDLSPLGAAALAGTTFPIDREMTAQLMGFAEPYSNSLDAVSDRDFILEFLSNASILMMHMSRMCEEVISWCSHEYQFVTLSDTFSTGSSIMPQKKNPDMAELIRGKSGRVYANLFGLLTVMKALPLAYNKDLQEDKEGMFDTAETITVALDILAGMLSSMIVNDKHMAESTQKDFSNATELADYLASKGMPFRQAHEIVGKLILECSKNGHYLQDVPLERYQTISDLIEEDVYETLKSHTAVERRHSLGGTGFEQVKWQIAEAKKAL

SEQ ID NO: 72244 - protein, 119 aa, Streptococcus mutans
MKKAYRVKSDKDFQAIFTEGRSVANRKFVVYSLEKDQSHYRVGLSVGKRLGNAVVRNAIKRKLRHVLMELGPYLGTQDFVVIARKGVEELDYSTMKKNLVHVLKLAKLYQEGSIREKEI

SEQ ID NO: 72245 - protein, 271 aa, Streptococcus mutans
MKKKYRIIGLAVAALLFLSACGRSQVTSHSSDAWEKFVYFFAETIRFLSINGRIGIGIILFTFLIRTILLPLFNLQLKSGQKMQELQPELKALQTKYPGKDRESRMRMAEESQELYKKYGVNPYASLFPLLIQMPVLWALYQALTRVEFLKTGSFLWMDIGNKDPYFILPVLAAIFTFLSSWLTNKAAKERNGMMITMNIILPIFILLIGFNLASGVALYWVVSNAYQVFQILLLNNPFKIIAERQRLEDEARELEAKKRRAKKKAHKKRK

SEQ ID NO: 72246 - protein, 299 aa, Streptococcus mutans
MHKRGQTAIIFHFQRGAVLKSAPLSHSVNHNILFSICYNDSMLQIFDTHTHLNVEDFTGKEQEEINFAHELGVTKMNIVGFDQSTIKRALELAELYPELYATIGWHPTEAGSYMQEVEDMIVSHLHDPKVIALGEIGLDYHWMEDPKEVQIEVFKRQIQLSKDHDLPFVVHTRDALDDTYEIIKEAGVGPRGGIMHSYSGSLEMAERFIDLGMMISFSGVVTFKKALDVQEAAQHLPLDKILVETDAPYLAPVPKRGRKNHTAYTRYVVDKIAELRGLTIEEVAQATYDNAMRLFRLKD

SEQ ID NO: 72247 - protein, 190 aa, Streptococcus mutans
MTEKIKIQEVLVVEGKDDTVNLRRFYDVDTYETRGSAINDEDLERIEKLNNLRGVIVFTDPDYNGERIRKLIMTAVPTAKHAFLNRGEAVPKSKTKGRSLGVEHASFEDLQKALSGVLGNYDDENHFDISKSDLMRFGLLMGADSRKRREYIGEKLRIGYSNGKQLLKRLELFGITKAEVEEVMEKYQKR

SEQ ID NO: 72248 - protein, 291 aa, Streptococcus mutans
MKIADKTVTRAILERHGFTFKKLFGQNFLTDTNILQKIVDTAEIDKTVNVIEIGPGIGALTEFLAENAAEVMAFEIDDRLVPILADTLRDFDNIKVVNEDILKSDLQTRIKEFANPDLPIKVVANLPYYITTPILMHLIESKIPFAEFVVMMQKEVADRISAQPSTKAYGSLSIAVQYYMTAKIAFIVPRTVFVPAPNVDSAILKMTRREQPLVQVQDEDFFFCVGKAAFVHRRKTLWNNLTSHFGKSEEVKVKLEQALEAADIKPSIRGEELTITDFARLADALREVDLK

SEQ ID NO: 72249 - protein, 278 aa, Streptococcus mutans
MVTEFSLDILLKIIKLARSTYYYHLKQLDKSNKDHAIKAEIQAIFTEHKGNYGYRRMTLELRNRGFLVNHKKVQRLMKVLGLEARIRRKRKYSSYQGEVGKKADNLIQRQFEASKPMEKCYTDVTEFAIPASGQKLYLSPVLDGFNSEIIAYNLSTSPNLIQVKAMLEQAFTEKHYTNTILHSDQSWQYQHDFYHQFLENKGIQPSMSRKGNSPDNGMMESFFGILKSEMFYGYEKTFKSLKQLEQAIVDYIDYYNNKRIKVKLKGLSPVQYRTKSFT

SEQ ID NO: 72250 - protein, 326 aa, Streptococcus mutans
MRNQMKINQMKKDELFEGFYLIKSAELRKTRAGKDYLAFTFQDDSGEISGNLWDAQPYNVEEFTAGKVVFMRGRREVYNGTPQVNQISLRHPKDGEPNDPRDFKEKPPVDVEEVKDYLEQMLFKIENATWQRIVRALYRKYSKEFFSFPAAKTNHHAFEVGLAYHTATMVRLADSIGDIYEELDKSLLFAGIMLHDLAKVLELSGPDNTEYTIRGNLIGHIALIDEEITKVLSELSIDDTKEDVIVLRHVILSHHGLLEYGSPVRPKIMEAEIIHMIDNIDAEMMMMTTALSRVSEGEMTGRIFAMDNRSFYKPKTNHQNTKKDDY

SEQ ID NO: 72251 - protein, 137 aa, Streptococcus mutans
MPTINQLVRKPRKSKVEKSDSPALNIGYNSHKKVHTKLAAPQKRGVATRVGTMTPKKPNSALRKFARVRLSNLIEVTAYIPGIGHNLQEHSVVLIRGGRVKDLPGVRYHIVRGALDTAGVTDRKQGRSKYGTKKPKA

SEQ ID NO: 72252 - protein, 156 aa, Streptococcus mutans
MSRKNRAPKREVLPDPLYNSKLVTRLINRIMLDGKRGTAASIVYGAFEQIKEATGNDALEVFEQAMENIMPVLEVRARRVGGSNYQVPVEVRPERRTTLGLRWLVTASRTRGEHTMKDRLAKEILDASNNTGASVKKREDTHRMAEANRAFAHFRW

SEQ ID NO: 72253 - protein, 693 aa, Streptococcus mutans
MAREFSLEKTRNIGIMAHVDAGKTTTTERILYYTGKIHKIGETHEGASQMDWMEQEQERGITITSAATTAQWKDHRVNIIDTPGHVDFTIEVQRSLRVLDGAVTVLDAQSGVEPQTETVWRQATEYGVPRIVFANKMDKIGADFLYSVSTLHDRLQANAHPIQLPIGAEDDFEGIIDLVTMKAEIYTNDLGTDILIEDIPADYLDQAKEYREKLIEAVAETDEDLMMKYLEGEEITETELKAAIRKATINVEFFPVLAGSAFKNKGVQMMLDAVVDYLPSPLDIPPIKGVNPDTDEEEERPASDDEPFAALAFKIMTDPFVGRLTFFRVYSGILNSGSYVLNTSKGKRERIGRILQMHANSRQEIETVYAGDIAAAVGLKETTTGDSLTDEKAKVILESIEVPEPVIQLMVEPKSKADQDKMGIALQKLAEEDPTFRVETNVETGETVISGMGELHLDVLVDRMKREFKVEANVGAPQVSYRETFRQATQARGFFKRQSGGKGQFGDVWIEFTPNEEGKGFEFENAIVGGVVPREFVPAVEKGLIESMANGVLAGYPIVDVKAKLYDGSYHDVDSSETAFKIAASLALKEAAKTAKPVILEPMMLVTITVPEENLGDVMGHVTARRGRVDGMEAHGNSQIVRAFVPLAEMFGYATVLRSASQGRGTFMMVFDHYEDVPKSVQEEIIKKNAGEA

SEQ ID NO: 72254 - protein, 337 aa, Streptococcus mutans
MVVKVGINGFGRIGRLAFRRIQNVEGVEVTRINDLTDPNMLAHLLKYDSTQGRFDGNVEVKEGGFEVNGKFVKVSAERDPEQIDWAADGVEIVLEATGFFASKAAAEKHLHANGGAKKVVITAPGGNDIKTIVFNTNHDVLDGTETVISGASCTTNCLAPMAKALHDNFSIKEGLMTTIHAYTGDQMVLDGPHRKGDLRRARAAAANIVPNSTGAAKAIGLVIPELNGKLDGAAQRVPVPTGSVTELVAVLDKKVTVDEVNAAMKAAANESYGYTEDPIVSSDIVGMSFGSLFDATQTKVLDVDGKQLVKVVSWYDNEMSYTSQLVRTLEYFAKIAK

SEQ ID NO: 72255 - protein, 398 aa, Streptococcus mutans
MAKLTVKDVDLKGKKVLVRVDFNVPVKDGVITNDNRITAALPTIKYIIEHGGRAVLFSHLGRVKEEADKKGKSLAPVAADLAKKLVQEVVFPGVTRGEQLEAAINALKNGEVLLVENTRFEDVDGKKESKNDPELGKYWASLGDGIFVNDAFGTAHRAHASNVGISANVDKAVAGFLLENEIAYIQEAVDNPVRPFIAILGGSKVSDKIGVIENLLKKADKVLIGGGMTYTFLKAQGIEIGDSLVEEDKLDIAKDLLAKANGKLILPVDSKEANAFADYTEVKDTEGAAVDPGFLGLDIGPKSIAKFDDELTGAKTVVWNGPMGVFENPDFQAGTIGVMDAIVKQPGVKSIIGGGDSAAAAINLGRADKFSWISTGGGASMELLEGKVLPGLAALTEK

SEQ ID NO: 72256 - protein, 448 aa, Streptococcus mutans
MAITAADIRREVKEKNVTFLRLMFTDILGTMKNVEIPATDEQLDKVLSNKAMFDGSSIEGFVRINESDMYLYPDLNTWTVFPWGDENGAVAGLICDIYTAEGEPFAGDPRGNLKKALRHMESLGYKSFNLGPEPEFFLFKMDEFGNPTTEVNDKGGYFDLAPTDLADNTRREIVNVLTKMGFEVEASHHEVAIGQHEIDFKYADVLTACDKIQLFKLVVKTIARKHGLYATFMAKPKFGINGSGMHCNMSLFGSDGKNAFFDPQDPKGMQLSEVAYQFLGGLVKHAYSYTAIMNPTVNSYKRLVPGYEAPVYIAWAGRNRSPLIRVPASRGVSTRLELRSVDPTANPYLALAVLLESGLDGIENKIEAPAPVESNIYVMTVEERKEAGIADLPSTLHNALKALQEDEVVKAALGNHIYTSFLEAKRIEWSSYAAFVSQWEVDNYLDLY

SEQ ID NO: 72257 - protein, 1505 aa, Streptococcus mutans
MREVIKKAKQTTLWDPSFETDACGMGFVAQIDGIASHQLVDYALTMLERMNHRGGTGAEPDTGDGAGMLLAMPDEFFRLKAKEEEIDLPPLGDYAVAQLFLPQDKVAKTILEDSLISEIKRLGFHVLLSRDVPFNYDNCGPAAQEIMPSFVQLFIEKPTETNSGCAFEDSLFRLRRKLEKTFAADELFICSLSSKTIVYKGMLHAFQVRLFYPDLSDEMFKSHIALTHSRFSTNTFPSWDRAQPFRFLAHNGEINTLRGAENWMHSHQIEVYNEENSDSAKLENCLEYLYRHGRDIPQSLLMMVPEAWGKDAGLSKELTAFYEYASSFVAPWDGPAALVFTDGEMVGARLDRNGLRPSRYSRTKDNFLICSSESGVVDIAPSQVVEKGVLGPGNMMLIDTKKNLVLKNDEVKEHYSKQHPYQQWVQENVTLLDDFAAQEEIVNDYDVNQMWKIFGYTDETIRTVILPMSEKGEEPVISMGFDSPLAVLSKKPQSLFTYFKQQFAQVTNPPIDAIREQLVVSTTVFLGGDGDIRQDNADNCVKVRVDSPVLSSQDFAKLANLTDERYKATTLSTVYDLGDSDNNRLQYALEDLFKKADEAINQGSKIIILSDRGVTKGRIAIPILLAVSGLNNYMVVKGKASQFSIVVDTAEAFEVHHFATLVGFGATAIHPYGAYATLKAFDKTNDSFEKYRKAAEKGIVKVMSRMGISTVLGYKGAQLFEAIGLSADVVNQYFRGTATRIEGLSLKQIEKEYLERVDFAFGPRANDFLPSGGSYQYKTDGEYHLFNPRSIYNFQQSIRRGDYGLFKQYSTELDNEALKQPTTLRSLWEFHSKRPKVDLAEVEPAKEIVKRFKVGAMSFGSLSKEAHETIAQAMNTIGAKSNSGEGGENRKRFKPQVDGRNINSKIKQVASGRFGVNAEYLMSAEELQIKLAQGAKPGEGGQLPGQKVFPWIAEIRGATPGVRLISPPPHHDIYSIEDLAQLIYDLKAINPYAKINVKLVSSTGVGTIATGCVKAGADKVVISGYDGGTGASPRNSVRDAGLPWEMGLAEAHQTLSMNRLRQRMTLETDGKLMTGRDIAIATLLGAEEYSFASLALISVGCVMMRVCSLNTCPVGVATQNPELRKNFSGKPEHVINMMTFLAEELREYMAELGFRSVDEMVGHAEVLKSRFVAQGKAKSLNFSRVIGNSFPIDRKNEDPFAEERQWKELDGFAAAAIEKGISVTIENTINNVDRSVGSRMAGWMAERYGNDAVKEGLIKYHYTGIAGQSFASYLTQGLEYTLIGEANDYIAKSMSGGRLIVKPPHDAAYDVENSPIVGNVSLFGAVKGEAYFAGRAGERFCVRNSGAKVVVEGVGAHGCEYMTGGVAVILGTTGRNFAAGMSGGVAYVYDVHGDFAQKVNMEMVDLYQIGETRGDDILKDMIEKHYEYTESVKAKRLLDNWDEEVKRFIKVYPSDFHEINDIEYALSQKGMSGDELELRTFEVATGGDATAQERQALLASVTGGK

SEQ ID NO: 72258 - protein, 244 aa, Streptococcus mutans
MNILILDDEMLARQELTFLIQQSKELDHPDIFEAEDISSAEKILFRQQIDLIFLDISLSEENGFTLANQLEQLAHPPLVVFATAYDHYAVKAFESNAADYILKPFEQGRVDKALAKVKKIQHLSTIDETATTEKKGMELLTLTLADRSIVLKMPDIVAASIEDGELTVSTKNTSYTIKKTLNWFKTRAKTNYFLQIHRNTVVNLEMIQEIQPWFNHTLLLVMVNGEKFPVGRSYMKELNAHLTL

SEQ ID NO: 72259 - protein, 580 aa, Streptococcus mutans
MLMILLFQRLGIIMILAFLLVNNSYFRQLIEERSKREKLVLIIIFGIFVIISNMTGIEITSDKSLVERPILTTISHSDSLANTRTLVITTASLVGGPLVGTVVGFIGGVHRFFQGNFSGAFYIVSSALVGYISGRLGDQLKTNNLYPSTSQVIVISIIAESIQMLFVGFFTGWDLVKLIFIPMMLLNSLGSTLFLAILKTYLSNERQLRAVQTRDVLDLTQQTLPYLRQGLSQQSATKVCNIIKQHTNFDAVGLTDRTNVLAHIGVGQDHHIAGQAVKTDLSKSVILNGQPQIALDKTAIACPDQSCLLNSAIVVPLKINNETVGALKMYFSGDKKMTEVEENLALGLAQIFSGQLAIGIAEEQNKLANIAEIKALQSQINPHFFFNAINTISALIRLDANKARYALMQLSTFFRTSLQGGQDREISLEQEKAHVDAYMNLEKLRFPDKYQLDYHITVSTKMTLPPFGLQVLVENAVRHAFKERKKDNHICISITDQGEFYKVAVSDNGQGISPNMIDKLGQETVSESKGTGTALVNLNNRLNLLYGSASQLHFDSTDQGTTVWYEIPYQKGDKDEHFNS

SEQ ID NO: 72260 - protein, 560 aa, Streptococcus mutans
MANINLKPEEVGVYAIGGLGEIGKNTYGIEYQDEIIIVDAGIKFPEDDLLGIDYVIPDYSYIVDNVDRIKALVITHGHEDHIGGIPFLLKQASIPIYAGPLALALIRGKLEEHGLLRDAKMYEINHNTELTFKNLSVTFFRTTHSIPEPLGIVIHTPQGKVVCTGDFKFDWTPVGEPADIHRMAALGEDGVLCLLSDSTNAEIPTFTNSEKVVGQSIMNIIEGIHGRIIFASFASNIFRLQQAAEAAVKTGRKIAVFGRSMEKAIVNGIELGYIKVPKGTFIEPNEIKEYHASEIMIMCTGSQGESMAALSRIANGTHRQVQLQPGDTVIFSSSPIPGNTTSVNKLINTIQEAGVEVIHGKVNNIHTSGHGGQQEQKLMLRLIKPKFFMPVHGEYRMQKVHAGLAIDTGIPKDNIFIMENGDVLALTKDSARRAGHFNAQDIYVDGNGIGDIGTAVLRDRHDLSEDGVVLAVATVDFKTKMILAGPDILSRGFIYMRESGDLIRSSQRILFNAIRIALKNKEASIQSVNGAIVNALRPFLYEKTEREPIIIPMILTPDKS

SEQ ID NO: 72261 - protein, 447 aa, Streptococcus mutans
MSDYLSVSSLTKYLKLKFDRDPYLERVYLTGQVSNFRRRPNHQYFSLKDEKAVIQATMWSGIYRKLGFELEEGMKINVIGRVQLYEPSGSYSIIIEKAEPDGIGALAVQFEQLKKKLAEAGYFDDRHKQRLSQFVKKIGVVTSPSGAVIRDIITTVSRRFPGVDILLFPTKVQGEGAAQEVADNIRLANERTDLDLLIVGRGGGSIEDLWAFNEEIVVQAIFESHLPIISSVGHETDTTLADFAADRRAATPTAAAELATPVTKADLLAFLKERQMRSYQAVMRLIRQKDEQVKKLQRSVIFRQPERLYDAYVQKLDHLRTHLLTKVRQVYDVYDSKEHLLRQRLLSFNLSGCIQRYQAQLKQDQRLLLSHMSSQYDSKLARFEKAQDALLSLDTTRIVARGYAIVQKDNHIIQSTQQIKKGDRLHLEMKDGQVQVEVENVKQEENI

SEQ ID NO: 72262 - protein, 289 aa, Streptococcus mutans
MKDKIKSINQAIKHYYAQTHVSQDLIEAVLYSVDAGGKRIRPLLLLEILQGFGLVLTEAHYQVAASLEMIHTGSLVHDDLPAMDNDDYRRGQLTNHKKFGEATAILAGDSLFLDPFGLLAKADLRADIKIKLVAELSDAAGSYGMVGGQMLDIKGEHVQLNLDQLAQIHANKTGKLLTFPFVAAGIIAELSEKALARLRQVGELVGLAFQVRDDILDVTASFSELGKTPQKDIEADKSTYPSLLGLDKSYAILEDSLNQAQAIFQKLALEEQFNATGIETIIERLRLHA

SEQ ID NO: 72263 - protein, 416 aa, Streptococcus mutans
MRRKMKNYALLNGAYDNKTMYDFKPVRADNTYLYDSQNRKYLDLRSGLWNTSLGYIDSLYQRVSKRFDQVLNKKLPYLDIHSFQHDIYDEVAQKVLELTGHAFKRVLYTNSGSENTELALKIADYTNKKGENNRILAFKDSYHGTFFGGVSVSGIDQEINSSFYPKYGEVTFIDYPKSAEQEKNVLDYIANVASFYDVMMIEPILASAGIYFASTDFFNALLKLLRKNQVLIVFDEVATGFFKTGKPFYFQQLSEKPDILCLSKAINNGITSFGCVCVNEEVDAKLQKNPKTMEHFSTQNGNLLGLESANIVLDYYLKSRDVIKGKVKDISDSISNVLDSQNVFYRNQGIMTAIRTESNQSLQLMKSLEKLGILTYLYVNEEEEGLSIMPPININLNVLEKALKLISKKIESQNSF

SEQ ID NO: 72264 - protein, 284 aa, Streptococcus mutans
MVYDIIKASLQGRINWLDTAEYYGHGNSEKFIGSILKLLAKEGSLTETIYIADKWFPLLRSAKTIAQTFSGRLSNLQRPFIDLYQIHHPTSISSLKKQAEELANLQEKGLIKAIGVSNFSAHQMVKMDELLKSFGLRLDSNQVKYNLLHRKPERNGVLDVAKERGISLIAYSPLQQGVLTGRFHAESDSIKKISMLRRLNSELSSRSLKKTQPLIELLQKLADKYHKTPAQISLNWLIHAHVSTIFAIPGASSLKQAQSNLEAQNFKLTKTDLQKLSVDSEKLN

SEQ ID NO: 72265 - protein, 348 aa, Streptococcus mutans
MNSPYTRSPRTIKHAFVTGATGLLGNNLVRALLKQGIKVTALVRSMEKARLQFGDLPIQYVKGDILNPEAFRSAFTDCDTLFHTAAFFRDSHKGGKHWQELYDTNVTGTTHLLKAAYEEGIRQMIHTSSIAVLKGERHQLIDETMSRDPSTKLDYYRSKILSENAVSNFLKEYPDLFLCYVLPGSMYGPGDMGPTATGQLILDYMQQKLPGIITKASYSVVDTRDVADIHILALKYGRRNERYLAAGRHMTMESIVKTLEEITGIPAPKRHIPIFLVQALAQWNELYHKITGKPVLVSKEIADITAEEYLRTYFSHKKTEQELGGQFRPFEETLLDTVRWYRNHGYLN

SEQ ID NO: 72266 - protein, 336 aa, Streptococcus mutans
MIDRYILAIESSCDETSVAILKNEDQLLSNIIASQVESHKRFGGVVPEVASRHHVEVITLCIQDALQEAGITAGDLSAVAVTYGPGLVGALLVGMAAAKAFAWANHLPLIPVNHMAGHLMAAQSIADLQYPLLALLVSGGHTELVYVAAPGDYRIVGETRDDAVGEAYDKVGRVMGLTYPAGKEIDQLAHQGQDIYDFPRAMIKEDNLEFSFSGLKSAFINLHHNARQKGEQLRLEDLCASFQAAVLDILMVKTKKALAAYPVKTLVIAGGVAANQGLRERLKEDIKDINVVIPPLRLCGDNAGMIAYAAAVEYEKGHFAELDLNAKPSLAFEGLE

SEQ ID NO: 72267 - protein, 91 aa, Streptococcus mutans
MANKQDLIAKVAEATELTKKDSAAAVDAVFSAVSSYLAKGEKVQLIGFGNFEVRERAARKGRNPQTGEEIKIKASKVPAFKAGKALKDAVK

SEQ ID NO: 72268 - protein, 390 aa, Streptococcus mutans
MTHFDTIVIGGGPAGMMACISAGFYGKKALLLEKNKRLGKKLAGTGGGRCNVTNNGTLEDLLAGIPGNGRFLHSVFSQFDNHDIMSFFEDNGVALKVEDHGRVFPKTNKSCTIIDCLERKIKELGGLIKTQCEIVSVKKEDGQFIVKSADEAFTCQQLIITTGGKSYPSTGSTGFGYAIAKHFKLKVTHLEAAESPLLTDFPHKALQGISLDDVTLTCGKHQINHDLLFTHFGLSGPAALRLSTFIQGGETAYLDLLPQLTKEALLKKIETTREKSLKNALKTFLPERLAAFLSEGYDHKVKQLSKKDLEKILHKIKALPIPITGKMSLAKSFVTKGGIDLKEINPKTLESKTISGLHFAGEVLDINAHTGGFNITAALCTGWVAGSLHY

SEQ ID NO: 72269 - protein, 99 aa, Streptococcus mutans
MMNMQNMMKQAQKLQKQMEKKQSELASMTFVGKSAQDLVVATFTGNKKLVSIDFKEAVVDPDDRETLQDMTVQAINDALGQIEDATQKTMGAFAGKLPF

SEQ ID NO: 72270 - protein, 692 aa, Streptococcus mutans
MVSQKNKSKKGQSKTFTLISNRINLLFFLIVALFTVLLLRLAQMQLYDAKFYKSKLTESTTYTIKTSSPRGQIYDAKGVALVENEVKEVVAFTRSNTMTAKDIKANAKKLADMVTLTESKVTKRQKKDYYLADPKNYQKIVKKLPNNKKYDNFGNNLTESKIYANAVKAVPNSAIDYSEDEKKIIHIFSQMNATSVFNTASLTTGDLTAEQIAVLATSKSDLKGISVKTDWERKTDKNSITSIIGKVSSQKTGLPAEEANNYVKKGYSLNDRVGTSYLEKQYENDLQGSRTVQAIKVNKEGKIISDKTTAKGTKGKNLKLTLDLEFQKGVEQILNQYFNSELASGNTKYSEGVYAVVLNPNTGAVLSMAGLEHDLKTGEVSSNALGAVTEVFTPGSVVKGATLTAGWENGVLSGNQVLNDQPIQFAGSSPINSWFTNGSTPLTASQSLEYSSNTYMVQLALKLMGQDYHSGMTLSTDGYKEAMEKLRATYAQYGLGVSTGIDLPGESKGYTPEHYDPSNVLTESFGQFDNYTAMQLAQYAAAVANGGKRIAPHLVEGIYDNNKTGGLGNLVQSIDTKVLNNVSISSDDMGIIKEGFYNVVNGGSYATGKTLAKGASVPISAKTGTAEAYVTGDDGKSVYTSNLNVVAYAPSSNPQIAVAVVLPHETDLHGTTSHAITRDIINLYQKMYPMNQ

SEQ ID NO: 72271 - protein, 199 aa, Streptococcus mutans
MLYPTPIAKLIESFTKLPGIGIKTATRLAFYTIGMSDEDVNNFAKNLLAAKRELTYCSVCGNLTDDDPCNICTDESRDRSTVLVVEDSKDVSAMEKIQEYHGLYHVLHGLISPMNGIGPDDINLKSLLTRLRDNSDIHEVIIATNATADGEATAMYISRVLKPAGITVTRLARGLAVGSDIEYADEVTLLRAIENRTEL

SEQ ID NO: 72272 - protein, 289 aa, Streptococcus mutans
MDVTWTVKYITEFIGTALLVILGNGAVANVELKGTKGYKSGWVIITLGYGFGVMLPALMFGNVSGNHINPAFTLGLAISDLFPWKQVLPYILAQMLGAIFGQLIIVATHAPYYRQTESSDGILGTFSTISAVDDGTDASKKASLINGFLNEFAGSFVLFFGALALTKNYFGGEIVQQLNTMGTDVTSSTFKFSQVGLTVGANVNSGLAIAHLGLGFLVMALVASLGGPTGPALNPARDLGPRLLHHFLPESVLGKSKGNSKWWYSWVPVIAPILAGIAGVALFKYLYMK

SEQ ID NO: 72273 - protein, 349 aa, Streptococcus mutans
MSKETLVLLYGGRSAERDVSVLSAESVMRAINYDNFLVKTYFITQAGDFIKTQEFDSQPSETDKLMTNDTIIASQKIKPSDIYEEEAVVFPVLHGPMGEDGSIQGFLEVLKMPYVGTNILSSSVAMDKITTNQVLESATTIPQVAYVALIEGEPLESKLAEVEEKLIYPVFVKPANMGSSVGISKAENRTDLKQAIALALKYDSRVLIEQGVDAREIEVGILGNTDVKTTLPGEIVKDVAFYDYEAKYIDNKITMAIPAEIDPVIVEKMRDYAATAFRTLGCCGLSRCDFFLTEDGKVYLNELNTMPGFTQWSMYPLLWENMGLSYSVLIEELVSLAKEMFDKRESHLV

SEQ ID NO: 72274 - protein, 213 aa, Streptococcus mutans
  MISC_FEATURE (17)..(17): X=any amino acid
SAVNHCIRCSQALQLDXTAPFYIKEPKMNTMFKSPKLSPQRLVTLAMLIALAFAIGKLSIPIIPQQLIISPTFIVNVMIGMIGGPIWAFISLAILDIVDNLSSGAGNFIIWWTLLEAVQGLFYGLFFYQKSLSWTNKKDWLHVTIATAIIMLIGSFIFTPLLVQIYYGVPFWAQFAAGRWLKIFEIPIRILVTMAIMPQLQRIPELRKLANFK

SEQ ID NO: 72275 - protein, 452 aa, Streptococcus mutans
MKLTLQEIASVVGAQNDVSLFEDLTINAIEFDSRQIKTGDLFLPLQGARDGHEFIDTAFANGAVATFSEKNITSDYPYILVVDCLKAFQDLAQYYLEKMRVDVIAVTGSNGKTTTKDMIATILATTYKTYKTQGNYNNEIGLPYTVLHMPDDTEKIVLEMGQDHLGDIALLSNLTHPHIAVVTLIGEAHLEFFGSREKIAEGKMQITQGMDGHGILIAPADKIINSFLPEKQKVIRFGADEDIFVTELEEHKNYLNFKTNFLDNEIKLPVTGKYNATNAMIASYVGKLLNVSEEKIISALAQLNLTRNRTEWKKAANGADILSDVYNANPTAMKLILETFSSIPANNGGKKIAVLADMKELGDSELALHAAMIASLDPAVIDRIFLFGPLMQALADEVAQVYSVGKWYYFAQADQVDELTEQIQKVLGPNDQILLKGSNSMKLAQVVECLEG

SEQ ID NO: 72276 - protein, 510 aa, Streptococcus mutans
  MISC_FEATURE (345)..(345): X=any amino acid
MNLQEEIKKRRTFAIISHPDAGKTTITEQLLYFGGEIREAGTVKGKKTGNFAKSDWMDIEKQRGISVTSSVMQFDYAGKRVNILDTPGHEDFSEDTYRTLMAVDAAVMVVDSAKGIEAQTKKLFEVVKHRGIPIFTFINKLDRDGREPLDLLEELEEVLGIASYPMNWPIGMGRSFEGLYDLYNQRLELYKGDERFASIEDGDKLFANNPFYEQAKEDIELLTEAGNEFSEEAILKGELTPVFFGSALTNFGVQTFLDSFLAFAPEPHGHKTTDDKVIDPLDKDFSGFVFKIQANMDPRHRDRIAFVRIVSGEFERGMLSTLPALVRALSCQTSLSLWQNLVRMXENAVAGDIIGVYDTGTYQVGDTLTVGKNKFEFEPLPTFTPELFMKVSAKNVMKQKSFHKGIEQLVQEGAIQLYTNYQTGEYMLGAVGQLQFEVFKHRMENEYNAEVIMTPMGKKTVRWIKEEDLDERMSSSRNILAKDRFNKPVFLFENDFSLHWFADKYPDIVL

SEQ ID NO: 72277 - protein, 614 aa, Streptococcus mutans
MKFMKRIDINHQAQRFSIRKYAFGAASVLIGCVFFLGTQNVSAQEQGTQLPASENAVVNVAENSVAISQAVSDKAAAQTTLTETPQVEVEEKENKVNAPALNVDDKGAKSKEDVNPTVSKTASEVEASAVTATDTKNSNPQVNVETDSNEKDENKMVTSAPAKETEAEQNEKAVAENLMQRQAKAVSIPSQGNYVFQETTPVKNAASMSSPTQFNFDKGDKVFYDKVLEADGHQWISYVSYSGIRRYAPIAVTIEELKQKEIVQQNLPAQGTYHFTKQADVKNEAKLSSPTQFSFYNGDHVFYDKVLEADGHQWISYVSYSGIRRYVVIGKLTTQPSPIETKVSGTIAIQNKTAQQFDVIISNVSSTQGIKEVLVPVWSEQNGQDDIVWYQATKQGEGVYKVTVKVSDHKNNSGNYDIHLYYRLSTGELKVVGGKTTEVEAPKPVETTGIISIANKSSQGFDVLITNASSTQGIKEVLVPVWSEQNGQDDIIWYQATKQGEGVYKVTVKVSDHKNDSGNYDIHLYYRLSTGELKVVGGKTTTVEAPNRVNLPAQGTYVFTNKVEVKNEARTSSPTQFTFNKGESIYYDSILNADGHQWISYRSYSGIRRYIIID

SEQ ID NO: 72278 - protein, 266 aa, Streptococcus mutans
MIAIDLDGTLLKSDGTLSDYTVAIIKKIQEQGHLVIITTGRPYRMALEFYKILGLKTPMINFNGSLIHIPEKKWAGEHKVRIDRRYLFDVLKNEKAFEADFIASEYRKKFYLTLDHRHAIKPEIFGVKELTNKMQLKPEKITRDPHALLMQTRVADKYALANDMRRHFNHEMEISSWGGPMNILEFSPKGVHKAYALKNLLKTLNLSRDDLIAFGDEHNDRQMLAFASVGYAMKNASEVLLPYADKMTQFDNDHDGVAKELKKLFL

SEQ ID NO: 72279 - protein, 1561 aa, Streptococcus mutans
  MISC_FEATURE (90)..(90): X=any amino acid
MKVKKTYGFRKSKISKTLCGAVLGTVAAVSVAGQKVFADETTTTSDVDTKVVGTQTGNPATNLPEAQGSASKEAEQSQTKLERQMVQYSXVPKTDLDQAAKDAKSAGVNVVQDADVNKGTVKTAEEAVQKETEIKEDYTKQAEDIKKTTDQYKSDVAAHEAEVAKIKAKNQATKEQYEKDMAAHKAEVERINAANAASKTAYEAKLAQYQADLAAVQKTNAANQAAYQKALAAYQAELKRVQEANAAAKAAYDTAVAANNAKNTEIAAANEEIRKRNATAKAEYETKLAQYQAELKRVQEANAANEADYQAKLTAYQTELARVQKANADAKAAYEAAVAANNAKNAALTAENTAIKQRNENAKATYEAALKQYEADLAAVKKANAANEADYQAKLTAYQTELARVQKANADAKAAYEAAVAANNAANAALTAENTAIKKRNADAKADYEAKLAKYQADLAKYQKDLADYPVKLKAYEDEQASIKAALAELEKHKNEDGNLTEPSAQNLVYDLEPNANLSLTTDGKFLKASAVDDAFSKSTSKAKYDQKILQLDDLDITNLEQSNDVASSMELYGNFGDKAGWSTTVSNNSQVKWGSVLLERGQSATATYTNLQNSYYNGKKISKIVYKYTVDPKSKFQGQKVWLGIFTDPTLGVFASAYTGQVEKNTSIFIKNEFTFYDEDGKPINFDNALLSVASLNRENNSIEMAKDYTGKFVKISGSSIGEKNGMIYATDTLNFRQGQGGARWTMYTRASEPGSGWDSSDAPNSWYGAGAIRMSGPNNSVTLGAISSTLVVPADPTMAIETGKKPNIWYSLNGKIRAVNVPKVTKEKPTPPVKPTAPTKPTYETEKPLKPAPVAPNYEKEPTPPTRTPDQAEPNKPTPPTYETEKPLEPAPVEPSYEAEPTPPTRTPDQAEPNKPTPPTYETEKPLEPAPVEPSYEAEPTPPTPTPDQPEPNKPVEPTYEVIPTPPTDPVYQDLPTPPSVPTVHFHYFKLAVQPQVNKEIRNNNDINIDRTLVAKQSVVKFQLKTADLPAGRDETTSFVLVDPLPSGYQFNPEATKAASPGFDVTYDNATNTVTFKATAATLATFNADLTKSVATIYPTVVGQVLNDGATYKNNFTLTVNDAYGIKSNVVRVTTPGKPNDPDNPNNNYIKPTKVNKNENGVVIDGKTVLAGSTNYYELTWDLDQYKNDRSSADTIQKGFYYVDDYPEEALELRQDLVKITDANGNEVTGVSVDNYTNLEAAPQEIRDVLSKAGIRPKGAFQIFRADNPREFYDTYVKTGIDLKIVSPMVVKKQMGQTGGSYENQAYQIDFGNGYASNIIINNVPKINPKKDVTLTLDPADTNNVDGQTIPLNTVFNYRLIGGIIPADHSEELFEYNFYDDYDQTGDHYTGQYKVFAKVDITFKDGSIIKSGAELTQYTTAEVDTAKGAITIKFKEAFLRSVSIDSAFQAESYIQMKRIAVGTFENTYINTVNGVTYSSNTVKTTTPEDPTDPTDPQDPSSPRTSTVINYKPQSTAYQPSSVQETLPNTGVTNNAYMPLLGIIGLVTSFSLLGLKAKKD

SEQ ID NO: 72280 - protein, 517 aa, Streptococcus mutans
MKFTELHLAEDILSAVAKVGFVEPSPIQELTIPLALEGKDVIGQAQTGTGKTAAFGLPTLNKIDVTNNVVQALVIAPTRELAVQSQEELFRFGREKKVKVRSVYGGSSIEKQIKALKSGAHIVVGTPGRLLDLIKRKALKLNHVETLILDEADEMLNMGFLEDIEAIISRVPETRQTLLFSATMPDAIKRIGVKFMKEPEHVKIAAKELTTDLVDQYYIRVKENEKFDTMTRLMDVEQPELSIVFGRTKRRVDELTRGLKLRGYRAEGIHGDLDQGKRLRVLRDFKNDNLDILVATDVAARGLDISGVTHVYNYDIPQDPESYVHRIGRTGRAGKHGQSITFVAPNEMGYLQIIEKLTKKRMKGMKPATAQEAFQASKKVALKKIERDFADEKIRSNFDKFTKDAEKLAAEFSPEELAQYILTLTVQDPEMLPKVEIAREKPLPFKFAGKGKGGNRRREDRRGGRDSRRNHRDGGRREFKRTSNKNRKDFENKSNKRPHRTSSEKKSGFTIRNKGDR

SEQ ID NO: 72281 - protein, 406 aa, Streptococcus mutans
MKIGKKILIMLVTIFLTSLVALGVYATSIYNFSLGEFSKTFKDYGTGSGKDVIADEKPFSILLMGVDTGSSERTSKWEGNSDSMILVTVNPKTKKTTMTSLERDILVKLSGSKTNDQTGYDAKLNAAYAAGGAKMAIMTVQDMLDIKIDKYVQINMEGLVQLVDAVGGITVTNHFDFPISIEEHEPEFTASVEPGTHKINGEQALVYSRMRYDDPDGDYGRQKRQREVISKVLKKILALDSVSKYRKILSAVSKNMQTNIEISSSTIPKLLGYSDALKSIRTYQLKGEGTTIDGGSYQLVTSKELLKAQNRIKGQLGLKKSTAENLKTTASLYENFYGGDTSIYDSSSSASDYSSSGNYSGSSSDYGSSSSYGSNSSSGSSSDYSGQNSYNQGNYQQPAAGTGIGN

SEQ ID NO: 72282 - protein, 111 aa, Streptococcus mutans
MIQATFIRRKGILESVELTGHAGSGEYGFDIVCAAVSTLSMNLVNALEVLADCTVSLQMDEFDGGYMKIDLSYITNKSDEKVQLLFEAFLLGITNLAENSPEFVTAKIMTQ

SEQ ID NO: 72283 - protein, 97 aa, Streptococcus mutans
MLKMNLANLQLFAHKKGGGSTSNGRDSESKRLGAKAADGQTVTGGSILYRQRGTHIYPGANVGRGGDDTLFAKVEGVVRFERKGRDKKQVSVYPIAK

SEQ ID NO: 72284 - protein, 250 aa, Streptococcus mutans
MFYTYLRSLLVFLIWAANGNIHYHHRDKLLPEDDNYILVAPHRTLWDPIFLAFAARPKQFIFMAKKELFGNRAFGWWIRMCGAFPIDRKNPGTEAVRYPVKMLRKSDRSLIMFPSGSRHSSDVKGGVAVIAKTAKVKIMPAAYAGPRSIKGLLKHDRIDVTFGNPIDISDIKRMNDDGIEEVAHRIEKEFDQMDTEVATFKDNERPSWWSLIYRLPAMVLVAIVLAFTYLFSWFASFVWNPEKHRDKKIK

SEQ ID NO: 72285 - protein, 260 aa, Streptococcus mutans
MAQSDKDLTLTPLKGKSGQAYIGTYPNGDKIFVKINTTPILAALAKEQIAPQLLWAKRLGNGDMMSAQEWLDGRLLTRADMNSKQIIQVLLQMHKSKPLVNQLLQLNYKVETPLDLLLSWERSAPYQISENAYLQSVVAEMKRNLPDFKKDYATIVHGDVRHSNWVITTSGLVYLVDWDSVRVTDRMYDVAHILSHYIPHTRWAEWLSYYGYKQNTKVFQKIKWYGQLSYLSQILKYYENRDMENVNQEIYELRKFRESF

SEQ ID NO: 72286 - protein, 397 aa, Streptococcus mutans
MSQEMLEAFRILEEEKHINKDDIIDAVKESLKSAYKRRYGQAESAEIEFDEKSGDFKVFTVREVVEEVFDSRLEISLKDALAISTAYELGDKIRFEESPKEFGRVAAQSAKQTIMEKMRRQMREVTFNEYKEHEREIMTGTVERFDNRFIYVNLGTIEAQLSRQDQVPGETFASHDRIEVYVYKVENNPKGVNVFVSRSHPEFIKRIMEQEIPEVFDGTVEIMSVAREAGDRTKVAVRSHNPNVDAIGTIVGRKGANIKKVTSKFHPKRFDQKTGLWVPMEENVDVIEWVDDPAEFIYNAVAPAEVDQVLFDEEDDKHATVVVPDNKLSLAIGRRGQNVRLAAHLTGYRIDIKSASEFEEMEAEWAAQDETQEATYEEAPAEEVSELSQEFAAEDAK

SEQ ID NO: 72287 - protein, 409 aa, Streptococcus mutans
MLTFKLKSQNNHLADSPFELIIERLPPCCQVKVRLDLDHYYNINAPMNLSSQAPWQAEALFYSDDKGILDLSESNPYHNLSIMELFFKSQPIVCKKAKLSQQLESIPLNPFYDLKISIFKGHSLLGETSVRRYYQLPSISCLDLNFSRAKGRFFYDKTSSQQPAIIVLSGSDGRIEKAQNIAQLLASHGFTTLALAYFGLEGLASHLEKIPLEIIQEAIDYLKKSPYADSIRLGLYGRSKGAEFALLAASHYADFKCLVLNSPSYLCLEGLKQWRNSKTSSWTYQGQELPYHPFLWKDFFQRLILKKDLKNINHQAVIPVEKINGSLLLLVSKKDEVWDAYGSAITIVNRLQQKRFKYPYQVESYENCGHMMTVAYQPNHRYKKVALEKIMADTNDSWQKTLVFFRNRL

SEQ ID NO: 72288 - protein, 342 aa, Streptococcus mutans
MNTSDFDFNLPEALIAQTPLKKRDSSKLLVVDHQKKTMKDTHFDHIIDELNSGDALVMNDTRVLPARLHGEKTVTHGHVELLLLKNIQGDQWEVLAKPAKRLKVGSHISFGDGRLKAIIKEELDHGGRIVEFSYEGIFLEVLESLGEMPLPPYIHEKLEDRDRYQTVYAKENGSAAAPTAGLHFTEELLSKIEAKGVKLVYLTLHVGLGTFRPVSVDNVEEHQMHSEFYSLSPEAAQTLKDVKANGGRIVAVGTTSIRTLETIGNKFAGQIEADSGWTNIFIKPGYQFKIVDAFSTNFHLPKSTLVMLVSAFAGRDFILDAYKHAVDKHYRFFSFGDAMFVK

SEQ ID NO: 72289 - protein, 916 aa, Streptococcus mutans
MSKKRLYEIAKEIGKESKEIVEKAKSLGLEVKSHASSVEESDAKRIVESFTVSVEPKAVTPTSKVEKEAKAQEGSVAAEPKAAATKPAGRPRPQNRNFKAEREARAKAEAERRQNNGERRNQNKGQNNRQKDNRNHGSQDRRNDNRNNRNRQNDNRRDNRNHFQNRQEASKSQPTGPRFDFKARAAALKAEQNAEYSRQSETRFHEAQEAKRQAAQAKEKAKKLNQKEQPTVEAAATAAPQAQPQTVEQVTHPAAVDTRRKKQARPDKSRDFSHENEDGPKQNKHKKNRNKQNQVRNQKNSNWNKKNKKSKNNRNHNANLKPVTERKFHELPKEFEYTEGMTVAEIAKRIKREPAEIVKKLFMMGVMATQNQSLDADTIELLMVDYGIEAHQKVEVDTADIERFFVEDDYLNPKNMVERAPVVTIMGHVDHGKTTLLDTLRNSRIATGEAGGITQHIGAYQIEEGGKKITFLDTPGHAAFTSMRARGASVTDITILIVAADDGVMPQTIEAINHSKAADVPIIVAINKIDKPGANPERVIGELAEYGVISTAWGGDSEFVEISAKFGQNIEELLETVLLVAEIQELKADPTVRAIGTVIEARLDKGKGAVATLLVQQGTLHVQDPIVVGNTFGRVRAMTNDLGRRVKVAAPSTPVSITGLNEAPMAGDHFAVYEDEKAARAAGEERAKRALLKQRQLTHRVSLDNLFDTLKAGEVKSVNVIIKADVQGSVEALAASLLKIDVEGVKVNVVHSAVGAINESDITLAEASNAVIIGFNVRPTPQARQQAEADEVEIRLHSIIYKVIEEVEDAMKGMLDPEFEEKIIGEALIRETFKVSKVGTIGGFMVTNGKITRDSSARVIRDGVVVFDGKLASLKHYKDDVKEVGNGQEGGLMIENYNDIKIDDTIEAYIMEEIKR

SEQ ID NO: 72290 - protein, 362 aa, Streptococcus mutans
MGKRLLILEDGTIFEGQAFGADLDVTGEIVFNTGMTGYQESITDQSYNGQILTFTYPLVGNYGINRDDYESIKPTCKGVVVSENARRANNWRKQMTLDEFLKSKNIPGISGIDTRALTKIIRHHGTMKATLANEGDSIEHLQDQLRATVLPTNNIEQVSTKTAYPAPGVGKNIVLVDFGLKHSILREFSKRNCNVTVVPYNTTAQEILNLNPDGIMLSNGPGNPQDVPEALEMIRGVQGKIPIFGICMGHQLFSLANGASTYKMKFGHRGFNHAVREIATGRIDFTSQNHGYAVSRDNLPEELIITHEEINDKSIEGVRHRYYPAFSVQYHPDAAPGPHDASYLFDEFLELIDAFQLEKASK

SEQ ID NO: 72291 - protein, 1059 aa, Streptococcus mutans
MPKRTDIKKIMVIGSGPIIIGQAAEFDYAGTQACLALKEEGYSVVLVNSNPATIMTDKEIADKVYIEPITIEFVTRILRKERPDAILPTLGGQTGLNMAMELSRAGILDELGVELLGTKLSAIDQAEDRDLFKQLMEDLEQPIPESDIVNSVDEAVAFAAKIGYPVIVRPAFTLGGTGGGMCADEKELREIAENGLKLSPVTQCLIERSIAGFKEIEYEVMRDSADNALVVCNMENFDPVGIHTGDSIVFAPTQTLSDIENQMLRDASLKIIRALKIEGGCNVQLALDPHSFKYYVIEVNPRVSRSSALASKATGYPIAKLAAKIAVGLTLDEMINPVTGTTYAMFEPALDYVVAKIPRFPFDKFEHGERRLGTQMKATGEVMAIGRNIEESLLKACRSLEIGVYHNEMPELTNVSDDALVAKIVKAQDDRLFYLSEAIRRGYSIEELSDLTKIDLFFLDKLLHIFEIETELAAKVGDIAILKEAKHNGFADRKIADIWQMTADAVRKLRLDNKIIPVYKMVDTCAAEFESATPYFYSTYEWENESIKSEKESVIVLGSGPIRIGQGVEFDYATVHSVKAIQNAGYEAIIMNSNPETVSTDFSVSDKLYFEPLTFEDVMNVIELEQPKGVIVQFGGQTAINLAEPLSHAGVTILGTQVADLDRAEDRDLFEQALKDLNIPQPPGQTATNEEEAVASARKIGFPVLVRPSYVLGGRAMEIVESENDLRSYMRTAVKASPDHPVLVDSYLVGSECEVDAISDGKDVLIPGIMEHIERAGVHSGDSMAVYPPQTLSKEVQATIADYTKRLAIGLNCIGMMNIQFVIKDETVYVIEVNPRASRTVPFLSKVTDIPMAQIATKLILGSSLTELGYKDGLYPESQNVHVKAPVFSFTKLAKVDSLLGPEMKSTGEVMGTDSTLEKALYKAFEASYFHLPAFGNVIFTIADDTKEEALALARRFSNIGYSILATEGTAKFFAENNLEAVLVNKLGEDDDNDIPAYVRSGKVQAIINTVGNKRTFDEDGAAIRSSAIEHGVPLFTALDTADAMVRVLESRGFITQAI

SEQ ID NO: 72292 - protein, 233 aa, Streptococcus mutans
MKTIKVKNKTEGSKVAFRMLEEEITFGAKTLGLATGSTPLELYKEIRESHLDFSDMVSINLDEYVGLSADDKQSYAYFMKQNLFAAKPFKKSYLPNGLAADLAKETEYYDQILAQYPIDLQILGIGRNAHIGFNEPGTAFSSQTHLVDLTPSTIAANSRFFEKAEDVPKQAISMGLASIMSAKMILLMAFGEEKAEAVAAMVKGPVTEEIPASILQTHPKVILIVDEKAGAGI

SEQ ID NO: 72293 - protein, 433 aa, Streptococcus mutans
MPKRKEKMTRKKKGWIIGGSFAAILIVLGLIWARLQQISQTSSNNVGYQTVKVKEGTIASSTLLSGTVKSESEQYVYYDSNKGTNPKVMVSAGDQVTAGQQLVQYDNSTAQAAYDQAVRNLDKVNRQITNYKTYGTLPSQDSSYDSGSNVGNSSSNSGSGNSNSFNSGYNMNNTNALGSSSAAAITPVNSVSSDQQLQDLYDAQANAQDEVNKAQKALDDTSVNSEVTGTVAEVNNDVDPSGKTSKALVHITSEGKLQIQGTLTEYDLANIKVGQEVSIKSKVYGNKKWSGKISYISNYPNQDQSSQSQAADSSGSGSSSNSAAYNYKVDLTSDIGDLKQGFTVSVEVVNGNKSLVIPNSALVTKDNKNYVWVYDKTNSKVLKKEVAVGNADAKSQEISSGLDKGQTIISNPDKNLKEGKKIEKPSSKANEKR

SEQ ID NO: 72294 - protein, 227 aa, Streptococcus mutans
  MISC_FEATURE (14)..(14): X=any amino acid
  MISC_FEATURE (43)..(43): X=any amino acid
WDFYRMESGEIFEXADGVIADSELHSDYLYQIYLAAYPDYSGXVMVPVLWDKQTKTIVNNESTEIMRMLNIAFNDITDNTEDYSPNRTQANIDVMNDFIYPNIMGITRAGFATSQEVYEEEAQTLFAALDKHENLLSQNDWLVGKRFTEVDIGLFTTLVHFDSVYYRHFKCNLRHLVDYLNHWNHTKRIYNISSIATTVNFKHIKNITYGSHKTINLTSIVSVGPDL

SEQ ID NO: 72295 - protein, 742 aa, Streptococcus mutans
MSEEVFLIDGMTCASCAINVENAVKKLDGIESAVVNLTTEKMTIDYDAAKVSEADVTKAVAGAGYGAKVYDPTTAESQEDREEHKLAGIKKRLLWTSIFTIPLFYIAMGSMVGLPLPNFLAPSSAPLTYAMVLLLLTIPVIVLSWSFYDNGFRSLFKGHPNMDSLVSLATTAAFLYSLYGTYHVYLGHTHHAHHLYYESVAVILTLITLGKYFETLSKGRTSDAIKKLMHLSAKEATLIRDGEEIKVPIEQVQIGDKILVKPGEKIPVDGRVLSGHSAIDESMLTGESIPIEKMADSPVYAGSINGQGSLTFEAEKVGNETLLSQIIKLVENAQQTKAPIAKIADKVSAVFVPVIITIAILTGLFWYFVMGQDFTFSMTISVAVLVIACPCALGLATPTAIMVGTGRAAENGILYKRGDVLELAHQINTIVFDKTGTITQGKPEVVHQFSYHDRTDLVQVTASLEALSEHPLSQAIVDYAKKEGTRLLAVEDFTSLTGLGLKGCVADETLLVGNEKLMRQENISLEQAQADFKAATAQGQTPIFVASDGQLLGLITIADKVKNDSAAAIKALQNMGVEVAMLTGDNEETAQAIAKEVGITFVISQVLPQEKTQAILDLQAEGKKVAMVGDGINDAPALATADIGISMGSGTDIAMESADIVLMKPAMLDIIKALKISRATIINIKENLFWAFIYNVLSVPIAMGVLYLFGGPLLDPMIAGLAMSFSSVSVVLNALRLKVVKL

SEQ ID NO: 72296 - protein, 238 aa, Streptococcus mutans
MRLGKLLGQAGFGSRGQVKKFIRSQQVRVDDELARTGNQNVDPNLQTITVSGKQLSYSPHVYYILNKPAGLVSVVRDQHYQTVIDLIAVVDRREGLYPVGCLDRDTEGLVLITNNGPLGFRLLHPKYHVDKTYYVEVNGDLGIDAIAFFDNGIAFLDGTVCKPAKLQIISSSSEVSRAYITITEGKFHQVKKMFLAYGVKVTYLKRISFGPFELGDLPVGEYRELTAEEKNSLRNYLN

SEQ ID NO: 72297 - protein, 91 aa, Streptococcus mutans
MAVKIRLTRMGSKKKPFYRINVADSRAPRDGRFIETVGTYNPLVTENQVTLKEDRILEWLGNGAQPSDTVRNILSKAGIMQKFHEAKYSKK

SEQ ID NO: 72298 - protein, 322 aa, Streptococcus mutans
MKAVYIQKTGGPATIIVGSLPVPKVRPKSVLIKVIAASINYVDLFIRSGIYQTDLPNPYILGRDAIGQVVEIGKDVIQFKVGDCVWTNSMGYDGRQGITSEYALIPEERLFLTPKNADSLKLIGAVHSAATATIVLQDIMELKPKQKLLIEGAAGHVGSKLVYLANEMGAEVVTTASLKDFSRLKQLSDAICFDYRDKSLFKKLKSAYPDGFDHIIDTSGEIPLQFNCDLLAPKGVISLITAPKDSQFDSRQFYMNCQQMKGFVISHASLKQLKKAGRILNDAFRQGQLLEEDMVIKKFDKAAEAHDLMETKKENRKIILVP

SEQ ID NO: 72299 - protein, 172 aa, Streptococcus mutans
MKYFNVGKIVNTQGLRGEVRVLSVTDFADERFKKGSQLALFDKKDHFAMTVEIASHRKHKNFDIVKFKGLYHINDVEKYRDFTLKVTEDHLADLEDGEFYYHEIIGLDVYENDILIGQVKEILQPGANDVWVVKRKGKKDLLLPYIPSVILKVDVPNGRIDVTVLEGLDDEN

SEQ ID NO: 72300 - protein, 383 aa, Streptococcus mutans
MTTYIKANKFYYPYETKLGGYLELVDDSFGKWLSTVPEGAQVLDYSGYEIAPGLVDTHIHGFAGADVMDNKEESLATMSRELLSAGVTSFLPTGLTASFETLNKVCQTIAKFAGKETGARIQGLFFEGPYFTEKYKGAQNPSYMRNPSTSELDQWLASSKGLLKKIALAPEREGTAEFISYACKRGVVVALGHSDATYQEAVEAVEAGASVWVHAYNGMRGLNHREPGMVGAVYDIPNTYAELICDGYHVHTCACDILLHQKRPDHVVLITDCMSAGGQPDGNYMLGEYPVTVENGTARLKSNGALAGSILQLKDGVKNIVDWGLVSKANAIMMASLIPAISVGIDEVCGQIKEGHLADFIVLDKEMNLRATYLAGKKVYECQ

SEQ ID NO: 72301 - protein, 240 aa, Streptococcus mutans
MKIDILTLFPEMFAPLEHSIVGKAQTKGLLEINYHNFRENAEKARHVDDEPYGGGQGMLLRAQPIFDTFDKIAAKKPRVILLDPAGQQFNQSYAEDLAQEGELIFICGHYEGYDERIKTLVTDEISLGDFILTGGELAAMTIIDATVRLIPEVIGKEASHQDDSFSSGLLEYPQYTRPYEYRGMKVPDVLLSGHHENIRLWRLEQSLRKTWERRPDLLEHYQFTQEEKQLLEKIKSEGSS

SEQ ID NO: 72302 - protein, 332 aa, Streptococcus mutans
MTSEKEIYDITVIGGGPVGLFTAFYAGLRGISVKVIESLSELGGQPAILYPEKVIYDIPAFPAITGADLVDNLIEQLERFKDKTTICLKEEVKTFEKENAIFTITTNKGNHFSKAIIIACGNGAFAPRRLGLDDEERYADHNLFYNVHKLDQFAGKKVVICGGGDSAVDWANALDKIAESVTLVHRRDAFRAHEHSVEVLKTSHVNIMTPYVPLELKGEGDEATSLVIQKVKSEETKELSLDSLIVSFGFSTSNKNLKSWNIDYKRSSINVSPLFETSQTGVFAIGDAAEYEGKIDLIATGFGEAPTAVNQAIKYIYPERDNRVVHSTSLIK

SEQ ID NO: 72303 - protein, 303 aa, Streptococcus mutans
MIYTVTLNPSIDFIVRIDSVKIGSVNRMDSDDKFVGGKGINVSRILKRLGQDNTATGFIGGFTGRFVEEGLIAEGIKTNFVHVNQDTRINVKIKADQETEINGTGPVITKEQVLALENILQQLSQDDTVVFAGSAPSNLGNQIYERLIPLVRQTGAQIVCDFEGQTLLDALDYQPLLVKPNNHELEAIFKVNLNGITDVEKYARQILAKGAQNVIISMAGDGALLVTSDATYFAKPIKGQVRNSVGAGDSMVAGFTGEFVKSANPLEALKWGVACGTATAFSDDLASIDFIKETYEKVEVEKL

SEQ ID NO: 72304 - protein, 655 aa, Streptococcus mutans
MKIQDLLNKDVMLLDLQATTKEAAIDEMVSKLVEQGIVTDFDTFKAGIMNREVQTSTGLGDGIAMPHSKNKAVKEATVLFAKSNKGVDYEALDGEPVDLFFMIAAPDGANDTHLAALAELSQYLLKDGFADKLRQVTNPDDVINLFNATEEEKKEATPAAPVADSHDFLVAVTACTTGIAHTYMAEEALKKQAAEMGVGIKVETNGASGVGNKLTADDIKRAKGVIIAADKAVEMDRFNGKPLISRPVAEGIKKPEELINIILDGKAEAYVADNSDLSSEASSSEKAGLGSAFYKHLMSGVSQMLPFVIGGGIMIALSFLIDQFMGVPKSSLSHLGNYHEIAAIFNQVGNAAFGFMIPVFAAYIAYSIAEKPGLVAGFVAGSMATTGLAFNKVAFFEFGEKASQASLTGIPSGFLGALAGGFLAGGVILVLKKALAFVPRSLEGIKSILLYPLLGVLVTGFLMLFVNIPMAAINTALYNFLGNLSGGSAVLLGLIVGGMMAIDMGGPFNKAAYVFGTSTLTAAALAKGGSVVMASVMAGGMVPPLAVFVATLLFKNKFTQEEHDAGLTNIVMGLSFITEGAIPFGAGDPARAIPSFIVGSAVTGALVGLSGIKLMAPHGGIFVIALTSNPLLYLLYIAVGAVIAGILFGSLRKVR

SEQ ID NO: 72305 - protein, 620 aa, Streptococcus mutans
MTMSRLLDKLKTDILVADGAMGTLLYADGLESCHEYYNISHPERILAIHQAYIAAGADIIQTNTYGAKRHRLKSFGHDKEVKAINQAAVHLARQAAGDNTFVLGTIGASHGLKHCELSLEDIISQTVEQARFLLETKQIDGLLLETYYDIEELEAALKALRPLTDLPIITNVALHEPGITENGRPLVEAFSNLVMLGADIVGLNCHLGPYHMIQSFKQVPLFAQSYLSAYPNASLLSFSSDDNETPYHFSQNADYFEYCAKLFVEEGVRLIGGCCGTTPEHIKAIKRGIRGLKPIERKVTTPLISQEDLIYEVEKKESLVDKVKKGITIIAEIDPPKTLAVDKFVDGVKALDEKGIAAITLADNSLARTRICNLSMASMLKDEIATPFLLHLSCRDHNMIGLQSRLLGMDLLGFDHILAITGDPSKIGDFPGATSVYDATSFKLLSLIKQLNQGHGYSGASLKKATHFTVAAAFNPNVKNLSRTGRLIEKKVAAGADYFITQPVFSETVIQELSEVTKPYEQPFFVGIMPITSYNNAVFLHNEVPGISLSESFLAKLEAVKDDKETCQKVALAESKKLIDAILAHFNGIYLITPFLRYDLTVELIDYIQVKTATVAKKRT

SEQ ID NO: 72306 - protein, 872 aa, Streptococcus mutans
MKQLTSAQVRQMWLDFWKSKDHAIEPSANLVPVNDPTLLWINSGVATLKKYFDGSVIPENPRITNAQKAIRTNDIENVGKTARHHTMFEMLGNFSVGDYFRDDAIKWGFELLTSPEWFDLPKDKLYMTYYPDDKDSYNRWIECGVDPSHLIPIEDNFWEIGAGPSGPDTEIFFDRGEDFDPDHIGVRLLAEDIENDRYIEIWNIVLSQFNADPAVPRSEYKELPHKNIDTGAGLERLVAVMQGAKTNFETDLFMPIIREIEKLSGKTYDQDGDNMSFKVIADHIRSLSFAIGDGALPGNEGRGYVLRRLLRRAVMHGRRLGINEPFLYKLVPTVGKIMESYYPEVLEKQDFIEKIVKREEETFARTIDAGSNMLDQLLADLKAADKDTLEGKDIFRLYDTYGFPVELTEELAEDAGFKIDHQGFQAAMKEQQERARANVVKGGSMGMQNETLSNITEKSTFNYEKEALDSSLSVIIADNKRIEAVSEGQVLLVFSETPFYAEMGGQVADHGLIKNDKGDTVARVTDVQKAPNGQALHTVDVLGSLSVGTTYHLEIDHERRNRVMKNHTATHLLHAALHNVIGNHATQAGSLNEVEFLRFDFTHFEAVTPEELRQIEEEVNQQIWKAIPVTTIETDLDTAKEMGAMALFGEKYGKNVRVVSIGDYSVELCGGTHLKNTSEIGIFKIVKEEGIGSGTRRILAVTSKEAFEAYRQEEDILKEIATTLKAPQMNQVANKVASLQDQLHKLQKENAELKEKAAAVAAGDIFKDVKEVNGLRYIASQVEVADAGALRTFADKWKQKDYSDVLVLVASIGKKVNVLVASKSKDIHAGNLIKALAPIVSGRGGGKPDMAMAGGSDASAIKDLIAAVAENL

SEQ ID NO: 72307 - protein, 536 aa, Streptococcus mutans
MQKHWWHKATVYQIYPKSFMDTNGDGIGDLKGITSKLDYLQKLGVMAIWLSPVYDSPMDDNGYDIANYEAITDIFGNMADMDNLLTQAKMRGIKIIMDLVVNHTSDEHAWFIEAREHPDSSERDYYIWCDQPNDLESIFGGSAWQYDDKSDQYYLHFFSKKQPDLNWENANLRQKIYDMMNFWIDKGIGGFRMDVIDMIGKIPAQHIVSNGPKLHAYLKEMNAASFGQHDLLTVGETWGATPEIAKQYSNPVNHELSMVFQFEHIGLQHKPEAPKWDYVKELNVPALKTIFNKWQTELELGQGWNSLFWNNHDLPRVLSIWGNTGKYREKSAKALAILLHLMRGTPYIYQGEEIGMTNYPFKDLNELDDIESLNYAKEAFTNGKSMETIMDSIRMIGRDNARTPMQWDASQNAGFSTADKTWLPVNPNYKDINVQAALKNSNSIFYTYQQLIQLRKENDWLVDADFELLPTADKVFAYLRKVREERYLIVVNVSDQEEVLEIDVDKQETLISNTNESAALANHKLQPWDAFCIKIN

SEQ ID NO: 72308 - protein, 395 aa, Streptococcus mutans
MCSKNVVLSIRFHYLVMSNLFQNYTRADLEFIKAEGNYLFDTQGKKYLDFSTGIGVTNLGFHPQVQVALQKQAEQIWHTPNLYQNSLQEEVAAKLMAGKDYLAFFCNSGAEANEAAIKIARKATGKQEIITFQNSFHGRTFGSMSATGQDKIKVGFGDAVPHFHYAVFNDLNSVKALVTENTAAVMLELVQGESGVLPAEQDFVTALADYCQKNGLLLIIDEVQTGMGRTGKLYAFQHYGIEPDIFTLAKGLANGVPVGAMLAKKQFGSAFGPGSHGSTFGGNKLAMAASSAVLDIMTKAGFLEQAWENAHYLQEQLTSALQVADTVTQVRGLGYMIGIETTADLGQLVKATRDRGLIVLTAGTNVIRLLPPLTLTKDEIDQGIMILQEVFEQHN

SEQ ID NO: 72309 - protein, 319 aa, Streptococcus mutans
MTTYYEAINWNEIEDVIDKSTWEKLTEQFWLDTRIPLSNDLDDWRKLSAAEKDLVGKVFGGLTLLDTMQSQSGVEAIRGDVRTPHEEAVLNNIQFMESVHAKSYSSIFSTLNTKSEIEGIFEWTNNNEYLQKKAKIINEIYENGNALQKKVASTFLETFLFYSGFFTPLYYLGNNKLANVAEIIKLIIRDESVHGTYIGYKFQLGFNELSEEEQSEFRDWMYDLLYQLYENEELYTQTLYDPVGWTEEVMTFLRYNANKALMNLGQDPLFPDTANDVNPIVMNGISTGTSNHDFFSQVGNGYLLGSVEAMHDDDYLMGK

SEQ ID NO: 72310 - protein, 719 aa, Streptococcus mutans
MSLKNLGDISYFRLNNEINRPINGQIPLHKDKEALEAFFKENVKPNTKTFDSITDKIQFLVANDYIEAEFIAKYKSEFIEQLSQDLHAYDFQFKSFMAAYKFHQQYALKTNDGEEYLESIEDRVLFNALYFADGNENLAHDLAMEMIAQRYQPATPSFLNAGRSRRGELVSCFLIQVTDDMNSIGRSINSALQLSRIGGGVGISLSNLREAGAPIKGFAGAASGVVPVMKLFEDSFSYSNQLGQRQGAGVVYLDVFHPDIMAFLSTKKENADEKVRVKTLSLGVTIPDKFYELARRNEDMYLFSPYSIEREYGVPYNYLDITEKYDELVANPKIIKTKIKARDLETEISKLQQESGYPYVVNIDTANRANPIDGKIIMSNLCSEILQVQKPSLINDAQEFVKMGTDISCNLGSTNVVNMMTSPDFGRSIKAMTRALTFVTDSSHIDAVPSIKNGNKQAHTFGLGAMGLHSYLAQNHIEYGSPESIEFTDIYFMLMNYWTLVESNNIARERQETFVGFEKSKYADGSYFDKYVTGQFIPKSDKIKELFKNHFIPQAEDWEALRQAVIKDGLYHQNRLAVAPNGSISYINDVSASIHPITRRIEERQEKKIGKIYYPAAGLSTDTIPYYTSAYDMDMRKVIDVYAAATQHVDQGMSLTLFMRSDIPQGIYEWKTESKQTTRDLSILRNYAFNKGIKSIYYIRTFTDDGDEVGANECESCVI

SEQ ID NO: 72311 - protein, 372 aa, Streptococcus mutans
MAETNGLKDMIACDTRISAIKDNKLSYAGYDIADLMDNKARFEEVIYLLWNLHLPTAIELKQFEEKLRKNYAISDAIEQCILIQSRQHLHPMSVLRSTVSLLGVYNLKAEERSVEATYDQSIQLMAKIPTIIATFARLRQGLSPIAPRKDLGFAANFLYMLNGRLPSELEILAMNRALVLHAEHELNASTFAARVCASTLSDIYSCVTTAIGTLKGPLHGGANERVFDMLREIREYGDVDSYLQEKLNSKEKIMGFGHRVYQTQDPREKYLREMARELTKGTEHDIWYQLSKKVEICMKQKKNLIPNVDFYSATVYHVLGIDSSIFTLIFAMSRVSGWIAHIQEQQKNNKLIRPRSHYTGMRKLRYIPIERR

SEQ ID NO: 72312 - protein, 398 aa, Streptococcus mutans
MKGDKMAEKVSFEEGKLQVPDKPVIPYIEGDGVGQDIWKNAQIVFDKAIAKVYGGHKQVIWREVLAGKKAYNETGNWLPNETLEIIKTHLLAIKGPLETPVGGGIRSLNVALRQELDLFACVRPVRYFKGVPSPLKHPEKTAITIFRENTEDIYAGIEWNAGTAEVQKVINFLQDDMQVKKIRFPKSSSIGIKPISIEGSQRLIRAAIEYALANNLTKVTLVHKGNIQKFTEGGFRKWGYELAKREYAAELASGQLVVDDIIADNFLQQILLKPERFDVVALTNLNGDYASDALAAQVGGIGISPGANINYQTGHAIFEATHGTAPDIAGQDLANPSSVLLSGCMLFDYIGWSKVSDLIMKAVEKAIANGQVTIDFAKELGVEALTTRQFSEVLLTYL

SEQ ID NO: 72313 - protein, 534 aa, Streptococcus mutans
MSFNKESQQRQELHQKIWAIADNVRGAVDGWDFKQYILGILFYRFISENMSDYFDRAEHEAGDPDFRYADLSDEEAEEDFKPDTVEEKGFFILPSQLFENIVKTASTNENLNTDLAKIFKKIEESAIGKDSEHAIKGLFDDVDTTSNRLGGSVKEKNKRLSDILTGIAGLDFGTFEENDIDAFGDAYEYLISNYASNAGKSGGEFFTPQTVSKLLAQLVMVGKEHINKVYDPTCGSGSLLLQMKKQFETHILEEGFFGQEINMTNYNLARMNMFLHNINYNNFDIRRGDTLLNPQHLYERPFDAIVSNPPYSIKWIGDADPTLINDERFAPAGKLAPKSKADFAFIMHSLSHLSNKGRAAIVCFPGIFYRGGAEKTIRQYLIDNNFVEAVIALPDNLFYGTSIATYILVLAKNKPEDKTLFIDASSDEKSTVSGKNKFYETVTNGKILNPKNIEAIVELFKNKKDVDYEAKLVDNNLIAEENDYNLSVSTYVEKRDTREIINIDELNKEIAETVKKIDHLRSEIDKIVEELSHD

SEQ ID NO: 72314 - protein, 506 aa, Streptococcus mutans
MTDLMTTFQNRFADWTQSLLEHLQISLLSLLIAIILAVPLAIFISHRKRIAEIILQISGIFQTIPSLALLGLFIPFMGIGTVPAVAALVIYALFPILQNTITGLTTIDPSLVEAGQAFGMTKWERLKKFELALAMPVIISGVRTAAVMIIGTATLAALIGAGGLGSFILLGIDRNNTSLILIGAISSALLAILFNLAIKFLEKASLKKIMLAFFIMLIGLGASYLPNVIKTSQSQKEIVIAGKMGPEPEVLINMYKELIEQDSHLSVKVKPNFGKTTFLYEALKKGDIDIYPEFTGTITSSLLKNPPKTSNNPQTVYEEARDGILKQDNLVYLKPMKYQNTYAVAVKKSFAKEKGLKSISDLKKVENTAKAGFTLEFNDRKDGNKGLKSLYGLNLQVSTMEPALRYQAIKSGDIDITDAYSTDSEIKEYDLVTLKDNKNLFPPYQGAPLFKKKLLQKHPELKKILNRLAGKITENQMSDMNYQVKVKGKSAKTVAHHYLKKTGLLK

SEQ ID NO: 72315 - protein, 577 aa, Streptococcus mutans
MTEMLKGIAASDGVAVAKAYLLVQPDLTFETVSVTDTQAEEARLDAALEASQNELSLIRQKAVDTLGEEAAAVFDAHLMVLADPEMIGQIKETIRTKEVNAESALKEVTDMFVTLFENMEDNPYMQERAADIRDVAKRVLAHLLGVELPNPATISEESIVIAHDLTPSDTAQLDANYVKAFVTNIGGRTSHSAIMARTLEIAAVLGTNDITERVKNGDIVAVNGITGQVIINPTEDQIAEFKAAGETYAKQKAEWALLKDAETVTADGKHFELAANIGTPKDVEGVNNNGAEAVGLYRTEFLYMDSQDFPTEDEQYEAYKAVLEGMNGKPVVVRTMDIGGDKELPYFDLPKEMNPFLGFRALRISISETGNQMFRTQLRALLRASVHGQLRIMFPMVALLNEFRKAKGILEEEKANLKAEGVAVSDDIQVGIMIEIPAAAMLADQFAKEVDFFSIGTNDLIQYTMAADRMNEQVSYLYQPYNPSILRLVDHVVKAAHAEGKWAGMCGEMAGDQTAVPLLVGIGLDEFSMSATSVLRTRSLMKKLDTDKMQELAQRALTECATMEEVLELEKEYIDFD

SEQ ID NO: 72316 - protein, 475 aa, Streptococcus mutans
MTKQYKNYVNGEWKLSENEIKIYEPASGAELGSVPAMSTEEVDYVYASAKKAQPAWRSLSYIERAAYLHKVADILMRDKEKIGAVLSKEVAKGYKSAVSEVVRTAEIINYAAEEGLRMEGEVLEGGSFEAASKKKIAVVRREPVGLVLAISPFNYPVNLAGSKIAPALIAGNVIAFKPPTQGSISGLLLAEAFAEAGLPAGVFNTITGRGSEIGDYIVEHQAVNFINFTGSTGIGERIGKMAGMRPIMLELGGKDSAIVLEDADLELTAKNIIAGAFGYSGQRCTAVKRVLVMESVADELVEKIREKVLALTIGNPEDDADITPLIDTKSADYVEGLINDANDKGAAALTEIKREGNLICPILFDKVTTDMRLAWEEPFGPVLPIIRVTSVEEAIEISNKSEYGLQASIFTNDFPRAFGIAEQLEVGTVHINNKTQRGTDNFPFLGAKKSGAGIQGVKYSIEAMTTVKSVVFDIK

SEQ ID NO: 72317 - protein, 937 aa, Streptococcus mutans
  MISC_FEATURE (917)..(917): X=any amino acid
  MISC_FEATURE (930)..(930): X=any amino acid
YQTENEMEKKLIEDLVQGQHYELLTIHTAEELMINLREQIEKLNNVTFTNDEWQRFLDEYLDRPNDGMIEKTRKIQENHIYDFIFDDGHIKNIILIDKKNIHQNHLQVVSQIRQKGSHSNRYDVTILVNGLPLVQIELKKRGIPMKEAFEQIHRYSKESFNTQHSLFQYIQIFVISNGTRTRYFANTTAQNKNHFEFTCEWADKKNKIIYDLEDFAQTFLNKQVLLSVLTKYCVFDTSDTLLIMRPYQIAATEAIMRQIHVAHENKLYGTTEAGGFIWHTTGSGKTLTSFKAARLATELDYIDKVFFVVDRKDLDYQTMKEYQKFQKDSVNGSKNTKELKRAIEKNDSKIVVTTIQKLNEFVKKNPEHPIFEKQCVLIYDECHRSQFGDTQRKVRSSFRAHYQFGFTGTPIFEDNTLTGMLTSTIFGKQLHSYIITDAIRDNKVLKFKVDYNYIKPELNKFREAEVTSGQENDKKKLKKIEKELLLHPERISTISEYLLKVFDDKTHRNVHYTHKQKQLKGFNAMFAVQNVKAAKAYYEEINKQQRQLPVDKRIKIATIYSYVPNEEQLAYGAIDSENFEPTKMDLSSKEFLDLAISDYNKHFKTNFSTEGKDFQNYYKDLTKRVKSKEVDLLIVVGMFLTGFDAPTLNTLFVDKNLRYHGLIQAFSRTNRILNKEKPFGNIVCFRDLEKATNDALTLYGESHSISVVLEKSYEEYMSGFTDKETGITVKGYQEVCQEILEKFPDPTEITLESEKREFVKLFGEVLKLENVLRNYDEFTPEEHLITPGQMQDMRSVYVDIREEAYGNGRTGKNEETGIDLSDIEFEIELLKTDEINLDYIISLISAKAQDNDSKETLKRDISRVIRSSIDMRAKEELVIGFINETHLEQLKDNQTILEAFYAYGNQKKKESYRGFSXRAYIKGRLSSIYXSFYCSGI

SEQ ID NO: 72318 - protein, 280 aa, Streptococcus mutans
METVVLSNGVKMPILGFGVFQVPDLEECERVVTEAIKVGYRLLDTAQVYGNEEAVGNAVRKSGLAREEFFITTKVWISNAGYEKAKASLDESLRKLQTDYVDLVLIHQPFGDYYGTWSALEAYYKSGKIKAIGVSNFYPDRLVDLASFNEIVPMVNQVETHVFNQQIEAKKVSEEYGVQLESWGPFAEGKNNFFTNPTLTAIGEKYGKSAAQVGLRYLIQRGVVVIPKTVHQERMVQNFDVFGFNLSDDDMADILKLDQGESLFINHYDPETVKFLANYK

SEQ ID NO: 72319 - protein, 198 aa, Streptococcus mutans
MVQTLYLMRHGETLFNTQKRVQGWCDSPLTDLGITQAKLVRDYFQEKGITFDKVYSSTQERATDTLKLITNQSYQQLKGLKEMNFGIFEAQPESLLPRFRPGSSSFEDLLVPYGGEDIAQVGKRIYETILTTLKKQSAQTLLMVSHGAALYGLILELNIQLPQDLRFGNCAICKYQYENGHLNLLSVIDPLKNISFDI

SEQ ID NO: 72320 - protein, 255 aa, Streptococcus mutans
MSIKVIVAGFKGRMGSTAVDMIKNDSELELAALLDPFAAEKEIDGVPVFTDKSDLVGLDAEVWVDFTIPKVAYENTHFALENGFRPVVGTTGFTQEQIADLMTLSADKKLGGLIAPNFAIGAVLLMEFAAKASKYFPDLEIIELHHDKKKDAPSGTAVKTAELIREARAYKKQGAADEEETLVGARGAEFDGFRIHSVRLPGLVAHQEVIFGAQGEGLTLRHDSYDRISFMSGVNLGIKEVVQREQLVYGLEHLL

SEQ ID NO: 72321 - protein, 61 aa, Streptococcus mutans
MLEQGHDEPTGQTKITSAFNLPAKYILHTVDPIIIGQVSQKAKDLLVSCYQSCLDLVIKNR

SEQ ID NO: 72322 - protein, 396 aa, Streptococcus mutans
MPSEFQEALPVLEKIKAAGFEAYFVGGSVRDVLLGHPIHDVDIASSSYPEETKKIFPRTVDIGIEHGTVLVLENGHDYEVTTFRTEDLYVDYRRPSQVSFVRSLEEDLKRRDFTINAFALDEKANIIDKFNGLVDLEQKILRAVGNAAERFNEDALRIMRGLRFAAQLNFDIEKKTFIAMREHAPLLEKISVERSFIEFDKLLRAPYWRKGINCLIASQAYDYLPLLQSTADKWQQLLTDLPEDFTFSTSEQAWAAVLLYLNVENPRSFLKSWKTSNDFQKTVEKLLAIYRLREDRQIKKTDVYQYSATLLTLVEELRQAQGLAVDFEHIKELDEALTIHDKHEIVVKGGDLMAAFDLKPGPDLGKILNQIESFIVAGNLANERQAILDFVRKEID

SEQ ID NO: 72323 - protein, 622 aa, Streptococcus mutans
MSDFIVERLSKTVGDKTVFQNISFIIHDKDRIGIIGVNGTGKTTLLDVISGRLGFDGDNSPFSAKNDYKMAYLTQEPVFNETKTILDTVLSSDLREMQLIHTYESFMANYDEANQEQLEKVMAEMDALDVWSIESEVKTVLSKLGISDLSQKVGNLSGGLKRRVQLAQVLLNDADLLLLDEPTNHLDIDTIAWLANFLKNSKKTVLFITHDRYFLDSIASRIFELDRAHLIEYQGNYQDYVRLRAEQDERDAAALHKKKQLYKQELAWMRRQPQARATKQEARINRFKNLKSDLSGMDTSSDLEINFQTSRIGKKVINFEQVDFAYPDKTILTHFNLLIQNKDRIGIVGENGVGKSTLLHLMNGDLQPNSGKLDIGETVRIGYFSQQIKDMDENKRVINYLQEVADEVTTAVGISSVTSLLEQFLFPRSTHGTLISKLSGGEKKRLYLLKILIEKPNVLLLDEPTNDLDIATLTVLESFLQDFSGPVITVSHDRYFLDKVANKILAFEHNAIREFFGNYTDYLDEKAFEKDSSAMVVKKEAAKVEKEKSERKRMSYFEKQEWATIEDDITALEERIENIEATMQEHASDYGQLAGLQRDLDTANEQLLEKYERYEYLSELEK

SEQ ID NO: 72324 - protein, 270 aa, Streptococcus mutans
MSVKVIATDMDGTFLNSKGSYDHNRFQRILKQLQERDIRFVVASSNPYRQLREHFPDCHEQLTFVGENGANIISKNQSLIEVFQQREDIASIIYFIEEKYPQAVIALSGEKKGYLKKGVSENIVKMLSPFFPVLELVNSFSPLPDERFFKLTLQVKEEESAQIMKAIADYKTSQRLVGTASGFGYIDIITKGLHKGWALQQLLKRWNFTSDHLMAFGDGGNDIEMLKLAKYSYAMANAPKNVKAAANYQAKSNDESGVLDVIDNYLASID

SEQ ID NO: 72325 - protein, 590 aa, Streptococcus mutans
MKKKTVFLRLWYYLKTYKGSLFLAIFLKILSSVMNVLEPFILGLVMTELTANLIDMARGVQGAHLNIRYITMILFLYFLRGLLYSIGSYGSNYFMTNAVQKSIYDLRHDLSEKINKIPVSYFDKHQFGDMLGRFTNDVETVSNALQQSFLQIINAFLTIILVVVMVLYLNLTLAAIILVCIPLTYFSSHFILRKSQPYFKKQANALGDMNSFVQENLTGFNVIKLYGREEISAETFRTITENLRDVGFKASFISGIMMPVLNAISDLAYLIVALVGGLQVLAGRLTIGNMQAFVQYIWQINQPIQTITQLSSVLQSAKSSLERIFEVLDETDEVNQVKEKLEHDLTGQVTFHNVAFQYTEDKPLIRHFDLDVKPGQMIAVVGPTGAGKTTLINLLMRFYDVTQGAITVDNHDIRNLSRQEYRKQFGMVLQDAWLYEGTIKDNLRFGNLQASDEEIVEAAKAANVDHFIRTLPDGYNMEVNQESNNISLGQKQLLTIARALLADPKILILDEATSSVDTRLELLIQKAMSKLMEGRTSFVIAHRLSTIQEADKILVLKDGQIIEQGNHQSLLADKGFYYDLYMSQFSAKTN

SEQ ID NO: 72326 - protein, 246 aa, Streptococcus mutans
MKKERQSRKKRSFLRTFLPILLLVIGLALIFNTPIRNALIAWNTNRYQVSNVSKKDIEHNKAAHSSFDFKKVESISTQSVLAAQMAAQKLPVIGGIAIPDLKINLPIFKGLDNVGLTYGAGTMKNDQVMGENNYALASHHVFGMTGSSQMLFSPLERAKEGMEIYLTDKNKVYTYVISEVKTVTPEHVEVIDNRPGQNEVTLVTCTDAGATARTIVHGTYKGENDFNKTSKKIKKAFRQSYNQISF

SEQ ID NO: 72327 - protein, 406 aa, Streptococcus mutans
MTYDNLLNRFLTYTRVNTRSDESSETTPTTQSQVDFALTILKPEMKSIGLQNVHYLENGYLVGTLPANGNFPYKIGFIAHMDTADFNAEGVNPQIIDNYNGEIIQLGQTDFVLDPKEFPNLNNYLGQTLITTDGTTLLGSDDKSGIAEIMTAIDYLVKHPEIEHGEIRVGFGPDEEIGRGADQFDVEDFDVDFAYTVDGGPLGELQYETFSAAAAEIDFMGRNVHPGTAKNQMVNALQLAMDFHGQLPQEDRPEKTEGYQGFYHLLSLEGTVDAAHASYIIRDFDDEAFVSRKDFMQKIADKMNAHLGAERVQLQIYDQYYNMRKIIKKDMTCVKLAKKVMENLAIEPIIEPIRGGTDGSKISFMGLPTPNLFAGGENMHGRFEFVSLETMQRAVDVIIGIVCFKQ

SEQ ID NO: 72328 - protein, 820 aa, Streptococcus mutans
MQDRNLVDVNLTSEMKTSFIDYAMSVIVARALPDVRDGLKPVHRRILYGMNELGVTPDKPHKKSARITGDVMGKYHPHGDSSIYEAMVRMAQWWSYRHMLVDGHGNFGSMDGDGAAAQRYTEARMSKIAMEMLRDINKNTVDFADNYDGSEREPLVLPSRFPNLLVNGATGIAVGMATNIPPHNLGETIDAVKLVMDNPDVTTRDLMEVLPGPDFPTGALVMGKSGIHRAYDTGKGSIVLRARTEIEQTKSGRERIVVTEFPYMVNKTKVHEHIVRLAQEKRIEGITAVRDESSREGVRFIIEVRRDASANVILNNLFKLTSLQTNFSFNMLAIEKGVPKILSLRQILDNYIDHQKEVIVRRTKFDKAKAESRAHILEGLLIALDHLDEVITIIRNSETDTIAQAELMSRFDLSERQSQAILDMRLRRLTGLERDKIQSEYNDLLALIADLADILAKPERVITIIKDELEDIKRKFADQRRTELMVGEVLSLEDEDLIEEEDVLITLSNKGYIKRLGQDEFRTQKRGGRGVQGTGVNDDDFVRELVSTSTHDAMLFFTNQGRVYRLKGYEIPEYGRTAKGLPIVNLLKLDDGETIQTIINVKSDDFHDKYLFFTTRQGVVKRTSVSAFGNIRQNGLKALSLRDNDELINVLLTNGQEDIIIGTHLGYSVRFQESAVRNMGRLATGVKGVNLRKNDYVIGADHIADSRNVLTITEKGYGKQTPASEYPTKGRGGKGIKTANITAKNGPLAGLVTVNDDEDIMIITDTGVIIRTSVADISQTGRSAMGVKVMRLDENAKIVTFALVKSEVIEGTSLNNNENE

SEQ ID NO: 72329 - protein, 449 aa, Streptococcus mutans
MTTGKEYVASVFEKVKAQNAHEPEFLQAVEEVFESLIPVFDNYPKYIEENLLERLVEPERIVSFRVPWVDDKGQVQVNRGFRVQFSSAIGPYKGGLRFHPSVNQSIIKFLGFEQIFKNSLTGQPIGGGKGGSNFDPKGKSDNEIMRFCQSFMTELSKHIGADTDVPAGDIGVGGREIGYLYGQYKRLRNEYTGVLTGKGLTWGGSLARTEATGYGAVYFAEQMLKARGQDFAGKTAIVSGSGNVAIYATEKLQTLGAKVVAVSDSSGYVYDPDGIDVALLKELKEVQRARIIKYADARPNASFTPAGGDSIWTIKADLAFPCATQNELNEADAKTLVANGVIAVSEGANMPSTLEAIDVFLKAGVSFGPAKAANAGGVAVSALEMAQNSQRTAWTFEEVDRKLYDIMKGIYDNSAAAAKSFGQEGNLVVGANIAGFLKVADAMSAQGIV

SEQ ID NO: 72330 - protein, 64 aa, Streptococcus mutans
MKVAIIPEKCIACGLCQTYSGVFDYNDDGIVIFTDSKEKIKTVADDPNILMAVKNCPTKALTLP

SEQ ID NO: 72331 - protein, 246 aa, Streptococcus mutans
MAIGMLTLEITSRLSKEVDMMGIRIAIDGPASSGKSTVAKIIAKKLGYVYLDTGAMYRSATYLALQNDTDLTDERAIVKLLKDYPISFGRRKDDSEQLVFVGNVEVSHPIRENEVTNNVSTVAALPLVRKTLVDLQQQLAKKGGIVMDGRDIGTVVLPDAELKIFLIASVEERAERRYRENLEKGIQTDFNTLKKEIAERDYKDSHRKISPLKPAADAITFDTTGIDIAGVVNFIEKKAQNIIDRS

SEQ ID NO: 72332 - protein, 200 aa, Streptococcus mutans
MEYYVYTGLICQVRFCFSQKNNEGVKNIAKKDLFINNEIRVREVRLIGLDGEQLGIKPLAQAQAIADDANVDLVLIQPQATPPVARIMDYGKFKFEYQKKQKEQRKKQSVVTIKEVRLSPVIDKGDFETKLRNGRKFLEKGNKVKVSIRFKGRMITHKEIGAKVLADFAEATQDIAIIEQRAKMDGRQMFMQLAPIPDKK

SEQ ID NO: 72333 - protein, 148 aa, Streptococcus mutans
MFLAPKEIKNETGESLLYCPKRVLVSKEFTFNAAHHLFNYEGKCKALHGHTYHLQVAVSAFLDERGMTYDFRELKRIYQEYLEPKLDHRYLNESLPYMNTTAENMVYWIYKTVEKALTDERGLQMEHVRLYETPSAYAEFRREWDLQA

SEQ ID NO: 72334 - protein, 66 aa, Streptococcus mutans
MPKQKTHRASAKRFKRTGSGGLKRFRAYTSHRFHGKTKKQRRHLRKASMVHSGDFKRIKSMLTRLK

SEQ ID NO: 72335 - protein, 119 aa, Streptococcus mutans
MARVKGGVVSRKRRKRVLKLAKGYYGAKHILFRTAKEQVMNSYYYAYRDRRQRKRDFRKLWITRINAAARMNGLSYSQLMHGLKLAEVEVNRKMLADLAVNDAAAFTVLADAAKEKLGK

SEQ ID NO: 72336 - protein, 220 aa, Streptococcus mutans
MKINQYIDHTLLKPESRQDQIDKLIREAKTYNFASVCINPTWVSYAAKALEGTDIKVCTVIGFPLGATTSAVKAFETKDAISHGADEVDMVINIGQAKSGHFAFVEEDIRAVVEASGDKLVKVIIETCLLTDKEKIKACQAAVAAGADFVKTSTGFSTAGARLDDVRLMRQTVGPDVGVKAAGGTRSLEDAQAFIEAGATRIGTSAGVTIMEGKQTNSGY

SEQ ID NO: 72337 - protein, 198 aa, Streptococcus mutans
MNNMYYTENPDSKHDIRKIKVELLGQSFHFLTDSGVFSKNMIDYGSQTLLNSLDFAEEKTLLDLGCGYGPLGIALAKVQKLDVTMVDINNRALDLTRQNAENNEVSANIFQSDIYENVFDSFDYIISNPPIRAGKKVVHTIIEGSINHLKENGSLTIVIQKKQGAPSAKNKMENVFGNAIVLKRDKGYYVLRSVKEGD

SEQ ID NO: 72338 - protein, 849 aa, Streptococcus mutans
METVEHLIEKFVPENYNIFLDINRQEKFFSGNVAINGEALDNVISFHQKDLTIHSVLLDNNELTYHIDNENEAVRIELPETGSMTLVLEFSGKITDNMTGIYPSYYTVENVKKEIISTQFESHFAREVFPSIDEPEAKATFDLALKFDQEEGDIALSNMPEINANRRQETGVWTFETTPRMSSYLLAFALGNLHGKTAYTKGGTEVGVFATCAHNIDSVDFALDIAVRVIDFYEDYYGIKYPIAQAYHVALPDFSAGAMENWGLITYREVYLLVDENSTVSSRQQVALVVAHELAHQWFGNLVTMKWWDDLWLNESFANMMEYVAIDAIKPNWHIFEDFQTSGVPHALKRDATDGVQSVHVAVNHPDEINTLFDAAIVYAKGSRLMHMLRRWLGDKVFAAGLKLYFEKHQYNNTVGRDLWNALSTASGKDVASFMDAWLEQPGYPLVTLKLEGDSLQLSQKQFFIGEYEDQDRLWPIPLNSNWSGLPEILSEKTIEIPNFSQLAAVNKEKGPLRLNTDNTAHYISNYEGQLLKSILSDFENLDKTSKLQIIQERRLLAESGQISYAELVKLLTQLSHETSYMVASASDQLIAGLKRFLDEDSQSESMFKVLVRDVYRTNYQRLGFEKSVEEMDEDEKVRQITISNMIYADDPDANEKAQAIFANYKENIEAIPAAIRLDVLTNQIKHAETDDLVSLYLDSYVKTNDSNFRRQLASALANTKSQITLDRILAQLPNRDVIKPQDLSLWYGLFLRKSFAQETFWAWARENWAWIKATLGGDMSFDSFVIIPANVFKTPERLAEYKAFFEPQLDDLSISRNITMGIKEIAARITLIEKEKAAVEQTIVNTFL

SEQ ID NO: 72339 - protein, 320 aa, Streptococcus mutans
MNKLKKGSSKVTVKSVKVKSYANIAIIKYWGKTNTKKMIPATSSISLTLENMYTETRLTLLRNAEADEFYIDHILQNEAEHRKISKVLDFFRKETPFFVKVETSNNMPTAAGLSSSSSGLSALVKAANIFFETNATQEELAQIAKFASGSSSRSFFGPLTAWDKDSGEIYPVPSDLKLAMIMLVLNDTRKPISSRQGMQRCSETSTNFADWIAQSEKDYVAMLDYLKAADFEKVGDLTEANALAMHATTRTANPPFSYLTKASYQAMERVKELRRQGERCYFTMDAGPNIKVLCLEKDLERLSRIFAQDYQIIVSKTKEL

SEQ ID NO: 72340 - protein, 252 aa, Streptococcus mutans
MTEPILKVNDLSVYYGKKKALHSVSIDFYPNEITSLIGPSGSGKSTLLRAINRMGDLNPEVTVTGSIIYNGHNIYSRRTDTVELRKEIGMVFQQPNPFPMTIYENVVYGLRLKGVKDKKILDEAVEKSLVGASIWDEVKDRLHDSAIGLSGGQQQRVCIARVLATSPKIILLDEPTSALDPISAGKIEDTLYGLKEKYTMLVVTRSMQQASRISNRTGFFLAGDLVEYGNTKEMFMNPQKQETEDYITGKFG

SEQ ID NO: 72341 - protein, 332 aa, Streptococcus mutans
MDNIIQVKTGGKLYIAGEYAILTPSQSAIIKNIPIYMTATIKSAKEISIWSDMFAYCVGMAADSNYSLIQETITVLANFLGKEIADLSPFSLEINGELGRDGKKFGIGSSGSVTILTLKALSRFYQLDLSTDTIFKLAAYTLIKRGDNGSMGDLACIAYDNLVYFTAFDRQLVRTWIVSDDLRTVLERDWGYRISVLYPKIACDFLVGWTKQPSISNKMVNLVKSSITPSFLKVSQENVEKLSQGLLNGQKDVIKESLATSSQLLENLNPAIYTERLRQLKAAEKGLDVIAKSSGSGGGDCGIALSFKDRDSHLLVERWQKAGIELLYQEKL

SEQ ID NO: 72342 - protein, 331 aa, Streptococcus mutans
MTNRKDDHIKYALDYRSPYNSFDDIELIHHSLPDYDLAEIDLSTHFAGQDFDFPFYINAMTGGSQKGKEVNEKLAQVADTCGLLFVTGSYSTALKNPDDTSYQVKKSRPHLLLATNIGLDKPYQAGLQAVRDLQPLFLQVHINLMQELLMPEGEREFRSWKKHLSDYAKKLQLPFILKEVGFGMDVKTIQTAIDLGVKTVDISGRGGTSFAYIENRRGGNRSYLNQWGQTTAQVLLNAQPLMDKVEILASGGIRHPLDIIKALVLGAKAVGLSRTMLELVEQHSVHEVIAIVNGWKEDLRLIMCALNCQTIAELRNVDYLLYGRLREGQRQ

SEQ ID NO: 72343 - protein, 218 aa, Streptococcus mutans
MSPTQTLKLSKQLSFGEEVANSVTHAVGAAIMLVLLPISAIYSYQHYGIAAAIGMSIFVISLFLMFLSSTVYHAMTYDSPQKYVLRIIDHSMIYIAIAGSYTPVALSLVGGWLGYLIIVLQWGTTIFGILYKIFAKKINDKFSLFLYLLMGWLVIFIIPAIVSKTGLAFWLLMLGGGLSYTVGAFFYAKKKPYFHMIWHLFILLASALQYIAIVYYML

SEQ ID NO: 72344 - protein, 311 aa, Streptococcus mutans
MKNQELAKKLTSPSKNSRLEKFGKMITLFCLILIVIIVAMILIFVAQKGLSTFFVNKINPLKFLFGTEWQPNVKGADGKPLLGALPMILGSFIVTILSAIIATPFAIGAAVFMTEISPKYGAKILQPVVELLVGIPSVVYGFIGLQIVVPFVRSIFGGTGFGILSGVFVLFVMILPTVTFMTVDSLKAVPRHYKEASLAMGATRWQTIWRVILNAAKPGIFTAVVFGMARAFGEALAIQMVVGNSAVIPTSLTTPAATLTSVLTMGIGNTVMGTVQNNVLWSLALVLLIMSLAFNMLMRFITREGKKNYER

SEQ ID NO: 72345 - protein, 408 aa, Streptococcus mutans
MQERLKHLEKHQLLSTEELKKLCQNQQLPLETANQMVENVLGTFSLPFALAPDFLIDGKEYQVPFVTEEPSVVAAASFAAKIIKRSGGFSTKIHNRQMLGQVALYDVDDFDKAHKNILDKKALLLSLANEAHPSIVKRGGGACDLMTEIKGSFLIVYLSVDTKEAMGANIVNTMLETLAAPLEELSGGQSLMAILSNYATEALVTAQCQVNLRFLSRDKTKAKKLARKMDLASQLAQIDVYRASTHNKGIFNGIDALVLATGNDWRAIEAGGHAYASRDGHYRGLPTWSYDDKNEILKGKISLPMPIATKGGSIGLNPTVQCAYDLLGNPTAKELAAIIAAVGLAQNFAALKALTSTGIQAGHMKLQAKSLALLAGAKEKEVSTLVSQLLKAKHMNLETAQTLLKNLR

SEQ ID NO: 72346 - protein, 279 aa, Streptococcus mutans
MSKADFIFKKNIKKILTDGVWSEQARPKYKNGKTANSKYITGAFAEYDLAKGEFPITTLRPIAIKSAIKEVFWIYQDQTNELAILNDKYGVRYWNDWEVKQTGTIGERYGAIVKKHDIMNKILKQLEENPWNRRNVISLWDYEAFEKTEGLLPCAFQIMFDVRRVKGEIYLDATLTQRSNDMLVAHHINAMQYVALQMMIAKHFGWKVGKFFYFVNNLHIYDNQFEQAEELLRREPVVCQPHLVLNVPNKTNFFDIKPEDFELLDYEPVKPQLKFDLAI

SEQ ID NO: 72347 - protein, 170 aa, Streptococcus mutans
MNNKREKKIVAIWAEDDRHLIGVKGSLPWHLPKELNHFKEMTMGQALLMGRVTFDGMNRRVLPGRDTLILTHDPQFKAEGVSIVHSVPEALSWYRQQDKSLFIVGGASIYKAFESYYDKIIKTSVHGQFEGDTYFPLRDFSSFQEISQAFFEKDENNSHDFTVTVLEKKE

SEQ ID NO: 72348 - protein, 306 aa, Streptococcus mutans
MEIIKIDSHKDIEQQEDSVLVLGYFDGLHRGHKELFNQAREIAQKMQLKIVVLTFPESPQLAFTRFEPDLLNHINYPEKRYCKFAEYGVDCLYLTDFTSSFAKISSDDFIKNYIKALKAKAVVMGFDYKFSHSKANSDYLKHHFAGQVITVPEVQYEGKKISSTRVRQLIKQGDMTQVNRLLGYEFSTRGIVVHGDARGRTIGFPTANLAPLDRTYLPADGVYVADVIVGRKRYRSMTSIGKNITFGGTELRLEANIFDFDDDIYGETIEIFWLNKIREMVKFNSVNDLVEQLKSDKEIAINWGKS

SEQ ID NO: 72349 - protein, 280 aa, Streptococcus mutans
MTSHDAVFKLRKILKEKKIGHGGTLDPDVIGVLPIAVGKATRVLEYMTEAGKVYEGQITLGFSTTTEDASGELLQWTPVDETLSVELIDQAMTCFMGQITQVPPMYSAVKVNGKKLYEYARAGQEVERPQRQVRIYDFKRTSDLVFEDECCHFDFRVSCSKGTYIRTLAVDLGQKLGYASHMSFLKRTASAGLDLSQALTLAEIAEKVEEKDFSFLLPIEYGVLDLPRIDLNPKQTKEVSFGRRLKLLRQEELLAAFFENQLVAVLEKRDTSYKPKKVFL

SEQ ID NO: 72350 - protein, 410 aa, Streptococcus mutans
MAGNRTNDVTVHCSFCGKNQDEVKKIIAGNGVFICNECVELSQEIIREELAEEVLADLSEVPKPKELLAILDSYVIGQDRAKRALAVAVYNHYKRISFTESQDDQDVDLQKSNILMIGPTGSGKTFLAQTLAKSLNVPFAIADATALTEAGYVGEDVENILLKLIQAADYNVERAERGIIYVDEIDKIAKKGENVSITRDVSGEGVQQALLKIIEGTVASVPPQGGRKHPQQEMIQIDTKNILFIVGGAFDGIEDIVKQRLGEKIIGFGQNNKKIDDQSSYMQEIISEDIQKFGLIPEFIGRLPVLAALEQLTVDDLVKILTEPKNALVKQYQTLLSYDGVELEFDQEALQAIAQKAIERKTGARGLRSIIEETMLDLMFEIPSQEDVTCVRITKKAVEGTDKPILETAS

SEQ ID NO: 72351 - protein, 458 aa, Streptococcus mutans
MENHNFENEGQFKRKMTSRHLFMLSLGGVIGTGLFLSSGYTIAQAGPLGAVISYLVGAIVVYLVMLSLGELAVAMPVTGSFHTYATKFISPGTGFTIAWLYWICWTVALGTEFLGAGMLMGRWVPYVPTWVFAALFALLIFGLNALSVRSFAEAESFFSSIKVLAILVFIILGFGAMLGLVSFNGKHEVFLFSHLTAHGALPKGLPALMSVMLAVNYAFSGTELIGIAAGETNNPKEAVPKAIKTTIGRLVIFFVLTIVVLASFLPMKEAGVSSAPFVDVFDKMGIPFAADIMNFVILTAILSAGNSGLYASSRMLWSLANEGMISPRVVKINEHGVPMRALLLSMAGAVLSLFSSIYAADTVYLALMSIAGFAVVVVWLSIPMAQINFRKEWLKSHAQEDLFYKTPFTPILPYITIMLLLISIIGIAWDASQRAGLYFGIPFILLCYLYYYWRHKTL

SEQ ID NO: 72352 - protein, 302 aa, Streptococcus mutans
MNNYIIETKQLSKDFSGEAAVNQLSIHVRKNEIYGFLGPNGAGKSTAMKMLLGLLQPTHGSIRLFDKNFDSNQIALLSSVGSLIEEPSYYANLTGYENLEIIQRLLKLPKENIDKVLKIVKLYEQKDKLVKNYSLGMKQRLGIALAIIKFPKLLILDEPTNGLDPAGIQEIRELIKSLPQKYDMTVIISSHILSEIEQMATTVGIINKGKLLFEGQLTELEEDEKYLFETSDDALAEQLLMRKGFELEENQSIVLKDYNKTNIAAAVKVLVANDIDIYQVRMVRKSLEEVFLDMTGREGGVL

SEQ ID NO: 72353 - protein, 701 aa, Streptococcus mutans
MANFNGRDPFGNMDDIFNQLMGNMGGYNSENRRYLINGREVSPEEFAQYRQTGKLPGNPEIQQAQAAARTPKEDSILTKLGNNLTEEARQGNLDPVIGRNKEIQETAEILARRTKNNPVLVGDAGVGKTAVVEGLAQAIVNGDVPASIKNKEVISIDISGLEAGTQYRGAFEENIQNLVKEVKEAGNIILFFDEIHQILGAGSTGGDSGSKGLADIIKPALSRGELTVIGATTQDEYRNTIMKNAALARRFNEVKVNAPSAEDTYEILKGISALYEQHHNVILPKEVLKAAVDLSVQYIPQRSLPDKAIDLVDMTAAHLAAQHPATDVKTLEKEIQTEKDKQQAAAEKEDYEEALKSKTKIDKLQAQIDNHTEGQKVTATINDVAEAVERLTGIPVSQMGSSDIERLKEMNSRLKGKVIGQDEAVEAVSRAIRRNRAGFDEGNRPIGSFLFVGPTGVGKTELAKQLALDMFGSKDSIIRLDMSEYSDRTAVSKLIGTTAGYVGYDDNSNTLTERVRRNPYSIVLLDEIEKADSQVITLLLQVLDDGRLTDGQGNTINFKNTVIIATSNAGFGNEALTGQEDKDMKIMDRIAPYFRPEFLNRFNAVIEFSHLSKEDLDEIVNLMLSEVNTTLAKKGIDLVVSDSAKAHLIEEGYDEAMGVRPLRRVIEQEIRDKVTDFYLDHTDVKHLKAEMQDDKLIIEEA

SEQ ID NO: 72354 - protein, 167 aa, Streptococcus mutans
MSEASIAKKAELVDAVAEKMKAAVSIVVVDSRGLTVEQDTVLRRNLRESAVEFKVIKNSILRRAAEKAGLEGFDDIFTGPSAVAFSNEDVVAPAKIINDFAKDAEALEIKGGAIEGAVSTKEEIQALAALPNREGLLSMLLSVLQAPVRNVAYAVKAVAESKDEDAA

SEQ ID NO: 72355 - protein, 122 aa, Streptococcus mutans
MALNIENIIAEIKEASILELNDLVKAIEEEFGVTAAAPVAAAGAAGGEEAAAKDSFDIELTAGGDKKVAVIKVVREITGEGLKEAKGLVDNAPSVLKEGVAAAEAEELKAKLEEAGATVTLK

SEQ ID NO: 72356 - protein, 288 aa, Streptococcus mutans
MKITVPATSANIGPGFDSVGVALSKYLSIEVLEEAASWHISHDLGDIPSDEHNLLLVTALKVAPDLRPHRLRMVSDIPLARGLGSSSSVIVAGIELANQLADLNLTDSEKLDIATEIEGHPDNVAPALFGNLVISSYINQKVNYVVADFPKSSFIAFIPNYELKTSDSRDVLPTDLTYKEAVAASSIANVAIAGLLTGDLKTAGEAIMNDRFHERFRQSLVREFAQIKEIGKRNGAYASYLSGAGPTVIVLTDQDKADQIKADIDALELSGSTHLLRIDAKGVRVEKN

SEQ ID NO: 72357 - protein, 756 aa, Streptococcus mutans
MNPLLHGMNEKQAQAVKTTEGPLLIMAGAGSGKTRVLTHRIAYLIDEKFINPWNILAITFTNKAAREMKERAFALNAATQETLIATFHSMCVRILRRDADHIGYNRNFTIVDPGEQRTLMKRIFKNFNIDSKKWNERAVLAAISNAKNDLLDEIAYENRAGDSYTQLVAKCYKAYQSELRQSEAMDFDDLIMLTLRLFDQNPDVLAYYQQRYQYIHVDEYQDTNHAQYQLVKLLASRFKNICVVGDADQSIYGWRGADMQNILDFEKDYPEAKVVLLEENYRSSKKILQAANDVIKNNRNRRDKKLWTQNDDGEQIVYYRADDEQDEAVFVASTIANIVREMGKNFKDFAVLYRTNAQSRTIEEALLKSNIPYTMVGGTKFYSRKEIRDIIAYLNVIANTADNISFERIVNEPKRGVGPGTLEKIRNFANLQGMSLLEASENIMLSSIKGKAVQAVYELANMIIDLRSKLDHYSITEVVEAVLDSSGYLEVLEIQKTLESQTRIENIEEFLSVTKNFDDTTDDVPENETGLERLSRFLNDLALIADTDEAESESAEVTLMTLHAAKGLEFPIVFLIGLEEGVFPLSRSMEEESELEEERRLAYVGITRAEQMLFITNANSRTLYGRTSYNRESRFIQEISEDLLVHQGLARPARASFKVSYQDSNETKFGQGMSLAQALQARKVASQPKKSPFSNSKDDQKEHIDWQIGDTAHHKKWGDGTVLEVSGSGSAQELKIKFPEIGLKKVLASVAPLEKK

SEQ ID NO: 72358 - protein, 266 aa, Streptococcus mutans
MKIGKYDVAGKAAIMGILNVTPDSFSDGGQYETIDQALKQVEAMLAAGAAIIDIGGESTRPGAAFVSAEDEIKRIVPIVEAISEKFNCLISIDTYKTETARVALAAGAHILNDVWSGLYDGQMFQLAAETGAPIILMHNQCEEVYGNVTEDVCQFLLERADLAQKTGVKKENIWLDPGFGFAKNVEQNMELLRGLAEVTKLGYPVLFGISRKRVVDSLLGGHTKPQERDMATAALSGYAISKGCKIVRVHNVAANKDIVKVSSQLA

SEQ ID NO: 72359 - protein, 277 aa, Streptococcus mutans
MTFKKAVTALITFLAVVTLTACGKKGADSQDNWKKFESKKSVTIGFDNTFVPMGFKDKNGKNVGFDIDLANAVFNEYGIKVKWQPINWDLKETELKNGKIDLIWNGYSKTRERARKVSFTKPYMKNDQVLVTKKSSGITSFADMKGKALGAQSGSSGYDAFTANPKILKDIVKDNDASQYETFTQAFIDLKNDRINGLLIDRVYANYYLKQEKELDNYNIIKGKYASEDFSVGVRKSDKTLKKKVNQAFKKLYKNGKFQAISQKWFGQDVASNAIKR

SEQ ID NO: 72360 - protein, 175 aa, Streptococcus mutans
  MISC_FEATURE (163)..(163): X=any amino acid
IETRALMTLVYLSLGSNIGERQTYLQRALEELAHLSHITLQAVSPIYETAAWGKTDQADFLNIVCQLETDLSPYDLLEACQKIEKHLNRVRHEHWGPRTIDIDILFYGNTIIKEDNLKIPHPYLQNRAFVLVPLNDIASELVSSGFKGNGSCFAGKSGQIRSXNLVGNLSVWEIM

SEQ ID NO: 72361 - protein, 382 aa, Streptococcus mutans
MKKAVHFGAGNIGRGFIGQILFENGFAIDFVDVNDKIINALNERHSYDIEIAEDGKRHITVSNVAGINNKENPQAVIDAVAETELITTAIGPNILPFIAQLIAKGIEKRRESQNQTPLDIIACENMIGGSAFLWQEVQKYLSADGLAFAKDYIGFPNAAVDRIVPAQVHEDPLFVVVEPFSEWVVETAAMKNPDLKLSSVHYEENLEPFIERKLFSVNSGHATTAYTGAYFGAKTVLEALKDQQVKEQVKAVLGEIRQLLMAKWQFKENDLKVYHDIIISRFENPYIVDDVTRVARTPIRKLGYDERFIRPIRELKDRGLSYEYLLQTVAYVFHYKDSNDEQSVQLKLLLQEKSLKAVVKEVTGLTDAALIEEIVTSVESLD

SEQ ID NO: 72362 - protein, 145 aa, Streptococcus mutans
MEFQKDLIKLNQHFPDKEAAIRFCGQLLADGGYVEPAYIDAMIQRDKELSVYMGNFIAIPHGTDDAKKDVLKSGITVVQVPDGVNFGTEDDPQVATVLFGIAGIGDEHLQIIQNISIFCADVDNVVKLADAQTEDEVVKLLSQVN

SEQ ID NO: 72363 - protein, 501 aa, Streptococcus mutans
MAINAQEISALIKKQIENFQPNFDVTETGVVTYIGDGIARACGLDNAMSGELLEFDNGTFGMAQNLESSDIGIIILGDFNSIREGDTVKRTGKIMEVPVGQSLIGRVVNPLGQPVDGLGEIETTATRPVEAAAPGVMQRQSVSEPLQTGIKAIDALVPIGRGQRELVIGDRQTGKTSIAIDAIINQKGQDMICIYVAIGQKESTVRSQVEVLRKYGALDYTIVVTASASQPSPLLYIAPYAGVAMAEEFMYNGKHALIVYDDLSKQAVAYRELSLLLRRPPGREAYPGDVFYLHSRLLERSAKLSDELGGGSITALPFIETQAGDISAYIATNVISITDGQIFLQENLFNSGIRPAIDAGSSVSRVGGSAQIKAMKKVAGTLRLDLASYRELEAFTQFGSDLDSATQAKLNRGRRTVEVLKQGLHKPLAVEKQVLILYALTHGFLDSVPVDDILTFQDDMFDYIDSHDADIFETIRTTKDLPEEAVLDKAIQTFKDQSQFS

SEQ ID NO: 72364 - protein, 178 aa, Streptococcus mutans
MDKKTQAVTEIYAKSLVEVALERDSVPIIYDEVRAILSVLDDQQVQDFLASKAIDLSAKSEVVRLFQESCSNYMKQFLEIILQNERQQLLYLIMKEVLKELSLKTHIFDIEVTTAVALSDDQKERLTALVEKKFALTKRNLIEKIDDEIIGGFIIKANNKVIDTSIRSQLQELKMNLK

SEQ ID NO: 72365 - protein, 604 aa, Streptococcus mutans
MCGIVGVVGNRNATDILMQGLEKLEYRGYDSAGIYVINQPENGRLIKSVGRIADLRAKIGIDVAGSTGIGHTRWATHGQATEENAHPHASATGRLVLVHNGVIENYLQIKENYLAGHNLKGETDTEIAVHLIGQFVTDGLSVLESFKKALHIIEGSYAFALIDSQNPDIIYVAKNKSPLLIGLGEGYNMVCSDAMAMIRETNQFMEIHDKELVVLTKDTAQVSDYDGNPVERQAYTAELDLSDIGKGTYPYYMLKEIDEQPTVMRKLISTYANENGKLTVDPAIVKSVQEADRIYILAAGTSYNAGFASKSMIETLTDTPVELGIASEWGYNMPLLSKKPMFILLSQSGETADSRQVLVKANAMGVPSLTITNVPGSTLSREATYTMLLHAGPEIAVASTKAYTAQIAALAFLSKAVGEANGKKEALEFDLVHELSIVAQSIEASLSEREVIEKKVANLLATSRNAFYIGRGNDYYVAMEASLKLKEISYIQCEGFAAGELKHGTISLIEEGTPVLALISSSETVAAHTRGNIQEVAARGANVLTVVEEGLNKEEDDVVVNQVHPYLSSISMVIPTQLIAYYASLQRGLDVDKPRNLAKAVTVE

SEQ ID NO: 72366 - protein, 165 aa, Streptococcus mutans
MSTLINGTSLGNLLIVTGSFILLLLLVKKFAWSQLAAIFKAREEKIAKDIDDAENSRQNAQVLENKRQVELNQAKDEAAQIIDNAKETGKAQESKIITEAHEEAGRLKDKANQDIATSKAEALSSVKADVADLSVLLAEKIMAKNLDKTAQGDLIDSYLDKLGDA

SEQ ID NO: 72367 - protein, 239 aa, Streptococcus mutans
MEKTINPTVKFLGIEFDLTILMMSLLVVLIAFLFVFWTSRHLKIKPTGRQNVLEWIYDFVLGIIKPNLGSYTKNYSLFAFCLFLFVFVANNIGLLTKIQVKDYNLWTSPTANFAVDFGLSLMVAVICHFEGIRKHGLKTYLKDYLEPTAAMLPMNLLEELTNIISLSLRLYGNIYAGEVVMALLVQFADFSPYATPIAFLLNMAWIGFSIFISGIQAYVFVLLTTTYIGKKVNIDTKGN

SEQ ID NO: 72368 - protein, 500 aa, Streptococcus mutans
MNKRVKIVATLGPAVEIRGGKKFGEDGYWGEKLDVEASAAKIAELITEGANVFRFNFSHGDHAEQGERMATVRRAEELARQKVGFLLDTKGPEMRTELFADGVKEYEYKTGDKLRIATKQGIESTKDVIALNVAGGLDIYDDVAVGQTILIDDGKLGLTVTAKDITTREFEVTVENDGIIAKQKGVNIPNTKIPFPALAERDNADIRFGLEQGLNFIAISFVRTAKDVNEVRQICKETGNEHVKLFAKIENQQGIDNIDEIIDAADGIMIARGDMGIEVPFEMVPVYQKMIITKVNAAGKSAITATNMLETMTDKPRATRSEVSDVFNAVIDGTDATMLSGESANGKYPVEAVRTMATIDKNAQTLLNEYGRLNSDNLPRTNKTEVVASAVKDATKSMDIKLVVTITESGNTARLISKYRPDADILALTFDEKVQKSLMINWGVIPILTEKPASTDDMFEIAEKAALKSGLVESGDNIVIVAGVPVGSGGTNTMRVRTVQ

SEQ ID NO: 72369 - protein, 337 aa, Streptococcus mutans
MKRIAVLTSGGDAPGMNAAVRAVVRKAISEGMEVCGINRGYAGMVEGDIFPLDAKGVSNILSRGGTFLQSARYPEFAKLEGQLKGIEQLKKHGIEGVVVIGGDGSYHGAMRLTEHGFPAVGLPGTIDNDIVGTDYTIGFDTAVNTATDALDKIRDTSFSHGRTFVVEVMGRNAGDIALWSGIAAGADQIIIPEEPYDIKEVVANVKNGYLSKSKNHHLIVLAEGVMHGEEFAAQMKEAGDNSDLRVTNLGHILRGGAPTPRDRVIASWMGAHAVELLREGKGGLAIGIQNEELVEHPILGSAEDGALFSLTEQGEIVVNNPHKARLDFAALNRDLSN

SEQ ID NO: 72370 - protein, 1034 aa, Streptococcus mutans
MFAQLDTKTVYSFMDSLIDLKSYIKKAKEMGYSHIGIMDGDNLYGAFHFIKEAQKEKLVPILGLELDLFLSDDLTTVCFIAQNTIGYHNLLKISTAKMTGQQLFSDIEEFMDGLAIIVPYFEGIDQMDFPFSFYIGVRKDTPQLDFKRDILPLHTVRYYDNDDTETLQILHAIRDNLPLREVPPVSKDQYLFSQEEMEQIFEERFPQSLLNLEKLVANVSYQFDTDLKLPRFSRDKPAVVELKELAQKGLVEKKLLSDDYQKRLSDELAVIHQMGFDDYFLIVWDLLRFGRSQHYYMGMGRGSAAGSLVAYALDITGIDPVKNDLLFERFLNEERYSMPDIDIDLPDIYRSQFLNYVRDRYGSTHSAQIVTFSTFGARQAIRDVFKRFGATEYELSQITKKISFRDNLTSVYDKKIAFRQLINSKIEYQRAFEIAKKIEGNPRQTSIHAAGIVMSDDNLTDHIPLKTGEEMMITQYDAPAVEANGLLKMDFLGLRNLTFIQKMQEKVAQDYGHAIDIRAIDLEDKETLALFAAGDTKGIFQFEAAGAINLLKRIKPSRFEEVVATTSLNRPGASDYTENFIRRKYGQEEVDLIDSSIASILKSTYGIMLYQEQVMQIAQIFAGFTLGKADLLRRAMSKKNTVEMQKMEKDFLQGADQLGRDLKVAQNLFARMAKFAGYGFNRSHAYAYSALAFQMAYFKVHYPAVFFDVMLNYSSGDYLSNALETHFKLGPLSINTIPYSDKISHGQIYLGLKNIKGLNRDFAYWIIGNRPFSSIEDFLIRIPEKYQKTEIITPLIQVGLFDQFDKNRQKIVVNLEHLFTFVNELGSLFADSSYNWIEAQDYTNAEKYQLEQDIIGAGVSPHPLIEIAKHSSRHLIALTDLVEGNEATILAQIESIRIIRTKSRGEQMAFLSVTDTKKKLNITLFPETYQKYKNFLTEKTIYYFTGKIQERDNQLQMILHQLDSASTEKCWIKLQNHDCDREISEILAAYPGNIPVVLHYSNTKETFQSSRYFVAKDPELQEKLAYYALKTLFQ

SEQ ID NO: 72371 - protein, 123 aa, Streptococcus mutans
MAWKFNEKSPIYLQIANHIKMQIISQEIKPGQQLATVRDLAEEAGVNPNTMQRAFTSLEQEGMVFSVRTSGRFVTKDQQLIEEERHKLAQTELEDFINKMTTIGFSKDRLTTILDQYIKGETK

SEQ ID NO: 72372 - protein, 347 aa, Streptococcus mutans
MVRKQKRARLIYNPTSGQEIMKKNVAEVLDILESFGYETSAFQTTPRADSAKNEAARASQAGFDLVIAAGGDGTINEVVSGIAPLKRRPKVAIIPTGTTNDFARALKIPRGNPVEATKLIGKNQTIHMDIGRAYNDKYFINIAAAGSLTELTYSVPSQLKTMFGYLAYLVKGAELLPRVRNVPVKVFYDHGVFEGEASMIFVALTNSVGGFETIAPDAKLDDGKFTLILVKTANLFELTDLIRLVLTGGRHINHKKIEYIKTSYLKIIPQGNPPKRMMINLDGEYGGDAPIELRNLKNHIEFFANTDEISDDAITLDTEELVLEAIAQKFAREAESLDEMDKTKEQD

SEQ ID NO: 72373 - protein, 652 aa, Streptococcus mutans
MKERMNELVQLLNQYAREYYTKDNPSVSDAEYDKLYRELVELEKEFPEDILPNSPTHRVGDLVLDGFEKYRHEYPLFSLQDAFSREELDAFDRRIKAEFPQADYLAELKIDGLSISLTYVNGRLRVGATRGDGTVGENITENLKRVRDIPLHLPENIDLTVRGECYLPKASFKTINAERRENGETEFANPRNAAAGTLRQLDTKVVAKRKLATFIYQEAGPTAASSQEAVLESFAKLGFTVNPRHIISSSMDAIWQFIEDVAKERAELAYDIDGVVIKVNSLALQEALGFTVKAPRWAIAYKFPAEEKTAEILSVDWTVGRTGVVTPTANLTPVQLAGTTVSRATLHNVDYIAEKDIRIGDIVVVYKAGDIIPAVLHVVENKRDQQVPLPIPTVCPSCQSELIHFEDEVALRCVNPRCPAQLKEKLIHFASRDAMNIIGLGPAIVEKLFTAELICDVADIYQLTPENLMQLEGIKEKSATKLYKAIQASKANSAEKLLFGLGIRHVGSKASRLLMERFESLEQLAAADFDDIAAIDGLGIVIAESLKTYFATAGAQKLLIELKTAGLNLTYLGKKTASDAALTGMTIVLTGKLANLTRSQAKEKLQSLGANVAGSVSKKTSLVIAGSDAGSKLEKAKTLGIEIKDEAWLESL

SEQ ID NO: 72374 - protein, 399 aa, Streptococcus mutans
MNEFEDLLNSVSEVNPGDVVTAEVLTVDGEQANLVIDGTGVEAVLTLRELTNDRNADINDFVKAGDKVEVLVLRQVVGKDTDTVTFLVSKKRLEARKAWDKLVGREGDVVTVKGTRAVKGGLSVEFEGLRGFIPASMIDTRFVRNTEKFVGQQFEAKIKEIDPSENRFILSRRDVVEAAAAKAREEVFSRLAVGDIVTGTVARLTSFGAFIDLGGVDGLVHITELSHERNVSPKSVVTVGEEIQVKVLAIDEEAGRVSLSLKATTPGPWDGVEQKLAAGDVIEGKVKRLTDFGAFVEVLPGIDGLVHISQISHKRVENPKDVLSVGQDVTVKVLDVNTADERVSLSIKALEERPAQDESNGEKRQSRPRRQKRQDKRDYELPETQTGFSMADLFGDIEL

SEQ ID NO: 72375 - protein, 198 aa, Streptococcus mutans
MKLLVAEDQSMLRDALCQLLLMEDDVEEIYQAADGQEAIELLGKQTVDVAILDIEMPIKTGLDVLEWIRQHQDTKVIIVTTFKRSGYFKRALAAHVDAYVLKDRSASELMATIYTVLSGQREYSPELVEEVTFDSNPLSEREQEVLQLVAKGASNQTIAEQLFLSNGTIRNYMTAIFNKLNANNRTDAVRIARENGWF

SEQ ID NO: 72376 - protein, 341 aa, Streptococcus mutans
MTVDLDWKNLGFEYHKLPFRYISYYKDGKWDDGKLTEDATLHISESSPALHYGQEAFEGLKAYRTKDGSVQLFRPNMNAERLQRTADRLLMPQVPTDKFIDAAKQVVRANEEYVPPYGTGATLYLRPLLIGVGDVIGVHPADEYIFTIFAMPVGNYFKGGLAPTNFLIQDDYDRAAPHGTGAAKVGGNYAASLLPGKVAHERQFSDVIYLDPATHTKIEEVGSANFFGITKDNEFITPLSPSILPSVTKYSLLYLAEHRFGMKAIEGDVCVDELDKFVEAGACGTAAVISPIGGVQHGDDFHVFYSETEVGPVTHKLYDELTGIQFGDVKAPEGWIYKVDD

SEQ ID NO: 72377 - protein, 233 aa, Streptococcus mutans
MSITLPIFVFGMYYFQNHLRLQEKMEAEIVEQNRTINILSAENERNRIGRDLHDTLGHTFAMMSLKTELALKQMKKGRYEAVQKQLEELNQISHDSMHEVRELVNHLKYRTVSEELTEMERLFGLSDISLSVDNQLDLDSLSPVTQSTMTMVLRELANNVIKHSQADDCQITIKRGEEIEVTVEDNGVGFDELTGQELHSIRERLGLVNGEVEVTSSNNPTVVTIYLNEGGRQ

SEQ ID NO: 72378 - protein, 806 aa, Streptococcus mutans
MGERFGRYSKYIIQERALPDIRDGLKPVQRRILYSMNKDGNTYDKGYRKSAKSVGNVMGNFHPHGDSSIYDAMVRMSQDWKNRETLIEMHGNNGSMDGDPPAAMRYTEARLSEIADYLLQDIDKNTVAWAWNFDDTEKEPTVLPAAFPNLLVNGATGISAGYATDIPPHNLAEVIDTVVYLIDHPSAKLDKLMEFLPGPDFPTGAIIQGKDEIRKAYETGKGRVVVRSRTEIENLKGGKKQIVATEIPYEVNKAALVKKIDDVRLNNKVPGIAEVRDESDREGLRIAIELKKDADEQTILNYLFKYTDLQINYNFNMVAIDNYTPRQVGIIPMLTSYIAHRKDIIVARSKFDKEKAEKRLHIVEGLIRVISILDEVIALIRASENKADAKENLKISYDFSEEQAEAIVTLQLYRLTNTDIVTLENEEAELRERITTLNAIIGDERTMYNVMKRELREVKKKFGNPRLSELQAETQTIEIDTASLIVEEETYVSVTRGGYIKRTSPRSFNASTVEELGKRDDDDVIFIQNAKTTQELLIFTNLGNVIYRPIHELADIRWKEIGEHLSQNITNFATDEEILYVDLVDHFEEGTYYAATRLGQIKRFERRDLTPWRSYKSKAAKYAKLKGDDDQVIRISPIKLDDVMLITARGYALRFNIEEVPIVGPKAAGIKAINLKEGDSLATAFIANTDSIYILTQRGSLKRMTTNLIPVTSRAKRGLQVLRELKSKPHRVFAAGPVFSEAAGEIDLFTTVGEQGQEEILEIQSQSLEKYEVNLAELLLSERTSNGSFISDTISDQGVYAAKIKI

SEQ ID NO: 72379 - protein, 201 aa, Streptococcus mutans
MTLDNKLGLTDSLDLAKAEEKISKARAKQLFEARLPDGKEAGCFATLAFIHQFLFEEIYDFAGQVRTVNLAKGNFRFAPVMYLAASLEHIDSMPQDSFEQIVEKYVEMNIAHPFREGNGRSMRLWLDHLLKEKLGQVIDWSQVDKEDYLLAMERSPIRDTEIKHVLKQALTSQINDRELYMKGIDYSYSYEGYTLYHTDDL

SEQ ID NO: 72380 - protein, 649 aa, Streptococcus mutans
MAKKKININNYNDDAIQVLEGLDAVRKRPGMYIGSTDGTGLHHLVWEIVDNAVDEALSGFGNQIDVIINKDGSITVADHGRGMPTGKHAMGIPTVEVIFTVLHAGGKFGQGGYKTSGGLHGVGSSVVNALSSWLEVEITRDGIVYKQRFEDGGKPATTLEKVGKAPKSKSGTKVTFMPDAGIFSTTNFVYNTIAERLNESAFLLKNVTLTLTDERSEEIEHVAFHYENGVQDFVEYLNEDKEILTPVIYFEGEEADFQVEVALQYNDGFSDNILSFVNNVRTKDGGTHETGLKSAITKAMNDYARKTGLLKEKDKNLEGSDYREGLSAVLSILVPEEHLQFEGQTKDKLGSPLARPIVDGLVLEQLTYFLMENGELASNLIRKAIKAREAREAARKARDDSRNGKKNKKDKGLLSGKLTPAQSKNPKKNELYLVEGDSAGGSAKQGRDRKFQAILPLRGKVLNTAKAKMDDIIKNEEINTMIYTIGAGAGPDFKVDDSNYDKIIIMTDADTDGAHIQTLLLTFFYRYMRPLVETGHVYIALPPLYKMSKGKGAKEVVEYAWTDGELEDLRKKFGKGAMLQRYKGLGEMNADQLWETTMNPENRTLIRVTIEDLARAERRVNVLMGDKVPPRRKWIEDNVKFTLEESGVF

SEQ ID NO: 72381 - protein, 212 aa, Streptococcus mutans
MKLILLIIAAYLLGSIPTGLWIGKYFYGKNLRDYGSGNMGTTNTFRVLGPKAGLLTFTVDFLKGTLATLLPMWLGVTHISPLLFGFFAILGHTFPIFANFKGGKAVATSAGILLGFAPFYLIFLLFIFFFTLYLTSMISLSSVIAASIAIITVLIFPALHFLLKDYDFLFVLIVISAGSLIIIRHRENLVRIKNKTESLVPFGLNITKQKTH

SEQ ID NO: 72382 - protein, 703 aa, Streptococcus mutans
MKKKAIIIPVLSTLLLSGAILTAHVYADDLTTEPSADSSTQSSSLSFSEQTADSGQETSQVSDAISSVAAVKSADDSKSVFEDSHSDEVSSSSASSGPKPAVNCVSDEATTTILHTNDMHGRFLEDSSNGVIGMPKLAGIAAESRKKGTTLLLDSGDAIQGLPITNNSKGEDAVALMNATGYDAMTVGNHEFDFGLDQLKTLVKKLDFPIISSNIYVNGVRLFQASTVIDKNKNIDGDEYVVIGVTTPETATKTHPRNVLGVTFTDPITEVNNVIAQTEAQARSQGKTYKNYIILGHLGVDTTTKEEWRGDSLAQALAKNSLLAGKNVIVLDGHSHTAKTQTYGNVTYNQTGSYLNNVGLIKLNSKEILSNALISDQDAKTVAADPNVQMMVDQIETKYKADSSTILIANSPVELNGDRMNVRVRETNLGNAVADALLDYGQTGFSHKSNLAVTNGGGLRETIAKDKPITKGDIIAVLPFGNSVAQVAATGQNIKDMFTKSLGSILQADDKGKSVLDENGQPLLEPSGGFLQIAGAKVYYDTSLEPRKRILYIAILDPETKTYQPLDLTKIYYLVTNDFLAAGGDGYTMLGGSREEGPSMDSIFTDYLSRADLTQYRVINPNSRSISISSTKDSDGDGQPDYLQLIADNKATVPQKGFDSGQDKSEVITLSYSKNWRADQSLLISALHQTAPLAEKFSSYQEK

SEQ ID NO: 72383 - protein, 422 aa, Streptococcus mutans
MLLIKNGRVLDPKSGLDRVLDVLLDGKKVVKIAENIESVDAQVIDAEGLVVAPGLVDVHVHFREPGQTHKEDIHTGALAAAAGGVTTVVMMANTTPTISDVATLTEVLESAAKENIHIKTVATITKHFDGQHLTDFETLLKAGAVGFSDDGIPLTSSKVVKEALDLAKKNDTFISLHEEDPELNGILGFNEKIAKEHFKICGATGVAEYSMIARDVMIAYDRQAHIHIQHLSKAESVKVVAFAQKLGAQVTAEAAPQHFSKTENLLLEKGANAKMNPPLRLEADRLAVIEGLKSGVISVIATDHAPHHADEKNVADVTKAPSGMTGLETSLSLGLTYLVEAGHLSLMDFLAKMTINPAQLYDFDVGYLAENGPADLVIFADKEDRLVSNHFASKAANSPFIGETLKGQVKYTICSGEVIYQA

SEQ ID NO: 72384 - protein, 930 aa, Streptococcus mutans
MSSTEQETMQGIEKLVSDDVYEAAQTSSNGLEASQVQKRQELYGLNRLNEVKGEPVWLKFIKNFTSMMALLLWAGGAVAFFSGTIELGIAIWLVNVINGLFSFFQEYRASQATEALKKMLPSYARVIRDGRESKILAEELVPGDVMLIEEGDAISADGRIIFSTDLQVNQSALTGESNPVRKNNYPVLDSDTENLEFKNMVFAGTSVSNGSAKVVVTKIAMATEFGKIADLTQSMEDEKSPLQKELDLLTKQISLIAVTIGIFFLLASVFFVKQPLAQAFIFSLGMIVAFIPEGLLPTVTLSLAMAVQRMAKEHALVKKLSSVETLGATSVICSDKTGTLTQNEMTVNHVWTLNHEYEVTGQGYASDGHLERNNQEVTVANEEGLEFLLRAAALCSNARVLAPSDGNPRYTVLGDPTEACLNVVAEKAGIDLTENETWAQRVRELPFDSSRKRMTTVHRLKQPVNGSSFISITKGAPKETSELCNKVYENGQLRDLTDTDREAILAANDDYARQGLRVLAVAYRNLEEVADLPKALSDYSPEVIEEDMVFQGLVVMADPPREEVAAAVELCRKASIRIVMVTGDYGLTAVSIAKRIGIVQGENPRVVTGLELKDMSDDDLKQALSDEVVFARVAPEQKYRVVTNLQALGHVVAVTGDGVNDAPALKKADIGVAMGITGTDVAKESADMILTDDNFASIVRAVEEGRAVYTNIRKFLTYIFNSNTSEAVPSAAFLFSKGGIPLPLTVMQILAIDLGTDMIPALGLGVEEAEDGIMERPPRRPTDRLLNKGLLIKAFIWYGLLEAAIAMGAFFFTYAIGGGLSGHLASSGQLYQQATTMTLGAIIFCQLGMVMNTRTEKASIFKVKLFSNKVINFGMMFEIFLFCLLAYLPFLHGLFNTAAIGVWHWLYLILCPIPVLFIEEARKAYMRRKH

SEQ ID NO: 72385 - protein, 339 aa, Streptococcus mutans
MVTIKDVAKEAGVNPSTVSRVLKNSSSISQKTKDRVQQAMTDLGYVPNLAAQMLASGLTHCVGVVFPPLTSPDRLSEPFFMEILAAINNEASRNKFTVSIATSNTLTDLKDQVQLMYRQGRVDGFIVLYSERRDPVRQYLIKNKIPFVIVGAPVDYKDETTYVDNDNQLMAETAVTYLNQKGHKQILFVTNDQESDVYIERFIGYQKGMQALGLQSYDSALFDSKQASTLEAFIKTVQKKKITALLIIGDVVSLRIIQFLSYYGIAVPEDMSIVSFNNSSYATILHPYLTTFDINVNRLGRASLNCLLEKVQKRQSKDQKVIVPFTLKKRESVRNLKKS

SEQ ID NO: 72386 - protein, 415 aa, Streptococcus mutans
MKTWQKIVVGGAGLMLASSILVACGSKDSKSSSSDPKTIKLWVPTGAKKSYQSIVHKFEKDSNYKVKIIESEDPKAQEKIKKDPSTAADVFSLPHDQLGQLVDSGVIQEIPQKYSKEINKNETQQAATGAMYKGKTYAFPFGIESQVLYYNKSKLSADDVTSYETITSKATFGAKFKQVNAYATAPLFYSVGDTLFGKNGEDAKGTNWGNDAGVSVLKWIASQKGNAGFVNLDDNNVMSKFGDGSVASFESGPWDYEAAQKAVGKNNLGVTVYPTININGQEVQQKAFLGVKLYAVNQAPSKGNTKRIAASYKLASYLTSAESQENQFKTKGRNIIPSNKTVQNSDTVKNHELAQAVIQMGSSSDYTVVMPKLNQMSTFWTESAAILSDTYNGKIKESDYLAKLKQFDKDLAAAK

SEQ ID NO: 72387 - protein, 209 aa, Streptococcus mutans
MTLAKDIARDLLDIKAVYLKPEEPFTWASGIKSPIYTDNRITLSYPETRTLIENGFVETIKEAFPEVEVIAGTATAGIPHGAIIADKMNLPFAYIRSKPKDHGAGNQIEGRVTKGQKMVIIEDLISTGGSVLDAVAAAQREGADVLGVVAIFTYELPKATANFEKASVKLVTLSNYSELIKVAKVQGYIDADGLTLLKKFKENQETWQD

SEQ ID NO: 72388 - protein, 419 aa, Streptococcus mutans
MRKIVINGGKPLKGEVAVSGAKNSVVALIPAIILADDIVTLDGVPAISDVDSLIDIMTLMGASVECDGDSLKIDPRGVKDIPMPYGKINSLRASYYFYSSLLGRFGRAVVGLPGGCDLGPRPIDLHLKAFKAMGATVSYEGEAMRLSTEGKPLKGAHIYMDTVSVGATINTMIAASKAQGRTVIENAAREPEIIDIATLLNNMGAHIRGAGTDMIIIEGVEKLHGTRHQVIPDRIEAGSYIALAAAVGEGIKVTNVLYEHLESFISKLEEMGVRMTIEEDSVFVEKQDKLKAVSIKTSPYPGFATDLQQPITPLLLTAVGRGKIRDTIYEKRVNHVAELARMGAKISVLGGQIIYEGPNELSGAPVKATDLRAGAALVTAGLMAKGQTVITNIEFILRGYSDIIQKLNRLGADIEIVEE

SEQ ID NO: 72389 - protein, 397 aa, Streptococcus mutans
MSERKLFTSESVSEGHPDKIADQISDAILDAVLVQDPDAHVAAETAVYTGSVHVFGEISTTAYVDINRVVRDTIAEIGYTDTAYGFSAETVGVHPSLVEQSPDIAQGVNEALEVRGHHEQDDLDLIGAGDQGLMFGFAVDETPELMPLPISLAHRLVRKLAELRKSGEIAYLRPDAKSQVTVEYDENDKPVRVDTVVISTQHDPEATNEQIHRDVIEKVIKAVIPAEYLDAKTKYLINPTGRFVIGGPQGDSGLTGRKIIVDTYGGYARHGGGAFSGKDATKVDRSASYAARYIAKNIVAAGLAKKAEVQLAYAIGVAQPVSVRVDTFGTALVAESKLEQAVRQIFDLRPAGIIKMLDLKRPIYRQTAAYGHVGRTDIDLPWEKLDKVEELKKAVQA

SEQ ID NO: 72390 - protein, 1249 aa, Streptococcus mutans
MTQIFKKLTPINDADIEQAHIDAINFAIEDKDVLNVAVSGNYGSGKSSFIETYKEKFNNKKKKFLHVSLAHFNSEDGNTERQQSNSGTDKAAPKDNILEGKIVNQLLHQIDADKIPLTIFKSKQHPKKRQILGWFILLTILILSMLALWTFPNLSWDSWIKQVLVILLIISISVLIYQLMKLQFYRKLFKSITFKGASVSGEIEIFGKSDASYFDKYLDDVLYLFDNCQSDIIVFEDIDRFETNLIFSKLKEINTLVNNKRKARGEDNKLLFMYLVKDEMFISKERTKFFDFIIPVIPAITASNSREKFSEILADLGCEEDFEGSFLQKISIYIDDLRLVTNICNEYVLYKNNLTGEESANKLKLSNEKLFAMIVYKNVFPKDFSELQVGSGFIHRFFQEKDKLREEQLHDINQQISEIEQKILSAGNEALNNELELYSSILKVPNNRAVLKVNNKFEYEFENRLGFIAELLKEDAEIVSYENYSSAYSGYNVRNETKETIFEILDSEQANFESRLENIKNKSLIESFNNEIDAFQKKKQEIQHQKLANLITREKINSIANEEEFEYIKYNPQFSMITFLIRNGHIDESYPDYITYFYPNSLNREDKEFIMAVQGEEKLPWDYHLTNITEIYNNRLDTSDFEQEKILNYSLLEYTMTRKGILDQEERLRLYFVENRLSFLLSFFQQVPIEGQINTVLDILKYNPNLLELLVVSDDILDKDRYAVFQRILFFVDLTQEILSDKYQKLVSDFISHNWLQLWEEYLSTELRDEMKVKRNLTYLTVKIDRFDFIQEQEYGSIGKTVYENSLYQLNSSNIKNLLLYLDYNLDNDDIKHRNFSIINSDNKFAHLLDYVKENMGDYVKVIVEQSEGEIKDKLEYIYYVLNHEDISDETKTKYLTCVDDNILSLSEIDDMPMTDEAIKLNKAVFDTKNVLNYFAKYGTWNELLINFVNSKDNFNFDNKIFEEESKEEQEKFFLETAKCSELNNNYYEAIMSSISWKFTVFPTEKISDKKIDILIETKSIEFSSAILSNLRDSYPASVIKYILKYLDDYSDNIDNVYNENEILEVLDQDIPLEKAKILVDKFNSTISIKDKKYNSALLAYIIENKFNVEDLPMLLEKYQIFDTTVQEVILQKAKSDIEIILDNAYPIDKNLLSLLIKDDDIDLDDRRLLYSRNIPHDSVEEVLEDLCFLSLFEEYQQIISEHRSINVPATEYNQNLLKFLQDKECFKSFDIDPNDEENYKIGFKEKLK

SEQ ID NO: 72391 - protein, 558 aa, Streptococcus mutans
MYQALYRKYRSQTFDEMVGQEVVAKTLKQAVASKKISHAYLFSGPRGTGKTSAAKIFAKAMNCPHQADGEPCNNCDICHDITNGSLEDVIEIDAASNNGVDEIREIRDKSTYAPSRATYKVYIIDEVHMLSTGAFNALLKTLEEPTENVVFILATTELHKIPATILSRVQRFEFKAIKTKAIKEHLADILKKEGLSFDEEALSLIARRAEGGMRDALSILDQALSLTNDNDVSLEIAEEITGSISLRALDQYVADLLAHETQQALSDLDTIFNNGKSMSRFATDLLNYLRDLLVVQAGGENTHHGEAFDKNLTLSQETIFQMIDVVTKSLPEIKNGTHPKIYAEMMTIRLSENDQKVHSVQDLPDNVAQEIEALKSEIKELKKSLQSLEKGKPFKVTKVQKTSFRYKVDKDKVMTIMRETVADSQKSREYLEALKGSWNEILDSISPQDRALLMGSEPVLANSENAILAFDAAFNAEQAMKRSDLNAMFGNIMSQASGFSPKIMAVPRAEFDAIRSEFAHSLKADKDDSQEETTEATKEFIPEGFDFLADKIVLEEEP

SEQ ID NO: 72392 - protein, 589 aa, Streptococcus mutans
MYYSNGNYEAFAHPQKPENVDGKSAYIVGSGLAALSTAVFLIRDGQMAGERIHILEELSLPGGSMDGIRNERLGYIIRGGREMEPHFEVLWDLFRSIPSLENPKHSILDEFYWLNKKDPSFAKTRAIYERGKAIPDDGQLTLSQKAVKEIFDLVLTPESHLQDVQIDQVFSEDFFNSNFWLYWSTMFAFEPWASAMEMRRYLMRFIQHVGTLKNLSSLKFTQYNQYESLILPLVAFLKDHNVNFSYQTVVTNILVNRSGSDKLATKIEMTVNGQEKSIALSRDDLVFVTNGSITESSTYGNNNHPAPLTHDLGASWQLWKNLAAQDSDFGCPEKFCENIPDANWTMSATITFTDQRIAKYIEQINQKDPYSGSIVTSGPTSIKDSSWLLGYSISRQPHFKEQKKNELVIWLYALYTDRKGDYVAKRPDECTGIEMCEEWLYHIGVPENTIHELACSASTIPCHMPYITTYFMPRTTNDRPLVVPKHSKNLAFIGNYAETPRDTVFTTEYSVRTAMEAVYTLLEVDRGVPEVFASTFDIRMLLNALYYLNGQKSLIEIDFPWVEKAALKEALKKVKGTYIEELLKDYHLI

SEQ ID NO: 72393 - protein, 649 aa, Streptococcus mutans
MIKITFPDGAVREFEIGTTTSEIAESISKSLAKKALAGKFNGQLIDTTRAITQDGSIEIVTPDHEDALDILRHSAAHLFAQAARRLFPDIHLGVGPAIQDGFYYDTDNEAGQISNEDLPRIEEEMKKIVKENFPSVREEVTKDEAREIFKNDPYKLELIEEHSEDAGGLTIYRQGEYVDLCRGPHVPSTGRIQVFHLLNVAGAYWRGDSNNAMMQRIYGTAWFDKKDLKSYLKRLEEAKERDHRKLGKELDLFMISQEVGQGLPFWLPDGATIRRIIERYITDKEVASGYQHVYTPPIASVDLYKTSGHWDHYREDMFPTMDMGDGESFVLRPMNCPHHIEVYKNHVHSYRELPIRIAELGMMHRYEKSGALSGLQRVREMTLNDGHTFVALDQVEDEFKRTLQLIIDVYEDFNLTDYSFRLSYRDPNDTHKYFDDDEMWEKSQTMLKAAMDDMGLDYYEAEGEAAFYGPKLDIQVKTALGNDETLSTIQLDFLLPERFELTYIGADGEEHRPVMIHRGIVSTMERFTAYLIETYKGAFPTWLAPHQVTVIPISNEAHIDYAWEVAKELRDHGIRADVDDRNEKMQYKIRQSQTKKVPYQLIVGDKEVENGTVNVRRYGSKQTHTESIAEFRENILADIKRKSRPDNAK

SEQ ID NO: 72394 - protein, 444 aa, Streptococcus mutans
MRVGLFTDTYLPQISGVATSIKTLKEELEKQGHEVYIFTTTDKHVKRYEDPTIIRLPSVPFISFTDRRIVYRGLFESYKIAKTYKLDIIHTQTEFSLGILGKMVGKALRIPVIHTYHTQYEDYVRYIANGKLIRPSMVKYIVRGFLNDLDGVICPSRIALNLLDGYSVKIPKRIIPTGIDLREYERPDISQEDIAKLREKWAIASDETVLLSLSRVSYEKNIQALLANMPKILSNNPKVKLLIVGDGPYLEELKEQAQDLAVMDNVIFTGMVSHNETALYYKAADFFISASTSETQGLTYAESLASGKPIIAQSNPYLDDLITDKMFGTLYQTESDLADAVLNAIVSTPAKQEKVWQKKLYEISAEAFGKSVFAFYLDMIISKKAKKKEKWSLAVEGNRADTSIRIVKSTIKLPATALKKTAKTSVKVIKAPVRMVNAIRDFLD

SEQ ID NO: 72395 - protein, 616 aa, Streptococcus mutans
MKQSNMLIPTLREMPSDAQVISHALMVRAGYVRQVSAGIYSYLPLAHRVIEKIKKIMREEFDKIGAVEMLAPALLTADLWRESGRYGTYGEDLYKLKNRDQSDFILGPTHEETFTNLIRDAVKSYKQLPLNLYQIQAKYRDEKRPRNGLLRTREFIMKDGYSFHADYDSLDATYEDYRKAYEAIFTRVGLDFKAIIGDGGAMGGKDSQEFMAVTPDRTDLEHWLVLDKAIGSIEEIPADVLKEIKQELSSWLISGEDTIAYSSESDYAANLEMATSEYKPNNKVVSHEDIQRIETPNCKTIDEVAAFLEIDPTQTIKTLLFIADDEPVVALLVGNDQVNEVKLKNYLGADFLEPANEEEAREIFSASFGSLGPVNLPENVKIVADRKVKNIGNAVVGANEDGYHLTGVNPERDFEAAYVDIREVCEGEASPDGRGVLKFARGIEIGHIFKLGTRYSESMGANILDENGRSIPIIMGSYGIGVSRILSAVIEQNARIFVNKTPKGAYRFSWGVNFPKTLAPFDVHLITVNVKDEVSQQLTAKVEESLVDAHYSVLTDNRNERIGSKFSDSDLIGLPIRVTVGKKASDGIVEVKIKSTGDTIEVNAENLLETLSILID

SEQ ID NO: 72396 - protein, 264 aa, Streptococcus mutans
MQKRVLFGGVALAIFLPFLFLGGLFFQLFVGVLAMIGVSELLKMKALEIFSFEGILAMLAAFVLTIPLENYLTFLPIDGSFSAFGLVIFLILAGTVLNTNRYSFEDAAFPIASSLYVGIGFQNLVNARISGLDKVFLALFIVWATDIGAYMIGRQFGQRKLMPAVSPNKTIEGSLGGILSAVVIAFIFMLFDKNVYAPHHFLVMLILVALFSIFAQFGDLVESSIKRHFGVKDSGKLIPGHGGILDRFDSMIFVFPIMHFFGLF

SEQ ID NO: 72397 - protein, 249 aa, Streptococcus mutans
MFTLRRKKQDIKLSKIPAHIGIIMDGNGRWAKKRMKPRVFGHKAGMDALQDVTIAASELGVKILTVYAFSTENWARPQEEVKFIMNLPVEFFDKYVPKLHKNNVRILVIGDKEELPAATLDALERARELTKHNSGLILNFALNYGGRAEIVDAVKLIAQDVLDARFNPGDITEGLIADYLMTSNLPYLYRDPDLIIRTSGELRLSNFLPWQAAYSELYFTDTLWPDFDKKALYLAIEEFNHRHRRFGGV

SEQ ID NO: 72398 - protein, 663 aa, Streptococcus mutans
MLHKKETQIIQLLIKDEGQFITSKALAEQLNCSDRTIRTYCKLLSEKLKDYSGVDIISKQGQGYQFNIKDREKYLHFLEDNHINDHLLTYKKVIDINDRYNYLLNKLLFEQNEIYFDDLADELFVSRSTLSNDFKKIRKRFVPYHLKIESKANKGVFVTGTERDKRRFIMDYFIHSGFINTMQTYIDNELLNQKISFEELTIIVLDECREGHLKLSDFVIQNLVIHIALAIRRITEGFHIAKISDKTELSNMPEREVARKILKRVTLATQIEFPIEEVDYITLHLISKSYNNAHYISNDNFEQIRKELVMAIEQLEPCLKNDFQFIEGLLAHLSTMLIRLEGQINLENPLTAEIQKNYQVKYQLAQKLMHSMPIFSPFSFSADEIAYIALHFMAATERLKEKNKHNILVICATGYGSAQMLKNRIENELGNLVHITDVVGYYDINDDKLKDIDFIISSIDLSNLIFNIPVFTVSVFLTEEELSRIRHGIAHIEASPTELAPVGVSPADLSSDFDHYFSKDAFLQLSDVSKEEVLKKMILSISKGEKSHFADKMEELIYQREAMSSVVFSDTIAVPHPIKAVGNRHHIAVAMIKDGLFWNQDYPKMKLVFLTSMSIYDNDGLPELASCIATLVDRPDIQQKMLTCQSFEQFKKLFLKLEEKEKG

SEQ ID NO: 72399 - protein, 238 aa, Streptococcus mutans
MGRKWANIVAKKTAKDGANSKVYAKFGVEIYVAAKQGEPDPESNSALKFVLERAKQAQVPKHVIDKAIDKAKGNTDETFVEGRYEGFGPNGSMIIVDTLTSNVNRTAANLRTAFGKNGGNMGAAGSVSYMFDKKGVIVFAGDDADSIFEQLLEADIDVEDVEAEDGSVTVYTAPTDLHRGIEALRAGGVAEFQVTELEMIPQSEVTLEGEDLETFEKLIDALEDDDDVQKVYHNVDGL

SEQ ID NO: 72400 - protein, 477 aa, Streptococcus mutans
MSKLPENFLWGGAVAAHQLEGGWQEGGKGISVADVMTAGRHGVAREITAGVLEGKYYPNHEAIDFYHHYKEDVKLFAEMGFKCFRTSIAWTRIFPKGDEAEPNEAGLQFYDDLFDECLKYGIEPVVTLSHFELPYHLVTEYGGFTNRKVIDFFVHFAEVCFRRYKDKVKYWMTFNEINNQANYQEDFAPFTNSGIVYKEGDDREAIMYQAAHYELVASARAVKIGHAINPNLNIGCMVAMCPIYPATCNPKDILMAQKAMQKRYYFADVHVHGFYPEHIFKYWERKAIKVDFTERDKKDLFEGTVDYIGFSYYMSFVIDAHRENNPYYDYLETEDLVKNPYVKASDWDWQIDPQGLRYALNWFTDMYHLPLFIVENGFGAIDQVEADGMVHDDYRIDYLGAHIKEMIKAVDEDGVELMGYTPWGCIDLVSAGTGEMRKRYGFIYVDKDDEGKGTLKRSPKLSFNWYKEVIASNGDDI

SEQ ID NO: 72401 - protein, 130 aa, Streptococcus mutans
MKFLHTCIRVKDLDASLKFYQEALDFKEVRRNDFPEYKFTLVYLQLEDDPDYELELTYNYDHEAYDLGNGYGHIAVGVDDLEATHQAHQKAGYTVTDLSGLPGKPKMYYFITDPDGYKIEVIRLKQFQEK

SEQ ID NO: 72402 - protein, 197 aa, Streptococcus mutans
MTYEAYIAMNRDDLLKKLKSVVPKKRLRHMIGVEKASIYLAEINGYDTEKAGLAGLLHDYAKKLSDQEFLQLIDKYHLDSQLKNWGNNVWHGMVGIYKIQEDLGLQDQEILRAIEIHTVGSSHMSTLDKIVYVADYIECNRDFSGVDKARAIAETSLNKAVAYETARTVAFLASKGLKIYPQTLETYNAYVDYLRED

SEQ ID NO: 72403 - protein, 561 aa, Streptococcus mutans
MKRLFAIVAMCVGIFLCMLDTTVMNIALPAIQDSLKVNLNDLQWSLNVYTIIFASLTIPLSKLAEKFGKHKFYLLGLLTFMGGSLISALSSDLNFLIFGRGIQSIGAAIVFPLSMTIGINTVSLNTRKSVIAALGVTQGLAAALGPTIGGVLTQFLGWRWIFLINLPLMVISFIICLVCLDLQERKEKAKIDYLGALISMATLFSLTLGLVQGRDWGWTSFNILTLLISSAVLLILFILWEKGCQDPMVPLNLFKNKEFMGSAIAIILSNVFLVAVTVVLPTYFTRVQSKTELEAALLVTPITAMILIFSPLAAFIIDKLGPRLVIASGFTLMAAAYILFTKIDMADSTQTTLTCLILGTGYGIIAGPITVLAASNFTGSLLTASQSVAGVLRQVGIVLAVAVYVTGLYTNLGTAKKEAISYIKTEVKTIDVSKEKQQTIQKTAIHSLGQSTSHQTVSNHFSKTERKGIINEAYQKTLQKYPSKLPQVQKQEIYKKVKASVEKKLATINKQINKAIKHIKDYSRKRYTKAFTKLYSYSIIFIILAIFSSLLFPRKNTIISM

SEQ ID NO: 72404 - protein, 155 aa, Streptococcus mutans
MVKAQGNVVAQNKKARHDYEILETYEAGIVLTGTEIKSVRAARITLKDGFAQVKNGEVWLNNVHITPYEQGNIWNQDPDRTRKLLLKKREIAKLDNELKGTGMTLVPLKVYLKNGFAKVLIGLAKGKHDYDKRESIKRREQDRDIKRQMKQFNGR

SEQ ID NO: 72405 - protein, 368 aa, Streptococcus mutans
MEELFCIGCGAQIQTTAKEQAGYTPKSALEKGLESGKIYCQRCFRLRHYNEITDVHISDDDFLKLLHEVGDSRTLVVNVIDIFDFNGSVIPGLQRFISSSDLLLVGNKADILPKSVKSGKITQWLMERAHEEGLRPLDLILISAQNKWAIKELIAKIEELRQGRDVYVVGVTNVGKSTLINAIIQEITGDKNIITTSRFPGTTLNKIEIPLNDGSYIFDTPGIIHRHQMAHYLSDKALKYISPKKEIKPKTYQLNPEQTLFLGGLARFDYVTGDKQGFTAYFDNNLKLHRTKLAGADAFYDKHIGSLLTPPDKKEMAAFPKLVRHEFTIKEKTDLVFSGLGWIRINGRAKIAAWAPEGVAVVTRKALI

SEQ ID NO: 72406 - protein, 389 aa, Streptococcus mutans
MIAWFGSFFTGASFSLVMPFMALFVEELGVKGDLVKLYAGLAVSISALASALFAPVWGRLADRYGRKPMMIRASLVMTFTMGGLAFVTDVYGLLFLRLLNGMFAGYVPNANALIASQAPKNESGSALGTLATGVIAGSLIGPLMGGMLAEFLGIRNVFLLVGTLLLLVMLLTTFFIQEDFRPVSKKDILSTKELFAQIKDRQILLGLFVTSMIIQISAQSVAPILALYIRYLGQRDNLMLIAGLIVSAMGFSSIISSSRFGKLGDKIGNHRMLLAGLFYCGIIYLILAQSKTPLQLGIWRFLFGFGTGALMPSVNALLTKLTPKEGISRIFSYNQMFTNFGQVLGPFVGSTVAAGWGYRWVFYATGAIVLFNFIWSLVNFRKYLKVREI

SEQ ID NO: 72407 - protein, 306 aa, Streptococcus mutans
MGVSMKKSFKGTVLVVLAAIAWGISGVSGQFLMKQGISVYLLTSLRLLISGLLLIGVVIWQQPQQIKAILEDKKMLVGIFGFSICGLLLNQFSYLQAIHYTNAGTATVLQYMAPVLVLTIICFKNRSLPTIGELAAILLAILGTFVIATHGQLGNLALSPVGLFWGLFSAVTYTLYMLLPIKLIHKWGSLLVIGLGMVMGGLVFGLVSRSWQYNSHFQANNLLAYVGLIIVGSVFAYTAFLKGVSLIGAVKGSLLASIEPVAAVFFSVTLMKEIFYPIDFLGMLLIILAVLIISIRDLLVTNKEKI

SEQ ID NO: 72408 - protein, 273 aa, Streptococcus mutans
MPELPEVETVRRGLEHLIVGKKIVSVEVRVPKMVKTGVEDFQLDILGQTFESIGRRGKYLLLNLNRQTIISHLRMEGKYLLFEDEVPDNKHFHLFFGLDGGSTLVYQDVRKFGTFELLPKSQVEAYFVQKKIGPEPNAKDFKLKPFEEGLAKSHKVIKTLLLDQHLVAGLGNIYVDEVLWAAKVDPERLASQLKKSEIKRIHDETIRILQLAIEKGGSTIRSYKNSLGEDGSMQDCLQVYGKTDQPCARCATPIEKIKVGGRGTHFCPSCQKQ

SEQ ID NO: 72409 - protein, 299 aa, Streptococcus mutans
MSFKSGFVAILGRPNVGKSTFLNHVMGQKIAIMSDKAQTTRNKIMGIYTTDKEQIVFIDTPGIHKPKTALGDFMVESAYSTLREVDTVLFMVPADEKRGKGDNMIIERLKAAKVPVILVINKIDKVHPNQLLEQIDDFRNQMDFQEIVPISALQGNNVSHLVDLLVDHLEEGFQYFPADQITDHPERFLVSEMIREKVLLLTREEIPHSVAVVIDSMARDEETHKIHIRATIMVERDSQKGIIIGKKGAMLKKIGQMARRDIELMLGDKVYLETWVKVKKNWRDKKLDLADFGYNKKEY

SEQ ID NO: 72410 - protein, 137 aa, Streptococcus mutans
MPMDLRDNKQSQKKWKNRTLTSSLEFALTGIFTAFKEERNMKKHAVSALLAVIAGLVFKVSVIEWLFLLLSIFLVITFEIVNSAIENVVDLASDYHFSMLAKNAKDMAAGAVLVISGFAALTGLIIFVPKIWFLLFH

SEQ ID NO: 72411 - protein, 479 aa, Streptococcus mutans
MNFETIIGLEVHVELKTNSKIFSPAPAHFGEDPNANTNIVDWSFPGVLPVMNKGVIDYGIKAALALNMDIHQRMHFDRKNYFYPDNPKAYQISQFDEPIGYNGWIEIELEDGSTKKIRIERAHLEEDAGKNTHGADGYSYVDLNRQGVPLIEIVSEADMRSPEEAYAYLTALKEIIQYTGISDVKMEEGSMRVDANISIRPYGQEAFGVKTELKNLNSFNFVRRGLAYEEKRQAEVLRSGGQIQQETRRYDEATGETLLMRVKEGSADYRYFPEPDLPIFEIEDEWIEKVRAELPAFPKERRAKYVNDLGLSAYDAAQLTSSKAISDFFESALAQGADAKAVSNWLQGDVAQYLNTENQTIDQIGLTPENLTEMLQLVADGTISSKIAKKVFVHLAKNGGSAKEYVKSAGLIQISDPAQLLPIIQEVFANNEKALNDYKGGNKNAAKSLVGQIMKATRGQANPQVAQKLLNEELAKLTD

SEQ ID NO: 72412 - protein, 488 aa, Streptococcus mutans
MTFNHKSIDELHDLLVNKEVSALELTKATLEDIKEREETVGSFITVTQEEALAQAAAIDEKGIDADNVMSGIPLAVKDNISTKNILTTAASKMLYNYKPIFDATSVEKLYGRDMIIVGKTNMDEFAMGGSTENSYFKLTKNAWNQEKVAGGSSGGSATAVASGQVRLSLGSDTGGSIRQPAAFNGVVGIKPTYGRVSRFGLIAFGSSLDQIGPFSQTVKENAQLLNVISGNDKKDSTSSQVKVPDFTQFIGKDIKGMKIALPKEYIGQGIDEKVKETILKAAKHLESLGAIVEEVSLPHSKYGVAVYYIIASSEASSNLQRFDGIRYGYRTDDYENLDDVYVNTRSEGFGEEVKRRIMLGTFSLSSGYYDAYFKKAGQVRTLIMEDFKKVFANYDLILGPTAPTVAYDLDSQHQDPVAMYLADLLTIPVNLAGLPGISIPAGFVEGLPVGMQLIGKPFAEQTIYQAAAAFEASTDYHKQQPVIFGGGN

SEQ ID NO: 72413 - protein, 100 aa, Streptococcus mutans
MKISEEEVRHVANLSKLKFSDDETTEFATTLTKIVDMVELLNEVDTQGVPFTSNVADNINYMREDVSVAGWDREQLFKNVPEHEDGLIKVPAIIDEGGDA

SEQ ID NO: 72414 - protein, 185 aa, Streptococcus mutans
MANAIVEKAKERFEQSHQSLAREFGSIRAGRANASLLDRIEVEYYGVPTPLNQLASITVPEARVLLVSPFDKSSLKDIEHAINASDIGINPANDGSVIRLVIPALTEETRKELAKEVKKVGENAKVAIRNIRRDAMDEAKKQEKIKEITEDELKSLEKDIQKVTDEAVKHIDSMTANKEKELLEV

SEQ ID NO: 72415 - protein, 245 aa, Streptococcus mutans
MVKPKYSRVLIKLSGEALAGEKGVGIDIPTVQTIAQEIKEVHDSGIEIALVIGGGNLWRGEPASKAGMDRVQADYTGMLGTVMNALVMADALQHAGVDTRVQTAIAMQQVAEPYIRGRALRHLQKGRIVIFAAGVGSPYFSTDTTSALRAAEIEADAILMAKNGVDGVYNDDPRKNADAIKFNELTHMEVLKRGLKIMDSTASSLSMDNDIDLVVFNLNESGNIKRVIFGEQIGTTVTSRISDSE

SEQ ID NO: 72416 - protein, 229 aa, Streptococcus mutans
MAKKSKQLRAALEKIDSTKAYSVEEAVALAKETNFAKFDATVEVAYNLNIDVKKADQQIRGAMVLPNGTGKTQRVLVFARGAKAEEAKEAGADFVGEDDLVQKINGGWLDFDVVIATPDMMAIVGRLGRVLGPRNLMPNPKTGTVTMDVAKAVEESKGGKITYRADKAGNVQTIIGKVSFDADKLVENFKAFNDVIAKAKPATAKGTYITNLVLTTTQGPGIKVDANSF

SEQ ID NO: 72417 - protein, 141 aa, Streptococcus mutans
MAKKVENIVKLQIPAGKATPAPPVGPALGQAGINIMGFTKEFNARTADQAGMIIPVVISVYEDKSFDFVTKTPPAAVLLKKAAGVDKGSGEPNKTKVASVTRAQVQEIAETKMPDLNAANLESAMRMIEGTARSMGFTVTD

SEQ ID NO: 72418 - protein, 787 aa, Streptococcus mutans
MAKTKNKRKGRKTRRPTKAELEKQRAIKRMVFALFMAFVLFFAIFKLGRVGVTVYNIIRLMVGSLAYPFIFAALIYLFATKWLKKHDGLVGGFVITMLGMLLEWQAYLFSLATMKDQSVIKGTLVIVFSDLSKFRVANFAGGGFLGALLYMPVAFLFSNIGSFLIGGLFLLLGLFLMSPWDVYDVMNFFKDSYAKWQVKRQENREKRFAQKEEARLLAQQAVQEAQESATFDHGLNAAIDLETGEVLDQAQTIDLDDFDGQVHKEPEIIGYQSDPEGEALEAEVPAAEQTSQLPKEEDMSDESLEVDFTPKTTLHYKLPGIDLFAKDKPKNQSKEKRLVRDNIKILEETFTSFGIKANVERAEIGPSVTKYEVKPAVGVRVNRISNLADDLALALAAQDVRIEAPIPGKSLVGIEVPNSEVATVTFRELWEQAKASPDKLLEVPLGKAVNGSVRSFDLAKMPHILVAGSTGSGKSVAVNGIIASILMKARPDQIKFMMIDPKMVELSVYNDIPHLLIPVVTNPRKASKALQKVVDEMENRYELFSHFGVRNIAGYNAKVEEFNRHSETKHIPLPLLVVIVDELADLMMVASKEVEDAIIRLGQKARAAGIHMILATQRPSVDVISGLIKANVPSRIAFAVSSGTDSRTILDENGAEKLLGRGDMLFKPIDENHPVRLQGSFISDDDVERIVSFIKEQAEADYDESFDPGEVSEDDNSNGNGGNSEGDPLFEDAKALVLETQKASASMLQRRLSVGFNRATRLMEELEEAGVIGPAEGTKPRKVLQSN

SEQ ID NO: 72419 - protein, 231 aa, Streptococcus mutans
MKIGIIAAMEEELKLLLAELNHKREEICLERPYYSGKLGKHQVVLVQSGVGKVMSAMSVAVLVDHFKVDALINTGSAGALAPDLAIGDVVVADRLAYHDVDLTALGYEFGRMSGQPLFFKSDQTFVSAFEEVLAKHHIHSKIGLITTSDSFMAGKEKTIFVKEHFPEVQAVEMEGAAIAQAAYAAKRPFVVIRSISDTAAHDANITFEEFVVKAGKQSAQVLLKFLEILDQ

SEQ ID NO: 72420 - protein, 466 aa, Streptococcus mutans
FFMKEFLMTNYAIILAAGKGTRMKSDLPKVLHQVAGLTMLEHVKRAVDTMNPAKTVTVVGHKAELVQKVLEDQSEFVLQSEQLGTGHAVMMAESSLAELEGQTLVIAGDTPLIRGESLKNLLHYHKSHKNVATILTAEADDPFGYGRIIRNQNAEVIKIVEQKDASDYEQQVKEINTGTYVFDNKRLFEALKEINTNNAQGEYYLTDVISIFKEADEKVGAYKLADFDESLGVNDRVALAKAEKVMRRRINHAHMVNGVTLTNPASTYIDSDVIIAPDVVIEANVTLKGQTKIETGAVLTNGTYIVDSVIGENTVITHSMIEASRIEKNVTVGPYAHLRPNSVLEEAVHVGNFVEVKASTLGKETKAGHLTYIGNAEVGHDVNFGAGTITVNYDGQNKYKTIIGNHVFVGSNSTIIAPLTIGDNALTAAGSTIHKDVPVDSIAIGRGRQVNKEGYAKKKPHHPNNK

SEQ ID NO: 72421 - protein, 371 aa, Streptococcus mutans
MIASYHRPTTALVHLDRIKFNIEQVQHHIPKSAKTFAVVKANAYGHGAVQVAQAIQKQVDGFCVSNLDEALELRQAGLNDFILILGVLLPEEVALAKKENITITVADLDWFDKVQTENIDLAGLSVHVKVDSGMGRIGVRSTAEANQLIAGLQKAGATVNGIFTHFATADEASTVKFSQQLEMFTTLISQLDYKPQTVHASNSATSIWHSDTVMNAVRLGIVMYGLNPSGNALELPYEVKPALELTSALVQVKEVQAGDTVGYGATYTASQAEIIGTVPVGYADGWTRDLQGFHVLVNGHYCEIVGRVSMDQITIRLPKAYPLGTKVTLIGQDGHETISATDVAEKRETINYEVLCLISDRVPRKYDKKFS

SEQ ID NO: 72422 - protein, 119 aa, Streptococcus mutans
MIIGHGIDLQDIAAVQRAHERSSRFASKVLTFKELEIFTSLKGRRQVEYLAGRWAAKEAFSKAYGSGIGSLRFQDLEILANNKGAPIFTKSPFSGNIFISISHSKNYVEASVILEENNL

SEQ ID NO: 72423 - protein, 669 aa, Streptococcus mutans
MTEKQPFYITTPIYYPSGKLHIGSAYTTIACDVLARYKRMMNHDVFYLTGLDEHGQKIQQKSEEAGITPQAYVDGMAVGVKELWKLLDISYDKFIRTTDDYHEKVVADVFEKLLAQGDIYLGEYSGWYSVSDEEFFTESQLEEIFRDEDGKVIGGIAPSGHEVEWVSEESYFLRLSNYADRLVDFFHAHPDFIQPDGRMNEIIKNFIEPGLEDLAVSRTSFTWGVKVPSNPKHVVYVWIDALLNYATALGYGQDAHANFDKFWNGTVFHMVGKDILRFHSIYWPILLMMLDLKMPERLIAHGWFVMKDGKMSKSKGNVVYPEMLVERYGLDPLRYYLMRSLPVGSDGTFTPEDYVGRINYELANDLGNLLNRTVAMINKYFGGEIPAYVENVTDFDADLAAVVADNLAQYHKQMNAVDYPRALETVWNIISRTNKYIDETTPWVLAKDKAKRDDLAAVMAHLAASLRVVAHLIQPFMMTTSNAIMEQLGLAGQFDLEGLELAGLPTGVKVIAKGTPIFPRLDMDEEIAYIKEQMGDNSAIAQEEEKEWNPTTVELKNEKKAIKFDDFDKLEIRVAEVKEVSKVKGSDKLLKFRLDAGDGEDRQILSGIAKYYPNELDLVGKKLQIVANLKPRKMMGLVSQGMILSAEHADGKLTVLTVDSSVPNGSQIG

SEQ ID NO: 72424 - protein, 201 aa, Streptococcus mutans
MTWNTPKPGEWKSEELSKGRIIDYKAFNFVDGEGVRNSLYVAGCMFHCEGCYNVATWSFDAGIPYTQELEEQIMEDLAQPYVQGLTLLGGEPFLNTGILLPLLKRIRKELPEKDIWSWTGYTWEELMLETPDKLEMLNLLDILVDGRFDKSKKNLMLQFRGSSNQRIIDVPKSLASGQVVIWDKLNDGKQTYEQIDRDGLI

SEQ ID NO: 72425 - protein, 839 aa, Streptococcus mutans
MANILRTIIENDKGEVRKLTKIAKKVEGYANEMEALSDEELQAKTDEFKERYQNGETLDDLLPEAFAVVREASKRVLGLYPYRVQIMGGVVLHHGDVPEMRTGEGKTLTATMPVYLNALAGEGVHVVTVNEYLATRDATEMGELYSWLGLSVGINLAAKSSSEKREAYNCDITYSTNAEIGFDYLRDNMVVRKENMVQRPLNFALVDEVDSVLIDEARTPLIVSGPVSTETNQLYHRADSFVKTLSEDDYAIDTPTKTIGLKDSGIDKAEEYFHLENLYDIDNVALTHYIDNALRANYIMLLDIDYVVSEEQEILIVDQFTGRTMEGRRFSDGLHQAIEAKEGVPIQDESKTSASITYQNMFRMYKKLAGMTGTAKTEEEEFREIYNMRIIPIPTNRPVARIDHQDLLYPTLEAKFRAVVADVKERHEKGQPVLVGTVAVETSDLISKMLVQAGVPHEVLNAKNHFKEAQIIMNAGQRGAVTIATNMAGRGTDIKLGEGVRELGGLCVIGTERHESRRIDNQLRGRSGRQGDPGESQFYLSLEDELMRRFGSERIKAFLDRFIEEDNDVVIKSRMLTNQVESAQRRVEGNNYDTRKQVLQYDDVMREQREIIYAERYDVITAERDLAPEIKAIIKRTIERTVDSHSQLDRKESLDAILNFAKTNLLPEDTISLHDIEDLNYEDIKDLLYDAALKNYDRQIAKLRDEEAVREFQKVLILMVVDNKWTDHIDALDQLRSSVGLRGYAQNNPIVEYQSEGFRMFQDMIGAIEFDVTRTMMKAQIHEQEREKETESRTTAEQNISAQSTISPQDPIFKNVGRNDKCPCGSGKKFKNCHGRKRF

SEQ ID NO: 72426 - protein, 316 aa, Streptococcus mutans
MAEPLFLQSQMHKKIWGGNRLRKEFGYDIPSETTGEYWAISAHPNGVSVVKNGVYKGVPLDELYAEHRELFGNSKSSVFPLLTKILDANDWLSVQVHPDNAYALEHEGELGKTECWYVISADEGAEIIYGHEAKSKEELRQMIAAGDWDHLLTKIPVKAGDFFYVPSGTMHAIGKGIMILETQQSSDTTYRVYDFDRKDDQGRKRALHIEQSIDVLTIGKPANATPAWLSLQGLETTVLVSSPFFTVYKWQISGSVKMQQTAPYLLVSVLAGQGRITVGLEQYALRKGDHLILPNTIKSWQFDGDLEIIASHSNEC

SEQ ID NO: 72427 - protein, 293 aa, Streptococcus mutans
MSKLYGSIEAGGTKFVCAVGDENFQILEKVQFPTTTPYETIEKTVAFFKKFEADLASVAIGSFGPIDIDQNSDTYGYITSTPKPNWANVDFVGLISKDFKIPFYFTTDVNSSAYGETIARSNVKSLVYYTIGTGIGAGTIQNGEFIGGMGHTEAGHVYMAPHPNDVHHGFVGTCPFHKGCLEGLAAGPSLEARTGIRGELIEQNSEVWDIQAYYIAQAAIQATVLYRPQVIVFGGGVMAQEHMLNRVREKFTSLLNDYLPVPDVKDYIVTPAVAENGSATLGNLALAKKIAAR

SEQ ID NO: 72428 - protein, 92 aa, Streptococcus mutans
MGFAETFKALSNPIRRDILDLLKLGQLSAGEISSHFELAGATISHHLSVLKKADLVRETREKNFIYYELNTSVLEDMMVWLADLKGNTHDED

SEQ ID NO: 72429 - protein, 391 aa, Streptococcus mutans
MNLLHFLHIYQKKLQIRIAVAHVNHKQRPQADEEEIYLKNWARDNHIPFYTAVFKGIFSEKKARDFRYTFFKNIMKEHGYTALVTAHHANDQAETVFLRLLRGSRLRYLTGIKEIQEFGNGQLIRPFLKFHKKELPNIFHFDDDSNQGDSYLRNRIRNHYLPILTQENPKLSQHLIQMSEETNLLFKAFSDLTSQLDIQDCQIFRSQSEAIQYFLLQNYLRKFPNLEVSKAQFDNLLHILRTKDYYYDYLKNNYYLKKDKKRFKICKIGPETDRFEGEKVLEYGSMVKYGQYIFSFQEGSDSKKGIPVKNDFPIIIRRRKPGDKIKLGSHSKKLRRLFIDEKIPIFKRSNAIIVEQDSDIILILLDGVTYLRKGFKDDIMKGRLYIQNRNW

SEQ ID NO: 72430 - protein, 656 aa, Streptococcus mutans
MKNNRNNGFVRNSLVYIILILAIVTGFQYFFRGTGSQSEKISYTTLVKRVKSGDIKSITYQPSGSIVQVTGDYTKSREIKTNSDLAFFNGTTTKVKKFTSIVLPNSTSIEKIEKLAEDKGTKISVKQESSSGAWISFLMSFLPIFIMIFFFTMMLNQSGGGARGAMSFGKNKARSSSKSDVKVRFSDVAGAEEEKQELIEVVDFLKDPKRYNALGARIPAGVLLEGPPGTGKTLLAKAVAGEAGVPFFSISGSDFVEMFVGVGASRVRSLFEDAKKAERAIIFIDEIDAVGRRRGAGMGGGNDEREQTLNQLLIEMDGFEGNENIIVIAATNRSDVLDPALLRPGRFDRKVLVGQPDVKGREAILRVHAKNKPLASDVNLKVVAQQTPGFVGADLENVLNEAALVAARRSKKIIDASDIDEAEDRVIAGPSKKDKTVSEHERQMIAYHEAGHTIVGLVLSNARVVHKVTIVPRGRAGGYMIALPKEDQNLLSKSDLKEQLAGLMGGRVAEEIIFNAQTTGASNDFEQATQLARSMVTEYGMSEKLGPVQYEGNHSMMPGQFASEKTYSAQTALLIDEEVRELLNEARNKAAGIINDNRETHKLIAEALLKYETLDAAQIKSIYETGKMPEKSEDSKDAHALSYDEIKEKMSEDNTD

SEQ ID NO: 72431 - protein, 470 aa, Streptococcus mutans
MTIFRKKNTNLDKTEMKRHFKVIDLIFLGLGSMVGTGIFTITGIGAAKYAGPALIISIIVSAIAVGISALFYAEFTSRIPANGGAYSYLYATLGEFPAWLAGWYIIMEFLTAISSVASGWGSYFKGLLSSYGIELPSLLNGTFNPAKNNYIDLLPALVIFLVTGIVLLNSKIALRFNSSLVVMKFSALALFIIIGLFYIKPENWSNFAPFGFGKIYGGQTGIMAGASLMFFAFLGFESISMAVDEVQKPQKNIPKGIIASLTIVTILYVSVTLVLTGIVHYSKLNVADAVAFALRQAGLVWAANYISVVAILTLITVCISMTFALARTVYSISRDGLLPKQLGIVTKHSKVPKNATLLVGFASMICAGVFPLSSIAEFLNICTLAYLIMLAIAIIKLRKDQGQPKIGEFKTPFIPFLPIVSIVICLSLMSQYKSVTWIAFGISTSIGFLIYFAYGYRHSTIFIKNNPKIR

SEQ ID NO: 72432 - protein, 734 aa, Streptococcus mutans
MIALEKENIFVKPDVIVIKRDGRHVAFDKDKIYQAIVRASNQVTELTPFIEAKLSGIADRVVAEIYERFTENIKIYEIQNIVEHELLQAGEYVIAQEYINYRAKRDFERSQATDINFTIDKLINKDQAVVNENANKDSDVFNTQRDLTAGIVGKSIGLKMLPEHVANAHLKGDIHFHDLDYSPYTPMTNCCLIDFKGMLHSGFKIGNAEVESPKSIQTATAQISQIIANVASSQYGGCSADRIDETLAPYAELNYQKHLKDAEKWVSEDKREDYAREKTKKDIYDAMQSLEYEINTLFTSNGQTPFTSLGFGLGKDWFEREIQKAILNIRIKGLGSEHRTAIFPKLIFTLKRGLNLEPGTPNYDIKKLALECATKRMYPDMLSYEKIIELTGSFKVPMGCRSFLQGWKDENGVEVNSGRMNLGVVTVNLPRIALESNGNIDKFWDIFKEKMAIAKDALVYRVERVKEATPANAPILYQYGAFGKRLGKDDSVDELFKERRATVSLGYIGLYEVATVFYGGNWESNPVAKDFTIDIVRQMKDLCGKWSNEYDYHFSVYSTPSESLTDRFCRLDTEKFGIIKDITDKEYYTNSFHYDVRKNPTPFEKLDFEKDYPDAGATGGFIHYCEYPVLQQNPKALEAVWDYAYDRVGYLGTNTPIDHCYKCDFEGDFTPTERGFMCPNCGNTDPKTADVVKRTCGYLGNPQARPMVNGRHKEISARVKHMNGSTIKNPGHKA

SEQ ID NO: 72433 - protein, 99 aa, Streptococcus mutans
MSHNHEQEHDLITLVDEQGNETLFEVLLTIDGKEEFGKNYVLLVPAGAEEDADGQIEIQAYSFTENEDGTEGALQPIPEDADAEWIMIEEVFNSFLDED

SEQ ID NO: 72434 - protein, 320 aa, Streptococcus mutans
MVAKLTDVAKLAGVSPTTVSRVINRKGYLSEKTITKVQAAMKTLGYKPNNLARSLQGKSAKLIGLIFPNISHIFYSELIEYLEIELFKHGYKAIICNSQNNPDKERDYLEMLEANQVDGIISSSHNLGIDDYEKVSAPIIAFDRNLAPNIPIVSSDNFEGGRMAAKLLKKHGCQHPIMIAGKDNSNSPTGLRQLGFKSVFAQAPIFHLSGELSIIRKEMEIKVILQNEKPDGIFLSDDMTAILTMKIANQLNITIPHELKIIGYDGTHFVENYYPYLTTIRQPIKDIAHLLVDVLLKKIDHQDTPKDYILPVGLLSGESV

SEQ ID NO: 72435 - protein, 139 aa, Streptococcus mutans
MRIIGLDVGSKTVGVAVSDPLGFTAQGLEIIPINEAKGEFGFDRLADLVKDYKVEKFVVGLPKNMNNTSGPRVEASQAYGKKIKELFDLPVEYQDERLTTVQAERMLVEQADVSRGKRKKVIDKLAAQLILQNYLDRMF

SEQ ID NO: 72436 - protein, 143 aa, Streptococcus mutans
MMTNVFVDSRRDLRERAFQALFSLEFGGDNLTAARFAYTYDKNEEEEAELPLFLLTLIQGVSDCRREIDKNISIHLKSGWTLSRLTLIDKSLLRLGLYEIKYHKETPERVALNEIIEIAKKYSDEKSSKFINGVLSQFVLERK

SEQ ID NO: 72437 - protein, 89 aa, Streptococcus mutans
MGFTDETVRFNLDDGNKKEISETLTHVYRSLEEKGYNPINQIVGYVLSGDPAYVPRYNDARNQIRKYERDEIVEELVRYYLQGNGIDLK

SEQ ID NO: 72438 - protein, 164 aa, Streptococcus mutans
MVLYKQIYHSPLGDLSLVANNQGLIGVWFLNQKYFEQGLEGETVIEQANTILDQAKQWLDTYFAGENPNMVKFPLNPRGTAFQKRVWQALSEIPWGQTRAYGDIAQKINCPSARAIGGSVSRNPLSIIIPCHRVLGAAGQMTGYAAGIDKKMWLLEHEGFKVDK

SEQ ID NO: 72439 - protein, 184 aa, Streptococcus mutans
MEIRQAFPNEVVAVMAVLSSAKQFLAESGSSQWQGENGYPNEDDVFDDILQGQAYVAVVGGQIVAYAAVIDGKDEAYDKIYDGKWQHNNYRYITIHRLAVLRDFAGQGIAQTFLQGLIEGQAGSDFRIDTHEKNKAMRHIVEKLGFVYCGKVPIDGERLAYQKIKQNNENALYQEIDEADYHGF

SEQ ID NO: 72440 - protein, 383 aa, Streptococcus mutans
MAKRIKKTEEITKKFGDERKKALDDALKNIEKDFGKGAVMRLGERAEQKVQVMSSGSLALDIALGAGGYPKGRIVEIYGPESSGKTTVALHAVAQAQKDGGIAAFIDAEHALDPAYAAALGVNIDELLLSQPDSGEQGLEIAGKLIDSGAVDLVVVDSVAALVPRAEIDGDIGDSHVGLQARMMSQAMRKLSASINKTKTIAIFINQLREKVGIMFGNPETTPGGRALKFYSSVRLDVRGNTQIKGTGEQKDSNIGKETKIKVVKNKVAPPFKEAFVEIIYGEGISRTGELVKIASDLGIIQKAGAWYSYNGEKIGQGSENAKKFLADNPEIFDDIDHKVRVQYGLIEEDNTEEKQSSKEKETDEKADKNLVLELDDTIELED

SEQ ID NO: 72441 - protein, 363 aa, Streptococcus mutans
MTIYNFSAGPAVLPKPVLEKAQTEFLDYNHSGMSVMELSHRSKDFDDIIKDAEKLLRDLMAIPDNYRVMFLQGGASLQFSMLPLNLAQGRKAYYVVAGSWGKKAYAEAVKLSKTIPFEPILLASSEETTYDHIPEIDSAKIDKDAAYVHITTNNTIEGTSIYDLPETHGVPIVADMSSNILAVRYNVADFGLIYAGAQKNIGPAGVTIVIVREDLLNDEPVLSSMLDYRIQAEAGSLYNTPPTYGIYIAKLVFEWLKELGGVDEMEKINREKSGLLYDFIEQSDFYTSPVKSPKDRSVANIPFVTPSQDLDAKFVKEADALGFKNIKGHRSVGGMRASLYNAFPRQGVLDLIDFMKKFEAENK

SEQ ID NO: 72442 - protein, 943 aa, Streptococcus mutans
MQDKLIIRGARAHNLKNIDVEIPRDKLIVMTGLSGSGKSSLAFDTIYAEGQRRYVESLSAYARQFLGNMDKPDVDSIDGLSPAISIDQKTTSKNPRSTVGTVTEINDYLRLLYARVGIPYCKNGHGAITASSVEQIVDQVLILPERTRMQILAPVVRRKKGQHKAVFDRIQKDGYVRVRIDGDIMDVAEVPELSKNKMHNIEVVVDRLVQKDGIRGRLFDSIEAALHLGDGYVIIDTMDDHELIFSEHYSCPVCGFTVPELEPRLFSFNAPFGSCPTCDGLGIKLEVDLDLVIPDENKTLREGTLAPWNPISSNYYPQLLEQAMNAFGVDMDKPWKDLSDEDKKLVLHGSGDTAFHFHYQNDFGGVRDIDIPFEGIISNISRRYHETNSDFTRNVMRSYMNELPCATCHGYRLNDQALSVRVGGKEGLNIGQVSELSIADHLSLLTHLELSENEKTIATPIVKEIKDRLTFLNNVGLNYLTLSRSAGTLSGGESQRIRLATQIGSNLSGVLYILDEPSIGLHQRDNDRLISSLKKMRDLGNTLIVVEHDEDTMMAADWLVDVGPGAGALGGEIVASGTPRQVAKNKKSITGQYLSGKKKIPVPLDRRKGSGRFIEIKGAAENNLQNINVKFPLGKFIAVTGVSGSGKSTLVNSILKKVIAQKLNRNSEKPGKYKSISGIEHIDRLIDIDQSPIGRTPRSNPATYTGVFDDIRDLFAQTNEAKIRGYKKGRFSFNVKGGRCEACSGDGIIKIEMHFLPDVYVPCEVCHGTRYNSETLEVHYKDKNIAEILNMTVNDAAEFFAPIPKIARKIRTIKDVGLGYVTLGQPATTLSGGEAQRMKLASELHKRSTGKSFYILDEPTTGLHTDDIARLLKVLERFVDDGNTVLVIEHNLDVIKTADHIIDLGPEGGVGGGQVIATGTPEQVAEMTESYTGQYLKGRLNEK

SEQ ID NO: 72443 - protein, 288 aa, Streptococcus mutans
MQVQKSFKEQTAYGKLYLVPTPIGNLQDMTFRSIAILKKVDYIAAEDTRNTGLLLKHFDISTRQLSFHEHNAFEKIPDLLKLLKSGNSLAQVSDAGLPSISDPGYDLVRAAIQEDIAVIALPGASAGITALIASGLAPQPHIFYGFLPRKSGQQKSFFEEKKYYPETQIFYESPYRVQETLENILSVYGDRQIVLTRELTKLYEEYQRGNISEILTYIAENPLKGECLLLVSGYDHQEKEQQVSEVELKHLVEALVKEGMKPNQAIKKVAKENDFNRQELYQLYHELQ

SEQ ID NO: 72444 - protein, 171 aa, Streptococcus mutans
MINMSIFKNKLFVILFAFLMLLVDGHLSLLSRILFQNQFIVSSHFLFIVLLFYTLVFNPYFIFGLACVLGIIYDFYYLGVYNLGIATMLYPLTIVIMFKLWKHIPNGPVQRFLVFFILIFFLDFASIGMAYLYQLTAYPLNDFITYNLAPSLIFNILAFLFFQKLLERIYL

SEQ ID NO: 72445 - protein, 322 aa, Streptococcus mutans
MSYSNLKLFALSSNKELAEKVAKTIGISLGKSTVRQFSDGEIQVNIEESIRGNHVFILQSTSSPVNDNLMEILIMVDALKRASAETVSVVMPYYGYARQDRKARSREPITSKLVANMLAVAGVDRLLTVDLHAAQIQGFFDIPVDHLMGAPLIADYFVRRGMCGSDYVVVSPDHGGVTRARKLAQFLQTPIAIIDKRRNVNKMNTSEVMNIIGNVSGKTCILIDDMIDTAGTIAHAADALAEAGATAVYASCTHPVLSGSALDNIQNSAIEKLVVLDTIDLPEEKLIDKIEQISITDLISEAIIRIHEKRPLSPLFEFTTFN

SEQ ID NO: 72446 - protein, 391 aa, Streptococcus mutans
MDLSKRFNKNLNKIEVSMIRQFDQSISDIPDVLKLTLGEPDFATPKHIKEAAKRAIDADESHYTGMAGLLALRQAASAFVKEKYHLTYNPDNEILVTIGATEALSASLTAILEPGDKVLLPAPAYPGYEPVVNLVGAEVVEIDTRSNDFVLTPEMLEEAILKEGEALKAVILNYPTNPTGVTYSRQQIKNLAEVLKKYPIFVISDEVYAELTYTGESHVSIAEYLPDQTILISGLSKSHAMTGWRLGLIFAPAVLTAQLIKSHQYLVTAATTSVQFAAIEALTNGKDDALPMKEEYIKRRDYIIEKMEAMKFKIIKPDGAFYIFAKIPVAQGQDSFKFLQDFAKEKAVAFIPGVAFGKYGEGYLRISYAASMETIKEAMKRLKEFMEQYAD

SEQ ID NO: 72447 - protein, 418 aa, Streptococcus mutans
MKSEIIAVGTEILTGQIVNTNSQFLSEKFAELGIDVYFQTAVGDNEERLLSVLKIAKERSDLIVLCGGLGPTEDDLTKQTLAKFLKRELVFDKTAQERLDEFFASRPTSMRTPNNECQAQIIAGSQPLSNKTGLAVGGLLEADGVTYVVLPGPPSELKPMVNKELLPYLSKTSEKLYSRVLRFFGIGESHLVTLLHDLIAEQTDPTIAPYAKTGEVTIRLSTKAHRQKEADSKLDKLEKKIITIDNLADYFYGYGEENSLPQVVFDLLKEKGKTITAAESLTAGLFQARLADFAGASDIFKGGFITYSIEEKARMLGIPFEDLQLHGVVSAFTAEKMAERSRQLTQADLAISLTGVAGPDSLEGQPAGTVFIGLSSSKRTMAIKVLIGGRSRSDVRYIAVLHAFNLVRQTLLSHKNLV

SEQ ID NO: 72448 - protein, 651 aa, Streptococcus mutans
MSKIIELPEVLANQIAAGEVIERPASVVKELVENAIDADSSQITIEIEESGLKKIQVTDNGQGIEQADVIMSLRRHATSKIKKQSDLFRIRTLGFRGEALPSIASISRLTLKTATKGEIYGTLLIANGGKIEKEEAISTPIGTKVSVENLFFNTPARLKYMKSLQAELAHIIDVINRLSLAHPEIAFTLINDGRELTKTAGKGDLRQALAGIYGVTIAKKMVEISNADLDFEVSGYISLPELTRANRNYITILINGRYIKNFLLNRAILDGYGSKLMVGRFPIAVIDIQIDPYLADVNVHPTKQEVRISKEKELMNLVSSAIADSLREQELIPDALENLAKTSTNKKQKFEQTQLPLKQSNLYYDKTQNDFFLKETTVSEASSEFTVVDKAVNITDNVSGHSSVKYAQRQMRTCENKEHPSLTMTDKQQKRQLSRIVESLENEEKSTFPELEYFGQMHGTYLFAQGEGGLYIIDQHAAQERVKYEYYRDKIGEVDNSLQQLLVPYLFEFPANDFMTLQEKMSILNEVGIHLENYGENTFILREHPIWLQEKEIESAVYEMCDMLLLTNEVSIKKYRAELAIMMSCKRSIKANHTLDDYSARNLLIQLSQCKNPYNCPHGRPVLVNFTKADMEKMFRRIQENHTSLRELGKY

SEQ ID NO: 72449 - protein, 1241 aa, Streptococcus mutans
MDRRIFVEKKANFSIKSESLVKELTHNLQLTSLKILRIVQVYDIFNLEESLFARAQKHVFSEQVTDTILDEATVQADLNSHAFFAIEALPGQFDQRAASSQEALLLLGSDSNVTVNTAQLYLVNKDIDASELEAVKHYLLNPVDSRFKDITLPIRPQEFSNSDKTIPNLDFFKTYTAEDFAAYKAEQGLAMEVDDLVFIQDYFKSIGRVPTETELKVLDTYWSDHCRHTTFETELKNINFSASKFQKQLQTTYDKYIAMRDELGRSEKPQTLMDMATIFGRYERANGRLNDMEVSDEINACSVEIEVDVDGIKEPWLLMFKNETHNHPTEIEPFGGAATCIGGAIRDPLSGRSYVYQAMRISGAGDITAPIAETRSGKLPQQVISKTAAHGYSSYGNQIGLATTYVKEYFHPGFVAKRMELGAVVGAAPKENVVREKPEAGDVVILLGGKTGRDGVGGATGSSKVQTVESVETAGAEVQKGNAIEERKIQRLFRNGNVTRLIKKSNDFGAGGVCVAIGELADGLEIDLDKVPLKYQGLNGTEIAISESQERMAVVVRPSDVDAFIAACHKENIDAVVVATVTEKPNLVMTWNGETIVDLERAFLDTNGVRVVVDANVVDKDVALPEVRTTSAATLEADTVKVLSDLNHASQKGLQTIFDSSVGRSTVNHPIGGRYQITPTEASVQKLPVQNGVTTTASVMAQGFNPYIAEWSPYHGAAYAVIEATARLVATGADWSRARFSYQEYFERMDKQADRFGQPVAALLGSIEAQIQLGLPSIGGKDSMSGTFEELTVPPTLVAFGVTTVDSRQVLSPEFKTVGENIYYIPGQAISEDINFDYIKANFAQFEAIQAKHKVTAASAIKYGGVLESLALMSFGNHIGASVELTELDSSLTAQLGGFVFTSDEAIADAVKIGQTVADFTVTVNGVNLSAAKLLAAFEGRLEEVYPTEFEQSTALEEIPAVVSDAVIKAKERIAQPLVYIPVFPGSNSEYDSAKAFEQAGAKVNSVPFVTLNEAAIEASVDTMVDNIVKANIIFFVGGFSAADEPDGSAKFIVNILLNEKVCSAIDSFIERGGLIIGICNGFQALVKSGLLPYGDFEEVGETSPTLFYNDANQHVAKMVETRITNTNSPWLAGVKIGDIHAIPVSHGEGKFVVTAEEFAELRDNGQIWSQYVDFDGKPSMDSKYNPNGSLNAIEGITSKNGQIIGKMGHSERYENGLFQNIPGNKDQGLFESAVKYFTGK

SEQ ID NO: 72450 - protein, 849 aa, Streptococcus mutans
MTKEKLSPGMQQYLDIKKDYPDAFLLFRMGDFYELFYDDAIKAAQILEISLTSRNKNADNPIPMAGVPYHSAQQYIDVLIDLGYKVAIAEQMEDPKKAVGVVKREVVQVITPGTVVDSTKPDSANNFLVSLDTDGSQFGLSYMDLSTGEFYATTLADLPAVRSEVLNLKTRELVIGFELSENEDQLFRKQMNLLLSFEKTVYDDVHLLDDQLKAIELAAAGKLLQYVHNTQKRELSHLQKLVHYEIKDYLQMAYATKSSLDLLENARSGKKHGSLYWLLDETKTAMGTRLLRTWIDRPLVSSSLISKRQDIIQTFLDHFFERSDLSDSLKGVYDIERLASRVSFGKANPKDLLQLGQTLSQVPVIKTILESFASSSLESLINQIDTLPELEALIRSAIDSNAPITITEGGMIREGFDETLDKYRTVMREGTSWIADIETKERQKSGISTLKIDYNKKDGYYFHVTNSNLSLVPDYFFRKATLKNSERFGTAELAKIEGEMLEAREESANLEYDIFMRIRSQVESYIERLQNLAKSLATVDVLQSLAVVAENNHYVRPSFNHQQEISIENGRHAVVEKVMGSQEYIPNTINFDQKTSIQLITGPNMSGKSTYMRQLALTVIMAQLGSFVAADSADLPIFDAIFTRIGAADDLISGQSTFMVEMMEANHAIKAATPNSLILFDELGRGTATYDGMALAQAIIEYIHNKVGAKTLFATHYHELTDLSTRLTSLVNVHVATLEKDGEVTFLHKIADGPADKSYGIHVAKIAGLPKDLLNRADHILVDLEKMSAAVSVNLKNETKESQPVEEQLSLFAIDNNYEELIKKLKQLDLTNLTPRESMNALFDLKELL

SEQ ID NO: 72451 - protein, 220 aa, Streptococcus mutans
MDVQNLTKKNQEFINIVTHQLLQSGKSDEDIQTILAKTLPEIIEKQKQGIPARSFLGAPTAWAAQFIETEQNKSTASAPKNTNPWLMWLDTSLFFLAVVTLITGFLNFFSKQAPTYGIVTLTFLGFGGGAIMFLTYHFFYRYSGMPKNERPSFIKSFGILAFFMIFWMFLYAATGFLPAFLNPKVPGFVLLVICALAFGIRYLLKKKYNIENALAPQQRK

SEQ ID NO: 72452 - protein, 79 aa, Streptococcus mutans
MAQQRRGGFKRRKKVDYIAANKIEYVDYKDTELLSRFVSERGKILPRRVTGTSAKNQRKVTTAIKRARVMALMPFVNED

SEQ ID NO: 72453 - protein, 164 aa, Streptococcus mutans
MINNVVLVGRMTRDAELRYTPSNQAVATFTLAVNRNFKNQNGEREADFINIVIWRQQAENLANWAKKGTLLGITGRIQTRNYENQQGQRVYVTEVVADNFQILESRATREGQSNSYNAGGNNNFGGNNFSSQGSSQSQTPNFARDESPFGDSNPMDISDDDLPF

SEQ ID NO: 72454 - protein, 96 aa, Streptococcus mutans
MAKYEILYIIRPNIEEEAKNALVARFDAVLTDNGATIVESKDWEKRRLAYEIQDFREGLYHVINVETEDAHALNEFDRLSKINNDILRHMIVKLDA

SEQ ID NO: 72455 - protein, 563 aa, Streptococcus mutans
MNHNRLIAKEIAAIVPALEQETILNLLEKPKKSSMGDLAFPTFSLAKTMRKAPQIIASELVGQINNSYFEKVEAVGPYINFFLNKSEISAQVLKEVIKKREDYAQAAIGQGHNIVIDLSSPNIAKPFSIGHLRSTVIGDALSNIFQKLGYETVKINHLGDWGKQFGMLIVAYKKWGSEEAVRAHPIDELLKIYVRINAETKNHPELDEEAREWFRKLENNDEEALALWQWFRDESLMEFNRLYAELGIDFDSYNGEAFYNDKMEEVVQLLAEKGLLEESKGAQVVNLEKYGIEHPALIKKSDGATLYITRDLAAAIYRKRTYDFAKAIYVVGQEQTAHFKQLKAVLAEMGYAWSKDIQHVSFGLVTKNGQKLSTRKGNVILLEPTIAEAVKRSLAQIDTKNPDLVNKEAVAHAVGVGAIKFYDLKTDRTNGYDFDLEAMVSFEGETGPYVQYAHARIQSILRKADFQPQATENYQLNDTESWEIIKLIQDFPNTIVRAADNFEPSLIARFAIHLAQSFNKYYAHTRILDNSPERDSRLALSYATATVLKEALALLGVEAPNEM

SEQ ID NO: 72456 - protein, 784 aa, Streptococcus mutans
MPLCYNSSMNTKILKALEFDKVKKQFTHFLQSEQGQMELNDLLPMTNQEKIERSFAEIADVAQIFQEYASFGFGHSQDISESLRRLELGADLNTQELLAVKRILQMSAELKDFYDNLENVDLQILDCLFEKIETFPDLQGSLQAINDGGFIEDFASPELTKIRHHIHQNEQQIRQILQEMLKKQGDLLAENLIASRSGRSVLPVKNTYRHRIAGVIHDISASGNTVYIEPRAVVNLNEEMTQARADERHEMTRILHDLSDRLRSQTDIIGNNAWLLGHIDFVRGKYLYMRENQASLPSLTTDQTIRLLSVRHPLLSNPIANDLHFEHDTTAILITGPNTGGKTIMLKTLGITQLMAQSGLPILADEGSKVAVFKDIFADIGDEQSIEQSLSTFSSHMTHIVEILQKANKDSLVLFDELGAGTDPQEGAALAMSILEHLRLSDIKTMITTHYPELKAYGIETEFIENASMEFDMVTLSPTYHFMQGVPGRSNAFEIARRLGLSEIIVAEAENLTNTDSDVNKIIERLENQTIESRRRLDNIREVEQENLKFNRAVKKLYNEFSHAQDKELRKAKLKAQEIVDKALAESDFILKNLQDKAQLKPHEIIEAKGKLKKLVPEIELSKNKVLKKAKKKRAAKVGDDIIVSSYGQRGTLTKRFKDGRWEAQVGLIKMTLQESEFDLVKSDKAQASQKRQAHLVKRTSQKAPSARLDLRGKRYEEAMQELDEFIDQALLNNMAQVDIIHGIGTGVIRDGVTKYLRRNKQVKEFGYAPQNAGGSGATIVTFK

SEQ ID NO: 72457 - protein, 589 aa, Streptococcus mutans
MKRSMYAGAVRSEHIGQELTLKGWVARRRDLGGLIFIDLRDREGIVQLVINPKTASNTVVKSAESLRSEYVIEVTGMIVERDQANDNLPTGCVEMQVTQLTILNASQTPPFEIKDKIEANDDTRLRYRYLDLRRPEMLKNFKLRAKVTHVIRNYLDDLDFIDVETPMLAKSTPEGARDYLVPSRMSRGHFYALPQSPQITKQLLMNAGFDRYYQIVKCFRDEDLRGDRQPEFTQVDLETSFLSEQEIQEITERLIACVMKEVKGIELQLPLPQISYDTAMNNYGSDKPDTRFEMTLQDLTDLVKNIDFKVFSQAPAVKAIVAKNAANSYSRKAIDKLTDIVKPFGAKGLAWVKYNDGKIGGPIAKFLTTIEDELIERLQLEANDLVFFVADDLEIANGSLGALRNHLAKELNLIDHSKFNFLWVVDWPMFEWSEEENRYTSAHHPFTLPQEDTVAELEGDLSKVRAVAYDIVLNGYELGGGSLRINQRETQERMFKALGFTKESAQKQFGFLLEAMDYGFPPHGGLALGLDRFVMLLAGKENIREVIAFPKNNKASDPMTQAPSLVSDKQLDELYLQVNKNAVKNNEQE

SEQ ID NO: 72458 - protein, 429 aa, Streptococcus mutans
MTLQKPKGTQDILPQETVKWQYVENVARKTFKKYHYGEIRTPMFERYEVISRSVGDTTDIVTKEMYDFHDKGDRHITLRPEGTAPVVRSYVENKLFAPEVQKPVKVFYIGSMFRYERPQAGRLREFHQLGVECFGSNNPAIDAETIAMAYQLFNELGIKDVTLHLNSLGNKESRKAYRQALIDYLIPMKDKLSKDSQRRLEENPLRVLDSKEKEDKEAVENAPSILDYLDDDSQAHFQGVRDMLEVLDIPYVIDTNMVRGLDYYNHTIFEFITQVDKSELTLCAGGRYDSLVEYFGGPATAGFGFGLGLERLLLVIDKQKINLPVDNSLDVYIAVLGAAANSTALELIQAIRKQGFSAERDYLSRKIKAQFKSADVFKTKLIMTLGESEVETGQVAVKNNFTRQEIAVSFEEIKTDFASVFKQLGSDRP

SEQ ID NO: 72459 - protein, 195 aa, Streptococcus mutans
MKRFLKEWGLFLVIIFALLLPRLFIWFPVQVDGHSMDPTLANGEHLIVVRTTSIKHFDIVVAAEGNKNIVKRVIGMPGDTITYENDMLSINGKKVNETYLKQYKDKFAKDKLQKTYAYNQYFQELASQSTAFTTDEQGNASFTIKVPKGRYLLLGDDRIVSKDSRHVGTFAKNKIVGEVKFRFWPLNAIRFISNK

SEQ ID NO: 72460 - protein, 49 aa, Streptococcus mutans
MRVNITLEHKESGERLYLTSKNKRNTPDRLQLKKYSPKLRKHVIFTEVK

SEQ ID NO: 72461 - protein, 787 aa, Streptococcus mutans
MTYYFSGTIDRVIFENTSNFFKIILLEIDDTDSDFDDFEIIVTGTIADVIEGENYTFWGELTQHPKYGQQLKVERYQRAKPSSAGLIKYFSSQHFKGIGKKTAEKIIHLYGDDPIDNILEDPDKLESISGLSKANRENLVSKLRLNYGAEQILAKLAEYGLNNKTAVQIFERYKEESLTVITENPYQLVEDIQGIGFKMADKLAEQVGINSDAPQRFRAALVHTLLETSIDKGDTYIEAKELLEKSLFILEEVRQVELDPSQIAQELTQLISEDKVQNIGTKIFDNTLFYAESGIHKHLTRILDRPLEKEISSQDIQTEIKHIQAEFNINYDKAQKNAIQKAIQSKVFLLTGGPGTGKTTVINGIIKAYANLHQIDLQKSDRPIILAAPTGRAARRMNELTGLPSATIHRHLGLNGDSEYQALDDFLDCDLIIIDEFSMVDTWLANQLFSAIASNTQVIIVGDSDQLPSVGPGQILADLLKINRLPQVSLTKIFRQSEDSTIVTLANQIRQGRLPTDFTAKKADRSYFEAQSTHIPQMIQKIVSSALKSGIDAQEIQILAPMYRGQAGITHLNKLMQDLLNPLNNQLEFQFNDLHFRKGDKVLHLINDAQINVFNGDIGYITDLIPAKYTESKQDEMILDFDGTEINYPRNEWLKITLAYAMSIHKSQGSEFKVVILPVTRQSGRLLQRNLIYTAITRSKSKLVMLGEIAAFDNAIKNEGTKRKTYLIERFKKDECSGHHNTEKNKQGVKESAAILKEDFILTERNILTIDPMIGLSQADIDLFFKK

SEQ ID NO: 72462 - protein, 464 aa, Streptococcus mutans
MTKKIMLTIAMCLGIFIVMLDTTIMNITLPAIQKGLGVKLDQLSWTINVYTIIFASCTIPLSKIADIYGKGRLFVLGLLLFGIGSLLSGLANGFSQLILGRIISSFGAAILLPVGNSLGISSWEVKDRFKIVAALGLMQGGAAAIGPTLGGILTDTFSWHWIFFINLPIIIIATCLMILSYHFKSEEKIESKIDFAGSFISMLGLFLVTLGLIKIRDWGAGDWRTLGCLITFLLSLFAFIILEKHSKNPMINLNLFKIREFTASALVALLAQFFYIGVIVILPTFFTTIQGKTELDAALILLPMSLVVFICGGLGSLVINQLGPRLLVFVGLTAILLSYLLIVSINPNKVMAMALTTLILGIGFGIIAGPVNVLAASTLQGELLTASQSVIGVVRQIGSVLGVTVFISMVSNNMANLSQYNHSSMVEAYISIYKIWIPCLLIFLVLSFLFPKKKRYLEGLTQSN

SEQ ID NO: 72463 - protein, 365 aa, Streptococcus mutans
MAITIQFSNYALKTDETLIQRIQFVYSPLNELFRSLHVLLNPRHHGTNIDWVIRIQNKLTKEFYENLHYFRLFYELGVSPILLCNFRYHATTIEEEIQNLKKFLDELSTAQLIEHLEKVTSDRENSFIPTLARGLEWKDFSLNKDNQLLSDLRKDASSVYQHLFSFVDWYRQEIFDETWESKDIQRKLLTEIQHQASFLKESGFKAMFNHLQIDRIHWRKDRLVIIKPFDKDIQLKDSDSIMLLPSYFIWPHLFVESFNQGIAVTYDITEQPSYYNATPENLITIFKALSDPVRLQIMNYVIDKPSTTQSLAQILVMSNSSVSRHLQILKEANLLTTTKAKKFVLYEPTQLITQLMPNFYHFFKN

SEQ ID NO: 72464 - protein, 330 aa, Streptococcus mutans
MAIGIVIASHGEFAAGIHQSGSMIFGDQEKVQVVTFMPSEGPDDLYAKFNDAIAAFDADDEILVLADLWSGSPFNQASRVMEENSDRKFAIITGLNLPMLIQAYTERMMDAAAGVEQVAANIIKEAKDGVKILPEKLQPQEEAPTTSTKKAAPQGAIPEGTVIGDGKLKINLARVDTRLLHGQVATNWTPASKADRIIVASDTVAKDELRKGLIKQAAPGGVKANVVPIKKLIEAAKDPRFGNTHALILFETPQEALEAIEGGVPITELNIGSMAHSTGKTMVNNVISMDKDDVATFEKLRDLGVKFDVRKVPNDSQKDLFELIEKAHVQ

SEQ ID NO: 72465 - protein, 889 aa, Streptococcus mutans
MAKETKTEALTAEEAAKQYTNSLVEKALKAEKVYATYTQEQVDKIVAAMALAGSEASLQLAKEAHDETGRGVVEDKDTKNHFATEYVYERIKNEKTVGIIGEDKVAGSIEIAAPLGVLAGIVPTTNPTSTTMFKILVALKTRNAIVFAFHPAAQKCSAHAAQILYDAAVKAGAPENIVQWIETPSIANTGALISNKGIASILATGGPGMVNAALKSGNPSMGVGAGNGAVYVDATANLERAVEDLLLSKRFDNGMICATENSAVVEAPIYKEWLAKMQEKGAYLVPKKDYKKFEDFVFNDNHGVNGPVAGMSAKWICEQAGVTLPEGKDVLLFELDKKKIGEKLSSEKLSPLLSVYKAKDRKDGIDIVAALLDYQGAGHNCAIQIGSQADPFVAEYGDALNSSRVLVNQPDSVGGIGDVYTDALQASLTLGTGSWGKNSLSHNLSTGDLLNVKTVAKRRNRPQWVRLPEKTYYEKNAISYLQDETETMTRAIIVADPGMLQFGFVDTVLAQLSLRDEKVATSIYGTIKPDPTLGQTIEIARQMRDFKPDTVIAVGGGSALDAAKIARYIYEYSLDQEADFLDSYEKVSELFLELQQKFIDIRKRIVRFKHQTVTRLFCIPTTSGTGSEVTPYAVITDDFTHVKYPLTDYELTPQVAIVDPEFVMTVPKRTVALSGLDTLSHALESYVSVMASDFTRPWSMEAIRLVIENLEDSYNFDPKNPTLRGEQARENMHYAATLAGMAFSNAFLGINHSLAHKAGGEFGLPHGLAISIAMQHVIRYNGVAGNVKRSVYPRYEEYRAQRDYADIARALGLKGKDDAELVEALCARIDQLMHAVDVEPKLSANGVTKKAFDAAVDRLASLAYDDQCTPANPRQPYIEEMKQLLIDQF

SEQ ID NO: 72466 - protein, 432 aa, Streptococcus mutans
MINRYSRPEMANIWSEENKYRAWLEVEILADEAWAELGEIPKEDVAKIREKADFDIDRILEIEQQTRHDVVAFTRAVSETLGEERKWVHFGLTSTDVVDTAYGYLYKQANAIIRKDLDNFLSIIADKAKEHKFTIMMGRTHGVHAEPTTFGLKLATWYSEMKRNIERFEHAAAGVEAGKISGAVGNFANIPPFVEKYVCDKLGIRAQEISTQVLPRDLHAEYFAVLASIATSIERMATEIRGLQKSEQREVEEFFAKGQKGSSAMPHKRNPIGSENMTGLARVIRGHMVTAYENVSLWHERDISHSSAERIIAPDTTILIDYMLNRFGNIVKNLTVFPENMKRNMGSTFGLIFSQRAMLTLIEKGMTREQAYDLVQPKTAQSWDNQVDFKPLLEADPEITSRLSQEEIDEIFNPVYYTKRVDEIFDRIGLGD

SEQ ID NO: 72467 - protein, 613 aa, Streptococcus mutans
MSKKFLFNRSVFSNAKGHDVKRKSSKGLVTGIALAGAIVLLGGSQIASADNVTASENNTTTSSTAADTDTANSQTVDSTDSDNSQVTSETVSSKNSTASSEAASESNEAETNNDATASESADQSDDELSDETTSNEAQVKSQSVNALESAKYDKDDDEEEEEVNEYKEDDKSEKADIKFDNTGVKTTSSGVNIDGKNITITSAGTYTITGSASGYSISVADKVTDTVKLKLDAVNLTDSTLYSSRDLDIKVLSDSSISSSLKNTIETGGALYISSKKKSGLKVTSTAGHAIKANSLEADKVTLELSSTAKDGINATSNVSIKKSNVTISAEDDGIQAEDNTDVNSGDIQIKDSIVKITSTSKGITANDEITVKGSTFITITSGSEGIEGRYVNLKKGQITINAGDDAINATEWTTKDDADLSHLKNSKKDIENEVAIVISGANISGIGKDDGVDSNGNLYITDGSLKIQSITDYSSAIDYDGTGFASGGTTWAIGHMGFAQGFSKGTKQAYIAAIVSGLAGDTITITDSKGHIVAKTKADVDFDHVVFSNKTIKAGKTYTVTTSDGHKAVIKATKDTTTHPSGRHVSKDTVPLLPNGHHPAFPGNGTPPNDKN

SEQ ID NO: 72468 - protein, 141 aa, Streptococcus mutans
MKKICFVCLGNICRSPMAEFVMREEASDASLEIASRATSGWEHGNPIHRGTQGIFRKYKIAYDSSKRSQRISLADFAYFDWIIGMDETNVCDLKRLSQGQFDDKIFLFIDGGVPDPYYTGDFEETYHLVEKGCQTWLKKIK

SEQ ID NO: 72469 - protein, 383 aa, Streptococcus mutans
MDKDPVIEFKEVNKIYGDNVAVKHINLKIMAGEFVCLIGTSGSGKTTILRMINRMLKPSNGKIFIKGEEISDLNPVQLRRKIGYVIQNIGLMPHMTIYENITLVPKLLKWSEDKKKAKAKELIKLVELPEDFLDRYPYELSGGQQQRIGVVRALAADQDIILMDEPFGALDPITREGLQDLVKSLQEKTGKTIVLVTHDMDEALKLATKIVVMDKGHMVQQANPTELLRHPATAFVKKMIGEDRLIQARADVTPVKNIMLKDPVSIAPDKSLNDAISLMRQKRVDSLLVTDKDNKLLGMIDVESLNNNYKQNLVVADILNKISFYLEEDQLLRDTAHRILKRGLKYVPVIDKEWHLKGIVTRSSLVDMLYDIIWGNQDTEETL

SEQ ID NO: 72470 - protein, 596 aa, Streptococcus mutans
MRIKWFSFVRVTGLLLVLLYHFFQRAFPGGFIGVDVFFTFSGYLITALLIDEFARNKMIDLLGFLRRRFYRIVPPVVIMVLVVLPFTFLIRKDFVADIGRQIASVLGFTTNLYEIFTGSSYESQFIPHLFVHTWSLAIEVHFYLFWGILVWFLSKKVKDPTQFRGLIFLISVGLFLLSFFTMFARAFFVNSFSTIYFSTLSHIFPFFLGAIFATMSGISETTKRFKKNVQLWQTKRVVFFMVGSAALLFLLGFILDFNNIITYLFGFALASLFTAVMVYSSRVLNDQTPHLQEPAFVTYLADISYGVYLFHWSFYIIFGQLMNNWLAVIFTVLFSLTFATISYYVVEPYIAGKQAVLFGLAVPIEHYKKWFYSLAGLLTVVTLGIAFTAPSVGSFETGLLVDALNQADNNMNRTHTLAAGDASAISDITVIGDSVALRSSTAFSELLPEAQVDAAVSRNFGNAYDIFKNHIDNSTLSKTVVLAVGVNSVEGYKDNIQQFIDNLPDGHRLIIVTPYNTKDERIPDVRDYELDLAKKYQFVTIADWYQAAVAHPEIWTESDGVHYNDSSDEGAKLYVETIKKAIQTSAKQPAKGEKQP

SEQ ID NO: 72471 - protein, 494 aa, Streptococcus mutans
MTLVYQSTRDENNKVSASLAILQGLARDGGLFTPTSYPQVDLDFDQLKTASYQEVAKLVLSAFLDDFTEAELDYCIANAYDDKFDTPVIAPLVKLNGQYNLELFHGSTIAFKDMALSILPYLLTTSAKKQGINNKIVILTATSGDTGKAAMAGFADVPGTEIIVFYPNGGVSKIQELQMTTQVGDNTHVVAIEGNFDDAQTNVKKMFNDSDLRTKLLEHGAQFSSANSMNVGRLVPQVVYYVYAYAQLLKSGDIKNGDRVNFTVPTGNFGNILAAYYARQIGVPIGKLICASNENNVLTDFFKTGTYDKKREFRVTTSPSMDILVSSNLERLIFHLLGNDSVKTKELMQALIEKGEYTLEKADKAILDLFAAGFATEEETAAEIKRVYTASRYIEDPHTAVASAVYHAYRKSSGDQSPTVIASTASPYKFPRVVVSAVGGKDPKDDFAAVRELSRLSGVSVPRAVDGLETAEVRHRKVVATADMQKAVESYLGI

SEQ ID NO: 72472 - protein, 426 aa, Streptococcus mutans
MLDIKRIRNDFDQIAEKLARRGVDEKTLHDLKELDFKRRQLLIKSEEAKAERNTASAAIAQAKRNQEDASEQIADMQKLSAEIKALDAQLVEIDGQLKTFTTTLPNIPADDVPLGADEDENVEMRRWGKPRQFDFDIKAHWDLGEDLDILDWERGSKVTGSRFLFYKGLGARLERAIYNFMLDEHAKEGYTEVIPPYMVNHDSMFGTGQYPKFKEDTFELADNDYVLIPTAEVPLTNYYRGEIIDGKELPIYFTAMSPSFRSEAGSAGRDTRGLIRLHQFHKVEMVKFAKPEDSYNELEKMTANAENILQKLELPYRVITLCTGDMGFSAAKTYDLEVWIPAQNTYREISSCSNTEDFQARRAQIRYRDEVDGKVKLLHTLNGSGLAVGRTVAAILENYQNADGSVTIPEVLRPYIGGVQVISPQS

SEQ ID NO: 72473 - protein, 468 aa, Streptococcus mutans
MNCTPKVRQKKSNFWGVFIMKLTYEDKVLIYELKNQGYSLEQLSNKFGIKISNLSYMIKLIDHYGIEIVKKGKNRYYSPELKQEIIDKVLLEGRSQIRVSLDYALPSHGMLPNWIAQYKKNRYTIVEKTRGRPPKMGRKPKKKIGRNDRARATSERIRISESGECCSKKVERTPIEGRKRARRKTEIVRGLVTEFSLDILLKIIKLARSTYYYHLKQLDKSNKDHAIKAEIQAIFTEHKGNYGYRRMTLELRNRGFLVNHKKVQRLMKVLGLEARIRRKRKYSSYQGEVGKKADNLIQRQFEASKPMEKCYTDVTEFAIPASGQKLYLSPVLDGFNSEIIAYNLSTSPNLIQVKAMLEQAFTEKHYTNTILHSDQGWQYQHDFYHQFLENKGIQPSMSRKGNSPDNGMMESFFGILKSEMFYGYEKTFKSLKQLEQAIVDYIDYYNNKRIKVKLKGLSPVQYRTKSFT

SEQ ID NO: 72474 - protein, 458 aa, Streptococcus mutans
MAYKTTYPYTNEVLKEFANNSDADLEKALVTGHALYKKWRAEGGLEERKAQLHKVADILRRDVDKYAEVMTKDMGKLFTEAKGEVELCAEIADYFADKAEEFLEPKAFEPIHGDAYYIKQAVGVLFMVEPWNFPFYQIMRVFAPNFMIGNPTVLKHASICPASAQAFENLVKEAGAPEGSFKNLFLTYDQVNKAIADPRIQGVALTGSERGGASIAAEAGANLKKSALELGGNDAFLILEDADFELLKDTIFFARLYNAGQVCTSSKRFIVVGEENYKKFLDMVVETFKTAKWGDPMDPETTLAPLSSAEAKEEVLGQIKLAADNGARVVYGNKPIDHPGNFVFPTVLTDITKENPIYNQEIFGPVASIYKVDTEEEAIALANDSSYGLGGTVFSKDLEHAKAVAAKIETGMTFINSGWSSYPEVPFGGIKNSGYGRELSNLGFDAFVNEHLVFIPKQ

SEQ ID NO: 72475 - protein, 172 aa, Streptococcus mutans
MKLTYEDKVLIYELKNQGYSLEQLSNKFGIKISNLSYMIKLIDHYGIEIVKKGKNRYYSPELKQEIIDKVLLEGRSQIRVSLDYALPSHGMLPNWIAQYKKNRYTIVEKTRGRPPKMGRKPKKKSEEMTELEQLQKELEYLRAENAVLKKLRELRLREEKEQEEKRKLSEDW

SEQ ID NO: 72476 - protein, 578 aa, Streptococcus mutans
MMKGSGQMTDKKTLKDLRNRSSVYDSMVKSPNRAMLRATGMQDEDFEKPIVGVISTWAENTPCNIHLHDFGKLAKVGVKEAGAWPVQFGTITVSDGIAMGTQGMRFSLTSRDIIADSIEAAMGGHNADAFVAIGGCDKNMPGSVIAMANMDIPAIFAYGGTIAPGNLDGKDIDLVSVFEGVGHWNHGDMTKEEVKALECNACPGPGGCGGMYTANTMATAIEVLGLSLPGSSSHPAESAEKKADIEEAGRAVVKMLEMGLKPSDILTREAFEDAITVTMALGGSTNSTLHLLAIAHAANVELTLDDFNTFQEKVPHLADLKPSGQYVFQDLYKVGGVPAVMKYLLKNGFLHGDRITCTGKTVAENLKAFDDLTPGQKVIMPLENPKREDGPLIILHGNLAPDGAVAKVSGVKVRRHVGPAKVFNSEEEAIEAVLNDDIVDGDVVVVRFVGPKGGPGMPEMLSLSSMIVGKGQGEKVALLTDGRFSGGTYGLVVGHIAPEAQDGGPIAYLQTGDIVTIDQDTKELHFDISDEELKHRQETIELPPLYSRGILGKYAHIVSSASRGAVTDFWKPEETGKK

SEQ ID NO: 72477 - protein, 834 aa, Streptococcus mutans
MLTELKAVLKKPMLWITMVGVALVPALYNIIFLSSMWDPYGKVSDLPVAVVNKDKTATYEGKKMTIGKDMTDNMVRNKSLDYHFVDSEKAQKGLEKGDYYMIITLPEDLSQNAASVLTDEPKKLTIPYQTSKGHSFVASKMSETAAKTLKESVSKNITSSYTKSLFKNMSTLKTGLGSAANASQKIATGSKQLANGSQVMTDNLNLLSNSSQSFAQGTNTLYSGLTAYTGGVGQLSAGLNNLNNGLTAYTNGVGQLANGSSQLSNQSQKLLGGVAQLANGSASIQQLVNASSQLNQGLIKLSTATGLSEEQVQQFSSLINQLGTLNQSIQNYSDNGTATTANSPDLSTYLSAITTAAQAIVNSGNTSQQTTTNQSNALAAVQATGAYQRLSAEDQSEIAAALANTGSSTTTTGADANAVSQAQAILNNVQSIQSALSTLQTTTANTPTSPSASLTQIKNTANSVLPSAATSLTTLSSGLTQAKTALDSQVVPVSTALANGTAQLGSTFSTGANSLMTGVGQYTNAVDILNAGANTLAAKNNQLTDGTSQLVNGANQLNSNSGQLTKGTAQLANGANQIETGAGKLAAGGESLTAGLTTLSSGSGELSKALSTAKNKLSLVAVDNDNAKTLSSPVTIKHTDKDNVKTNGVGMAPYMMSAALMVMAISTNTIFRVALSGKQAKTLREWIDQKLAVNGLIAVTGAIILYFGVHIIGLSANFELKTLGLIILTSITFMVLVTTLVTWHDKFGSFAALILLLLQLGSSAGTYPLAVTDKFFQVVNPYLPMSYSVSGLRETISMAGTIGNQLLALSLFFLTFAALGLLIARRRIRSVKVA

SEQ ID NO: 72478 - protein, 89 aa, Streptococcus mutans
MAISKEKKNEIIKQYARHDGDTGSVEVQVAVLTWEINHLNEHIKQHKKDHATYRGLMKKIGHRRNLLAYLRRTDVNRYRDLISSLGLRR

SEQ ID NO: 72479 - protein, 730 aa, Streptococcus mutans
MSKQVFETIFAGKKLAVEIGQVAKQANGAALVRYGDSTVLSAAVMSKKMSTGDFFPLQINYEEKRYAAGKFPGGFNKREGRPSTDATLTARLIDRPIRPMFAEGFRNEVQVINTVLSYDADASAPMAAMFGSSLALSISDIPFNGPIAGVQVAYLDGQYVINPTAEEKKASLLELTVAGTKEAINMVESGAKELSEDIMLEALLKGHEAVRELIAFQEEIIAAVGKEKAEVELLQVDADLQAEIVGKYNADLQKAVQIEEKKAREIATEAVKEHVTAEYEERYAEHEEHDRIMRDVAEILEQMEHAEVRRLITEDKVRPDGRRVDEIRPLDAEIDFLPKVHGSGLFTRGQTQALSVLTLAPMGDTQIVDGLDEEYKKRFMHHYNFPQYSVGETGRYGAPGRREIGHGALGERALAQVLPSLEAFPYAIRLVAEVLESNGSSSQASICAGTLALMAGGVPIKAPVAGIAMGLISDGTNYTVLTDIQGLEDHFGDMDFKVAGTREGITALQMDIKIEGITPQILEEALAQAKKARFEILDVIEKVIPAPRLELAPTAPKIDTIKVDVDKIKIVIGKGGETIDKIIEETGVKIDIDEDGNIAIYSSDQEAINRTKEIIASLVREAKVGEIYEAEVVRIEKFGAFVHLFDKTDALVHISEIAWTRTNKVEDVLAVGDKVTVKVVKVDDKGRIDASMKALLPRPPRSEKSNKEDHQSVRHHGSPKDDKGKEKYDK

SEQ ID NO: 72480 - protein, 205 aa, Streptococcus mutans
MGWWKETIDIVKEKDPAARTALEVLLTYPGVKALAAHCLSHFLWTHHCKLLARMHSQFWRFWTQIEIHPGAEIAEGVFIDHGSGLVIGETAIVEKGVMLYHGVTLGGTGKETGKRHPTIRQGALISAHSQVIGPVEVGPGAKVGAGAVVVSDVPADVTVVGVPAKVVRIHGQKDETAIHEIEENREYYLKKLEEAKEASFHSSGL

SEQ ID NO: 72481 - protein, 577 aa, Streptococcus mutans
  MISC_FEATURE (448)..(448): X=any amino acid
MIKIYDTLTRSLREFVPIHENTVNMYVCGPTVYNYIHVGNGRSAIAFDTIRRYFEYRGYTVNYISNFTDVDDKIIKAAAKAGMTTKALSDKFIAAFKEDVAALGVKPATENPRVIDYMQDIIDFVQILVDKGFAYESSGDVYFRVRKSDNYAALANKTLEELEIGASGRVDAESDCKEDPLDFALWKAAKEGEIAWDSPWGAGRPGWHIECSVMATTILGDTIDIHGGGADLEFPHHTNEIAQSEAKTGKKFANYWMHNGFVNIDNEKMSKSLGNFITVHDALKTMDGQVLRFFFATQHYRKPFNFTEKAIRDAEINLKYLKNTYEQPFTATVDEAVFARFLEKFQAAMDEDFNTANGITVVFELAKWINSGHYDQTVKDKFAEILQIFGVVFKEEVLDAEIEKLIEERQKARAARDFTKADAIRDDLAAQGIKLLDTKDGVRWMRDXVSDVNLINGIALAFEGDAIYSTYIRKHLIFQGLTKPNQLHHKTTRYVSAKAQAMLITKMLEAQLLSEKEEDIYRRGRNANSHTKAKNTDVVTYKMSTGFEAVMGYLHMTEQIKRLEELIDWCIQTVENE

SEQ ID NO: 72482 - protein, 301 aa, Streptococcus mutans
MTIRIIHSDKIYRELLKMPVAKRRAYFKEQVLAPFKPKFYKQNIPYEAKQADGFDIMMLLSWMHLMPETLTDQHQAFIDCLDDGFWKRCDQAIQDSLARFSSFQLPVQDYTFTALLANPAAPMLQINDGYSGDGGIPGYIFLSLVPHLDTLNRVQSALAHEINHNVRYQFIDWDGGSLKEMIVAEGLAENFAVQLYGKEKLGPWVSKTDLETLNQLVKPFLREHLDVRGMQKITAYLYGDKIAAMMGQDGVGMPYCAGYACGYYLVKYYLEKTGQTIEEATFLPASEILAEADEFWTETTH

SEQ ID NO: 72483 - protein, 245 aa, Streptococcus mutans
MDRDYTLKEIMTITGLTKRTLHYYDQIGLLPARKLANGYRHYSQQDLIDLQRILFLKALDFSIKEIQSLLKLSDEALRPILEEQQTRLVQKIQDLQKKKKELENFLAGSPLITLDIFEKPLNDQYQTEAELRYGKTSVYQTYQDHRAQLDSTERTQYDTKMEQQFDQVFQEFKRVSHLPLSATEVAAAVEQWKSAFLMIGDFSDEVLAYIAKSYVYDSRFKQYFSKYGNFDLTRFIAEAVTYYLT

SEQ ID NO: 72484 - protein, 203 aa, Streptococcus mutans
MSRYTGPSWKKSRRLGLSLTGTGKELARRNYVPGQHGPNNRSKLSEYGLQLAEKQKLRFSYGLGEKQFRNLFVQATKIKGGILGYNFMLLLERRLDNVVYRLGLATTRRQARQFVNHGHILVDGKRVDIPSYRVEVGQVISVREKSAKVPAILEAVESVVGRPAFVSFDADKLEGSLTRLPERDEINPEINEALVVEFYNKML

SEQ ID NO: 72485 - protein, 454 aa, Streptococcus mutans
MPETSELRVQPQDLIAEQSVLGSVFISPEKLIAVREYIDPEDFYKYAHRVIFKAMISLSDQNDAIDATTVRAILDNQGDLQNIGGISYLVELVNSVPTSANAEYYAKIVAEKAMLRRIISRLTEAVNQAYEGAINSEDIISGAEKALIDVNERSNRSGFRKISDVLAVNYENLEVRSQQITDVTGLATGFRDLDKITTGLHPDQLIILAARPAVGKTAFVLNIAQNVGTKMNRPVAIFSLEMGAESLVDRMLASEGMVDAHNLRTGQLTEQDWQNITLAQGTLADAPIYIDDTPGIKVTEIRARARKLDQELEKGLGLIVIDYLQLITGTRPENRQQEVSDISRQLKILAKELGVPVIALSQLSRGVEQRQDKRPVLSDIRESGSIEQDADIVAFLYRDDYYDRGDKDEGQEQLVDNTIEVILEKNRAGARGTVKLMFQKEYNKFSSIAQFEER

SEQ ID NO: 72486 - protein, 150 aa, Streptococcus mutans
MKVIFLADVKGKGKRGEVKEVSTGYAQNFLIKKNLAKEATKQAINELKGKQKSEEKAQAELLAEAKAVKVKLEQESTLVQFSEKVGPDGRTFGSITSKKISEELNKQFGIKLDKRYIKLDHPIRTIGLIEIPVKLHKDIDGIIKLQIKEA

SEQ ID NO: 72487 - protein, 657 aa, Streptococcus mutans
MKRFRFATSHLIMIGMILFGILAISARVFPDSPLLMFIIFLTCVAVIILFYYQKNIYEISELEQIELLNSQTEGKLITMLDQMPVGVIQFDPETDKIEWFNPFAELIFTKEDGEFDGEFISSVIKNRKEGSVDQTMEVGENKYSVDIDLDNGIFYFFNLSRESENQRQGLDLQPVIGIISIDNYDDTIESLADADVSQINGFIANFISEFAQSREIFYRRVNMDRFYFFTDYSVLDQLIQDKFEVLEQFRKEAQERHLPLTLSMGISYGNANHSQIGQIALKNLNIALVRGGDQAVIRENDEHKKLLYFGGGTVSTIKRSRTRTRAMMTAISDKIKTVDSVFVVGHKNLDMDALGASVGMQAFANNIIEHAAYAVYDEDSMSHDVARAVNRLKEDGHTQLLTVKESIEQVSDNSLLVMVDHSKLQLTLSRELYNKFTEVIVIDHHRRDDDFPENAILTFIESGASSASELVTELLQFQNGKYHLNKIQASIVMAGIMLDTKSFSTRVTSRTFDVASYLRTLGSDNVEIQNISALDFDEYRLINELILRGDRILPNVVVATGADDISYSNVIASKAADTMLNMAGIEATFVITRNDERTVCISARSRNKINVQRIMEEMGGGGHFNLAACQLKGTSVKEARKLLLEKIKEEFTGNEEA

SEQ ID NO: 72488 - protein, 436 aa, Streptococcus mutans
MALPTVAIVGRPNVGKSALFNRIAGERISIVEDVEGVTRDRIYTKAEWLNRQFSIIDTGGIDDVDAPFMEQIKHQADIAMTEADVIVFVVSAKEGITDADEYVAKILYRTHKPVILAVNKVDNPEMRSAIYDFYALGLGDPYPVSSAHGIGTGDVLDAIVDNLPTEAQEESSDIIKFSLIGRPNVGKSSLINAILGEDRVIASPVAGTTRDAIDTTFTDEEGQEFTMIDTAGMRKSGKVYENTEKYSVMRAMRAIDRSDIVLMVLNAEEGIREYDKRIAGFAHEAGKGIVVVVNKWDAIKKDNRTVAQWEADIRDNFQYIPYAPIVFVSAVTKQRLHKLPDVIKQVSQSQNTRIPSAVLNDVVMDAVAINPTPTDKGKRLKIFYATQVSVKPPTFVIFVNEEELMHFSYLRFLENQIRQAFVFEGTPIRLIARKRK

SEQ ID NO: 72489 - protein, 631 aa, Streptococcus mutans
MTHEFTENYDVIVIGAGHAGVEASLATSRMGCKTLLATINLEMLAFMPCNPSIGGSAKGIVVREIDALGGEMGKNIDKSYIQMRMLNTGKGPAVRALRAQADKALYARNMKHTVEQQENLTLRQSMIDEILVEDGKVIGVRTATNQKYSAQAVIVTTGTALRGEIILGELKYSSGPNNSLASVTLADNLRDLGLEIGRFKTGTPPRVKANSIHYDETEIQPGDKKANHFSFMSKDEDYLKDQIPCWLTYTNQSSHDIINKNLYRAPMFSGIVKGVGPRYCPSIEDKIVRFADKDRHQLFLEPEGRETEEVYIQGLSTSLPEDVQKDVVHSIKGLENAEMMRTGYAIEYDIVLPHQLRATLETKKISGLFTAGQTNGTSGYEEAAGQGIVAGINAALKIQGKPELILKRSDAYIGVMIDDLVTKGTLEPYRLLTSRAEYRLILRHDNADLRLTEIGHQVGLVNEERYMRFQIRKNQFDNELTRLSSIKLKPVAEINKRIEELGFKPLTDALTAKEFMRRPEINYAIATSFVGPAAESLDEKVIELLETEIKYEGYINKALDQVAKMKRMEEKRIPKNIDWDAIDSIATEARQKFKKINPETIGQASRISGVNPADISILMVYLEGKNRSRTR

SEQ ID NO: 72490 - protein, 373 aa, Streptococcus mutans
MTDNSKTRVVVGMSGGVDSSVTALLLKEQGYDVIGVFMKNWDDTDEFGVCTATEDYKDVAAVADQIGIPYYSVNFEKEYWDRVFEYFLAEYRAGRTPNPDVMCNKEIKFKAFLDYAMTLGADYVATGHYAQVSRDADGTVHMLRGADNNKDQTYFLSQLSQEQLQKVMFPLGHLQKPRVREIAEKAGLVTAKKKDSTGICFIGEKNFKEFLSSYLPAQKGRMMTIDGRDMGEHNGLMYYTIGQRGGMGIGGQKGGDNAPWFVVGKDLSQNILYVGQGFYHDALMSTSLTASQVHFTQNMPDKFTLNCTAKFRYRQPDSKVDVKVNGDKAEVIFDEPQRAITPGQAVVFYDGDECLGGGLIDNAYQEEKICQYI

SEQ ID NO: 72491 - protein, 148 aa, Streptococcus mutans
MNKTTYMAKPGEVERKWYIVDATDVPLGRLSAVVASVLRGKNKPTFTPHTDTGDFVIVINAEKVKLTGKKAANKIYYTHSMYPGGLKQISAGELRSKNAVRLIEKSVKGMLPHNTLGRAQGMKLKVFVGSEHTHAAQQPEVLDITGLI

SEQ ID NO: 72492 - protein, 130 aa, Streptococcus mutans
MAQAQYAGTGRRKNAVARVRLVPGTGKITVNKKDVEEYIPHADLRLVINQPFAVTSTEGSYDVFVNVVGGGYAGQSGAIRHGIARALLEVDPDFRDALKRAGLLTRDARMVERKKPGLKKARKASQFSKR

SEQ ID NO: 72493 - protein, 110 aa, Streptococcus mutans
MVTIKQGSIIKINLDPKQGHEQKGYRPYICLNHSIVTKYSNIGIFAPISNTKRDYPFYVSLEGTESTGKVLLDQLVTIDFNARDYRYVEDIQEDLLDELLARVKVLFEKG

SEQ ID NO: 72494 - protein, 612 aa, Streptococcus mutans
MSKIIGIDLGTTNSAVAVLEGTESKIIANPEGNRTTPSVVSFKNGEIIVGDAAKRQAVTNPETILSIKSKMGTSEKVSANGKEYTPQEISAMILQYLKGYAEDYLGEKVEKAVITVPAYFNDAQRQATKDAGKIAGLEVERIVNEPTAAALAYGLDKTDKDEKILVFDLGGGTFDVSILELGDGVFDVLATAGDNKLGGDNFDQKVIDWLVEEFKKENGIDLSTDKMALQRLKDAAEKAKKDLSGVTSTQISLPFITAGEAGPLHLETSLSRAKFDDLTRDLVERTKTPVRQALSDAGLSLSEIDEVILVGGSTRIPAVVDAVKAETGKEPNKSVNPDEVVAMGAAIQGGVITGDVKDVVLLDVTPLSLGIETMGGVFTKLIDRNTTIPTSKSQVFSTAADNQPAVDIHVLQGERPMAADNKTLGRFQLTDIPAAPRGVPQIEVTFDIDKNGIVSVKAKDLGTQKEQTIVIQSNSGLTDEEIDKMMKDAEANAEADAKRKEEVDLKNEVDQAIFTTEKTIKETEGKGFDTERDAAQAALDDLKKAQESGNLDDMKAKLEALNEKAQALAMKLYEQAAAAQQAQAGQEGAQSSDSDSSDKGGDDVVDGEFTEK

SEQ ID NO: 72495 - protein, 262 aa, Streptococcus mutans
MLFLDNCHAIIFLMIRYKAIISYDGTNFSGFQRQPQVRTVQEEIEKTLLRLNSGQAVKIHGAGRTDAGVHAYGQVIHFDLPQQRDLEKLRFGLDTQTPDDIDVIQVEQVADDFHARYQKHRKTYEFLVDLGRPKNPLMRHYATHFPYKVDFSVVKAAIKKLRGTHDFTGFTASGTSVENKVRTISRATVEKDDKTGFLIFTFTGSGFLYKQVRNMVGTLLKIGNGRMPIDQIDRILESGDRSLAGPTAASNGLYLKEIIYDD

SEQ ID NO: 72496 - protein, 285 aa, Streptococcus mutans
MKLITSYFGRFNLENLLFEFASKLLSLLLLLIVFIIAKRVISYLFEKTIARSTALARYSQGRQKTLIKLFHNIMDYSLYFLLIYWILAIIGLPVSSLLAGAGIAGVAIGLGAQGFLSDLVNGFFILLERQFDVGDSVKLRATTGSISGTVSSVGIRTTQIRDFDGTLHFVPNRNITIVSNLSRGDMRAQIDIPIYANTNLRQVTTIIKQVNEDNISQFPEIVGVPNILGATTSPVTGQIVFRIDIFVQNSKQNHIYYTFYRLYQEALLANHISLPTANAIPIAKK

SEQ ID NO: 72497 - protein, 264 aa, Streptococcus mutans
MANLILGRYIPGDSFVHRLDPRSKLLSMLIFIIVVFWANNVLTNLLMFVFTMILVFLSRVKISFFLKGLRPMIGLILFTTLFQVLFTQNGHVLFHLWIIKITDSGIGQAALIFMRFVLIIIFSTLLTLTTTPLSLADAVESLLKPLEPLKVPVHEIGLMLSLSLRFVPTLMDDTTRIMNAQRARGVDFGEGNLIQKIKSIIPILIPLFASSFKRADALATAMEARGYQGGAGRSKYRLLKWTYKDSLAIVGICLLGFILFLLKK

SEQ ID NO: 72498 - protein, 280 aa, Streptococcus mutans
MGINLQEVSYTYQAGTPFEGRALFNVSLEIKDGSFTAFIGHTGSGKSTIMQLLNGLNTPTEGTVLVDDVAIRSDSKNKDIKNIRKKVGLVFQFPESQLFDETVLKDVAFGPQNFGISKEEAEKLAREKLAMVGISEELFEKNPFELSGGQMRRVAIAGILAMEPSILVLDEPTAGLDPKGRRELMTLFKELHQGGMTIVLVTHLMDDVSNYADWVYVLEKGRIVLSGSPKSVFQEIEFLESKQLGVPKITQFAAHLRERGITFDALPITLEEFVEAIKNG

SEQ ID NO: 72499 - protein, 290 aa, Streptococcus mutans
  MISC_FEATURE (19)..(19): X=any amino acid
MITSKELAFFLRILLNKKXQDKIIELKNVTFRYDENQEKPTLNNISFHVKHGEWLSIIGHNGSGKSTTVRLIDGLLEAESGQILIEGHKLSEDNVWDIRHKISMVFQNPDNQFVGATVEDDIAFGLENKGIPLKEMRERVVEALNLVDMSDFKTREPARLSGGQKQRVAIAGAVAMRPSIIILDEATSMLDPEGRLELIGTIQKIREQYGMTVISITHDLDEVTLSDRVLVMKNGQIESSSSPRELFSRGDELLDLGLDIPFTSTIIKALRQIGFTFDNRYLLEKELEDK

SEQ ID NO: 72500 - protein, 180 aa, Streptococcus mutans
MAKKENIPNLLTLIRILLIPVFLLLTSVTSSVTWHIIAAIIFAVASLTDYLDGYLARKWKVVTNFGKFADPLADKMLVMSAFIILVGLNLAPAWISAIIICRELAVTGLRLLLVETGGEVLAAAMPGKIKTATQMFSIILLLCHFEFVGTILLYIALFFTLYSGYDYFKGAGFLFKDTFK

SEQ ID NO: 72501 - protein, 430 aa, Streptococcus mutans
MAATRLKRRKFPTINEEFYYNQLENGMTVFLIPKESFKETLAVMSSRFGSIDTNFTVNGKKKSYLAGIAHLLEHQLFEMNKQKDAAYEFTKLGAESNAYTTFDKTIYYFSTADNIKKNLDLLQEFTSQINFTDMSIEKEKKIITQEFNMYQDDSDDYLYQVILSKLYPQTSLAEDITGNRDSIDKLTKNNLEENFHYFYQPENLTLLVAGDFDVKRVYKDIVTTQRQLPDRPKFEIKRSPLKLLPITPTSSMQMDISISKLAVGFRFNFIKKKRKSLIKERLLLKLFFLLLFGWTSEHYQQWYEDRKIDDSFELKIEVSTSYQFVVILLDTKEPIAMSNKIGQTIKKFKTDTNLSASHLQTVKKELYGDFIRSLDSLEALSSQFIDNLWGEETYFDFPTVLQNIEIKDVLEFGEKITKEMQLTDFTLFPK

SEQ ID NO: 72502 - protein, 325 aa, Streptococcus mutans
MTKLNSSFMIDNVEIPHRTVLAPMAGVTNSAFRTIAKEFGAGLVVMEMVSDKGIQYNNEKTLHMLHIDEGEHPVSIQLFGSDGDSLARAAEFIQANTKTDLVDINMGCPVNKIVKNEAGAMWLKDPEKIYSVISSVKSVLNIPLTVKMRTGWSDASLAVENALAAESAGVAALAMHGRTREQMYTGSCDHETLAKVAKAITKVPFIANGDIRSVEDAQFMIDQVGADAVMIGRAARSNPYIFTQINHYFETGEILDNLPFAKMLEIAQDHLRRLVDLKGEKIAVREFRGLAPYYLRGTSGAAKIRSAVSRAETILEVENIFAQIH

SEQ ID NO: 72503 - protein, 290 aa, Streptococcus mutans
MDKLIKSIAKSGSFRAYVLDSTETVRTAQEEHQSLSSSTVALGRTLIANQILAANQKGDSKVTVKVIGDSSFGHIISVADTKGNVKGYIQNAGVDVKKTASGEVIVGPFMGNGQFVVITDYGTGNPYTSSTPLVSGEIGEDLAYYLTESEQTPSAVGLNVLLDEKDKVKVAGGFMLQVLPEASEEEITRYEKRIQEMPAISTLLESEDHIEALLKAIYGEEDYKVLVEEDLQFTCDCSRQRFEAALMTLSKSDLKEMKEEDHGAEIVCQFCGKKYQFKESDLEEMINDKA

SEQ ID NO: 72504 - protein, 536 aa, Streptococcus mutans
MTKYIFVTGGVVSSIGKGIVAASLGRLLKNRGLKVTIQKFDPYINIDPGTMSPYQHGEVYVTDDGAETDLDLGHYERFIDINLNKYSNVTTGKIYSEVLRKERKGEYLGATVQVIPHITDALKEKIKRAATTTDSDVIITEVGGTVGDIESLPFLEALRQMKADVGADNVMYIHTTLLPYLKAAGEMKTKPTQHSVKELRGLGIQPNMLVIRTEQPAGQGIKNKLAQFCDVAPEAVIESLDVDHLYQIPLNLQAQNMDQIVCDHLKLDVPVADMTEWSAMVDKVMNLKKKTKIALVGKYVELPDAYLSVVEALKHSGYVNDTAIDLNWINANEVTPETVTDLLGDADGIIVPGGFGHRGTEGKIEAIRYARENDVPMLGICLGMQLTCVEYARHVLNLEGANSAELDPDTKYPVIDIMRDQIDIEDMGGTLRLGLYPCKLKSGSKTASAYSNQEVVQRRHRHRYEFNNAFRQQFEEAGFVFSGVSPDNRLVEVVELSDKKFFVAAQYHPELQSRPNRPEELYTAFITAAVENSQAH

SEQ ID NO: 72505 - protein, 293 aa, Streptococcus mutans
MAIVSAEKFVQAARDNGYAVGGFNTNNLEWTQAILRAAEAKKAPVLIQTSMGAAKYMGGYKLCKVLIETLVESMGITVPVAIHLDHGHYEDALECIEVGYTSIMFDGSHLPVEENLEKAKEVVAKAHAKGISVEAEVGTIGGEEDGIIGRGELAPIDDAKAMVETGIDFLAAGIGNIHGPYPANWEGLDLDHLKKLTEAVPGFPIVLHGGSGIPDDQIRAAIKLGVAKVNVNTECQIAFANATRKFAAEYEANEAEYDKKKLFDPRKFLKPGFEAITEAVEERIDVFGSEGKA

SEQ ID NO: 72506 - protein, 340 aa, Streptococcus mutans
MSKPIILTGDRPTGKLHLGHYVGSLKNRVLLQNENKYEMFVFLADQQALTDHAKESEIIKDSIANVALDYLSVGLDPEKVTIFIQSQIPELAELTMYYMNLVSLARLERNPTVKTEIAQKGFGESIPTGFLVYPISQAADITAFKANYVPVGNDQKPMIEQTREIVRSFNHTYKTNCLVEPEGIYPKNEAAGRLPGLDGNAKMSKSLGNGIFLSDDADTVRKKVMSMYTDPNHIRVEDPGQIEGNMVFHYLDIFGRKEDQTDIAAMKEHYQSGGLGDVKTKHYLLDILERELTPIRRRRLEYEKNMDQVLDILKKGSETARETASETLSGVKRAMGINYF

SEQ ID NO: 72507 - protein, 539 aa, Streptococcus mutans
MLTVSDISLRFSDRKLFDNVNIKFTAGNTYGLIGANGAGKSTFLKILSGDIEPTTGHVSLGPEERLSILRQNHFDYEEERAIDVVIMGNQDLYNIMKEKDAIYMKPDFSDEDGVRAAELEGQFVELNGWEAESEASQLLQNLNIPEELHYQNMSELTNGDKVKVLLAKALFGKPDVLLLDEPTNGLDIQSINWLEDFLIDFENTVIVVSHDRHFLNKVCTHMADLDFGKIKLYVGNYDFWKESSELAAKLQADRNAKAEEKIKELQEFVARFSANASKSKQATSRKKMLDKIELEEIVPSSRKYPFIKFQAEREIGNDLLSVENLSVKIDGESILDNISFTLNPGDKTAIIAQNDIQSTALIRALMGDIDYEGTIKWGVTTSQSYLPKDNTNDFASGESILEWIRQFANKEDDDNTFLRGFLGRMLFSGDEVNKSVSVLSGGEKVRVMLAKLMLLKSNVLVLDDPTNHLDLESISSLNDGLKDFKESIIFASHDHEFIQTLANHILVISKNGVIDRIDETYDEFLENEEVQAKVAQLWQ

SEQ ID NO: 72508 - protein, 159 aa, Streptococcus mutans
MKVKLITVGKLKEKYLKDGIAEYCKRLKRFTKFELEELPDEKIPNNASQAQNTYILEKEGQRILNKISNREFVIVLAIEGKQFSSEKFSQLLSATMLKGYSDLTFVIGGSLGLSQEVKKRASILMSFGLLTLPHQLMRLVFVEQIYRAFMIQEGSPYHK

SEQ ID NO: 72509 - protein, 402 aa, Streptococcus mutans
MNNTKSHPFLKWFIPFLVIFLTFILGVISTLTFNWITGNKSFSNNGKTTVSNVIYDTKSNTTKAVKNVKNTVVSVINYQKTDNSYYNYDSGSQEKNKSEDGLGVYGEGSGVIYKKDGDSAYLVTNNHVVKDAEKLEIMMANGKKVVGKLVGSDTYSDLAVIKISSKYVTTVAEFANSDKIKVGEPAIAIGSPLGSDYANSVTEGIVSSLSRTVTSQNENGETISTNAIQTDAAINPGNSGGALINIKGQVIGINSSKIASSNNSNSGVAVEGMGFAIPSNDVVSIINQLEENGEVVRPALGISMANLSEASTSGRDTLKIPSDVTSGIVVLSTQSGMPADGKLKKYDVITEIDGKKVASISDLQSILYKHKKGDKIKLTFYREKDKQTVEIQLTKTSQDLNH

SEQ ID NO: 72510 - protein, 966 aa, Streptococcus mutans
  MISC_FEATURE (301)..(301): X=any amino acid
  MISC_FEATURE (303)..(303): X=any amino acid
TFQEIILTLQQYWNDQGCMLMQAYDNEKGAGTMSPYTFLRAIGPEPWNAAYVEPSRRPADGRYGENPNRLYQHHQFQVVMKPSPSNIQELYLQSLELLGINALEHDIRFVEDNWENPSTGSAGLGWEVWLDGMEITQFTYFQQVGGLATQPVTAEVTYGLERLASYIQEVDSVYDIEWAPGVKYGEIFRQPEYEHSKYSFEISNQEMLLENFEKFEAEAKRCLEGSLVHPAYDYILKCSHTFNLLDARGAVSVTERAGYIARIRNLARVAAKTFVAERRRLGYPLLDEMTREKLLAEEEAXSXQRNLLVELGLEEMPAYVVKPSIKQLRQKMGQFLETNRLSFEKIEMFSTPRRLAIRVVHLADQQSDYSEDFKGPAKKIALDADGHFTKAAQGFVRGKGLTTDAIEFREVKGEEYVYVTKNEAGKPAKEVLGGLIDVLQSLTFPVNMHWANHTFEYIRPVHTLVVLLDDEALDLNFLDIKSGRISRGHRFLGQETQIASAASYETDLRAEFVIADAKEREDMIIEQIREIEKTYNVSVEIDEALLSEVLNLVEYPTAFMGSFDEKYLELPEEVLVTSMKTHQRYFVVRDQTGKLLPNFISVRNGNEQFIENVVKGNEKVLLARLEDGEFFWREDQRLQIADLVEKLKLVTFHEKIGSLYEHMMRTKQIAAYLAEQADLTDQEKAEIERAASIYKFDLLTGMVGEFDELQGIMGEKYATLAGESQAVATAVREHYLPISSDGQLPDSKVGAILAVADKLDTLLSFFSVGLIPSGSNDPYALRRATQGIVRILDKFGWEIPLDRLVANLYQFDFDSLTYQNQADVLAFIRGRVEKMIDKSVPKDIREAVLDSSTHIVRLEVEAAAALAEKADEDHFKASIESLSRVFNLAEKSNHNEMVDTSIFENEYEQELFDAVEELHFTEDMTDNVDRLFVLSPIIDAFFDNTMVMVDDEAVKKNRLNLLDRLA

SEQ ID NO: 72511 - protein, 416 aa, Streptococcus mutans [sequence omitted]

SEQ ID NO: 72512 - protein, 316 aa, Streptococcus mutans
MTNDFHHITVLLHETIDMLDIKPDGIYVDATLGGAGHSECLLSKLGKEGHLYCFDQDQKAIDNAKIRLQQYVKTGQVSFIKDNFRHLKSRLADEGIYEIDGICYDLGVSSPQLDERERGFSYKKDAPLDMRMNQDAQLTAFDVVNTYDYRDLVRLFFKYGEDKFSKQIARKIESARKEKLIETTAELAEIIKSAKPAKELKKKGHPAKQIFQAIRIEVNDELGAAEESLTQALDLLALNGRIAVITFHSLEDRLTKQLFKEVTTLDVPKGLPFVPENLQPKFSLVNRKPILPNARELSENNRAHSAKLRVIQKIRN

SEQ ID NO: 72513 - protein, 107 aa, Streptococcus mutans
MTNEKRSEALSQALQKRIKTFTRLEKAFYGAIIITAITLAVSIIYLQSRSLQIQQEISHLNSQINDRETEYNNAKQEVNELSRYDRIAEIAQKAGLTVQKDNIKKVD

SEQ ID NO: 72514 - protein, 310 aa, Streptococcus mutans
MGIYTCTMNLAIDLFIETEHLYESKVNRALSDDIQANGKGVNVSFIMKRLGLENTALGFSGGFTGKYVADNLEAEGIAAPFVEVEGLTRINVFTKVNATCQEFKLVNQGPLVNEAAQCRLLQQISKFKKGDYLVVSGSLPRGVPSQILYDIAKLCYEKGVNLIFDVSDCIIMDSLSFHPFLLKPNEEELATWFGKNQLEEEQLISYAKQLIVKGARHVLLSLGQDGAIFIDSHFNVYQANAPRGKVVNTACAGDTLLGTFLAGFIRQESLERVLAKSVAAGSSTAFRSGITDFSDVNELKEQIMVKKIKE

SEQ ID NO: 72515 - protein, 466 aa, Streptococcus mutans
MSEFKLIAATGCPTGIAHTFMAQEALEQAAKEKGVSIKVETHGQVGVENELTPAEIAGAKAVIIAADKDVQAERFAGKRVIEVSVADGIKKADQLIADALAGKGQIKGGTKIESAELSSDTEGESFGRQVYRHLMNGVSHMLPFVVAGGVLVAISFLFGIYSFDPKSEQYNWFAALLKTDIGGVAMGVMTPILAAYIAESIAKRPGFVAGFVGGMMAVNGGSGFLGGIIAGFAAGYIVLGLMKLFEKLPKSLDGLKAIFLYPVFGVFLTGMVMAVVNSPMAWVNKSLMAWLGAFENANPLVLGVIVGCMCAFDMGGPVNKAAYVTGTALLAQGNTTFMAGVSAACIAPPLITFVATTAFRKYYDENDRNAGLANLILGSTHITEGAIPFAAKDPLRMLPTFMLGSSIAAILTYMWKVKVPAPHGGFLVLPVVTHAFLWVLAIAIGAIVAGIIMGFIQKSKYEKARG

SEQ ID NO: 72516 - protein, 329 aa, Streptococcus mutans
MILSQQKYNYLAKVSDSNGVISALAFDQRGALKCLMAQYQMKEPTVAQMEELKVLVSEELTPYASSILLDPEYGLPAAQARDREAGLLLAYEKTGYDANTTSRLPDCLVDWSIKRLKEAGADAVKFLLYYDVDGDPQVNVQKQAYIERIGSECQAEDIPFFLEILTYDETISNNSSVEFAKVKVHKVNDAMKVFSAERFGIDVLKVEVPVNMVYVEGFAEGEVVYSKEEAAQAFREQEASTDLPYIYLSAGVSAELFQETLVFAHKAGAKFNGVLCGRATWAGSVQVYMEEGKEAARQWLRTSGLQNINELNKVLKTTASPWTEKVSVG

SEQ ID NO: 72517 - protein, 280 aa, Streptococcus mutans
MKQLSKNKIFGGWHERYSHSSKTTNTEMTFAIYLPPQAADRRVPVLYFLSGLTCTDENFSTKAGAQQYAAKYGLALVIPDTSPRGKNVPDDEAYDLGQGAGFYLNATQNPWSQHYHMYDYIVEELPELIEANFPVTNQRSIFGHSMGGHGALQIGLKNPDCYAAISAFAPIVNPSNVPWGKKAFSAYLGKDEKTWAAYDSSKLVSQVKKARPILIDQGLADNFYPEQLQPEVFVQAAESNGIEVLLDLHEGYDHSYYFIASFVEKHIAFHAYYLGLRKEP

SEQ ID NO: 72518 - protein, 372 aa, Streptococcus mutans
MNTIKTRAAVAWAPNEPLKIEELDLMMPQKGEVMVHITATGVCHTDAYTLSGKDAEGVFPCVLGHEGAGIVEAVGEGVTEFQVGDHVIPLYTAECGKCEFCLSGKTNLCSAVRETQGRGVMPDGTVRFFKDGQPIYHYMGTSTFAEHTVVSEYSLVKIQDNAPLEEVCLLGCGVTTGMGAVLNTAKVEEGATVAIFGLGGIGLAAIIGARMAKASRIIAIDINPDKFDKARKLGATDLVNPNNHAKPIQEVIIDITNGGVDYSFECIGNVEVMRAALECCHKGWGESTIIGVAPAGAEIHTRPFQLVTGRVWRGSAFGGVKGKTQLPGIVGQYMAGEFALSDFITHTMPLEQINDAFDLMHEGKSIRTVIHY

SEQ ID NO: 72519 - protein, 749 aa, Streptococcus mutans
MKNFKKKFLDYVVGDRRVPRENRERVGQNLMILSVFIFCVFIVNFIIIIGTDRKFGVNLSKGASSVYQTVQKVQAKRGTIYDRNGNPIAEDSTTYNIYAVIDKSYVSTSGEKLYVQPSQYDKVADILNQHLGMEKDYVTAQLKQKKLTQVSFGSKGSNITYGTMTDVTKALKDAKIKGVAFTTSPGRMYPNGTFASQFIGLAQIKENKDGSKSLVGATGMEASLDKILSGKDGQVTYQKDKNGNTLLGAATTVKKAQDGKDVYTTLSAPIQTYLETQMDAFQSKAKGAQASATLVNAKTGEILATSQRPSFNSDTKEGLDSKDFSWQNALYQTNYEPGSTMKVMLLAAAIDEGVFNPNETYNNASLSIADATIKDWSVNEGISQGGYLSFAQGFAYSSNVGMTLLEQKMGNDNWLNYLNKYRFGLPTRFGMGSEASGLLPSDNMVTIAMSAFGQGIGVTQTQMLRAFTSVSNDGVMLEPQFITKIYDPKTGSSRTAKKEEAGNPVSADAAKQTRQYMVTVGTDPNYGTLYSASLGGPVIKVGNQSVAVKSGTAQIASGDGSGYLSGSNDYIYSVVAMVPSDNPDFLMYVTLQQPESFSVSFWQDVVNPVLEEATLMKDTLLAPIETPEDQQTKYYLPNVIGKNPGNTADDLRQNLVHPIVLGTGNKIIKTSVSVGSNLKENQQVLLLTSHFDTMPDMYGWSKKNVKKFEDWTGIKVTFKGKKSGKVTEQSVKVGSKLKNLKKIRITLGE

SEQ ID NO: 72520 - protein, 339 aa, Streptococcus mutans
MLTTTIIAGIISFILTILAMPFFIRFYQLKKINGQQMHEDVKQHLAKAGTPTMGGTVFLLVAALVTFICAFVLHITGGPAFGATLAILFIVLIYGTIGFLDDFLKIFKKINQGLTAWQKMALQLIGGLVFYLVHVKPSGTDSLNLFGFPLHLGVFYIIFILFWVVGFSNAVNLTDGIDGLASISVVISLLTYSVIAYVQNQFDVLLIIISMVGALLGFFVYNHKPAKVFMGDVGSLALGAMLAAISITLRQEWTLLIIGIVYVLETASVMLQVSYFKWTKKRKGEGQRIFRMTPFHHHLELGGLRLRESGKKWSEWQVDFFLWSIGLLGSLLILAILYL

SEQ ID NO: 72521 - protein, 447 aa, Streptococcus mutans
MLFTDFKFKNYINNALANLHFEGPTEVQERLIPLILSGKDLVGESKTGSGKTHTFLLPIFEKLEEDSLDVQAVITAPSRELARQIYEAAKQIAQFSEQNIRLANYIGGTDKLRQVEKLKATQPQIMIGTPGRIYDLVKSGHLDIHKAHTFVVDEADMTLDLGFLDTVDKIAASLPKDIQLLVFSATIPQKLQPFLKKYLNHPIIEKIKTSTVIADTISNWLISTKGRDKNQQILEIVKSLKPYLAIIFANTKDRVDDLHAFLSANGFKTAKIHGGIPPRERKRIMNQVKQLDFEYIVATDLAARGLDIEGVSHVINDAIPQDLSFFVHRVGRTGRNGLSGTAITLYQPSDDSDIRELEKLGIVFVPKVLKNGEFQDTYDRDRRLNRKKTQEKLDLEMMGLVKKKKKKIKPGYKKKIQWKVNEKRRKERRFVKRAQNRANRKAKKQRF

SEQ ID NO: 72522 - protein, 567 aa, Streptococcus mutans
MEKIYLENPKSGSEILLDTLANLGVKTIFGYPGGAVLPLYDAIYKQDNIRHILARHEQGAVHEAEGFAKSTGKLGVAIVTSGPGATNAITGIADAMSDSVPMLVFTGQVATPGIGKDAFQEADIIGITMPITKYNYQIRETADIPRIVTEAVHIATTGRPGPVVIDLPKDVSEKRVSSFNETTIKIPGYQPTIEPNNLQVKKILSQLKKAKKPLILAGGGVNYAGASAELIAFAERYKIPVVSTLLSLGVMPIEHPLSLGMGGMHGSYASNMALTECDFLINFGSRFADRLTGNPKTFAQKAVVAHVDIDPAEIGKVVKTAIPVVGDAKKTLKQLLESDKVSTRHREWTDKVLQDKAKAPFSYKFDQEVIKPQHAIETIGKLTKGDAIIITDVGQHQMWAAQFYPYKNERQIITSGGLGTMGFGIPAAVGAKLANPGKEVVLFVGDGGFQMTNQELAILNGYGVPIKLVLINNHSLGMVRQWQESFYDERRSESTFDDEPNFQLLAESYGISHYKLDNPLTLEKDLEVILENKPMLIEVDISNREHVYPMVPSGKSNAEMLGVTFNA

SEQ ID NO: 72523 - protein, 486 aa, Streptococcus mutans
MYKDDSLTLHTDLYQINMMQVYFNQGIHNKRAVFEVFFRKEPFANGYAVFAGLERMIAYLQGLSFSETDIAYLEELGYPADFVAYLKEFKLELSVKSAKEGDLVFANEPIVQIEGPLAQCQLVETAILNIVNFQTLIATKAARIRSVIEDEPLLEFGTRRAQEMDAAIWGTRAAVIGGANATSNVRAGKLFGIPVSGTHAHALVQAYGNDYDAFMAYAGTHKDCVFLVDTYDTLRLGVPAAIRVASELGDKINFLGVRIDSGDMAYLSKKVRKLLDEAGYPHAKIYASNDLDENTILNLKMQKAKIDIWGVGTKLITAYDQPALGAVYKIVSIEDDNGVMQDTIKLSNNAEKVSTPGKKQVWRITSRAKGKSEGDYITFTDTDVNSLDEIDMFHPTYTYINKKVRDFDAVPLLVDIFDQGKLVYTQPSLSDIQDYARREFDKLWDEYKRVLNPQDYPVDLACDVWQNKVNLIDRIRKEAYEKGDVK

SEQ ID NO: 72524 - protein, 160 aa, Streptococcus mutans
MRRMLTAKLQNSTGVLNRFTGVLSRRQVNIESISVGHTEIPNISRITIIIDVDSLEEVEQIMKQLNRLIDVVRVRDITDKPHLEREVILIKVAAPTSKRAEILAIIQPFRASVIDVAPKSITIQMTGDADKIEALIRVIQPYGVKNIARTGATGFTRDLS

SEQ ID NO: 72525 - protein, 274 aa, Streptococcus mutans
MSLQEDIITQLGVKPKIDAQEEIRKSIDFLKAYMKKHGFLKSYVLGISGGQDSSLAGRLAQLAIEELRHETGDNGYKFIAIRLPYGVQADEDDAQRALNFIQPDVSLAINIKPAVDGEVAALAEAGVQVSDFNKGNIKARQRMISQYAVAGENGGAVIGTDHAAENITGFFTKFGDGGADILPLYRLNKRQGKQLLAELGADKALYEKIPTADLEENKPGIADEVALGVTYNDIDDYLEGKQVSPAAQKIIENWWNKTEHKRHLPISIFDDFWK

SEQ ID NO: 72526 - protein, 340 aa, Streptococcus mutans
MAVEMLYEADVKVAALDGKKIAVIGYGSQGHAHAQNLRDSGHDVIIGVRHGKSFDKAKEDGFDTYEVGEATKLADIIMVLAPDEIQKDIYKDEIAPNLSAGKALGFAHGFNIHFGYIKAPEDVDVFMVAPKGPGHLVRRTYTEGFGVPSLYAVYQNPTGNAENIALDWAKGIGSARVGLLVTTFKEETEEDLFGEQAVLMGGLTHLIEAGFEVLTEAGYAPQLAYFEVLHEMKLIVDLIYEGGFKKMRQSCSNTAEFGDFVTGPRVIGPEVKENMKAALADIQSGKFAREFVEDHDAGFPRLKAFRKEAEGLEIEKIGAELRKAMPFVNQNDDDAFKIYN

SEQ ID NO: 72527 - protein, 295 aa, Streptococcus mutans
MGVFIFLCFILFLVILLIASGLYVVRQQTVAIIERFGKYQLTSASGIHLRLPFGIDKIAARIQLRLLQSEIIVETKTKDNVFVTLNVATQYRVNEQNVTDAYYKLMRPEAQIQSYIEDALRSSVPKLTLDELFEKKDEIALEVQHQVAEEMSTYGYIIVKTLITKVEPDAEVKQSMNEINAAQRKRVAAQELANADKIKIVTAAEAEAEKDRLHGVGIAQQRKAIVDGLAESIMELKGTNVSLTEEQIMSILLTNQYLDSLNTFAQHGNSSIFLPANPEGAEDIRTQVMSALKAR

SEQ ID NO: 72528 - protein, 1465 aa, Streptococcus mutans
MSELFKKLMDQIEMPLEMKNSRVFSSADIVEVKVYPESRIWDFRFSFETILPIDFYQELRSRLVTSFETADIKAVFDIEVENAEFSNELLQAYYQEAFKQPTCNSASFKSSFSHLTVSYTDGKVLISAPQFVNNDHFRKNHLPNLEKQFEAFGFGKLSFDIVSNQKMTEEIKHHFESSRQQQIQKASQETLEIQKSLEASIPPEEIPKPVSNFKERIKDRQAAFEKAEITPMAEIETEENRITFEGLVFDVERKTTRTGRHIINFKMTDYTSSFPMQKWAKDDEELKKYDMISKGAWLRVRGNIENNPFTKALTMNVQNVKTIVHKERKDLMPQGEKRVEFHAHTNMSTMDALPTVEQLVAKAAQFGHPAVAITDHGNVQSFPHGYHAGKKNGIKVLFGLEANLVEDRVPIVYNEVDMDMNEATYVVFDVETTGLSAINNDLIQIAASKMHKGNIVEQFDEFIDPGHPLSQFTTDLTGITDQHVKGAKPISQVLQEFQSFCQDTVLVAHNATFDVGFMNANYERHDLPKITQPVIDTLEFARNLYPEYKRHGLGPLTKRFQVSLEHHHMANYDAEATGRLLFIFLKEAKEKHGVNNLLDLNTKIVDDNSYKKARVKHATIYVLNQKGLKNLFKLVSLSNVTYFAGVARIPRTILDQYRDGLLLGTACSDGEVFDTVLSKGVEDAVEVAKYYDFIEVMPPALYEPLLARELIKDEAGIQQIIKDLIEVGRRLDKPVLATGDVHYLEPEDEIYREIIVRSLGQGAMINRPIGRGENAQPAPLPKAHFRTTNEMLDEFAFLGEDLARDIVIKNPNEMVERFEDVEVVKTDLYTPFIENSEEKVAEMTYEKAFEIYGNPLPDIIDLRIEKELTSILGNGFAVIYLASQMLVNRSNERGYLVGSRGSVGSSFVATMIGITEVNPMPPHYICPNPDCKHSEFITDGSVGSGYDLPDKICSECGTPYKKDGQDIPFETFLGFDGDKVPDIDLNFSGDDQPSAHLDVRDIFGEEYAFRAGTVGTVADRTAYGFVKGYERDYGKFYRDAEVDRLAQGSAGVKRTTGQHPGGIVVIPNYMDVYDFTPVQYPADDLTAEWQTTHFNFHDIDENVLKLDVLGHDDPTMIRKLQDLSGIDPKTIPADDPEVMKLFSGTEVLGVTEEEIGTPTGMLGIPEFGTNFVRGMVDETHPTTFAELLQLSGLSHGTDVWLGNAQDLIKQGIATLSTVIGCRDDIMVYLMHAGLEPKMAFTIMERVRKGAWLKISEEERNGYISAMRENNVPDWYIESCGKIKYMFPKAHAAAYVLMALRVAYFKVHHPIYYYCAYFSIRAKAFELKTMSAGLDAVKARMADISQKRKINQASNVEIDLFTTLEIVNEMLERGFKFGQLDLYRSDATEFIIDGDTLIPPFVALEGLGENVAKQIVKARNEGEFLSKTELRKRGGLSSTLVEKMSDMGILGSMPEDNQLSLFDDFF

SEQ ID NO: 72529 - protein, 149 aa, Streptococcus mutans
MVIERSCMGDLDKNPAVKAMVVFRKAMRTIDAQVAPSYKNNGLTQTQFAVLDVLYAKGEMTISRLIASILATSGNMTVVIKNMERNGWIYRSPNPDDRRASVVGLTEVGKQLIQKALPDHIAMVEAAFSVMTEEEQLVLIDLLKKFKSL

SEQ ID NO: 72530 - protein, 331 aa, Streptococcus mutans
MSETKVVALREAINLAMSEEMRKDEKIILMGEDVGIYGGDFGTSVGMLAEFGEKRVKDTPISEAAIAGSAVGAAQTGLRPIVDLTFMDFVTIAMDAIVNQGAKANYMFGGGLKTPVTFRVASGSGIGSAAQHSQSLEAWLTHIPGIKVVAPGTVNDAKALLKSAIRDNNIVIFMEPKALYGKKEEVNLDPDFYIPLGKGEIKREGTDVTIVSYGRMLERVLKAAEEVAAEDISVEVVDPRTLIPLDKDLIINSVKKTGKVILVNDAYKTGGFIGEIASVITESEAFDYLDAPVLRLASEDVPVPYSHVLETAILPDVAKIKEAIYKQVRKR

SEQ ID NO: 72531 - protein, 455 aa, Streptococcus mutans
MAVEIIMPKLGVDMQEGEIIEWKKQEGDEVKEGEILLEIMSDKTNMEIEAEDSGVLLKIVKGNGQVVPVTEVIGYIGQAGEVLEIADVPASTVPKENSAAPAEKTKAMSSPTVAAAPQGKIRATPAARKAARDLGVNLNQVSGTGAKGRVHKEDVESFKAAQPKATPLARKIAIDKGIDLASVSGTGFGGKIIKEDILNLFEAAQPVNDVSDPAKEAAALPEGVEVIKMSAMRKAVAKSMVNSYLTAPTFTLNYDIDMTEMIALRKKLIDPIMEKTGFKVSFTDLIGLAVVKTLMKPEHRYLNASLINDATEIELHQFVNLGIAVGLDEGLLVPVVHGADKMSLSDFVIASKDVIKKAQTGKLKATEMSGSTFSITNLGMFGTKTFNPIINQPNSAILGVGATIQTPTVVDGEIKIRPIMALCLTIDHRLVDGMNGAKFMVDLKKLMENPFTLLI

SEQ ID NO: 72532 - protein, 581 aa, Streptococcus mutans
MAVEIIMPKLGVDMQEGEIIEWKKQEGDEVKEGDILLEIMSDKTNMEIEAEDSGVLLKIVKGNGQVVPVTEVIGYIGSAGETIETNAAPAASADDLKAAGLEVPDTLGESAAPAAQKTPLADDEYDMIVVGGGPAGYYAAIRGAQLGGKVAIVEKSEFGGTCLNKGCIPTKTYLKNAEILDGIKIAAGRGINFASTNYTIDMDKTVAFKDTVVKTLTSGVQGLLKANKVTIFNGLGQVNPDKTVTVGSETIKGHNIILATGSKVSRINIPGIDSPLVLTSDDILDLREIPKSLAVMGGGVVGIELGLVYASYGTEVTVIEMADRIIPAMDKEVSLELQKILSKKGMNIKTSVGVAEIVEANNQLTLKLNDGSEVVAEKALLSIGRVPQLSGLENLNLELERGRIKVDDYQETSISGIYAPGDVNGRKMLAHAAYRMGEVAAENAIWGNVRKANLKYTPAAVYTHPEVAMCGITEEQARQEYGNVLVGKSSFSGNGRAIASNEAQGFVKVVADAKYHEILGVHIIGPAAAEMINEASTIMENELTVDELLRSIHGHPTFSEVMYEAFADVLGEAIHNPPKRR

SEQ ID NO: 72533 - protein, 707 aa, Streptococcus mutans
MTVLKYGLGILLSAIILAIIIGGLLFTYYVSSTPKLSEAKLKATNSSLVYDSNNNLIADLGAEKRESISSDSIPMKLVNAVTSIEDHRFFKHRGVDIYRIIGAAWSNLLHKSTQGGSTLDQQLIKLAYFSTKESDQTLKRKAQEVWLSLQMEKKYTKEEILTFYVNKVYMGNGNYGMRTAAKSYYGKDLKDLSIAQLATLAGIPQAPTQYDPYAQPKAATSRRNTVLSQMYKHKKITKREYDAAVATPISDGLQELKRSSSYPKYMDNYLKQVISEVKKRTGQDIFSAGMKVYTNVNADAQQYLWNIYNTDEYIAYPDDNFQVASTVMDVTNGKVIAQLGGRHQDTNVSFGTNQAVLTDRDWGSTMKPISAYGPALESEAFTTTAQMLNDSVYYYPGTTTQVYDWDHRYNGWMTIQTAIQQSRNVPAVRAIDAAGLDTAKGFLSGLGIDYPEMRYSNAISSNTSSSEQKYGASSEKMAAAYAAFSNGGTYYEPQYVNKIEFKDGTSETYDAKGNRAMKETTAYMMTDMLKTVLTYGTGTEAAIPGLYQAGKTGTSNYDDNELVEMSEKLGINPYGLGTIAPDENFVGYTPQYSMAVWTGYKNRLMPVYGDSMKIAAQVYRTMMAYLSSSGNSDWTMPDGLYRSGGYLYLNGSSGSNSRYGAAPATSSSSSSSSSSDSNNNDQNNNQTTEASSDSSSSSSDATTSSNP

SEQ ID NO: 72534 - protein, 112 aa, Streptococcus mutans
MASIMYTPKDIFEQEFKSSMRGYDKKEVDEFLDDIIKDYETYISTIEELRQENTRLKEEVKQAKKRQEAAQTTVSPAASVSSSRVATTATNFDILKRISRLEKEVFGKQITE

SEQ ID NO: 72535 - protein, 517 aa, Streptococcus mutans
MKKTILSCLAALFMLFIGVTNAQADNYLRVGMEAAYAPFNWTQDNSSNGAVPIEGTKQYANGYDVQTAKKIAKTLGKKPLIVKTKWEGLVPALTSGKIDLIIAGMSPTKERKKEIAFSNSYYTSEPVLVVRKDSKYAKAKNLNDFSGAKVTSQQGVYLYNLINQIPKVSRQTAMGDFSQMRQALASNVIDAYVSERPEALSSTKANSNFKMVSLKNGFKVSKSDVTIAVGMRKGDPRIEQVNAALDQFPLKEQISLMDKIIPMQPSQNNSDQKESKSNFFDQVSKIVKNNWKALLRGTGVTLLISIIGTIAGLIIGLLIGVYRTAPKASNLILAWLQKIFGWLLTVYIEVFRGTPMIVQAMVIYYGTAQAFGVSLDRTLAAIFIVSINTGAYMSEIVRGGIFAVDKGQFEAATALGFTHRQTMRKIVLPQVVRNILPATGNEFVINIKDTSVLNVISVVELYFSGNTVATQTYQYFQTFFIIAVIYFILTFTVTRILRLVERKMDQDNYTKIEGETN

SEQ ID NO: 72536 - protein, 633 aa, Streptococcus mutans
MKKLLLFLATCLSLVTTSFVSAKDVDYNIRLYWGRLTLNKDNTATFQQDLVYDFASSYNGQYVTLGSAGNVPKGFKINSNPEVKAYEVNEQGKLTKRPIKTKIEQLSDGYRAKVYNGGHSGDRVVLSLKWKLHHVTTIYSDIAELNWTPISDWDAPLDKVVLTVKGPSNSLAVSRFHAHTGYFKKQPKVTQKNGNYEVNIEGLGKNKKLELHAYWKRSDFAAATDKSSKRLSKFQALEAKIARRQKFYPLLVGWLFPMVSAILILISIVLYATWKVVLGQRKTARHMHLFSPPADLSPLILSRYVYDLEIQELSPLKTKRKRYDLGFKQLIQASLLDLIDQGKLVIADDHKSFFVPDWNRLESYEKRFLIFVYGDNKKTMPIDGAFDDYKIDKSIFKGSNETEIRRRGGDILHLFENRMEKLDKAVKNKISSLSLNDIHRERTGEEKTQLILVYFFASTAMLFAFFVGAFALIKGYWLGLGTNLLLLIVASLFLIFYRRKDDYYKVSSLLTQEGLAIKQGWDSFENMIRDIKRFDDVELEGVIIWNRILVYATLYGYAERVQNYLKVKNIHLQNPQMNTYLEINPSYYVGQSTADLSTYTSTATSASNFSVSSGGSSGGGFSGGGGGGGGGAF

SEQ ID NO: 72537 - protein, 535 aa, Streptococcus mutans
MLNILLTLVFSLIGLVIGYAVISARLKKAKETAELTLLNAEQDAVNARSKAEMDAEHIKKTAERESKAYKKELLIEAKEEARKYREEIEKEFKSERQELKQMDARLTERAASLDRKDENLSSKEQLLDSKEQSLSDKSRHIDERELQVKQLEVKKAEELEKIASLSQEQARGIILSETEKNLAHDIANRIKEAEREIKDRTDKTAKDLLAQAMQRLAGDYVAEQTITTVHLPDDSMKGRIIGREGRNIRTLESLTGIDIIIDDTPEVVVLSGFDPIRREIARMTLEALIQDGRIHPARIEELVEKNRLEMDNRIREYGEAAAFEIGAPNLHPDLIKLMGRLQFRTSYGQNVLRHSVEVGKLAGLLASELGENVDLARRAGFLHDIGKAIDREVEGSHVEIGTEFARKYKENPVVINTIASHHGDVEAQSVIAVLVAAADALSSARPGARNESMENYIKRLRDLEEIATSFDGVQNSYALQAGREIRIMVQPEKLSDDDVTILAHKVREKIENNLDYPGNIKVTVIRELRAIDYAK

SEQ ID NO: 72538 - protein, 386 aa, Streptococcus mutans
MIPITLKFVLVLIATLLTSLVLTPLVRFFAFRVGAVDNPNARRINKVPMPSAGGLAIIISFVIATLALMPMILKTQIGGKSYFEYILPVVLGALVIALTGFIDDVYELSPKIKFLGILLGAVIIWIFTDFRFDSFKIPFGGPMLHFNPFLSFFLTILWVVAITNAVNLIDGLDGLVSGVSMISLTTMGLVSYFFLYDTDIFLTLTIFVLIFAIAGFFPYNYHPAIIYLGDTGALFIGFMISVLSLQGLKNATAVAVVTPIIVLGVPIVDTTVAIIRRTLSGQKFYEADNMHLHHRLLAMGFTHRGAVLVVYGIAMFFSLVSLLLNVSSRLGGILLMIGVAFALEIFIEGLEIWGPKRTPLFRLLAFIGNSDYRQEVVAKYRRKKKK

SEQ ID NO: 72539 - protein, 256 aa, Streptococcus mutans
MSVLEIKDLHVSIEDKEILKGVNLTLKTGEIAAIMGPNGTGKSTLSAAIMGNPIFEVTQGEILLDGENILEMEVDERARLGLFLAMQYPSEIPGITNAEFIRAAMNAGKKDDEKISVRDFIMKLDEKMELLGMKEEMAERYLNEGFSGGEKKRNEILQLLMLEPKFALLDEIDSGLDIDALKVVSKGVNAMRGEGFGAMIITHYQRLLNYITPDIVHVMMDGRVVLSGGPELAARLEKEGYAQIAEELGLEYSEEV

SEQ ID NO: 72540 - protein, 440 aa, Streptococcus mutans
MIILGNKQPTARSGALFVLTEIFDKTAYSNIALRHYLSKHKLSQADRSLLTELVYGTLTRKITLEWYLAHYIEDRNKLETWIYYLLMLSLYQILYLDKIPQHAIVNEAVDLAKSRNRGAEKLVNAVLRQFLRQKRPDITVIKRKNKRYSITYSVPVWLVKKMIDQFGEDRAISILKSLLVRSKASIRVVNPDQIEVIAKATGAKKSVLSPCGLVKASGQFFDSDLFKQGKITIQDESSQLVAPTLAIKGNETVLDACSAPGGKAVHIASYLTTGQIIALDLYDHKLKLIKDNADRLKAANYIKPQKLDARKVHKYFAKDTFDKILVDAPCSGIGLIRRKPDIKYNKDSKDFTSLQKIQLEILDSVCQTIKKGGIITYSTCTIFAEENQMVLKQFLEQHPNFEQVKLNHKKKDIVVDGCLLITPEQYLTDGFFISQVKRIS

SEQ ID NO: 72541 - protein, 144 aa, Streptococcus mutans
MALSRLDSLYMAVVGDHSKNPHHHGFLEDVEQVNLNNPTCGDVISLSVKFDGDKISDIAFAGDGCTISTASSSMMTDAVIGKTKKEALELADIFSKMVQGEKDDRQKELGDAAFLAGVSKFPQRIKCSTLAWNALKKAIERQEN

SEQ ID NO: 72542 - protein, 616 aa, Streptococcus mutans
MIQIGKLFAGRYRILQSIGRGGMADVYLANDLILDNEEVAIKVLRTNYQTDQVAVTRFQREARAMAELNHPNIVAIRDIGEEDGQQFLAMEYVDGADLKKYIQDHAPLSNAEVIRIMKEVLSAMTLAHQKGIIHRDLKPQNVLLTKDGTAKVTDFGIAVAFAETSLTQTNSMLGSVHYLSPEQARGSKATVQSDIYAMGIMLFEMLTGHIPYDGDSAVTIALQHFQKPLPSIIAENKNVPQALENVVIKATAKRLTDRYHSTQEMLQDLRTSLQPNRSRERKLVFSDASDTKPLPKLEQAAANSLAAQSLKNKTSNQDKVDHKSKPKTKPQPKPKKKRHFLARFFKIFFILVAIGIAVLTYLVLTKPSTVSVPDVSGDKLSTAKMIIRKSGLKVGDVQKIEDDNVGAGKVVRTNPSAGSKKREGSSVDIFVASAKGFKMEDYTGQDYKDAIDNLTNNYGVSRDSIVLKEVSSDDYSGGTVIGQSPKPGKTYHPSSDKKITLKVVKVTMPNLKNSTYEEAVSTLTAMGISSSRIKAYDASDYSSEISSPSSSSLVVGQSPYYGNTVSLSSNDDIILYVSTSGGSHSGSSSSESSNSEGTTSSEASTDSSSSATTTSH

SEQ ID NO: 72543 - protein, 334 aa, Streptococcus mutans
MKKKTILMIFLYAAVTIISIVFVIINSLNLDLKSLLADWLVLEQFILSLLAAFISLTFLLLLVWMILDDNSKRHLNQNLKRILLNQAITQEDDTELGKNVNRLSRKMQQLTNNLQKTENTYIASSQEIVKKERKRIARDLHDTVSQELFASSMILSGVSHNLDQLEKKQLQTQLLAIEDMLNNAQNDLRVLLLHLRPTELEGKTLSEGLAMILRELTDKSNIEVVYKEDIGELPKTIESNFFRIAQEFISNTLKHAKASRLEVYLYQTSSKVQLKMIDDGIGFDMDVVRDLSYGLKNIEDRVNDLAGTVKFLSAENKGVVMDIHVPIMKGDADE

SEQ ID NO: 72544 - protein, 350 aa, Streptococcus mutans
MSKEKILQVNNLHVNFHTYAGEVKAIRDVSFYLEKGETLAIVGESGSGKSVTTRTLMGLSAKNAEIFGDIEFKGHNLNDLKEEDWVHIRGNDISMIFQDPMTSLDPTMRIGLQIAEPIIKHEKVTKKEALKRALDMMEKVGIPNAQEHINDYPHQWSGGMRQRAVIAIALATNPEILVADEPTTALDVTIQAQILHLMKEIQKNTDSSIIFITHDLGVVAGMADRVAVMYAGKIVEYGTVDEVFYNPQHPYTWGLLNSMPTTNTASGSLHSIPGTPPDLLQPPQGDAFAPRNEFALDIDLKEEPPFFKVSDSHYAATWLLDDRAPKITPPERILQRWEKWKSLQGEKHND

SEQ ID NO: 72545 - protein, 336 aa, Streptococcus mutans
MIVLLRLLRRKEFCSVGKNGRAYREKSIMTENRKKLVEVKNVSLTFNKGKANQVKAIDNVSFNIYEGEVFGLVGESGSGKTTIGRAILKLYNIDKGEIDFEGETISKLKGKSLFNFRKKAQMIFQDPQASLNSRMKVRDIIAEGLDVHKLVKNKADRDAKVQDLLDLVGLNKDHLTRYPHEFSGGQRQRIGIARALAVEPKFIIADEPISALDVSIQAQVVNLMQKLQHEQGLTYLFIAHDLSMVKYISDRIGVMHWGKIVEIGTSDEVYHHPIHPYTQSLLSAVPEPDPVLERQRIHKVYDPVDELDGQEREMREITPGHFVLATEEEAKAYKKK

SEQ ID NO: 72546 - protein, 452 aa, Streptococcus mutans
MEGKKKFSLFSAVLSVICVVFVAEAAAPVAAIGNSQFFWWLFLLIAFLLPYGLISSELGTTYIGDGGIYDWVTKAFGHKWGSRVAWYYWINFPLWLASLAVMTPGLLTTVTGHNFSTVTAIIVELIFIWLVIWISFYPVSDSIWILNGAAVIKMLLALLVGGLGLYVALTKGMANEMTLKSLLPSFNLNSLSYISVIIFNLLGFEVICTFAGDMENPKKQIPQSIIVAGLVIAAIYIFSAFGIGVSIPTDKISTSSGMMDSFKLLTGSTGGWFIMTMAFLFLLTLFGNMISWSLGVNNTASYAAENGDMPQFFAKRSRKRDMPIGAALANGIVASIVVVIAPFLPNQDLFWAFFSLNLVMFLLSYVPVFPAFFKLRKIDPDTPRPFKVSGNDSFLRLLVILPMILIIISLIFTALPLAFDSETLASKLPITIGSLIFIGIGELIIIIKKIKK

SEQ ID NO: 72547 - protein, 425 aa, Streptococcus mutans
MKIDKRHLLNYSILLPYLILSVLGLIVVYSTTSASLIQNGLNPFRSVINQAAFWVISLLAILFIYRLKLNFLKNSGVLTVMMMIEVVLLLIARFWTQEVNGAHGWIVIGPISFQPAEYLKVIMVWFLAFTFARRQQSIEIYDYQALTKRKWWPKQLSDLKDWRFYSLVLILLVAAQPDLGNATIIVLTAIIMYSVSGIGYRWFSALLTGIITLSAIFLGLINMVGVKTMSKVPVFGYVAKRFSAFFNPFKDVTDSGHQLANSYYAMSNGGWLGRGLGNSIEKRGYLPEAQTDFVFSIIIEELGLIGAGLILALIFFLILRILLVGVKAKNPFNSMIALGIGSMMLMQVFVNIGGISGLIPSTGVTFPFLSQGGNSLLVLSVAIGFVLNIDANEKREDIYQEVEEAERDDTDVFIDPQSQQETYGE

SEQ ID NO: 72548 - protein, 818 aa, Streptococcus mutans
MVIPLLTQKYTNDVQKNSQKHFGYLTERMYSYRDKVLDKKPYIDAERAILATEAYKEHQEKPNVLKRAYMLKNILEKMSLYIDDETMIVGNQASSDKDAPIFPEYTLEFVLNELDLFEKRDGDVFYITEETKKQIRDIAPFWENNNLRARAGAMLPDEVQVYMETGFFGMEGKMNSGDAHLAVNYQKLLELGLVGFEERTREAKADLDLTDPASIDKYHFYDSILVTIDAVKTYAQRFVTLAKEMAETAAAKRRRELLEIAAICERVPYYPARTFAEAVQSVWFIQCILQIESNGHSLSYGRFDQYMYPYVKADLEAGRETEDSIVERLTNLWIKTLTINKVRSQAHTFSSAGSPLYQNVTVGGQTRAKKDAVNPLSFLVLKSVAQTHLPQPNLTVRYHAGLNPDFMNEAIEVMKLGFGMPAFNNDEIIIPSFIAKGVAEEDAYDYSAIGCVETAVPGKWGYRCTGMSYMNFPKILLITMNNGIDPASGKRFAPEFGHFVDMTSYEDLKSAWDKTIRYLTRMSVIVENAIDLSLEREVPDILCSALTDDCIGRGKHLKEGGAVYDYISGLQVGIANLSDSLAAVKKLVFEEKRLTTAELWEALQSDYAGEHGGEIRQMLINDAPKYGNDNDYADQLVCDCYDVYVDEIAKYPNTRYGRGPIGGIRYSGTSSISANVGQGRGTLATPDGRHAGAPLAEGCSPSHNMDKNGPTSVLKSVSKLPTAEIVGGVLLNQKVNPQTLSKEEDKQKLIALLRAFFNRLHGYHIQYNVVSRETLIDAQKHPEKHRDLIVRVAGYSAFFNVLSKATQDDIIARTEHAL

SEQ ID NO: 72549 - protein, 398 aa, Streptococcus mutans
MAKEKYDRSKPHVNIGTIGHVDHGKTTLTAAITTVLARRLPSAVNQPKDYSSIDAAPEERERGITINTAHVEYETEKRHYAHIDAPGHADYVKNMITGAAQMDGAILVVASTDGPMPQTREHILLSRQVGVKYLIVFMNKVDLVDDEELLELVEMEIRDLLSEYDFPGDDIPVIQGSALKALEGDTAQEDIIMELMHTVDDYIPDPERDTDKPLLLPVEDVFSITGRGTVASGRIDRGTVKVNDEVEIVGIRDDIQKAVVTGVEMFRKQLDEGIAGDNVGVLLRGIQRDEIERGQVLAKPGSIHPHTKFKGEVYILTKEEGGRHTPFFNNYRPQFYFRTTDVTGSIELPAGTEMVMPGDNVTIDVELIHPIAVEQGTTFSIREGGRTVGSGIVSEIEA

SEQ ID NO: 72550 - protein, 222 aa, Streptococcus mutans
MEFMLDTLNLADIEKWAAILPLAGVTSNPSIAKKEGKIDFFEQVKRVRAIIGEEPSIHAQVVAADVEGIIKDAHKLQDELGGNLYVKVPVSPTGLTAMKQLKEEGFQITATAIYTVFQGLLAIEAGADYLAPYYNRMENLNIDPIEVIGQLAQAIECQQASAKILAASFKNVTQVAKALAAGAKAVTAGADIFAAGFANPSIQKAVDDFAADWESTQGRPYI

SEQ ID NO: 72551 - protein, 316 aa, Streptococcus mutans
MAKRKIVIALGGNAILSRDASAKAQQAALAQTAKYLVQFIKNGDDLVITHGNGPQVGNLLLQQTAADSYDNPALPLDTLVAMTEGSISYWLQNALINELRKQSIDKEVVSMVTEVLVSAEDPAFDHPSKPIGPFLSEEEAYLQEKMTGATYKVDAGRGWRKVVASPKPIAIQEIATIKSLLNTGAVVITAGGGGIPVIEDPKTKELMGVEAVIDKDFASQLLAEKIKADLFIILTGVDHVYIHYGQPNQEKLEKVTASQLKAWKDQQQFAAGSMLPKVEAAIAFVEAHPSGKAIITSLENIANVISEGSGTQITAN

SEQ ID NO: 72552 - protein, 308 aa, Streptococcus mutans
MAKIYNNITELIGNTPIVKLNNVVPEDAADVYVKLEAFNPGSSVKDRIALSMIEDAEKRGLIKPGDTIVEPTSGNTGIGLSWVGAAKGYNVIITMPETMSVERRKIIQAYGAKLVLTPGSAGTKGAIDKAHEIAKEVGGWVPLQFDNPANPKIHELTTGPEILEAFGSHGLDAVVAGIGTGGTITGISRALKKDNPDIKIYGLEADESAVLSGDKPGPHKIQGISTGFIPAALDTHSYDEVIRVKSDDALATGRYFGGKEGFLLGISASAAVWAALEVAKKLGKGKKVLAIAPDNGERYLSTALYEFN

SEQ ID NO: 72553 - protein, 441 aa, Streptococcus mutans
MELFIDSSVSRIMTSVVVVGTQWGDEGKGKITDFLSADAEVIARYQGGDNAGHTIVIDGKKFKLHLIPSGIFFPEKVSVIGNGMVVNPKSLVEELDYLHQEGVATDNLRISDRAHIILPYHIKLDQLQEASKGDNKIGTTNKGIGPAYMDKAARVGIRIADLLDKDIFAERLKANLAEKNRLFEKMYESSPVAFDTIFDEYYAYGQKIKDYVTDTSVILNKALDKGRRVLFEGAQGVMLDIDQGTYPFVTSSNPVAGGVTIGSGVGPSKINKVVGVCKAYTSRVGDGPFPTELFDQTGERIREVGHEYGTTTGRPRRVGWFDSVVMRHSRRVSGITNLSLNCIDVLSGLDIVKICVAYDLDGKRIDHYPASLEQLKRCKPIYEELPGWSEDITGVRSLEDLPENARNYVRRVSELVGVRISTFSVGPDRDQTNILESVWGL

SEQ ID NO: 72554 - protein, 605 aa, Streptococcus mutans
  MISC_FEATURE (490)..(490): X=any amino acid
  MISC_FEATURE (503)..(503): X=any amino acid
RGKHMNILINILTWFSQNILQKPAFFVGILVLIGYLLLKKPLHDVFAGFIKATVGYMILDVGAGGLVTTFRPILAALNYKFKIGAAVIDPYFGLTAANEKIAQEFPRFIGTATTALLIGFFFNILLVALRKITKIRTLFITGHIMVQQAATVTLMVILLIPAFRNQFWGTLAVGIICGLYWAVSSNMTVEPTQRLTGGGGFAIGHQQQFAIWFTDKIAPKLGKKEENLDNLKLPAFLNIFHDTVVASATLMLVFFGAILAILGPDIMSNPKVITTGTLFDPTKQAFFMYVVQTAFTFSVYLFVLMQGVRMFVGELTNAFQGISNKLLPGSFPAVDVAASYGFGSPSAVLFGFATGLIGQLITIVLLIVFKNPVLIITGFVPVFFDNAAIAVYADKRGGWKAAVVLSFLSGVLQVALGAVAVALLGLAGFGGYHGNIDFEIPWVPFAYLFKYAGVIGYALVAVFLLAIPQIQFAKAKDKEAYYRGDAQAEXSANMNLAYHCVIXARSFIGGKIMVKVLTACGNGMGSSMVIKMKVENALRQLGVSDIESASCSVGEAKGLASNYDIVVASNHLIHELDGRTNGKLIGLDNLMDDNEIKTKLEEALK

SEQ ID NO: 72555 - protein, 161 aa, Streptococcus mutans
MNLAQAFKENHSIRLGLTAKDWKEAVKLSVTPLIESGAVKPEYYNAIIESTESYGPYYILMPGMAMPHARPEAGVQRDAFSLVTLTEPVTFTDGKEVQVLLALAATSSKIHTSVAIPQIIALFELDHSIERLVNCKTPEEVLAMVEESKSSPYLEGLDLDS

SEQ ID NO: 72556 - protein, 404 aa, Streptococcus mutans
MYTYKIGISKEEHDNFIKNSSQTNLLQSSSWAKVKDEWENERIGFYQDSKLVASASILIRPLPLGMTMFYIPRGPVMNYQDKDLVNFVLTSLKKFAKRKRALFIKFDPFILLNHHQIDEEAINNPQAQTIIDTLKHLGCEWLGQTSDMGETIQPRFQANIYAEGFSEANLSKKIRQSIRTAKNKGVSIRFGGYELLADFSDLMKKTEDRKSIHLRGIDYYRKLLDNYPQHSFITLASLNLKERLTELESQRKKAQNNLAKFGDNVKPSKIDNTKKEIERLSDEIAFLQEHLSQGKDTVPLSGTLSLEFGKTSENVYAGMDDEFRRYQAAIYTWFATANHAFERGSHWQNMGGIENDLSGGLYNFKSKFKPEIEEFIGEFNLPVSPLYKLANIAYTIRKKRRSKH

SEQ ID NO: 72557 - protein, 269 aa, Streptococcus mutans
MSIKLVAVDIDGTLLNSKREVTPEVYTAIQDAKKAGVKVVIATGRPIAGVTDLLEKLNLKDQGDYVITFNGALVQDTATGEDLIKETLTYDDYLDIELLSRKLGVHMHAISKEGIYTANRDIGKYTVHEASLVNMPVYYRTPEEMVGKEIVKIMMIDEPEMLDAAIAQLPASLYEHYTVVKSRPFYLEIMNKKVSKGTAIVHLAEKLGLSRDETMAIGDEENDRAMLEAVGSPVVMENGIPELKKMAKYITKSNDNSGVAYAIKKWVLN

SEQ ID NO: 72558 - protein, 246 aa, Streptococcus mutans
MTQIFAHRGSKVDCPENTLAAFKKAIQVGCDGIEIDVHRTKDNQLVVIHDEAVDRTSNGSGLVRQLTLKQIRMLDAGSWFHPAYFCEKIPTLEEVLNFLEESGFQGTLNLEIKTNRYPYPKIEKQIAQTMQAKKRSFSHIYSSFNLFSLYVMRKHDPKAELAYLMKFHPFHFWLAQQLKFIKTVHSHSSFYENQVTKRKNKKPFRLWTVNNDDDMKKFFLSGIEGIITDKPEEAVKLRKSLQTKKE

SEQ ID NO: 72559 - protein, 244 aa, Streptococcus mutans
MRYILEVNGLTKIYPAFELKTTSFHIEAGEVMGFIGRNGAGKTTALKSILNLVHPEAGSVRILGMNYLDNEDKIKQQIGYAVGGVSYYKRKKIKEIVAITRVFYNSWDDEEYQHYLTVFNLDENKKIMELSEGMKVKFYLTLALSHHAKLLILDEPTSGLDPVSRDEMNEIFRKLAKKGVAILFSTHITSDLDKCADTITYIKNGELLLSTKKEDFIHYYAKEIGGTPTLEDIMVHIEREEVNL

SEQ ID NO: 72560 - protein, 658 aa, Streptococcus mutans
MSDLSVNAIRFLGVDAIEKSKSGHPGVVMGAAPMAYSLYTKHLRVNPSQPNWINRDRFVLSAGHGSMLLYALLHLSGFEDISIDEIKNFRQWGSKTPGHPEYGHTVGVDVTTGPLGQGISMAVGLAQAERFLAAKYNREGYPIFDHYTYVIAGDGDFMEGVSGEASSYAAKQNLDKLIVLYDSNDICLDGETNDAFTESVRARYDAYGWHTILVEDGNNIEAIGLAIEEAKAAGKPSLIEIKTVIGYGAPTKGGTNAVHGAPLGAEEAAATRKALNWGYAPFEVPQEVYDDFKENVADRGEAAYDAWSNLVGEYRQAYPKEAREVDAIIDGKDPVEIKEADFPVYENGFSQATRNSSQDAINAAADVLPNFLGGSADLAHSNMTYIKADGLQDADHPLNRNIQFGVREFAMGTVLNGMALHGGLRVYGGTFFVFSDYLKAAVRLSALQGVPVTYVFTHDSIAVGEDGPTHEPIEHLAGLRATPNLVVFRPADARETQAAWHYALTSQNTPTALVLTRQNLDVEAGSSFTSVAKGAYVTYETDSDFNTILLASGSEVNLAVKAAKELEAQGEKVRVVSVPSTELFDEQSAAYKEAILPNSVRRRVAIEMAASQPWYKYVGLDGAVIGIDKFGASAPAAQVIENYGFTVDNVVKVVKELK

SEQ ID NO: 72561 - protein, 209 aa, Streptococcus mutans
GKVTVTINEKNHQYIKGNYNIHVYVDYTDGTSSGTNIGNYSLNADKPAVALPSYFIDISSHNGIISVAEFNSLKQQGIQGVVVKLTEGTSYINPYASSQIANARAAGIKVSAYHYAHYTSAAGAQEEARYFANAARSFGLEASTVMVNDMEESSMVNNINNNVQAWQDEMRRQGYSNLIHYTMASWLDIRGGQVDTARFGINNFWVAHY

SEQ ID NO: 72562 - protein, 30 aa, Streptococcus mutans
MTSNHHAPYDLGYTRATMVGTTSCEPVTAS

SEQ ID NO: 72563 - protein, 174 aa, Streptococcus mutans
MEKKTLKQISRIAILSALAIVLRLAFSALPNIQPITAIFLVCAVFYGFWESFLIMTVTMLITSFLLGFGPWVLGQLISFGLVICLWKFCLYPMTKLFRFGNINGLGLQSVLAGLMGIVYGILIDTYSALLFSTPILAYIIAGMTFNLAHAISTLFFYPIILSIFRRLLSHEKNN

SEQ ID NO: 72564 - protein, 357 aa, Streptococcus mutans
MNKKNEKIKSLPYNAGIDFLRIFAMFMIVVTHVLGKGGIRSTVKENFDLYYFVTWGIQVSAYSAVNCYALISGYVGVDSPYRYSKCLSLWLQVFFYTLLFILFFTFLQKPITYHDWIQAFFPIITGQYWYVTAYFGLLIFMPILNLALRKLNTKDLKHIVLLAIIFFSVLPALLNTKVDEFSFAKGFSMNWLSVLYIIGAYLKRLDLKRLFSRKFLLFLCLMAMAVTFITKVFIGDIWYWYTSPTLLCEAVTIFIFFVTLDIKKTGRLFRIIKRMAPATLGVYLFHLNPLLVKFLLKDGFESFVTAPIWLFPFLILGMALLIYLISTLVELLRIKLFTYLKVRHLILKLDTYLPFDN

SEQ ID NO: 72565 - protein, 150 aa, Streptococcus mutans; identical to SEQ ID NO: 72199
  MISC_FEATURE (73)..(73): X=any amino acid
  MISC_FEATURE (108)..(108): X=any amino acid

SEQ ID NO: 72566 - protein, 518 aa, Streptococcus mutans
MRYSQICRKSLALLATGMILTTSTLPSISILAEDSTGAPARPDGQAPAGGGANTTTYDYSGINSGVLVANGSKVTSSSKTKSTTSAQNTALVQNGGSLTLHKANLIKSGDDNNGDNDNFYGINSILLAVNERSKAYVSNSKLKASSSGSNGIFATDKATIYANKTSIATTADNSRGLDATYNGNIIANKMAISTKGAHSAAIATDRGGGNISTTNSSLNTSGSGSPLLYSTGNIQVNHVTGTSSNSQIAGMEGLNTILIHNSNLISTMTNKTASDPIANGVIIYQSQSGDAEATTGQSAHFELSKSKLTSSITSGSMFYLTNTSANIILNQSTLNFDANKAKLLTVAGNSANNWGTPGSNGATVNFTGHKQTLKGDVDVDSISTLNMYLLDKTNYTGKTAVSTNSTNISPSTSPITMNISKNSKWVLTGHSTVTNLNAEKGAKIVDKDGKTVSVISSSGQKLVKGKSKYSLTVTGTYSQKVTTSSSNKPSSSYINRSDFDNYFKTTTAFVNNTKNTSN

SEQ ID NO: 72567 - protein, 236 aa, Streptococcus mutans
MLINNGNKAGQTADCMVKFYATEQSQKKYELLLEYPIETQEIEEGQIKVVALVDYLNNFKQYFEENDNVRGIRVEVIRNEKVLFDDGQGYNREQGRFVKPLGGTGIPINLNKTLFRVPRGFKFEKELIQKCHQPLNIGTNTIDFYILTEETASLNYEVELISGNKRICPPQNEGKIKLDVFVPCYKVLDNHTYGKFYEVLEKQGIRCDDIFTVTDMKLIKEDLVYNIYEPLEKMDW

SEQ ID NO: 72568 - protein, 30 aa, Streptococcus mutans; identical to SEQ ID NO: 72562

SEQ ID NO: 72569 - protein, 131 aa, Streptococcus mutans; identical to SEQ ID NO: 72200
  MISC_FEATURE (20)..(20): X=any amino acid
  MISC_FEATURE (104)..(104): X=any amino acid
  MISC_FEATURE (110)..(110): X=any amino acid
  MISC_FEATURE (124)..(124): X=any amino acid

SEQ ID NO: 72570 - protein, 148 aa, Streptococcus mutans
MKILKQIITYSFIGIGIGSLMNYFIAIFFFPNSNPLGVPSFVQLFSSVSQATAVQLFIFALLGVLQGFASSLFKNEKLSLLTTSLIHYLFIVLPLLLAGSYLHWFYMTRKYFVFSFLLVSIIYILIYLFCYFENKKNIQKINKKLHQI

SEQ ID NO: 72571 - protein, 278 aa, Streptococcus mutans
MVTEFSLDILLKIIKLARSTYYYHLKQLDKSNKDHAIKAEIQAIFTEHKGNYGYRRMTLELRNRGFLVNHKKVQRLMKVLGLEARIRRKRKYSSYQGEVGKKADNLIQRQFEASKPMEKCYTDVTEFAIPASGQKLYLSPVLDGFNSEIIAYNLSTSPNLIQVKAMLEQAFTEKHYTNTILHSDQGWQYQHDFYHQFLENKGIQPSMSRKGNSPDNGMMESFFGILKSEMFYGYEKTFKSLKQLEQAIVDYIDYYNNKRIKVKLKGLSPVQYRTKSFT

SEQ ID NO: 72572 - protein, 58 aa, Streptococcus mutans
MKFIGGVFSVLKHTTWPTRKQSWHDFISILEYSAFFALVIFIFDKLLTLGLAELLKRF

SEQ ID NO: 72573 - protein, 131 aa, Streptococcus mutans; identical to SEQ ID NO: 72200
  MISC_FEATURE (20)..(20): X=any amino acid
  MISC_FEATURE (104)..(104): X=any amino acid
  MISC_FEATURE (110)..(110): X=any amino acid
  MISC_FEATURE (124)..(124): X=any amino acid

SEQ ID NO: 72574 - protein, 150 aa, Streptococcus mutans; identical to SEQ ID NO: 72199
  MISC_FEATURE (73)..(73): X=any amino acid
  MISC_FEATURE (108)..(108): X=any amino acid

SEQ ID NO: 72575 - protein, 478 aa, Streptococcus mutans
MADPFGFLKYERKDNPYRPVNERIKDFEELQTTLSVEERQKQAARCMNCGIPFCHEGTFYGGGRAVSGCPNDNLIPEWNDLIYKGDFRRAFERLTRTNPLPEMTGRVCPAPCEKACTEGLNGSGVTIHDNERFIIDNAFEEGWVADSGRPIERTGFKVAVVGSGPAGLSAAWRLNQLGHSVTVFERSDRFGGLLMYGIPNMKLDKKIVQRRIDTMASIGINFVANTEIGRDITAEELLEKFDRVILATGASVPRDLDIPGRDLKGIRFAVDFLTETTKNLLDSDTHELPPLLEGKHVLVIGGGDTGNDCIGTAVRLGAASVRQLEITPQLPEKRLPTNPWPQYPMINRTGYGQEEADFVQQTDLTDYITSTVEFLGENGQVTAVKTIKVGPGFKAIEGTEEVIKADLVLLAMGFTGAEKALFDQFRVECVYDDYSTRNEKVFVAGDARRGPSLVIWGIREGRKTAEKIDQNLRMMVTE

SEQ ID NO: 72576 - protein, 150 aa, Streptococcus mutans; identical to SEQ ID NO: 72199
  MISC_FEATURE (73)..(73): X=any amino acid
  MISC_FEATURE (108)..(108): X=any amino acid

SEQ ID NO: 72577 - protein, 181 aa, Streptococcus mutans
MKFYIIRHAKVNMRWPKKCTSDEFNQACKKYDGADIVAFQGSLELPVSNIYTSELIRTKQTAQQLFPLQSYQIDKRLNEVPLKAAFSSKIKLPLIFWNILGRLQWLFNSSKQEGIKASKERAEKFCDDLIYKGEDAILITHGFFMITLLKELKKRGFIEKDNGFNFDNLQVIEVKKRLLVY

SEQ ID NO: 72578 - protein, 31 aa, Streptococcus mutans
MANVKLFDQTGKEAGEVTLNDAIFGIEPNES

SEQ ID NO: 72579 - protein, 172 aa, Streptococcus mutans; identical to SEQ ID NO: 72475

SEQ ID NO: 72580 - protein, 122 aa, Streptococcus mutans; identical to SEQ ID NO: 72198
  MISC_FEATURE (26)..(26): X=any amino acid
  MISC_FEATURE (106)..(106): X=any amino acid

SEQ ID NO: 72581 - protein, 172 aa, Streptococcus mutans; identical to SEQ ID NO: 72475

SEQ ID NO: 72582 - protein, 122 aa, Streptococcus mutans; identical to SEQ ID NO: 72198
  MISC_FEATURE (26)..(26): X=any amino acid
  MISC_FEATURE (106)..(106): X=any amino acid

SEQ ID NO: 72583 - protein, 191 aa, Streptococcus mutans
MNCTPKVRQKKSNFWGVFIMKLTYEDKVLIYELKNQGYSLEQLSNKFGIKISNLSYMIKLIDHYGIEIVKKGKNRYYSPELKQEIIDKVLLEGRSQIRVSLDYALPSHGMLPNWIAQYKKNRYTIVEKTRGRPPKMGRKPKKKSEEMTELEQLQKELEYLRAENAVLKKLRELRLREEKEQEEKRKLSEDW

SEQ ID NO: 72584 - protein, 122 aa, Streptococcus mutans; identical to SEQ ID NO: 72198
  MISC_FEATURE (26)..(26): X=any amino acid
  MISC_FEATURE (106)..(106): X=any amino acid

SEQ ID NO: 72585 - protein, 30 aa, Streptococcus mutans; identical to SEQ ID NO: 72562

SEQ ID NO: 72586 - protein, 122 aa, Streptococcus mutans; identical to SEQ ID NO: 72198
  MISC_FEATURE (26)..(26): X=any amino acid
  MISC_FEATURE (106)..(106): X=any amino acid

SEQ ID NO: 72587 - protein, 546 aa, Streptococcus mutans
MVTRQHFSEDSMRKNNSYFSALKATIETAFYENHVVPLKELAEAYRLAAKSPNTIVLDTPVAHAEDLGLPKDAKILLENSGGIVGRTAKARRIFGQDSKEDAKILQIIREAIFQARHRTFYRADAVVGLDEAFMLRAHLMVPQDDINNLYSWLNNFQVLNDTYRERLKKSKRYEETDIYIFSDPEWSHPDYPDGLVYFDTNHNCAAILGLHYFGELKKATLTLAWGTANRNKYVACHGGLKIFEKEGQKPYVASFFGLSGSGKSTLTHAKHNGKYRIDVLHDDAFVISEEDGSTIALEPAYFDKTNDYPAGHREQKYFVAVQNCGAALDKEGHLRLVTEDIRNGNGRTIKSRFSTPNRVDRINHPIQSIFWIMKDDSLPPLIRVTDPIMASIMGCTLVTTRSTAENTTDSLDALIIEPYANPFRVYPLVEDYIKFQHLFESGVNCYIINTGSYLGQDIPKETTLDVIEQVVDGTAKFEPFGSVKGFEYLSSSHYKIPNFDKAYVKIIRQRMKIRLQYLEAFNRKNPKLSLPDEAISHLKDVLANLG

SEQ ID NO: 72588 - protein, 131 aa, Streptococcus mutans; identical to SEQ ID NO: 72200
  MISC_FEATURE (20)..(20): X=any amino acid
  MISC_FEATURE (104)..(104): X=any amino acid
  MISC_FEATURE (110)..(110): X=any amino acid
  MISC_FEATURE (124)..(124): X=any amino acid

SEQ ID NO: 72589 - protein, 81 aa, Streptococcus mutans
MPMDTIENLIIAIVKPLISQPDNFTIKIEDTPEFLEYHLDLDSSDIGRIIGKKGRTITAIRSIVYSVPTQGKKVRLVIDEK

SEQ ID NO: 72590 - protein, 30 aa, Streptococcus mutans; identical to SEQ ID NO: 72562

SEQ ID NO: 72591 - protein, 172 aa, Streptococcus mutans; identical to SEQ ID NO: 72475

SEQ ID NO: 72592 - protein, 61 aa, Streptococcus mutans
MAKKSMVAKSKRPAKFSTQAYTRCEKCGRPHSVYRKFKLCRVCFRELAYKGQIPGVTKASW

SEQ ID NO: 72593 - protein, 30 aa, Streptococcus mutans; identical to SEQ ID NO: 72562

SEQ ID NO: 72594 - protein, 188 aa, Streptococcus mutans
MKILIVYTHPNPTSFNAEILKQVQTNLSKEHTVSTLDLYAEHFDPVLQFNETHKRRDLAKVAEMEKYRDLVTWADHLIFIFPIWWSGMPAILKGFIDRVFVADFAYSYKKVGLEGHLQGKSAWIITTHNTPSFAMPFVQDYGKVLKKQILKPCAISPVKLTELTSIEKISDDERQKLLHKVAQITRNI

SEQ ID NO: 72595 - protein, 131 aa, Streptococcus mutans; identical to SEQ ID NO: 72200
  MISC_FEATURE (20)..(20): X=any amino acid
  MISC_FEATURE (104)..(104): X=any amino acid
  MISC_FEATURE (110)..(110): X=any amino acid
  MISC_FEATURE (124)..(124): X=any amino acid

SEQ ID NO: 72596 - protein, 278 aa, Streptococcus mutans; identical to SEQ ID NO: 72571

SEQ ID NO: 72597 - protein, 278 aa, Streptococcus mutans; identical to SEQ ID NO: 72571

SEQ ID NO: 72598 - protein, 150 aa, Streptococcus mutans; identical to SEQ ID NO: 72199
  MISC_FEATURE (73)..(73): X=any amino acid
  MISC_FEATURE (108)..(108): X=any amino acid

SEQ ID NO: 72599 - protein, 278 aa, Streptococcus mutans; identical to SEQ ID NO: 72571

SEQ ID NO: 72600 - protein, 44 aa, Streptococcus mutans
MKRTFQPSKIRRQRKHGFRHRMSTKNGRRVLAARRRKGRKVLSA

SEQ ID NO: 72601 - protein, 158 aa, Streptococcus mutans
MILQDARIDVPYTVVSINLPEDSVRHLSNLGLKVGSRLELISKTKSSAIVMLKSSRLAFDDSILSKIDVSESQETVETLPLSELEVGQFAYIDNIFAVNEAKRRLMDMGLTRHTKIYLRKVAPLGDPIEISLRGYELTLRKSEAQMISVVKIDNQEEK

SEQ ID NO: 72602 - protein, 66 aa, Streptococcus mutans
MKLRGVRYMSKTVVRKNESLDDALRRFKRSVTKAGTLQESRKREFYEKPSVKRKRKSEAARKRKKF

SEQ ID NO: 72603 - protein, 342 aa, Streptococcus mutans
MTKYSTPNALGLGLILFIISVSLVACSKSSTSTSKNYNASEKDSYILKISENSDLCGAPQQIAIEKGFFDDVGLKYKVVKIGQDTSNLDALNAGKIDASNSLMASIIQPLANGAKLKITTGLHTGCLQILTKNGKIKSAAELKGKKIGVTAVAGSPAIFAKRVLAKSGLKVSDEKGDVSFVTYQSDQLGQVLDKGEVDAIALGDPDTEVLKKQYGFKTLANSSTDKGFKNEYCCVAYVSNDIVKKHPAVAAKYTLAMQKAANWVQKHKEETVDIQLNQNYVAGSKDSNLTSLNSYTFKPSYSGAYDSFDTVASDLRKIGILSNDVDLKALRINSFLKVKNVK

SEQ ID NO: 72604 - protein, 507 aa, Streptococcus mutans
MEQKIFSKRKSKIAGLCGAILTTTVVALASGTVIEADETIEQPVAAETVSQADGDNPEQTTSVQQETAPQQTKTSQSSDATVDSEESATSPSDEQTVSQNDSNSSSQIDQTIADTNRSDSDHISKTSAATTEDQEEKVNSAKAQTAAATNNQDTRYSAKDAYGNSNFNKTLTEFGKNANVADVTYNGVRDEYIVVNDPSAPYVPNANEIAKYLKEYLTELRNINNIAIPVPSVDQVMQKYAQDRANEEANEKNGLDHDTNLPIPNNLTWVAEDGHLDMDSSIQSKSQEGYTLASDKATAYYLALNWFSDYFNIYDDPNDGLKSFGHAVSILSDGGTGMGLGLASGQDNEKGMWYAQLEFGGNDNEDNTNDFSSLKNGKGEWVLYYKGSPVKFLPNTTFWYVKKGTSPDAASTPHNSDKPSFQSSKDLDPNFKADNRFQEGKEASVHQAIPATFKSHRDEVGNKDQNSLSAQLPDTGVQKNNQLALIALGTGLILLSGLLLSKRKSLK

SEQ ID NO: 72605 - protein, 84 aa, Streptococcus mutans
MEVIKTLANIKSAIKRAELNVKQNNRNSAQKSAMRSAIKAFEANPNEELFRAASSSIDKAKSKGLIHKNKASRDKARLASKLAK

SEQ ID NO: 72606 - protein, 67 aa, Streptococcus mutans
MLNLKILALGIAVLGVSLGEGILVANIAKSAARQPEMYGKLQTLMIMGVAFIEGTFFVLLASTFFVG

SEQ ID NO: 72607 - protein, 82 aa, Streptococcus mutans
MTNEEIFDRISNLIKEQLHNEKIEVTVKTNIQEDLGIDSIALMEFIITLEDEFNLNIPDEDVEDIQTMGELVDYLSRRLKSS

SEQ ID NO: 72608 - protein, 60 aa, Streptococcus mutans
MAQIKITLTKSPIGRIPAQRKTVVALGLGKLNSSVIKEDNAAIRGMVNAVSHLVTVEDVK

SEQ ID NO: 72609 - protein, 69 aa, Streptococcus mutans
MKLQEIKDFVKELRGLSQEELAKKENELKKELFDLRFQAAAGQLDQTARLNEVKKQIARVKTVQAETKE

SEQ ID NO: 72610 - protein, 40 aa, Streptococcus mutans
MNRKHVPVYIQEDMVGHKLGEFAPTRTYKGHATDDKKTRR

SEQ ID NO: 72611 - protein, 330 aa, Streptococcus mutans
MTVITNTQPFIGQHCESTTIGTLLTQLSIYLSEPMIFGLGEGLGFAIFNMKTLDFPFIGGRIKPDLLTVNLSKNLGIKLITNETNSKNKAWKTVKSLIDNNKAVGLKLDCYHLDYFSNPIHFAAHHVAMLGYDDKKAYLVDTKQQGTKTATSLESLALARNEKGPMSSRNKYYIFEKETALIPIETAILKAVRHNSETYLNPPIKNLGYKGIEKASREIIKWFKQSKDIQKEFAMSALLMKSAGTGGALFRNFYRDFLKEAYEWTGHSAIKIAYEIFKDSAKNWSRLILLFEKAGKTGDIQYVLEASKLLKDLSLQEKEGMQLLNSIKQM

SEQ ID NO: 72612 - protein, 62 aa, Streptococcus mutans
MAKVCYFTGRKTVSANNRSHAMNKTKRVAKPNLQKVTVLIDGKPKKVWASARALKSGKVERV

SEQ ID NO: 72613 - protein, 459 aa, Streptococcus mutans
MKEGIKMTKHLQDFFITVIAGMGMLLSTLDTGIINVALSFLRGQFQTTTNIASFTITGYTLALAISILPLGVLSDKFGKLKISYLGFVLFGLSSLFCGFANSIGWLITGRIIQGMGAAALQATSAALITTLVSEDRKNSAISILGVMIGLGPVLGPSLGGVLLSLNLWRFIFWINVPFALIVIICNHYLLTKVSEQTSEWTLDSLGTVLNASMLVCLLLGLSLLSKPHLLGISLILIIISFLIGIWFYRLECSKESALVNVKGLSENPRVLSYLFQTVAFGFASAMIFLLPPFIFEQLYHLGVGQTGFLVLGAPAGLVLFSRISGKINDGSKNKSFSHIGLGIIILSLIFLLLLTPSWPYLFLTLGLFIYGIGGGYFQPANMASIMLASPMKMQGSTGALQRMVQNIAISAGSAIGSTCLNLWSNNLLLATRIGWGITLVLVIFSLKELTPFKMTNKTK

SEQ ID NO: 72614 - protein, 87 aa, Streptococcus mutans
MASKDFHIVAETGIHARPATLLVQTASKFASDITLDYKGKAVNLKSIMGVMSLGVGQGADVTITAEGADADDAIAAINETMTKEGLA

SEQ ID NO: 72615 - protein, 223 aa, Salmonella paratyphi A
  MISC_FEATURE (148)..(148): X=any amino acid
LDELYHSELFFLPVMDENARLVGLEIIATFAAEDGAVGMPTELVAPRLSVEEQYCLFVEKLALLETCQHFFIQHKLIAWLNLPPAISDLLLLDSELFSRAARFPFLELAINENYPGLNQGKNNETLANLAMHFPLMLANFGAGEASTXAIFDGLLNEVMLDKNFIQQRAEMISFEPFMHAIVAQISSSCESLMIAGIDTEAMCARADMWDVAHFQGGLLAALP

SEQ ID NO: 72616 - protein, 278 aa, Salmonella paratyphi A
  MISC_FEATURE (194)..(194): X=any amino acid
  MISC_FEATURE (224)..(224): X=any amino acid
  MISC_FEATURE (247)..(247): X=any amino acid
MTLLALGINHKTAPVSLRERVTFSPDTLDQALDSLLAHQMVQGGVVLSTCNRTELYLSVEEQDNLQEALIRWLCDYHNLNEDDLRNSLYWHQDNDAVSHLMRVASGLDSLVLGEPQILGQVKKAFADSQRGHLNASALSKCFQKSFSVAKRVRTETDIAPAASVAFAACTLARQIFESLSSGHCLLVGAGETSXTGARHLREHKVAKDDYANRTRERAQALAEXGLALRLVSLSSSRAPVVQDAEYXSSVASRQPRCRVIGRRQWLERAVRKAVRKPV

SEQ ID NO: 72617 - protein, 58 aa, Salmonella paratyphi A
  MISC_FEATURE (51)..(51): X=any amino acid
LLKFCARFSQLHRFTLRQPVRWAPECPLENIVSEALIFDDEAFAQAPHGSXAISAFYQ

SEQ ID NO: 72618 - protein, 109 aa, Salmonella paratyphi A
ALGITPYGVADVPNYKLWVSEPPLPDSVIDVGLRTEPNLELLTEMKPSFMVWSAGYGPSPEKLARHSGRGFDFSDAKSAGVARRSLVELAQTLNLEAAAEKHLAQYDRF

SEQ ID NO: 72619 - protein, 387 aa, Salmonella paratyphi A
FIDQLLHRLWMEARFDQIADLALRLVGGYGRRELHPLSDIDLLILSRKKLPDEQAQKVGELLTLLWDVKLDVGHSVRTLEECLLEGLSDLTVATNLIETRLLIGDVALFLALQKHIFSEGFWPSDKFYAAKVEEQNPRHQRYHGTSYNLEPDIKSSPGGLRDIHTLQWVARRHFGATSLDEMVGFGFLTPAERRSLNECLHILWRIRLRYHLVVSRYDNRLLFDRQLSVVNALTYSGEGNDPVERMMKDYFRVTRRVSELNQMLLHYFDEAILGAAGEEKPRPVDDEFQLRGTSCDLADDTCFIREPQADCLRMVLYDGANTHAAGHLLYGRYPLGGQSRRHLRQLAVFTSRRRALCFSSYGYAFPGRVHRALCLLHVIAQQVSWWA

SEQ ID NO: 72620 - protein, 261 aa, Salmonella paratyphi A
KTIDILNVDVVTKPFNSEDKKRMTSAEQDITELSKHVNSLITIPNDKLLKVLGRGISLLEAFGAANDVLKGAVQGIAELITRPGLMNVDFADVRTVMSEMGYAMMGSGVASGEDRAEEAAEMAISSPLLEDIDLSGRRGVLVNITAGFDLRLDEFETVGNTIRAFASDNATVVIGTSLDPDMNDELRVTVVATGIGMTKRPEITLVTNKQVSSPVLDRYQQHGMALTQEQKTVAKVVNDNTPQAAKEPDYLDIHAFRVSKA

SEQ ID NO: 72621 - protein, 349 aa, Salmonella paratyphi A
  MISC_FEATURE (79)..(79): X=any amino acid
  MISC_FEATURE (147)..(147): X=any amino acid
MKKYQRLADEIREQIASGLWQPGDRLPSLREQVASSGMSFMTVGHAYQLLESQGRIIARPQSGYYVAPHPVCRSVATAXHVIRDEAVDINTYIFEMLQASRDTSVVPFASAFPDPRLFPLPQLNRSLAQVSKTATAMSVIENLPPVXAELRYAIHARYAHRGITVSPDEIVITAGALEALNLSLQAVTAPGDWVVVENPCFYGALQALERLRLKALSIPTDVKEGIDLMALEQALQEYPVKACWLMTNSQNPLGFTLSAEKKARLVALLTHHNVTLIEDDVYSELYFGREKPLPAKAWDRDDTVLHCSSFSKCLVPGFRIGWVAGGSHARQIQRLQLMSTLSTSSPMQL

SEQ ID NO: 72622 - protein, 312 aa, Salmonella paratyphi A
VAEQKAWMELIAEVQGEGQIFYRRRRRRMKRKSGNIDDFCRRWGNQYSYMVVLDADSVMSGECLSGLVRLMEANPNAGIIQSSPKASGMDTLYARCQQFATRVYGPLFTAGLHFWQLGESHYWGHNAIIRVKPFIEHSALAPLPGEGSFAGSILSHDFVEAALMRRAGWGVWIAYDLPGSYEELPPNLLDELKRDRRWCHGNLMNFRLFLVKGMHPVCRALFLTGVMSYLSAPLWFMFLALSTALQVVHALTEPQYFLQPRQLFPVWPQWRPELAIALFASTMVLLFLPKLLSIMLIWCRGAKEYGGFWRVS

SEQ ID NO: 72623 - protein, 55 aa, Salmonella paratyphi A
MTTQVRKNVMDMFIDGARRGFTIATTNLLPNVVMAFVIIRDPLESTCSMTRLGST

SEQ ID NO: 72624 - protein, 337 aa, Salmonella paratyphi A
  MISC_FEATURE (121)..(121): X=any amino acid
  MISC_FEATURE (282)..(282): X=any amino acid
  MISC_FEATURE (309)..(309): X=any amino acid
KLLITTQAHVARFHDIPGMEYLCYSQPLPVSDATPLGLSLPHHTAYIIFTSGSTGRPKGVMVGQTAIVNRLLWMQDHYPLTADDVVAQKTPCSFDVSVWEFFWPFIAGAKLVMAEPEAHRXPLAMQRFFAQYGVTTTHFVPSMLAAFIASLTPASAGKSCLSLKRVFCSGEATPTGCCREWETLTTRRLHNLYGPTEAAVDVSWYPACGDELAAVDGNSIPIGYPVWNTGLRILDAHTAAVAPGVAGDLYLTGIQLARAIWGRPDLTASRFIADPFAQANGXYRTGDVAAGWIPARVEYLGRSERISLXNYGGQRIELGEIERVMQTLPDVEQAVAH

SEQ ID NO: 72625 - protein, 122 aa, Salmonella paratyphi A
MAYSEKVIDHYENPRNVGSFDNNDDNVGSGMVGAPACGDVMKLQIKVNDEGIIEDARFKTYGCGSPIASSSLVTEWVKGKSLDEARAIKNTDIADELECRPVKIHCSILAEDAIKALLRDYR

SEQ ID NO: 72626 - protein, 194 aa, Salmonella paratyphi A
MTDLKASSLGALKLMDLTTLNDDDTNEKVIALCHQAKTPVGNTAAICIYPRFIPIARKTLKEQGTPDIRIATVTNFPHGNDDIDIALAETRAAIYGADEVDVVFPYRALIAGNEQVGFDLVKACKDACAAANVLLKVIIETGELKEEALIRKASEISIKAGADFIKTSTGKVPVNLPGSARIMMEVIRDMGVSR

SEQ ID NO: 72627 - protein, 308 aa, Salmonella paratyphi A
  MISC_FEATURE (38)..(38): X=any amino acid
  MISC_FEATURE (39)..(39): X=any amino acid
  MISC_FEATURE (277)..(277): X=any amino acid
VFIGFDYGTANCSVAIMRDGHPQLLTMENNSALLPSMXXSPTREAVSEWLYRHHDVPATDEETQGVRRAIRYNREEDIEVGAKSVQFGLASWRHYIDDPQEVWFVKSPKSFLGPAALKPQQVALFEDLVCAMMVHIRHTAHSQLPEAITQAVIVARSNFQGLGGDDANRQAQGILERAAKRAGFQEVVFQYEPVAAGLDYELRCGKEKRVLVVDIGGGTTDCSMLLMGPSGVSAPDRENSLLGHSGCAWAETIWDIALAFKNLMPLLGMGGETEKGXRLPVLPWWNAVAINDVPAKAIFTVARNGRLL

SEQ ID NO: 72628 - protein, 78 aa, Salmonella paratyphi A
MGDGINDAPALRAADIGISVDGAVDIPREAADIILLEKSLMVLEEGVIEGRRTFSNMLKYIKMTASSNFGNVFSVLVA

SEQ ID NO: 72629 - protein, 71 aa, Salmonella paratyphi A; identical to SEQ ID NO: 43063

SEQ ID NO: 72630 - protein, 347 aa, Salmonella paratyphi A
EMTVADIPNNPVIAYEEDCVTRLIQDDVNETAYNRIKNWSISELREYVLSDETSVDDIAFTRKGLTSEVVAAVAKICSNADLIYGGKKMPVIKKANTTIGIPGTFSCRLQPNDTRDDVQSIAAQIYEGLSFGAGDAVIGVNRVTDDVENLTRVLDTVYGVSINSIFRPRAACWRTSPPRLKRLLAARRATDFPEHLRQREGFKEFGVELAMLDEARAVGAEFNRIAGENCLYFETGQGSALYGGANFGADQVTMEARNYGLARHYDPFLVNTVVGFIGPEYLYNDRQIIRAGLEDHFMGKLSGISMGCDCCYTNHADADQNLNENLMILLATAGCNYIMGMPLGDDI

SEQ ID NO: 72631 - protein, 220 aa, Salmonella paratyphi A
  MISC_FEATURE (33)..(33): X=any amino acid
  MISC_FEATURE (38)..(38): X=any amino acid
  MISC_FEATURE (49)..(49): X=any amino acid
  MISC_FEATURE (97)..(97): X=any amino acid
  MISC_FEATURE (117)..(117): X=any amino acid
  MISC_FEATURE (208)..(208): X=any amino acid
KNYKRTKLVPAQERKPAEKVRVCGFMKRGAFNXMPGWXPPAFEFAFHGXTQMGFCPFGQRFVYRVEQAPEDNCPLVCFSAFRGARMQEALMLLMQMXKTSLRWAKMQERGLPYISYXPIPTMGRFPPSFAMLAISTSPEPKALIRSPARALIEQTVRENVPPGFQRSEFLIEKGAIDMIVRRPEMRLKLASILAKLMNLPAPNPDPAXRRGVVGPDQESE

SEQ ID NO: 72632 - protein, 248 aa, Salmonella paratyphi A
  MISC_FEATURE (43)..(43): X=any amino acid
MAELSDQEMVRYNRQIILRGFDFEGQEALKDARVLVVGLGGLXCAATQYLAGAGVGQLTLLDFDTVSVSNLQRQTLHSDATVGQPKVESARDAGRINPHITITPVNARLDDDAMTSLIAGHSLVLDCTDNVSVRNQLNAGCYTAKVPLISARPIRMEGQVTVFTYRENEPCYRCLSRLFGENALTCVEAGVMAPLIGVIGSLQAMEAIKLWRIYGQPASGKIVMYDAMTCQFREMKLMRNPGCEVCGQ

SEQ ID NO: 72633 - protein, 243 aa, Salmonella paratyphi A
RLRRAEDVFPPVIGLAAHKGGVYKTSVSVHLAQDLALKGLRVLLVEGNDPQGTASMYHGWVPDLHIHAEDTLLPFYLGEKDDVTYAIKPTCWPGLDIIPSCLALHRIETELMGKFDEGKLPTDPHLMLRLAIETVAHDYDVIVIDSAPNLGIGTINVVCAADVLIVPTPAELFDYTSALQFFDMLRDLLKNVDLKGFEPDVRILLTKYSNSNGSQSPWMEEQIRDAWGSMVLKNVVRETDEVG

SEQ ID NO: 72634 - protein, 245 aa, Salmonella paratyphi A
  MISC_FEATURE (61)..(61): X=any amino acid
LIFSQTLSGSNDIPMWDRLFAPLMAATAGSLTTSLFFHPHFSLPIAHYTQMRLVDIASGVXVAAIALPAGWSPVWCLPRLHELLHRLKNPVLILGIGGFILGILGVIGGPLTLFKGLDEMQQMAFSQTLGAGDYFTLAVVKLAALVIAAASGFRGGRIFPAVFIGAALGLMLHAHVEAVPAAITVSCAILGLVLVVTRDGWLSLFMAAVVVPDTNLLPLLCIVMLPAWLLLAEKPLLPPTSTNPN

SEQ ID NO: 72635 - protein, 315 aa, Salmonella paratyphi A
VTIAIVIGTHGWAAEQLLKTAEMLLGEQENVGWIDFVPGENAETLIEKYNAQLAKLDTSKGVLFLVDTWGGSPFNAASRIVVDKERYEVIAGVNIPMLVETFMARDDDPSFDELVALAVETGREGVKALKAKPVEKAAPAAQSPPRQKRRTAKPMGPNDYMVIGLARIDDRLIHGQVATRWTKETNVSRIIVVSDEVAADTVRKTLLTQVAPPGVTAHVVDVAKMIRVYNNPKYAGERVMLLFTNPTDVERIVEGGVKVTSVNIGGMAYRQGKTQVNNAVSVDEKDIEAFNKLNERGIELEVRKVFTDPKLKMMD

SEQ ID NO: 72636 - protein, 258 aa, Salmonella paratyphi A
MKSSSANVNKHVTAAMAKAVCAVVNGETMTPIAVTLLTGFLGAGKTTLLRHILNEQHGFKIAVIENEFGEVSVDDQLIGDRATQIKTLTNGCICCTRSNELEDALLDLLDSRDRGDIAFDRLVIECTGMADPGPIIQTFFSHDVLCERYLLDGVIALVDAVHANEQMNQFTIAQSQIGYADRILLTKTDVAGDSEKLASGARINAAPRFILVHGDIDLSQLFNTSGFMLEENVASQPRFHFIADKQNDVSSIVVELDY

SEQ ID NO: 72637 - protein, 439 aa, Salmonella paratyphi A
  MISC_FEATURE (398)..(398): X=any amino acid
MAWHGAGTYRSIDGRGGAGRGQQRFAPLNSWPDNVSLDKARRLLWPIKQKYGQKISWADLFILAGNVALENSGFRTFGFGAGREDVWEPDLDVNWGDEKAWLTHRHPESAGKSALGATEMGLIYVNPEGPASQGEPLSAAAAIRATFGNMGMNDEETVALIAGGHTLGKTHGAAAASHVGADPEAAPIEAQGLGWASSYGSGVGADAITSGLEVVWTQTPTQWSNYFFENLFKYEWVQTRSPAGAIQFEAVDAPDIIPDPFDPSKKRKPTMLVTDVTLRFDPEFEKISRRFLNDPQPLNEAFARAWFKLTHRDMGPKARYIGPEVPKEDLIWQDPLPQPLYQPTQEDIINLKAAIAASGLSISEMVSVAWASASTFRGGDKRGDANGAIVCISASGTXGRSTPLRSAFLPVLEALQKTTNKASLADIIVLAGVVGSEQA

SEQ ID NO: 72638 - protein, 338 aa, Salmonella paratyphi A
DADINGPGKAVGPYFDETPLKDSLGSTLGESQLDGDVNARLHLDIPLDGEQVTAEGDVSLRNNSLFIKPLNSTLKNLNGKFSFVNGALKSGPLTETWFNQPLNLDFSTTEGAKAYQVAVNLNGNWQPTRMGVLPPQLNDALSGRERWNSKVGIDLPYHADTTYHIELNGDLRNVSSHLPSPLNKPAAKHSGEIQADGNLKSFALTGSAGSKNHFNSRWLLNQKLTLDRAIWTTDSRTIPPLPAQQGVELNLPALDGAQWLALFQKGAADNVSSSAEFPQRVTLRTPALSLGGQQWNNLSVVSAPSLNGTKIEAQGREVNATLLMRNHARGWRTIKYLY

SEQ ID NO: 72639 - protein, 323 aa, Salmonella paratyphi A
  MISC_FEATURE (280)..(280): X=any amino acid
ITPIAQFQIPCLIKNTGNPQAPGTLIGASSDDDNLPVKGISNLNNMAMFSVSGPGMKGMIGMAARVFAAMSRAGISVVLITQSSSEYSISFCVPQSDCARARRAMQDEFYLELKEGLLERLAVTERLAIISVVGDGMRTLRGISAKFFAALARANINIVAIAQGSSERSISVVVNNDDATTGVRVTHQMLFNTDQVIEVFVIGVGGVGGALLEQLKRQQTWLKNKHIDLRVCGVANSKALLTNVHGLNLDNWQAELGKANAPFNLGRLIRLVKEYHLHRXLVDCTSSQAVADQYADFLREGFHVVTPNKKANTSSMDYYHQLR

SEQ ID NO: 72640 - protein, 323 aa, Salmonella paratyphi A
VNPLSYAILESCGRLRSTQPNLSVRYHAGMSNDFLDACVQVIRCGFGMPAFNNDEIVIPEFIKLGIEPQNAYDYAAIGCIETAVGGKWGYRCTGMSFINFARVMLAALEGGRDATSGKVFLPQKKALSAGNFNNFDEVMAAWDTQIRYYTRKSIEIEYVVDTMLEENVHDILCSALVDDCIERAKSIKQGGAKYDWVSGLQVGIANLGNSLAAVKKLVFEQGVIGQQQLAAALANDFDGLTHEQCAQRLINARRSYGNDDDSVDTLLARAYQTYIDELKQYHNPRYGRAPVGGNYYAGTSSISANVPFGAATMATPDGRRGSS

SEQ ID NO: 72641 - protein, 333 aa, Salmonella paratyphi A
  MISC_FEATURE (301)..(301): X=any amino acid
  MISC_FEATURE (327)..(327): X=any amino acid
MADTKAKITLTGDTAIELDVLKGTLGQDVIDIRSLGSKGIFTFDPCFTSSHSCESKITFIDGDEGILLHRVSPIDQLATDSNYLEVCYILLYGEKPTQEEYDEFRTTVTRHTMIHEQITRLFHAFRRDSHPMAVMCGITGALAAFYHDSLDVNNPRHREIAAFRLLSKMPTMAAMCYKYSIGQPFVYPRNDLSYAGNFLNMMFSTPCETYEVNPVLERAMDRILILHADHEQNASTSTVRTAGSSGANPFACIAAGIASLWGPAHGAQTKAALKMLEEISSVKHIPEFVRRAKDKNDSFAXWGFGHRVYKNHDPRATVMRETCTKCXKELGTK

SEQ ID NO: 72642 - protein, 267 aa, Salmonella paratyphi A
HRLLGAQAADQRLRHHAGNPLHLDVLVVDEASMIDLPMMSRLIDALPPHGRVIFLGDRDQLASVEAGAVLGDICAYVNAGFTAERARQLSRLTGSAIPAGAGTQAASLRDSLCLLQKSYRFGSDSGIGKLAAAINCGDRSAIQAVFQQGFSDIEKRTLQSSDDYAGMLDEALAGYGRYLRLLHEKATREAILQAFNEYQLLCALREGPFGVRGLNDRIEQAMVQQRKIQRHPHSRWYEGRPVMIARNDSALGLFNGDIGIALDRGQG

SEQ ID NO: 72643 - protein, 163 aa, Salmonella paratyphi A
MRLTSKGRYAVTAMLDVALNSEAGPVPLADISERQGISLSYLEQLFSRLRKNGLVSSVRGPGGGYLLGKDAGSIAVGEVISAVDESVDATRCQGKGGCQGGDKCLTHALWRDLSDRLTGFLNNITLGELVNNQEVLDVSGRQHTHDAPASGRAQDAIDVKLRA

SEQ ID NO: 72644 - protein, 325 aa, Salmonella paratyphi A
  MISC_FEATURE (198)..(198): X=any amino acid
  MISC_FEATURE (242)..(242): X=any amino acid
  MISC_FEATURE (297)..(297): X=any amino acid
DIYAFRVIVHDSDTCYRVLGQMHSLYKPRPGRVKDYIAIPKANGYQSLHTSMIGPHGVPVEVQIRTEDMDQMAEMGVAAHWAYKEHGETSTTAQIRARWMQSLLELQQSAGSSFEFIESVKSDLFPDEIYVFTPEGAIVELPAGATPVDFAYAVHTDIGHAASGARVDRQPYPLSQPLSSVRPVEIITAPAVPTAAAXTLSSSSKARAKIRQLLKNLKRDDSVSLGRRLLNHALGGSRKLAXIPRNSIQRELDRMKLATLDDLLAEIGLGNAMSQLLREKIWQQGDSVWPYRLRNRXHGHLRIKGADGWRYHLVRSVCSSDPRAT

SEQ ID NO: 72645 - protein, 387 aa, Salmonella paratyphi A
  MISC_FEATURE (78)..(78): X=any amino acid
  MISC_FEATURE (303)..(303): X=any amino acid
VSKATEQNDKLKRAIIISAVLHIILFAVLIWSSFDEHIEASAAGASGSAIDAVMVDPGAVVQQYNRQQDQQASARRAXEERKKLQQQQAEELQQKQAAEQERLKQLEKERLAAQEQQKQAEEAAKLAQQQQQQAEEAAADAKKKAEPEAAKAAADAKKKAEAEAVKAAADAKKKAEAEAAKAAADAKKKAEAEAAKAAAEAKKKAEAEAAKAAADAKKKADAEAAKAAAEAKKKADARRAKAAADAKKKAAAENSGRAEGVDDLLGDLSSGKNAPKTGGGAKGNGQPSKDSGTSGANGGTARXYQAYAKQIQVAIQSRLYDASLYQGKQCVLHISLAPDGSLKSITSEGGDPALCQAALMAAKTAKIPKPPSQAVYEKIKDAKLDFK

SEQ ID NO: 72646 - protein, 195 aa, Salmonella paratyphi A
  MISC_FEATURE (19)..(19): X=any amino acid
MSSNFRHHLLSLSLLGSAXPPWAAFAQAPISSVGSGSVEDRVTQLERISNAHSQLLTQLQQQLSDNQSDIDSLRGQIQENQYQLNQVMERQKQIMLQLGSLNNGGAAQPAAGDQSGTATTATPAPDAVTATSGAPVQSGDANTDYNAAIALVQDKSRQDDAIVAFQNFIKKYPDSTYQPNANYWLGQLNYNKGKK

SEQ ID NO: 72647 - protein, 88 aa, Salmonella paratyphi A
SFQFEQIGVIRSPYKEKFAVPRQPGLVKSRGELHLIAPYNQADAVRGLEAFSHLWVLFVFHQTMDGGLRPTVRRPRLAVTARMGVFAT

SEQ ID NO: 72648 - protein, 308 aa, Salmonella paratyphi A
  MISC_FEATURE (298)..(298): X=any amino acid
MTMPTSQCPWRMQVHHIRQETPDVWTIALLCHDYYPYRAGQYALVSVRNSAETLRAYTLSSTPGVSEYITLTVRRIEDGTGSQWLTHDIKRGDYIWLSDAMGDFTCDDKTEDKFLLLAAGCGVTPIMSMRRWLAKYRPQADVQVIFNVRSPDDVIFADEWRQYPVTLVAENHATEGFVAGRLTTELLQRVPDLASRTIMTCGPAPYMDFVEQGVKALGVTRFFKEKFFSRVAETATSGLKFTKLQPAQEFYAPIGTTLLEALESNKVPVAAAVGAGVCGCCKTKVVSGDYTVSSTMTXARAEIAEGYV

SEQ ID NO: 72649 - protein, 314 aa, Salmonella paratyphi A
MSHLAELVANAAAAINQASDVAALDNVRVEYLGKKGHLTLQMTTLRDLPPEERPAAGAVINAAKEQVQQALNARKAELESAALNARLAAETIDISLPGRRIENGGLHPVTRTIDRIESFFGELGFTVATGPEIEDDYHNFDALNIPGHHPARADHDTFWFDATRLLRTQTSGVQIRTMKAQQPPIRIIAPGRVYRNDYDQTHTPMFHQMEGLIVDTNISFTNLKGTLHDFLRNFFEEDLQIRFRPSYFPFTEPSAEVDVMGKNGKWLEVLGCGMVHPNVLRNVGIDPEIYSGFAFGMGMERLTMLRYGVTDLRS

SEQ ID NO: 72650 - protein, 183 aa, Salmonella paratyphi A
MSDEKQKMIAGALYCPTDETLCQDRLRARQLIHQYNYTTPDEINKRQAILRDLLGRCEDAYIEPSFRCDYGYNIFLGHSFYANFDCVMLDVCPIHIGDNCMRAPGVHIYTATHPLDAVERNSGRELGKPVTIGNNVWIGGRAVVNPGVTIGDNVVVASGAVVTKNVPPDVVVGGNPARIIKKL

SEQ ID NO: 72651 - protein, 137 aa, Salmonella paratyphi A
MRTVEVTLRQLDKLNSLLDGALKAGLNEIRSVSLGVAQPDAYKDKARKAAIDDAIHQAQALAAGFNSKLGPVYSVRYHVSNYQPSPVVRMMKAADAAPVSAQETYEQPTIQFDDQVDVVFQLEPGTGQTSTTAASTQ

SEQ ID NO: 72652 - protein, 231 aa, Salmonella paratyphi A
  MISC_FEATURE (8)..(8): X=any amino acid
VVSFSAFXKISTTFEGIFVMRIILLGAPGGGKGTQAQFITEKYGIPQISTGDMLRAAVKSGSELGKQAKDIMDAGKLVTDELVIALVKERIAQEDCRNGFLLDGFPRTIPQRDAMKEAGIVVDYVLEFDVPDELIVDRIVGRRYDRSGRVYHVKFNPPKVEGKDDVTGEDLTTRKDDQEETVRKRLVEYHQMTGPLIGYYQKEAEAGNTKYAKVDGTQAVADVRSLEKILG

SEQ ID NO: 72653 - protein, 231 aa, Salmonella paratyphi A
MRLDKFIAQQLGVSRAIAGREIRGNRVTVDGDIIKNAAFKLLPEHAVAYDGNPLAQQHGPRYFMLNKPQGYVCSTDDPDHPTVLYFLDEPVAYKLHAAGRLDIDTTGLVLMTDDGQWSHRITSPRHHCEKTYLVTLESPVADDTAAQFAKGVQLHNEKDLTKPATLEVITPVQVRLTISEGRYHQVKRMFAAVGNHVVELHRERIGAITLDENLAPGEYRPLTEEEIASVG

SEQ ID NO: 72654 - protein, 214 aa, Salmonella paratyphi A
  MISC_FEATURE (210)..(210): X=any amino acid
VTTRQHSSFAIVFILGLLAMLMPLSIDMYLPALPVISAQFGVPAGSAQMTLSTYILGFALGQLIYGPMADSLGRKPVILGGTLVFAAAAVACALAQTIDQLIVMRFFHGLAAAAASVVINALMRDIYPKEEFSRMMSFVMLVTTIAPLMAPIVGGWVLVWLSWHYIFWILAIAAILASVMIFALIKETLPVERVQPFHIRTTIGDPLESXLRHQ

SEQ ID NO: 72655 - protein, 308 aa, Salmonella paratyphi A
  MISC_FEATURE (257)..(257): X=any amino acid
VAFSFSGGIMSQVQSGILPEHCRAAIWIEANVKGDLDALRAASRTFADKLATFEVKFPDAHLGAVVAFGNNTWRALSAGVGAEELKDFIPYGKGLAPATQYDVLIHILSLRHDVNFSVAQAAMEAFGDCIDVKEEVHGFRWVEERDLSGFVDGTENPAGEETRREVAVIKDGVDAGGSYVFVQRWEHNLKQLNRMSIHDQEMMIGRTKEANEEIDGDARPATSHLSRVDLKEDGKGLKIVRQRPAYGTPSGTHGLYXTFTCARLHNIEQQLLSMFGDTDGKREPIGASPKPVTGGYYFAPSLDRLLAL

SEQ ID NO: 72656 - protein, 260 aa, Salmonella paratyphi A
ARHPRWTLSQVTELFEKPLLELLFEAQQIHRQHFDPQQVQVSTLLSIKTGACPEDCKYCPQSSRYKTGLEAERLMEVEQVLDSARKAKNAGSTRFCMGAAWKNPHERDMPYLEQIVQGVKAMGLETCMTLGMLNESQAQRLANAGLDYYNHNLDTSPEFYGNIITTRTYQERLDTLEKVREAGIKVCSGGIVGLGETVTDRAGLLLQLANLPTPPESVPINMLVKVKGTPLADNDDVDAFDFIRTMAVARSMMPTSYVRL

SEQ ID NO: 72657 - protein, 507 aa, Salmonella paratyphi A
  MISC_FEATURE (88)..(88): X=any amino acid
  MISC_FEATURE (149)..(149): X=any amino acid
  MISC_FEATURE (365)..(365): X=any amino acid
GAAAGYRYDEAGRLNGVVDNAGQYQREFAYDDNDCMTMHREPGGERYYYTWAWFEGPDDAAWRVTGHHTDSGEQYRLDWNLAERSCAXRIAWGVTRCHWWDAQGLVTAYRDEAGQMTTFRWSDEERLLLGMTDAQGGKWRYVYDRLVHXTETHDPLGRVEQTQWHPCATSRKRRWYSRGRRGRYEYDERGNLQAVSDPLHQRTVYGYDRHGQVVRITDARGGDKYLQWNEDGQLMRHTDCSGSQTAWFYDERTRLERVTDAESNSTRYSYDGNGHLTEVMFADGRTERYQPDAAGRWVKYTSPAGQITRWQRDGQGRVRRQTDATGRRTAYEYDAYGRLTTLTNENGESYRFRYDVLDRLTEQTXKPPAAGHTGYNALNAVTAVIYGGERGGEIRHGLERDAAGRLYAKTTPETRTEYRYDAADRLLENRRRHDAAEGGEPEVIRFSYDSAGNLLSEETGRALQHRYDVQGNRTETRCRTGRTLRYLYYGSGHLQQINLGRMSISEF

SEQ ID NO: 72658 - protein, 381 aa, Salmonella paratyphi A
  MISC_FEATURE (352)..(352): X=any amino acid
  MISC_FEATURE (353)..(353): X=any amino acid
VATLMLLGGAVGKSAQLPLQTWLADAMAGPTPVSALIHAATMVTAGVYLIARTHGLFLMTPEILHLVGIIGAITLVMAGFAALVQTDIKRVLAYSTMSQIGYMFLALGVQAWDAAIFHLMTHAFFKALLFLASGSVILACHHEQNIFKMGGLRKSIPLVYACFLVGGAALSACPLVTAGFFSKDEILAGAMANGHINLMVAGLVGAFMTSLYTFRMIFIVFHGKEQIHAHAGKGITHHLPLIVLMILSTFVGALIVPPLQGVLPQTTELAHGRVLTLEITSGVVAIAGILIAAWLWLGKRTLVTSIANSAPGRLLGTWWYTRWGFDWLYDKVFVKPFLGIAWLLKRDPLMRXXTFRLSFPFCSKGLVLSENGYLRWYVASM

SEQ ID NO: 72659 - protein, 210 aa, Salmonella paratyphi A
MYQPDFPTVPFRLGLYPVVDSVEWIERLLEGAYARSQLRIKDKRDEEVEADVIAAIALGRRYDRDSFINDYWRLAMKHNAYGVHLGQEDLETTDLKAIQAAGLRLGVSTHDDMEIDIALAAKPSYIALGHVFPTQTKQMPSAPQGRHVVRHIERLADYPTVAIGGISLEHAPAVLATGVGSIAVVSAITQAADWRDATASLLAIAGVGDE

SEQ ID NO: 72660 - protein, 179 aa, Salmonella paratyphi A
MQENHIHSDTTFALRSVAFRVPGRTLLHPLSLTFPAGRVTGLIGHNGSGKSTLLKMLGRHQPPSEGDILLDNQRLASWSGKRLARKVAYLPQQSAKAEGMTVRELVAIGRYPWHGALDALASRTGKKVDEAITLVGLKPWRIVWSDTLIRGERQRAWIAMWSRRTAVCLLLDEPTSALD

SEQ ID NO: 72661 - protein, 354 aa, Salmonella paratyphi A
MQSKFATGEVDHTLLTGVDFMRMRNDINAWFGYDDSVPLLDLYNPVYTDFDFASRDPATSGPYQILNKQKQTGLYVQDQAQWDKVLVTLGGRYDWADQESLNRTTGITSKRDDKQFTWRGGVNYLFDNGITPYFSYSESFEPASQTGENGKIFAPSKGKQYEAGVKYVPNDRPIVITGAVYQLTKTNNLMADPAGSFFSVEGGEIRARGVELEAKAALSASINVVGSYTYTDAEYTTDTTYKGNTPAQVPKHMASLWGDYTFFDGPLSGLTLGTGGRFTGSSYGDPANSFKVGSYTVVDALVRYDLARVGMAGSNVALHVNNLFDREYVASCFQTYGCFWGAERQVVATATFRF

SEQ ID NO: 72662 - protein, 407 aa, Salmonella paratyphi A
  MISC_FEATURE (79)..(79): X=any amino acid
  MISC_FEATURE (101)..(101): X=any amino acid
  MISC_FEATURE (365)..(365): X=any amino acid
IGINEIIRYNMMFFIANCAGDRIPSRFAGRALSRKIGKSIKGSCGQFEEGLMAIGALGLAMVRYTALGRVLANVLGAGXYPGYEMLGANPIHVRGTLLGLXYWAILPRKELAGGDVAAWLYSGLILGSMMGATIVFSIPVALGIIEPSDRRYLALGVLAGIVTIPIGCIAGGVIAMYSGVQINGQPVEFTFALILMNMIPVLIVAVLVALGLKFIPEKMINGFQIFAKFLVALITIGLAAAVVKFLLGWELIPGLDPIFMAPGDKPGEVMRAIEVIGSISCVLLGAYPMVLLLTRWFEKPLMNVGKLLNVNNIAAAGMVATLANNIPMFGMMKQMDTRGKVINCAFAVSAAFALGDHLRSPPPTXTAMIFPMIVGKLIGGVTAIGVAMMLVPKDDAAQVKTEAEAQS

SEQ ID NO: 72663 - protein, 374 aa, Salmonella paratyphi A
  MISC_FEATURE (81)..(81): X=any amino acid
  MISC_FEATURE (257)..(257): X=any amino acid
MAIEIKVPDIGTDEVEITEILVKVGDKVEAEQSLITVEGDKASMEVPSPQAGVVKEIKVSVGDKTETGALIMIFDSADGRXRAPAKAEEKKEAAPATAPAAAAAKDVHVPDIGSDEVEVTEVMVKVGDTVEAEQSLITVEGDKASMEVPAPFAGTVKEIKVNTGDKVSTGSLIMVFEVAGEAGAAAPAKAEAAPAAAAPAAATGVKDVNVPDIGGDEVEVTEVMVKVGDKVAAEQSLITVEGDKALWEVPAPFAAPXKEIKISTGDKVKTGSLIMVFEVEGARLRPAPAKQEAAAGLRRETEKPAAPAAKAEGKSEFAENDAYVHATPLIRRLAASMASNWRSEGTAVSRILRETFRLREDAINARTAPAAAAG

SEQ ID NO: 72664 - protein, 308 aa, Salmonella paratyphi A
MVKVYAPASSANMSVGFDVLGAAVTPVDGTLLGDVVSVEAADHFRLHNLGRFADKLPPEPRENIVYQCWERFCQALGKTIPVAMTLEKNMPIGSGLGSSACSVVAALVAMNEHCGKPLNDTRLLALMGELEGRISGSIHYDNVAPCFLGGMQLMIEENGIISQQVPGFDEWLWVLAYPGIKVSTAEARAILPAQYRRQDCIAHGRHLAGFIHACYSRQPQLAPALMKDVIAEPYRARLLPGFSQARQAVSEIGALASGISGSGPTLFAYADKPETAQASRTWLSKHYLQNQEGFVHICRLDTAGARVV

SEQ ID NO: 72665 - protein, 249 aa, Salmonella paratyphi A
  MISC_FEATURE (6)..(6): X=any amino acid
  MISC_FEATURE (89)..(89): X=any amino acid
IPSLIXSEGQIQLKDAEALYGLLKDEMGEILAKVDEPLNIEGKTPFVILMVGVNGVVKTTTIGKLARQFEQQGKSVMLAAGDTFRAARXEQLQVWGQRNNIPVIAQHTGADSPSVIFDAIQAAKARNVDVLIADTAGRLQNKSHLMEELKKIVRVMKKLDEEAPHEVMLTIDASTGQNAVSQAKLFHEAVGLTGITLTKLDGTAKGGVIFSVADQFGIPIRYIGVGERIEDLRPFKAGDFIEALFARED

SEQ ID NO: 72666 - protein, 345 aa, Salmonella paratyphi A
  MISC_FEATURE (256)..(256): X=any amino acid
  MISC_FEATURE (280)..(280): X=any amino acid
MFMEFSAGLMPLETALTQMLSRITPVTAVETLPLVNCFGRILATDIVSPLDVPGFDNSAMDGYAVRADLSADKPLPVAGKAFAVQPYQGEWPAGTCIRIMTGAPVPAVCEAVVMQEQTEQTDDGVRFTADVRCGQNIRRRARDIRQDAVVFPAGTRLTTAELPVLASLGIADAQVVRKVRVALFSTGDELQLPGQPLEAGQIYDTNRLTIHLMLQQLGCEVINLGIIPDDPGNVARIYDADSQADVVISSAASRWXADYTKTILEELRNRLLEVLSSQAXTFGKLSNSWFCGCRGIQSSAALTFYQLVQPLLAKLGGNTRNAVPRPRVRTTSRLKKHRASRFPRA

SEQ ID NO: 72667 - protein, 175 aa, Salmonella paratyphi A
LDIDLNDPLAVRDRAMLEVMYGAGLRLSELVGLDIKHLDLDTGEVWVMGKGSKERRLPIGRNAVTWIEHWLDLRGLFASDEEALFLSKLGKRISARNVQKRFAEWGIKQGLNSHVHPHKLRHSFATHMLESSGDLRGVQELLGHANLSTTQIYTHLDFQHLASVYDADPRAKRGK

SEQ ID NO: 72668 - protein, 238 aa, Salmonella paratyphi A
MRFYRPLGRIAALTFDLDDTLYDNRPVILRTEQEALAFMQNYHPSLRSFQNVDLQRIRQAVREAEPEIYHDVTRWRHRAIEQAMRDAGLSAQEAIAGANAAMMHFAKWRSQIEVPQATHETLQQLAKKWPLVAITNGNAQPELFGLGDYFKFVLRAGPDGRSKPFSDMYFLAAEKLHVPIGEILHVGDDLTTDVAGAIRCGMQACWIKPENADLMRTQDSRLLPHIEISRLASLTSLI

SEQ ID NO: 72669 - protein, 719 aa, Salmonella paratyphi A
  MISC_FEATURE (264)..(264): X=any amino acid
RSRGCTFAGPYSADIKAELGVKELNLDAAIDDAGLDYALPGLGGMAKGIVKVRGTVEAPQLLADSPPRLRWQELSVAQARIEGDIKSTDQIAGHLNVRVERISQPDVNINLVTLDAKGSEKQHQLQLRVQGEPVSGQLSLTGSFDREAARWKGTLSDTRFQTPVGPWSLDRAIALDYRNKEQKISIGPHCWLNPNAELWYRQTIDAGAAGRAVVNLNRFDLAMLKPFMPDTTQASGIFSGKADVSLTPPGVIVAGKVTLSVVMXRSRRPVNDAPLPVAFETLNLSADLHNNRAELGWLIRLTNNGQFDGQVQVTDPQGRRNLGGNVNMRNLNLAMVNPVFSRGEKAAGMLNARLRLGGDVQSPQLFGQLQLSALDIDGNFMPFEMQPSQLTMNFSGTRSTLAGIVRTQQGQINLNGNADWSQIDNWRARVTAKGSRVRITVPPMVRLDVSPDVVFDATPSLFTLDGRVDVPWARIVVHDLPESAVGVSSDVVMLNNDLQPETPQTASIPINSNLTVHVGNNVRIARFGLKARLTGDLKVAQDKQGLGLNGQINIPDGRFPPYGQDLLVRKGELLFLGPPDQPLLNIEAIRNPDATEDDVIAGVRVTGTADEPKAEIFSDPAMRRLKRFSYLLRGQGLDSNQSDSAAMTSMLIGLGVAQSGQVVGKIGETFGVSNLALDTQGVGDSSPGCGQRLVLPGLQVKYGVGIFDSLATLTLRYRL

SEQ ID NO: 72670 - protein, 65 aa, Salmonella paratyphi A
MFDTLSKAGKYLGQAAKMMIGVPDYDNYVEHMRITHPDQTPMTYEEFFRERQDARYGGKGGARCC

SEQ ID NO: 72671 - protein, 285 aa, Salmonella paratyphi A
VSEMVDMTKTTTEKKLTPSDIRGVFLRSNLFQGSWNFERMQALGFCFSMVPAIRRLYPENNDARKQAIKRHLEFFNTHPYVAAPVLGVTLAMEEKRANGAEIDDGAINGIKVGLMGPLAGVGDPIFWGTVRPVFAALGQDIAMSGSSLGPLLFFILFNLVRLATRYYGVAYGYRKGVDIVKDMGGTFLQKLTEGASILGLFVMGALVNKWTHVNIPLVVSTITGQDGQTRVTTVQTILDQLMPGLVPLLLTFACMWLLRKKVNPLWIIVGFFVIGIAGYSVGLLG

SEQ ID NO: 72672 - protein, 254 aa, Salmonella paratyphi A
MAYSKIRQPKLSDVIEQQLEFLILEGTLRPGEKLPPERELAKQFDVSRPSLREAIQRLEAKGLLLRRQGAETFVQSSLWQSFSDRWVELLSDHPESQFDLLETRHALEGIAAYYAALRSTDEDKDRIRELHHAIELAQESGDLDAESEAVLQYQIAVTEAAHNVVLLHLLRCMEPMLAQNVRQNFELLYARREMLPLVSTHRTRIFEAIMAGKPEEAREASHRHLAFIEEIMLDRSREESRRERALRRLEQRKN

SEQ ID NO: 72673 - protein, 488 aa, Salmonella paratyphi A
LQPYQGVTANSPWLASETEKRRRKICDSLEEAIRRSGLKNGMTISFHHAFRGGDKVVNMVMAKLAEMGFRDLTLASSSLIDAHWPLIEHIKNGVVRQIYTSGLRGKLGEEISAGLMENPVQIHSHGGRVKLIQSGELNIDVAFLGVPCCDEFGNANGFSGKSRCGSLGYAQVDAQYAKCVVLLTEEWVEFPNYPASIAQDQVDLIVQVDEVGDPEKITAGAIRLSSNPRELLIARQAANVIEHSGYFCDGFSLQTGTGGASLAVTRFLEDKMRRHNITASFGLGGITGTMVDLHEKGLIKALLDTQSFDGDALRSLAQNPHHIEISTNQYANPASKGAASNRLNVVMLSALEIDVNFNVNVMTGSNGVLRGASGGHSDTAAGADLTIITAPLVRGRIPCVVEKVLTTVTPGASVDVLVTDHGIAVNPARQDLLDNLRAAGVALTTIEQLQQRAEQLTGKPQPIEFTDRVVAVVRYRDGSVIDVIRQVK

SEQ ID NO: 72674 - protein, 112 aa, Salmonella paratyphi A
HIITTAEIAKILTSENNHQVWFKVQDASLMKYILYKGFIGVDGISLTVGEVTPTRFCVHLIPETLERTTFGRKKLGERVNIEIDPQTQAVVDTVERVLATRENVVRNQADIG

SEQ ID NO: 72675 - protein, 396 aa, Salmonella paratyphi A
  MISC_FEATURE (387)..(387): X=any amino acid
MSTEIKTQVVVLGAGPAGYSAAFRCADLGLETVIVERYNSLGGVCLNVGCIPSKALLHVAKVIEEAKALAEHGIVFGEPKTDIDKIRTWKEKVITQLTGGLAGMAKGRKVKVVNGLGKFTGANTLEVEGENGKTVINFDNAIIAAGSRPIQLPFIPHEDPRVWDSTDALELKEVPKRMLVMGGGIIGLEMGTVYHALGSEIDVVEMFDQVIPAADKDIVKVFTKRISKKFNLMLETKVTAVEAKEDGIYVSMEGKKAPAEAQRYDAVLVAIGRVPNGKNLDAGKAGVEVDDRGFIRVDKQLRTNVPHILAIGDIVGQPCWAHKGVHEGHVAAEVIAGKKHYFDPKVIPSIAYTEPEVAWVGLTEKEAKEKGISYETATFPWAASGRXSLLDCADGM

SEQ ID NO: 72676 - protein, 165 aa, Salmonella paratyphi A
  MISC_FEATURE (62)..(62): X=any amino acid
AVNQLRDSDSPTRDAEILLEYVTGKGRTYIMAFAETPLTDVQQQQLADLLQRRRQGEPIAYXTALREFWRALFVSHATLIPRPDTECLVEQALARLPVKTCRILDLGTGTGAIAWRWACERPDCEVTAVDRMPDAVALAIRNAEHLAIQNVRILQSCWFSALSGQ

SEQ ID NO: 72677 - protein, 358 aa, Salmonella paratyphi A
  MISC_FEATURE (33)..(33): X=any amino acid
MKPSIVAKLEALHERHEEVQALLGDAGIIADQXTPFALSREYAQLSDVSRCFTDWQQVQDDIETAQMMLDDPEMREMAQEELPKAKEKSEQLEQQLQVLLLPKDPDDERNAFLEVRPGTGGDEAALFAGDLFRMYSRYAEAWRVEIMSMSEGEHGGYKEIIAKISGDGVYGRLKFESAGHRVQRVPRPSSQGRIHTSACTVAVMPELPEAELPDINPADLRIDTFRSSGAGGQHVNTTDSSIRITHLPTGIVVECQDEAFAHKNKAKALSVLGARIHAAETQNASRAEASTAATCLGSGDRSDRNRTYNFRRGADPIIVLILTLYRLDETMEGKLDMLIEPIVQEHQADLLAALSEQE

SEQ ID NO: 72678 - protein, 169 aa, Salmonella paratyphi A
RHYWHADVGGLLVAQGGRWAKAGVYLISRFVARIYDCIKARSPLEPYVVEEDPGVKSVRNIYDYFKQHRYETIVMGASFRRTEQILALTGCDRLTISPNLLKELKEKEEPVIRKLVPSSQMFHRPTSMTEAEFRWEHNQDAMAVEKLSEGIRLFAVDQRKLEDLLAAKL

SEQ ID NO: 72679 - protein, 241 aa, Salmonella paratyphi A
  MISC_FEATURE (204)..(204): X=any amino acid
MANMFALILVIATLVTGILWCVDKFVFAPKRRARQAAAQTASGDALDNATLNKVAPKPGWLETGASVFPVLAIVLIVRSFLYEPFQIPSGSMMPTLLIGDFILVEEFAYGIKDPIYQKTLIETGNPKRGDIVVFKYPENPKLDCIKRAVGLPGDKITYDPVAKEVTIQPGCSSGQACEGALPVTYSSVEPSDFVQTFARRDGVXASRLFFEVSLGDTEEDGDSLSRTWETLGFVAHRIVMV

SEQ ID NO: 72680 - protein, 382 aa, Salmonella paratyphi A
  MISC_FEATURE (51)..(51): X=any amino acid
  MISC_FEATURE (52)..(52): X=any amino acid
EDPLQKVQRAVYALPTVNIGDAAIGVVTLETLIFWPRLGIRLPGHLHALLXXGCAVMGIVNLLGGNVATIGSQFHYVLADGTQGNGIPQLLPQLMLPWSLPGSDFTLSWDSLRALLPAAFSMAMLGAIESLLCAVVLDGMTGTKHKANSELIGQGLGNMVAPFFGGITATAAIARSAANVRAGATSPVSAVIHAILVILALLVLAPLLSWLPLSAMAALLLMVAWNMSEAHKVVDLLRHAPKDDIIVMLLCMSLTVLFDMVIAISVGIVLASLLFMRRIARMTRLAPVNVDMPEDVLVLRVIGPLFFAAAEGLFTDLESRIKGKRIVVLKWDAVPVLDAGGLDVFSVFVKRLPEGCELRISNLEFTTAATMARAGIKPIPGR

SEQ ID NO: 72681 - protein, 267 aa, Salmonella paratyphi A
MIISAASDYRAAAQRTLPPFLFHYIDGGAYAEYTLRRNVEDLSQVALRQRVLKNMSDLSLETTLFNETLSMPVALAPVGLCGMYARRGEVQAAAAADAKGIPFTLSTVSVCPIEEVAPTIQRPMWFQLYVLRDRGFMRNALERAKAAGCSTLVFTVDMPTPGARYRDAHSGMSGPNAAMRRYWQAVMHPKWAWDVGLNGRPHDLGNISAYLGKPTGLEDYIGWLANNFDPSISWKDLEWIREFWDGPMVIKGILDPEDCPDAVRFGA

SEQ ID NO: 72682 - protein, 199 aa, Salmonella paratyphi A
MQNRLTIKDIARLSGVGKSTVSRVLNNESGVSERTRERVEAVMNQHGFSPSRSAAAMRGQSDKVVAIIVTRLDSLSEELAVQTMLPAFYEQGYDPIMMESQFSPTLVMEHLGMLRRRNIDGVVLFGFTGITEELISPWKRSLVLLARDAQGFASVCYDDEGAIHILMQRLYEQGHRNISFLGVPHSDITTGKRRHDAYL

SEQ ID NO: 72683 - protein, 448 aa, Salmonella paratyphi A
SQSESPFRIIPTVFHNSSIFLPSLLTTIEEATFRKTFQDEKLIPMKGSNTFRWAIAIGVVVAAAAFWFWHRPGVARQAPHTAAAGRRGMRDGPLAPVQAATATTQAVPRYLSGLGTVTAANTVTVRSRVDGQLIALHFQEGQQVNAGDLLAQIDPSQFKVALAAQGQLAKDNATLANARRDLARYQQLAKTNLVSRQELDAQQALVNETQGTIKADEANVPAAQLQLDWSRITAPVSGRVGLKQVDVGNQISSSDTAGIVVITQTHPIDLIFTLPESDIATVVQAQKAGKTLVVEAWDRTNSHKLSEGVLLSLDNQIDPTTGTIKIKARFTNQDDTLFPNQFVNARMLVDTEQNAVVVPAAAVQMGNEGHFVWVLNDENNVSKKRVKIGIQDNRNVVISAGLSAGDRVVTDGIDRLTEGAKVEVVEPQTTMADEKSPSRHEGQKGARA

SEQ ID NO: 72684 - protein, 461 aa, Salmonella paratyphi A
LALFGCFLIMIIILAVLALIVVKALAESPWACFTVCSTVPIALFMGIYMRFLRPGRVGEVSVIGIVLLVASIYFGGVIAHDPYWGPALTFKDTTITFALIGYAFVSALLPVWLILAPRDYLATFLKIGVIVGLALGIVILNPELKMPALTQYVDGTGPLWKGALFPFLFITIACGAVSGFHALISSGTTPKLLACETDARFIGYGAMLMESFVAVMALVAASIIEPGLYFAMNTPPAGLGITMPNLHEMGGENAPLIMAQLKDVTAHAAATVSSWGFVISPEQILQTAKDIGEPSVLNRAGGAPTLAVGIAHVFHKVLPMADMGFWYHFGILFEALFILTALDAGTRSGRFMLQDLLGNFVPFLKKTDSLVAGIIGTAGCVGLWGYLLYQGVVDPLGGVKSLWPLFGISNQMLAPVALVLSTVVLIKMQRTKYIWVTVIPAVWLLICTTWALGLKLFSANP

SEQ ID NO: 72685 - protein, 310 aa, Salmonella paratyphi A
  MISC_FEATURE (283)..(283): X=any amino acid
  MISC_FEATURE (298)..(298): X=any amino acid
QIKPEHLKNWVEWAKANRLGLDFNPTCFSHPLSADGFTLSHPDAKIRQFWIDHCKASRRVSAYFGEQLGTPSVMNIWIPDGMKDITVDRLAPRQRLLEALDEVISEKFDPAHHIDAVESKLFGIGAESYTVGSNEFYMGYATSRQTALCLDAGHFHPTEVISDKISAAMLYVPRLLLHVSRPVRWDSDHVVLLDDETQAIASEIVRHNLFDRVHIGLDFFDASINRVAAWVIGTRNMKKSVLRALLEPTDQLRQLEASGDYNPRLALLEEQKSLPWQAVWEMXLPRHDTPAGTSGWDXVRAYEKEILSKR

SEQ ID NO: 72686 - protein, 353 aa, Salmonella paratyphi A
  MISC_FEATURE (114)..(114): X=any amino acid
  MISC_FEATURE (138)..(138): X=any amino acid
  MISC_FEATURE (145)..(145): X=any amino acid
  MISC_FEATURE (297)..(297): X=any amino acid
FKRRYVALLPLCVLLAACSTRQNLPGLQATTGTSSGGFLLEPQHNVMQMGGDFAHNPNAQEFIDKMVSKHGFDRQQLQEILSQSKRLDYVLRLMDRQAPTTQPPAGPNGAWFAXRKQFITPDNVQNGVAFWNQYEVRXNRAWQVXSYRRKIIVGIIGVETRWGRIMGKTRILDALATLSFNYPRRAEYFSGELETFLLMARDEQDDPLNLKGSFAGAMRLRPVMPSSYKEYAVDFNGDGHINLWDPVDANRQCGEYFKAHGWVKGDTVAVPANGQAPGLANGFKTKYSLSQLDATAXRRSNRLGNHQEASLLRLDIGTGYQYWYGLPNFYTITRYNHSTHYAMAVWQLGQAVG

SEQ ID NO: 72687 - protein, 401 aa, Salmonella paratyphi A
  MISC_FEATURE (295)..(295): X=any amino acid
  MISC_FEATURE (397)..(397): X=any amino acid
  MISC_FEATURE (398)..(398): X=any amino acid
WYQQIKDLPVSDASVKALQVYLTQFSEGDSVSAARAQLSEQQKQLADPRFRARSQGIAAVNAGEGGKAIAQLQQAVSARADDSEAVGALGQAYSQRGDRARAVAQFEKALAMAPHSSSRDKWESLLKVNRYWLLIQQGDAALKANNLAQAERFYQQARAVDNTDSYAVLGLGDVAMARKDNAAAERYYQQTLRMDSGNTNAVRGLANLYRQQSPQKAAAFIASLSASQRRSIDDIERSLENDRLAQQAETLESEGKWAQAAELHRRRLALDPGSVWVTYRLSRDLWQAGSTPRPXCKCALWRSRSQTIRNRSMLMGFIFPAAIGTGRLAHLNTLPTSQWNSNIQELAGRLQSNQVLESANRLRDSGKEREAEALLRQQPPSTPCVNVGGLGQQRGDXXRTR

SEQ ID NO: 72688 - protein, 290 aa, Salmonella paratyphi A
  MISC_FEATURE (53)..(53): X=any amino acid
WGEGQDPYVAIGIAASSDEHLGLTGHVTHVLSDDSVAEQLKSRTTAEDCAHCXMGEKQSEQLKLDNETMTLDVIASSLVTLQALNAARLKEAGAVDAAFVAKTINDSPMNLGQGIWLNDSAEGNLRSAVAVSRATQAFDVEGEKAALLVTVAMNDEQPIAVLKRLGDLLLNNKADRLLSADAATLLALLTSDDALTDDVLSAEFVVRNEHGLHARPGTMLVNTIKQFNSEITVTNLDGTGKPANGRSLMKVVALGVKKGHRLRFTAQGEDAEQALKAIGDAIAAGLGEGA

SEQ ID NO: 72689 - protein, 523 aa, Salmonella paratyphi A
  MISC_FEATURE (37)..(37): X=any amino acid
  MISC_FEATURE (121)..(121): X=any amino acid
  MISC_FEATURE (124)..(124): X=any amino acid
  MISC_FEATURE (335)..(335): X=any amino acid
MQEFYARVWNTKEMNLLKSLAAVSSMTMFSRVLGFAXDANVARIFGAGIATDAFFVAFKLPNLLRRIFADAFSQAFVLILAEYKSKQGEEATRIFVAYVSGLLTLALAVVTWPGMLAPRGXLWXTAPGFADTADKFALTTQLLRITFPYILLISLASLVGAILNTWNRFSIPAFAPTFLNISMIGFALFAAPYFNPPVLALAWAVTVGGVLQLVYQLPYLKKIGMLVLPRINFRDTGAMRVVKQMGPAILGVSVSQISLIINTIFASFLASGSVSWMYYADRLMEFPSGVLGVALGTILLPSLSKSFASGNHDEYCRLMDWGLRLCFLLALRARXRLGILAKPLTVSLFQYGKFTAFDAAMTQRALIAYSVGLIGLIVVKVLAPGFYSRQDIKTPVKIAIVTLIMTQLMNLAFIGPLKHAGLSLSIGLAACLNASLLYWQLRKQNIFTPQPGWMWFLMRLIISVLVMAAVLFGVLHIMPEWSQGSMLWRLLRLMAVVIAGMRPISTRLAVLGFKVKEFVRRTA

SEQ ID NO: 72690 - protein, 463 aa, Salmonella paratyphi A
SLLLFQHENDDQVTVRDIRLNMEQDAEHRATFDFSGRVNRIQHSLLLSFSGTVDASDYPHNLTAGIEQLRWQLQGADLPAQGIEGQGQLQAQWQEAQKRLSFNHLNLTANDSSLTGHVQVTLADSRNWQIDLQSSKLNLDNLLPHHSTVAQTGGAVSQGQNTLPLTRPVIASRVGAPPYQGLQSFTAEIALQADSVRWRGMDFTQVSTKMSNQAGLLDITELQGKLADGEMSLPGTLDARTASPRIEFHPRLNHVEIGTILKAFNYPISLTGKMSLVGDFSGADIDAEAFRHSWKGKAHVDMSNTRLEGMNFQQLVQQAVERSGATRSSSQENMDNATRLDRFTTDLTLNKGTLTLDDMVGQSSMLALTGSGTLDLVKQSCDTQFNLRVLGGWNGDSNLITFLKETPVPLRLWQVAELNYTLQVDQLLRDVCRMRATSGSATGRRHIKIPAMVEDVRELLDKL

SEQ ID NO: 72691 - protein, 433 aa, Salmonella paratyphi A
  MISC_FEATURE (112)..(112): X=any amino acid
  MISC_FEATURE (223)..(223): X=any amino acid
MAQEIELKFIVNHDAVDALRNHSHTLGGEHSCPSHVLNIYFETPDNWLRAMIWGLRIRGENGRYEMTMKIADRVTGGLHQRPEYNVALSNPCWILTQLPAEVWPDATCPLAXTLSVQPLFSTDFYREKWCLDVDGSRIEIALDLGDVKAGEFAEPICELELELLPAIRAPCLKLATDCCRKPVLRQGSLSKAARGYHLAQGIAPRVISPTAILGPLRKPRMSXWLEASLDLALSQWQYHEELLLRGDESAKEHVLDAMGLVRHALMLFGGIVPRKASAHLRDLLTQAEATMTSAVSAVTAVYSTQTAMAKLALTEWLVTKAWQPFLDAKAQAKMADSFKRFADIHLSRHAAELKKVFGQPLGDKYRDQLPRLTRDIDSVLLLAGYYDAMVAQAWLENWQGLRHAIITGQRIEIEHFRNEAINQQPFWLHSGKR

SEQ ID NO: 72692 - protein, 510 aa, Salmonella paratyphi A
SGLLAAMQEQYRPEEIESKVQLHWDEKRTFEVTEDESKEKYYCLSMLPYPSGRLHMGHVRNYTIGDVVARYQRMLGKNVLQPIGWDRFACPAEGAAVKNNTAPAPWTYDNIAYMKNQLKTLGFGYDWSREIATCTPEYYRWEQKFFTELYKKGLVYKKTSAVNWCPNDQTVLANEQVIDGCCWRCDTKVERKEIPQWFIKITAYADELLRDLDKLDHWPDTVKTMQRNWIGRSEGVEITFDVKGYDNTLIVYTTRPDTFMGATYLAVAAVIPLAQKAAANNASWRRFVDECRNTKVAEAEMATMEKKGVDTGYKAIHPLTGEEIPVWAANFVLMEYGTGAVMAVPGHDQRDYEFASKYGLTIKPVILAADGSEPDLSEQALTEKGVLFNSGEFDGLAFEAAFNAIADKLAEKGVGERKVNYRLRDWGVSRQRYWGAPIPMITQEDGTVLPTPEDQLPVILPEDVVMDGITSPIKADPEWAKTTVNGMPALRETDTFDTFMESSWYYARYT

SEQ ID NO: 72693 - protein, 284 aa, Salmonella paratyphi A
  MISC_FEATURE (40)..(40): X=any amino acid
  MISC_FEATURE (51)..(51): X=any amino acid
  MISC_FEATURE (56)..(56): X=any amino acid
  MISC_FEATURE (77)..(77): X=any amino acid
  MISC_FEATURE (79)..(79): X=any amino acid
  MISC_FEATURE (86)..(86): X=any amino acid
MTWFIDRRRNGKNKSTVDSQRFLPRYKAQIKQSDFEAINXRSVTDVDSREXVSIPXDDISEPMFPQRPAGTGHRPHXGXRSFIQTXLHARAARRWRGGSRRAQGQASTDGEGMNEFVFQMSKDEYLDLLFEDLALPNLKKNQHRQLNEYKTHRAGFTSNGVPANISVVRSLQNSLARRTAMTAGKRRELHALETELETISKSEPAQLLEEERLRREIAELRAKIERVPFIDTFDLRYKNYEKRPEPSSQAVDVLSDGVSGSMDQATKDMGKRFYIPLFLCVSPT

SEQ ID NO: 72694 - protein, 644 aa, Salmonella paratyphi A
  MISC_FEATURE (261)..(261): X=any amino acid
  MISC_FEATURE (323)..(323): X=any amino acid
  MISC_FEATURE (373)..(373): X=any amino acid
  MISC_FEATURE (472)..(472): X=any amino acid
  MISC_FEATURE (473)..(473): X=any amino acid
  MISC_FEATURE (517)..(517): X=any amino acid
MSRKQLALFEPVLLVQALTDAVKKLSPRAQWGNPVMFVVWAGSVLTTLLTLAMVTGQIAGSALFTGVISLWLWFTVLFANFAEALAEGASKAQANSLKGVKKTAFARRLRAPPMMRQADNVPAAELRKGDIVLVKAGDIIPCDGEVIEGGASVDESAITGESAPVIRESGGDFASVTGGTRILSDWLVIACSVNPGETFLDRMIAMVEGAPARKTPNEIALTILLIALTIVFLLATALWPLSPGAGNAVSVTVLVGCWCAXYTTIGGLLSMCSRNSRMLGANVIATRPRRRSAAMSMCLLLINRHYHRSQTQASIYSRRAVDXTRVTRAARRWRRNAEGRSIVILAKQRFNLVNAIRSRFHATFVPFTAQSAXADYIDNRMIRKGSVDAIRRHVESNGGHFPAMSSKTSRTWARLGATPLVVVEGRAYWGVFSPPRDLFKGGIKERFAQLRKMGIKTVMITGDNRLTGRIAXXRCGRFSCRSHAEAKLALIRQYQAEGRLVAMTGDGTNDAPALAGXRRGGMNSGTQAAKEAGNMVDLDSNPTKLIEVVHIGKQMLMTRGSLTTFSIANDVAKYFAIIPAAFAATYPQLNALNVMGLHSPNSAILSAVIFNALIIIFLIPLALKGVSYKPLSASAMLRRNLWIY

SEQ ID NO: 72695 - protein, 278 aa, Salmonella paratyphi A
MQSLQRKVLRTICPDQKGLIARITNICYKHELNIVQNNEFVDHRTGRFFMRTELEGIFNDSTLLADLDSALPEGSVRELNAGRRRVVILVTKEAHCLGDLLMKANYGGLDVEIAAVIGNHETLRSLVERFEIPFELVSHEGLTREEHDTKMRDAIDAHQPDYVVLAKYMRVLTPGFVARFPNKIINIHHSFLPAFIGARPYHQAYERGVKIIRTAHYVNDNLDEGPIIMQDVIHVDHTYTAEDMMRAGRDVEKNVLSRALYQVLAQRVFVYGNRTIIL

SEQ ID NO: 72696 - protein, 111 aa, Salmonella paratyphi A
MMKDADYLIKSWHPTCNAAAFRDDIIAGFANTRWLGLTIFEHTWSEAENTGYVSFIARFSEQGKTGAIIERSRFIKENGQWYYIDGTRPQLGRNDPCPCGSGKKFKKCCGQ

SEQ ID NO: 72697 - protein, 147 aa, Salmonella paratyphi A
MKNATFYLLDNDTTVNGLSAVEQLVCEIAAERWAAGKRVLIACEDEKQPIRLDEALWARPAESFVPHNLAGEGPRGGAPVEIAWPQKRNSSPRDILISLRTSFADFATAFTEVVDFVPYEETLKQLARERYKAYRVAGFNLNTATWK

SEQ ID NO: 72698 - protein, 404 aa, Salmonella paratyphi A
  MISC_FEATURE (42)..(42): X=any amino acid
IQKTINTLNDTGSMEAVCFLTELHVKGRNNYWKVRQAVEPIXDLYSFDQLKTNKSEPPPLRKMVFNVPTRRELTSVESPFQHGLAIAPGIKAAKDLGNMRPIICNAAYLASQARQLADSYSKNVITRVIGEQQMRELGMNAYLAVGHGSQNESLMSVIEYKGNPSEDARPIVLVGKGLTFDSGGISIKPSEGMDEMKYDMCGAAAVYGVMRMVAELQLPINVIGVLAGCENMPGGRAYRPGDVLTTMSGQTVEVLNTDAEGRLVLCDVLTYVERFEPEAVIDVATLTGACVIALGHHITGLMSNHNPLAHELIGASEQAGDRAWRLPLGDEFQEQLESNFADMANIGGRPGGAITAGCFLSRFTRKYNWAHLDIAGTAWRSGKAKGATGRPVALLSQFLLNRAG

SEQ ID NO: 72699 - protein, 365 aa, Salmonella paratyphi A
MKFVDEASILVVAGDGGNGCVSFRREKYIPKGGPDGGDGGDGGDVWMEADENLNTLIDYRFEKSFRAERGQNGASRDCTGKRGKDVTIKVPVGTRVIDQGTAETMGDMTKHGQRLLVAKGGWHWLGNTRFKSSVNRTPRQKTNGTPGDKRDLLLELMLLADVVMLGMPNAGKSTFIRAVSAAKPKVADYPFTTLVPSLGVVRMDSEKSFVVADIPGLIEGAAEGAGLGIRFLKHLERCRVLLHLIDIDPIDGSDPVENARIIIGELEKYSQDLAAKPRWLVFNKIDLMDKTEAEEKAKAIPEALGWEGKYYLISAASQLGVKDLCWDVMTFIIENPIAQAEEAKQPEKVEFMWDDYHRQQLAEVE

SEQ ID NO: 72700 - protein, 85 aa, Salmonella paratyphi A
MAHKKAGGSTRNGRDSEAKRLGVKRFGGEAVLAGSIIVRQRGTKFHAGTNVGCGRDHTLFAKADGKVKFEVKGPKNRKYISIVAE

SEQ ID NO: 72701 - protein, 72 aa, Salmonella paratyphi A
TIEFAEVLMIANGEEVKIGIPFVDGGVIKAEVVAHGRGEKVKIVKFRRRKHYRKQQGHRQWFTDVKITGISA

SEQ ID NO: 72702 - protein, 335 aa, Salmonella paratyphi A
MSLSETATQAPQPANVLLEVNDLRVTFATPDGTVTAVNDLNFTLRAGETLGIVGESGSGKSQTAFALMGLLATNGRIGGSGPFNGREILNATERELNTLRQNRISRIFQEPDDLVKSLYRVGEQLMEVLMLHKGMIKGGLLKSPVRMLDAVKMPEARKRMNMYPHEFSGGMRQRVMIAMALLCRPKLLIADEPTTALDVTVQAQIMTLLNELKREFNTAIIMITHDLGVVAGICDKVLVMYAGRTMEYGKARDVFYQPVHPYSIGLLNAVPRLDSEGAEMLTIPGNPPNLLRLPKGCPFQPRCPHAMEICNNAPPLEAFSPGRCAPVLNRVEELL

SEQ ID NO: 72703 - protein, 71 aa, Salmonella paratyphi A
MFTYHSANTSAAQPALVNAIEQGLRAELGVVTEDDILMELTKWVEASDNDILSDIYQQTINYVVSGQHPTL

SEQ ID NO: 72704 - protein, 680 aa, Salmonella paratyphi A
  MISC_FEATURE (17)..(17): X=any amino acid
  MISC_FEATURE (47)..(47): X=any amino acid
  MISC_FEATURE (413)..(413): X=any amino acid
TPHNKLHPAKPNTHTTXTMNKITFPPTPSQETKTLPPTYTKPNHTIXNKHTHNHTTTSNYQPTTHCTTPPKTHLTHKATHSTHLTKKTQDHTITADSHAQFTRDMDYIVKDGEVIIDDEHTSRTMAGRRWSDGLHQAVEAKEGVEIQNENQTLASITFQNYFRLYEKLAGMTGTRDTEAFEFSSIYKLDTVVVPTNRPMIRKDLPDLVYMTEAEKIQAIIEDIKERTANGQPVLVGTISIEKSEVVSRELTKAGIKHNVLNAKFHANEAGIVAQAGYPAAVTIATNMAGRGTDIMLGGSWQAEVARWKRRTEEQIAQIKADWQVRHDAVLAAGGLHIIAPSAHESRRIDNQLRGRSGRQGDPGSSRFYLSMEDALMRIFASDRVSGMMRKLGMKPGEAIEHPWVTKAIANAAXSESRNFDIRKQLLEYDDVANDQRRAIYTQRNELLDVSDVSDTINSIREDVFKATIDAYIPPQSLEEMWDILGLQERLKNDFDLEMPIAEWLDKEPELHEETLRERILAQSIEVYQRKEEVVGAEMMRHFEKGVMLQTLDSLWKEHLAAMDYLRQGIHLRGYAQKDPKQEYKRESFAMFAAMLESLKYEVISTLSKVQVRMPEEVEAMEMQRREEAERLAQMQQLSHQDDDAAVAADLAAQTGERKIGRNDPCPCGSGKKYKQCHGRL

SEQ ID NO: 72705 - protein, 192 aa, Salmonella paratyphi A
MLPDRIETGTFLVAAAISRGKILCRNAQPDTLDAVLAKLRDAGADIEVGEDWISLDMHGKRPKAVNVRTAPHPAFPTDMQAQFTLLNLVAEGTGFITETVFENRFMHVPELSRMGARAEIESNTVICHGVETLSGAQVMATDLRASASLVLAGCIAEGTTIVDRIYHIDRGYERIEDKLRALGANIERVKGE

SEQ ID NO: 72706 - protein, 185 aa, Salmonella paratyphi A
VNVIAEGKVLQLMNVNDPNITEENYMRVIYSKTARLFESAAQCSGILAGCTPEQEKGLQDYGRYLGTAFQLIDDLLDYSADGEHLGKNVGDDLNEGKPTLPLLQPMRHVRPEQSAMIRTAIEQGNGRHLLEPVLEAMTTCGSLEWTRQRAEEEADKAISALQILPDTPWREALIGLAHIAVQRDR

SEQ ID NO: 72707 - protein, 334 aa, Salmonella paratyphi A
  MISC_FEATURE (68)..(68): X=any amino acid
  MISC_FEATURE (74)..(74): X=any amino acid
SKRDILTLYLNRAPFGPLQGIGAASWAYFGKPPARLSYAVAALLAVLPQRERLRPDRWPARAEDAQEXDAVIGXADEGVLACRTVRESREEPVWLAPRQMPQLAPLFARMMLSKSRSDKIVTTLDAGLQRQLEDLARAWKGRLLHAVHLAMIVVDHTDMSVRGWVGSVDLNDDSRFGHVDMVTAIRSPEIGTQTLVYGLALDDGLIHPASLLQDVPRRTGDYRPGNFDSGFHGPVSMSGALVRSLNLPAVQVLEAYGPKRFAAKLRNVGLPLYLPAGAAPNLSLILGGAGARLDEMAAAYSAFARHGKAAKLRLQPDDPLSERPLMSPGAAWII

SEQ ID NO: 72708 - protein, 451 aa, Salmonella paratyphi A
MEKTRADGLPLPQRYGAILTIIIGISMAVLDGAIANVALPTIATDLHASPASSIWIVNAYQIAIVVSLLSLSFLGDMFGYRRIYKCGLVVFLLSSLFCALSDSLQMLTWRIAQGFGGAALMSVNTALIRLIYPQRHLGRGMGINSFIVAVSSAAGPTIAAAILSISSWKWLFLINVPLGIIALILAIRFLPANIAHDTKPRFDLPSAVMNALTFGLLITALSAFAQGQSLTLIGAELLVLVVVGFFFVRRQLSLPVPLLPIDLLRIPLFSLSIGTSICSFCAQMLAMVSLPFYLQTVLGRSEVETGLLLTPWPLATMVMAPLAGYLIERLHAGLLGALGMVIMAAGLFALVMLPGSPSDLNIIWPMILCGAGFGLFQSPNNHTIITSAPLERSGGASGMLGTARLLGQSTGAALVALMLNQFGDSGTHLSLLAAAILATLAAVVSGLRITQ

SEQ ID NO: 72709 - protein, 253 aa, Salmonella paratyphi A
  MISC_FEATURE (133)..(133): X=any amino acid
  MISC_FEATURE (201)..(201): X=any amino acid
  MISC_FEATURE (230)..(230): X=any amino acid
  MISC_FEATURE (239)..(239): X=any amino acid
SVSRLALALAFGVTLRRCSSTPPDQIPSDQTAPGTARPILSANEAKNFVAARYFASLTPNTAPWSPSPITLPAQPDFVVGPAVTRGCTHTSIQAAVDTKVVKRTNKRAVHCYMPGDYQGNVICSRAPEDLTLXGTGGKPIDGENWDASDGEMSVADWRRGMNPGGGYMPGKPAWYVFDNWPKQTAATMRVMCSAALLVREXRSGLTNRTLGNTLGGSCSGRRPYGVRLAXTVGDRVQIXTRVNMPWGSRNTLL

SEQ ID NO: 72710 - protein, 574 aa, Salmonella paratyphi A
  MISC_FEATURE (4)..(4): X=any amino acid
  MISC_FEATURE (6)..(6): X=any amino acid
EQLXPXYESSSYPNKEIFLRELISNASDAADHMTVRALSNPDLYEGDSELRVRVSFDKDKRTLTIADNGVGMNRDEVIDHLGTIAKSGTKSFLESMGSDQAKDSQLIGQFGVGFYSAFIVADKVTVRTRAAGDKPENGVFWESAGEGEYTVADITKNDRGTEITLHLREGEDEFLDDWRVRSIISKYSDHIALPVEIEKREEKDGETVISWEKINKAQALWTRNKSEIKDDEYNEFYKHIAHDFTDPLTWSHNRVEGKQEYTSLLYIPSQAPWDLWNRDHKHGLKLYVQRVFIMDDAEQFMPNYLRFVRGLIDSNDLPLNVSREILQDSTVTRNLRSALTKRVLQMLEKLAKDDAEKYQTFWKQFGLVLKEGPAEDHANQEAIAKLLRFASTHTDSSAQTVSLEDYVSRMKEGQEKIYYITADSYAAAKNSPHLELLRKKGIEVLLLSDRIDEWMMNYLTEFDGKAFQSVAKADESIEKLADEVDENAKEAEKALEPFVERVKTLLGDRVKECRLTHRLTDTPAIVTTDADEMSTQMAKLFAAAGQSCREVKYIFELNPDHVLVKRTADTEEGI

SEQ ID NO: 72711 - protein, 403 aa, Salmonella paratyphi A
  MISC_FEATURE (88)..(88): X=any amino acid
  MISC_FEATURE (89)..(89): X=any amino acid
  MISC_FEATURE (235)..(235): X=any amino acid
  MISC_FEATURE (327)..(327): X=any amino acid
FNQSKFNRATQALGQVGSNIKPFLYTAAMDKGLTLASMLNDVPISRWDAGAGSDWRPKNSPPQYAGPIRLRQGLGQSKNVVMVRAMRXXGVDYAAEYLQRFGFPAQNIVHTESLALGSASFTPMQVARGYAVMANGGFLIDPYFISKIENDQGGVIFEAKPKIACPECDIPVIYGNTQKSDVLKNTNVEEVAVSQEQQNSAVPMPELEQANQALVAQNGTQEYAPHVINTPLVFXSKSALNTNIFGEPGWMGTGWRAARDLKRRDIGGKTGTTNSSKDAWFSGYGPGVVTSVWIGFDDHRRDLGRTTASGAIKDQISGYEGGAKSAXLHWDAYMKAVLEGVPEQPLTPPPGIVTVNIDRSTGQLASGGNSREEYFIEGTQPTQQAVHEVGTPLLINGETQELF

SEQ ID NO: 72712 - protein, 107 aa, Salmonella paratyphi A
MRGLPEILVVLFIYFGSSQLLLTLSDGFTLHLGFTQIPVQMEIENFDVSPFLCGVIALSLLYAAYASQTSGALKAVPSGQWESGQALGLSKTAIFFRLVMPQMWRHA

SEQ ID NO: 72713 - protein, 518 aa, Salmonella paratyphi A
LISGRGRPTKRRKALGCRTQTFSVSKRRGESSRGFSLAQKMVGRACGVKGIRPGAYCEPKMTSVGSQDTTGPMTRDELKDLACLGFSADLVMQSFCHTAAYPKPVDVTTHHTLPDFIMNRGGVSLRPGDGVIHSWLNRMLLPDTVGTGGDSHTRFPIGISFPAGSGLVAFAAATGVMPLDMPESVLVRFKGKMQPGITLRDLVHAIPLYAIKQGLLTVEKKGKKNIFSGRILEIEGLPDLKVEQAFELTDASAERSAAGCTIKLNKEPIVEYLTSNIVLLKWMIAEGYGDRRTLERRIQGMEKWLADPQLLEADADAEYAAVIDIDLADIKEPILCAPNDPDDARLLSDVQGEKIDEVFIGSCMTNIGHFRAAGKLLDSHKGQLPTRLWVAPPTRMDAAQLTEEGYYSVFGKSGARIEIPGCSLCMGNQARVADGATVVSTSTRNFPNRLGTGANVFLASAELAAVAALIGKLPTPEEYQTYVAQVDKTAVDTYRYLNFDQLSQYTEKADGVIFQTAV

SEQ ID NO: 72714 - protein, 275 aa, Salmonella paratyphi A
  MISC_FEATURE (264)..(264): X=any amino acid
  MISC_FEATURE (265)..(265): X=any amino acid
MPSIRLADLAEQLDAELHGDGDIVITGVASMQSATTGHITFMVNPKYREHLGLCQASAVVMTQDDLPFAKSAALVVKNPYLTYARMAQILDTTPQPAQNIAPSAVIDATATLGSNVSVGANAVIESGVQLGDNVVIGAGCFVGKNSKIGAGSRLWANVTIYHDIQIGENCLIQSSTVIGADGFGYANDRGNWVKIPTTGRVIIGDRVEIGACTTIERGALDDTVIGHGVIIDNQSQIAPYVVIGEITALRSVIMAGTEDGQYCXXCAADHWHMNI

SEQ ID NO: 72715 - protein, 279 aa, Salmonella paratyphi A
  MISC_FEATURE (68)..(68): X=any amino acid
  MISC_FEATURE (131)..(131): X=any amino acid
MKLFAQGATLDLTHPHVMGILNVTPDSFSDGGAHNTLIEAVKHANLMVNAGATIIDVGGESTRQSGQXVSVGKKLNSVIPVLKAIAQRFEVWILWDTSKPEVIREAQGAGAHIINDVRSLSEPGALEAAGXPACRSLMHMQGNPKTMQEAPKYDDVFAEVNRYFIEQIARCEKAGIAKEKLLLDPGFGFGKNLSHNYTLLARLGEFHHFNLPLLVGMSRKTMVGQLLNVGPSDRLNGSLACAVIAAMQGAQIIRVHDVKETVEAMRVVEATLSAKGNKR

SEQ ID NO: 72716 - protein, 262 aa, Salmonella paratyphi A
MSNRKYFGTDGIRGRVGNAPITPDFVLKLGWAAGKVLARHGSRKIIIGKDTRISGYMLESALEAGLAAAGLSASFTGPMPTPAVAYLTRTFRAEAGIVISASHNPFYDNGIKFFSIDGTKLPDDVEEAIEAEMEKEITCVDSAELGKASRIVDAAGRYIEFCKGTFPNELSLNGLKVVVDCANATYHIAPNVLRELGATVIAIGCEPNGVNINEEVGATDVRALQARVLVEKADLGIALDGDGDRVIMVDHEGNKVDGDQIM

SEQ ID NO: 72717 - protein, 619 aa, Salmonella paratyphi A
  MISC_FEATURE (31)..(31): X=any amino acid
KFSELWLREWVNPAVDSDALANQITMAGWKXTALSAAGSFNGVVVGEVVECAQHPNAEQLRVTKVNVGGERLLDIVCGAPNCRQGLKVAVATIGAILPGDFKIKAAKLRGEPSEGMLCSFSELGISDDHSGIIELPADAPLGTDIREYLKLDDNTIEISVTPNRADCLGIIGVARDVAVLNKAPLQEPEMAPVTATISDTLPITVEAADGVHRYLGRVVKGINVNAPTPLWMKEKLRRCGIRSIDAVVDVTNYVLLELGQPMHAFDKDRIDGGIVVRMAKEGETVVLLDGSEATLNADTLVIADHHKALGIAGIFGGEHSGVNGETQNVLLECAYFNPLSITGRARRHGLHTDASHRYERGVDPALQYKAIERATRLLLDICGGDAGPIIDVSNEATLPKRATITLRRSKLDRLIGHHIADEQVSDILRRLGCEVTEGQDEWKAVAPTWRFDMEIEEDLVEEVVRVYGYNNIPDEPIQAGLIMGTHREADLSLKRVKTMLNDKGYQEVITYSFVDPKVQQLIHPGAEALLLPNPISVEMSAMRLSLWSGLLATVVYNQNRQQNRVRILKPGLRFVPDTQANLGIRQDLMLAGVICGNRYDEHWNLAKETVDFYDLKGDL

SEQ ID NO: 72718 - protein, 450 aa, Salmonella paratyphi A
MQLNDSTLFRQQAFIDGDWRDRGGDVIPVSNPANGKPLGNVPKMGAEETRDAINAANRALPAWRALTAKERANILRRWFNLMMEHQDDLARLMTLEQGKPLAEAKGEISYAASFIEWFAEEGKRIYGDTIPGHQTDKRLLVIKQPIGVTAAITPWNFPSAMITRKAGPALAARAQWVLKPASQTPFSALAVAELAQRAGIPQRFNVVTGSQAISAATDQQPAVRNCSFTARRRLAPLMDNAQKTLKKYCLELRANAPSLVFDDADLDKAVEGALASKFRNAGETCVCANRLYVQDGVYDRFAEKLNQAVNKLAVGDGLQADVAIGPLIDEKAVAKVQEHIADALEKGARVITGGEAHKLGGNFFQPTILVDVPDNAKVAKEETFGPLAPLFRFSDEADVIRQANDTEFGLAAYFYARDLSRVFRVGEALEYGIVGINTGIISNESRLSAY

SEQ ID NO: 72719 - protein, 249 aa, Salmonella paratyphi A
ITESLLVTHSSKNSIENHFDTSFELEAMLQKRVKRQLLEEVQSICPPHVTIMQVRQGLAKGLGHAVLCAHPVVGNEPVAVILPDVILDEYESDLSQDNLAENNPRFDETGNSQIMVEPVEDVTAYGVVDCKGVDWPGAKVVPIVGVVEKPKADVAPSNLAIVGRYVLSADIWALLAKTPPAPGMKIQLTDAIDMLIEKETVEAYHMKGKSHDCGNKLGYMQAFVEYGIRHNSLGAEFKAWLEEEMGIKK

SEQ ID NO: 72720 - protein, 203 aa, Salmonella paratyphi A
  MISC_FEATURE (63)..(63): X=any amino acid
MAQLYFYYSAMNAGKSTALLQSSYNYQERGMATVVYTAEIDDRFGAGKVSSRIGLSSPAKLFXQNTSLFEEIRAESAAQTIHCVLVDESQFLTRQQVYQLSEVVDKLDIPVLCYGLRTDFRGELFVGSQYLLAWSDKLVELKTICFCGRTASMVLRLDQDGRPYNEGEQVGYWRNERYVSVCRKHYKDALVEGSLTAIQERHR

SEQ ID NO: 72721 - protein, 217 aa, Salmonella paratyphi A
MSITIYTRNNCVQCHATKRAMESRGFEFEMVNVDLVPDAADTLRAQGFRQLPVVMAGDLSWSGFRPDMINRLAPDTPRGKRMSALVYFSSSSENTHRFMQRLGLPPTRIPLNERERIRVDEPYILVVPSYGGGGMAVRVRDRVIRFLNDEHNRARIQRVIAPVIAISAMPWGCAGDVIAQKYGVPWLYALSSWATQRDIDNVRRGVNEFWQQLPRSA

SEQ ID NO: 72722 - protein, 367 aa, Salmonella paratyphi A
  MISC_FEATURE (335)..(335): X=any amino acid
  MISC_FEATURE (352)..(352): X=any amino acid
  MISC_FEATURE (358)..(358): X=any amino acid
MLSSQTSSIFTVSRLNQTVRLLLEQEMGQVWISGEISNFTQPASGHWYFTLKDDTAQVRCAMFRNSNRRVTFRPQHGQQVLVRANITLYEPRGDYQVIAESMQPAGEGLLQQKYEQLKAKLQAEGLFDQQHKQPLPSPAHCVGVITSKTGAALHDILHVLKRRDPSLPVIIYPTAVQGDDAPGQIVRAIELANARGECDVLIVGRGGGSLEDLWSFNDERVARAIFASRIPVVSAVGHETDVTIADFVADLRAPTPSAAAEIVSRNQQELLRQIQSAQQRLGMAMDYYLANRSTSFTQIFHRSQQQHRQLRLARQQTALERLRQRMGFALEDQDXQSQSQQQRVSQRLSQQXIQRAFXTPSRIQQLE

SEQ ID NO: 72723 - protein, 765 aa, Salmonella paratyphi A
  MISC_FEATURE (563)..(563): X=any amino acid
  MISC_FEATURE (588)..(588): X=any amino acid
  MISC_FEATURE (600)..(600): X=any amino acid
  MISC_FEATURE (605)..(605): X=any amino acid
GTITIAEPIGIICGIVPTTNPTSTAIFKSLISLKTRNAIIFSPHPRAKEATNKAADIVLQAAIAAGAPKDLIGWIDQPSVELSNALMHHPDINLILATGGPGMVKAAYSSGKPAIGVGAGNTPVVIDETADIKRAVASVLMSKTFDNGVICASEQSVVVVDSVYDAVRERFASHGGYMLQGQELKAVQNVILKNGALNAAIVGQPAYKIAELAGFSVPETTKILIGEVTVVDESEPFAHEKLSPTLAMYRAKDFEEAVEKAEKLVAMGGIGHTSCLYTDQDNQPERVAYFGQMMKTARILINTPASQGGIGDLYNFKLAPSLTLGCGSWGGNSISENVGPKHLINKKTVAKRAENMLWHKLPKSIYFRRGSLPIALDEVITDGHKRALIVTDRFLFNNGYADQITSVLKAAGVETEVFFEVEADPTLSVVRKGAELANSFKPDVIIALGGGSPMDAAKIMWVMYEHPETHFEELALRFMDIRKRIYKFPKMGVKAKMIAVTTTSGTGSEVTPFAVVTDDATGQKYPLADYALTPDMAIVDANLVMDMPKSLCAFGGLDAVTHXLEAYVSVLASEFSDGQALQALKLLXENLAASYHEGLXTGCAXTCHSAATIAGIAFATAFSVVCHSMRTNLGSQFHIPHGLANPADLNVIRYNANDNPTKQTAFSQYDRPQHAVVTAEIADHLGLSAPGTVTAAKIEKLLAWLESIKAELGIPKSIREAGVQEADFLAHVDKLSEDAFDDQCTGANPRYPLISELKQILLDTY

SEQ ID NO: 72724 - protein, 84 aa, Salmonella paratyphi A
MTSSHHGPYDQGYTRATMAHTKRSDLARASGPHKVRRSPDWSLQLDSMKSESLVIVDQNATVNTFPGLVHTARHTMGVGCKRSR

SEQ ID NO: 72725 - protein, 297 aa, Salmonella paratyphi A
  MISC_FEATURE (139)..(139): X=any amino acid
  MISC_FEATURE (256)..(256): X=any amino acid
  MISC_FEATURE (261)..(261): X=any amino acid
MKTLVVALGGNALLQRGEALTAENQYRNIADAVPALARLARSYRLAIVHGNGPQVGLLALQNLAWKAVEPYPLDVLVAESQGMIGYMLAHRLALEPDMPPVTAVLTRIKVSADDPAFLEPEKFIGPVYSPEEQMSLEAXYGWHMKRDGKYLRRVVASPAPRQIIESAAIELLLKEGHVVICSGGGGVPVAGEGEGVEAVIDKDLAAALLADEIAADGLIILTDADAVYEHWGTPQQRAIRQASPDELAPFAKADAXMGPKXTAVRLMVKRCGKPAWIGALSRIDDTLAGRAGTCICL

SEQ ID NO: 72726 - protein, 197 aa, Salmonella paratyphi A
DAGISNDRILIKLASTAQGIRAAEQLEKEGINCNLTLLFSFAQARACAEAGVYLISPFVGRILDWYKANTDKKDYAPAEDPGVVSVTEIYEYYKQHGYETVVMGASFRNVGEILELAGCDRLTIAPALLKELAESEGAIERKLSFSGEVKARPERITEAEFLWQHHQDPMAVDKLADGIRKFAVDQEKLEKMIGDLL

SEQ ID NO: 72727 - protein, 196 aa, Salmonella paratyphi A
MNTLRIGLVSISDRASSGVYQDKGIPALEEWLASALTTPFELQTRLIPDEQAIIEQTLCELVDEMSCHLVLTTGGTGPARRDVTPDATLAIADREMPGFGEQMRQISLRFVPTAILSRQVGVIRKQALILNLPGQPKSIKETLEGVKADDGSVRVPGIFASVPYCIQLLDGPYVETAPEVVAAFRPKSARRENMSS

SEQ ID NO: 72728 - protein, 205 aa, Salmonella paratyphi A
  MISC_FEATURE (147)..(147): X=any amino acid
MALIITLYLREKNMPRLILASTSPWRRALLEKLTIPFECAAPDVDETPHAGRTPRQLVLRLAQAKAQSLAARFPNHLIIGSDQICVLDGEITGKPLTEEKARHELAKASGNIVTFYTGLALYNSASGHLQTEVEPFDVHFRHLSERXIDDYVRKEHPLHCAGSFKSEGLGIALFERLEGRDPNTLIGLPLIALCQMLRREEMNPL

SEQ ID NO: 72729 - protein, 307 aa, Salmonella paratyphi A
MAQQTPLYEQHTLCGARMVDFHGWMMPLHYGSQLDEHHAVRTDAGMFDVSHMTIVDLHGSRTREFLRYLLANDVAKLTKTGKALYSGMLNASGGVIDDLIVYYFTEDFFRLVVNSATREKDLSWITQHAEPYAIDITVRDDLSLIAVQGPNAQEKAATLFTDQQRHAVEGMKPFFGVQAGDLFIATTGYTGGAGYEIAMPNEKAADFWRALVEAGVKPCGLGARDTLRLEAGMNLYGQEMDEGISPLAANMGWTIAWEPLDRDFIGREALEMQREKGHEQLVVWVMTEKGVLRNELPCVLTDARQSQ

SEQ ID NO: 72730 - protein, 376 aa, Salmonella paratyphi A
  MISC_FEATURE (5)..(5): X=any amino acid
GSGLXMATGSRCPPAVGIDASLQLRVSAINAASEKLLTRLGVWSNIVVRRASCYHGMEVRDKDSFGRITFDDASMGYSHLGHIVENSVIHYALWQKAQQAADITLMAPAELQQVAWGENDAFLTLKDGAMLTARLVIAADGANSWLRNKADIPLTFWDYRHHALVATIRTEEPHGAVARQVFHGEGILAFLPLSDPHLCSIVWSLSPQDAERMQQSGDEAFNQALTIAFDNRLGLCRLESERQVFPLTGRYARQFAAHRLALVGDAAHTIHPLAGQGVNLGFMDAAELVDNLRRLQRQGKDIGQHLYLRRYERSRKHSAAMMLAGMQGFRDLFAGENPAKKLLRDIGLKLADTLPGVKPQLLRQAMGLNDLPQWLR

SEQ ID NO: 72731 - protein, 510 aa, Salmonella paratyphi A
  MISC_FEATURE (112)..(112): X=any amino acid
  MISC_FEATURE (215)..(215): X=any amino acid
  MISC_FEATURE (446)..(446): X=any amino acid
MKYELTATEARVIGCLLEKQVTTPEQYPLSVNGVVTACNQKTNREPVMNLTEQEVQEQLDNLVKRHFLRTVSGFGNRVTKYEQRFCNSEFGDLKLSAAEVALITTLLWRRAXTGELRSRASRMHEFSDMAEVESTLERLASREDGPYVVRLAREPGKRESRYIHLFCGDVDELSLQTSAPESASGDLQSRVEALESEVAELKQRLDSLLAHLGEXVRTLRIGIVGLGGIAQKAWLPVLTNTAGWTLQGAWSPSRDKALRICETGAIPYVDSLANLASGCDAVFVHSSTASHYAVVSELLNAGVHVCVDKPLAENLRDAERLVALAAQKKLTLMVGFNRRFAPLYRELKTRLGTAASLRMDKHRTDSVGPHDLRFTLLDDYLHVVDTALWLAGGEARLPAGTLLTSESGEMCYAEHHFSADKLQITTSMHRRAEVSVESVQAVTDGXLYDVTDMREWREDRGRVILIKPIPGWQTTLEQRGFVGCARHFIDCVQIRRFRKRGGEAIWPARR

SEQ ID NO: 72732 - protein, 294 aa, Salmonella paratyphi A
MNMKKLATLVSAVALSATVSANAMAKDTIALVISTLNNPFFVSLKDGAQKEADKLGYNLVVLDSQNNPAKELANVQDLTVRGTKILLINPTDSDAVGNAVKMANQAKIPVITLDRQATKGDVVSHIASDNVLGGKIAGDYIAKKAGEGAKVIELQGIAGTSAARERGEGFQQAVAAHKFNVLASQPADFDRTKGLNVMQNLLTAHPDVQAVFAQNDEMALALRALQTAGKADVMVVGFDGSRDGEKAVKDGKLAATIAQLPDQIGQRVEVADKVLKGEKVQAKYPVDLKLVIKQ

SEQ ID NO: 72733 - protein, 321 aa, Salmonella paratyphi A
MTTQAVSGRRYFTKAWLLEQKSLIALLVLIAIVSTLSPNFFTVNNLFNILQQTSVNAIMAVGMTLVILTSGIDLSVGSLLALTGAVAASIVGVEVNALVAVAAALALGAAIGAVTGVIVAKGRVQAFIATLVMMLLLRGVTMVYTDGSPVNTGFTDNADLFGWFGIGRPLGVPTPVWIMAIVFIAAWYMLHHTRLGRYIYALGGNEAATRLSGISVSKVKIIVYSLCGLTASLAGIIEVARLSSAHRTAGTGYELDAIAAVVLGAPALAGGKGRIVGTLIGALILGFLNNGLNLLGVSSYYQMIVKAVVILLAVLVDNKKQ

SEQ ID NO: 72734 - protein, 185 aa, Salmonella paratyphi A
  MISC_FEATURE (160)..(160): X=any amino acid
MWLLVRGVWETLAMTFVSGFFGFVIGLPVGVLLYVTRPGQIMENARLYRSLSAVVNIFRSIPFIILLVWMIPFTRIIVGTSIGLQAAIVPLTGAAAPFIARMVENALLETLAGLIEASRAMGATPLQIVRKILLPEALPGLVNAATITLITLVGYSANGXRVGAGGLGQIGYQYGYIGYNATVMN

SEQ ID NO: 72735 - protein, 314 aa, Salmonella paratyphi A
VPDMKLFAGNATPELAQRIANRLYTSLGDAPVGRFSDGEVSVQINENVRGGDIFIIQSTCAPTNDNLMELVVMVDALRRASAGRITAVIPYFGYARQDRRVRSARVPITAKVVADFLSSVGVDRVLTVDLHAEQIQGFFDVPVDNVFGSPILLEDMLQLNLDNPIVVSPDIGGVVRAPAIAKLLNDTDMAIIDKRRPRANVSQVMHIIGDVTGRDCVLVDDMIDTGGTLCKAAEALKERGLKRVFAYATHPIFSGNAANNLRNSVIDEVVSADTIPLTDEIKALPNVRTLTLSGMLAEAIRRISNEESISAMFE

SEQ ID NO: 72736 - protein, 190 aa, Salmonella paratyphi A
MIYQPDENRYHTMEYRRCGRSGVKLPAISLGLWHNFGDTTRVENSRALLQRAFDLGITHFDLANNYGPPPGSAECNFGRILQEDFLPWRDELVISTKAGYTMWDGPYGDWGSRKYLIASLDQSLKRMGLEYVDIFYHHRPDPETPLKETMKALDHLVRHGKALYVGISNYPADLARQSYRYSGGFSARLA

SEQ ID NO: 72737 - protein, 519 aa, Salmonella paratyphi A
  MISC_FEATURE (320)..(320): X=any amino acid
  MISC_FEATURE (453)..(453): X=any amino acid
  MISC_FEATURE (456)..(456): X=any amino acid
  MISC_FEATURE (492)..(492): X=any amino acid
  MISC_FEATURE (498)..(498): X=any amino acid
FKVYLIDEVHMLSRHSFNALLKTLEEPPAHVKFLLATTDPQKLPVTILSRCLQFHLKALDVEQIRHQLEHILNEEHIAHEPRALQLLSRAADGSLRDALSLTDQAIASGDGQVSTQAVSAMLGTLDDDQALSLVEAVVDANGERVMSLINEAAARGIEWEGLLVEMLSLLHRIAMVQLSPAALGSDMAAIEQRMRELARTVPPGDLQLYYQTLLIGRKELPWAPDRHWGVEMTLLRALAFHPRMPLPEPETPRQSFAPVAPTAVMTRRSAAASRPRQTSPAPLPASTSQVLAARNQLQRAQGVTKTKKSEPAAASRARRXNNSALERLASVSERVQAPRRLALETAPVKKEAYRWKATTPVVQTKEVVATQKRLKKALEHEKTPELAAKLAAEAIERDPWAAQVSQLSLPKLVEQVALNAWKEQNGNAVCLHLRSTQRHLNSSGRSKSWAQAXAIXRETTVELTIVEDDNPAVLRRWNGVQAIYEEKLAQAXVNYRGXNIQTLRRFFDAELDEESIRPI

SEQ ID NO: 72738 - protein, 109 aa, Salmonella paratyphi A
MFGKGGLGNLMKQAQQMQKKMQKMQEEIAAVEVTGESGAGLVKVTINGAHNCRRVEIDPSLLEDDKEMLEDLVAAAFNDAARSLKETQKEKMASVSSGMQLPPGFKMPF

SEQ ID NO: 72739 - protein, 201 aa, Salmonella paratyphi A
MQTSPLLTQLMEALRCLPGVGPKSAQRMAFTLLQRDRSGGQRPAQALTRAMSEIGHCADCRTFTEQDVCNICSNPRRQENGQICVVERSADIYAIEQTGQFSGRYFVLMGHLSPLDGIGPDDIGLDRLEQRLASEKISELILATNPTVEGEVTANYIAELCAEAGVEASRIPTACRLGGELEMVDGTTLSHSLRDAIKIIF

SEQ ID NO: 72740 - protein, 269 aa, Salmonella paratyphi A
MFLINGHAQDQLAVTDRATQFGDGSFTTARIVDGNICHLEAHLQRLQVACAKLRIAFSHWATLRQEMTMLATGHDSGVLKVIISRGSGGRGYSAMNCQAATRILSVSAYPAYYSQWRKQGITLTLSPIPLGRNPYLAGLKHLNRLEQVLIRSHLEQTDADEALVLDSEGWVTECCAANLFWRTGDIVFTPRLDQAGVNGIMRQFCLRQLAQSPFQVLEVQAREEAVRQADEIIICNALMPIIPIRAYHGTSYSSRTLFQFLAPFCEHPN

SEQ ID NO: 72741 - protein, 410 aa, Salmonella paratyphi A
  MISC_FEATURE (285)..(285): X=any amino acid
VSKRRVVVTGLGMLSPVGNTVESTWKALLAGQSGISLIDHFDTSAYATKFAGLVKDFNCDDIISRKEQRKMDAFIQYGIVAGVQAMQDSGLEVTEENASRIGAAIGSGIGGLGLIEENHSSLVKGGPRKISPFFVPSTIVNMVAGHLTIMYGLRGPSISIATACTSGVHNIGHAARIIAYGMADAMVAGGAEKASTPLGLGGFGARALSTRNDNPQAASRPWDKERDGFVLGDGAGMLVLEEYEHAKARGAKIYAEIVGFGMSSDAYHMTSPPENCATGALAMVXTLRDAAIEPAQIGYVNAHGTSTAGDKAETQAVKSVFGDAASRVMVSSTKSMTGHLLARQAQVESIFSILATRSGIPPTINLDNPDEGCDLDFVPHEARQVSDLEYALCNSFGFGGTNGSLIFKKI

SEQ ID NO: 72742 - protein, 78 aa, Salmonella paratyphi A; identical to SEQ ID NO: 43145

SEQ ID NO: 72743 - protein, 246 aa, Salmonella paratyphi A
  MISC_FEATURE (164)..(164): X=any amino acid
  MISC_FEATURE (221)..(221): X=any amino acid
  MISC_FEATURE (244)..(244): X=any amino acid
MRLFIAEKPSLGRAIADVLPKPHRKGDGFIECGNGQVVTWCIGHLLEQAQPDAYDSRYARWNLADLPIVPEKWQLQPRPSVTKQLNVIKRFLHQAGEIIHAGDPDREGQLLVDEVLDYLQLPAEKRHEVRRCLINDLNPQAVERAIDRLRANSDFVPLWSPRWXARANWLYGINMTRAYTIWGRNAAIQACYSWDRQTRYWGLVVGETRDLRTRRQDFFEXGAIVRPARRFTLLERARCEPIRXED

SEQ ID NO: 72744 - protein, 239 aa, Salmonella paratyphi A
MIKVLIVDDEPLARENLRILLQGQDDIEIVGECANAVEAIGAVHKLRPDVLFLDIQMPRISGLEMVGMLDPEHRPYIVFLTAFDEYAIKAFEEHAFDYLLKPIEEKRLEKTLHRLRQERSKQDVSLLPENQQALKFIPCTGHSRIYLLQMDDVAFVSSRMSGVYVTSSEGKEGFTELTLRTLESRTPLLRCHRQFLVNMAHLQEIRLEDNGQAELILRNGLTVPVSRRYLKSLKEAIGL

SEQ ID NO: 72745 - protein, 493 aa, Salmonella paratyphi A
  MISC_FEATURE (16)..(16): X=any amino acid
  MISC_FEATURE (21)..(21): X=any amino acid
  MISC_FEATURE (22)..(22): X=any amino acid
ETFVTRVKSYKVPFLXNYASXXQASLYHHEEYVDMCRGPHVPNMRFCHHFKLMKTAGAYWRGDSNNKMLQRIYGTAWADKKALNAYLQRLEEAAKRDHRKIGKQLDLYHMQEEAPGMVFWHNDGWTIFRELEVFVRSKLKEYQYQEVKGPFMMDRVLWEKTGHWDNYKDAMFTTSSENREYCIKPMNCPGHVQIFNQGLKSYRDLPLRMAEFGSCHRNEPSGALHGLMAYRGFTQDDAHIFCTEEQIRDEVNACIRMVYDMYSTFGFEKIVVKLSTRPDKRIGSDEMWDRAEADLAVALEENNIPFEYQLGEGAFYGPKIEFTLYDCLDRAWQCGTVQLDFSLPSRLSASYVGEDNERKVPVIIHRAILGSMERFIGILTEEFAGFFPTCRPVQVVVMNITDSQSEYVNELTQKLQNAGIRVKADLRNEKIGFKIREHTLRRVPYMLVCGDKEVEAAKFRCTRRGKDLGSLDVNDVIEKLQQESCSRSLQQLE

SEQ ID NO: 72746 - protein, 180 aa, Salmonella paratyphi A
IKGGKRVQTARPNRINSEISAQEVRLTGLEGEQLVIVSLREALEKTEEAGVDLVEISPNAEPPVCRIMDYGKFLYEKSKSSKEQKKKQKVIQVKEIKFRPGTDEGDYQVKLRSLIRFLEEGDKAKITLRFRGREMAHQQIGMEVLNRVKDDLQELAVVESFPTKIEGRQMIMVLAPKKKQ

SEQ ID NO: 72747 - protein, 65 aa, Salmonella paratyphi A [sequence omitted]

SEQ ID NO: 72748 - protein, 120 aa, Salmonella paratyphi A
  MISC_FEATURE (120)..(120): X=any amino acid
MARVKRGVIARARHKKILKQAKGYYGARSRVYRVAFQAVIKAGQYAYRDRRQRKRQFRQLWIARINAAARQNGISYSKFINGLKKASVEIDRKILADIAVFDKVAFTALVEKANELWHKX

SEQ ID NO: 72749 - protein, 370 aa, Salmonella paratyphi A
LTVGGASLEFFKVAIGGILAGFVVSWLYGRSLAFLSCWGGDEPATQIGPLFLLPFASYLIAEHIGVSGILARLPAGMTITRSGVMRRAAGNRLRANSTWAMLEFVFNGMVFLLLGLQLPGILESSLAAAEADPNVETWMLFTDIVLIYAALMLVRFGWLWTMKKFSLRFLKKKPMEFASWTSREILIASFAGVRGAITLAGVLSIPLLLPDGSGFPARYELVFLAAGVILFSLFVGVIMLPLLLQHLEVADHAQQLKEERIARAATAEVAIVAIQKMEERLAADTEENIDNQLLTEVSSRVIGNLRRRADGRNDVESSIQEENLERRFRLAALRSERAELYHLRATREISNETLQKLLHDLDLMEALLIE

SEQ ID NO: 72750 - protein, 783 aa, Salmonella paratyphi A
  MISC_FEATURE (137)..(137): X=any amino acid
  MISC_FEATURE (146)..(146): X=any amino acid
  MISC_FEATURE (393)..(393): X=any amino acid
GFDSPYVPGWDCHGLPIELKVEQEFGKPGEKFTAAEFRAKCREYAATQVDGQRKDFIRLGVLGDWSDPYLTMDFKTEANIIRALGRIIKNGHLHKGAKRVHWCVDCRSALAAAEVEYYDKTSPSIDVAFRASIRMRXKRSLVCRAXGPVSLVIWTTTPWTLPANRAISLAPDFDYALVQIDGQAVILAKDLVESVMQRIGAAEYTILGTVKGAELELLRFTHPFMGFDVPAILGDHVTLDAGSRYITAPGHGPDDYVIGQKYGLETANPVGADGAYLPGTYPTLDGVNVFKANDIVIELLKEKGALLHVEKMQHSYPCCWRHKTPIIFRATPQWFVSMDKEGLRQQSLKEIKGVQWIPDWGQARIESMVANRPDWCISRQRTWGVPMSLVRAXRNAELLPIERTLAAMEEVAKRVEVDGIQAWWDLDPKEILGEDADQYEKVPDTLDVWFDSGSTSYSVVDARPEFAGHAADMYLEGSDQHRGWFMSSLMISVAMKGKAPYRQYLTHGFTVDGQGRKMSKSIGNTVSPQDVMNKLGADILRLWVASTDYTGEMAVSDEILKRAADSYRRIRNTARFLLANLNGFNPATDMVKPEEMVVLDRWAVGCAKTAQQEILKAYEAYDFHEVVQRLMRFCSVEMGSFYLDIIKDRQYTAKADSVARRSCQTALYHIAEALVRWMAPIMSFTADEIWGYLLGEREKYVFTGEWYDGLFGLEENEEFNDAFWDDVRYIKDQINKELENQKANGIKSNLEAKVTLKYADDANGTIKKLKLLGEEVRFIFRGS

SEQ ID NO: 72751 - protein, 468 aa, Salmonella paratyphi A
VSTIDSPLTYSVINGKKYGLDYELAHRFANYLGVKLKVTVRQNISQLFDDLDNGNADLLAAGLVYDSARVKNYQPGPMYYSVSQQLVYRVGQYRPRSLATVNENQLTIAPGHVVVNDLQRLKETKFPDLSWKVDDKKGSTTLLEEVISGKLDYTIADSVAIGLFQRVHPELAVALDVTDEQPVTWFSRLDDNNTLSAPLLDFFNSINEDGSLARIEEKYLGHGDDFDYVDTRSFLRAVDNVLPELEPLFKKYAKEIDWRLLGRISYQESHWDPLATSPTGVRGLMMLTKNTAQSLGLTDRTDAEKSISGGARYLEDMMAKVPETVPEDERIWFALAAYNMGYAHMLDARSLTVKTKGNPDSWTDVKQRLPLLSQKPYYSKLTYGYARGHEAYAYVENIRKYQISLVGYLQEKEKQEAEAMKLAQDYPAVSPEELNKAPFPLLSFLSQSSGYLTHSPSLLFTPQKKEEK

SEQ ID NO: 72752 - protein, 348 aa, Salmonella paratyphi A
MTAPSQVLKIRRPDDWHVHLRDGDMLKTVVPYTSEIYGRAIVMPNLASPITTVDAAIAYRQRILDAVAAGHDFTPLMTCYLTDSLDADELERGFHEGVFTAAKLYPANATTNSSHGVTSVDAIMPVLERMEKLGMPLLVHGEVTHADVDIFDREARFIDTVMEPLRQRLTALKVVFEHITTKDAAQYVRDGSDNLAATITPQHLMFNRNDMLVGGIRPHLYCLPILKRNIHQQALRDLVAVGFTRAFLGTDSAPHSRHRKETRCGCAGCFNAPSALGSYAPCFEEMNALATLKAFCSLNGPQFYGLPVNTGWVELVRDEQQIPENIALADDSLVPFLAGETVRWSVKK

SEQ ID NO: 72753 - protein, 186 aa, Salmonella paratyphi A
MKKFFFAAALVVSGLLVGCNQLTQYTISEQEINQALEKRNNFSKDIGLPGIADAHIVLTNLASQIGREEPNKVTLTGDARLDMNSLFGSQKATMKLKLKALPVFDKEKGAIYLQEMEVVDATVTPEKMQSVLQTLLPYLNQSLRSYFNQRPAYVLREDSSKGEALAKKLAKGIEVKPGEIVIPFTN

SEQ ID NO: 72754 - protein, 303 aa, Salmonella paratyphi A
  MISC_FEATURE (18)..(18): X=any amino acid
MIKQGTLKRIVGRAGVGXHTGREVTLTVYAAAAQTGSCYSRTDLNPPGRFPADAKSVRDTMLCTCLVNEHDVRISTVEHLNAALASLGIDNIVIEVNAPEIPIMDGSAAPFVYLLLDAGIDELNCAKKFVRIKETVRVEDGDKWAEFRPYNGFTLDFTIDFTIRRIDSSSQLRDEFSADAFMRQISRARLRFYADIEYLQSRGLLLGGSFDCAIVVDDYRVLNEDGLRFEDEFVRHKMLDAIGDLFMCGHNIIGAFTAYKSGHALNNKLLQAVLAKQEAWEFVTFQDDAELPLAFKAPSTVLA

SEQ ID NO: 72755 - protein, 485 aa, Salmonella paratyphi A
TLWINGDWITGQGERRRKTNPVSAEILWQGNDANAAQVAEACQAARAAFPRWARQPFTARQAIVQKFAALLEAHKADLTEVIARETGKPRWEAATEVTAMINKIAISIKAYHARTGEQKSELVDGAATLRHRPHGVLAVFGPYNFPGHLPNGHIVSALLAGNTLIFKPSELTPWTGETVIKLWERAGLPAGVLNLVQGGRETGQALSSLDDLDGLLFTGSASTGYQLHRQLSGQPEKILALEMGGNNPLIIEDVANIDAAVHLTLQSAFITAGQRCTCARRLLVKQGAQGDAFLARLVDVAGRLQPGRWDDDPQSFIGGLISAQAAQHVMEAWRQREALGGRTLLASRKVKEGTSLVTPGIIELTGVADVPDEEVFGPLLNVWRYAHFDEAIRLANNTRFGLSCGLVSTDRAQFEQLLLEARAGIVNWNKPLTGAASTAPFGGVGASGNHRPSAWYAADYCAWPMASLESPELTLPATLSPGLDF

SEQ ID NO: 72756 - protein, 269 aa, Salmonella paratyphi A
MTVNVVVTDMDGTFLDDAKQYDRVRFMAQYQELKKRNIEFVVASGNQYYQLISFFPELKDEISFVAENGALVYEHGKQLFHGELTRHESRIVIGELLKDKQLNFVACGLKSAYVSKNAPETFVALMAKHYHRLQPVNDYHDIDDILFKFSLNLPDEQIPLVIDKLHVSLDGIMKPVTSGFGFIDLIIPGLHKANGISRLLKRWNRSPQNVVAIGDSGNDAEMLKMAHYSFAMGNAADNIKALSRYHTDDNNHQGALNVIQAVLDGTDPF

SEQ ID NO: 72757 - protein, 334 aa, Salmonella paratyphi A
  MISC_FEATURE (286)..(286): X=any amino acid
QGSMMATMLDVLAMAGVSKATVSRVLNGTGQVKESTRQKVFTAMQALDYRPNLLARSLANRTNNSIGLVVSTFDGFYFGSLLRRRSRQAELHNKQLIVTDGHDTPEREQKAVQMLADRQCDAIILYTRYMDELAILSLIDATEMPLVIINRNVTQARDRAIFFEQETAAFQAVEYLITQGHRDIACITLPVHTPTGTSRVAGYRKALEKYGIPWQPAKVKYGDYTLTRGYDAAGNYLEEGVTFSALFACNDDTALGAAKALRQAGLRIPQDVSLFGFDDAPGDLAXAGAFTVYLPIEDMIATAIDQAVRLANSEPVAPIPPFTGTLILRESVSA

SEQ ID NO: 72758 - protein, 451 aa, Salmonella paratyphi A
LDRLEELYEQSVNALREAIADYVDNGTLPDPHARLNGLFVYPSLSVSWDGATPNPPKTRAFGRFTHPGCYTTTVTRPALFRAYLLEQLNLVYHDYGAHIAVEASHHEIPYPYVIDGSALTLDRSMSAGLTRHFPTTELAQIGDETADGLFHPGEFYPLSHFDARRVDFSLARLRHYTGTPVEHFQPFVLFTNYTRYVDEFVRWGCSQILDPDSPYIALSCAGGIWITAETEAPEEAISDLAWKKHQMPAWHLVTADGQGITLVNIGVGPSNAKTICDHLAVLRPDVWLMIGHCGGLRESQAIGDYVLAHAYLRDDHVLDAVLPPDIPIPSIAEVQRALYDATKAVSGMPGEEVKQRLRTGTVVTTDDRNWELRYSASALRFNLSRAVAIDMESATIAAQGYRVRYGTLLCVSDKPLHGEIKLPGQANRFYEGAISEHLQIGIRAIDLLRAE

SEQ ID NO: 72759 - protein, 216 aa, Salmonella paratyphi A
  MISC_FEATURE (64)..(64): X=any amino acid
  MISC_FEATURE (68)..(68): X=any amino acid
  MISC_FEATURE (69)..(69): X=any amino acid
  MISC_FEATURE (78)..(78): X=any amino acid
LPEASDTAIDDGRTARSLDAVAGLGADMHGCSDGAVAAGATNPAGENCLPDVESEFCLGHAAAXENLXXTGSAPPLVXRRINYQRHYHSGECGIMGVMWGLISVAIASLAQLSLGFAMMRLPSIAHPLAFISGLGAFNAATLALFAGLAGYLVSVFCWQKTLHMLALSKAYALLSLSYVLVWVASMLLPGLQGAFSLKAMLGVLCIMAGVMLIFLP

SEQ ID NO: 72760 - protein, 367 aa, Salmonella paratyphi A
  MISC_FEATURE (172)..(172): X=any amino acid
MTMLRGWITMIVMLTTINAQAACSWPAWEQFKKDYISQQGRVIDPGDARKITTSEGQSYAMFFALAANDRPAFAQLFNWTQNNLAQGSLREHLPAWLWGQKDPDTWSVLDSNSASDAIIWMAWSLLERGRLWKETRYTEVGTALLKRIAREEVVNVPGLGSMLLPGKIGFAXESWRFNPSYLPPQLSQYFSRFAQRGSTLRETNLRLLLETAPKGFSPDWVRYESKQGWAVESEKTLISSYDAIRVYLWAGMMHDGDPQKARLLARFKPMATLTMKNGVPPEKVDVVSGNAQGTGPVGFSAALLPFLQNRDAQAVQRQRSQTIFPGSDAYYNYVLTLFGQGWDQHRFRFTVKGELLPDWGQECVSSR

SEQ ID NO: 72761 - protein, 169 aa, Salmonella paratyphi A
LSLGMALTPLAGAATSPQRQLLEQVRLGEATHREDLVRQSLYRLELIDPNDPQVIAARFRYLLRQGDSDGAQKLLDRAAQLAPESTAYQSSRTAMLLSTPQGRQSLQEARLLATTGHTEQAIASYDKLFKGYPPEGELAVEYWTTVAKLPARRHEAINQLQKINAVSPG

SEQ ID NO: 72762 - protein, 274 aa, Salmonella paratyphi A
IRITLILFFSAVGWTILASLIENRLASDIHGRPLPSARTRTLLTLFRNALAVIISTITIMIVLSEIGVNIAPLLAGAGALGLAISFGSQTLVKDIITGVFIQFENGMNTGDLVTIGPLTGTVERMSIRSVGVRQDTGAYHIIPWSSITTFANFVRSIGSVVANYDVDRHEDADKANQALKDAVTALMETEDIRRLIIGEPTFAGIVGLTNTAFTLRVSFTRLPLKQWTVRFALDSQVKKHFDLANVRAPVQTYQVLPALLAPAADSLPPREPTI

SEQ ID NO: 72763 - protein, 669 aa, Salmonella paratyphi A
DEMLPVSPQPSETVLANTACREPEDPRYKDLIDKFVILRWVNRRIPIVGDEHADMEKGTGCVKITPAHDFNDYEVGKRHALPMINILTFDGDIRESAEVFDTKGEESNVYSSEIPAEFQKLERFAARKAIVAAVDALGLLEEIKPHDLTVPYGDRGGVVIEPMLTDQWYVRADVLAKPAVEAVENGDIQFVPKQYENMYFSWMRDIQDWCISRQLWWGHRIPAWYGNDGNVYVGRTEDEVRQENNLGADVQLRQDEDVLDTWFSSALWTFSTLGWPENTDALRQFHPTSVMVSGFDIIFFWIARMIMMTMHFIKDENGKPQVPFHTVYMTGLIRDDEGQKMSKSKGNVIDPLDMVDGISLPELLEKRTGNMMQPQMAEKIRKRTEKQFPERIEPHAPTPCAFTLAALARPGRDINWDMKRLEGYRNFCNKLWNASRFVLMNTEEQDCGFNGGEMTLSLADRWILAEFNQTVKAYREALDNFRFDIAAGILYEFTWNQFCDWYLELTKPVMTGGSESELRGTRHTLVTVLEGLLRLAHPIIPFITETIWQRVKVICGITADTIMLQPFPEYNAAQVDEAALADTEWLKQAIVAVRNIRAEMNIAPGKPLELLLRGCSEEAVRRVNDNRSFLLNLARLESITVLPADDKGPVSVTKIIDGAELLIPMAGLI

SEQ ID NO: 72764 - protein, 459 aa, Salmonella paratyphi A
  MISC_FEATURE (412)..(412): X=any amino acid
  MISC_FEATURE (455)..(455): X=any amino acid
MLKIFNTLTRQKEEFKPIHAGEVGMYVCGITVYDLCHIGHGRTFVAFDVVARYLRFLGYKLKYVRNITDIDDKIIKRANENGESFVALVDRMIAEMHQDFDALNILRPDSEPRATHHIQEIIELTRTLIEKGHAYVADNGDVMFDVPTDPTYGQLSRQDLEQLQAGAAVDVVDVKRNPMDFVLWKMSKEGEPSWPSPWGEGRPGWHIECSAMNCKQLGNHFDIHGGGSDLMFPHHENEIAQSTCAHDGEYVNYWMHSGMVMVDREKMSKSLGNFFTVRDVLKYYDAETVRYFLMSGHYRSQLNYSEENLKQARASLERLYTALRGTDKSAAPAAAITCEARFVEAMNDDFNTPEAYSVLFDMAREVNRLKGEDMTAANAWRLHLRKISGVLGLLEQRPDVFLQSGARASRWXSAEIEALIQQRLDARKAKDWAAADGADSVSQRCGMMLEDGAQXSAGD

SEQ ID NO: 72765 - protein, 303 aa, Salmonella paratyphi A
MQKFDTRTFQGLILTLQDYWARQGCTIVQPLDMEVGAGTSHPMTCLRALGPEPMATAYVQPSRRPTDGRYGENPNRLQHYYQFQVVIKPSPENIQELYLGSLKELGMDPTIHDIRFVEDNWENPTLGAWGLGWEVWLNGMEVTQFTYFQQVGGLECKPVTGEITYGLERLAMYIQGVDSVYDLVWSDGPLGKTTYGDVFHQNEVEQSTYNFEYADVDFLFTCFEQYEKEAQQLLALENPLPLPAYERILKAAHSFNLLDARKAISVTERQRYILRIRTLTKAVAEAYYASVEAPAFPMCNKDK

SEQ ID NO: 72766 - protein, 330 aa, Salmonella paratyphi A
MQPKINWIDNLRGIACLMVVMIHTTTWYITNAHSVSPLNWDIANVLNSASRVSVPLFFMISGYLFFGERAQPRHFLRIALCLIFYSVVALAYISLFTSINVELSLKNVLQKPVFYHLWFFFAITVIYLVSPLIQVKNVSGKMLLMLMVVIGIIANPNTVPQKIGGVEWLPINLYISGDTFYYILYGILGRALGMMETQKPSLTLICAALFIIAVFVISRGTLHELRWRGNFADTWYLYCGPMVFICAVSLFTVVKNKLNARTLPGLGLISRHSLGIYGFHALIIHALRTNGLELKRWPPLDIVWVFAATVTGSLLLSMLLQRIDKRKWVS

SEQ ID NO: 72767 - protein, 103 aa, Salmonella paratyphi A
MKRPDYRTLQALDAVIRERGFERAAQKLCITQSAVSQRIKQLENMFGQPLLVRTVPPRPTEQGQKLLALLRQVELLEEEWLGDEQTGSTPLLVSLAVNADSLA

SEQ ID NO: 72768 - protein, 348 aa, Salmonella paratyphi A
  MISC_FEATURE (7)..(7): X=any amino acid
  MISC_FEATURE (116)..(116): X=any amino acid
  MISC_FEATURE (139)..(139): X=any amino acid
  MISC_FEATURE (171)..(171): X=any amino acid
MRTTVYXTQWIDMKVLVTGATSGLGRNAVEFLRNKGISVRATGRNEAMGKLLEKMGAEFVHADLTELVSSQAKVMLAGIDTLWHCSSFTSPWGTQQAFDLANVRATRRLGEWAVAXGLRNFIHISSPSLYFDYHHHRDXQEDFRPHRFANEFARSKAAAGEVINLLAQQPXTHFTVLRPQACFGPHDKVFIPRLAHMMHHYGSVLLPHGGSALVDMTTMKNAIHAMCWPASAAAIHLPSGRAYNITNGENRTLRSIVQKLIDELTIDCRIRSVPYPMLDMIARSMERFGKKSAKEPPLTHYGVSKLNFDFTLDTTRAQDELGYQPIVTLDEGIERTAPGCAITGNLPR

SEQ ID NO: 72769 - protein, 447 aa, Salmonella paratyphi A
MDQTCSLESFLNHVQKRDPHQTEFAQAVREVMTTLWPFLEQNPRYRHMSLLERLVEPERVIQFRVVWLDDKNQVQVNRAWRVQFNSAIGPYKGGMRFHPSVNLSILKFLGFEQTFKNALTTLPMGGGKGGSDFDPKGKSEGEVMRFCQALMTELYRHLGPDTDVPAGDIGVGGREVGFMAGMMRKLSNNSACVFTGKGLSFGGSLIRPEATGYGLVYFTEAMLKRHGLGFEGMRVAVSGSGNVAQYAIEKAMAFGARVVTASDSSGTVVDESGFTPEKLARLCEIKASRDGRVADYAREFGLTYLEGQQPWSVPVDIALPCATQNELDVDAARILIANGVKAVAEGANMPTTIEATDLFLEAGVLFAPGKAANAGGVATSGLEMAQNAARLSWKAEKVDARLHHIMLDIHHACVEYGGDNKHTNYVQGANIAGFVKVADAMLGQGVI

SEQ ID NO: 72770 - protein, 156 aa, Salmonella paratyphi A
GHGFDVHAFGGEGPIIIGGVRIPYEKGLLAHSDGDVALHALTDALLGAAALGDIGKLFPDTDPAFKGADSRELLREAWRRIQAKGYTLGNVDVTIIAQAPKMLPHIPQMRVFIAEDLGCHMDDVNVKATTTEKLGFTGRGEGIACEALALLMKAAK

SEQ ID NO: 72771 - protein, 234 aa, Salmonella paratyphi A
  MISC_FEATURE (179)..(179): X=any amino acid
MAATLLDVCAVVPAAGFGRRMQTECPKQYLSIGNKTILEHSVHALLADPRVTRVVIAISPGVHRFAQAPLAKSPQITVVDGGNERADSVLAGLQAVAKAQWVLGHDAARALFHQDDLARLLAISENSRVGISSPSPVRDTMKRGEPGKTAIAHTVERADLWHALTPQFFPRELLHDCLXRALNEGAIITDEASALEYCGFHPALVEGRADNIKVTRPEDLALAEFYLTRTIHQE

SEQ ID NO: 72772 - protein, 350 aa, Salmonella paratyphi A
RHEENRMKQQTNRNRRWVLASRPHGAPQMDNFRLEEDDVATPGEGQVLLRTVFLSLDPYMRGRMSDEPSYAPPVEPGCVMVGGTVSRVVASNHPDYRPDEWVLSYNGWQDYDISDGEGLVKLGDNPQHPSWSLGVLGMPGFTAYMGLLDIGQPKEGETLVVAAATGPVGATVGQIGKLKGCRVVGIAGGAEKCRHATDVLGFDLCLDHHADNFPQQLAQACPQGIDIYYENVGGKVFDAVLPLLNTSARIPLCGLVSGYNATTLPDGPDRLPLLMATLLKKRIRLQGFIINQDYGHRIHEFQQEMGRWIKEGKIHYREQITDGLENAPEAFIGLLAGKNFGKVVIRLADD

SEQ ID NO: 72773 - protein, 459 aa, Salmonella paratyphi A
RVDPPKKPLKLRKIEFVEIYEPFSEGQAKAQADRCLSCGNPYCEWKCPVHNYIPNWLKLANEGRIFEAAELSHQTNTLPEVCGRVCPQDRLCEGSCTLHDEFGAVTIGNIERYINDKAFEMGWRPDMTGVRQTDKRVAIIGAGPAGLACADVLTRNGVKAVVFDRHPEIGGLLTFGIPAFKLEKEVMTRRREIFTGMGIEFKLNTEVGRDVQLEDLLKDYDAVFLGVGTYQSMRGGLENEDADGVFDALPFLIANTKQIMGFGETSDEPYVSMEGKRVVVLGGGDTAMDCVRTSIRQGATHVTCAYRRDEENMPGSRREVKNAREEGVEFQFNVQPLGIEVNANGKVSGVKMVRTEMGEPDAKGRRRAEIVAGSEHVVPADAVVMAFGFRPHSMEWLAKHSVELDSQGRIIAPERSDNAFQTSNPKIFRGDIVRGSDLVVTAIAEGRKAADGIMNYLEV

SEQ ID NO: 72774 - protein, 291 aa, Salmonella paratyphi A
  MISC_FEATURE (39)..(39): X=any amino acid
  MISC_FEATURE (106)..(106): X=any amino acid
  MISC_FEATURE (107)..(107): X=any amino acid
QVNIDGTIVIGEGNIDEAPMLYIGEKVGTGHGDAVDIAXDPIEGTRMTAMGQANRWGVLAVGDKGCFLNAPDMYMEKLIVGPGAKGAIDLNLPLADNLRNIAYALXXTLGDLTVTILAKPRHDEVIAEMAKLGVRVFAIPDGDVAASILTCMPDSEVDVLYGIGGAQKAWVSAAVIRALDGDMQGRLLARHDVKGDSEENRRIGEQELARCKAMGIEAGKALCLGDMARSDNVIFSATGITKGDLLEGISRKGHIATTETLLIRGKSRTIRRIQSIHYLDRKDPDVQAHIL

SEQ ID NO: 72775 - protein, 373 aa, Salmonella paratyphi A
  MISC_FEATURE (187)..(187): X=any amino acid
IATRNLRGRTIHLRYPIGTYGSIAMTDIAQLLGKDADSLLQHRCMTIPSDQLYLPGKDYVDRVMIDNNRPPAVLRNMQTLYNTGRLAGTGYLSILPVDQGVEHSAGASFAANPRYFDPKNIVELAIEAGCNCVASTYGVLASVSRRYAPIPFLVKLNHNETLSYPTEYDQTLYASVEQAFNMGAVAXAATIYFGSEQSRRQIEEISAAFERAHELGMVTVLWAYLRNSSFKKDGVDYHVSADLTGQANHLAATIGADIVKQKMAENNGGYKAVNFGYTDDRVYSKLTSDNPIDLVRYQLANCYMGRAGLINSGGADGGDTDLGDAVRTAMINKRAGGMGLILGRKAFKKSMADGVKLINAVQDVYLDSKVTIA

SEQ ID NO: 72776 - protein, 298 aa, Salmonella paratyphi A
MANFPASLLILNGKSADNQPLREAITLLRDEGIQIHVRVTWEKGDAQYVDEARRLGVETVIAGAEDGTINEVSTALIQIRDGVAPALGLLPLGPPNDFATSAGIPEALDKALKLAIAETRMEIDMARVNDKTCFINMATGGFGTRITTETPEKLKAALGGVSYLIHGLMRMDTLTPDRCEIRGENFHWQGDALVIGIGNGRQAGGGQQLCPTALVNDGLLQLRIFTGEELLPALFSTLTQSDDNPNIIDGASAWFDIHAPHEITFNLDGEPLSGQEFHIEVLPGALRCRLPPDCPLLR

SEQ ID NO: 72777 - protein, 151 aa, Salmonella paratyphi A
MTTNTHTLQIEEILELLPHRFPFLLVDRVLDFEEGRFLRAVKNVSVNEPFFQGHFPGKPILPGVLILEAMAQATGILAFKSVGKLEPGELYYFAGIDEARFKRPVVPGDQMIMEVTFEKTRRGLTRFKGVALVDGKVVCEATMMCARSREA

SEQ ID NO: 72778 - protein, 152 aa, Salmonella paratyphi A
MAAQRPLTIALVAGETSGDILGAGLIRALKARVPNARFVGVAGPRMQAEGCEAWYEMEELAVMGIVEVLGRLRRLLHIRADLTRRFTELKPDVFVGIDAPDFNITLEGNLKKQGIKTIHYVSPSVWAWRQKRVFKIGRSTHMVLAFLPFEKA

SEQ ID NO: 72779 - protein, 356 aa, Salmonella paratyphi A
AFLENVDIFNLWLRNEHRHVSLTHLPRGMILMNALTAVKANTDDLAQRHTGFTLAPSAQSPRLLALTFTADTTRQFLHQVAQWPVQALEYKSFLRFKIGKILDDLCGNQLQPLLIKTLLNRAQGAALISAEGIDDVAQAEEMVKLATAVAHLIGRSNYDAMSGQYYARFVVKNVDNSDSYLRQPHRVMELHNDGTYVEEVTDYVLMMKIDEQNMEGGNSLLLHLDDWEHLESFFTHPLARRVMRWARRPSKNVSHDVWHPVFDVDQQGRPVMRYIDQFVQPKDFEEGVWLSELSDALETSQNILSVPVPVGKFLLINNLFWLHGRDRFTPHPDLRRELMRQRGYFAYAASHYQTHQ

SEQ ID NO: 72780 - protein, 285 aa, Salmonella paratyphi A
VKADNPFDLLLPAAMAKVAEEAGVYKATKHPLKTFYLAITAGVFILIASVFYITATTGTGAMPYGMAKLIGGICFSLGLILCVICGADLFTSTVLIVVLKASGRITWGQLAKNWLNVYFGNLIGALLFVLLMWLSGEYMTANGQWGLNVLQTADHKMHHTFIEAVCLGILANLMVCLAVWMSYSGRSLMDKAFIMVLPVAMFVTSGFEHSIANMFMIPMGIVIRDFATPEFWTAVGSSPESFSHLTVMSFITDNLIPVTIGNIIGGGLLVGLTYWVIYLRGNEHH

SEQ ID NO: 72781 - protein, 230 aa, Salmonella paratyphi A
MSMVETAPSKIQVRDLNFYYGKFHALKNINLDIAKNQVTAFIGPSGCGKSTLLRTFNKMYSLYPEQRAEGEILLDGDNILTNTQDIALLRAKVGMVFQKPTPFPMSIYDNIAFGVRLFEKLSRADMDERVQWALTKAALWNETKDKLHQSGYSLSGGQQQRLCIARGIAIRPEVLLLDEPCSALDPISTGRIEELITELKQDYTVVIVTHNMQQAARCSDGDPLESTSGS

SEQ ID NO: 72782 - protein, 71 aa, Salmonella paratyphi A
LDSLFLDEGFGTLDRETWTPRWMVDALNASGKTIGVISHVEAMKERIPVQIKVKKINGLGYSKLDKAFAVE

SEQ ID NO: 72783 - protein, 560 aa, Salmonella paratyphi A
MRTSQYLLSTLKETPADAEVISHQLMLRAGMIRKLASGLYTWLPTGLRVLKKVENIVREEMNNAGAIEVSMPVVQPADLWQESGRWEQYGPELLRFVDRGERPFVLGPTHEEVITDLVRNELSSYKQLPLNFFQIQTKFRDEVRPRFGVMRSREFLMKDAYSFHTSQESLQETYDAMYAAYSRIFSRMGLDFRAVQAITGSIGATPRHEFQVLAKAAEDDIVFSDVSDYAANIELAELTPAKPAQRRRREMTLVDTPNAKTIAELVEQFNLPIEKTVKTLLVKAVKDSKSPLVALLVRGDHELNEVKAEKLPHVASPLTFATEEEIRAVINAGPGSLGPVNMPIPVIIDRTVAAMSDFAAGANIDGKHYFGINWDRDVATPVVADIRNVVAGDPSPDGQGTLLIKRGIEVGHIFQLGTKYSEALKASVQGEDGRNQILTMGCYGIGVTRVVAAAIEQNFDERGIVWPDALHLSRSAILPMNMHKSFRVQELAKSCTKLRAQGIEVLMDDRKEARADVCRMELIGIPHTIVIGDRNLDNDDIEYKYRRSGEKSLIKTGDIV

SEQ ID NO: 72784 - protein, 258 aa, Salmonella paratyphi A
  MISC_FEATURE (14)..(14): X=any amino acid
ISVAVLPNAPHARXMATKAHNSGHEVLIHLPMAPLSKQPLEKDTLRPDMSSDEIERIIREAVNNVPYAVGLNNHMGSAMTSSLFGMQKVMQALEHYNLYFLDSMTIGNSQAMRAASGTGVKVIKRKVFLDDTQNEADIRRQFNRAIELARRNGFIAIGHPHPATVRVLQQMVYLPADIPLVRPGSLLNEPQVDTSRPGVTPQKIDAPPYSLLRGVKMCKPKKPLQPVYATAFFSVIGETLRQSSVIVWFQHQWQGWGK

SEQ ID NO: 72785 - protein, 343 aa, Salmonella paratyphi A
MKNSKTKVSIIVPLYNAGADFNACMASLIAQTWSALEIIIVNDGSTDHSVEIAKHYAEHYPHVRLLHQANAGASVARNLGLQAATGDYVAFVDADDLVYPKMYETLMTMALNDDLDVAQCNADWCVRKTGHAWQSIPTDRLRSTGVLSGPDWLRMALASRRWTHVVWMGVYRRALIIDNNITFVPGLHHQDILWSTEVMFNATRVRYTEQSLYKYFLHDNSVSRLQRQGNKNLNYQRHYIKITRLLEKLNRDYARRIPIYPEFRQQITWEALRVCHAVRKEPDILTRQRMIAEIFTSGMYRRMMANVCSAKAAYQTLLWSSRLWQWRDKTLSHRRMARKALNL

SEQ ID NO: 72786 - protein, 281 aa, Salmonella paratyphi A
  MISC_FEATURE (103)..(103): X=any amino acid
  MISC_FEATURE (256)..(256): X=any amino acid
EEVHRLREKSVELTRKIFADLGHWQVAQLARHPQRPYTLDYVRLAFDEFDELAGDRAMLDDKAIVGGIGVWKGRPVMIIGHQKGRETKEKIRRNFGMPAAGRXRKALRLMEMAERFNMPIITFIDTPGAYPGVGAEERGQSEAIARNLREMSRLNVPVICTVIGEAAPAAALAIGVGDNVICCIQHPIPLSSPEGCASILWKSADKAPLAAEAMGIIAPALKELKLIDSIIPEPLGVTVIRKRWRACLKRSCWKIXPDLDVLSTDDLKNRRYQRLMSYGYA

SEQ ID NO: 72787 - protein, 46 aa, Salmonella paratyphi A
MQVLNSLRNAKQRHPDCQIVKRKGRLYVICKTNPRFKAVQGRKKRR

SEQ ID NO: 72788 - protein, 86 aa, Salmonella paratyphi A
MKPDIHPVYRTVVFHDTSANEYVKVGSTIKTEREIELGGVTYPYVTIDVSSKSHPFYTGRQKTFDSESSAARFQKRFGHFIGAKRG

SEQ ID NO: 72789 - protein, 269 aa, Salmonella paratyphi A
MPELPEVETSRRGIEPHLVGATILHAHIRNGRLRWPVSDEIYRLSDTPVLSVQRRAKYLLLELPDGWIIIHLGMSGSLRILSEALPAEKHDHVDLVMSNGKILRYTDPRRFGAWLWTKELEGHNVLAHLGPEPLSDEFNGEYLQQKCAKKKTAIKPWLMDNKLVVGVGNIYASESLFAAGIHPDPLASSLSTEECDLLARVIKAVSVRSIEQGGTTLKDFLQSDGKPGYFAQELQVYGRKGEPCRVCGTPIVATKTHQRATFYCRHCQK

SEQ ID NO: 72790 - protein, 55 aa, Salmonella paratyphi A [sequence omitted]

SEQ ID NO: 72791 - protein, 78 aa, Salmonella paratyphi A
MSRVCQVTGKRPVTGNNRSHALNATKRRFLPNLHSHRFWVESEKRFVTLRVSAKGMRIIDKKGIETVLSELRARGEKY

SEQ ID NO: 72792 - protein, 215 aa, Salmonella paratyphi A
LLPREKMLRSGIASLSDVELVALFLRHARRGKDVMTLAKEILQHFGSLYGLLSADFAQFRGVNGIGLAKFAQLKGIAELARRYYSVRMNEESALLSPEMTREFLQSQLTGEEREIFLVIFLDVQHRVLQHSRLFSGTLNHVEVHPREIVREAIKLNASAVILAHNHPSGCAEPSKADKLITERVIKCCQFMDIRVLDHLIIGRGEYVSFAERGWI

SEQ ID NO: 72793 - protein, 459 aa, Salmonella paratyphi A
GKLPEGWVTTHLSEICSKPQYGYTTKSSSMGDVKFLRTTDITKGAVDWSSVPYCMDAPEDVSKYQLQDRDIVISRAGSVGFSFLVQNPPSQVVFASYLIRFKPVNYFSEYYLKRFLESSDYWNQLSLMSAGNAVQNVNAQKLSTLTVPIPPIAEQKIIAEKLDTLLAQVDSTKARLEQIPQILKRFRQAVLAAAVSGLLIGSNKRNHHPLCSEWQWPDLPSTWSVHKYSELVDSRLGKMLDKAKNFGSATKYLGNINVRWFSFDLENLQDILISDIERRELSLKLGDVLICEGGEPGRCAIWSEPQDIPVIFQKALHRARVKDKIIPEWLVYNLKNDSNNISLSQLFTGTTIKHLTGKALANYPIRVPPLEEQHEIVRRVEQLFAWADTIEKQVNNALNRVNSLTQSILAKAFRGELTAQWRAENPSLISGENSAAALLEKIKAERAASGGKKTSRKKA

SEQ ID NO: 72794 - protein, 263 aa, Salmonella paratyphi A
MFLVDSHCHLDGLDYQSLHKDVDDVLAKAAARDVKFCLAVATTLPGYRHMRELVGKRDNVVFSCGVHPLNQDEVYDVEELRLLAAEDDVVAMGEAGLDYFYTPETKIRQQASFIHHIQIGRELHKPVIVHTRDARADTLAILREEKVTDCGGVLHCFTEDRETAGNLLDLGFYISFSGIVTFRNAEQLRDAARYVPLDRLLVETDSPYLAPVRIRGKENQPAWVRDVAEYMAVLKGVAVETGADHTITFARCSYDASRLSSIR

SEQ ID NO: 72795 - protein, 334 aa, Salmonella paratyphi A
  MISC_FEATURE (200)..(200): X=any amino acid
MKWYPWLRPAYEKLVESYQAGRGHHALLIQALPGMGDEALCYALSRYLLCQQPEGHKSCGHCRGCQLMQAGTHPDYYTLTPDKGKSSLGVDAVREVSEKLYEHSRLGGAKVVWIAEAALLTDAAPNALLKTLEEPPEQTWFFLASPEPARLLATLRSRCRLHHLAPPSESYAMSWLSREVTASQEALLTALLPERGVARXPLALLQSERWAQREALCQALMDSLHTGDWYAVLTALNHEQAPARLHWLATLLVDALKRQHGASYLTNVDADAVVAALAGPLSPARIQAILNDVCHCRDQLLHVTGLNRELVLTDLILRIEHYLQPGTLLPVPHL

SEQ ID NO: 72796 - protein, 202 aa, Salmonella paratyphi A
IEGLEGAGKTTARDVVVETLEQLGIRNMIFTREPGGTQLAEKLRSLVLDIRSVGDEVITDKAEVLMFYAARVQLVETVIKPAAQGIWVIGDRHDLSTQAYQGGGRGIDQTMLATLRDAVLGDFRPDLTLYLDVTPEVGLKRGRGAGDLDRIEQESFDFFNRTRARYLELAAQDSRIRTIDATQPLDAVMRTFAATVTKWVQE

SEQ ID NO: 72797 - protein, 138 aa, Salmonella paratyphi A
MFMTWEYALIGLVVGIIIGAVAMRFGNRKLRQQQALQYELEKNKAELEEYREELVSHFARSAELLDTMAHDYRQLYQHMAKSSSSLLPEMSAESNPFRSRLAESEASNDQAPVQMPRDYSEGASGLLRSAKARLIARR

SEQ ID NO: 72798 - protein, 455 aa, Salmonella paratyphi A
  MISC_FEATURE (308)..(308): X=any amino acid
MKKHTQLLSALALSVGLTLSAPFPALASIPGQVPGQATLPSLAPMLEKVLPAVVSVKVEGTATQSQKVPEEFKKFFGEDLPDQPSQPFEGLGSGVIIDAAKGYVLTNNHVINQAQKISIQLNDGREFDAKLIGGDDQSDIALLQIQNPSKLTQIAIADSDKLRVGDFAVAVGNPFGLGQTATSGIISALGRSGLNLEGLENFIQTDASINRGNSGGALLNLNGELIGINTAILAPGGGSIGIGFAIPSNMAQTLAQQLIQFGEIKRGLLGIKGTEMTADIAKAFKLNVQRGAFVSEVLPNSGSAKAGXKSGDVIISLNGKPLNSFAELRSRIATTEPGTKVKLGLLRDGKPLEVEVTLDSNTSSSASAEMIAPALQGATLSDGQLKDGTKGVKVDSVEKSSPAAQAGLQKDDVIIGVNRDRISSIAEMRKVMAANRSIIALQVVRGTRTIYLLLR

SEQ ID NO: 72799 - protein, 286 aa, Salmonella paratyphi A
KMISTIQKKESAMVAPVPTKRGRKPAATTAPVTGQVQSLTRGLKLLEWIAESNGSVALTELAQQAGLPNSTTHRLLTTMQQQGFVRQVGELGHWAVGAHAFIVGSSFLQSRNLLAIVHPILRKLMEDSGETVNLAVLDQSDHQAIIIDQVQCTQLMRMSAPIGASLPMHASGAGKAFLSQLSEEQVTSLLHRKGLHAYTHATLVSPLHLKDDLAQTRKRGYSFDDEEHALGLRCVASCIYDEHREPFAALSISGPCSRITDDRVTELGAMVIKAAKEVTLAYGGTR

SEQ ID NO: 72800 - protein, 314 aa, Salmonella paratyphi A
QSNLCLEIALPTKPLNDVNDENGEIALCTLSAFNLGAIKTLDELEELAILAVRALDALLDYQDYPIPAAKRGAMGRRTLGIGVINFAYWLAKNGKRYSDAAPINLTHKTFEAIQYYLLKASNELAKEQGACPWFNETTYAKGILPIDTYKKDLDAIVNEPLHYDWEQLRESIKTHGLRNSTLSALMPSETSSQISNATNGIERRGYVSIKASKDGILRQVVPDYEHLKDAYELLWEMPNNDGYLQLVGIMQKFIDQSISANTNYDPSRFPSGKVPMQQLLKDLLTAYKFGVKTLYYQNTRDGAEDAQDDLAPSI

SEQ ID NO: 72801 - protein, 532 aa, Salmonella paratyphi A
MRIPFTRWPDEFARRYREKGYWQDVPLTDILTRHADSDKMAVIEGERAFSYRQLNQAADYLACSLTPSGIKPGETALVQLGNVPELYITFFALLKLGYPVLALFSHQRTELNAYAMQIAPTLVIADRQHTLFAGEDFLNTFVAEHRSVRVVLLRNDDGDHSLDAAMRQAAEDFTATPSPADEVAYFQLSGGTTGTPKLIPRTHNDYYYSVRRSNEICGFNEETRFLCAIPAAHNYAMSSPGALGVFLAKGTVVLATDPSATLCFPLIEKHQINATALVRPVSLWLQAIQEWGRQCAWGSLRLLQVGGARLSATLAARIPAEIGCQLQQVFGMAEGLVNYTRLDDSPERVINTQGRPMCPDDEVWVADATGIHCRRGEIGRLMTRGPYTFRGYFNSPQHNASAFDANGFYCSGDLISIDQDGYITVHGREKDQINRGGEKIAAEEIENLLLRHPAVIHAALVSMEDELLGEKSCAYLVVKEPLRAVQVRRFLREQAGGILNYPDRVECVASLPLTPVGKVDKKQLRQRLASRS

SEQ ID NO: 72802 - protein, 118 aa, Salmonella paratyphi A
MVVWQHDSYVTQGEGMSKTLLQIHFNFSGPFGEEMTQQLVGLAESINEEPGFIWKIWTESEKNQQAGGIYLFESEETAQAYIKKHTARLKNLGVDEVTFKLFGVNDALTKINHGNLCR

SEQ ID NO: 72803 - protein, 425 aa, Salmonella paratyphi A
  MISC_FEATURE (96)..(96): X=any amino acid
  MISC_FEATURE (197)..(197): X=any amino acid
  MISC_FEATURE (210)..(210): X=any amino acid
  MISC_FEATURE (213)..(213): X=any amino acid
  MISC_FEATURE (333)..(333): X=any amino acid
TLTLNTSLLSSCRILAAFSGGLDSTVLLHQLVLWRERHPDVTLRAIHIHHGLSPHADSWVRHCETVCEPWQVPLVVERMTLADNGLGIEAHAREAXRAFAQTLLPGEVLATAQHLDDQCETFLLALKRGSGPAGLSAMGERSPFAGTLLLRPLLRETRKTLEQWAVRHGLCWIEDESNQDDAYDRNFLRLRPFPLLXTALQHFPCGGSPXRDXCAEQERLLDELLASDLTDCITAEGTLRLSPLMLMSDVRRAAILRRWLAMRNAPMPSRDALERIWQEVRGARDASPCLRFGDHEIRRYQSQLWWIKSVAGQHETTVVWPVWQTPLALLPAXGTVQLVPGGELRRPREEESVSIRFKAPGVLHIVGRNGGRKLKKIWQEQGIPPWRRDTTPLLFYGETLIAAAGVFVTREGAAEDKEGVSLVWH

SEQ ID NO: 72804 - protein, 129 aa, Salmonella paratyphi A
MLGLKQVHHIAIIATDYAVSKAFYCDILGFDLLSEVWREERDSWKGDLALNGQYVIELFSFPFPPARPSRPEACGLRHLAFSVENVENAVAHLEKHQVKCEPIRIDPYTGKRFTFFNDPDGLPLELYEQ

SEQ ID NO: 72805 - protein, 488 aa, Salmonella paratyphi A
FIRQEDRPWSEKEYDRLHTFTQIVGVVAEQIQNRVNNNVDYDLLCRERDNFRILVAITNAVLSRLDIDELVSEVAKEIHHYFNIDAISIVLRSHRKNKLNIYSTHYLDEHHPAHEQSEVDEAGTLTERVFKSKEMLLINLNERDPLAPYERMLFDTWGNQIQTLCLLPLMSGKTMLGVLKLAQCEEKVFTTANLKLLRQIAERVAIAVDNALAYQEIHRLKERLVDENLALTEQLNNVDSEFGEIIGRSEAMYNVLKQVEMVGRSDSTVLILGETGTGKELIARAIHNLSGRSGRRMVKMNCAAMPAGLLESDLFGHERGAFTGATRSGIGRFELADKSSLFLDEVGDMPLELQPKLLRVLQEQEFERLGSNKLIQTDVRLIAATNRDLEKMVADREFRNDLYYRLNVFPIQLPPLRERPEDIPLLVKAFTFKIAPEMGRNIDSIPAETCARLSSMEWPGNVPSWRNVVERPCLTRGNVLQRRCRILP

SEQ ID NO: 72806 - protein, 330 aa, Salmonella paratyphi A
  MISC_FEATURE (166)..(166): X=any amino acid
  MISC_FEATURE (284)..(284): X=any amino acid
HEATLQQPLLRAIDLKKHYPVKKGIFSPERLVKALDGVSFNLERGKTLAVVGESGCGKSTLGRLLTMIESPTGGELYYQGQDLLKHDPHAQKLRRQKIQIVFQNPYVSLNPRKKVGQILEEPLLINTSLSKAQRREKALAMMAKVGLKTEHYDRYPHMFSGGQRQXSAIARGLMLDPDVVIADEPVSALDVSCAPQVLNLMMDLQQDMGLSYVFISHDLSVVEHIADEVMVMYLGRCVEKGTKEQIFNNPRHPYTQALLSATPRLNPDDRRERIKLTGELRVRXNPPPAALQRPAAARRFGPCTQLQPQLKEYDGQLVACFAVDQDENPQ

SEQ ID NO: 72807 - protein, 1150 aa, Salmonella paratyphi A
  MISC_FEATURE (462)..(462): X=any amino acid
  MISC_FEATURE (874)..(874): X=any amino acid
HLRVHSDYSMIDGLARPGPLLKKAASLGMPALAITDFTNLCGLVKFYGAGHGAAIKPIVGADFNVHNELLGDELTHLTVLAANNTGYQNLTLLISKAYQRGYGAAGPIIERDWLVELKDGLILLSGGRMGDVGRCLYAGNQALVEECVAFYEAHFPDRYFLELIRTGRQDEETYLHAAVELAEARGLPVVATNDVRFLESDDFDAHEIRVAIHDGFTLDDPKRPRNYSPQQYMRSEEEMCELFSDIPEALENTVEIAKRCNVTVRLGEYFLPQFPTGDMTTEDYLVKKSKEGLEERLAFLFPDEEERKKRRPEYDERLDIELQVINQMGFPGYFLIVMEFIQWSKDNGVPVGPGRGSGAGSLVAYALKITDLDPLEFDLLFERFLNPERVSMPDFDVDFCMEKRDQVIEHVADMYGRDAVSQIITFGTMAAKAVIRDVGRVLGHPYGFVDRISKLVPPDPGXTLAKAFEAEPQLPEIYEADEEVKALIDMARKLEGVTRNAGKHAGGVVIAPTKITDFAPLYCDEEGKHPVTQFDKSDVEYAGLVKFDFLGLRTLTIINWALEMINKRRAKNGEPPLDIAAIPLDDKKSFDMLQRSETTAVFQLESRGMKDLIKRLQPDCFEDMIALVALFVPARLQSGMVDNFIDRKHGREELSYPDVQWQHESLKPVLEPTTASFCYQEQVMQIAQVLSGYTLGGADMLRRAMGKKKPEEMAKQRSVFEEGAKKNGIDGELAMKIFDLVEKFAGYGFNKSHSAAYALVSYQTLWLKAHYPAEFMGGNDRRMDNTEKVVGLVDECWRMGLKILPPDINSGLYHFHVNDEGEIVYGIGAIKGVGEGPIEAIIDARNQGGYFRELFDLCARTDTKRLNRRCWKSXSCSGAFDRLGPHRRADELIGDALKAADQHAKAEAIGQADMFGVLAEEPEQIEQSYASCQPWPEQVVLDGERETFGAVPDGPPINQYLKEIERYVGGVRLKDMHPTERGKVTTAAGLVISARVMVTKRGNRIGICTLDDRSGRLEVMLFTDALDKYQQLLEKDRILIVSGQVSFDDFSGGLKMTAREVMDIDEAREKYARGLAISLTDRQIDDQLLNRLRQSLEPHRSGTIPVHLYYQRADRVRTVVLAQRWRVSPSDRLLNDLRGLIGSEQVELEF

SEQ ID NO: 72808 - protein, 276 aa, Salmonella paratyphi A
FCSSDEFTSKTMIKWPWKAQEITQNEDWPWDDALAIPLLVNLTAQEQARLIALAERFLQQKRLVALQGFELDSLKSARIALIFCLPILELGIEWLDGFHEVLIYPAPFVVDDEWEDDIGLVHSQRVVQSGQSWQQGPIILNWLDIQDSFDASGFNLIIHEVAHKLDMRNGDRASGIPFIPLRDVAGWEHDLHAAMNNIQDEIDLVGESAASIDAYAATDPAECFAVLSEYFFSAPELFAPRFPALMQRFCAVYRQDPSQRLRVSADEGDYGEESEH

SEQ ID NO: 72809 - protein, 638 aa, Salmonella paratyphi A
  MISC_FEATURE (275)..(275): X=any amino acid
  MISC_FEATURE (613)..(613): X=any amino acid
MGKIIGIDLGTTNSCVAIMDGTQARVLENAEGDRTTPSIIAYTQDGETLVGQPAKRQAVTNPQNTLFAIKRLIGRRFQDEEVQRDVSIMPYKIIGADNGDAWLDVKGQKMAPPQISAEVLKKMKKTAEDYLGEPVTEAVITVPAYFNDAQRQATKDAGRIAGLEVKRIINEPTAAALAYGLDKEVGNRTIAVYDLGGGTFDISIIEIDEVDGEKTFEVLATNGDTHLGGEDFDTRLINYLVDEFKKDQGIDLRNDPLAMQRLKEAAEKAKIELSXAQQTDVNLPYITADATGPKHMNIKVTRAKLESLVEDLVNRSIEPLKVALQDAGLSVSDINDVILVGGQTRMPMVQKKVAEFFGKEPRKDVNPDEAVAIGARVQGGVLTGDVKDVLLLDVTPLSLGIETMGGVMTPLITKNTTIPTKHSQVFSTAEDNQSAVTIHVLQGERKRASDNKSLGQFNLDGINPAPRVCPQIEVTFDIDADGILHVSAKDKNSGKEQKITIKASSGLNEEEIQKWFRDAEATLRSDRKFEELVQTRNQVTICLHSTRKQVEEAGDKLPADDKTAIESALSALETALKGEDKAAIEAKMQELAQVSQKLMEIAQQQHAQQQARXPDASANNAKDDRRCRREFEEVKDKK

SEQ ID NO: 72810 - protein, 275 aa, Salmonella paratyphi A
  MISC_FEATURE (38)..(38): X=any amino acid
  MISC_FEATURE (109)..(109): X=any amino acid
  MISC_FEATURE (122)..(122): X=any amino acid
  MISC_FEATURE (123)..(123): X=any amino acid
  MISC_FEATURE (189)..(189): X=any amino acid
AKITHVPSMYLSELPGKNHGCRQAAIDGHIEIGKRCAXMGVDTIIVFDTHCLVNSAYHINCADHFQGVYTSNELPHFIRDMTYDYDGNSELATLIVDEQSKLGVRAKTXHLSLKLEYGTLVXXRYMNSDKHFKVVSISAFCTVHDFADSRRLVRRFLKAIEKYDGTVAVFASGSLSHRFIDDQRGKRGXNSYTREFDHQMDERVVKLWREGKFKEFCTMLPEYADYCYGEGNMHDTVMLLGMLGWDKYDGKVEFITDLFASSGTGQVNAVFPLPA

SEQ ID NO: 72811 - protein, 123 aa, Salmonella paratyphi A
HFIAECTENIREQADLPSLFSKVNEALAATGIFPIGGIRSRAHWLDTWQMADGKHDYAFVHMTLKIGAGRTGEPSEVGEMLFGLIKAHFADLMENRYLALSFEIAELHPTLNYKQNNVHALFK

SEQ ID NO: 72812 - protein, 416 aa, Salmonella paratyphi A
MAWNQPGNNGQDRDPWGSSKPGSNSGGNGNKGGRDQGPPDLDDIFRKLSKKLGGFGGGKGTGSGGGSSSQGPRPQLGGRIVAIAAAAVVIIWAASGFYTIKEAERGVVTRFGKFSHLVEPGLNWKPTFIDDVTPVNVEAVRELAASGVMLTSDENVVRVEMNVQYRVTDPQKYLFSVTSPDDSLRQATDRRCAGVIGKYTMDRILTEGRTVIRSDTQRELEETIKPYNMGITLLDVNFQAARPPEEVKAAFDDAIAARENEQQYIREAEAYTNEVQPRANGQAQRILEEARAYKTQTILEAQGEVARFAKILPEYKAAPQITERLYIETMEKVLSHTRKVLVNDKSGNLMVLPLDQMLKGGNARRAKSDNSATNLLRLPPSTSLTQRRKHTSSSIRAIIMELRRANRRKRLTAQGD

SEQ ID NO: 72813 - protein, 253 aa, Salmonella paratyphi A
MRICSNEPCIVLLTEKDTWLRVNGKEPISLKANHMAILACENNVIDISSLNSVLVIQVSRNNIKDYLQFLNKDLSHLPVWQRNADPLLTATCLTPDIFRVAARYSAMETPDEIVSERTRALLFTVYSRFLDHKKFIFLLMHMLRSRISDSVYHIIQSDIHKDWNLSAVASCLCLSPSLLKKKLKNENTSYSQIITTCRMRYAVNQLLMDGKNISQVSQLCGYNSTSYFISVFKEFYGMTPLHYVSQHRERSAA

SEQ ID NO: 72814 - protein, 429 aa, Salmonella paratyphi A
  MISC_FEATURE (50)..(50): X=any amino acid
  MISC_FEATURE (286)..(286): X=any amino acid
  MISC_FEATURE (303)..(303): X=any amino acid
NADENPIKPLSRGYPDITSAAKKDEMPLSPIRQRRTQTVCDTPLRTYDNXCRSHVRKTYINARDFFQHWAEIQFESGYPYIMFEDTVNRANPIAGRINMSNLCSEILQVNSASRYDDNLDYTHIGHDISCNLGSLNIAHVMDSPDIGRTVETAIRGLTAVSDMSHIRSVPSIAAGNAASHAIGLGQMNLHGYLAREGIAYGSPEALDFTNLYFYTITWHAVHTSMRLARERQKTFAGFAQSRMPVGDYFTQYLQDDWQPKTAKVRALFARSGITLPTREMWLKLRXDVMRYGIYNQNLQAVRXPVSISYINHATSSIHPIVAKIEIRKEGKTGRVYYPAPFMTNENLDMYQDAYDIGPEKIIDTYAEATRHVDQGLSLTLFFPDTATTRDINKAQIYAWRKGIKSLYYIRLRSWRWKGTEIEGCVSCAL

SEQ ID NO: 72815 - protein, 319 aa, Salmonella paratyphi A
  MISC_FEATURE (124)..(124): X=any amino acid
MKLSRISAINWNKIQDDKDLEVWNRLTSNFWLPEKVPLSNDIPAWQTLSAAEQQLTIRVYTGLTLLDTIQNIAGAPSLMADAITPHEEAVLSNISFMEAVHARSYSSIFSTLCQTKEVDAAYAXSEENPPLQVKAQIILAHYVSDEPLKKKIASVFLESFLFYSGFWLPMYFSSRGKLTNTADLIRLIIRDEAVHGYYIGYKYQIALQKLSAIEREELKLFALDLLMELYDNEIRYTEALYAETGWVNDVKAFLCYNANKALMNLGYEALFPPEMADVNPAILAALSPNADENHDFFSGSGSSYVMGKTVETEDEDWNF

SEQ ID NO: 72816 - protein, 215 aa, Salmonella paratyphi A
MLQVYLVRHGETQWNAERRIQGQSDSPLTAKGEQQAMQVGERARSLGITHIISSDLGRTKRTAEIIAQACGCDITFDSRLRELDMGVLEKRQIDSLTEEEEGWRRQLVNGTQDGRIPGGESMQELSDRVHAALASCLELPQGSRPLLVSHGIALGCLVSTILGLPAWAERRLRLRNCSISRIDYQESQWLASGWVVETAGTVSHLDAPALDELQR

SEQ ID NO: 72817 - protein, 299 aa, Salmonella paratyphi A
MFSGLLIILVPLIVGYLIPLRHKAALQLINRLLSWIVYLILFFMGISLAFLDNLASNLVAIFHYSAVSITIILLCNIAALLWLERILPWRHHHQQEKLPSRIAMALESLQLCGVVVLGFVIGLSGLSVLQHATEASEYTLIFLLFLVGIQLRNSGMTLKQIVLNRRGMMVAVVVVASSLLGGVINAFILDLPLKTALAMASGFGWYSLSGILLTESFGPVIGSAAFFNDLARELLAIMLIPGLVRRSRSTALGLCGATSMDFTLPVLQRSGGVEIVPAAIVHGFILSLLVPLLMAFFSA

SEQ ID NO: 72818 - protein, 210 aa, Salmonella paratyphi A
AVAANKRSVMTLFSGPTDIYSHQVRIVLAEKGVSFEIEHVEKDNPPQDLIDLNPNQSVPTLVDRELTLWESRIIMEYLDERFPHPPLMPVYPVARGESRLYMHRIEKDWYTLMNVIVNGSASEADSARKQLREELTAIAPVFGQKPYFLSDEFSLVDCYLAPLLWRLPQLGIEFSGAGAKELKGYMTRVFERDSFLASLTEAEREMRLGR

SEQ ID NO: 72819 - protein, 130 aa, Salmonella paratyphi A
MAENQYYGTGRRKSSAARVFIKPGNGKIVINQRSLEQYFGRETARMVVRQPLELVDMVEKLDLYITVKGGGISGQAGAIRHGITRALMEYDESLRGELRKAGFVTRDARQVERKKVGLRKARRRPQFSKR

SEQ ID NO: 72820 - protein, 142 aa, Salmonella paratyphi A [sequence omitted]

SEQ ID NO: 72821 - protein, 244 aa, Salmonella paratyphi A
MSFEGKIALVTGASRGIGRAIAETLVARGAKVIGTATSENGAKNISDYLGANGKGLMLNVTDPASIESVLENIRAEFGEVDILVNNAGITRDNLLMRMKDDEWNDIIETNLASVFRLSKAVMRAMMKKRCGRIITIGSVVGTMGNAGQANYPAAKAGLIGFSKSLAREVASRGITVNVVAPGFIETDMTRALSDDQRAGILAQVPAGASGGAQEIASAVAFLASDEASYITGETLHVNGGMYMV

SEQ ID NO: 72822 - protein, 308 aa, Salmonella paratyphi A
MTQFAFVFPGQGSQSVGMLAEMAANYPIVEETFAEASAALGYDLWALTQQGPAEELNKTWQTQPALLTASVALWRVWQQQGGKMPALMAGHSLGEYSALVCAGVINFADAVRLVEMRGKFMQEAVPEGTGGMSAIIGLDDASIAKACEESAEGQVVSPVNFNSPGQVVIAGHKEAVERAGAACKAAGAKRAALPVSVPSHCALMKPAADKLAVELAKITFSAPTVPVVNNVDVKCETDVAAIRDALVRQLYNPVQWTKSVKFIAAQGVEHLYEVGPGKVLTGLTKRIVDTLTASALNEPAALSAALTQ

SEQ ID NO: 72823 - protein, 317 aa, Salmonella paratyphi A
MYTKIIGTGSYLPEQVRTNADLEKMVETSDEWIVTRTGIRERHIAAPDETVATMGFTAANRAIEMAGIDKDQIGLIVVATTSATHAFPSAACQIQSMLGIKGCPAFDVAAACAGFTYALSIADQYVKSGAVKHALVVGSDVLARTCDPGDRGTIIIFGDGAGAAVLSASEEPGIISTHLHADGRYGELLTLPNADRVNPDNPIYLTMAGNEVFKVAVTELAHIVDETLAANNLDRSELDWLVPHQANLRIISATAKKLGMSMDNVVVTLDRHGNTSAASVPCALDEAVRDGRIKAGQLVLLEASGGGFTWGPALIRF

SEQ ID NO: 72824 - protein, 157 aa, Salmonella paratyphi A
MDKFRVQGPTTLQGEVTISGAKNAALPILFAALLAEEPVEIQNVPKLKDVDTSMKLLSQLGAKVERNGSVHIDASQVNVFCAPYDLVKTMRASIWALGPLVARFGQGQVSLPGGCTIGARPVDLHITGLEQLGATIKLEEGYVKGLVEGRLKGAHIV

SEQ ID NO: 72825 - protein, 249 aa, Salmonella paratyphi A
MAVADLNTFAAAAVCRTQSAVSQQMQRLEQLVGKELFARHGRNKLLTEHGIQLLGYARKILRFNDEACSSLMFSNLQGVLTIGASDESADTILPFLLSRISSVYPKLALDVRVKRNAYMVDMVKSQEVDLVVTTNQPHSLDCLNLRTSPTHWYCAAEYVLQRGEPVPLVLLDDPSPFRDMVLETLNAAGIPWRLAYVASTLPAVRAAVKAGLGVTARPVEMMSPDLRVLGAADGLPPLPGGSSGGRAGS

SEQ ID NO: 72826 - protein, 543 aa, Salmonella paratyphi A
MSLISMHGAWLSFSDAPLLDNAELHIEDNERVCLVGRNGAGKSTLMKILNREQGLDDGRIIYEQDLIVARLQQDPPRNIAGSVYDFVAEGIEEQAEYLKRYHEISRLVMTAPSEKNLNEMARVQEQLDHHNLWQLENRINEVLAQLGLDPNAALSSLSGGWLRKAALGRALVSNPRVLLLDEPTNHLDIETIDWLEGFLKTFNGTIIFISHDRSFIRNMATRIVDLDRGKLVTYPGNYDQYLLEKEEALRVEELQNAEFDRKLAQEEVWIRQGIKARRTRNEGRVRALKAMRRERSERREVMGTAKMQVEEAARSGKIVFEMENVDYQVEGKQLVKDFSAQVQRGDKIALIGPNGCGKTTLLKLMLGQLQADSGRIHVGTKLEVAYFDQHRAELDPEKTVMDNLAEGKQEVMVNGKPRHVLGYLQDFLFHPKRAMTPVRALSGGERNRLLLARLFLKPSNLLILDEPTNDLDVETLELLEELIDGYQGTVLLVSHDRQFVDNTVTECWIFEGGGKIGRYIGGYHDARAARAASGDETASGEKK

SEQ ID NO: 72827 - protein, 468 aa, Salmonella paratyphi A
VKRPVSASLAKAFFYIVLLSILSTGSALLTLTSSLRDAEAINIAGSLRMQSYRLGYDLQSRSPQINAHRQLFQHALNSPVLQNLNAWYVPQAVKTRYARLHANWLEMNSRLQDGDIAWYQTNINNYVDQIDLFVLALQHYAERKVMLVVAISLAGGIGIFTLVFFTLRRIRQQVVRPLNQLVTASQRIEHGQFAPLPLDTSLPNELGLLAKTFSQMSSELHKLYRSLEASVEEKTHDLHEAHRRLEVLYQCSQALNTSQIDVHCFRHILQIVREHDAAWYLELTVGDNWRISEGTQSPDLPMQMLPVTMQDTVYGELHWQSPNVNASTPLLNSVSTMLGRGLYFNQAQKHFQQLLLMEERATIARELHDSLAQVLSYLRIQLTLLKRAIPEDNAGAQSIMADFSRALNDAYRQLRKLLTTFRLTLQQARFTSALHEMLEDLQSQTPAKLTLDLRLPTLALDAEMQVHL

SEQ ID NO: 72828 - protein, 244 aa, Salmonella paratyphi A
DFDACQALVKQAFDDEELKTALGLNSANSINISPLLAQICYYFEAVAQLPQGARNPLVISVPSGNFGDLTAGLLAKSLGLPVKRFIAATNINNTVPRFLHDGKWAPKATQATLSNAMDVSQPNNWPRVEELFRRKIWRLTELGYAAVDDSTTQQTMRELKAKGYISEPHAAVAYRALRDQLNPGEYGLFLGTAHPAKFKESVESILGETLALLKRSAERADLPLLSHHLPADFAALRNVNMTRQ

SEQ ID NO: 72829 - protein, 219 aa, Salmonella paratyphi A
MDDLLPDLTLAFNETFQMLSISTVLAILGGLPLGFLIFVTDRHLFWQNRFIYLVASVLVNIIRSVPFVILLVLLLPLTQLLLGNTIGPIAASVPLSVAAIAFYARLVDSALREVDKGIIEAALAFGASPMRIICTVLLPEASAGLLRGLTITLVSLIGYSAMAGIVGGGGVGDLAIRYGYYRYETEVMVVTVVALIVLVQVVQMLGDWLAKRADKRDRH

SEQ ID NO: 72830 - protein, 452 aa, Salmonella paratyphi A
  MISC_FEATURE (290)..(290): X=any amino acid
  MISC_FEATURE (355)..(355): X=any amino acid
VISLFDMFKVGIGPSSSHTVGPMKAGKQFVDDLVEKGLLDNVTRVAVDVYGSLSLTGKGHHTDIAIIMGLAGNEPATVDIDSIPGFIRDVETRERLLLAQGRHEVDFPKDDGMRFHNGNLPLHENGMQIHAWHDDTVIYSKTYYSIGGGFIVDEEHFGQEATNEVTVPYPFKSAKEMLEYCNSTGLSLSGMVMQNELALHSKKEIEEYFGHVWQTMQACIDRGMNTEGVLPGPLRYRRASALRRMLVSSDKLSNDPMNVIDWVNMFALAVNEENAQVDRVVTAPTNGACXIVLRVLAYYDHFIESVSPDIYTRYFLAAGAIARCIKMNASISGAKSAVQGEVGVACSMAAAGPCXTAGASPGTGLRCAEIGMEHNLGLTCDPVAGQVQVPCIERNAIASVKAINAARMAMRRTSPRVSLDKVIETMYETGKDMNAKYRETCAAGWLLKVQCD

SEQ ID NO: 72831 - protein, 439 aa, Salmonella paratyphi A
MQQIARSVALAFNNLPRPHRVMLGSLTVLTLAVAVWRPYVYHPESAPIVKTIELEKSEIRSLLPEASEPIDQAAQEDEAIPQDELDDKTAGEVGVHEYVVSTGDTLSSILNQYGIDMSDISRLAASDKELRNLKIGQQLSWTLTADGDLQRLTWEVSRRETRTYDRTANGFKMSSEMQQGDWVNSLLKGTVGGSFVASAKEAGLTSSEISAVIKAMQWQMDFRKLKKGDEFSVLMSREMLDGKREQSQLLGVRMRSDGKDYYAIRAADGKFYDRNGVGLAKGFLRFPTAKQFRISSNFNPRRLNPVTGRVAPHRGVDFAMPQGTPVLSVGDGEVVVAKRSGAAGYYIAIRHGRTYTTRYMHLRKLLVKPGQKVKRGDRIALSGNTGRSTGPHLHYEVWINQQAVNPLTAKLPRTEGLTGSDRREYLAQVKEVLPQLRFD

SEQ ID NO: 72832 - protein, 183 aa, Salmonella paratyphi A
RAEVMDVANAVLDGTDAVMLSAETAAGQYPSETVAAMARVCLGAEKIPSINVSKHRLDVQFDNVEEAIAMSAMYAANHLKVVTAIITMTESGRTALMTSRISSGLPIFAMSRHERTLNLTALYRGVTPVHFDSAADGVVAAHEAVNPVRDKGYLVSGDLVIVTQGDVMSTVGSTNTTRILTVE

SEQ ID NO: 72833 - protein, 137 aa, Salmonella paratyphi A
LLSFSSNGSRHPNVANVQQATELARERAPQLLVDGELQFDAAFVPEVAAQKAPDSPLQGRANVMIFPSLEAGNIGYKIAQRLGGYRAVGPLIQGLARPLHDLSRGCSVQEIIELALVAAVPRQADVSRERSLHTLVE

SEQ ID NO: 72834 - protein, 74 aa, Salmonella paratyphi A
MSQTIDLTLDGLSCGHCVKRVTDSLEQRPDVELADVTVTEAHVTGTASATALIDTIKQAEYGATLSQPKAKRLT

SEQ ID NO: 72835 - protein, 363 aa, Salmonella paratyphi A
  MISC_FEATURE (296)..(296): X=any amino acid
  MISC_FEATURE (297)..(297): X=any amino acid
  MISC_FEATURE (298)..(298): X=any amino acid
  MISC_FEATURE (303)..(303): X=any amino acid
  MISC_FEATURE (305)..(305): X=any amino acid
  MISC_FEATURE (330)..(330): X=any amino acid
GVKELRSLLGDKAMLALIVFAFTISVYSSATVLPGSLHLAPIAIADMDQSQLSNRIVNSFYRPWFLPPEMITATEMDAGLDAGRYTFAVNIPPNFQRDVLAGRQPDIQVNVDATRMSQAFTGNSYIQNIISGEVNSFVARRGDNVQPVSLEIRMRFNPNLDPAWFGGVMAIINNITMLAIVLTGSALIREREHGTVEHLLVMPVTPFEIMMAKVWSMGLVVLVVSGLSLMLMVKGVLGVREGSIPLFMLGVALSCLATISIGIFMGTSPRSMPQLGLLMILVLLPLQMLSGGSTPXXXSMPQXVXGYYATMPTTHFVSLAQAILYRGEVXVSSWPQFLTLLANRRRVLLIALLRFRKTIGTMA

SEQ ID NO: 72836 - protein, 102 aa, Salmonella paratyphi A
  MISC_FEATURE (81)..(81): X=any amino acid
VREAFVMQVNADAHEEYQRRHNPIWPELETVLKSHGAHHYAIYLDQERNLLFATREIESEERWNAVASTDVCQRWWKHMRXRYAANPDNSPVSAELKEVFYL

SEQ ID NO: 72837 - protein, 394 aa, Salmonella paratyphi A
  MISC_FEATURE (30)..(30): X=any amino acid
EAYKFRLEPTPEQSQRLRQLCGCARFVWNXVLRRQSASLVQAKSYFGFRLNRMLTVWKKMPGHIFLQDAYTDNLQQKLKDLHTAWKRCFDKKLAAKAPVWKRKNEGRDSIRFVNFEKYCRLENRRVKLPSGLGWVKFRQSQRVNGKIKNATISQLAGQWYISFQVEVETAEPNHTSTTIVGLDAGVTKLATLSDGTVYQPVNSFKASQRKLATLQRQLSRKVRFSSNWQKQKRKVQHLHSHIANIRRDYLHKVTSEISKNHAMIVIEDLKVSNMSKSAKGTAEQHGRNVKAKSGLNRSILDQGWYEMRRQLEYKQLWRGGQVLAVPPAYTSQRCACCGHTAKENRLSQSKFVCQACGYTANADVNGARNILAAGHAVLACGGMVQSGRPSKQEP

SEQ ID NO: 72838 - protein, 465 aa, Salmonella paratyphi A
  MISC_FEATURE (102)..(102): X=any amino acid
  MISC_FEATURE (445)..(445): X=any amino acid
  MISC_FEATURE (447)..(447): X=any amino acid
EFETTFADLGLKAPILEALTDLGYEKPSPIQAECIPHLLGGRDVLGMAQTGSGKTAAFSLPLLNNLDPELKPPQILVLAQTRELAYRVAEAMTDFSKHMRAXTWVALYGGQRYDVQLRALRQGPQIVVGTPGRLLDHLKRGTLDLSKLSGLVLDEADEMLRMGFIEDVETIMAQIPEGHQTALFSATMPEAIRRITRRFMKEPQEVRIQSSVTTRPDISQSYWTVWGMRKNEALVRFLEAEDFDAAIIFVRTKNATLEVAEALERSGYNSAALNGDMNQALREQTLERLKDGRLDILIATDVAARGLDVERISLVVNYDIPMDSESYVHRIGRTGRAGRAGRACCSLENRERRLLRNIERTMKLTIPEVELPNAELLGKRRLEKFAAKVQQQLESSDLDQYRALLAKIQPSAEVKSWILETLAAALLKMAQGSSADSAPDARCSXAXIPDRDDRGPRDRNDRGPR

SEQ ID NO: 72839 - protein, 429 aa, Salmonella paratyphi A
  MISC_FEATURE (282)..(282): X=any amino acid
  MISC_FEATURE (356)..(356): X=any amino acid
  MISC_FEATURE (370)..(370): X=any amino acid
AQVDVIKSETIEQLIAEDETLMLNELGEILHAIEKNVVRSRVLAGEPRIDAREKDMIRGLNVRTGVLPRTHGSALFTRGETQALVTATLGTARDAQVLDELMGERTDSFLFHYNFPPYSVGETGMVGSPKRREIGHGRLAKRGVLAVMPDMDKFPYTVRVVSEITESNGSSSMASVCGASLALMDAGVPIKAAVAGIAMGLVKEGDNYVVLSDILGDEDHLGDMDFKVAGSRDGISALQMDIKIEGITKEIMQVALNQAKGARLHILGVMEQAINARRDILXICAGIHTIKISTDKIKDVIGRGGSVIRALTEETGITIELEMTYLRSRDDVKTKYAIVVIERSRRDRVGLLQCKXPYRDFARLLASAAXKKVWVTSLKSRDKRVEKVTDYLQMGQEVPVKVLEVDRQGRVRLSIKEATEQSQPAAVAE

SEQ ID NO: 72840 - protein, 823 aa, Salmonella paratyphi A
  MISC_FEATURE (459)..(459): X=any amino acid
  MISC_FEATURE (467)..(467): X=any amino acid
  MISC_FEATURE (498)..(498): X=any amino acid
  MISC_FEATURE (526)..(526): X=any amino acid
MLQCGAKKVNPVEPFVTSLPVAAVLPELLTALKTAPQVLLSAPTGAGKSTWLPLQLLQQGPVAGKILLLEPRRLAARNVPQRLAEALNEKPGETVGYRMRAQSCVGPRTRLEVVTEGVLTRMIQRDPELRGVGLVILDEFHERSLQADLALALLLDIQQGLRDDLRLLIMSATLDNDRLCQRLPDAPTIVSEGRAFPVERRYQPLATHLRFDEAIAMATAELLRNENGSLLLFLPGVGEIQRVHEHLASRVGSDVLLCPLYGALSLEAQRKAIVPAPAGMRKVVLATNLAETSLTIEGIRLVVDTAQDAWADSTARTGLTRLVTQRISQASMTRGGAPGRLAPGICLHLLAKEQAERAAGKAIREILHSDLSGLLMEVLQWGCHDPASLFWLDRPPEVNLQAARRLLLVLGALEGERLSARGQKMAAMGNDPRLAAMLVNAGEGIAPATAPCSRPSLEXTAAAVRIXAVVFSRDSRAGSSVASQLLKRLQVRNGEPEXHGLLCRCLPERFKPTNPRRRGQEGAISXPMVWARMLDVDDALGRHEWLNAALLLQGSASPDARILLAQPLDIASLIQACPDLLRQSDTVEWDEAQGTLKAWRRMRIGQLTVNVQPLRSRLKRSFIRRMLNGIRDKGLSVLNWTPEAEQFRLRLHCAAKWLPEYDWPAVDEASLLATLENWLLPHMTGVQSLRSLKSLNVTQALRGLLDYPLLQRLDSELPGHYTVPTGSRITIRYHEDNPPALAVRMQEMFGEASTPTLAQGRVPLVLELLSPAQRPLQITRDLSAFWQGAYREVQKEMKGRYPKHVWPDDPRYTAPTRRTKKYS

SEQ ID NO: 72841 - protein, 739 aa, Salmonella paratyphi A
  MISC_FEATURE (547)..(547): X=any amino acid
TPAPISDDACLQEQQDNMLPAICQDGKVYCYATLNISSGRFRLSEPADRETMAAELQRTNPAELLYAEDFAEMALIEGRRGLRRRPLWEFEIDTARQQLNLQFGTRDLVGFGVENASRGLCAAGCLLQYVKDTQRTSLPHIRSITMERQQDSIIMDAATRRNLEITQNLAGGVENTLAAVLDCTVTPMGSRMLKRWLHMPVRNTDILRERQQTIGALQDTVSELQPVLRQVGDLERILARLALRTAVRRDLARMRHAFQQLPELHAQLETVGSAPVQALRKKMGDFAELRDLLERAIIDAPPVLVRDGGVIAPGYHEELDEWRALADGATDYLDRLEIRERERTGLDTLKVGYNAVHGYYIQISRGQSHLAPINYVRRQTLKNAERYIIPELKEYEDKVLTSKGKAWRWEKQLYDELFDLLLPHLADLQQSPTRWRSLDVLVNLAERAWTLNYTCPTFTDKPGIRITEGRHPVVEQVLNEPFIANPLNLSPQRRMLIITGPNMGGKSTYMRQTALIALLAYIGSYVPAQNVEIGPIDRIFTRVGQGXTWASGRSTFMVEMTETANILHNATENSLVLMDEIGRGTSTYDGLSLAWAARRISRIKIKALTLFATHYFELTQLPEKMEGVANVHLDALEHGDTIAFMHSVEDGAASKSYGLAVAALGAVPKEVNKRARQKLRELESISPNAAATEVDGTQMSLLAAPEETSPAVEALENLDPDSLTPRQALEWIYRLKSLV

SEQ ID NO: 72842 - protein, 214 aa, Salmonella paratyphi A
MLTLTDGLPETMNFNTVFRWHLHFLFLILLTFRAAAADTLLILGDSLSAGYRMAASAMPSLLNDKWQNKTSVVNASISGDTSQQGLARLPALLQQHHPRWVVVELGGNDGLRGFAPAQTEQTLRKIIQTVKAADAQPLLMQIHLPANYGRRYNESFSAIYPKLAKEFDIPLLPFFMEEVYLKPQWMQDDGIHPNRDAQPFIADWMAKQLTPFLS

SEQ ID NO: 72843 - protein, 206 aa, Salmonella paratyphi A
ELSILTGVELVVKRGETIALIGESGSGKSTLLAILAGLDDGSSGEVSLVGKPLHQMDEEARAHVRAQHVGFVFQSFMLIPTLNALENVELPALVRGENSGQSKAGAKALLEQLGLGKRLDHFPAQLSGGEQAAASVARAFNGRPDVLFADEPTGNLDRQTGDKIADLLFSLNREHGTTLILVTHDPGWAARCDRRLRLVNGQLQEE

SEQ ID NO: 72844 - protein, 219 aa, Salmonella paratyphi A
MLRIIDTETCGLQGGIVEIASVDVIDGNIVNPMSHLIRPDRLITPQAMAIHRITEAMVADKPWIEDVIPLYYGSEWYVAHNASFDRRVLPELPGEWICTMKLSRRLWPGIKYSNMALYKSRKLSVQTPPGLHHHRALYDCYITAALLIDIMRTTGWTAEEMVNITGRPALLTTFPFGKYRGKAVSEVAKRDPGYLRWLFNNLDNMSPELRLTLKHYLED

SEQ ID NO: 72845 - protein, 377 aa, Salmonella paratyphi A
MSVFQSFGPSESNGRKVDYSTFLQEVNQDQVAEARINGREINVTKKDSNRYTTYIPINDPKLLDNLLTKNVKVVGEPPEEPSLLASIFISWFPMLLLIGVWIFFMRQMQGGGGKGAMSFGKSKARMLTEDQIKTTFADVAGCDEAKEEVAELVEYLREPSRFQKLGGKIPKGVLMVGPAGTGKTLLQKAIAGEAKVPFFTISGSDFVEMFVGVGASRVRDMFEQAKKAAPCIIFIDEIDAVGRQRGAGLGGGHDEREQTLNQMLVEMDGFEGNEGIIVIAATNRPDVLDPACCRPGRFDRQVVVGCRMVRGREQILKVHMRRVPLATDIDAAIIARGTPGFSGADLANLVNEAALFAARGNKRVVSMVEFEKAKDKI

SEQ ID NO: 72846 - protein, 476 aa, Salmonella paratyphi A
  MISC_FEATURE (249)..(249): X=any amino acid
  MISC_FEATURE (250)..(250): X=any amino acid
  MISC_FEATURE (253)..(253): X=any amino acid
MRFSRFIIGLTTSIAFSVQAANIDEYIKQLPAGANLALMVQKIGAPPAIDYHSQQMALPASTQKVITALAALIQLGPDFRFTTTLETKGNVDNGILKGDVIARFGGDPTLKRQDIRNMVATLKKSGVTQIDGNVLIDTSIFASHDKAPGWPWNDLTQCFKAPPAAAIVDRNCFSVSLYSAQKPNDLAFIRVASYYPVTMFSQVRTLPRGSADAQYCELDVVPGDLNRYTLTGCLPQRADPLPLAFAIQXXGQXAGAILKQELKEAEITYRGTLCAQTQVNEPGTIVASKQSAPLHDLLKIMLKKSDNIIADTVFRMIGHVRFNVPGTWRAGSDAVRQILRQQAGIDIGNTIIADGSGLSRHNLIAPATMMQVLQYIAQHDNELNFISMLPLAGYDGSLQYRAGLHQAGVDGKVSAKTGSLQGVYNLAGFITTASGQRMAFVQYLSGYAVPPADQRNRRIPLVRFESRLYKDIYQNN

SEQ ID NO: 72847 - protein, 370 aa, Salmonella paratyphi A
MKYGLIIIGSGSVGAAAGYYATRAGLKVLMTDAHMPPHQQGSHHGDTRLIRHAYGEGEKYVPLVVRAQTLWDELSTHNEEPIFVRSGVVNLGPADSAFLANVARSTQQWQLNVERLDATALMTRWPEIRVPDNYIGLFEADSGFLRSELAITTWLRLAREAGCAQLFNSPVSHIHHDDNGVTIETSEGCYHASKALISAGTWVKTLVPELPVQPVRKVFAWFKADGRYSTKNRFPAFTGEMPNGDHYYGFPAENDELKIGKHNGGQRIQAPEERKPFAAVASDGAEAFPFLRNVLPGIGGCLHGAACTYDNSPDEDFIIDTLPGHENTLVITGLSGHGFKFAPVLGEIAADFALGKTPSFDLTPFRLSRF

SEQ ID NO: 72848 - protein, 45 aa, Salmonella paratyphi A
  MISC_FEATURE (7)..(7): X=any amino acid
RGCLLRXAMRRLFHFLMNNIREHFMLYVILWSLLAVMDIVYLLFF

SEQ ID NO: 72849 - protein, 167 aa, Salmonella paratyphi A
  MISC_FEATURE (132)..(132): X=any amino acid
  MISC_FEATURE (140)..(140): X=any amino acid
  MISC_FEATURE (141)..(141): X=any amino acid
  MISC_FEATURE (163)..(163): X=any amino acid
MKKNLLGFTLASLLFTTGSAVAAEYKIDKEGQHAFVNFRIQHLGYSWLYGTFKDFDGTFTFDEKNPSAEKVNVTINTNSVDTNHAERDKHLRTREFLNVAKFPQATFTSTSVKKEGDELDITGNLTLNGVTXPVTLEATXXGQGDDPWGGNARGFEAEKNLGXGFNI

SEQ ID NO: 72850 - protein, 340 aa, Salmonella paratyphi A
  MISC_FEATURE (108)..(108): X=any amino acid
  MISC_FEATURE (286)..(286): X=any amino acid
VQLLEHYFSEQGAGQAFHRLMRVVSQNEQRSAIWDIINRMIDKPGSRSHRVILLGLFSTLLQAKGTLRLHKDARPLLLVEDPETRLHPIMLSVAWQLLNLLPLQRVSXQPTQGELLSLTPVEHVVRLVRESSRVAAWALGPGGLSAEDGRRIAFISALNRASSLFARCWLLVEGETETWVINELARQCGHHFDAEGIKVIEFAQSGLKPLVKFARRMGIEWHVLVDGDEAGKKYAATVRSLLNNDREEEREHLTALLPRIWNHFMYRQGFADVFHRVAHFRLMCRXNTRKIITKAIHRSSKPDLAIEVAMEAGRGGIDAVPPLFRKMFSRVVWLARGRAD

SEQ ID NO: 72851 - protein, 368 aa, Salmonella paratyphi A
VTSIIGNGVVLSPSALMKEMKELEDRGIPVRERLLLSEACPLILDYHVALDNAREKARGAKAIGTTGRGIGPAYEDKVARRGLRVGDLFDKETFAEKLKEVMEYHNFQLVNYYKVEAVDYQKVLDDTMAVADILTSMVVDVSDLLDQARQRGDFVMFEGAQGTLLDIDHGTYPYVTSSNTTAGGVATGSGLGPRYVDYVLGILKAYSTRVGAGPFPTELFDETGEFLCKQGNEYGATTGRRRRTGWLDTVAVRRAVQLNSLSGFCLTKLDVLDGLKEVKLCVAYRMPDGREVTTTPLAADDWKGVEPIYETMPGWSESTFGVKDRSGLPQAALNYIKRIEELTGVPIDIISTGPDRTETMILRDPFDA

SEQ ID NO: 72852 - protein, 427 aa, Salmonella paratyphi A
LKSRDIIALGFMTFALFVGAGNIIFPPMVGLQAGEHVWTAAIGFLITAVGLPVLTVVALAKVGGGVDSLSTPIGKVAGLLLATVCYLAVGRLFATPRTATVSFEVGIAPLTGDSAMPLLIYSVVYFAIVILVSLYPGKLLDTVGNFLAPLKIIALVILSVAAIVWPAGPISNALDAYQNAAFSNGFVNGYLTMDTLGAMVFGIVIVNAARSRGVTEARLLTRYTVWAGLMAGVGLTLLYLALFRLGSDSATLVDQSANGAAILHAYVQHTFGGAGSFLLAALIFIACLVTAVGLTCACAEFFAQYIPLSYRTLVFILGGFSMVVSNLGLSHLIQISIPVLTAIYPPCIALVVLSFTRSWWHNSTRIIAPAMFISLLFGILDGIKASAFGDMLPAWSQRLPLAEQGLAWLMPTVVMVILAIIWDRAAG

SEQ ID NO: 72853 - protein, 448 aa, Salmonella paratyphi A
  MISC_FEATURE (41)..(41): X=any amino acid
  MISC_FEATURE (88)..(88): X=any amino acid
LMESNNKLKRGLSTRHIRFMALGSAIGTGLFYGSADAIKMXGPSVLLAYIIGGVAAYIIMRALGEMSVHNPAASSFSRYAGKPGPLRXITGWTYCFEILIVAIADVTAFGIYMGVWFPAVPHWIWVLSVVLIICAINLMSVKVFGELEFWFSFFKVATIIIMIVAGIGIIVWGIGNGGQATGIHNLWSNGGFFSNGWLGMIMSLQMVMFAYGGIEIIGITAGEAKDPEKSIPRAINSVPMRILVFYVGTLFVIMSIYPWNQVGTNGSPFVLTFQHMGITFAASILNFVVLTASLSAINSDVFGVGRMLHGMAEQGSAPKIFAKTSRRGIPWVTVLVMTIALLFAVYLNYIMPENVFLVIASLATFATVWVWIMILLSQIAFRRRLPPEEVKALKFKVPGGVVTTIAGLIFLVFIIALIGYHPDTRISLYVGFAWIVLLLIGWIFKRRR

SEQ ID NO: 72854 - protein, 266 aa, Salmonella paratyphi A
MLNAWHLPVAPFVKQHNDKLTITLWLSGENPPSRVTLRSEFDNEEISLAMRKQRRQPQPGVTAWRATLNIALGQPCRRYSFKLLWHDRQLWFTPQGFNRFPPARLEQFAVDVPDSGPQWVADQIFYQIFPDRFARSRTREADQDRVYYHHAAGQEIVLRDWDDPLTPQAGGSTFYGGCLNGICEKLPYLKTLGVTALYLNPVFTAPSVHKYDTEDYRHVDPQFGGDRALLRGRETQAQGMRLMLDGVFNHSGDSHAWFDRHNRSTG

SEQ ID NO: 72855 - protein, 404 aa, Salmonella paratyphi A
MSPSDVPINWKRNLTVTWLGCFLTGAAFSLVMPFLPLYVEQLGVTGHSALNMWSGLVFSITFLFSAIASPFWGGLADRKGRKIMLLRSALGMAIVMLLMGMAQNIWQFLILRALLGLLGGFIPNANALIATQAPRHKSGWALGTLSTGGVSGALLGPLAGGLLADHYGLRPVFFITASVLFICFLLTFFFIRENFLPVSKKEMLHVREVVASLKNPRLVLSLFVTTLIIQVATGSIAPILTLYVRELAGNVSNIAFISGMIASVPGVAALLSAPRLGKLGDRIGPEKILIVALIISVLLLIPMSFVQTPWQLALLRFLLGAADGALLPAVQTLLVYNSTNQIAGRIFSYNQSFRDIGNVTGPLMGAAISASYGFRAVFCVTAGVVLFNAIYSWNSLRRRRLAIE

SEQ ID NO: 72856 - protein, 246 aa, Salmonella paratyphi A
MPVLHNRISNDELKAKMLAESEPRTTISFYKYFTIASPQQTRDALYQVFTALDVFGRVYLAHEGINAQISVPQSKVETFRQQLYTFDPALDGLRLNIALEDDGKSFWVLRMKVRDRIVADGIDDPTFDASNVGDYLKAADVNAMLDDPDAVFIDMRNHYEYEVGHFENALEIPADTFREQLPKAVEMLREHADKKIVMYCTGGIRCEKASAWMKHNGFNKVWHIEGGIIEYARRAREQGLPVRFIG

SEQ ID NO: 72857 - protein, 757 aa, Salmonella paratyphi A
DTSDMLYAEAWRDFKGTDWKEEINVRDFIQHNYTPYEGDESFLADATPATTALWEKVMAGIRIENATHAPVDFDTNIATTITAHDAGYIEKNLEKIVGLQTDKPLKRALHPFGGVNMIKSSFHAYGREMDADFEYTFTDLRKTHNQGVFDVYSPDMLRCRKSGVLTGLPDGYGRGRIIGDYRGVALYGIRYLVRERELQFADLQSNLERGQNLEATIRLREELAEHRRALLQMQEMAAKYGYDISRPARNAQEAVQWLYFAYLAAIKSQNGGAMSLGRTASFLDIYIERDFNAGLLTEQQAQELIDHFIMKIRMVRFCRPEFDSLFSGDPIWATEVIGGMGLDGRTLVTKNSFRYLHTLHTMGPAPEPNLTILWSEALPVAFKKYAAQVSIVTSSLQYENDDLMRTDFNSDDYAIACCVTPMVIGKQMQFFGARQLAKTLLYAINGGVDEKLKIQVGPKTAPLTDEVLDYDAVMESLDHFMDWLAVQYISALNIIHYMHDKYSYEASLMALHDRDVYRTMACGIAGLSVAADSLSAIRYAQVKPIRDENGLAIDFAIEGEYPQYGNNDERVDSIACDLVKRFMQKISVLPTYRNAVPTQSILTITSNVVYGQKTGNTPDGRRAGTPFAPGANPMHGRDRKGAVASLTSVAKLPFTYAKDGISYTFSIVPAALGKEDAVRKTNLVGLLDGYFHHEAQVEGGQHLNVNVMNREMLLDAIEHPENYPNLTIRVSGYAVRFNALTREQQQDVISRTFTQAM

SEQ ID NO: 72858 - protein, 457 aa, Salmonella paratyphi A
VAKAPKRAFVCNECGADYPRWQGQCSACQAWNTITEVRLAASPTVARNERLSGYAGSAGVSKVQKLSDISLEELPRFSTGFKEFDRVLGGGVVPGSAILIGGNPGAGKSTLLLQTLCKLAEQMKTLYVTGEESLQQVAMRAHRLGLPTANLNMLSETSIEQICLIAEEEQPKLMVIDSIQVMHMADIQSSPGSVAQVRETAAYLTRFAKTRGVAIVMVGHVTKDGSLAGPKVLEHCIDCSVLLDGDADSRFRTVRSHKNRFGAVNELGVFAMTEQGLREVSNPSAIFLSRGDEVTSGSSVMVVWEGTRPLLVEIQALVDHSMMANPRRVAVGLEQNRLAILLAVLHRHGGLQMSDQDVFVNVVGGVKVTETSADLALLLAMVSSLRDRPLPQDLVVFGEVGLAGEIRPVPSGQERISEAAKHGFRRAIVPAANVPKKPPEGMQVFGVKKLADALSVF

SEQ ID NO: 72859 - protein, 391 aa, Salmonella paratyphi A
MQKLINSVQNYAWGSKTALTELYGIANPQQQPMAELWMGAHPKNSSRITDPTGETVSLRDAIEKNKTAMLGEAVANRFGELPFLFKVLCAAQPLSIQVHPNKRNSEIGFAKENAAGIPMDAAERNYKDPNHKPELVFALTPFLAMNAFREFSDIVSLLQPVAGAHIAIAHFLQAPNAERLSQLFASLLNMQGEEKSRALAVLKAALNSQQGEPWQTIRVISEYYPDDSGLFSPLLLNVVKLNPGEAMFLFAETPHAYLQGVALEVMANSDNVLRAGLTPKYIDIPELVANVKFEPKPAGELLTAPVKSGSELDFPIPVDDFAFSLHDLALQETSIGQHSAAILFCVEGEAVLRKDEQRLVLKPGESAFIGADESPVYASARAVLARVYNKL

SEQ ID NO: 72860 - protein, 298 aa, Salmonella paratyphi A
MLDNTRLRIAIQKSGRLSDDSRELLARCGIKINLHTQRLIAMAENMPIDILRVRDDDIPGLVMDGVVDLGIIGENVLEEELLNRRAQGEDPRYLTLRRLDFGGWALSLATRLDEAWDGPAALDGKRIATSYPHLLKRYLDQKGVSFKSCLLNGSVEVARARGLADAICDLVSTGATLEANGLREVEVIYRSKACLIQRDGEMAQSKQQLIDKLLTRIQGVIQARESKYIMMHAPSERLEEVIALLPGAERPTISAGREQQAWRCTWVSSETLFWETMEKLKRLAPARILVLPIEKMME

SEQ ID NO: 72861 - protein, 200 aa, Salmonella paratyphi A
MYQVVASDLDGTLLSPDHTLSPYAKETLKLLTARGIHFVFATGRHHVDVGQIRDNLEIKSYMITSNGARVHDTDGNLVFTHNLDSDIASDLFGVVNANPDIVTNVYRDDEWFMNRHRPDEMRFFKEAVFNYSLFEPALLEPEGVSKVFFTSDTHEKLLPLEQAINARWGDRVNVSFSTLTCLEVMAGGVSIGHALEAVAQ

SEQ ID NO: 72862 - protein, 338 aa, Salmonella paratyphi A
MFQQQNDWETRENAFAAFAMGPLTDFWRHREEAEFIGVGKIPVRFVRFRNDSNDRTIVICPARIESYVKYAELAYDLFHLGFDIFIIDHRGQGRSGRMLSDPHRGHVDHFNDYVEDLAAFWQQEIEPGPWRKRYILAHSMGGRDATLFLQRHRVRCDAIALTAPMFGIVIRLPSFMVRHILDWAEGHQRIREDYAIGTGQWRRCRFGMNALTHSRQRYQRNLRFYADEPQLRVGGPTWHWVREGILAGEQVLAGASDDTTPTLLIQAEEERVVDNRTHDRFCEIRAAAGYPCEGGKPLVIKGAYHEILFEKDAMGSVALNAIVEFFNKPNLSSGNRFA

SEQ ID NO: 72863 - protein, 205 aa, Salmonella paratyphi A
  MISC_FEATURE (169)..(169): X=any amino acid
MTFEWWFAYLLTSTLLSLSPGSGAINTMTTSINHGYRGAAASIAGLQTGLGIHIVLVGVGLGTLFSRSLLAFEILKWAGAAYLIWLGIQQWRAGAIDLHTLAQTQSRGRLFKRAIFVNLTNPKSIVFLAALFPQFIMPQQPQLAQYLILGVTTIVVDMIVMTGYATLAXRTAAWIKGPKQMKALNKAFGSLFMLVGALLASARHA

SEQ ID NO: 72864 - protein, 597 aa, Salmonella paratyphi A
AEVLSLESGAKQVLQETFGYQQFRPGQEAIIDTALSGRDCLVVMPTGGGKSLCYQIPALLLDGLTVVVSPLISLMKDQVDQLLANGVAAACLNSTQSREQQLEVMGGVRTGQIRLLYIAPERLMLDNFLDHLAHWNPVLLAVDEAHCISQWGHDFRPEYAALGQLRQRFPALPFMALTATADDTTRQDIIRLLGLNDPLIQISSFDRPNIAYMLMEKFKPLDQLMRYVQEQRGKSGIIYCNSRAKVEDTARLQSRGISAAAYHAGLERLIRADVQEKFQRDDLQIVVATVAFGMGINKPNVRRRAFDIPRNIESYYQETGRGRDGLPAEPCYFYDPADMAWLRRCLEEKPAGQLQDIERHKLNAMGAFAEAQTCRRLVLLNYFGEGRQEPCGNCDICLDLPKQYDGLNDAQIALSTIGRVNQRFGMGYVVEVIRGANNQRIPRFRSDKLKVYGMGREKSHEHWVSVIRQLIHLGLVMPNTAQHSALQLTDAARPVLRGDVPLKLAVPRIVALKPRVMQKSFGGNYDRKLFAKLRNCVKLSADEENIPPYVVFNDATLIEMAEQMPVSASEMLSVNGVGMRKLERFGKEFMALIRAHV

SEQ ID NO: 72865 - protein, 411 aa, Salmonella paratyphi A
LRLKNLNSLKGEWKVDFTAEPFASNGLFAITGPTGAGKTTLLDAICLALYHETPRLNTVSQSQNDLMTRDTAECLAEVEFEVKGDGRAFWSQNRARNQPDAILQAPRVSWARCSDGKIFADKVKDKLEMIATLTGLDYGRFTVRCLLSQGQFAAFLTPKTKERAELLRSSPATEIYGQISAQVFEKHKSSPSRTGKLQAQARRVALLADEQLQQLEASLQALTDEEKRLLADQQGQQQHLHWLTRKNELHTELHARQQACTRARGARKSAPQLAALTLRNLLASCRPHWERIQEQTRAVERVRQHSDEVNARLQSAYRLRQRKSACAHRQFTQLNATGQRLKTWLAEHDGIRVWRSELAGWRALLTQQSHDRAQLSQWQQQLLSDTRQRDAYRVSRSTFQPQALAEARALH

SEQ ID NO: 72866 - protein, 407 aa, Salmonella paratyphi A
LFLHGTIMRILHTSDWHLGQNFYSKSRALEHQAFLDWLLETAQAHQVDAIIVAGDIFDTGSAPSYARELYNRFVVNLQQTGCHLVVLAGNHDSVATINESRDILAFLNTTVIASAGYAPRLLHRRDGSPGAVLCPIPFLAPRDIITSQAGLSGSEKQQQLLHAIADYYQQQYQEACHVRGERKLPVIATGHLTTVGASKSDAVRDIYIGTLDAFPAQHFPPADYIALDHIHRAQCVGGTEHIAICARPSALSFDECGKSKCVHLVTFDQGKWQSTESLAVPVTQPLAVLKGDLASITEQLEQWRGVEQSPPVWLDIEITTDDYLHDIQRRIQTLTESLPVEVLLVRRSREQRERSLANERRETLSELSVEEVFARRLALEALDTPPRERLNQLFSSTLYALNEEHEA

SEQ ID NO: 72867 - protein, 229 aa, Salmonella paratyphi A
MARRILVVEDEAPIREMVCFVLEQNGFQPVEAEDYDSAVNKLNEPWPDLILLDWMLPGGSGLQFIKHLKREAMTRDIPVVMLTARGEEEDRVRGLETGADDYITKPFSPKELVARIKAVMRRISAMAVEEVIEMQGLSLDPGSHRVMTGDSPLDMGPTEFKLLHFFMTHPERVYSREQLLNHVWGTNVYVEDRTVDVHIRRLRKALEHSGHDRMVQTVRGTGYRFSTRF

SEQ ID NO: 72868 - protein, 424 aa, Salmonella paratyphi A
VLERLSWKRLVLELVLCCIPALILSAFFGYLPWFLLAAVTGLLVWHFWNLLRLSWWLWVDRSMTPPGRGSWEPLLYGLHQMQLRNKERRRELGNLIKRFRSGAESLPDAVVLTTEEGGIFWCNGLAQQILGVRWPDDNGQNILNLLRYPEFTQYLKTRDFTRPLHLVLNTGRHLEIRVMPYTDKQLLMVARDVTQMHQLEGARRNFFANVSHELRTPLTVLQGYLEMMQEQALEGAMREKALHTMREQTYRMEGLVKQLLTLSKIEAAPALLLNEKVDVPMMLRVVEREAQTLSQQKHTFTFEVDDSLSVLGNEEQLRSAISNLVYNAVNHTPAGTHITVSWRRVHGAEFCIQDNGPGIAAEHIPRLTERFYRVDKARSRQTGGTAWGLAIVKHALNHHESRLEIDSSPGKGTRFSFVLPERLI

SEQ ID NO: 72869 - protein, 441 aa, Salmonella paratyphi A
MSNVTHQPKIGFVSLGCPKNLVDSERILTELRTEGYDVVPRYDDADMVIVNTCGFIDSAVQESLEAIGEALNENGKVIVTGCLGAKEDQIREVHPKVLEITGPHSYEQVLQHVHHYVPKPKHNPFLSLVPEQGVKLTPRHYAYLKISEGCNHRCTFCIIPSMRGDLVSRPIGDVLSEAKRLVDAGVKEILVISQDTSAYGVDVKHRTGFHNGEPVKTSMVSLCEQLSKLGVWTRLHYVYPYPHVDDVIPLMAEGKILPYLDIPLQHASPRILKLMKRPGSVDRQLARIKQWREICPELTLRSTFIVGFPGETEEDFQMLLDFLKEARLDRVGCFKYSPVEGAGANELPDQVPEEVKEERWNRFMQLQQQISAERLQEKVGREILVIVDEVDEEGAIGRSMADAPEIDGAVYLNGETNVKLGDIVRVKVENADEYDLWGSRV

SEQ ID NO: 72870 - protein, 302 aa, Salmonella paratyphi A
MRLFNWRRQAILHAMPVVKPDQIRTPWREFLRRFRRQHVALVAGGFVLALILVAIFARSDPYDAENYFDYDSLNNGPSLQHWFGVDSLGRDIFSRVLVGAQISLAAGVFAVFIGAIIGTVLGLLAGYYEGWWDRFIMRICDVLFAFPGILLAIAVVAVLGSGIANVIVAVAIFSIPAFARLVRGNTLVLKQQTFIESARSIGASDTTILFSHILPGTVSSIVVFFTMRIGTSIISAASLSFLGLGAQPPTPEWGAMLNEARADMVIAPHVALFPAVAIFLTVLAFNLLGDGLRDALDPKIKG

SEQ ID NO: 72871 - protein, 355 aa, Salmonella paratyphi A
MAGNTIGQLFRVTTFGESHGLALGCIVDGVPPGIPLTEADLQHDLDRRRPGTSRYTTQRREPDQVKILSGVFDGVTTGTSIGLLIENTDQRSQDYSAIKDVFRPGHADYTYEQKYGLRDYRGGGRSSARETAMRSAGAIAKKYLAEKFGIEIRGCLTQMGDIPLEIKDWRQVELNPFFCPDADKLDALDELMRALKKEGDSIGAKVTVVASGVPAGLGEPVFDRLDADIAHALMSINAVKGVEIGEGFNVVALRGSQNRDEITAQGFQSNHAGGILGGISSGQHIVAHMALKPTSSITVPGRTINRMGEEVEMITKGRHDPCVGIRAVPIAEAMAGDRADGSPAAPSGTECGCKD

SEQ ID NO: 72872 - protein, 283 aa, Salmonella paratyphi A
MAEITASLVKELRERTGAGMMDCKKALTEANGDIELAIENMRKSGAIKAAKKAGNVAADGVIKTKIDGNVAFILEVNCQTDFVAKDAGFQAFADKVLDAAVAGKITDVEVLKAQFEEERVALVAKIGENINIRRVASLEGDVLGSYQHGARIGVLVAAKGADEELVKQLAMHVAASKPEFVKPEDVSVDVVEKEYQVQLDIAMQSGKPKEIAEKMVEGRMKKFTGEVSLTGQPFVMEPSKSVGQLLKEHNADVTGFIRFEVGEGIEKVETDFAAEVAAMSKQS

SEQ ID NO: 72873 - protein, 241 aa, Salmonella paratyphi A
MATVSMRDMLKAGVHFGHQTRYWNPKMKPFIFGARNKVHIINLEKTVPMFNEALAELNKISARKGKILFVGTKRAASEAVKEAANSCDQFFVNHRWLGGMLTNWKTVRQSIKRLKDLETQSQDGTFEKLTKKEALMRTRELEKLENSLGGIKDMGGLPDALFVIDADHEHIAIKEANNLGIPVFAIVDTNSDPDGVDFVIPGNDDAIRAVSLYLGAVAATVREGRSQDLASQAEESLVEAE

SEQ ID NO: 72874 - protein, 320 aa, Salmonella paratyphi A
  MISC_FEATURE (40)..(40): X=any amino acid
  MISC_FEATURE (57)..(57): X=any amino acid
  MISC_FEATURE (279)..(279): X=any amino acid
MSKIYEDNSLTIGHTPLVRLNVSNGRILAKVESRNPSFTXKCRIAPNMIWDAEKRGXTEPGVELVEPTSATPVIALAYVAPRALQLTLTMPETMSIERRKLLKALGANLVLTEGAKGMKGAIQKAEEIVASDPQKYLLLQQFSNPANPEIHEKTTGPEIWEDTDGQVDVFISGVGTGGTLTGVTRYIKGTKGKTDLITVAVEPTDSPVMPQALAGEEIKPGPHKIQGIGAGFIPRQPGSKLIDKVVGITNEEAISTARRLMEEEGILAGISSARLLHAXSCRKMESFTNKNIVVILPSSGERYLSTALFADLFTEKELQQ

SEQ ID NO: 72875 - protein, 575 aa, Salmonella paratyphi A
  MISC_FEATURE (385)..(385): X=any amino acid
  MISC_FEATURE (464)..(464): X=any amino acid
  MISC_FEATURE (467)..(467): X=any amino acid
  MISC_FEATURE (468)..(468): X=any amino acid
MISGILASPGIAFGKRLLLKEDEIVIDRKKISADKVDQEVERFSSGRAKASAQLEAIKTKAGETFGEEKEAIFEGHIMLLEDEELEQEIIALIKDKHMTADAAHMEVIEGQATALEELDDEYLKERAADVRDIGKRLLRTSWGLAIIDLSAIQEEVILVAADLTPSETAQDEPAKVLGFITDAGDATSHTSIMARSLELPAIVGTGSVTAQVKNGDYLILDAVNNQVYVNPTNDVIEQLRAVQEQVATEKAELAKLKDLPAITLDGHQVEVCANIGTVRDVEGAERNGAEGRWSVSTEFLFMDRDALPTEARAVCRYKAVAASARLARGYRPYHDIGGDQELPYSTFPKEKTRPWAGARLVSPWIAQRSLRDQVRAISACLRSRXIAHMFPMIISVEDSLAAPKRLTSTNRNAVTKVKHLTKALRIGVMVETPAAATIARHLAKEVDFFSIGTNDLTQYTLASXPWXXYDFTPLPAMSPSVLNLIKQVIDASHAEGKWTGMCGELAGDERATLLLLGMGLDEFSMSAISIPRIKKIIRNTNFEDAKVLAEQALAQPTTDELMTLVNKFIEEKTIC

SEQ ID NO: 72876 - protein, 281 aa, Salmonella paratyphi A
MAETQNDPLLPGYSFNAHLVAGLTPIEANGYLDFFIDRPLGMKGYILNLTIRGEGVINNNGEQFVCRPGDILLFPPGEIHHYGRHPDASEWYHQWVYFRPRAYWQEWLTWPTIFAQTGFFRPDEARQPHFSELFGQIISAGQGEGRYSELLAINLLEQLLLRRMAVINESLHPPMDSRVRDACQYISDHLADSHFDIASVAQHVCLSPSRLSHLFRQQLGISVLSWREDQRISQAKLLLSTTRMPIATVGRNVGFDDQLYFSRVFKKCTGASPSEFRAGCE

SEQ ID NO: 72877 - protein, 253 aa, Salmonella paratyphi A
  MISC_FEATURE (17)..(17): X=any amino acid
  MISC_FEATURE (26)..(26): X=any amino acid
RHLAAVAQRKARSAFSXLTHCMRNEXHDVTANTLPVCVRPSMVIIVAEARPFAAIAQRLLIKCRRHYSASTAGAMRAALEIAYDAKTPWTLDPVAVGVLEFRRRLCLDLLSMRRRQYRAYASEIMASAGMALGGRGVDTTVGRWPTLCGVRLARQIDCIVVVTGEIDYVTNSQRTLSIPGGDPLMTRIVRLLGAVVAVVAASCALPGAALDNVASACCWMKLAGQAAAERSEGPGSFIPAFLDALYHLDVEAA

SEQ ID NO: 72878 - protein, 248 aa, Salmonella paratyphi A
MEQAHTRLIAQLNERISAADNTPLYMKFAQTVKDAVRSGILEHGNILPGERDLSQLTGVSRITVRKAMQALEEEGVVTRARGYGTQINNIFEYSLKEARGFSQQVVLRGKKPDTLWVNKRVVSCPDEVAQHLAIPAGSDVFLLKRIRYVDEDAVSIEESWVPAHLIHDVDAIGISLYDYFRRQHIYPQRTRSRVSARMPDDEFQSHIQMDGKVPVLVIKQVALDQQQRPIEYSISYCRSDLYVFVCEE

SEQ ID NO: 72879 - protein, 183 aa, Salmonella paratyphi A
  MISC_FEATURE (4)..(4): X=any amino acid
GMKXTTGWMTLGQFSEIFFMLALPFFTKRSGIKKLLLLGLVTAAIRYGFFVYGGAETYFTYALLFLGILLHGVSYDFYYVTAYIYVDKKAPVHMQYRAQGLITLCCQGFGSLLGYRLGGVMMEKMFAYPQPVNGLTFNWAGMWTFGAVMIAVIALLFMIFFRESDKEITAIDDRDIASTQGEV

SEQ ID NO: 72880 - protein, 720 aa, Salmonella paratyphi A
  MISC_FEATURE (467)..(467): X=any amino acid
  MISC_FEATURE (541)..(541): X=any amino acid
CASCVTRVQHAYKAYGRHAARVNCRERTALVMSSVRADLVQAVKKPGYGAEAIEDDIKRRERQQETAIATMKRFRCRQSSPGGRIPVMVWGMIGDNMMVTGDNRSLWLAIGLITLAVMVFAGGHFYRNAWKSLLNGTATMDTLVALGTGVAWLYSMSVNLWPQWFPMEARHLYYEASAMIIGLINLGHMLEARARQRSSKALEKLLDLTPPTARVVTEDGEKSVRWRDVQPGMLLRLTTGDRVPVDGQITQGEAWLDEAMLTGEPIPQQKGEGDSVHAGTVVQDGSVLFRASGGQSTTLSRIIRMVRQAQSSKPEIGQLADKISAVFVPVVVAIALFSAAIWYFFGPAPQIVYTLVIATTVLIIACPCALGLATPMSIISGVGRAAEFGVLVRDADALQRASTLDTLVFDKTGTLTEGKPQVVAVKTFNGVDEAQALRLAAALEQGSSTRWPMAILEKAGDDKLPQXTVSRTLRGLGVTVKRKAINLLLGNQALLNEQHVATDDMTAEITAQASQGSTPVLLAIDGKAAALLAVPIHCARXYLPRLNALHNAGYRLVMLTGDNPTTANAIAKEAGIDEVIAGVLPECKADAIKRLQSQGRQVAMVGDGINDAPAWRRRTSVSRWGGGSDVAIETAAITLMRHSLMGVADALAISRAMLRNMKQNLLGAFIYNSIGIPVAAGILWPFTGTLLNPVVAGAAMALSSITVVSNANRLLRFKPK

SEQ ID NO: 72881 - protein, 263 aa, Salmonella paratyphi A
  MISC_FEATURE (232)..(232): X=any amino acid
MELLNQLKRLWRALRGTPNSWPAIDLSLPGGRHLHLVGSIHMGTRDMAPLPAKLVKKLRQADALVVEADISGNETPFSNLPKCPPLVERLSAGQLSALEKRVSELGMPLIHFDNQPLWQIAMVLQATQAQRLGLRPDYGIDYQLLQAAREMSLPVQELEGAKHQLELLCDLPDGGMALLDDTLTHWHTNARLLQVMIGWWLEAAHQRRVSLPRTFSQPLYDVLMVKRNEAWXTRCLALSPGRYVVAVGALHLYGEGNLPQILK

SEQ ID NO: 72882 - protein, 262 aa, Salmonella paratyphi A
  MISC_FEATURE (209)..(209): X=any amino acid
  MISC_FEATURE (235)..(235): X=any amino acid
MPIQVLPPQLANQIAAGEVVERPASVVKELVENSLDAGATRVDIDIERGGAKLIRIRDNGCGIKKEELALALARHATSKIASLDDLEAIISLGFRGEALASISSVSRLTLTSRTAEQAEAWQAYAEGRDMDVTVKPAAHPVGTTLEVLDLFYNSPPRRKFMRTEKTEYNHIDEIIRRIALASFDVTLNLSHNGKLVRQYSRVAKDETKXTRLRRHSATPFLEQALAIRVATWRYXPCGLGRRSNHTTTALTEIQYCYVNETM

SEQ ID NO: 72883 - protein, 280 aa, Salmonella paratyphi A
MTTDNPLISIYMPTWNRQQLAIRAIKSVLRQDYRHWEMIIVDDCSSSYQQLQQFVEELNDPRVRYTHNARNTGACAVRNQAIMQAQGHYITGIDDDDEWTPNRLSVFLAHKHQLTTHAFLYANDYVCEGEVYSQPASLPLYPKSPYSRRLFYKRNIIGNQVFTWAWRFKASLFDTELKAAQDYDIFLRMVVEYGEPWKVEEATQILHINHGEMQITSSPKKFSGYFHFYRKHKDKFDRASKKYQLFTLYQIRNKRMTWRTLLTLLSVRNSKRLAAGLRGR

SEQ ID NO: 72884 - protein, 162 aa, Salmonella paratyphi A
  MISC_FEATURE (43)..(43): X=any amino acid
MLEDLRANSWSLRPCCMVLAYRIAHFCSVWRKKNVLNNLWAAXVLVLYRVITECLFGYEIQAAATIGRGFTIHHGYAAVINKHVVAGDDFTIRHGVTIGNRGADSLACPVIGHGVELGANVILLGDITIGNHVTIGAGSVVLDSIPDHALVVGEKARVKVST

SEQ ID NO: 72885 - protein, 541 aa, Salmonella paratyphi A
  MISC_FEATURE (6)..(6): X=any amino acid
  MISC_FEATURE (22)..(22): X=any amino acid
  MISC_FEATURE (472)..(472): X=any amino acid
LLLRRXSQVIELSEQSDAQMRXLRARLIAMIFQEPMTSLNPVFTVGEQIAESIRLHQGASHEEALGNKRMLDQVRIPESQAILSRYPHQLSGGMRQRVMIAMALSCRPAVLIADEPTTALDVTIQAQILQLIKVLQQEMSMGVIFITHDMGVVADIAIAVLVMYQGEAVETGSVEQIFHAPTHPYTQTLLAAVPQLGAMRPLAATRFPLISADEPALYESQIEQDTVVEGEPILQVRGLVTRFPLRSGLFNRVTREVHAVENISFDLWPGETLSLVGESGSGKSTTGRALLRLVESRQGEIIFNGQRIDSLSAGKLQPLRRDIQCIFQDPYASLDPRQTVGYSIMEPLRIHGLGQGDAAAKRVAWLLERVGLRPEHAWRYPHEFSGGQRQRICICRALALNPKVIIADEAVSALDVSVRGQIINLLLDLQREMGSPTLFISHDMAVVERISHRVAVMYLGQIVEMGRARRFXNPQHPYTRKLMARCRLPIPSRHRPRRVLLSDDIPSNIHKRGEETPAVSLQLVGPGHYVARPLQDNALSR

SEQ ID NO: 72886 - protein, 327 aa, Salmonella paratyphi A
  MISC_FEATURE (304)..(304): X=any amino acid
VSRTTILDDATGSDIDEQRHSQPVQFIKRGTAPFMRVTLALFSAGLATFALLYCVQPILPVLSQEFGVSPASSSVSLSMSTGMLAIGLRFTGRFSDAIGRKPVMVTALLLASCCTLLSTMMTSWHGILIMRALIGLSLSGVRWRMTYLSEEIHPSFVAFSMGLYISGNSIGGMSGRLLSGVMTDFFNWRIGPAIGCFALASALMFWKILPASQHFRPTSLRPKTLFINFRLHWRDRGLPLLFAEGFLLMGAFVTLFNYIGYRLMLSPWELSQAVVGLLSVAYLTGTWSSPKAGAMTSRYGRGRXCLFSIAVMLGGLLLTLFTSLWLI

SEQ ID NO: 72887 - protein, 272 aa, Salmonella paratyphi A
MHKTIAVLLGIVCFLPVMAKARGAETDATDASDVKTLFFNHDDRVPVADPTQSPWDAIGQLETASGNLCTATLISPHIALTAGHCLLTPPKGKPDKAVALRFVARKGVWRYEIHGIEGRVEPSLGRRLKADGDGWIVPPAAASWDFGLVILRYPPSGITPVPLFTGDKAALTAALKAADRKVTQSGYPEDHLNALYSHQDCVVTGWAQNAVLSHQCDTLPGDTGSPLLLHTDSGWQLIGVQSSAPAAKDRWRADNRAISVTGFRDKLKALAQ

SEQ ID NO: 72888 - protein, 453 aa, Salmonella paratyphi A
QFVYTMHRVGKVVPPKRHILKNISLSFFPGAKIGVLGLNGAGKSTLLRIMAGLDKDIEGDAPAAGIKIGYLPQNPQLNPEHTVRESIEEAVSEVVNALKRLDEVYALYADPDADFDKLAAEQGRLEEIIQAHDGHNLNVQLERAADALRLPDWDAKVEKLSGGERRRVALCRLLLEKPDMLLLDEPTNHLDAESVAWLERFLHDFEGTVVAITHDRYFLDNVAGWILELDRGEGIPWEGNYSSWLEQKDQRLAQEASAEAARRKSIEKELEWVRQGAKGRQSKGKARLARFEELNSVEYQKRNETNELFIPPGPRLGNKVIEVSNLRKSYGDRVLIDDLSFSVPKAAIVGIIGPNGAGKSTLFRMMSGQEQPDSGTITLGETSSWASVDQFRDAMDNSKTVWEEVSGGLDIMKIGNTEMPSRAYVGRFNFKGVDQGKRVGELSGGERGRCIWR

SEQ ID NO: 72889 - protein, 327 aa, Salmonella paratyphi A
VLKKYLSLLLLCAAPAFAKPVLTVYTYDSFAADWGPGPAVKKAFEADCNCELKLVALEDGVSLLNRLRMEGKNSKADVVLGLDNNLLEAATQTKLFAKSGVANEAVKVPGGWKNDTFVPFDYGYFAFVYDKSKLKNPPKSLKELVESDQKWRVIYQDPRTSTPGLGLLLWMRKVYGDNARQAWQKLAAKTVTVTKGWSEAYGLFLKGESDLVLSYTTSPAYHIIEEKKDNYAAANFSEGHYLQVEARARTVASKQPELAEKFLKFMVSPAFQNAIPTGNWMYPVADVALPAGFESLAKPATTLEFTPQQVAAQRQAWISEWQRAVSR

SEQ ID NO: 72890 - protein, 548 aa, Salmonella paratyphi A
MPSGRLQQQFIRLWQCCDGKTQDTTLNELADLLNCSRRHMRTLLNTMQARGWLTWEAEVGRGKRSRLTFLYTGLALQQQRAEDLLEQDRIDQLVQLVGDKSAVRQMLISHLGRSFRQGRHILRVLYYRPMHNLLPGTALRRSETHIARQIFSSLTRVNEENGELEADIAHHWQQISPLLWRFYLRPGIHFHHGRELEMEDVIASLTRINTLPLYSHITKIDSPTAWTLDIHLSQPDRWLPWLLGQVPAMILPREWETLANFASHPIGTGPYAVRRNTPNQLKILAFDDYFGYRALIDEVNVWVLPDISEEPACGLMLEGPIQGGEKAIESRLEEGCYYLLFDARTPRRDPQVREWVSHVLSPTNLLYHADEPLQQLWFPAYGLLPRWHHARPGPGEKPAGLETLTLTFYREHIEHRVIARIMSALLAEHQVHLHIQEIDYDQWHAGEIESDIWLNSAKFYAAAGFLAVRAPVRSTALAELHSARWQDDAAQWRAGEMNLANWCQQLLANKAIVPLIHHWLIIQGQRSMRGLRMNTLGWFDFKSAWFAP

SEQ ID NO: 72891 - protein, 462 aa, Salmonella paratyphi A
  MISC_FEATURE (96)..(96): X=any amino acid
  MISC_FEATURE (110)..(110): X=any amino acid
HIGAYHVETDNGMITFLDTPGHAAFTSMRARGAQGTDIVVLVVAADDGVMRRTIEAIQHAKAQVVRSWVAVNKIDKPEAYPDRVKNELSQYGILHXSGAARQFVHVSAKXAPVIDELLDAILLQAEVLELKAVRKGMASGALIESFLDKGRGPVATVLVREGTLHKGDIVLCGFEYGRVRAMRNELGQEVLEAGPSIPVEILGLSGVPAAGDEVTVVRDEKKAREVALYRQGKFREVKLARQQKSKLENMFANMTEGEVHEVNIVLKADVQGSVEAISDSLLKLSTDEVKVKIIGSGVGGITETDATLAAASNAILVGFNVRADASARKVIEFESLDLRYYSVIYNLIDEVKAAMSGMLSPELKQQIIGLAEVRDVFKSPKFGRSRAVMVTEGTIKRHNPIRVLRDNVVIYEGELESLRRFKDDVNEVRNGMECGIGVKNYNDVRVGDMIEVFEIIEIQRTI

SEQ ID NO: 72892 - protein, 314 aa, Salmonella paratyphi A
MSRPRRRGRDIHGVLLLDKPQGMSSNDVLQKVKRIYNANRAGHTGALDPLATGMLPICLGEATKFSQYLLDSDKRYRVIARLGQRTDTSDADGQIVQERPVTFSAEQLASALETFRGDIEQIPSMYSALKYQGKKLYEYARQGIEVPREARPITVYELLFIRHEGNELELEVHCSKGTYIRTIIDDLGEKLGCGAHVTYLRRLTVSKYPVDRMVTLEHLQTLVAQAEQQGVPAAQWLDPLLMPMDSPASDYPVVNLPLTSSVYFKNGNPVRTTGAPLKGLVRVTEGEDDKFIGMGEIDDEGRVAPRRLVVEYPA

SEQ ID NO: 72893 - protein, 89 aa, Salmonella paratyphi A
MSLSTEATAKIVSEFGRDANDTGSTDVQVALLTAQINHLQGHFAENKIDHHSRRGLLRMVSQRRKLLDYLKRKDVARYTALIERLGLRR

SEQ ID NO: 72894 - protein, 879 aa, Salmonella paratyphi A
  MISC_FEATURE (234)..(234): X=any amino acid
  MISC_FEATURE (235)..(235): X=any amino acid
  MISC_FEATURE (876)..(876): X=any amino acid
EMNDEPLRPDPDRLLEQTPPPHRGKLKIFFGACAGVGKTWAMLAATQRLRAQGLDVVIGVVETHGREETAALLDGLTILPPKRHSHRGRQIREFDLDAALARRPALILMDELAHSNAPGSRHPKRWQDIEELLEAGIDVFTTVNVQHLESLNDVVSGVTGIQVRETVPDPFFDATDEVVLVDLPPDDLRQRLNEGKVYIAGSGERAIEHFFRKAILIALASWALRGQPIRVERXXSGARIRAKKKYGTPRDAILLCIGHNTGSEKLVRTAARLASRLGSVWHAVYVETPTLHRLPEKQRRAILSALRWRRSLAAETATLSDPAEEKAVVRYAREHNLGKIVMGRPASRRWWRRDAFADRLARRAPDLDQVIVALEEPPARALAQTPDNRPFKEKWRGQIQGCLVAGVCAITTLIAMQWLVTFDAANLVMLYLLGVVVIALLYGRWPSVVATVINVASFDLFFIAPRGTLAVSDVQYLLTFAVMLTVGLVIGNLTAGVRYQARVARYREQRTRHLYEMSKALAVGRSEHDIAATSERFIASTFQARSQILLPDANGKLLPLTHQQGMTPWDDAIARWSFDKGQPAGAGTDTLPGVPYQILPLKSADKTYGLAIVEPGNLRQLMVPEQQRLLETFTLLVANALERLTLTASEEQARLASERESIRNALLAALSHDLRTPLTVLFGQAEILTLDLASAGSPHARQASEIRQHILNTTRLVNNLLDMARIQSGGFNLKKEWLTLGEVVGSALQMLEPGLLHPITLSLPQQLTLIHVDGPLFERVLINLLENAVKYAGPQASIGIDAAVKDDRLQLDVWDSGPGIPAGQEQKIFDKFARGNKESAVPGVGLGLAICHAIVEVHGGTVTAYNRPQAAPVSVXTLP

SEQ ID NO: 72895 - protein, 351 aa, Salmonella paratyphi A
  MISC_FEATURE (148)..(148): X=any amino acid
  MISC_FEATURE (316)..(316): X=any amino acid
MAIDENKQKALATMGQIEKQFGKGSIMRLGEDRSMDVETISTGSLSLDIALGAAGLPMGRIVEIYGPESSGKTTLTLQVIAAAQREGKTCAFIDAEHALDPVYARKLGVDIDNLLCSQPDTGEQALEICDAGASGAVDVIVVDSVAAXRRKAEIEGEIGDSHMGPAARMMSQAMRKLAGNLKQSNTLLIFINQIRMKIGVMFGNPETTTGGNALKFYASVRLDIRRIGAVKEGDNVVGSETRVKVVKNKIAAPFKQAEFQILYGEVYQLYGELVDLGVKEKLIEKAGAWYSYNGEKIGQGKANSSYLAERNPATEXRSRKGFRELLLSNQNATPDFAVDDSEGLQKPTKIF

SEQ ID NO: 72896 - protein, 166 aa, Salmonella paratyphi A
MSEPTSRRPAYARLLDRAVRILAVRDHSEQELRRKLSAPVMGKNGPEEIDATADDYERVIAWFHEHHYLDDERFVMRFIASRSRKGYGPARIRQELNQKGISRESTEKAMRECEIDWSEMAREQPVRKYGEPLPSNFSEKVKVQRFLLYRGYLMDDIQQIWRNFAD

SEQ ID NO: 72897 - protein, 871 aa, Salmonella paratyphi A
TAEIRQAFLDFFHSKGHQVVASSSLVPNNDPTLLFTNAGMNQFKDVFLGLDKRNYSRATTSQRCVRAGGKHNDLENVGYTARHHTFFEMLGNFSFGDYFKHDAIQFAWELLTGENWFALPKERLWVTVYETDDETYEIWEKEVGIPRERIIRIGDNKGAPYASDNFWQMGDTGPCGPCTEIFYDHGDHIWGGPPGSPEEDGDRYIEIWNIVFMQFNRQADGTMEPLPKPSVDTGMGLERIAAVLQHVNSNYDIDLFRTLIEAVAKVTGATDLGNKSLRVIADHIRSCAFLVADAVLPSNENRGYVLRRIIRRGAVTGNMLGAKETFFYKLVGPLIEVMASQGEELKRQQAQVEQVLKTEEEQFARTLERGLALLDEELAKLQGDTLDGETAFRLYDTYGFPVDLTADVCRERNIKVDEVGFEAAMEEQRRRAREASGFGADYNAMIRVDSASEFKGYDHLELNGKVTALFVDGKAVEAINAGQEAVVVLDQTPFYAESGGQVGDKGELKGAGFTFAVDDTQKYGQAIGHIGKLSAGALKVGDAVQADVDEARRARIRLNHSATHLMHAALRQVLGTHVAQKGSLVSDKVLRFDFSHNEAMKPSEIRQVEDLVNAQIRRNLPIETNIMDLDAAKAKGAMALFGEKYDERVRVLSMGDFSTELCGGTHASRTGDIGLFRIISESGTAAGIRRIEAVTGEGAMATVHAQSDRLNDIAHLLKGDSQNLGDKVRAVLERTRQLEKELQQLKDQAAAQESANLSSKAVDLNGVKLLVSELAGIEPKMLRTMVDDLKNQLVSTVIVLATVVEGKVSLIAGVSKDVTDRVKAGELIGMVAQQVGGKGGGRPDMAQAGGTDAAALPAALASVQGWVSAKL

SEQ ID NO: 72898 - protein, 688 aa, Salmonella paratyphi A
LDNVAVVAIDVPGEKVNTLKAEFAAQVRAILKQIRENKALQGVVFISAKADNFIAGADINIIGHCQNAQEAETLARQGQQLMAEIQALPVPVIAAIHGACLGGGLEMALACHRRICTDDVKTVLGLPEVQLGLLPGSGGTQRLPRLVGVSTALDMILIGKQLRARQALKAGLVDDVVPQTILLEAAVELAKKERLAQRTLPVRERILAGRWGRALLFRLVRKKTAQKTQGNYPATERIIDVIETGLAQGSSSGYDRKRALFGELAMTPQSQGCAAVFFASTEVKKDPGSDAPPGPLNSVGILGGGLMGGGIAWVTACKGGLPVRIKDINTQGINHALKYSWDLLETKVRRRHIKASERDKQLALISGSTDYRGFSHRDLVIEAVFEDLPLKQQMVAEVEQNCATHTIFASNTSSLPIGDIAANAARPEQVIGLHFFSPVEKMPLVEVIPHASTSAQTIATTVKLAKKQGKTPIVVSDKAGFYVNRILAPYINEAIRMLTEGERVEHIDAALVKFGFPVGPIQLLDEVGIDTGTKIIPVLEAAYGERFSAPANVVASILNDDRKGRKNGRGFYLYGEKGRKSKKQVDPAIYKLIGVQGQSRLSAHEWQSACVMLMLNEAARCFDEKVIRSGAHGDIGAVFGIGFPPFLGGPFRYMDALGPGEMVATLQRLAALYGPRYAPCEQLVRMAE

SEQ ID NO: 72899 - protein, 432 aa, Salmonella paratyphi A
  MISC_FEATURE (157)..(157): X=any amino acid
MRQALPLVTRQGDRIAIVSGLRTPFARQATAFHGIPAVDLGKMVVGELWARSEIPADAIEQLVFGQVVQMPEAPNIAREIVLGTGMNVHTDAYSVSRACATSFQAVANVAESLMAGTIRAGIAGGADSSSVLPIGVSKALARVLVDVNKARTTRQRXRFFLVCLRDLLPVPPAVAEYSTGLRMCDTAEQMAKTYGITREQQDAWRHRSHSRAAQAWAEGKLAEEVMTTYVPPYKNPFAEDNNIRGASTLADYAKLVPLFDRKHGSVTAANSTPLYRPCAVILMTESRAKELGLHPLGYLRIRLYRIDVWQDMLLGPAWSTRGLERAGLTMADLTLFDMHEAFAAQTLANLQLLGSERFAREVLGRARRQGRWDDAKFNVLGAQSLRASFLPQRGARMITQTLHELRRRGGGFAWSRPVQLAVLGAAMVLEAE

SEQ ID NO: 72900 - protein, 102 aa, Salmonella paratyphi A
  MISC_FEATURE (62)..(62): X=any amino acid
  MISC_FEATURE (63)..(63): X=any amino acid
VEIQRKSTMSKCSADETPVCCCMDVGTIMDNSDCTASYSRVFATRAEAEETLAALTEKARSXXSEPCQITPTFTEESEGVRLDIDFVFACEAETLIFQLGLR

SEQ ID NO: 72901 - protein, 315 aa, Salmonella paratyphi A
MIEFNHVSKTFGDQQAVSDLNLHFSEGSFSVLIGTSGSGKSTTLKMINRLVEHDSGTIRFAGEEIRSLPVLELRRRMGYAIQSIGLFPHWTVAQNIATVPQLQKWSRARINDRIDELMALLGLESALAFCYPHQLSGGQQQRVGVARALAADPQVLLMDEPFGALDPVTRGALQQEMTRIHQLLGRTIVLVTHDIDEALRLADHLVLMDGGHVIQQGSPLSMLTSPENDFVQAFFGRSELGVRLLSLRSVGDYVRRNEQLSGDALVEEMTLRDALSMFVARRCDVLPVANQQGEPCGTLHFRDLLSETSPRETTV

SEQ ID NO: 72902 - protein, 243 aa, Salmonella paratyphi A
MKRLCDPLLWLIVLFLLLLFGLPYSQPFFAALFPDLPRPVYQQESFAALALAHFWLVGISSLFAVVVGVGAGIAVTRESGKEFRPLVETIAVVGQTFPPVAVLAIAVPVMGFGQQPAIIALILYGVLPILQATLAGLGAVPASVMSVASGMGMSRRQQLYQVELPLAAPVILAGIRTSVIINIGTATIASTVGASTLGTPIIIGLSGFNTAYVIQGALLVALAAIIIDRLFERLTRALTRHAK

SEQ ID NO: 72903 - protein, 438 aa, Salmonella paratyphi A
  MISC_FEATURE (434)..(434): X=any amino acid
MIVFTNSYFYATVQRKLIVLNVCYALLIEVWFAGMYEFNLVLLLLQQMCVFLVIAWLMSKTRLFIPLMQVTVRLPHKLLCYVTFSIFCIMGTYFGLHIEDSIANTRAIGAVMSGLLGGPVVGGLVGLTGGLHRYSMGGMTALSCMISTIVEGLLGGLVHSVLIRRGRPDKVFSPLTAGAITCVAELVQMLIILLIARPFDDALHLVSNIAAPMMVTNTVGAALFMRIVLDKRAMFEKYTSAFSRTALKVAASTEGILRQGFNEVNSMKVAQVLYQELDIGAVAITDREKLLAFTGIGDDHHLPGKPISSGYTLKAIETGEVVYADGNEVPYRCSLHPQCKLGSTLVIPLRGENQRVMGTIKLYEAKNRLFSSINRTLGEGIAQLLSAQILAGQYERQKALLTQSEIKLLHAQVNPHFLFNALNTIKAVIRRDSXRPAN

SEQ ID NO: 72904 - protein, 662 aa, Salmonella paratyphi A
MSSRKELANAIRALSMDAVQKAKSGHPSDPMGMADIAEVLWRDFLNHNPTNPSWAERDRFVLSNGHGSMLIYSLLHLTGYDLPMSELQNFRQLHSKTPGHPEVGYTAGVETTTGPLGQGIANAVGMAIAEKTLAAQFNRPGHDIVDHFTYVFMGDGCMMEGISHEVCSLAGTLKLGKLIAFYDDNGISIDGHVEGWFTDDTAKRFEAYGWHVIRGIDGHDADAIKRATEEARAVTDKPSLLMCKTIIGFGSPNKQGTHDSHGAAGRPEIALTREQLGWKYAPFEIPSEIYAQWDAKEAGQAKESAWNEKFAAYEKAFPQEAAEFTRRMKGDMPADFNAKANEFIAKLQANPSKIASRKASQNAIEAFGPLLPEFLGGSADLAPSNLTLWSGSKAINEDAAVNYIHYGVREFGMTAIANGIALHGGFLPYTSTFLMFVEYARNAVRMAALMKQRQVMVYTHDSIGLGEDGPTHQPVEQVASLRVTPNMSTWRPCDQVESAVAWKYGVERQDGPTALILSRQNLAQQERTEEQLANIARGGYVLKDCAGQPQIIFIATGSEVELAVAAYEKLTAEGVKARVVSMPSTDAFDKQDAAYRESVLPKAVSARVAIEAGIADYWFKYVGLNGAIVGMTTFGESAPAELLFEEFGFTVDNVIAKAKALL

SEQ ID NO: 72905 - protein, 147 aa, Salmonella paratyphi A
YAVTLWLRLLAIVSTSQLWMQYVPVQRFIRALFASRLPPGIAYLFAGPLLVVEQLKRQLTIVHEAQRARGVPLDEGWYQRLRAMPALIVPLTQNALNDLTIRGAALDMRGFRLHRARTTLWAPKDSMLQRVARYGMVLLILAEAGVW

SEQ ID NO: 72906 - protein, 46 aa, Salmonella paratyphi A [sequence omitted]

SEQ ID NO: 72907 - protein, 534 aa, Salmonella paratyphi A
  MISC_FEATURE (113)..(113): X=any amino acid
MDSQRNLLVIALLFVSFMIWQAWEQDKNPQPQTQQTTQTTTTQRVSPPTRAYQQCQGKMITVKTDVLDLTINTRGGDVEQALLPAYPKELGSNEPFQLLETTPQFIYQAQRAXHALGPDNPANGPRPLYNVEKDAFVLADGQNELQVPMTYTTPQNTFTKTFVFKRGDYAVNVNYSVQNTGEKPLEVSTFGQLKQSVNLPPHRDTGSSNFALHTFRGARYSTPDEKYEKYKFDTIADNENLNVSSKGGWVAMLQQYFATAWIPRNDGTNNFYTANLGNGIVAIGYKAQRVLVQPGQTGAMTSTLWSGPEIQDKMAAVAPHLDLTVDYGWLWFISQPLFKLLKWIHSFVGNWGFSIIIITFIVRGIMYPLTKAQYTSMAKMRMLQPKIQAMRERLGDDKQRQSQEMMALYKAEKVNPLGGCFPLIIQMPIFLALYYMLMGSIELRHAPFALWIHDLSAQDPYYILPILMGVTMFFIQKMSPTTVTDPMQQKIMTFMPVIFTVFFLWVPSGLVLYYIVSNLVTIIQQQLIYRGLEK

SEQ ID NO: 72908 - protein, 454 aa, Salmonella paratyphi A
  MISC_FEATURE (145)..(145): X=any amino acid
  MISC_FEATURE (217)..(217): X=any amino acid
  MISC_FEATURE (219)..(219): X=any amino acid
  MISC_FEATURE (430)..(430): X=any amino acid
MSHNDTIVAQATPPGTGGVWYLRISGLKARALRQEVLGKLPKPRYADYLPFKDVDGSALDQGIALWFPGPNSFTGEDVLELQGHGGPVILDLLLKRILTLPGVRIADRASFSERAFLNDKLDLAQAEAIADLIDASSEQAGVRRXNSLQGAFSARVNHLVEALTHLRIYVEAAIDFPDEEIDFLSDGKIEAQLNGVIADLDAVAPKRARASLCAKGXRXVIAGRPNAGKSSLLNALAGREAAIVTDIAGTTRDVLREHIHIDGMPLHIIDTAGLRDANDEVERIGIERAWQEIEQADRVLFMVDGTTTDAVDPADIWPDFIARLPKNLPITVVRNKADITGETLGISEVNGHSLVRLSARTGEGVDVLRNNLKQSMGFETNMEGASWARRRHLQALRKPLTILNRGKAQLLGAWAGELLAEEFAWRSKAXAEITGEFTSDDLLGRIFSSFCIGK

SEQ ID NO: 72909 - protein, 641 aa, Salmonella paratyphi A
MRLSTIFSALITLLTGLTIFVTLIGCSLSFYNAVQYKYVSRVQATATAIDTHLVTHDIVSLTPQIDELMIASDIVRVDLLQGERSVYSHSRARGYRPAGTSDMYRELVVPLIKHPGMSLRLVYQDPMGNYFHSLITTAPLTLAIGFIVLILFLSVRWLQRQLSGQELLEIRSTRILNGERGANVRGSVYEWPARTSSALDVLLSEIQFAHEQRSRLDTLIRSYAAQDTKTGLGNRLFFDNQLATLLEDQEKVGVHGVVMMIRLPDFNLLRDSLGGNQAEEQMFMLINLLSTFIMRYPGSLLARYHRSDFAVLLPHRTLKEAESIAGQLLKAVDALPANKMLDRDDMVHIGICAARSGQSTDQVMEHAEAAARNAACQGGNSWAIYDDTLPEKGRGNVRWRTLIEQMLNRGGPRLYQKPAVTREGRVHHRELMCRIYDGKEEVSSAEYMPMVLQFGLSEEYDRLQISRLITLLGYWPDENLAMQLTVESLIRPRFQRWLRDTLMQCEKSQRNRIIIELAEADVCQHISRLQPILRLVNALGVRVAVTQAGLTLVSTSWIKALNVELLKLHPSLVRNIEKRTENQLLVQSLVEACAGTPTQVYATGVRSRGEWQTLTKRGVAGGQGDFFASSQLLDTNVKKYS

SEQ ID NO: 72910 - protein, 286 aa, Salmonella paratyphi A
  MISC_FEATURE (151)..(151): X=any amino acid
  MISC_FEATURE (254)..(254): X=any amino acid
VVGKVSGFCFPPQLSGLSLSMLKKFRGMFSNDLSIDLGTANTLIYVKGQGIVLNEPSVVAIRQDRAGSPKSVAAVGHDAKQMLGRTPGNIAAIRPMKDGVIADFFVTEKMLQHFIKQVHSNSFMRPSPRVLVCVPVGATQVERRAIRESAXAGAREVFLIEEPMAAAIGAGLPVSEATGSMVVDIGGGTTEVAVISLNGVVYSSSVRIGGDRFDEAIINYVRRNYGSLIGEATAERIYTEIGSLIPGDEVARSXVRVRYLAEGVLPGFYLYSYEILVDVQGPLYAI

SEQ ID NO: 72911 - protein, 231 aa, Salmonella paratyphi A
MSIAVNMNDPTNTGVKTTTGSGSMTGSNAADLQSSFLTLLVAQLKNQDPTNPLQNNELTTQLAQISTVSGIEKLNTTLGAISGQIDNSQSLQATTLIGHGVMVPGTTILAGKGAEEGAVTSTTPFGWELQQPADKVTATITDKDGRVVRTLEIGELRAGVHTFTWDGKQTDGTTVPNGSYNIAITASNGNATGGARCNFALVQGVTKGSNGNLLDLGTYGTTTLDEVRQII

SEQ ID NO: 72912 - protein, 650 aa, Salmonella paratyphi A
  MISC_FEATURE (45)..(45): X=any amino acid
MNILGFFQRLGRALQLPIAVLPVAALLLRFGQPDFAEYAVYRARXGSIFDNLALVFAIGVASSWSKDSAGGHVAASREGYFVMTKAMVTINPEINMGVLAGIITGLVGGAVYNRWSGIKLPDFLSFFGGKRFVPIATGFFCLVLAAIFGYVWPPVQHGIHAGGEWIVSRSALGSGIFGFINRLLIPTGLHQVLNTIAWFQIGEFTNAAGTVFHGDINRFYAGDGTAGMFMSGFFPIMMFGLPGAALAMYFAAPKERRPMVGGMLLSVAITAFLTGVTEPLEFLFMFLAPLLYLLHAILTGISLFVATLLGIHAGFSFSAGAIDYVLMYNLPAASNNVWMLLVMGVVFFIIYFLLFSAVIRMFNLKTPGREDKVDEMVTEEANSNTEEGLTQLATSYIAAVGGTDNLKAIDACITRLRLTVNDSARVNDAACKRLGASGVVKLNKQTIQVIVGAKAESIGDEMKKVVARGPVAAASADAAHVATPAPAAKPQAVPNAVTIAELVSPITGEVVALDQVPDEAFASKAVGDGVAVKPTDKTVVSPAAGTIVKIFNTNHAFCLETEKGAEIVVHMGIDTVALNGQGFKRLVEEGAEVTAGQPVLELDLDFLNANARSMISPVVCSNSDDFSALVIKADGHVVAGKTPLYEIKSK

SEQ ID NO: 72913 - protein, 548 aa, Salmonella paratyphi A
SEAEARPTNFIRQIIDEDLASGKHTTVHTRFPPEPNGYLHIGHAKSICLNFGIAQDYQGQCNLRFDDTNPVKEDIEYVDSIKNDVEWLGFHWSGDIRYSSDYFDQLHAYAVELINKGLAYVDELTPEQIREYRGTLTAPGKNSPFRDRSVEENLALFEKMRTGGFEEGKACLRAKIDMASPFIVMRDPVLYRIKFAEHHQTGNKWCIYPMYDFTHCISDALEGITHSLCTLEFQDNRRLYDWVLDNITIPVHPRQYEFSRLNLEYTVMSKRKLNLLVTDKHVEGWDDPRMPTISGLRRRGYTAASIREFCKRIGVTKQDNTIEMASLESCIREDLNENAPRWAVIDPVKLVIENYPQGESEMVTMPNHPNKPEMGSREVPFSGEIWIDRADFREEANKQYKRLVMGKEVRLRNAYVIKASAVEKDAEGNITTIFCTYDADTLSKDPADGRKVKGVIHWVSAAHALPIEIRLYDRLFSVPNPGAAEDFLSVINPESLVIKQGYGEPSLKAAVAGKAFQFEREGYFCLDSRYATADKLVFNRTVGLRDTW

SEQ ID NO: 72914 - protein, 326 aa, Salmonella paratyphi A
MLTFARQQQRRNVRWLLSLSLLVLLATLLSLCAGEQWIAPGDWLSARGELFVWQIRLPRTLAVLLVGAALALSGAVMQALFENPLAEPGLLGVSNGAGVGLIAAVLLGQGQLAGWALGLCAIAGALIITLILLRFARRHLSTSRLLLAGVALGIICSALMTWAIYFSTSFDLRQLMYWMMGGFGGVDWQQSWLMIALIPVLIWICCQSQPLNMLALGETSGRAAGLPLWFWRNLLVVATGWMVGVSVAMAGAIGFIGLVIPHILRLCGLTDHRVLLPGCALAGAIACYWADVVARLALASAELPIGVVTATLGAPVFIWLLLKSAR

SEQ ID NO: 72915 - protein, 345 aa, Salmonella paratyphi A
MSEINQNVKDSRQQYYQHISGQNLTPLWESLHHLVPQTPNANCAPAYWNYQEIRPLLMESGNVIGAKEAIRRVLVLENPALRGQSSITATLYAGLQLILPGEVAPSHRHNQSALRFIVEGKGAFTAVDGERTPMHTGDFILTPQWRWHDHGNPGSEPVVWLDGLDLPLVNLLGCGFVEDYPEDQQPVTRKEGDYLPRYAANMLPLRHQRGNSSPIFNYRYDRSREALHDLTRMGDPDEWEGYKLRYVNPVTGGYPMPSMGAFLQLLPKGFASRVARSTDSTIYHVVEGAGQVTIGNETFHFSAKDIFVAPTWHEVSFRSSEDTVLFSFSDKPVQEALGLFREARY

SEQ ID NO: 72916 - protein, 668 aa, Salmonella paratyphi A
LTTNQGVRIADDQNSLRAGSRGPTLLEDFILREKITHFDHKRIPERIVHARGSAAHGYFQPYKDLSDITKAAFLCDPQKITPVFVRFSTVQGGAGSADTVRDIRGFATKFYTEEGIFDLVGNNTPIFFIQDAHKFPDFVHAVKPEPHWAIPQGQSAHDTFWDYVSLQPETLHNVMWAMSDRGIPRSYRTMEGFGIHTFRLINAQGKATFVRFHWKPLAGKASLVWDESQKLTGRDPDFHRRDLWEAIEAGDFPEYELGLQLIAEEDEFKFDFDLLDPTKLIPEELVPVQRVGKMVLNRNPDNFFAENEQAAFHPGHIVPGIDFTNDPLLQGRLFSYTDTQISRLGGPNFHEIPINRPTCPYHNFQRDGMHRMDIDTNPANYEPNSINDNWPRETPPAPKRGGFESYQERVDGNKIRERSPSFGEYYSHPRLFWLSQTPIEQQHIIDAFSFELGKVARAYIRERVVDQLAHIDVTLAQGVAHNLGFALTHEQTQIAPPPDVNGLKKDPALSLYAVPDGDVKGRVVAILLNDKVNAAELLTILQALKAKASHAKLLYSRMGEVTADDGSTLTIAATFAGAPSLTVDAVIVPCAILPISRVARARYYLLEAYKHLKPIALAGDTRRFKALLNIDSQGEEGLVEADNVDHHFMDTLVTLMAAHRVWSRAGKI

SEQ ID NO: 72917 - protein, 643 aa, Salmonella paratyphi A
MPKRTDIKSILILGAGPIVIGQACEFDYSGAQACKALREEGYRVILVNSNPATIMTDPEMADATYIEPIHWEVVRKIIEKERPDAVLPTMGAQTALNCALELERQGVLEEFGVTMIGATADAIDKAEDRRRFDIAMKKIGLDTARSGIAHTMEEALAVAADVGFPCIIRPSFTMGGTGGGIAYNREEFEEICERGLDLSPTNELLIDESLIGWKEYEMEVVRDKNDNCIIVCSIENFDAMGIHTGDSITVAPAQTLTDKEYQIMRNASMAVLREIGVETGGSNVQFAVNPKNGRLIVIEMNPRVSRSSALASKATGFPIAKVAAKLAVVYTLDELMNDITGGRTPASFEPSIDYVVTKIPRFNFEKFAGANDRLTTQMKSVGEVMAIGRTQQESLQKALPSLGSGATGFDPKVSLDDPEALTKIRRELKDAGADRIWYIADAFRAGLSVDGVFNLTNIDRWFLVQIEELVRLEEKVAEVGITASTADFLRQLKRKGFADARLAKLAGVPKRKIRKLRDQYDLHPVYKRVDTCAAEFATDTAYMYSTYEDECEANPSVDRGKIMVLGGGPNRIGQGIEFDYCCIHASLGCAKTGYETIMVNCNPETVSTDIRHFPTPILRPVTLEDVLKIVRIEKPKGFLVQWG

SEQ ID NO: 72918 - protein, 382 aa, Salmonella paratyphi A
  MISC_FEATURE (216)..(216): X=any amino acid
LIKSALLVLEDGTQFHGRAIGATGSAVGEVVFNTSMTGYQEILTDPSYSRQIVTLTYPHIGNVGTNEADEESSQVHAQGLVIRDLPLIASNFRNTEDLSSYLKRHNIVAIADIDTRKLTRLLREKGAQNGCIIASDSPDANLALEKAKAFPGLNGMDLAKEVTTTETYRWTQGSWTLKDGLPEAKSEDDLPFHVVAYDFAPSRNILRMLVESRAAXRWCPAQTSAEEVLKMNPDGIFLSNGPGDPAPCDYAIEAIEKFLQTDIPVFGICLGHQLWRWRAGAKTVKMKFGHHGGNHPVKDMDRNVVMITAQNHGFAVDEDSLPANLRVTHKSLFDGTCKGFTVTDKPAFSFQGHPERAQARTMAAPLFDHFIELIEQYRQSAK

SEQ ID NO: 72919 - protein, 272 aa, Salmonella paratyphi A
  MISC_FEATURE (269)..(269): X=any amino acid
MHEAQIRVPLPARWRMGRQLIQAAMAMEGVQLGAALEREGSSLLGSDAGELAGAGKSGVIVQSSLEAVKDDFDVFIDFTRPEGTLTHLAFCRQHGKGMVIGTTGFDDAGKQAIPEASQEIAIVFAANFSVGVNVMLKLLEKAAKVMGYYSDIEIIEAHHRHKVDAPSGTALEMGEAIAGALDKNLKDCAVYSREGYTGERVPGTIGFATVRAGTIVGEHTAMFADIGERVEITHNVPAAMTFANCALRAALWLKTKKNGLFDMREMLGXCNI

SEQ ID NO: 72920 - protein, 72 aa, Salmonella paratyphi A
MAKEDNIEMQGTVLETLPNTMFRVELENGHMVTAHISGKMRKNYIRILTGDKVTVELTPYDLSKGRIVFRSR

SEQ ID NO: 72921 - protein, 282 aa, Salmonella paratyphi A
MVLMIVSGRSGSGKSVALRALEDMGFYCVDNLPVVLLPDLARTLADRQISAAVSIDVRNMPESPEIFEQAMNNLPGAFSPQLLFLDADRNTLIRRYQDTRRLHPLSSKNLSLESAIDKESDLLEPLRSRADLIVDTSEMSVHELAEMLRTRLLGKRERELTMVFESFGFKHGIPIDADYVFDVRFLPNPHWDPKLRPMTGLDKPVAAFLDRHTEVHNFIYQTRSYLELWLPMLETNNRSYLTVAIGCTGGKHRSVYIAEQLADYCRAGKNVQSRHRTLEKRK

SEQ ID NO: 72922 - protein, 240 aa, Salmonella paratyphi A
  MISC_FEATURE (220)..(220): X=any amino acid
QTSIAPLTFLRRLLLRILRALAVFWGGGIALFSVVPVPFSAVMAERQISAWLGGEFGYVAHSDWVSMADISPWMGLAVITAEDQKFPEHWGFDVPAIEKALAHNERNESRIRGASTLSQQTAKNLFLWDGRSWVRKGLEAGLTLGIETVWSKKRILTVYLNIAEFGDGIFGVEAAAQRYFHKPASRLSVSEAALLARVLPNPLRYKANAASGYVRTRHGXIMRQMPNLGGESFMTRNQLN

SEQ ID NO: 72923 - protein, 233 aa, Salmonella paratyphi A
MTTLSCKVTSVEAITDTVYRVRLVPDAAFTFRAGQYLMVVMDERDKRPFSMASTPDEKGFIELHIGASELNLYAMAVMDRILKDREIVVDIPHGDAWLRDDEERPLILIAGGTGFSYVRSILLTALARNPNRDVTIYWGSREEKHLYDLSELEALSVNHPNLRIEPVVEQPEEGWRGRTGTVLTAVLQDYGTLAGHDIYIAGRFEMAKIARDLFCHERNAREDRLFGDAFAFI

SEQ ID NO: 72924 - protein, 135 aa, Salmonella paratyphi A
MRLLHTMLAVGDLQRSIAFYTNVLGMKLLRTSENPEYKYSLAFVGYGPETEEAVIELTYNWGVESYDMGNAYGHIALSVDNAAEACERIRQNGGNVTREAGPVKGGSTIIAFVEDPDGYKIELIEAKDAGRGLGN

SEQ ID NO: 72925 - protein, 309 aa, Salmonella paratyphi A
MATIKDVAKRANVSTTTVSHVINKTRFVAEETRNAVWTAIKELHYSPSAVARSLKVNHTKSIGLLATSSEAAYFAEIIEAVEKNCFQKGYTLILGNAWNNLEKQRAYLSMMAQKRVDGLLVMCSEYPEPLLSMLEEYRHIPMVVMDWGEAKADFTDTVIDNAFAGGYMAGRYLVERGHRDIGVIPGPLERNTGAGRLAGFMKAMEEALINVPDNWIVQGDFEPESGYHAMQQILSQSHRPTPVFCGGDIMAMGLCAADEMGFVPQDVSVIGYDNVRNARYFTPALTTIHQPKDSLGETAFNMLLDRIVN

SEQ ID NO: 72926 - protein, 226 aa, Salmonella paratyphi A
MENQPKLNSSKEVIAFLAERFPHCFSAEREARPLKIGIFQDLVERVGGEMNLSKTQLRSALRLYTSSWRYLYGVKPGATRVDLDGNPCGELEEQHVEHARKQLEEAKARVQAQRSQAKKREAAAAAGEKEDARDRERKPRPVARRKEGAERKPRADKPTTKRRVAPREEKHTPVSDISVLTVGQSLKVKACNNAMDATVLEITKDGVRVQLNSGMSLIVRAEHLVF

SEQ ID NO: 72927 - protein, 447 aa, Salmonella paratyphi A
MLNSIFIIFCLIAVSAFFSISEISLAASRKIKLKLLADEGSINAQRVLKMQENPGMFFTVVQIGLNAVAILGGIVGDAAFSPAFSALFSHYMSPELSEQLSFILSFSLVTGLFILFADLTPKRIGMIAPEAVALRIINPMRFCLFVFRPLVWLFNGMANNIFRLFKIPMVRKDDITSDDIYAVVEAGALAGVLRKQEHELIENVFELESRTVPSSMTSRESIIWFDLHEDEQSLKKKVAEHPHSKFLVCNEDIDHIIGYVDSKDLLNRVLANQSMALNSGVQIRNTLIVPDTLTLSEALESFKTAGEDFAVIMNEYALVVGIITLNDVMTTLMGDLVGQGLEEQIVARDENSWLVDGGTPIDDVMRVLDIDEFPQSGNYETIGGFMMFMLRKIPKRTDSVKFSGYKFEVVDIDNYRIDQLLVTRLDNKSNVPAPKLPDAQGKEDSAA

SEQ ID NO: 72928 - protein, 545 aa, Salmonella paratyphi A
  MISC_FEATURE (106)..(106): X=any amino acid
  MISC_FEATURE (318)..(318): X=any amino acid
  MISC_FEATURE (354)..(354): X=any amino acid
QQTIRAPRGTVLTAKSWLTEAPLRMLMNNLDPDVAENPHELVVYGGIGRARNWECYDAIVDALTRLEADETLLIQSGKPVGVFKTHDNAPRVLIANSNLVPHWATXEHFNELDAKGLAMYGQMTAGSWIYIGSQGIVQGTYETFVEAGRQHYNGTLAGRWVLTAGLGGMGGAQPLAATLAGACSLTIECQQSRIDFRLRTRYVDEQAATLDDALARITRYTREGKAVSVALCANAADILPELVNRGVRPDLVTDQTSAHDPLHGYLPSGWCWEEYQKNAQSDPTGRCRQAKRSMAVHVRAMLAFSQMRVPTYDYGNKXTQMAKEMGMENAFDFPGLVPAYIRPLFCRDIGPFRXVALSGDQQDIYKTDAKVKEIVAEDKHLHHWLDNARERIHFQGLPARICWVGLEWRQKLGLAFNEMVRCGEVSPPIVIGRDHLDSGSVASPNRETEAMRDGSDAVSDWPLLNALLNTTSGATWVSLHHGGGVGMGFSQHAGMVIVCDGTDEAAARIRRVLHNDPATAVMRHADAGYDLAVECAVEQGLNLPM

SEQ ID NO: 72929 - protein, 504 aa, Salmonella paratyphi A
  MISC_FEATURE (70)..(70): X=any amino acid
  MISC_FEATURE (151)..(151): X=any amino acid
  MISC_FEATURE (205)..(205): X=any amino acid
  MISC_FEATURE (222)..(222): X=any amino acid
  MISC_FEATURE (448)..(448): X=any amino acid
  MISC_FEATURE (454)..(454): X=any amino acid
MNTMTLTPGQLSLSQLYDVWRHPVQLRLDASAIDGINASVACVNDIVAEGRTAYGINTGFGLLAQTPIAXEDLQNLQRSLVLSHAAGLGDPLDDAMVRLIMVLKINSLARGFSGIRLSVIEALIALVNAGVYPLIPAKGSVGASATLALSXLSLTLLGGEKARWQANGSRRSAVKKAGLNLSRGGQRGAALLNGTQRRRPSRWRXCMRHRNYLPPPSVCARXLPKPYWGSRRPFDATHSCRARTTGQIDAARLFRHLLTDTSAIAESHHHCHKVQDPYSLRCQPQVMGACLTQLRQTKEVLLAEANAVSDNPLVFADAGEVISGGNFHAEPVAMAADNLALAIAEIGALSERRIALMMDKHMSQLPPFLVKNGGVNSGFMIAQVTAAALASENKALAHPHSVDSLPTSANQEDHCLQWPRAAGRRLWEMAANTRGIIAVEWLAACQGXIYGKGXPPARYLEQARQTLRERVAHYTQDRFFAPDIECATTLLAQGALQRLLPDFM

SEQ ID NO: 72930 - protein, 182 aa, Salmonella paratyphi A
MIRQRRRALTSEQQRRFGQQAAARILSFLPVVMAHTVAVFLSFDGELDPQPLIEQLWRAGKRVYLPVLHPFSPGNLLFLHYHPQSALVTNRLKIQEPRLDVRDVLPLAKLDVLVTPLVAFDEDGQRLGMGGGFYDRTLQNWQQHKILPVGYAHDCQLVENLPVEEWDIRLPAVGDAVKIWEW

SEQ ID NO: 72931 - protein, 444 aa, Salmonella paratyphi A
MKNVIRTPETHPLTWRLRDDKQPVWLDEYRSKNGYEGARKALTGLSPDEIVSQVKDAGLKGRGGAGFSTGLKWSLMPKDESMNIRYLLCNADEMEPGTYKDRLLMEQLPHLLVEGMLISAFALKAYRGYIFLRGEYIEAAVHLRRAIAEATEAGLLGKNIMGTGFDFELFVHTGAGRYICGEETALINSLEGRRANPRSKPPFPATSGVWGKPTCVNNVETLCNVPAILANGRWYQNISKSKDAGTKLMGFSGRVKNPGLWELPFGTTAREILEDYAGGMRDGLKFKAWQPGGRETDFLTEAHLDLPMEFESIGKAGSRLGTALAMAVDHEIGMVSLVRNLEEFFARESCGWCTPCRDGLPWSVKILRALELAKGHPGDIETLEQLCRFLGPGKTFCAHHRARVEPLQSAIKYFREEFEAGIKQPFSNTHLINGIQPNLLKERW

SEQ ID NO: 72932 - protein, 166 aa, Salmonella paratyphi A
MHENQQPQTEAFELSAAEREAIEHEKHHYEDPRAASIEALKIVQKQRGWVPDGAIYAIADVLGIPASDVEGVATFYSQIFRQPVGRHVIRYCDSVVCHITGYQGIQAALEKNLNIKPGQTTFDGRFTLLPTCCLGNCDKGPNMMIDEDTHSHLTPEAIPELLERYK

SEQ ID NO: 72933 - protein, 256 aa, Salmonella paratyphi A
MSETFDPRCVWFVGAGPGDCELITLKGYRLLQQAQVVIYAGSLINTELLDYCPAQAERYDSAELHLEQIIELMAAGVKAGKTVVRLQTGDVSLYGSVREQGEELTRRGIDWQVVPGVSAFLGAAAELGVEYTVPEVSQSLIITRLEGRTPVPAREQLEVASHQTSMAIYLSVQRIHRVAERLICGGYPATTPVAVIYKATWPESQTVRGTLADISDKVRDAGIRKTALILVGNFLGKEYHYSRLYAADFSHEYRKA

SEQ ID NO: 72934 - protein, 403 aa, Salmonella paratyphi A
  MISC_FEATURE (63)..(63): X=any amino acid
  MISC_FEATURE (276)..(276): X=any amino acid
VKIYLVGGAVRDALLGLPVKDKDWVVVGATPREMLDAGYQQVGRDFPVFLHPQTHEEYALARXRKSGSGYTGFTCYTAPDVTLEADLQRRDLTINALARDDDGQIIDPYHGRRDLEARLLRHVSPAFGEDPLRVLRGAFAARYAHLSFRIADETLALMREMTAAGELEHLTPERVWKETENALTTRNPQVYFQVLRDCAPCAVLFPEIDALFGYPRRAKWHPEIDTGVHTLMTLSMAAMLSPQLDVRFATLCHDLGKGLTPKNLWPRHHGHGRRAXNLVEQLCQRLRVPNDLRDLAKLVAEYHDLIHTFPILQPKTIVKLFDAIDAWRKPQRVEQIALTSEADVRGRTGFEASDYPQGAGCAKAWQVAQAVPTKEVVEAGFKGIEIREELTKRRIAAVANWKE

SEQ ID NO: 72935 - protein, 208 aa, Salmonella paratyphi A
  MISC_FEATURE (203)..(203): X=any amino acid
MSAIAPGMILFAYLCGSISSAILVCRIAGLPDPRESGSGNPGATNVLRIGGKGAAVAVLIFDILKGMLPVWGAYALGVTPFWLGLIAIAACLGHIWPVFFGFKGGKGVATAFGAIAPIGWDLTGVMAGTWLLTVLLSGYSSLGAIVSALIAPFYVWWFKPQLHFPVSMLSCLISAHHDNIQRLWRRQETKIWTKLKKKRQKDXAGTAS

SEQ ID NO: 72936 - protein, 235 aa, Salmonella paratyphi A
PDLPISRGSPHMEGHLLAPMLEDNPPDFPFVALLVSGDHTQLISVTGIGQYELLGESIDDAPEVDKTAKLLGLDYPGGPMLSKMASQGTAGVFVFPRPMTDRPGLDFSFSGLKTFAANTIRSNGDDEQTRADIARAFEDAVVDTLMIKCKRALESTGFKRLVMAGGVTLTATLRRTCRNMQKRRGKCSMRRPEFCTDNGAMIAMPEWCGFKAGVTADLGVTVRPRWPLASCRRRK

SEQ ID NO: 72937 - protein, 414 aa, Salmonella paratyphi A
MKWLCSVGVAVSLAMQPALAENLFGNHPLTPEARDAFVTDLLKKMTVDEKIGQLRLISVGPDNPKEASREMIKDGQVGAIFNTVTRQDIRQMQDQVMALSRLKIPLFFAYDVVHGQRTVFPISLGLASSFNLDAVRTVGRVSAYEAADDGLNMTWAPMVDVSRDSAWGRASEGFGEDTYLTSIMGETMVKAMQGKSPADRYSVMTSVKHFAAYGPLEGGKEYNTVDMSSQRLFNDYMPPYKAGLDAGSGAVMVALNSLNSLNGTPATSDSWLLKDVLRDEWGFKGITVSDHGAIKELIKHGTAADPEDAVRVALKAGVDMSMADEYYSKYLPGLIKSGKVTMAELDDATRHVLNVKYDMGLFNDPYSHLGPKESDPVDTNAESRLHRKEAREVARESVVLLKNRLETLPLEKSG

SEQ ID NO: 72938 - protein, 426 aa, Salmonella paratyphi A
METTQTSTIASIDSRSAWRKTDTMWMLGLYGTAIGAGVLFLPINAGVGGMIPLIIMAILAFPMTFFAHRGLTRFVLSGKNPGEDITEVVEEHFGIGAGKLITLLYFFAIYPILLVYSVAITNTVESFLTHQLAINPPRAILSLILIVGMMTIVRFGEQMIVKAMSILVFPFVAALMLLALYLIPQWNGAALETLSFDSAASTATALWMTLWLAIPVMVFSFNHSPIISSFAVAKREEYGEGAEKKCSKILAFAHIMMVLTVMFFVFSCVLSLTPADLAAAKEQNISILSYLANHFNAPIIAWMAPIIAMIAITKSFLGHYLGAREGFNGMVIKSLRGKGKSIEINKLNKITALFMLVTTWIVATLNPSILGMIETLGGPIIAMILFLMPMYAIQKVPAMRKYSGHISNVFVVIMGLIAISAIFYSL

SEQ ID NO: 72939 - protein, 448 aa, Salmonella paratyphi A
LITHISPLGSMDMLSQLEVDMLKRTASSDLYQLFRNCSLAVLNSGSLTDNSKELLSRFENFDINVLRRGVKLELINPPEDAFVDGRIIRALQANLFAVLRDILFVNGQIHNAGRFQHLDLESSTHITNLVFSILRKARALHVGEAPNMVVCWGGHSINEKSYLMPIVGTQWDYRANICTAAACCDESPMKSAAVGQASSGIKEHRYIGMTEPSINFAEPPNPLVNELIIMPDIEKRLEAFVRIAHGIIIFPGGVGTAEELLYLLGILMNPANKNQVLPLILTGPKESADYFRVLDEFITHTLGEAARRHYRIIIDDAAEVARLMKKAMPQVKENRRDTGDAYSFNWSMRIAPDLQVPFEPSHENMANLKLYPDQPVEILAADLRRAFSGIVAGNVKEVGIRTIEANGPYKIHGDREMMRRMDDLLQGFVAQHRMKLPGSAYIPCYEIC

SEQ ID NO: 72940 - protein, 407 aa, Salmonella paratyphi A
  MISC_FEATURE (283)..(283): X=any amino acid
MKILVYGINYSPELTGIGKYTGEMVAWMAQEGHEVRVITAPPYYPQWKVGERYSAWRYRWEEGEATVWRCPLYVPKQPSTLKRLLHLGSFALSSFFPLMAQRRWKPDRIIGVVPTLFCTPGMRLLATLSGARTVLHIQDYEVDAMLGLGMAGKVKRGSVARLATAFERSALRNVDNVSTISRSMMNKAREKGVAAEKILFFPNWSEVARFQDVNDADVTALRQQLGLAEGKKIVLYSGNIGEKQGLEKVIDAAERLRDRPLIFAIVGQGGGKARMENMARERXWQIIKFLPLQPYDALPALLKMGDCHLVVQKRGAADAGTPSKLTNILAVGGNAVITAEPHTELGQLCARYPGIAVCVEPESTDALVDGISQALAMAEKNMTAREYAERTLNKENVLRQFIADIRG

SEQ ID NO: 72941 - protein, 528 aa, Salmonella paratyphi A
  MISC_FEATURE (383)..(383): X=any amino acid
KMTLPFKPHLIALVCSAGLFAASGVLYVKSRAPEAPAQGELPAPEQTQTAVPAPVAKTTFTTAQIDQWVSPVALYPDALLSQVLMASTYPANVVQAVQWSRDNPTLQGDAAIQAVASQPWDPSVKSLVAFPQLMALMGENPQWVQNLGDAFLAQPQDVMDAVQRLRLLAQQTGSLKSTPQQTVTSVPKSSASTAVTTTTTTTTSASTPATPSTVIKIEPANPQVVYVPNYNPATVYGAWPNTAYPPVYLPLPGQQFADSFVKGFGYSLGVATTYALFSSIDWDDDDHHHHDDDHHDDDYHHGGNGYQHNGDNININVNNFNRISGQNLPGQTMGWQHNPAWRNGVPYPNNTVAQRFHPTNVSGGLSTTQQAPVSRDSQRQAPXTQFQQRTHTANASLPAPGTRDAQRKGPIEQLNQIAQRNNYRGYDGTQNSSRSRGAQQTLNKSTTQQHRSELKAKAQQHPVSQQQRDTARQRIESSTPQQRQAFRQNMHANVFSGNDQSIAVMAIATATRPGKPSRQSLKHRATRR

SEQ ID NO: 72942 - protein, 237 aa, Salmonella paratyphi A
MQKVFFTMLNSIKVGFIVLLTLFTSLNVQAAGGIALGATRVIYPSAAKQTSLAISNSDTQERYLVNSWIENSAGQKEKTFIVTPPLFVSEPKSENTLRIIYAGQPLPADRESLFWMNVKAIPSVDKSHIEGKNVLQLAILSRIKLFVRPANLPQTPEDAPTLLKFSRVGNHLKITNPSAYYLTLVNISVGAKKIDNVMIAPKSDMQIPLPTGAQGSVTFQTVNDYGALTSSTTGSLG

SEQ ID NO: 72943 - protein, 390 aa, Salmonella paratyphi A
  MISC_FEATURE (210)..(210): X=any amino acid
QQSRRRWPKSFDLTSTAFLIVAFLTGIAGALQTPTLSIFLTDEVHARPGMVGFFFTGSAVIGIIVSQFLAGRSDKKDDRKKLIVFCCVLGMLACVLFAWNRNYFILLFIGVFLSSFGSTANPQMFALAREHADRTGREAVMFSSILRAQVSLAWVIGPPLAYALAMGFSFTVMYLSAALLFIVCGVMVWFFLPSMRKDAPLATGTLEAPXRNRRDTLLLFVICTLMWGTNSLYIINMPLFIINELHLPEKLAGVMMGTAGLEIPTMLIAGYFAKRLGKRLLMCIAVVAGLCFYAGMLLAHTPATLLGLQLLNAIYIGILGGIGMLYFQDLMPGQAGSATTLYTNTIRVGWIIAGSLAGIAAEIWNYHAVFWFALVMIVATMFCLARIKDV

SEQ ID NO: 72944 - protein, 343 aa, Salmonella paratyphi A
MEVKTQSCVVAGKRAVAVTEQNIEWNNKGTLVQITRGGICGSDLHYYQEGKVGNFTVKAPMILGHEVIGKIVHSDSDLLREGQPVAINPSKPCGHCKYCLQHEENHCTEMRFFGSAMYFPHVDGGFTRFKAVDTAQCIPWPEQADEKAMAFAEPLAVAIHAAHEAGDLQGKRVFISGVGPIGCLIVSAVKTLGAAEVVCADISTRSLSLARQMGADTLVNPQHDSLDGWKAEKGYFDISFEVSGHPSSISTCLEVTRAKGVMVQVGMGGAVPNFPMMMLISKEISLKGSFRFTTEFNTAVSWFANRVINPLPLLSAEYPFTDLEAALIFAGDKTQAAKVQLVF

SEQ ID NO: 72945 - protein, 317 aa, Salmonella paratyphi A
  MISC_FEATURE (111)..(111): X=any amino acid
MTVTSMLDNVLRIATRQSPLALWQAHYVKDSLMGTHPGLTVELVPMVTRGDVILDTPLAKVGGKGLFVKELEIALLEKRADIAVHSMKDVPVAFPDGLGLVTICEREDPRXPFVSNKYHSLDDLPAGSIVGTSSLRRQCQLAERRPDLIIRSLRGNVGTRLGKLDNGDYDAIILAVAGLKRLGLESRIRTALPPDVSLPAVGQGAVGIECRLDDARTQALLAPLNHSQTALRVTAERAMNTRLEGGCQVPIGSYAEIINGEIWLRALVGAPDGSVMVRGERRGSPEQAEQMGISLAEELLENAHAAILTEVYNARRP

SEQ ID NO: 72946 - protein, 217 aa, Salmonella paratyphi A
MFHYGKCVVRTLFLLLVCCSLSGCLSFGLILATDKDGNRHQSTWKSDTVTALSLGKDSNGKTGWVFVGEHFDYLLTQGGDNVVALLKDATIRRDKMRVKDGVKFLIDTDKKEFTGEVNVTYAWVDEKDKLAAVGYGFICADGAVNCTLSVMDLKGTIHQKNKEQSVTQQLSFYHPFTVEFYQYQRSMSGAKFGRVLLPVTLALDIVTMPLQLLIFSR

SEQ ID NO: 72947 - protein, 280 aa, Salmonella paratyphi A
MLSYRHSFHAGNHADVLKHTVQSLIIESLKEKEKPFLYLDTHAGAGRYQLGSEHAERTGEYLEGIARIWQQDDLPAELEPYISVVKHFNRSGQLRYYPGSPLIARQLLREQDSLQLTELHPSDFPLLRAEFQKDNRARWERADGYQQLKAKLPPVSRRGLILIDPPYEMKTDYQAVVSGISEGYKRFATGTYALWYPVVLRQQIKRMIHELEATGIRKILQIELAIRPDSDQRGMTASSMIVVNPPWKLEQQMNNVLPWLHSRLAPNGHGHTSVSWIVPE

SEQ ID NO: 72948 - protein, 221 aa, Salmonella paratyphi A
  MISC_FEATURE (172)..(172): X=any amino acid
  MISC_FEATURE (204)..(204): X=any amino acid
  MISC_FEATURE (205)..(205): X=any amino acid
MTKHYDYIAIGGGSSGIASINRAAMYGQKCALIEAKELGGTCVNVGCVPKKVMWHAAQIREAIHLYGPDYGFDTTINQFDWSKLIASRTAYIDRIHTSYDNVLGKNNVDVIKGFARFVDAKTIEVNGETITADHILIATGGRPSHPSIPGVEYGIDSDGFFALSALPERVDXVGAGYIAVELAGVINGWGGKTHLFVRKHAPCXXLTPMISETLVEVMNAE

SEQ ID NO: 72949 - protein, 746 aa, Salmonella paratyphi A
  MISC_FEATURE (14)..(14): X=any amino acid
NGKPASGLGIKLAXTANALDTATAIKAKLAELQPFLPQGMKVVYPYDTTPFVKISIHEVVKTLFEAIILVFLVMYLFLQNIRATLIPTIAVPVVLLGTFAVLAAFGYSINTLTMFGMVLAIGLLVDDAIVVVENVERVMMEDNLSPREATEKSMSQIQGALVGIAMVLSAVFIPMAFFGGSTGAIYRQFSITIVSAMALSVLVALILTPALCVRCLKPVSAEHHEKKSGFFGWFNTRFDHSVNHYTNSVSGIVRNTGRYLIIYLLIVVGMAVLFLRLPTSFPAGRDQGVFLTMIQLPSGATQERTQKVLDQVTHYYLNNEKANVESVFTVNGFSFSGQGQNSGMAFVSLKPWEERNGEENSVEAVIARATRAFSQIRDGLVFPFNMPAIVELGTATGFDFELIDQGGLGHDALTKARNQLLGMVAKHPDLLVRVPRTAGRHAQFKLDVDQEKAQALGVSLSDINETISAALGGYYVNDFIDRGRVKKVYVQADAQFRMLPGDINNLYVRSANGEMVPFSTFSSARWIYGSPRLERYNGMPSMELLGEAAPGRSTGEAMSLMENLASQLPNGIGYDWTGMSYQERLSGNQAPALYAISLIVVFLCLAALYESWSIPFSVMLVVPLGVVGALLAASLRGLNNDVYFQVGLLTTIGLSAKNAILIVEFAKDLMEKEGRGLIEATLEASRMRLRPILMTSLAFILGVMPLVISRGAGSGAQNAVGTGVMGGMLTATLLAIFFVPVFFVVV

SEQ ID NO: 72950 - protein, 1049 aa, Salmonella paratyphi A
SISSDVNDPAFRNITFDQLVAAYRESTKALVEGGVDLILIETVFDTLNAKAAVFAVKEEFEALGVDLPIMISGTITDASGPYLSGQTTEAFYNSLRHAEALTFGLNCALGPDELRQYVQELSRIAECYVTAHPNAGLPNAFGEYDLDADTMAKQIREWAEAGFLNIVGGCCGTTPEHIAAMSRAVAGLPPRQLPDIPVACRLSGLEPLNIGDDSLFVNVGERTNVTGSAKFKRLIKEEKYSEALDVARQQVESGAQIIDINMDEGMLDAEAAMVRFLSLIAGEPDIARVPIMIDSSKWEVIEKGLKCIQGKGIVNSISMKEGVEAFIHHAKLLRRYGAAVVVMAFDEQGQADTRERKIKICRRAYKILTEEVGFPPEDIIFDPNIFAVATGIEEHNNYAQDFIGACEDIKRELPHALISGGVSNVSFSFRGNDPVREAIHAVFLYYAIRNGMDMGIVNAGQLAIYDDLPAELRDAVEDVILNRRDDGTERLLELAEKYRGSKTDEAANAQQAEWRSWDVKKRLEYSLVKGITEFIEQDTEEARQQAARPIEVIEGPLMDGMNVVGDLFGEGKMFLPQVVKSARVMKQAVAYLEPFIEASKEKGSSNGKMVIATVKGDVHDIGKNIVGVVLQCNNYEIVDLGVMVPAEKILKTAKEVNADLIGLSGLITPSLDEMVNVAKEMERQGLTIPLLIGGATTSKAHTAVKIEQNYSGPTVYVQNASRTVGVVAALLSDNQRDDFVARTRIEYDIVRIQHARIKPVRAESTLEERAIMIWRSIGTLHPAGSPPSGSAGGEASIETLRNYIDWTPFFMTWSLAGKYPRILEDEVVGVEAQRLYKDANDMLDKLSAEKLLNTRGVVGLFPANRVGDDIEIYRDETRTHVLTVSHHLRQQTEKVGFANYCLADFVAPKLSGKADYIGAFAVTGGLEEDALADAFEAQHDDYNKIMVKAIADRLAEAFAEYLHERVRKVYWGYAPNESLSNDELIRENYQGIRPAPGYPACPEHTEKGTIWQLLDVEKHTGMKLTESFAMWPGASVSGWYFSHPESKYF

SEQ ID NO: 72951 - protein, 535 aa, Salmonella paratyphi A
VLTLLHLLSAVALLVWGTHIVRTGVMRVFGARLRTVLSRSVEKKPLAFCAGIGVTALVQSSNATTLLVTSFVAQDLVALTPALVIVLGADVGTALMAGILTFDLSWLSPLLIFIGVIFFLGRKQSRAGQLGRVGIGLGLILLALELIVQAVTPITQANGVQVIFASLTGDIMLDALIGAMFAIISYSSLAAVLLTATPTAAGIISFPVALCLVIGANLGSGLLAMLNNSAANAAARRVASASLLFKLIGSLVILPFVHPLANLMDELSLPKSELVIYFHVFYNLVRCLAMVPFAELMARFCKRIIRDEPELDTHLKPKHLDVSALDTPTLALANAAREVLRIGDAMEQMMEGLKKVMHGEPREEKALRKLADDVNVLYTAIKLYLARMPKDELAAEESRRWAEIIEMALNLEQASDIIERMGSEIADKSLAARRAFSEEGLKELDALYDQLLSNLQLAMSVFFSGDVTSARRLRRSKHRFRILNRRYSHAHVDRLHQQNVQSIETSSLHLGLLGDMKRLNSLFCSVAYSVLEQPD

SEQ ID NO: 72952 - protein, 251 aa, Salmonella paratyphi A
MTKVAIVTASDSGIGKACALLLAQNGFDIGITWHSDERGAQETAKKAAQFGVRAETIHLDLSQLPEGAQAIEHLIQRLGRVDVLVNNAGAMTKSAFIDMPFTQWRQIFTVDVDGAFLCAQIAARHMIKQGEGGRIINITSVHEHTPLPQASAYTAAKHALGGLTKSMALELIEYHILVNAVSPGVIATPMNDMDDSDIEPGSEPSIPIARPGSTHEIASLVAWLCSEGASYTTDQSLIVDGGFMLVNPQFN

SEQ ID NO: 72953 - protein, 289 aa, Salmonella paratyphi A
MNNHFKCIGIVGHPRHPTALTTHEMLYRWLCDQGYEVIVEQQIAHELQLKNVPTGTLAEIGQQADLAVVVGGDGNMLGATRTLARYDINVIGINRGNLGFLTDLDPDNALQQLSDVLEGRYISEKRFLLEAQVCQQDRQKRISTAINEVVLHPGKVAHMIEFEVYIDETFAFSQRSDGLIISTPTGSTAYSLSAGGPILTPSLDAITLVPMFPHTLSARPLVINSSSTIRLRFSLRRSDLEISCDSQIALPIQEGEDVLIRRCDYHLNLIHPKDYSYFNTLSTKLGWSK

SEQ ID NO: 72954 - protein, 288 aa, Salmonella paratyphi A
MQRLELRSRNAILLLFLTGQTVDTTMPVFALLALVAYSFSLALIVPGLLQKNSGWRRMAILSAVIALVCHAVALESRILPGGDSGQNLSLLNVGSLVSLMICTVMTIVASVNRGWLLLPIVYAFALINLAFATFMPNEYITHLEATPGMMVHIGLSLFSYATLIIAALYALQLAWIDYQLKNKKLAFSNEMPPLMSIERKMFHITQIGVVLLTLTLCTGLFYMHNLFSTENIDKAVLSIVAWFVYIVLLWGHYHEGWRGRRVVWFNVAGAGILTLAYFGSRILQQFVS

SEQ ID NO: 72955 - protein, 456 aa, Salmonella paratyphi A
  MISC_FEATURE (11)..(11): X=any amino acid
  MISC_FEATURE (52)..(52): X=any amino acid
SRLPVKSISIXPDAGHNRHTSWPIPSYQNVPPILFKIGDRMDQTFGLLATAXTWINRTPIRENQAADVPLAIDHFRYLASCIRAQKGGIREVDSETVTTIFHEPLGVVGQIIPWNFPLLMASWKMRPALAAGNCVVLKPGTPDPLSVLLLMEVIGDLLPPGVVNVVNGAGGEIGEYLATSKRIAKVAFTGSTEVGQQIMQYATQNIIPVTLELGGKSPNIFFADVMDEEDAFFDKALEGFALFAFNQGEVCTCPSRALVQESIYERFMERAIRRVESIRSGNPLDSGTQMGAQVSHGQLETILNYIDIGKKEGADILTGGRRKELDGELKEGYYLEPTILFGKNNMRVFQEEIFGPVLAVTTFKTMEEALEIANDTQYGLGAGVWSRNGSLAYKMGRGIQAGRVWTNCYHAYPAHAAFGGYKQSGIGRETHKMMLEHYQQTKCLLVSYSDKPLGLF

SEQ ID NO: 72956 - protein, 285 aa, Salmonella paratyphi A
FDSTNIRQTMTDLIHRPRRLRKSAALRAMFEETTLSLNDLVLPIFVEEELDDYKAIDAMPGVMRIPEKQLAREIERIANAGIRSVMTFGISHHTDDTGSDTWKEDGLVARMSRICKQTVPEMIVMSDTCFCEYTSHGHCGVLCEHGVDNDATLANLGKQAVIAAAAGADFIAPSAAMDGQVRLSAALDAAGFTDTAIMSYSTKFASSFYGPFREARGTALKGDRKTYQMNPMNRREAIRESLLDEAQGADCLMVKPAGAYLDVLREIRERTELPWRYQVSGEYAM

SEQ ID NO: 72957 - protein, 330 aa, Salmonella paratyphi A
  MISC_FEATURE (130)..(130): X=any amino acid
NTDATFSAANKADLGAYTYQAKQEGNTVVLEQMELTDYANMALSIPSANTNIWNLEQDTVGTRLTNARHGLADNGGAWVSYFGGNFNGDNGTINYDQDVNGIMVGVDTKVDGNNAKWIVGAAQASRKAIXSDRTGQVDQDSQSAYIYSSARFANNIFVDGNLSYSHFNNDLSANMSDGTYVDGNTSSDAWGFGLKLGYDLKLGDAGYVTPYGSVSGLFQSGDDYQLSNDMKVDGQSYDSMRYELGVDAGYTFTYSEDQALTPYFKLAYVYDDSNNDADVNGDSIDNGVERSAVRVGLGTQVQLHEDFSAYTDANYLGGGDGDQDWSANVG

SEQ ID NO: 72958 - protein, 218 aa, Salmonella paratyphi A
  MISC_FEATURE (84)..(84): X=any amino acid
QDLTGIIARNAMLSLNKPLQEFNRLDKCLSKHGTRFEFVNDKEIICSPDESNTHTFVILEGVVSLVRGDKVLIGIVQAPFIFAXADGVAKKEAQYKLIAESGCIGYRLSSSQTLAIIEQNQLCVEAFCWIVWKSQVLELRDKQLIGNNSYDQIRATLMTMIEWDEELRSRIGVMNYIHQRTRVSRSVVAEVLAALRKGNYIEMNKGKLISINRLPSEY

SEQ ID NO: 72959 - protein, 276 aa, Salmonella paratyphi A
MGLRQSLRIAASTLLLACGLQFAHADSSPQTIVFGVAPGPYGDMVKQAIAPTLKEKGYKVVVREFSDYVQPNMALANGSIDANLFQHTLYFDKFTADKGLKLSKLIVVPTAGMGFYSRKINSLDALKKGDIITLSNDPTNLARGLRFLQSLGLITIKDNIDPTKASERDIASNPKGLVFKPLEAAQLPRTLDGVTGALVNGNFAVAAGLDLSSAIKQEHLDENLKNIIAVRSEDADKPFAKDIVEAVKSPAYRAVIDDPKNIYSAFQKPEWMTATP

SEQ ID NO: 72960 - protein, 247 aa, Salmonella paratyphi A
MHTQVLFEHPLNEKMRTWLRIEFLIQQLSINLPIADHAGALHFFRNISDLLDVFERGEVRTELLKELERQQRKLQAWVEVPGVDQDRIEALRQQLKSAGSVLISAPRIGQQLREDRLIALVRQRLSIPGGCCSFDLPTLHIWLHLQQAQRDAQIESWLASLNPLTQALTLVLDLIRNSAPFRKQTSLNGFYQDNGDDADLLRLMLTLDSQLYPQISGHKSRFAIRFMPLDSENGLVPERLDFELACC

SEQ ID NO: 72961 - protein, 294 aa, Salmonella paratyphi A
MIAENHSFTRAAAQLHISTSALSQNMRQLEDELGVKLLNRTTRRVGLTEAGHAFLASIRPALAHIDEAMEHARQSRDIPGGTLRLTVPRTAATLLLQPNLAGFMRDYPDIRLDIDVNDGFVDLINERFDAGIRFGDAVQLDMNVVPLGDVLRPAIVASPAYLARFGTPLHPQELINHRCLCHRFTRESGLYRWEFVHGAQRLEITPEAALMVNDKALRLSAARDGAGLTYVFEQDVHEDLQDGRLCSVLEEWLPAADRFYLYYPGRAHMAPKLRVFIDYFCHKAILPSQQSHHR

SEQ ID NO: 72962 - protein, 317 aa, Salmonella paratyphi A
  MISC_FEATURE (290)..(290): X=any amino acid
VSAIGLGCMGMSAFYGAHDDSTSIKTLHYALDQGVTLLDTADMYGPYTNERLVGKAIADRRDRVFLATKFGIVLDPANPMARGVNGRPEYVRRSCEQSLQRLGVDHIDLYYQHRVDPSVPIEETVGAMADLVREGKVRYLGLSEASTQTLERAHNVHPITALQSEYSLWSREAEISALSTCERLGIGFVAYSPLGRGFLTGTIKTPEDFAANDFRRTNPRFMGESFSRNLRLAEAIKQMAREKECTPAQLALAWLLARNRHIVPIPGTRHCARVDENLGALSLTLSPQSXRQIEAVFPHDTAAGPRYWPEIMSTLNR

SEQ ID NO: 72963 - protein, 486 aa, Salmonella paratyphi A
  MISC_FEATURE (289)..(289): X=any amino acid
AIAWVVNRLIVHSCRKIARELNDIPQQELIGHQLALPRLHQDDEIGMLVRSYNLNQQLMQRQREEQTDNAMRFPVSELPNKAFLMALLEQVITRQQTTALIIVTCETLRDTAGVLQETQREILLLTLVEKLKSVLAPRMVLTQVSGYDFAIIAHGSKEPCTPITLGQQILTIINERLPIQGIQLRPSCSIGIAMYYGDLTAEALYGRAVSAAFTGAEKVKNQIQFFDPAQMEAAQQRLTEESDILTALDNHQFAICCSAGSRCAGNVLSAEALLRMQQPDVAGNCREGXLSALNSCGLMVTVGHWVLEESCRQLAAWQERGVTLPLSVNLSALQLMHPGMVSDLLELLNRYRIQPGTLILEVTESRRIDDPHAAVAILRPLRNAGVRIALDDFGMGYAGLRQLQHMKSLPVDILKIDKMFVDGLPDDHSMVTAIILMARSLNLQLIAEGVENEAQRAWLEQAGVNVAQGFLFARPVPADIFEERYL

SEQ ID NO: 72964 - protein, 427 aa, Salmonella paratyphi A
  MISC_FEATURE (386)..(386): X=any amino acid
MKTSLFKSLYFQVLTAIAIGILLGHYYPELGAQMKPLGDAFVKLIKMIIAPVIFCTVVTGIAGMESMKAVGRTGAVAVLYFEIVSTIALIIGLIIVNVVQPGAGMNVDPATLDAQAVAVYAAQAKEQGIIAFLMDVIPGSVIGAFASGNILQVLLFAVLFGFALHRLGSKGQLIFNVIESFSQVIFGIINMIMRLARIGAFGAMAFTIGKYGVGSLVQLGQLIICFYITCILFVVVVLGTIARVTGFSIFKFIRYIREELLIVLGTSSSESALPRMLDKMEKLGCRKSVVGLVIPTGYSFNLDGTSIYLTMAAVFIAQATNSHMDIFHQITLLVVLLLSSKGVAGVTGSGFIVLAATISAVGHLPVAGLALILGIDRFMSEARADXLVGNGVATVVVAKWVKELDHQKLDDVLNNRAPDGKTHEISS

SEQ ID NO: 72965 - protein, 608 aa, Salmonella paratyphi A
  MISC_FEATURE (442)..(442): X=any amino acid
  MISC_FEATURE (445)..(445): X=any amino acid
  MISC_FEATURE (455)..(455): X=any amino acid
  MISC_FEATURE (511)..(511): X=any amino acid
MCGIVGAIQRDVAEILLEGLRRLEYRGYDSAGLAVVDAEGHMTRLRRLGKVQMLAQAAEEHPLHGGTGIAHTRWATHGEPSEANAHPHVSEHIVVVHNGIIENHEPLREALKARGYTFVSETDTEVIAHLVNWELKQGGTLREAVLRAIPQLVGAYGTVIMDTRHPDTLLAARSGSPLVIGLGMGENFIASDQPALLPVTRRFIFLEEGDIAEITRRSVNIFDNTGAEVKRQDIESNLQYDAGDKGIYRHYMQKEIYEQPNAIKNTLPGRISHGQVDLSELGPNADELLSKVEHIQILAAVRSYNSGMVSRYWFESLAGIPCDVEIASEFRIANLAVRRNSLMITLSQSGETADTLAGLRLSKELGYLGSLAICNVPGSSLVRESDLALMTNAGRKLAVHLPKPSTTQLTVLLMLVAKLSRLKGLDASIEHDIVHGLQALRXSYXADLSQDKTHXAACRRFSDKHHALFLGRGDQYPIALEGPWKLKEISYIHAEAYAAGELKHGPLAPDXRRYAGDVVAPNNELLEKLKSNIEEVRARGGSVVRLRRSGCGFVSSDNMHIIEMPHVEEVIAPIFYTVPLQLLAYHVALIKGTDVDQPRNLAKSVTVE

SEQ ID NO: 72966 - protein, 603 aa, Salmonella paratyphi A
  MISC_FEATURE (378)..(378): X=any amino acid
YDSSSIKVLKGLDAVRKRPGMYIGDTDDGTGLHHMVFEVVDNAIDEALAGHCKDIVVTIHADNSVSVTDDGRGIPTGIHPEEGVSAAEVIMTVLHAGGKFDDNSYKVSGGLHGVGVSVVNALSQKLELVIQRDGKIHRQIYEHGRPQAPLAVTGDTDKTGTMVRSLAEHETFTNVTEFEYEISAKRLRELSFLNSAFPIRLRDKRDGKEDHFHYEGGIKAFVEYLNKNKTPIHPNIFYFSTEKDGIGIEVALQWNDWFPENIYCFTNNIPQRDGGTHLAGFRAAMTRTLNAYMDKEGYSKKAKVSATGDDAREGLIAVVSVKVPDPKFSSQTKDKLVSSEVKSAVEQQMNELLSEYLLENPSDAKIVVGKIIDAAVRXSGVAREMTRRKGALDLAGLPANWRDCRNATRALSELYLVEGDSAGGSAKQGVTARTQAILPLKGKILNVEKARFDKMLSSQEVATLITALGCGIGRDEYNPDKLRYHSIIIMTDADVDGSHIRTLLLTFFYRQMPEIVERGHVYIAQPPLYKVKKGKQEQYIKDDEAMDQYQISIALDGATLHANAHAPALSGEALEKLVSEYNATQKMIGRMERRFPKALLKEL

SEQ ID NO: 72967 - protein, 365 aa, Salmonella paratyphi A
  MISC_FEATURE (17)..(17): X=any amino acid
EITVEREHLLKPLQQVXSALGGRPTLPILGNLLLQVADGTLSLTGTDLEMEMVARLTLSQPHEPGATTVPARKFFDICRGLPEGAEIAVQLEGDRMLVRSGRSRFSLSTLPAADFPNLDDWQSEVEFTLPQATMKRLIEATQFSMAHQDVRYYLNGMLFETEGSELRTVATDGTRLAVCSMPLEASLPSHSVIVPRKGVIELMRMLDGGENRCAVQIGSNNIRAHVGDFIFTSKLVDGRFPDYRRVLPKNPDKHLEAGCDILKQAFARAAILSNEKFRGVRLYVSENQLKITANNPEQEEAEEILDVSYGGTEMEIGFNVSYVLDVLNALKCETVRIMLTDSVSSVQIEDAASQSAAYVVMPMRL

SEQ ID NO: 72968 - protein, 240 aa, Salmonella paratyphi A
RSVDALLIDDIQFFANKERSQEEFFHTFNALLEGNQQIILTSDRYPKEINGVEDRLKSRFGWGLTVAIEPPELETRVAILMKKADENDIRLPGEVAFFIAKRLRSNVRELEGALNRVIANANFTGRAITIDFVREARDLLALQEKLVTIDNIQKTVAEYYKIKIADLLSKRRSRSVARPRQMAMALAKELTNHSLPEIGDAFGGRDHTTVLHACRKIEQLREESHDIKEDFSNLIRTLSS

SEQ ID NO: 72969 - protein, 505 aa, Salmonella paratyphi A
MTQAVMLQGTASDVGKSVLVAGLCRIFYQDGLRTAPFKSQNMALNSGITPDGKEMGRAQIFQAEAAGITPDVRMNPVLLKPTSDRQAQVVLMGKVATNMDAVSYHDYKPRLREQILAVYNSLAQEYDVIVLEGAGSPAEINLRDRDIVNMGMAEMAQCPVILVADIDRGGVFAAIYGTLALLHKQERDRVKGVIINKFRGDVALLYSGIEQIESLTGVPVLGVMPWLDVDLEDEDGVALQNDKYRGNAPRDITIAIVQLPHISNFTDFNALAAHDVRIRYIRRPEALTDADLVILPGSKNTLSDLAWLRESGMADAVLQTHRQGVPVMGICGGYQMLGDTIVDEVESGLGTQPGLGLLNTITRFAQDKTTTQVNATMSGELPGWLAAAAGLPVRGYEIHMGETVLQEGCCTAMTLQKNGCSVADGAVTADGLAFGTYLHGLFDSDAFTRAVVNGLRARKGLAPWETTFCYAEHKARQFDLLAEAMRQHIDIDKIYTIMQQHQEPV

SEQ ID NO: 72970 - protein, 271 aa, Salmonella paratyphi A
MLATSDLWFRYQDEPVLKGLNLDFSLSPVTGLVGANGCGKSTLFMNLSGLLRPQKGAVLWQGKPLDYSKRGLLALRQQVATVFQDPEQQIFYTDIDSDIAFSLRNLGVPEAEITRRVDEAVTLVDAQHFRHQPIQCLSHGQKKRVAIAGALVLQARYLLLDEPTAGLDPAGRTQMIAIIRRIVAQGNHVIISSHDIDLIYEISDAVYVLRQGQILMHGAPGEVFACTEAMEHAGLTQPWLVKLHTQLGLPLCKTETEFFHRMQKCAFKEAS

SEQ ID NO: 72971 - protein, 479 aa, Salmonella paratyphi A
MQLEVILPLVAYLVVVFGVSIYAYAQGTAGTFLNEYFLGSRSMGGIVLAMTLTATYISASSFIGGPGAAYKYGLGWVLLAMIQLPAVWLSLGILGKKFAILARRYNAVTLNDMLFARYQSRLLVWLASLSLLVAFIGAMTVQFIGGARLLETAAGSPYETGLLIFGVSIALYTACCAFRASVLNDTLQGLVMLVGTIVLLVGVVHAAGGLHQAVDTLHALDPKLVTPQGADDILSPAFMTSFWVLVCFGVIGLPHTAVRCISYKDSKAVHRGIIIGTIVVAILMFGMHLAGALGRRVLPDLTVPDLVIPTLMVKVLPPFAAGIFLAAPMAAIMSTINAQLLQSSATIIKDLYLNLRPDQMQNEIRLKRMSAAITLLLGALLLLAAWKPPEMIIWLNLLAFGGLEAVFLWPLVLGLYWERANAARALSAMIVGGVLYALLATFNIQYLGFHPIVPALLLSLLAFLIGNRFGSSASQATVL

SEQ ID NO: 72972 - protein, 444 aa, Salmonella paratyphi A
  MISC_FEATURE (402)..(402): X=any amino acid
MLDKIVIANRGEIALRILRACKELGIKTVAVHSSADRDLKHVLLADETVCIGPAPSVKSYLNIPAIISAAEITGAVAIHPGYGFLSENANFAEQVERSGFIFIGPKADTIRLMGDKVSAITAMKKAGVPTVPGSDGPLGDDMNANRAHAKRIGYPVIIKASGGGGGRGMRVVRSDAELAQSISMTKAEAKAAFSNDMVYMEKYLENPRHIEIQVLADGQGNAIYLAERDCSMQRRHQKVVEEAPAPGITPELRRYIGEACAKACVDIGYRGAGTFEFLFENGEFYFIEMNTRIQVEHPVTEMITGVDLIKEQLRIAAGQPLSITQDEVVVRGHAVECRINAEDPNTFLPSPGKITRFHAPGGFGVRWESHIYAGYTVPPYYDSMIGKLICYGENADVAIAVXKNALQELIIDGIKTNIDLQTRIMNDEHFQHGGTNIHYLEKKL

SEQ ID NO: 72973 - protein, 156 aa, Salmonella paratyphi A
MDIRKIKKLIELVEESGISELEISEGEESVRISRTTANHGFPVMQQAYAAPMMQQPALSNAVAPAATPAMEAPAAAEISGHIVRSPMVGTFYRTPSPDAKAFIEVGQKVNVGDTLCIVEAMKMMNQIEADKAGTVKAILVESGQPVEFDEPLVVIE

SEQ ID NO: 72974 - protein, 187 aa, Salmonella paratyphi A
  MISC_FEATURE (133)..(133): X=any amino acid
TWLKVCLHLAGFLPLLWLFWAINHGGLSADPVKDIQHFTGRTALKFLLATLLVSPLARYAKQPLLIRTRRLLGLWCFVWATLHLTSYALLELGIHNLALLGSELISRPYLTLGIISWLVLLALTLTSTQFATXHLGKRWQTLHNVVYLVAILAPIHYLWSVKILSPQPVIYAALALRLLALRYRKFR

SEQ ID NO: 72975 - protein, 277 aa, Salmonella paratyphi A
MDNVVDRHVFYISDGTAITAEVLGHAVMSQFPVTISSITLPFVENESRARAVKDQIDAIYQQTGVRPLVFYSIVLPEIRAIILQSEGFCQDIVQALVAPLQQEMKLDPTPIAHRTHGLNPGNLNKYDARIAAIDYTLAHDDGISLRNLDQAQVILLGVSRCGKTPTSLYLAMQFGIRAANYPFIADDMDNLTLPTSLKPLQHKLFGLTIDPERLAAIREERRENSRYASLRQCRMEVAEVEALYRKNQIPCLNSTNYSVEEIATKILDIMGLNRRMY

SEQ ID NO: 72976 - protein, 144 aa, Salmonella paratyphi A
IVNGPGTRCTLFVSGCVHECPGCYNKSTWRLNSGQPFTKEMEDKIIADLNDTRIHRQGFSLSGGDPCHPQNVPDILALVQRIHAECPGKDIWVWTGYKLDELNAAQMQVVDLINVLVDGKFVQALKDPALIWRGSSKPVVHHLR

SEQ ID NO: 72977 - protein, 601 aa, Salmonella paratyphi A
RLAQLFAMLQNETLPQDELAQRLSVSTRTVRADIAALNMLLTPHAQFTLSRGNGYQLKIDDPARYQSLQTQQISHAGRGPRTSQERIHYLLARFLTSAFSLKLEDLADEWFVSRATLQNDMADVREHLLRYHLTLETRPRHGMKLFGGEMAIRACLTDLLWTLAQQEPSHPLIVSTTLNTEVSQRLQSLLPDIFSHCQIRLTDEGELFLRLYCAVAVRRIREGYPLSECVAEEVDEKAHAAHEIAELLQQLADKPLSEPEVSWLKVHIAARQVQEIAPSAINADDEEALVHYILNFINTQYNYNLLNDKQLHADLLTHIKTMITRVRYQIMIPNPLLENIKQHYPMAWDMTLAAISSWGKYTPYTISENEIGFLVLHIGVGLERSYNIGYQRQPQVLLVCDAGNVMVRMIEAVLARKYPQIEIARTLTLRDYEARDSIVEDFVISTARIGEKDKPVIMIAPFPTDYQLEQIGKLVLVDRTRPWMLDKYFDASHFRIVEGEIDQQALFKTLCDQLHEEGFVDAAFLDSVIEREAIVSTLLGDGIALPHALGLLAKKTVFIRLLAPQGIVWGDETAHVIFLLAISKSEYEEAMAIYDIFVTFL

SEQ ID NO: 72978 - protein, 445 aa, Salmonella paratyphi A
TVITLPWRPDAAEHYFAPVNHLPWAMLLHSGDAIHPYNRFDILVADPVTTLTTRAQETTVCTARTTTVTLDDPLHVLQTQLEALPFHPQPDPDLPFQGGALGLFGYDLGRRFEILPDTAARDIVLPDMAIGLYDWALIVDHQKQVVSLISHHDADARYRWLTSQRAPTRTPFRLTSAWQSNMTRCEYGEKFRQVQAWLHSGDCYQVNLSQRFQASYEGDEWQAFERLNRANRAPFSAFLRLHDGAILSLSPERFIQLENGHIQTRPIKGTLPRLNDPQADRQQAQKLANSMKDRAENLMIVDLMRNDIGRVAVPGSVKVPELFVVEPFPAVHHLVSTITARLPDSLHATDLLRAAFPGGSITGAPKVRAMEIIDELEPQRRNAWCGSIGYLSFCGKMDTSITIRTVTATQGQLYCSAGGTIVADSKEEAEYQETFDKVNRILHPL

SEQ ID NO: 72979 - protein, 167 aa, Salmonella paratyphi A
  MISC_FEATURE (87)..(87): X=any amino acid
  MISC_FEATURE (98)..(98): X=any amino acid
  MISC_FEATURE (145)..(145): X=any amino acid
LTLDHFLSRFQLLRPQITHETLNQRQAAVLIPVVRRPQPGLLLTQRAIHLRKHAGQVAFPGGLVDSTDASLIAAALREAEEVAIPPXAVEVIGVLPRXDSVTGFQVTPVVGIIPPDLPWRAVKTECLRCFECAAQRCNWVHIIAXCLRRAIRTVWLSGMSIFVLGMT

SEQ ID NO: 72980 - protein, 387 aa, Salmonella paratyphi A
ELCMPLALFALTISAFVIGTTEFVIVGLVPTIAQQLAISLPSAGMLVSIYALGVAIGAPVLTALTGRLPRKQLLVALMVLFTAGNLLAWQAPGYMTLIVARLLTGLAHGVFFSIGSTIATSLVPKEKAASAIAIMFGGLTVALVTGVALGTFIGQHFGWRETFLAVSLLGVIALMSSQLLIPANIPGRAAASIRDQVKVLAHPRLLLIYAVTALGYGGVFTAFTFLAPMMQDLAGFSPAAVSWILLGYGVSVAIGNIWGGKLADKHGAVPALKFIFAALFVLLMVFQVTASTQYAALATILVMGVFAFGNVPGLQVYVVQKAEQFTPNAVDVASGLNIAAFNIGIALGSVIGGQTVEHYGLAQTPWIGALIVLVAFLLMGVSGRLDK

SEQ ID NO: 72981 - protein, 267 aa, Salmonella paratyphi A
MTIPAFGLGTFRLKDDVVIASVKTALELGYCAVDTAQIYDNEAAVGQAIAESGVPRNELYITTKIWIENLSKDKLIPSLKESLKKLRTDYVDLTLIHWPSPGDAVPVEEFMQALLEAKKQGLTREIGISNFTIPLMEKAIAAVGADHIATNQIELSPYLQSRKVVDWAKAHGIHITSYMTLAYGKALKDEVIATIAAKHNATPAQVILAWAMGEGYSVIPSSTRRENLASNLLALELHLDAEDRAAIAALDCNDRLVSPEGLAPEWD

SEQ ID NO: 72982 - protein, 88 aa, Salmonella paratyphi A
  MISC_FEATURE (19)..(19): X=any amino acid
  MISC_FEATURE (25)..(25): X=any amino acid
MLSALISSAFSYRAVPLAXQPEHQXCVHSGPLVLGAAPLSSPAPTADRDRTVSRRSKPSSRTTLNGEQPYPWDLLQPQDVMSRHRGAK

SEQ ID NO: 72983 - protein, 264 aa, Salmonella paratyphi A
MKKTKIVCTIGPKTESEEMLSKMLDAGMNVMRLNFSHGDYAEHGQRIQNLRNVMSKTGKKAAILLDTKGPEIRTIKLEGGNDVSLKAGQTFTFTTDKSVVGNNEIVAVTYEGFTSDLSVGNTVLVDDGLIGMEVTAIEGNKVICKVLNNGDLGENKGVNLPGVSIALPALAEKDKQDLIFGCEQGVDFVAASFIRKRSDVVEIREHLKAHGGENIQIISKIENQEGLNNFDEILEASDGIMVARGDLGVEIPVEEVIFAQKMMI

SEQ ID NO: 72984 - protein, 447 aa, Salmonella paratyphi A
MKKVKKLSLTDLVLYGLVFMVPIAPVSLYGVVYNLSHGMVALVYIIGAIGMFFTAYSYSTLSQHISSSGSAYAYAGVCINPAVGFLTGWILLLDYLLFPTLVAVLGGVAVHAILPQIPVWVWPLIYVAIGTGVNYLGIQQTAKFDKLLVFIQLGILAIFVLLIVRLMMQDSSQITLSFRPFFDSQWFTPGLIATAISVAALNFLGFDAISTLSEESEGGGTRVSKATLLALVLATVLFIIVVAFAAFAPGNVDRFAKGNATNEAFFTIAGNVGGIWLKVAFSIIVAFVCAVGTLITAQTAVSRVLFSMGRDRMLPAFLAHVHTTRKTPNYAILFTGGVTLLLSYLFSGKIESISTLVNFGALFAFFVVNLCVFILFNFRMKAQRRMFRPCISPIMGMIVIGYVCLNMNIHALILGISWAAIGIAILCYRKAHNQNIAIDLEGKKLLD

SEQ ID NO: 72985 - protein, 297 aa, Salmonella paratyphi A
EKIDEGLWDTLSARLDFCNLDVNDTPAFSRLGDMLDQKNRTTINYFAMPPSTFGAICKGLGEAKLNAKPARVVMEKPLVTSLATSREINDRVGEYFEECQVYRIDHYLGKETVLNLLALRFANSLFVNNWDNRTIDHVEITVAEEVGIEGRWGYFDQAGQMRDMIQNHLLQILCMIAMSPPSDLSADSIRDEKVKVLKSLRRIDRSNVREKTVRGQYTAGFARGQKVPGYLEEEGANKSSNTETFVAIRSTIDNWRWAGVPFYLRTGKRLPTKCSEVVVYFKTPELNLFKESWQDLP

SEQ ID NO: 72986 - protein, 281 aa, Salmonella paratyphi A
  MISC_FEATURE (102)..(102): X=any amino acid
MSQTSTLKGQCIAEFLGTGLLIFFGVGCVAALKVAGATFGQWEISVIWGLGVAMAIYLTAGVSGAHLNPAVTIALWLFACFDKRKVVPFIISQVAGAFCDGXLVYGLYYNLFVDFEQTHHIVRGSVESLDLAGIFSTYPNPHINFVQAFAVEMVITAILMGLILALTDDGNGVPRGPLAHLLIGLLIAVIGASMGPLTGFAMNPARDFGPKMFAGLARGGEIAFTGGRDIPYFLVPLFGPIVGAILGRFAYRKFIGRHLPCDTCVVEEKDSTATTQQNASL

SEQ ID NO: 72987 - protein, 501 aa, Salmonella paratyphi A
MTEKKYIVALDQGTTSSRAVVMDHDANIVSVSQREFEQIYPKPGWVEHDPMEIWASQSSTLVEVLAKADISSDQIAAIGITNQRETAIVWERETGKPIYNAIVWQCRRTADICEQLKRDGLEDYIRDNTGLVVDRYFSGTKVKWILDHVEGSRERRSRGELLFGTVDTWLIWKMTQGRVHVTDYTNASRTMLFNIHDLDWDDKMLDVLDIPRAMLPQVRKSSEVYGQTNIGGKGGTRIPIAGIAGDQQAALFGQLCVKEGMAKNTYGTGCFMLMNTGEKAVKSENGLLTTIACGPSGEVNYALEGAVFMAGASIQWLRDEMKLISDAFDSEYFATKVKDTNGVYVVPAFTGLGAPYWDPYARGAIFGLTRGVNSNHIIRATLESIAYQTRDVLEAMQADSGIRLHALRVDGGAVANNFLMQFQSDILGTRVERPEVREVTALAPPYLAGLAVGYWQNLDELQEKAVIEREFRPGIETTERNYRYSGWKKAVKRAMAWEEHD

SEQ ID NO: 72988 - protein, 320 aa, Salmonella paratyphi A
MIKKIGVLTSGGDAPGMNAAIRGVVRAALTEGLEVMGIYDGYLGLYEDRMVQLDRYSVSDMINRGGTFLGSARFPEFRDENIRAVAIENLKKRGIDALVVIGGDGSYMGAKRLTEMGFPCIGLPGTIDNDIKGTDYTIGYFTALGTVVEAIDRLRDTSSSHQRISIVEVMGRYCGDLTLAAAIAGGCEFIVVPEVEFNREDLVAEIKAGIAKGKKHAIVAITEHMCDVDELAHFIEKETGRETRATVLGHIQRGGSPVPYDRILASRMGAYAIDLLLEGHGGRCVGIQNEQLVHHDIIDAIENMKRPFKSDWMECAKKLY

SEQ ID NO: 72989 - protein, 166 aa, Salmonella paratyphi A
MRKVTAAVMASTLAFSFLSHAAEVVTSDNWHPGDGATQRSAQNHMFDGISLTEHQRQQMRDLMQQARHEQPPVNVSEMETMHRLVTAEKFDESAVRAQAEKMAQEQVARQVEMARVRNQMYRLLTPEQQAVLNEKHQQRMEQLRDVAQWQKSSSLKLLSSSNSRSQ

SEQ ID NO: 72990 - protein, 294 aa, Salmonella paratyphi A
MLRKKQYNSKANVSYLIYQQANLMKYTITTIKYVNFLISDILDPLILNKLITMEPGLTMEEKKMKNRLKRGFSHISIEIPKSITQVIKEKIREMIIHGDFDLGQAISENELSNILMVSKTPIREAFIWLSYNENLVNIIPRSGTFVFSVTDEDINDLIKMRVILEQGAIREAMEKNANNVIVELSNILSKSAKINAERDTQAYLKLDHDFHYVFVKYADNKYISQAHLLISARLLAIRYRLDFTAEYITSSNRGHATILDMLKNNNVEGVCNFITHHIGSGFTERARKLLALKA

SEQ ID NO: 72991 - protein, 553 aa, Salmonella paratyphi A
  MISC_FEATURE (394)..(394): X=any amino acid
MCSIFGVFDIKTDAAELRKKALELSRLMRHRGPDWSGIYACDNAILAHERLSIVDVNAGAQPLYNARKTHVLAVNGEIYNHQTLRAEYGDRYAFQTGSDCEVILALYQEKGPNFLDDLQGMFAFALYDSEKDAYLIGRDHIGIIPLYMGYDEFGNFYVASEMKALTPVCRTIKEFPAGSYLWSKDGKIRQYYQRDWFDYDAVKDNVTDKNALRQALEESVKSHLMSDVPYGVLLSGGLDSSVISAITKKFAARRVEDQERSEAWWPQLHSFAVGLEGSPDLKAAQEVANHLGTVHHEIHFTVQEGLDAIRDVIYHIETYDVTTIRASTPMYLMSRKIKAMGIKMVLSGEGSDEVFGGYLYFHKAPNAKELHEETVRKLQALHMYDSPRANKAMXPWGVEARVPFLDKNSSDVAMRINPQDKMCGNGKMEKHVVRECFESYLPASVRGVRKEQFSDGVGYSWIDTLKEVAAKQISDQQLETVSSAFHTTRPSSKEAYLYREIFEELFPVPSAAECVPGGPSVACSSAKAIEWDEAFKTMDDPSGRAVGVHQSAY

SEQ ID NO: 72992 - protein, 406 aa, Salmonella paratyphi A
MTPGGQAQIGNVDLVKQLNSAAVYRLIDQHGPISRIQIAEQSQLAPASVTKITRQLIERGLIKEVDQQASTGSRRAISIVTETRNFHAIGFRLGRHDTTLTLYDLSSKVVAEEHYPLPERTQETLEHALLNTIAVFIDSCQRKIRELIAISVILPGLVDPESGVIRYMPHIQVENWGLVEALEKRFHVTCFVGHDIRSLALAEHYFGASQDCEDSILVRVHRGTGAGIISNGRIFIGRNGNVGEIGHIQVEPLGERCHCGNFGCLETIAANAAIEQRVLNLLKQGYQSRVPLDDCTIKTICKAANRGDSLASEVIEHVGRHLGKTIAIAINLFNPQKIVIAGEIIEADKVLLPAIESCINTQALKAFRKNLPVVRSTLDHRSAIGAFALVKRAMLNGTLLQRLLES

SEQ ID NO: 72993 - protein, 380 aa, Salmonella paratyphi A
  MISC_FEATURE (282)..(282): X=any amino acid
MYALTQGRIFTGHEILDDHALVVANGLIDRVCPMAELPPGIEQRSLNGAILSPGFIDVQLNGCGGVQFNDTAEDRSDETLEIIQEANEKSGCTNFLPTLITTSDELMKQWHCVMREYLEKQYAQALGLHLEAPWLNLVKKGTHNPDFVRKPRLRLVDFLCDNADVITKVTLAPEMVPADVIAKLANAGIVVSAGHSNATLKEAESGLRAGITFATHLFNAMPYITGREPGLVALFWTEADIYLALSPMGLHVDYANIRNATKLKGDKLCLVTDATHRGGQYXSSSIFAGKTIYYRNGLCVDENGTLSGSSLTMIEGYATWSRIAAIALDEVCAWQRSIRHAAIGVDKHLGSIAPGKVANLTAFTHDFKIIKTIVNGDEVV

SEQ ID NO: 72994 - protein, 180 aa, Salmonella paratyphi A
SFMHRNFFDHVDIPAENINLLNGNAPDIDAECRQYEEKIRSYGKIHLFMGGVGNEGHIAFNEPASSLASRTRIKTLTHDTRVATSRFFDGDVNQVPKYALTVGVGTLLDAEEVMILVLGHQKAQALQAAVEGNVNHMWTISCLQLHPKAVVVCDEPSTMELKVKTLKYFNELEAENIKGL

SEQ ID NO: 72995 - protein, 825 aa, Salmonella paratyphi A
  MISC_FEATURE (444)..(444): X=any amino acid
  MISC_FEATURE (820)..(820): X=any amino acid
MNEQYSALRSNVSMLGKVLGETIKDALGEHILDRVETIRKLSKSSRAGNEANRRELLTTLQNLSNDELLPVARAFSQFLNLANTAEQYHSISAKSEAASNPEVIARTLRKLKNQPDLNDATIKKAVESLSLELVLTAHPTEITRRTLIHKMGEINNCLKQLDNTDIADYERHQVMRRLRQLIAQSWHTDEIRKQRPSPVDEAKWGFAVVENSLWQGVPNYLRELNEQLEENLGYKLPVDFVPVRFTSWMGGDRDGNPNVTADITRHVLLLSRWKATDLFLKDIHVLVSELSMVDATPELLALVGEEGASEPYRYLMKKLRARLMATQSWLEARLKGEELPKPAGLLTQNEQLWEPLYACYQSLQACGMGIIANGELLDTLRRVKCFGVRLVRIDIRQESTRHTEALGEITRYLGIGDYESWSEADKQAFLIRELNSKRPLLPAXWEPSNDTREVLETCKVIAEAPKGSIAAYVISMRKRPSDVLAVHLLLKEAGIALPCRVAPLFETLDDLNNADDVMTQLLNIDWYRGLIQGKQMVMIGYSDSAKDAGVMAASWAQYAGAGRLIKTCEKAGIELTLFHGRGGSIGPWRAAQPNAALFAQPPGSLEGGLRVTEQGEMIRFKYGLPEVTVSSLSLYTSAILEANLLPPPEPKDSWRHIMDELSVISCETYRGYVRENKDFVPYFRRDAGARLGKLRSAHVRRKRRPTGGVESRARFRGSSAWTQNRLMLPAWLGRVLAAKSGWKTVNQSELEAMCRDWPFFSTRLGMLEMVFSKADLWLAELLRSSVWWRNTYWPLGERGYEHLLEEDIKVVLRLPTIRTXCRLTV

SEQ ID NO: 72996 - protein, 354 aa, Salmonella paratyphi A
MTTPSWRSLRIKKYQFSLRLFLFLNAVSALFTLVFPLYQINVFCTPMIGIVVLSVLLLIWHGKYGQKRINLPFISLLFGGIWAAHIALKYPALGHYDFSFLLISLLSVLFIGSIAFAANIVAFTLYSLPPVAVCLWLNGNEQGLRILYLLALPMVGIAIQHVIQKRYDNFAQQLMFKLLAERETLNGLSMLDPLTGLYNRRGLQNRLDTLQAPGSHEHYVLLLDIDHFKAYNDHYGHMMGDQALIRVSAAIRDAVRSRDVVCRFGGEEFLVLLTTAEPQQARATAERIRQEVYDLKIPHMFNESVATNVTVSIGIAPLTDRNIGDAIEKADKALYEAKHLGRNHILVSDDMRAL

SEQ ID NO: 72997 - protein, 164 aa, Salmonella paratyphi A
MKMFVPAVVFAALASASAWANNGDTAQPLEKIAPYPQAEKGMKRQVITLTPQQDESTLKVELLIGQTLNVDCNQHRLGATLETKTLEGWGYDYYVFDNVTSPVSTMMASPDGKKEQKFVTAWLGEDGMVRYNSKLPIVVYTPANVDVKYRIWKADANVQNAVAR

SEQ ID NO: 72998 - protein, 259 aa, Salmonella paratyphi A
MNQVAVVIGGGQTLGAFLCRGLAEEGYRVAVVDIQSDKAANVAQEINADFGEGMAYGFGADATSEQSAVALSRGVDEIFGRVDLLVYSAGMPKAAFISDFQLGDFDRSLQVNLVGYFLCAREFSRLMIRDGIQGRIIQINSKSGKVGSKHNSGYSAAKFGGVGLTQSLALDLAEYGITVHSLMLGNLLKSPMFQSLCPQYATKLALKPDEVEQYYIDKVPLKRGCDYQDVLNMLLFYASPKASYCTGQSINVTGGQVMF

SEQ ID NO: 72999 - protein, 119 aa, Salmonella paratyphi A
MVSTLITVAVIAWCSQLALGGWQISRFNRAFDKLSQQGRVGVGRSGGRFKPRVVVAVALDEQQRVTDTLLMKGLTVFARPVKIAAMQGKHLHELQPDVIFPHDSLAQNALSLALKLKHG

SEQ ID NO: 73000 - protein, 551 aa, Salmonella paratyphi A
  MISC_FEATURE (113)..(113): X=any amino acid
  MISC_FEATURE (408)..(408): X=any amino acid
  MISC_FEATURE (488)..(488): X=any amino acid
NWMAAVHPGEDAGLYDAVKGVGEELCPQLGLTIPVGKDSMSMKTRWQEGNEQREMTSPLSLVISAFARVEDVRHTLTPQLSTEDNALLLIDLGKGHNALGQSAWTQVYRQLGXKPADVRDVAQLKGFYDAMQGLVAARKLLAWHDRSDAVCWVTLAEMAFAGHCGVQVDIAALGHDHLAALFNEELGGVIQVRAEDREAVEALLAQYGLADCVHYLGQALAGDRFVITANDQTVFSESRTTLRVWWAETTWQMQRLRDNPQCADQEHEAKANDADPGLNVKLSFDINEDIAAPYIATGARPKVAVLREQGVNSHVEMAAAFHRAGFDAIDVHMSDLLGGRIGLGNFHALVACGGFSYGDVLGAGEGWAKSILFNPRVRDEFETFFHRPQSWRLGVCNGCQMMSNLRDXIPGSELWPRFVRNHSDRFEARFSLVEVTQSPSLLLQGMVGSQMPIAVSHGKGRVEVRDDAHLAALESKGLVALRYVITWXVTETYPLTRTVSRTASRRVTTENGRVTIMMPHPERVFRTVANSWHPENWGEDSPWMRIFRNAR

SEQ ID NO: 73001 - protein, 493 aa, Salmonella paratyphi A
  MISC_FEATURE (227)..(227): X=any amino acid
  MISC_FEATURE (246)..(246): X=any amino acid
  MISC_FEATURE (258)..(258): X=any amino acid
  MISC_FEATURE (259)..(259): X=any amino acid
  MISC_FEATURE (301)..(301): X=any amino acid
YLALPSVSIFLFFFYVSDTLKRWSVFPRSLRQLVMLAFLLILLPLLVLAWQAWQSLNALSDQAAVTNRSTLIDARRSEAMTNVALEMERSYRQYCVLDDPTLAKVYQSQRKAISDMLDAHAGVLPDDKLYQALRQDLNALAQLQCKDSGPEAQRAARLEPLHRIRKMVQGRVLWVYSRGQQLQQEMPSADNFFGWQTLVLFLVSLAMVLLFTRILSGRLKRNETDDXSLAKARSFGNNRQPLPVRXITIGGPAHYSGXXAFCAAEIQRHQFLRHLSNELKTPLPSMREGQSCWRSGWLGPXRRSKKRWSIFWMDSSRNLQKLIEQLLDYNRKLVDSATELEAVDTPPLVDMVVSAHSLPARAKMMHTDVDLEAERCIAEPMLLMSVLDNLYSNAVHYGAESGNICIRSRSQGSTVYIDVVNSGEPIPQTEREMIFEPFFQGSHQRKGAVKGSGLGLSIARDCIRRMQGEIQLVDDKAQEVCFRISLPLPASDK

SEQ ID NO: 73002 - protein, 114 aa, Salmonella paratyphi A
NNRVVILSAGTGNPFFTTDSAACLRGIEIEADVVLKATKVDGVFTADPEKDPSATMYDQLTYSEVLDKELKVMDLAAFTWLRDHKLPIRVFNMNKPGALRRVVMGEKEGTLITE

SEQ ID NO: 73003 - protein, 184 aa, Salmonella paratyphi A
VISDIRKDAEVRMEKCVEAFKTQISKVRTGRASPSLLDGIVVEYYGTLTPLRQLASVTVEDSRTLKINVFDRSMGPAVEKAIMASDLGLNPSSAGTDICVSLPPLTEERRKDLTKIVRGDEQARVAVRNVRRDANDKVKALLKDKAISEDDDRRSQEEVQKMTDAAIKKVDAALADKEAELMQF

SEQ ID NO: 73004 - protein, 238 aa, Salmonella paratyphi A
  MISC_FEATURE (34)..(34): X=any amino acid
  MISC_FEATURE (120)..(120): X=any amino acid
LPAHGCRHVAIIMDGNGRWAKQKIRAFGHKGGGXSVRRAVSFAANNGIDALTVYAFSSENWNRPAQAVSALMELFVWALDSKSKSLHRHNVRLRIIGDISRFNSRLQERIRKSEALTAAXYGLTLNIAANYGGRWDIVQGVRQLATGAGWSAAPDQIDEERLGQQICMHELAPVDLVIRTGGEHRISNFLLWQIAYAELYFTDVLWPDFDEQDFEGALHAFANRERRFGGTEPGDDKA

SEQ ID NO: 73005 - protein, 248 aa, Salmonella paratyphi A
MLAAWEWGQLSGFAARSQRVWLAVLCGLLLALMLFLLPEYHHNIRQPLVEMSLWASLGWWVVALLLVLFYPGSAAIWRNSKTLRLIFGLLTIVPFFWGMLALPWHYDENHYSGAIWLLYVMILVWGADSGAYMFGKLFGKHKLAPKVSPGKTWQGFIGGLVTAAVISWGYGMWANLNVAPVILLICSVVAALASVLGDLTESMFKREAGIKDSGHLIPGHGGILDRIDSLTAAVPVFACLLLLVFRTL

SEQ ID NO: 73006 - protein, 267 aa, Salmonella paratyphi A
MRPRRSMLFIPGANAAMLSTSFVYGADAVIFDLEDAVALREKDTARLLVHHALQHPFYQDVEKVVRINPLNTPFGLADLEAVVRGGADIVRLPKTDSKNDVLELEAQVERIERECGREVGSTRLMAAIESAKGVVNAVDIATSSPRMVAIALAAFDYVMDMGTCRGDGTELFYACAVLHAAALAGIAAYDVVWSDINNEEGFLKEVQLAKGLGFNGKSLVNPRQIELLHQAYSPTRKEVEHAYEVIAAAEEAESRGLGVFSLNGGIL

SEQ ID NO: 73007 - protein, 250 aa, Salmonella paratyphi A
MTDLTLKALAAERQVSVDRLVQQFADAGIRKSADDSVSAQEKQTLLAHLNREAVSGPDKLTLQRKTRSTLNIPGTGGKSKSVQIEVRKKRTFVKRDPQEAERLAAEEQAQREAEEQARREAEEQAKREAQQKAEREAAEQAKREAAEKAKREAAEKDKVSNQQTDDMTKTAQAEKARRENEAAELKRKAEEEARRKLEEEARRVAEEARRMAEENKWTATPEPVEDTSDYHVTTSQHARQAEDGGSSRVD

SEQ ID NO: 73008 - protein, 498 aa, Salmonella paratyphi A
MNKEILAVVEAVSNEKALPREKIFEALESALATATKKKYEQEIDVRVEIDRKSGDFDTFRRWLIVEEVTMPTKEITLEAARFEDESLNVGDYVEDQIESVTFDRITTQTAKQVIVQKVREAERAMVVDQFRDQEGEIVTGVVKKVNRDNISLEIKSEGMAGNAEAVILREDCCRAKTSALGPVFAACCMLFARKRVAQLFVTRSKPEMLIELFRIEVPEIGEEVIEIKAAARDPGSRAKIAVKTNDKRIDPVGACVGMRARVQAVSTELGGERIDIVLWDDNPAQFVINAMAPADVASIVVDEDKHTMDIAVEAGNLAQAIGRNGQNVRLASQLSGWELNVMTVDDLQAKHQAEAHAAIEIFTKYLDIDEEFATVLVEEGFSTLEELAYVPMKELLEIDGLDEPTVEALRERAKNALATLAQDQEASLGDNKPADDLLNLEGLDRDMAFKLAARGVCTLEDLADQGIDDLADIEGLTDEKAGELIMAARNICWFGDEA

SEQ ID NO: 73009 - protein, 328 aa, Salmonella paratyphi A
MNNNDLVAKLWKLCDNLRDGGVSYQNYVNELASLLFLKMCKETGQEADYLPESYRWDDLKSRIGQEQLQFYRKMLGHLGEDKKKLVQAVFHNVSTTITEPKQITELVSNMDSLDWYSGTRGKSRDDFGDMYEGLLQKNANETKSGAGQYFTPRPLIKTIIHLLKPQPREVVQDPAAGTAGFLIEADRYVKSQTNDLDDLDGDTQDFQIHRAFIGLELVPGTRRLALMNCLLHDIEGNLDHGGAIRLGNTLGSDGENLPQADIVATNPPFGSAAGTNITRTFVHPTSNKQLCFMQHIIETLRPGGRAAVVVPDNVLFDRVGLEIRREVL

SEQ ID NO: 73010 - protein, 459 aa, Salmonella paratyphi A
RYYQEDAVRAVEKAIVNGQQEILLAMATGTGKTRTAIALMFRLIQSQRFKRVLFLVDRRSLGEQALGSFEDTRINGDTFNSIFDIKGLTDKFPEDSTKIHVATVQSLVKRTLQSDEPMPVGRYDCIVVDEAHRGYILDKEQTEGELQFRSQLDYVSAYRRILDHFDAVKIALTATPALHTVEIFGEPVYRYTYRTAVIDGYLIDQDPPIQIVTRNAQDGVYLSEGEQVERLNPQGELINDTLADDQDFEVADFNRGLVIPAFNRAVCGELTKYLDPIGQQKTLVFCVTNAHADMVVDELRTAFKKKYPQLEHDAIIKITGDADKDAKKVQSMIVRFNKERLPNIVVTVDLLTTGVDIPSICNIVFLRKVKSRILYEQMKGRATRLCPSVGKTSFKIFDCVDIYSSLESVDTMRPVVVRPQVELQTLVNEITDSETYKTIEADGRSFAEHSHEQLVAKLQ

SEQ ID NO: 73011 - protein, 353 aa, Salmonella paratyphi A
MHLRHLFSPRLRGSLLLGSLLVASSFSTLAAEDMLRKAVGKGAYEMAWSQQENALWLATSQSRKLDKGGVVYRLDPVTLEITQAIHNDLKPFGATINAATQTLWFGNTINSAVTAIDAKTGDVKGRLVLDARKRTEEVRPLQPRELVADASTNTIYISGVGKESAIWVVDGETIKLKTTIENTGKMSTGLALDSKAQRLYTTNADGEFITIDTASNKILSRKKLLDDGKEHFFINLSLDTAGHRAFITDSKATEVLVVDTRNGNILVKIAAPASLAVLYNPTRNEAYVTHRQAGQVSVIDAKTYNVVKTFDTPTYPNSLALSADGKTLYVSVKQKSTREQEATQPDDVIRIAL

SEQ ID NO: 73012 - protein, 169 aa, Salmonella paratyphi A
VREALLRLVSSSALAVAPAQAFMVPEISLESLLEINTIRTALEEMAVVAAAGKITPDREQTLNALLDEFQQALESGVMEKILLANPAFRFEIYHYADMPTLYAMIEQLWVRLGPSLHFLYDNFKLDDYQNGVNLYRKLLNALVTGDKEASRHCLQNVLQQNVATIKNQY

SEQ ID NO: 73013 - protein, 355 aa, Salmonella paratyphi A
MTRPIQASLDLQVMKQNLAIVRRAAPEARVWSVVKANAYGHGIERVWSAAGATDGFAMLNLEEAITLRERGWKGPILMLEGFFHAQDLEAYDTYRLTTCIHSNWQLKALQNARLNAPLDIYVKVNSGMNRLGFQPERAQTVWQQLRAMRNVGEMTLMSHFAQADHPEGIGEAMRRIALATEGLQCAYSLSNSAATLWHPQAHYDWVRPGIILYGASPSGQWRDIADTGLKPVMTLSSEIIGVQTLSAGERVGYGGGYSVTQEQRIGIVAAGYADGYPRHAPTGTPVLVDGIRTRTVGTVSMDMLAVDLTPCPQAGIGTPVELWGKEIKVDDVASAAGTLGYELLCAVARACPFVT

SEQ ID NO: 73014 - protein, 510 aa, Salmonella paratyphi A
MATIDSMNKDTTRLSDGPDWTFDLLDVYLAEIDRVAKLYQLDTYPHQIEVITSEQMMDAYSSVGMPINYPHWSFGKKFIETERLYKHGQQGLAYEIVINSNPCIAYLMEENTITMQALVMAHACYGHNSFFKNNYLFRSWTDASSIVDYLIFARNYITRCEERYGVDEVEKLLDSCHALMNYGVDRYKRPQKISLQEEKARQKSREEYLQSQVNMLWRTLPKREEEKTVAEARRFPAEPQENLLYFMEKNAPLLEPWQREILRIVRKVSQYFYPQKQTQVMNEGWATFWHYTILNHLYDEGKVTERFMLEFLHSHTNVVFQPPYNSPWYSGINPYALGFAMFQDIKRICQSPTDEDKYWFPDIAGSDWLETLHFAMRDFKDESFISQFLSPKVMRDFRFFTVLDDDRHNYLEISAIHNEEGYREIRSKLSSQYNLSNLEPNIQVWNVDLRGDRSLTLRYIPHNRAPLDKGRKEVLKHVHRLWGFDVMLEQQNEDGSVELLERCPPRMNTL

SEQ ID NO: 73015 - protein, 432 aa, Salmonella paratyphi A
MQDDTLPLNNSNATTTPLSTRLPFTKYDFGWVLLCIGMAIGAGTVLMPVQIGLKGIWVFITAFIIAYPATYIVQDIYLKTLSESETCDDYTDIISHYLGKNWGVFLGVIYFLMIIHGVFIYSLSVVFDSASYIKTFGLTEADLSQSIIYKVAIFAVLVVIASGGEKLLFKISGPMVVVKVGIILIFGFAMIPHWNLDNISAFPAASVFFRDVLLTIPFCFFSAVFIQVLNPMNIAYRKREPDRVLATRMAIRTHRISYITLIAIILFFSFSFTFSISHEEAVSAFEQNISALALAAQVIPGHIIHITSTILNIFAVLTAFFGIYLGFHEALKGIVLNVLSRIMDVKNINPLLLTSGICVFIVVTLVIWVSFRVSVLVFFQLGSPLYGIVACIIPFFLIYKVAQLEKLRGLKTWLILLYGILLCLSPLLKLIE

SEQ ID NO: 73016 - protein, 79 aa, Salmonella paratyphi A
  MISC_FEATURE (2)..(2): X=any amino acid
  MISC_FEATURE (6)..(6): X=any amino acid
  MISC_FEATURE (20)..(20): X=any amino acid
  MISC_FEATURE (25)..(25): X=any amino acid
AXVAGXRKPPHVTGINLATXRGLTXNLNTSRIAANGCHCNKAGYMTLTQLGVAFWHDLAAPIIAGIIASVIVNWLHDRK

SEQ ID NO: 73017 - protein, 216 aa, Salmonella paratyphi A
  MISC_FEATURE (145)..(145): X=any amino acid
QIKRRTGFEHFFSKAGWKSGYYHEMVITDAQPVGRKRLCPITTRAVNSIPSIKRAMFAELPPGAYLGKHRDPYAGSVRYHLGLSTPNDDRCFIEVDRQRHSWRTRKPSSFDETYVHWAENKTEQTRIILFCDIERPMKWRWGRAXNHWVGASLMSAASSPNDENDRTGAINRIFKYVHAARDAGQRLKKKNRTLYYALKYLVIAAIFAAIILFSLL

SEQ ID NO: 73018 - protein, 685 aa, Salmonella paratyphi A
  MISC_FEATURE (140)..(140): X=any amino acid
  MISC_FEATURE (604)..(604): X=any amino acid
MKKVVTVCPYCASGCKINLVVDNGKIVRAEAAQGKTNQGTLCLKGYYGWDFINDTQILTPRLKTPMIRRQRGGKLESVSWDEALNYVAERLSAIKAKYGPDAIQTTGSSRGTGNETNYVMQKFARAVIGTNNVDCCARVXHGPSVAGLHQSVGNGAMSNAINEIDNTDLVFVFGYNPADSHPIVANHVINAKRNGAKIIVCDPRKIETARIADMHIALKNGSNIALLNAMGHVIIEENLYDKAFVASRTEGFEEYSKIVEGYTPESVEEITGVSAQEIRQAARMYASAKSAAILWGMGVTQFYQGVETVRSLTSLAMLTGNLGKPSAGVNPVRGQNNVQGACDMGALPDTYPGYQYVKFPENREKFAKAWGVESLPAHTGYRISELPHRAAHGEVRAAYIMGEDPLQTDAELSAVRKAFEDLELVIVQDIFMTKTASAADVILPSTSWGEHEGVFSAADRGFQRFFKAVEPKWDLKTDWQIISEIATRMGYPMHYNNTQEIWDELRHLCPDFYGATYEKMGELGYIQWPCRDTSDADQGTSYLFKEKFDTPNGLAQFFTCDWVAPIDKLTEEYPMVLSTVREVGHYSCRSMTGNCAALPRAGRXTGLAQINTADAARLGIEDEALVWVHSRKGKIITRAQVSDRPNKGAIYMTYQWWIGACNELVTENLSPITKTPEYKYCAVRV

SEQ ID NO: 73019 - protein, 229 aa, Salmonella paratyphi A
MKLLLALMLFMTFFAHAADPEPGSQYLQAAEAGDRRAQYFLADSWLSYGDLNKAEYWAQKAADSGDADACALLAQIKITNPVSLDYPDAKKLAEKAANAGSKVGEITLARILVNTQAGRPDYPKAISLLQKASEDLDNDSAVDAQMLLGLIYANGVAIAADDEKAAWYFKRSSAISRTGYSEYWAGMMFLNGEPGFIEKNKQKALHWLNLSCLEGFDTGCEEFETLTNG

SEQ ID NO: 73020 - protein, 436 aa, Salmonella paratyphi A
QTMAMQLGGHVEGSNEREFGYAQVEVLTDSALVRGIEDSLTADGKPLLDVWMSHGDKVTAIPSDFVTVASTESCPFAIMANEEKRFYGVQFHPEVTHTRQGMRMLERFVRDICQCEALWTPAKIIDDAVGRIREQVGDDKVILGLSGGVDSSVTAMLLHRAIGKNLTCVFVDNGLLRLNEAEQVMDMFGDHFGLNIVHVPAEERFLSALAGENDPEAKRKIIGRVFVEVFDEEALKLEDVKWLAQGTIYPDVIESAASATGKAHVIKSHHNVGGLPKEMKMGLVEPLKELFKDEVRKIGLELGLPYDMLYRHPFPGPGLGVRVLGEVKKEYCDLLRRVTAIFIEELRKADLYDKVSQAFTVFLPVRSVGVMGDGRKYDWVVSLRAVETIDFMTRHWAHLPYDFLGRVSNRIINEVNGISRVVYDISGKPPATIEWE

SEQ ID NO: 73021 - protein, 287 aa, Salmonella paratyphi A
MLLITDLDGTLLTSQKTISPRTRRALIAFRQDGDLLAACSARPVSSMVRLLRQQQVDTLFSWCAGFNCGHLLEMAGQRIIHAAPLSATDLWNIDQHISLSRYHHHFFSAEAIHHRDDRLIAPWTTYEARLFGLPLITETTENIFNRRDTYKITLVAASSEIDTLCTEVNNHLPYGYYAVVTGENYIDIQRTDVNKGCIIEQLIHYLNISSDKVVVIGDQQNDVSMFAAAGISIAMGNAPDAVKRQAGYVTATNDEEGIVHALEWLRCLTHPVTMRQRLTAAKDNESN

SEQ ID NO: 73022 - protein, 341 aa, Salmonella paratyphi A
MGPVMLNVEGCELDAEEREILAHPLVGGLILFTRNYHDPEQLRELVRQIRAASRNHLVVAVDQEGGRVQRFREGFTRLPAAQSFFALHGLEEGGRLAQEAGWLMASEMIAMDIDISFAPVLDVGHISAAIGERSYHADPAKALAMATRFIDGMHDAGMKTTGKHFPGHGAVTADSHKETPCDPRPETDIRGKDMSVFRALISENKLDAIMPAHVIYRAIDPRPASGSPYWLKTVLRQELGFDGVIFSDDLSMEGAAIMGSYAERAQASLDAGCDMILVCNNRKGAVSVLDNLSPIKAERVTRLYHKGSFSRRELMDSARWKTASAQLNQLHERWQEEKAGH

SEQ ID NO: 73023 - protein, 439 aa, Salmonella paratyphi A
  MISC_FEATURE (234)..(234): X=any amino acid
PSREDTVIVEGATTADAVNREEQDYSVKTTAADTKMPMTQRDIPQSVSIVSQQRMEDQQLQTLGEVMTNTLGISGSQADSDRISYYSRGFEIDNYMVDGIPTYFESRWNLGDALTDTALYERVEVVRGANGLMTGTGNPSASINMIRKHATSREFKGNVSTEYGSWNKQRYVMDLQSPLTADGNVRGRIVAGYQNNDSWLDRYNSEKAFFSGIVDADLGATTSLSAGYEYQKNXCQQPDLGGLPRWNTDGSKNSYDRARSTAPDWAYNNKEINKFFVTLKQRFAESWQATLNATHTEVKFDSKMMYIDALVDKETGTLVSPYGATTPWSAVRAGTRQAQSRCHRSLCRWAYELFGRQHNMMFGGSYSKQNNRYFSAWANVFPDDIGNFSAFNGNFPQTHWAPQNLAQDDTTHMKSLYAATAFSLADPLHLILGARYTNW

SEQ ID NO: 73024 - protein, 498 aa, Salmonella paratyphi A
MLHLFAGLDLHTGLLLLLDLAFVLFYEAINGFHDTANAVATVIYTRAMRSQLAVVMAAVFNFFGVLLGGLSVAYAIVHMLPTDLLLNMGSAHGLAMVFSMLLAAIIWNLGTWYFGLPASSSHTLIGAIIGIGLTNAMMTGTSVVDALNIPKVINIFGSLIISPIVGLVFAGGLIFLLRRYWSGTKKRARIHLTPAEREKKDGKKKPPFWTRIALILSAIGVAFSHGANDGQKGIGLVMLVLIGVAAAGFVVNMNASSYEITRTRDAINNVETYFEQRPDLLKRVTGVDQLIPSPEPGATEPTEFHCHPANTINALNRAKGMLANVESYDKLSVEQRSQLRRIMLCISDTTDKVVKLPGVSSDDQRLLKKLKTDMLSTIEYAPVWIIMAVALALGIGTMIGWRRVATTIGEKIGKKGMTYAQGMSAQMTAAVSIGLASYTGMPVSTTHVLSSSVAGTMVVDGGGLQRKTVTSILMAWVFTLPAAIILSGVLYWLSLKII

SEQ ID NO: 73025 - protein, 398 aa, Salmonella paratyphi A
VERFDAVIIGAGAAGMFCAAQAGQAGSRVLLIDNGKKPGRKILMSGGGRCNFTNLYVEPAAYLSQNPHFCKSALARYTQWDFIDLVGRYGIAWHEKTLGQLFCDDSAQRIVDMLVAECDKGGVTMRLRSEVLSVERDESGFVLALNGETVTTQKLVIASGGLSMPGLGASPFGYKIAEQFGLKVLPTRAGLVPFTLHKPLLEQLQTLSGVSVPCVITARNGTVFRENLLFTHRGLSGPAVLQISSYWQPGELVSINLLPDLSLEDVLNEQRNAHPNQSLKNTLAMHLPKRLVECLQQLGLIPDVSLRQLNVRDQQTLVDTLTAWQVQPNGTEAYRTAEVTLGGVDTNELSSRTMEARRVPGLYFIGEVMDVTGWLGGYNFQWAWSSAWACAQDLIALK

SEQ ID NO: 73026 - protein, 256 aa, Salmonella paratyphi A
  MISC_FEATURE (189)..(189): X=any amino acid
MAHSWLRLVAGATLSFVIAGHALADEGKITVFAAASLTNAMQDIAAEYKKEKNVDVVSSFASSSTLARQIEAGAARNLFISADQKWMDYAADKKAVDTTTRETLLGNSLVVVAPKASEQKPFTIDNKTDWIHLLNGGRLAVGDPNHVPAGIYAKEALQKLGAWQTLEPKLAPGEDVRACEVVERNEAPXALVYGSDAVASKGVNVVATFPEDSHKKVEYPIAIVEGHKNATVSAFYDYLKGPQASAIFKRYGFTTK

SEQ ID NO: 73027 - protein, 352 aa, Salmonella paratyphi A
MLELNFSQTLGTHCLTLNETLPASGITAIFGVSGAGKTSLINAISGLTRPQKGRIGSNGRVLHDAENGICLTPEKRRIGYVFQDARLFPHYKVRGNLRYGMAKSMTGQFDKLVSLLGIEALLDRLPGSLSGGEKQRVAIGRALLTAPELLLLDEPLASLDIPRKRELLPYLQRLAREINIPMLYVSHSLDEILHLADKVMVLEDGQVKAFGPLEEVWGSSVMHPWLPKEQQSSILKVSVLEHHPHYAMTALALGDQHLWVNKLNQPLQSTLRIRIQASDVSLVLQPPQQTSIRNVLRAKVANCYDDNGQVEVQLEIGGRTLWARISPWARDELNIKPGLWLYAQVKSVSITA

SEQ ID NO: 73028 - protein, 573 aa, Salmonella paratyphi A
IPGRIPRVFINDLLARTDIVDLIDVRVKLMKQGKNYHACCPFHNEKTPSFTVNGEKQFYHCFGCGAHGNAIDFLMNYDKLEFVETVEELAAMHNLEIPYEAGTGLSQIERHQRQNLYQLMNGLNDFYQQSLTHPAAKPARDYLQKRGLSAEIIQRFAIGFAPPGWDNALKRFGNNSDNKALLLDAGMLVNNEQGSTYDRFRNRVMFPIRDKRGRVIGFGGRVLGNDTPKYLNSPETDIFHKGRQLYGLYEAQQYSAEPQRLLVVEGYMDVVALAQYDINYVVASLGTSTTADHMHMLFRATNNVICCYDGDRAGRDAAWRALETAMPYMTDGRQVRFMFLPDGEDPDTLVRKEGKAAFEARMEQATLSTFLFNSLLPQVDLSSPDGATQLAALGCPLINQVPGDAHRIQLRQTLGLKLGIFDDSQLDRLVPKQAESGVSRPAPQLKRTTMRILIGLLVQNPDLAPLVPPLDALDQNKLPGLGLFKELVKTCLAQPGLTTGQLLELYRGTNDAATLEKLSMWDDIADKAIAEKTFTDSLNHMFDSLLQLRQEELIARDRTHGLSSEERRELWTL

SEQ ID NO: 73029 - protein, 601 aa, Salmonella paratyphi A
  MISC_FEATURE (149)..(149): X=any amino acid
  MISC_FEATURE (151)..(151): X=any amino acid
  MISC_FEATURE (214)..(214): X=any amino acid
  MISC_FEATURE (235)..(235): X=any amino acid
  MISC_FEATURE (247)..(247): X=any amino acid
QSQLKLLVTRGKEQGYLTYAEVNDHLPEDIVDSDQIEDIIQMINDMGIQVMEEAPDADDLLLAENTTSTDEDAEEAAAQVLSSVESEIGRTTDPVRMYMREMGTVELLTREGEIDIAKRIEDGINQVQCSVAEYPEAHYLSAGTVRSRXGXRGSFVRSYHRLCRSERGKRRWRRPQLTSVLNSPRKTWMMTKTKMKKSDMTPPMTTTALTLNWXREKFAELGAIRRYARHHQSEXASHSQGDSEAVXSVQTVPSGTKQFDYLVNSMRVMMDRVRTQERLIMKLCVEQCKMPKKNFITLFTGNETSETWFNAAIAMNKPWSEKLHDVAEEVQRCLQKLRQIEEETGLTIEQVKDINRRMSIGEAKPAVQIKEMVEANLRLVISIAKKYTNRGLQFLDLIQEGNIGLMKAVDKFEYRRGYKFSTYATWWIRQAITRSIADQARTIRIPVHMIETINKLNRISRQMLQEMGREPTPEELAERMLMPEDKIRKVLKIAKEPISMETPIGDDEDSHLGDFIEDTTLELPLDSATTESLRAATHDVLAGLTAREAKVLRMRFGIDMNTDHTLEEVGKQFDVTRERIRQIEAKALRKLRHPSRSEVLR

SEQ ID NO: 73030 - protein, 601 aa, Salmonella paratyphi A
MSELLSVALFLASVLIYAWKPGRNTWWFAAILTVLGLFVILNITLYASDYFTGDGINDAVLYTLTNSLTGAGVGKYILPGIGIALALVAVFGALGWVLRRRRHHPHHVGYSLLALLLALGSVDASPAFRQITELVKSQMRDGDPDFAVYYKEPAKTIPNPKLNLVYIYGESLERTYFDNDAFPNLTPELGALKNEGLDFSHTMQLPGTDYTIAGMVASQCGIPLFAPFEGNASASVSSFFPQNICLGDILKNSGYQNYFVQGANLRFAGKDVFLKSHGFDHLYGAEELKTVVAAPSYRNDWGFYDDTVLDEAWKKFEALSRSGQRFSLFTLTVDTHHPDGFISRTCNRKRYDYDGKPNQSFSAVSCSQENIAEFINKIKASPWFKDTVIVVSSDHLAMNNTAWKYLNKQDRNNLFFILRGDKPQQETLAVKRNTMDNGATVLDILGGDNFIGLGRSSLSGQSLSEVFLNVKEKVLAMKPDIIRLWNFPKEIKDFTVDRDKNTIAFSGSHFRLPLLLRVSDKRVEPLPESEYSAPLRFQLADFARAIISFGSIAATRWRSYGRRRWRSLPTGASRRGSLAGSKPYSMSIKRSGRVRRRLKTR

SEQ ID NO: 73031 - protein, 116 aa, Salmonella paratyphi A
  MISC_FEATURE (14)..(14): X=any amino acid
VIVHKVPLGVEFQXYLTGGFMNRPILVPIDISDSELTQRVISHVEAEAKIDDAKVHFLTVIPSLPYYASLGLAYSAELPAMDDLKAEAKSQLEAIIKKFNLPRTAQAHVQEGSPKD

SEQ ID NO: 73032 - protein, 220 aa, Salmonella paratyphi A
MELYLDTANVAEVERLARIFPIAGVTTNPSIVAASKESIWDVLPRLQNAIGEEGTLFAQTMSRDAKGMVEEAKRLNNAIPGIVVKIPVTAEGLAAIKLLKKEGIVTLGTAVYSASQGLLAALAGAKYVAPYVNRVDAQGGDGIRMVQELQTLLEHHAPDSMVLAASFKTPRQALDCLLAGCQAITLPLDVAQQMLNTPAVESAIEKFEQDWKNAFGNLNL

SEQ ID NO: 73033 - protein, 291 aa, Salmonella paratyphi A
MADLDDIKDGKDFHTDKPQTNTLFALKGCGALDWGMQSRLARIFNPKTRKTVMLAFDHGYFQGPTTGLERIDINIAPLFEYADVLMCTRGILRSVVPPAINKPVVLRASGANSILTELSNEAVAVAMDDAVRLNSCAAAAQVYIGSEHEHQSIKNIIQLIDAGLRVGMPIMAVTGVGKDMARDQRYFSLATRIAAEMGAQIIKTYYVDKGFERIAAGCPVPIVIAGGKKLPEREALEMCYQAIDQGASGVDMGRNIFQSEDPVAMIKAVHAVVHHNETAERAYELFLSEKG

SEQ ID NO: 73034 - protein, 347 aa, Salmonella paratyphi A
MLKFIQNNREATALLAIVCLFVFPGALDSQYLSVQTLTMVFSSAQILMLLAIGATMVMLTRNIDVSVGSTTGMCAVLLGVMLNAGYSLPVACLATLILGIVAGFFNGVLVAWLKIPAIVATLGTLGLYRGIMLLWTGGKWIEGLPAGLKQLSAPVFLGISAIGWFTLVLALLMAWLLAKTRFGRNFLATGDNLQGARQLGVRTEMVRIMAFSLNGGMAALAGIVFASQIGFIPNQTGTGLEMKAIAACVLGGISLLGGSGTVIGAILGAYFLTQIDSVLVLLRIPAWWNDFIAGLVLLGVLVFDGRLRCALQRNLRRQKYARFISPPTPLQTEAKTHAQQNKNKEVA

SEQ ID NO: 73035 - protein, 523 aa, Salmonella paratyphi A
NDAELAIVLGESLPNDNALNGKKVWLGDIGRAVAHPELFLSEAKSHATPYSAPAAAAPAASGGPKRVVAVTACPTGVAHTFMAAEAIETEAKKRGWWVKVETRGSVGAGNAITPEEVAEADLVIVAADIEVDLAKFAGLPMYRTSTGLALKKTAQELDKAVAEATPYQPAGKASQAATEGKKESAGAYRHLLTGVSYMLPMVVAGGLCIALSFAFGIEAFKVPDTLAAALMQIGGGSAFALMVPVLAGYIAFSIADRPGLTPGLIGGMLAVTPGSVLIGGIIAGFLAGIWRKLISTKLKLPQSMEALKPILIIPLISSLVVGLAMIYLIGKPVAGILEGLTHWLQTMGTANAVLLGAILGGMMCTDMGGPVNKAAYAFGVGLLSTQTYAPMAAIMAAGMVPPLALGLATMVARRKFDKAQQEGGKAALVLGLCFITEGAIPFAARDPMRVLPCCIVGGALTGAISMAVGAKLMAPHGGLFVLLIPGAITPVLGYLLAIVAGTLVAGLLMPSLKRPETEVAAKA

SEQ ID NO: 73036 - protein, 283 aa, Salmonella paratyphi A
  MISC_FEATURE (14)..(14): X=any amino acid
MKYIGRTSAAAGLXRPCSAAEIAATALALFTKNQRRAVPPPLTPQVIDDFKIACEKYHFSAAQILPHDSYLINLGHPVSEALEKSRDAFLDEMQRCEQLGLTLLNFHPGSHLMQIAQEDCLARIAESINIALAQTEGVTAVIENTAGQGSNLGFEFEQLAAIIDGVEDKSRVGVCIDTCHAFAAGYDLRTPEACEKTFAEFGKIVGFQYLRGMHLNDAKSAFGSRVDRHHSLGEGNIGHDAFRWIMQDARFDGIPLILETINPDIWAEEIAWLKAQQIAEVMA

SEQ ID NO: 73037 - protein, 416 aa, Salmonella paratyphi A
MIKATDRKLVVGLEIGTAKVAALVGEVLPDGMVNIIGVSCPSRGMDKGGVNDLESVVKCVQRAIDQAELMADCQISSVYLALSGKHISCQNEIGMVPISEEEVTQEDVENVVHTAKSVRVREHRVLHVIPQEYAIDYQEGIKNPVGLSGVRMQAKVHLITCHNDMAKNIVKAVERCGLKVDQLIFAGLAASYSVLTEDERELGVCVVDIGGGTMDIAVYTGGAASTKVIPYAGNVVTSDIAYAFGTPPSDAEAIKVRHGCALGSIVGKDESVEVPSVGGRPPRSLQRQTLAEVIEPRYTELLNLVNEEILQLQEQLRQQGVKHHLAAGIVLTGGAAQIEGLAACSARFHTQVRIGAPLNITGLTDYAQEPYYSTAVGLLHYGKESHLNGEAEVEKRVTASVGSWIKRLNSWLRKEF

SEQ ID NO: 73038 - protein, 276 aa, Salmonella paratyphi A
MSQAALNTRNSDEETPSSRRNNGTRLAGILFLLTVLCTVFVSGWVVLGWMEDAQRLPLSKLVLTGERHYTRNDDIRQAILALGAPGTFMTQDVNIIQSQIERLPWIKQASVRKQWPDELKIHLVEYVPIARWNDQHMVDAEGNTFSVPSDRIGKQVLPMLYGPEGSASEVLQGYREMGQVLAKDKFTLKEAAMTARRSWQLTLNNGIKLNLGRGDTMKRLARFVELYPVLQQQAQTDGKRISYVDLRYDSGAAVGWAPLPPEESNQQQNQAQAEQQ

SEQ ID NO: 73039 - protein, 476 aa, Salmonella paratyphi A
QQLAKLRSIVPEMRRVRHIHFVGIGGAGMGGIAEVLANEGYQISGSDLAPNPVTQQLTSLGATIFFNHRPENVRDASVVVVSSAISSDNPEIVAAHEARIPVIRRAEMLAELMRFRHGIAIAGTHGKTTTTAMVSSIYAEAGLDPTFVNGGLVKAAVHARLGHSRYLIAEADESDASFLHLQPMVAIVTNIEADHMDTYHGDFENLKQTFINFLHNLPFYGRAVMCVDDPVIRELLPRVGRQTTTYGFSEDADVRVEDYQQIGPQGHFTLLRQGMPDLHVTLNAPGRHNALNAAAAVAVATEEGIDDDAILRALESFQGTGRRFDFLGEFPLEPVNGKAGTAMLVDDYGHHPTEVDATIKAARAGWPDKNLVMLFQPHRYTRTRDLYDDFANVLTQVDALLMLDVYPAGEAPIPGADSRSLCRTIRNRGKIDPILVSDPAQVATMLAPVLTGNDLILVQGAGNVGKIARYLSEIKL

SEQ ID NO: 73040 - protein, 348 aa, Salmonella paratyphi A
  MISC_FEATURE (259)..(259): X=any amino acid
  MISC_FEATURE (271)..(271): X=any amino acid
MSGQPKRLMVMAGGTGGHVFPGLAVAHHLMAQGWQVRWLGTADRMEADLVPKHGIDIDFIRISGLRGKGVKALLAAPLRIFNAWRQARAIMKRFKPDVVLGMGGYVSGPAGLAAWSLGIPVVLHEQNGIAGLTNQWLARIATTVMQAFPGAFPNAEVVGNPVRTDVLALPVAQVRLAGRDGPIRVLVVGGSQGARVLNQTMPQVAARLGDTVTIWHQSGKGAQLTVEQAYAGTGQPQHKVTEFIDDMAAAYAWADVVVXVSGALTVSEIAXPGLPAIFVPFQHKDRQQYWNALPLENAGAAKIFEQPQFTVDVSPNTGGVVAEALLTMAEVPAAVSIPDATERVASEV

SEQ ID NO: 73041 - protein, 278 aa, Salmonella paratyphi A
  MISC_FEATURE (272)..(272): X=any amino acid
VRRLPGILLLTGAALIVIAALLVSGLRLALPHLDAWRPAILNKIESVTGVPVAASQLSASWQNFGPTLEAHNIHAALKDGGELSIKRVTLALDVWQSLLHMRWQFRDLTFWQLNFRTNTPLQSSDGEGIETSRLSDLFLRQFDHFDLRDSQISFLTLSGQRAELAIPQLTWLNGKERHRRGEVSLSSLTGQHGVMQVRMDLRDDDGLLNNGRVWLQADDIDVKPWLGKWMQDNVALQTARFSLEGWMTLSKGEIAGGDVWLKQGRRKLAGRXHDAHAV

SEQ ID NO: 73042 - protein, 646 aa, Salmonella paratyphi A
  MISC_FEATURE (217)..(217): X=any amino acid
  MISC_FEATURE (220)..(220): X=any amino acid
  MISC_FEATURE (504)..(504): X=any amino acid
  MISC_FEATURE (505)..(505): X=any amino acid
MSQTHKHAIPANIADRCLINPEQYETKYKQSINDPDTFWGEQGKILDWITPYQKVKNTSFAPGNVSIKWYEDGTLNLAANCLDRHLQENGDRTAIIWEGDDASQSKHISYRELHRDVCRFANTLLDLGIKKGDVVAIYMPMVPEAGWAMLACAAIGACISVIFGGFSPEAVAGAQLRLSSRLVITADERCTCRRSIPLKKNVDDALKNPNVTSVDMXSSXKRTGSDIDWQEGRDLWWRDLIEKASPEHQPEAMNAEDPLFILYTSGSTAKPKACCHTTGGYLVYAATTFKYVFDYHPSDIYWCTADVGWVTGHSYLLYGPLACGATTLMFEGVPNWPTPARMCQVVDKHQVNILYTAPTAIRALMAEGDKAIEGTDRSSLRILGSVGEPINPEAWEWYWKKIGKEKCPVVDTWWQTETGGFMITPLPGAIELKAGSATRPFFGVQPALVDNEGHPQEGATEGNLVITDSWPGQARTLFGDHERFEQTYFSTFKNMYFSGDGRVXXKTVYYWITGRVDDVLNVSGHRLGTAEIESALVAHPKTSEAAVVGIPHAIKGQAIYAYVTLNHGEEPSPELYAEVRNWVRKEIGPLRRRTCCTGTDSLPKTRSGKIMRRILRKIAAGDTSNLGDTSTLADPGVVEKLLEEKQ

SEQ ID NO: 73043 - protein, 344 aa, Salmonella paratyphi A
SLLRKGKVMKAAVVTQDHQVDVTEKTLRPLRHGEALLKMECCGVCHTDLHVKNGDFGDKTGVILGHEGIGVVAEVGPGVTSLKPGDRASVAWFYEGCGHCEYCNTGNETLCRNVKNAGYTVDGGMAEECIVVADYAVKVPEGLDSAAASSITCAGVATYKAVKISHIKPGQWIAIYGLGGLGNLALQYAKNVFNAKVIAIDVNDGQLKLAEEMGADLTINSRTEDAAKIVQEKTGGAHAAVVTAVAKAAFNSAVDAVRAEGRVVAVGLPPEAMNLDIPRLVLDGIQVVGSLVGTRQDLTEAFQFAAEGKVVPKVALRPLEDINVIFKEMEQGQIRGRMVIDFRR

SEQ ID NO: 73044 - protein, 127 aa, Salmonella paratyphi A
MLKPRITARQLIWISAFLLMLTILMMTWSTLRQQESTLAIRAVNQGASMPDGFSVLHHLDANGIHFKSITPKNDMLLITFDSPAQSAAAKTVLDQTLPHGYVVAQQDDDNETVQWLSRLRESSHRFG

SEQ ID NO: 73045 - protein, 122 aa, Salmonella paratyphi A
MKYRIALAITLFTLSAGSYANSLCQEKEQDIQKEISYAEKHNNQRRIEGLNKALSEVRANCTDSKLRAEHQKKIAEQKEEVAERQRDLAEAKAKGDADKIDKRERKLAEAQDELKKLEARDY

SEQ ID NO: 73046 - protein, 97 aa, Salmonella paratyphi A
MSKDNTTEHLRAELKSLTDTLEEVLSSSGEKSNEELSKIRSKAERALKESRYRLGETGDVIAKQTRAAAARADDYVRENPWTGVGIGAAVGLVLGVL

SEQ ID NO: 73047 - protein, 153 aa, Salmonella paratyphi A
LDRRRHWRRCRSGVGRTLTASLIMADSRQAQGPGKSVLGIGQRIVTIIVEMVETRLRLAVVELEEEKANLFQLLLMVGLTMLFAAFGLMSLMVLVIWAIDPQYRLNAMIATTVVLLVLRLIGGIWTFAKARQSTLLRHTRHELANDRQILEDD

SEQ ID NO: 73048 - protein, 327 aa, Salmonella paratyphi A
MGQLIDGVWHDTWYDTKSSGGKFQRSASAFRNWLTADGAPGTSGEGGFAAEKDRYHLYVSLACPWAHRTLIFRKLKGLEPFIPVSVVNPLMLENGWTFDDTFPAATGDTLYQHEFLYQLYLHADPHYSGRVTVPVLWDKKNHTIVSNESAEIIRMFNSAFDGLGAKAGDYYPHALQSKIDELNGWIYDNVNNGVYKAGFATSQQAYDEAVEKVFTALALEQILGQHRYLTGNQLTEADIRLWTTLVRFDPVYVTHFKCDKYRISDYLNLYGFLRDIYQIPGIAETVNMDHIRHHYFRSHKTINPTGIISVGPWQDLLEPHGRDVRFG

SEQ ID NO: 73049 - protein, 175 aa, Salmonella paratyphi A
MTSRLQVIQGDITQLSVDAIVNAANASLMGGGGVDGAIHRAAGPALLDACKLIRQQQGECQTGHAVITPAGKLSAKAVIHTVGPVWRGGEHQEAELLEEAYRNCLLLAEANHFRSIAFPAISTGVYGYPRAQAAEVAVRTVSDFITRYALPEQVYFVCHDEETARLYARLLTQQG

SEQ ID NO: 73050 - protein, 353 aa, Salmonella paratyphi A
  MISC_FEATURE (46)..(46): X=any amino acid
PAVVLMAGLQGAGNTTSVVRLGQFLRERHKRKVLVSLADVYARNHXQLETLAEQVGVDFFPSDVGQKPVDIVNAALKEAKLKFYDVLLVIRRSVCTVDEAMMDEIKQVHASIKPVETLFVVDAMTGQDAANTAKAFNEALPLTGVVLTKVDGDARGGAALSIRHITGKPIKFLGVGEKTDALEPFHPDRIASRILGMGDVLSLIEDIESKVDRAQAEKLATKLKKGDGFDLNDFLEQLKQMKNMGGMASLMGKLPGMGQIPDNVKSQMDDKVLVRMEAIINSMTLKERAKPEIIKGSRKRRIAQGCGMQVQDVNRLLKQFDDMQRMMKKMKKGGMAKMMRSMKGMMPPGFPGR

SEQ ID NO: 73051 - protein, 102 aa, Salmonella paratyphi A
MTPGSVPRWGPVVLFTQEDVMVTIRLARHGAKKRPFYQVVVTDSRNARNGRFIERVGFFNPIASEKEEGTRLDLDRIAHWVGQGATISDRVAALIKEVKKAA

SEQ ID NO: 73052 - protein, 182 aa, Salmonella paratyphi A
MSKQLAAQVPAEPVVLGKMGSSYGIRGWLRVFSSTEDAESIFDYQPWFIQKAGQWQQVQLESWKHHNQDLIIKLKGVDDRDAANLLTNCEIVVDSSQLPALEEGDYYWKDLMGCQVVTAEGYDLGKVIDMMETGSNDVLVIKANLKDAFGIKERLVPFLDGQVIKKVDLATRTIEVDWDPGF

SEQ ID NO: 73053 - protein, 255 aa, Salmonella paratyphi A
VFIGIVSLFPEMFRAITDYGVTGRAVKKGLLNIQSWSPPDFAHDRHRTVDDRSYGGGPGMLMMVQPCRDAIHAAKAAAGEGAKVIYLSPQGRKLDQAGVSELATNQKLILVCGRYEGVDERVIQAEIDEEWSIGDYVLSGGELPAMTLIDSVARFIPGVLGHEASAIEDSFADGLLDCPHYTRPEVLEGMEVPPVLLSGNHAEIRRWRLKQSLGRTWLRRPELLENLALTEEQARLLAEFKTEHAQQQHKHDGMA

SEQ ID NO: 73054 - protein, 115 aa, Salmonella paratyphi A
MSNIIKQLEQEQMKQNVPSFRPGDTVEVKVWVVEGTKKRLQAFEGVVIAIRNRGLHSAFTVRKISNGEGVERVFQTHSPVVDSIAVKRRGAVRKAKLYYLRERTGKAARIKERLN

SEQ ID NO: 73055 - protein, 385 aa, Salmonella paratyphi A
MSVIKMTDLDLAGKRVFIRADLNVPVKEGKVTSDARIRASLPTIELALKQGAKVMVTSHLGRPTEGEYNEEFSLLPVVNYLKDKLSNPVRLVKDYLDGVDVAEGELVVLENVRFNKGEKKDDEALSKKYAALCDVFVMDAFGTAHRAQASTHGIGKFADVACAGPLLAAELDALGKALKEPARPMVAIVGGSKVSTKLTVLDSLSKIADQLIVGGGIANTFVAAQGHSVGKSLYEADLVDEAKRLLTTCDIPVPTDVRVATEFSETAPATLKSVNDVKEDEQILDIGDASAQQLAEILKNAKTILWNGPVGVFEFPNFRKGTEIVANAIADSEAFSIAGGGDTLAAIDLFGIADKISYISTGGGAFLEFVEGKVLPAVAMLEERA

SEQ ID NO: 73056 - protein, 338 aa, Salmonella paratyphi A
MTVRIAINGFGRIGRNVVRALYESGRRAEITVVAINELADAGMAHLLKYDTSHGRFAWEVRHERDSLFVGDDVIRILHERTLADLPWRELGVDVVLDCTGVYGNQEHGEAHIAAGAKKVLFSHPGSNDLDATVVFGVNQNQLRAEHRIVSNASCTTNCIIPVIKLLDDAYGIESGTVTAIHSAMNDQQVIDAYHSDLRRTRAASQSIIPVDTKLAAGITRIFPQFNDRFEAIAVRVPTINVTAIDLSVTVKKPVKASEVNQLLQKAAQGAFHGIVDYTESPLVSIDFNHDPHSAIVDGTQTRVSGAHLIKTLVWCDNEWGFANRMLDTTLAMAAVDFR

SEQ ID NO: 73057 - protein, 454 aa, Salmonella paratyphi A
  MISC_FEATURE (445)..(445): X=any amino acid
GVPGQIRAIDGNQAKVDVCGIQRDVDLTLVGSCDENGQPRLGQWVLVHVGFAMSVINEAERATTLDALQNMFDVEPDVGALLYGEGEIMRFVDEYRAPEQVMQLIEHLRERAALLPYTAERPLRIMEVCGGHTHAIFKFGLDQLLPENVEFIHGPGCPVCVLPMGRIDSCVEIASHPEVIFCTFGDAMRVPGKQGSLLQAKARGADVRIVYSPMDALKLAQDNPTRKVVFFGLGFETTMPTTAITLQQAKQRDVRNFYFFCQHITLIPTLRSLLEQPDNGIDAFLAPGHVSMVIGTEAYQFIAADFHRPLVVAGFEPLDLLQGVVMLVEQKIAALSQVENQYRRVVPDAGNMLAQQAIADVFCVNGDSEWRGLGVIESSGVHLTPEYQRFDAEAHFRPAPQQVYDDPRAAAAEVLTGRCKPHQCPLFGKTCNPETAFGALMVSSXKHCAAWYQY

SEQ ID NO: 73058 - protein, 290 aa, Salmonella paratyphi A
MCTTCGCAEGNLYIEGDEHNPHSAFRSAPFAPAARPALNITGIKTPDFTPSQTAEGDLHYGHGEAGTHAPGMSQRRMLEVEIDVLDKNNRLAERNRARFAARQQLVLNLVSSPGSGKTTLLTETLMKLKDRVPCAVIEGDQQTVNDAARIRATGTPAIQVNTGKGCHLDAQMIADAAPRLPLDDHGILFIENVGNLVCPASFDLGEKHKVAVLSVTEGEDKPLKYPHMFAAASLMLLNKVDLLPYLNFDVEKCIASAREVNPEIEIILISATSGEGMDQWLAWLEAQRCA

SEQ ID NO: 73059 - protein, 299 aa, Salmonella paratyphi A
MAKNIQAIRGMNDYLPGETAIWQRIEGTLKNVLGSYGYSEIRLPIVEQTPLFKRAIGEVTDVVEKEMYTFEDRNGDSLTLRPEGTAGCVRAGIEHGLLYNQEQRLWYIGPMFRHERPQKGRYRQFHQLGAEVFGLQGPDIDAELIMLTARWWRALGISEHVSLELNSIGSLEARANYRDGLVAFLEQHQETLDEDCKRRMYTNPLRVLDSKNPDVQALLNDAPVLGDYLDDDSREHFTGLCKLLDAAGIAYTVNQRLVRGLDYYNRTVFEWVTNSLGSQGTVCAGGRYDGLVEQLGGIL

SEQ ID NO: 73060 - protein, 370 aa, Salmonella paratyphi A
  MISC_FEATURE (52)..(52): X=any amino acid
MHNQAPIQRRKSTRIYVGNVPIGDGAPIAVQSMTNTRTTDVEATVNQIKALXGVGADIVRVSVPTMDAAEAFKLIKQQVNVPLVADIHFDYRIALKVAEYGVDCLRINPGNIGNEERIRMVVDCARDKNIPIRIGVNAGSLEKDLQEKYGEPTPQALLESAMRHVDHLDRLNFDQFKVSVKASDVFLAVESYRLLAKQIDQPLHLGITEAGGARSGAVKSAIGLGLLLSEGIGDARVSLAADPVEEIKVGFDILKCRIRARGINFIACPTCSRQEFDVIGTVNALEQRLEDIITPMDVSIIGCVVNGPGEALVSTLGVTGGNKKSGLYEDGVRKDRLDNDDMIAQLESRIRAKASQLDEARRIDVLQVEK

SEQ ID NO: 73061 - protein, 334 aa, Salmonella paratyphi A
MNTEATHDQNEAQTTGVRLRNAREQLGLSQQAVAERLCLKVSTVRDIEEDKAPSDLASTFLRGYIRSYARLVHVPEEELLPGLEKQAPLRAAKVAPMQSFSLGKRRKKRDGWLMSFTWLVLFVVVGLTGAWWWQNHKAQQEEITTMADQSTAELNADKDSGQSVTLDTGAATSQDTTPAQTAPAPATPVDSTAATQTPAPTAAATQNTVVAPSQANVDTAATSAAPAATETPSALPTSQAGVAAPAADPNALVMNFTADCWLEVTDATGKKLFSGMQRKDGNLNLTGQAPYKLKIGAPAAVQIQYQGKPVDLSRFIRTNQVARLTLNAEPTPAQ

SEQ ID NO: 73062 - protein, 711 aa, Salmonella paratyphi A
MLYKGDTLYLDWLEDGIAELVFDAPGSVNKLDTATVASLGQALEVLEKQHDLKGLLLRSNKAAFIVGADITEFLSLFLVPEEQLSQWLHFANSVFNRLEDLPVPTLAAVNGYALGGGCECVLATDYRLATPDLRIGLPETKLGIMPGFGGSVRLPRMLGADSALEIIAAGKDVGAEHALKIGLVDGVVKQEKLIEGAIAVLRQAITGDLDWRAKRQPKLEPLKLSKIEAAMSFTIAKGMVAQTAGKHYPAPMTAVKTIEAAARFGREEALNLENKSFVPLAHTNEARALVGIFLNDQYVKGKAKKLTKDIETPKQAAVLGAGIMGGGIAYQSAWKGVPVIMKDINDKSLNLGMTEAAKLLNKQLERGKIDGLKLAGVISTIHPTLDYAGFDRVDVVVEAVVENPKVKKAVLAETEQKVRPETVLASNTSTIPIGELASALERPENFCGMHFFNPVHRMPLVEIIRGEKSSDETIAKVIAWASKMGKTPIVVNDCPGFFVNRVLFPYFAGFSQLLRDGADFRKVDKVMEKQFGCRMGPAYLLDVVGIDTRITAQAVMAAGFPQRMQKEYPMRSDALFDANRFGQKNGLGFWRYKEDSKCKPKKEEDAAVDDLLASVSQPKRDFSDDEIIARMMIPMINEVVRCLEEGIIASHAEADMALVYGLGFHSFHGGAFRWLDTQGSAKYLDMAQQYQHLGPLYEVPEGLRNKARHNE

SEQ ID NO: 73063 - protein, 387 aa, Salmonella paratyphi A
MEQVVIVDAIRTPMGRSKGGAFRNVRAEDLSAHLMRSLLARNPSLTAATLDDIYWGCVQQTLEQGFNIARNAALLAEIPHSVPAVTVNRLCGSSMQALHDAARMIMTGDAQVCLVGGVEHMGHVPMSHGVDFHPGLSRNVAKAAGMMGLTAEMLSRLHGISREMQDQFAARSHARAWAATQSGAFKTEIIPTGGHDADGVLKQFNYDEVIRPETTVEALSTLRPAFDPVSGTVTAGTSSALSDGAAAMLVMSESRARELGLKPRARIRSMAVVGCDPSIMGYGPVPASKLALKKAGLSASDIDVFEMNEAFAAQILPCIKDLGLMEQIDEKINLNGGAIALGHPLGCSGARISTTLINLMERKDAQFGLATMCIGLGQGIATVFERV

SEQ ID NO: 73064 - protein, 87 aa, Salmonella paratyphi A
MANIKSAKKRAVQSEKARKHNASRRSMMRTFIKKVYAAIEAGDKAAALKAFNEMQPIVDRQAAKGLIHKNKAARHKANLTAQINKLA

SEQ ID NO: 73065 - protein, 308 aa, Salmonella paratyphi A
MKLIRGIHNLSQAPHGCVLTIGNFDGVHRGHRALLQGLQEEGRRRGLPVVVMIFEPQPQELFATDKAPARLTRLREKLHYLAQCGVDYVLCVKFDRRFAALTAQTFISELLVERLGVQFLAVGDDFRFGASRAGDFLLLQKAGVEYGFAVSSTQTFCEGGVRISSTAVRQALAEDNLALAESLLGHPFTISGRVVHGDELGRTIGFPTANLPLRRQSSPVKGVYAVEVTGLGDKPLPGVRTIGTRPTVAGVRQQLEVHLLDVVMDLYGRHIDVILRKKIRNEQRFASLDELKAQIARDELTARKFFGL

SEQ ID NO: 73066 - protein, 512 aa, Salmonella paratyphi A
HYRERFTNILVDEFQDTNNIQYAWVRLLAGDTGKVMIVGDDDQSIYGWRGAQVENIQRFLNDFPGAQTIRLEQNYRSTSNILSAANALIENNNGRLGKKLWTDGVDGEPISLYCAFNELDEARFVVNRIKTWQDNGGALAQCAILYRSNAQSRVLEEALLQASMPYRIYGGMRFFERQEIKDALSYLRLIANRNDDAAFERVVNTPTRGIGDRTLDVVRQTSRDRQLTLWQAVRELLQEKALAGRAAAALQRFMELIDALGRETADMPLHVQTDRVIKDSGLRTMYEQEKGEKGQTRIENLEELVTATRQFSYNDEDEDLMPLQAFLSHAALEAGEGQADTWQDAVQLMTLPRPKGLEFPQVFIVGMEEGMFPSQMSLDEGGRLEEERRLAYVGVTRAMQKLTLTYAETRRLYGKEVYHRPSRFIGELPEECVEEVRLRATVSRPVSHQRMGKRWAENDTGYKLGQRVPMRSSGEGTIVNLEGSGEHSRLQVAFQGQGIKWLVAAYAKLETV

SEQ ID NO: 73067 - protein, 961 aa, Salmonella paratyphi A
VWDILDEVIREHPVLLNRAPTLHRLGIQAFEPVLIEGKAIQLHPLVCAAYNADFDGDQMAVHVPLTLEAQLEARALMMSTNNILSPANGEPIIVPSQDVVLGLYYMTRDCVNAKGEGMVLTGPKEAERIYRAGLASLHARVKVRITEYEKDENGEFVAHTSLKDTTVGRAILWMIVPKGLPFSIVNQALGKKAISKMLNTCYRILGLKPTVIFADQTMYTGFAYAARSGASVGIDDMVIPEKKHEIISEAEAEVAEIQEQFQSGLVTAGERYNKVIDIWAAANDRVSKAMMDNLQTETVINRDGQEEQQVSFNSIYMMADSGARGSAAQIRQLAGMRGLMANADGSIIETPITANFREGLNVLQYFISTHGARKGLADTALKTANSGYLTRRLVDVAQDLVVTEDDCGTHEGILMTPVIEGGDVKEPLRDRVLGRVTAEDVLNPGTADILVPRNTLLHEQWCDLLEANSVDAVKVRSVVSCDTDFGVCAHCYGRDLARGHIINKGEAIGVIAAQSIGEPGTQLTMRTFHIGGAASRAAAESSIQVKNKGSIKLSNVKSVVNSSGKLVITSRNTELKLIDEFGRTKESYKVPYGAVMAKGDGEQVAGGETVANWDPHTMPVITEVSGFIRFTDMIDGQTITRQTDELTGLSSLVVLDSAERTTGGKDLRPALKIVDAQGNDVLIPGTDMPAQYFLPGKAIVQLEDGVQISSGDTLARIPQESGGTKDITGGLPRVADLFEARRPKEPAILAEIAGIVSFGKETKGKRRLVITPVDGSDPYEEMIPKWRQLNVFEGERVERGDVISDGPEAPHDILRLRGVHAVTRYIVNEVQDVYRLQGVKINDKHIEVIVRQMLRKATIESAGSSDFLEGEQVEYSRVKIANRELEANGKVGATFSRDLLGITKASLATESFISAASFQETTRVLTEAAVAGKRDELRGLKENVIVGRLIPAGTGYAYHQD

SEQ ID NO: 73068 - protein, 239 aa, Salmonella paratyphi A
VIEFKNVSKHFGPTQVLHNIDLNIRQGEVVVIIGPSGSGKSTLLRCINKLEEITSGDLIVDGLKVNDPKVDERLIRQEAGMVFQQFYLFPHLTALENVMFGPLRAGVKKEEAEKQAKALLAKVGLAERAHHYPSELSGGQQQRVAIARALAVKPKMMLFDEPTSALDPELRHEVLKVMQDLAEEGMTMVIVTHEIALPEKARHGLIFIDKGRIAEDGSPQALIENPPSPRLQEFLQHVS

SEQ ID NO: 73069 - protein, 218 aa, Salmonella paratyphi A
MQFDWSAIWPAIPLLLEGAKMTLWISVLGLAGGLVIGLAAGFARTFGGWFANHIALVFIEIIRGTPIVVQVMFIYFALPMAFNDLRIDPFSAAVVTIMINSGAYIAEITRGAVLSIHKGFREAGLALGLSRRETIRHVILPLALRRMLPPLGNQWIISIKDTSLFIVIAVAELTRQGQEIIAGNFRALEIWSAVAVFYLIITLVLSFILRRLERRMKI

SEQ ID NO: 73070 - protein, 167 aa, Salmonella paratyphi A
MSTAKLVKTKASNLLYTRNDVSESDKKATVELLNRQVIQFIDLSLITKQAHWNMRGANFIAVHEMLDGFRTALTDHLDTMAERAVQLGGVALGTTQVINSKTPLKSYPLDIHNVQDHLKELADRYAVVANDVRKAIGEAKDEDTADIFTAASRDLDKFLWFIESNIE

SEQ ID NO: 73071 - protein, 293 aa, Salmonella paratyphi A
  MISC_FEATURE (202)..(202): X=any amino acid
  MISC_FEATURE (280)..(280): X=any amino acid
MPGSTRKLPVWLPILVLLIAMSSIQSGASLAKSLFPLVGAAGVTALRLALGTLILIAFFKPWRLHFAKEQRLPLLFYGLSLGGMNYLFYLSIQTVPLGIAVALEFTGPLAVALFSSRRPVDFIWVVLAVLGLWFLLPLGQDMSHVDLTGAALARRGACWAVYILTGQRAGAEHGPATVAVGSLIAAIIFVPIGAVQAGDALXHWSILPLGLAVAVLSTALPYSLEMIALTRLPTRHLGTLMSMEPALAAFPGMIFLGETLTGIQILALCAIIAASMVLPXTIRREPQIKQVDV

SEQ ID NO: 73072 - protein, 681 aa, Salmonella paratyphi A
  MISC_FEATURE (243)..(243): X=any amino acid
LVSLLLWKKIARCLSAGRVQSVAVRLVVERDVYKAFVPEEFWEIDANTTTPSGGLPLQVTHQNDKPFRPVNREQTLAAVSLLEKARYSYLEREDKPTSSKPGAPFITSTLQQAASTRLVFGVKKTMMMAHVCYEACYITYMRTDSTNLSQDAVNMVRGYIGDNFGKKYLPDNPNQYASKEKLQEAHEAIRPSDVAVMAESLKDMEADAQKLYQLILASVVRCQMTSAQYDSTTLTVGAGNSVXKARGAILRFDGWTKVMPALRKGDEDRTLPAVNKGDALTLVELTPAQHFTKPPARFSEASLVKELEKRGIGRPSTYASIISTIQDRGYVRVENRRFYAEKMGEIVTDRLEENFRELMNYDFTAQMEDSLDQVANHQAEWKAVLDNFFSDFTQQLDKAEKDPEEGGMRPNQMVLTSIDCPTCGRKMGIRTASTGVFLGCSGYALSPKERCKTTINLVPENEVLNVLEGDDAETNALAPNVAVRKCGTAMDSYLIDPKRKLHVCGNNPTCDGYEIEEGEFRIKGYDGPIVECEKCGSEMHLKMGRFGKYMACTNDECKNTRKILRNGEVAPPKEDPVPLPELPCEKSDAYFVLRDGAAGIFLAANTFPKSRETRAPLVEELYRFRDRLPEKLRYLADAPQQDPEGNKTVVRFSRKTKQQYVAAEKDGKATGWSAFFVDGKW

SEQ ID NO: 73073 - protein, 142 aa, Salmonella paratyphi A
MRNYDLSPLLRQWIGFDKLANALQNSGESQSFPPYNIEKSDDNHYRITLALAGFRQEDLDIQLEGTRLTVKGTPEQPENEPKWLHQGLVMQPFSLSFTLAENMEVSGATFTNGLLHIDLTRNEPETIAPQRIAINERSALNS

SEQ ID NO: 73074 - protein, 313 aa, Salmonella paratyphi A
  MISC_FEATURE (24)..(24): X=any amino acid
  MISC_FEATURE (121)..(121): X=any amino acid
  MISC_FEATURE (153)..(153): X=any amino acid
YRNGPFYSRGPIMMSAIAVDHDMXDIKGKVLNAPVWQLMDALVRDKIKAYSWVGDDRPADVIDSIEKLRGIRFDTFKLNGCEEMGVIDNSRAVDAAVNTVAQIREAFGSEIEFGLDFHGAXRPMAKVLIKELEPYRPLFIEEPVLAEQAEYYXLRRQTHIPIAAGERMFSRFEFKRVLDAGGLGILQPDLSHAGGITECYKIAGMAEAYDVAVAPHCRWVPIALAACLHIDFVSRNAVFQEQSMGIHYNKGAELLDFVKNKEDFSMDGGFFKPLTKPGLGVDIDEARVIELSKSAPDWSNPLWRHADGSVAEW

SEQ ID NO: 73075 - protein, 545 aa, Salmonella paratyphi A
LAFALMAALTLLSTVIGWISLRVISQVEQTNTQALLPTMNMARQLSEASAYELFSAQNLTNADSEGVWLAQGKMLKAQSLKINHLLQALSEQGFNTSAIARQEKEIAQTLGQQGTLVGEILTLRAQQQQLSHQIAEAAESIAAQAHGQANNAATSAGATQAGIYDLIESGKGDQAERALDRLIDIDLEYVNQMNELRVNACGFKQLIVTLKDAQGLSDAEDTDEKLNQLVKILSRRQQRIEDPTVRAQIADALEKINQYTTLVTLFRKENAIRDQLQTLMANNLFQFTRFSTEVSQLVNAIEKRNEAGLARLTHASQRGQIGLVILGILALCSLSFILWRVVYRSVSRPLAQQTQALQRLLEGDIDSPFPEAVWRTKLDTISRSDGSVCANVPNLNRHREDLADQVRSQTADVHSLVLEHRQSLVESDKCHRGESTFLAAMSHEIRTPLYGILGTVQLLADKPLMANYRDYLQPINDSGESLLAILNDILDYSAIEVGGTNVSISEEPFEPRQLLNSALHLMHSRVQVALITDFSEQLPSTLQGD

SEQ ID NO: 73076 - protein, 340 aa, Salmonella paratyphi A
FFFLIIIVSNVETASAETGLLHWTRADRAIPWRQTSVNASKPWKLCALYPSLKDSYWLSVNYGMQKAAKLYGVDLKVLEANGYRQLATQQQQMTQCREWGADAILLGSSTDRFPELERYAGNVPVIELVNMIHDASVATRIGLPWFQMGYLPGRFLVQWSKGKTLNVLLFPGPEEAGGSQEMVAGFRQAIKAAPINIVDIAWGDNDIEVQRNLLQEMLERHPDANVVAGSAIAAEAAMGEGRNLTTPLTIVSFYLTHQVYRGLKRGHILMALSDQMAWQGELAITQSIKVLQGQPVPENISPPVLILTHNNADSARVRRSLSPPGFRPVYLYQYTSEAKK

SEQ ID NO: 73077 - protein, 171 aa, Salmonella paratyphi A
MLRLLEEKIATPLGPLWVVCDEQFRLRAIEWEQYRDRMEQLLNIHYRHEGYERVSATNPGGLSDKLADYFAGNLAVIGTLETATGGTPFQREVWQALRAIPCGQVMHYGQLAAQLGRPGAHRAVGAANGANPISIVVPCHRVIGRNGTLTGYAGGVQRKEWLLRHEGYLLL

SEQ ID NO: 73078 - protein, 502 aa, Salmonella paratyphi A
  MISC_FEATURE (238)..(238): X=any amino acid
RGHRFMGEPEFTIDSAEQYPQILLERGKVIADYEARKAKIKADAEEAARKIGGNADLSESLLEEVASLVEWPVVLTAKFEEKFLAVPAEALVYTMKGDQKYFPVYDNAGKLLPNFIFVANIESKDPTQIISGNEKVVRPRLADAEFFFNTDRKKRLEDHLPRLQTVLFQQQLGTLRDKTDRIQALAGWIAGQIGADVNHATRAGLLSKCDLMTNMVFEFTDTQGVMGMHYARHDGDGXDVAVALNEQYQPRFAGDDLPSNPVACALGIAIRMDTLAGIFGIGQHPKGDKDPFALRRAALGVLRIIVEKNLNLDLQTLTEEAALLYGDKLTNANVVDDVIDFMLGRFRAWYQDEGYTVDTIQAVLARRPTRPADFDARMKAVSHFRTLEEASALAAANKRVSNILAKATEPLNDIVHASVLKEAAEIELARHLVVLRDKLQPYFADGRYQEALIELAALRAPVDEFFENVMVNAEEKDIRINRLTLLSKLRELFLQVADISLL

SEQ ID NO: 73079 - protein, 139 aa, Salmonella paratyphi A
  MISC_FEATURE (118)..(118): X=any amino acid
PIIDLFNNEVISCSISERPTMPMIDDILMKAFADLMGYNPVLHSDQGWQYRHQWYQYQLREFGIIQSMSAKGNCLDNACAECFFGTLKSESFYTSKFKDIDELKIAIEDYIRYYNTRXISLKFNGLSPVEYRLKSYQGR

SEQ ID NO: 73080 - protein, 70 aa, Salmonella paratyphi A; identical to SEQ ID NO: 42639

SEQ ID NO: 73081 - protein, 98 aa, Salmonella paratyphi A
MKSLIFTLSLLALTGCTITRQAQVSDASPISGIVRLTYNQPLFFTSRTDDYVSHGTATRECQQMGYAMAVSFGQPVEPCSIYGARCCLNTRFTLSWQC

SEQ ID NO: 73082 - protein, 167 aa, Salmonella paratyphi A
MAAVGMVQKLNTPMNLEFYASNLYLHLSEWCSEHSLTGTATFLRTQAQGNVTQMMRMFNFMKNAGATPIVKAIDVPGEELCSLEELFQKTLEDYQQRASSLSRLADEAKALNDASTLDFLHTLEKEQQQDGVLLQTILEEVRSAKRAGLCLAQTDQHLLNVVTYQHH

SEQ ID NO: 73083 - protein, 380 aa, Salmonella paratyphi A
  MISC_FEATURE (123)..(123): X=any amino acid
MKRQRNVNLLLMLVLLVAVGQMAQTIYIPAIADMAQALNVREGAVQSVMAAYLLTYGVSQLFYGPLSDRVGRRPVILVGMSIFMVATLFAMTTHSLTVLIAASAMQGMGTGVGGVMARRSPRXCMEGTQLRHANSLLNMGILVSPLLAPLIGGLLDTLWNWRACYAFLLVLCAGVTFSMARWMPETRPAGAPRTLIASYKTLFGNGAFNCYLLMLIGGLAGIAVFEACSGVLMGAVLGLSSMVVSILFILPIPAAFFGAWFAGRPNKRFSALMWQSVICCLLAGLMMWIPGWFGVMNVWTLLIPAALFFFGAGMLFPLATSGALVGGLQNIGSGVLAWLSAMLPQTGQGSLGLLMTLMGLLILACWLPLASRISHQGQTV

SEQ ID NO: 73084 - protein, 276 aa, Salmonella paratyphi A
  MISC_FEATURE (37)..(37): X=any amino acid
LQLDAIIITCWIILNAICVACGLQKGVRIASDMRTTXSFLMLGWVFIVSGATSSMNYFTDSVGMLLMHLPRMLFYTDAIGKGGFPQGWTVFYWAWWVIYAIQMSIFLGPYSRGRTVRELCFGMVMGLTASTWILWTVLGSNTLLLMDKNILNIPQLIEQHGVARAIIETWAALPLSTATMWGFFILCFIATVTLINACSYTLAMSTCREVRDGEEPPLLVRIGWSVLVGIIGIVLLALGGLKPIQTAIIAGGCPLFFVNIMVTLSFIKDAKVHWKD

SEQ ID NO: 73085 - protein, 534 aa, Salmonella paratyphi A
  MISC_FEATURE (449)..(449): X=any amino acid
  MISC_FEATURE (457)..(457): X=any amino acid
  MISC_FEATURE (469)..(469): X=any amino acid
  MISC_FEATURE (476)..(476): X=any amino acid
  MISC_FEATURE (521)..(521): X=any amino acid
VSRIIMLIPTGTSVGLTSVSLGVIRAMERKGVRLSVFKPIAQPRAGGDAPDQTTTIVRANSTLPAAEPLKMSHVESLLSSNQKDVLMEEIIANYHANTKDAEVVLVEGLVPTRKHQFAQSLNYEIAKTLNAEIVFVMSQGTDTPEQLNERIELTRSSFGGAKNTNITGVIINKLNAPVDEQGRTRPDLSEIFDDSSKAQVIKIDPAKLQESSPLPVLGAVPWSFDLIATRAIDMARHLNATIINEGDIKTRRVKSVTFCARSIPHMLEHFRAGSLLVTSADRPDVLVAACLAAMNGVEIGALLLTGGYEMDARISKLCEPHFATGLPVFMVNTNTWQTSLSLQSFNLEVPVDDHERIEKVQEYVANYVNADWIESLTATSERTRRLSPPAFRYQLTELARKAGKRVVLPERLEPRTVKAAAICAERGIAACVLLGNPDEINRVGHLRAXTGPGIESXSGVVVKHVLASXLRRAKAXIEPVAHEQLEDNVVLGSIMLSKTNHRAGSGAVIPHQNHPSPLILXTARDLLVTQFLML

SEQ ID NO: 73086 - protein, 125 aa, Salmonella paratyphi A
MEKRLAPVFVENRVIRMTRYAIRFMPPVAVFTLCWQIALGGQLGPAVATALFALSLPMQGLWWLGKRSVTPLPPSILNWFYEVRGKLQEAGQALAPVEGKPDYQALADTLKRAFKQLDKTFLDDL

SEQ ID NO: 73087 - protein, 549 aa, Salmonella paratyphi A
  MISC_FEATURE (148)..(148): X=any amino acid
  MISC_FEATURE (156)..(156): X=any amino acid
ESFAQLFEESLKRNRNPPGSIVRGVVVAIDKDVVLVDAGLKSESAIPAEQFKNAQGQLEIQVGDEVDVALDAVEDGFGETLLSREKAKRHEAWITLEKAYEDAETVTGVINGKVKGGFTVELNGIRAFLPGSLVDVRPVRDTLHLEGXELEFKVIXLDPERDTLCFSSCRYRSENSAERDQLLENLQEGMEVKGIVKNLTDYGAFVDLGGVDGLLHITDMAWKRVKHPSEIVNVGDEINVKVLKFDRERTRVSLGLKQLGEDPWVAIAKRYPEGTKLTGRVTNLTDYGCFVEIEEGVEGLVHVSEMDWTNKNIHPSKVVNVGDVVEVMVLDIDEERRRISLGLKQCKSNPWQQFAETHNKGDRVEGKIKSITDFGIFIGLDGGIDGLVHLSDISWNVAGEEAVREYKKGDEIAAVVLQVDAERERISLGVKQLAEDPFNNWVALNKKGAIVTGKVTAVDAKGATVELADGVEGYLRASEASRDRVEDATLVLSVGDDVEAKFTGVDRKNRAISLSVRAKDEADEKDAIATVNKQEDANFSNNAMAEAFK

SEQ ID NO: 73088 - protein, 582 aa, Salmonella paratyphi A
MHNDKDLSTWQTFRRLWPTIAPFKAGLIVAGIALILNAASDTFMLSLLKPLLDDGFGKTDRSVLLWMPLVVIGLMILRGITSYISSYCISWVSGKVVMTMRRRLFGHMMGMPVAFFDKQSTGTLLSRITYDSEQVASSSSGALITVVREGASIIGLFIMMFYYSWQLSIILVVLAPIVSIAIRVVSKRFRSISKNMQNTMGQVTTSAEQMLKGHKEVLIFGGQEVETKRFDKVSNKMRLQGMKMVSASSISDPIIQLIASLALAFVLYAASFPSVMDSLTAGTITVVFSSMIALMRPLKSLTNVNAQFQRGMAACQTLFAILDSEQEKDEGKRVIDRATGDLEFRNVTFTYPGREVPALRNINLKISAGKTVALVGRSGSGKSTIASLITRFYDIDEGHILMDGHDLREYTLASLRNQVALVSQNVHLFNDTVANNIAYARTEEYSREQIEEAARMAYAMDFINKMDNGLDTIIGENGVLLSGGQRQRIAIARALLRDSRILILDEATSALDTESERAIQAALDELQKNRTSLMIAHRLSTIEQADEIVVVEEGIIVERGTHSELLAQHGVYPSLHKMQFGQ

SEQ ID NO: 73089 - protein, 666 aa, Salmonella paratyphi A
  MISC_FEATURE (142)..(142): X=any amino acid
AAKDEFKRSMPGRIIGVSKDAAGNTALHGMQTREQHIRREKANSNICTSQVLLANIASLYAVYHGPVGLKRIANRIHRLTDILAAGLQQKGLKLRHAHYFDTLCVEVADKAAVLARANGRDQPAHDIHNAVGITLDETTTRXECGAVVQCFAGRHDGLNIETLDKDVALDSRSIQQSMLRDDAILTHPVFNRYHSETEMMRYMHSLERKDLALNQAMIPLGSCTMKLNAAAEMIPITWPEFAELHPFCPPEQAEGYHQMISQLSDWLVKLTGYDAVCMQPNSGAQGEYAGLLAIRHYHESRNEGHRDICLIPASAHGTNPASAHMAGMQVVVVACDKNGNIDLTDLRAKAEQAGDNLSCIMVTYPSTHGVYEETIREVCEVVHQFGGQVYLDGANMNAQVGITSPGFIGADVSHLNLHKTFCIPHGRRPGMGPIGVKAHLAPFVPGHSVVQIEGMLTRQGAVSAAPFAAPPILPISWMYIRMMGAEGLKQASQVAILNANYIASCLKDAYPVLYTGRDGRVAHECILDIRPLKEETGISELDIAKRLIDYGFHAPTMSFPVAGTLMVEPTESEGKAELDRFIDAMLAIRAEIDQVKAGVWPLEDNPLVNAPHIQSELVAEWAHPYSREVAVFPAGVADKYWPTVKRLDDVYGDRNLFCSCVPISDY

SEQ ID NO: 73090 - protein, 473 aa, Salmonella paratyphi A
TLPKDFLWGGAVAAHQVEGGWNKDGKGPSICDVLTGGAHGVPREITQNVVAGKYYPNHEAVDFYGHYKEDIRLFAEMGFKCFRTSIAWTRIFPNGDESQPNEAGLKFYDDMFDELLKYNIEPVITLSHFEMPLHLVQHYGGWTNRKVVDFFVRFAEVVLERYKHKVKYWMTFNEINNQRNWRAPLFGYCCSGVVYTEHENPEETMYQVLHHQYVASALAVKAARRINPQMKVGCMLAMVALYPFSCKPEDVMFAQESMRERYVFTDVQLRGYYPSYVLNEWERRGFNIKMENGDLEVLREGTCDYLGFSYYMTNAVKAEGGSGDAISGFEGSVPNPYVKASDWGWQIDPVGLRYSLCELYERYQKPLFIVENGFGAYDKVEEDGSINDDYRIDYLRAHIEEMKKAVTYDGVDLMGYTPWGCIDCVSFTTGQYSKRYGFIYVNKHDDGTGDMSRSRKKSFNWYKEVIASNGEKL

SEQ ID NO: 73091 - protein, 215 aa, Salmonella paratyphi A
MVQKPLMTQGYSLAEEIANSISHGIGLVFGIVGLVLLLVQAVEANAGMTAIASYSLYGGSMILLFLASTLYHAIPHQRAKIWLKKFDHCAIYLLIAGTYTPFLLVGLDSPLARGLMIVIWSLALFGILFKLTIAHRFKVLSLVTYLAMGWLSLIVVYQLAIKLAIGGVTLLAVGGVVYSLGVIFYVCKRIPLKHAIWHGFVLGCSVCTFLASILY

SEQ ID NO: 73092 - protein, 392 aa, Salmonella paratyphi A
  MISC_FEATURE (13)..(13): X=any amino acid
  MISC_FEATURE (364)..(364): X=any amino acid
MNSTLIDSLLAVXGCNPWAGLYFLQSLLINLALGYPFSLLYTAAFTCLLLLLWRYLPRGQKALLGICSLVAACYFPFGQAYGAPNFNTLLALHSTNMEESSEILTIFPWYSYLTGLFIFALGIIALRRRKEEVKPRWNSLDSLCLLISVAAFFVAPVQNLAWGGVFKVIDTGYPVFRFAKDVIVNNNEVIEEQHRMAQLSGIKDSWTVTAVKPRYHIYVVVIGESARRDAMGAFGGHWDNTPFASHVNGDFFMDYIAASGQTQKSLGLTLNRVVDNKPQYQDNFVTLANRAGFQTWWFSNQVQIGEYDTAIASIAKRADEAHFLKNGDFEADKNTRDDALLTMTAQVLATERTQPQLIVLHVMXSHARPCDRTQGIYATFVQSEEDVCYLYT

SEQ ID NO: 73093 - protein, 531 aa, Salmonella paratyphi A
VLVSSNVTMQLRSKPLFENISVKFGGGNRYAVIGANGSGKSTFMKILGGDLEPTLGNVSLDPNERIGKLRQDQFAFETFTVLDTVIMGHGELWEVKQERDRIYALPEMSEEDGYKVADLEVKYGEMDGYSAEARAGELLLGVGIPLEQHYGLMSEVAPGWNLRVLLAQALFSNPDILLLDEPTNNLDIDTIRWLEQVLNERDTTMIIISHDRHFLNMVCTHMADLDYGDLRVYPGNYDEYMTAATQARERLLADNAKKKAQIAELQSFVSRFSANASKSRQATSRARQIDKIKLEEVKASSRQNPFIRFEQDKKLFRNALEVEALTKGFDNGPLFKNVNLLLEVGEKLAVLGTNGVGKSTLLKTLVGDLDADHGTVKWSENARIGYYAQDHEYEFENDLTVFEWMSQWKQEGDDEQAVRSILGRLLFSQDDIKKPAKVLSGGEKGRMLFGKLMMQKPNILIMDEPTNHLDMESIESLNMALELYQGTLIFVSHDREFVSSLATRVIEITPERVVDFSGNYDDYLRSKGIES

SEQ ID NO: 73094 - protein, 146 aa, Salmonella paratyphi A
HQIDRLLTLMQRLRSPENGCPWDKEQTFASIAPYTLEETYEVLDAIAREDFDDLRGELGDLLFQVVFYAQMAQEEGRFDFNDICAAISDKLERRHPHVFGELSADNSEEALVRWEQIKTEERGKKAQHSALDDITRSLPALMARKK

SEQ ID NO: 73095 - protein, 507 aa, Salmonella paratyphi A
  MISC_FEATURE (166)..(166): X=any amino acid
  MISC_FEATURE (167)..(167): X=any amino acid
  MISC_FEATURE (184)..(184): X=any amino acid
  MISC_FEATURE (476)..(476): X=any amino acid
SGKPSEHVLHCAWLNSHYQTGLKNLLDTAVLEGVDETAAVHVSGRWQKIDEIPFDFERRRMSVVVAEDSNVHQLVCKGALQEILNVCTQVRHNGDIVPLDDNMLRRVKRVTDTLNRQGLRVVAVATNTLPAREGDYQRIDESDLILEGYIAFLDPPKETTAPRLKXXRRAEITVKILTGDTSWXRAKVCHEVGLDAGDVVIGSDIEGLSDDALALPARLTNVVLRSDADHKERIVTLLKREGHVVGFMGDGINDAPALRAADIGISVDGAVDIAREAADIILLEKSLMVLEEGVIEGRRTFSNMLKYIKMTASSNFGNVFSVLVASAFLPFLPMLPLHLLIQNLLYDVSQVAIPFDNVDEEQIQKPQRWNPADLGRFMVFFGPISSIFDILTFCLMWWVFHANTPETQTLFQSGWFVVGLLSQTLIVHMIRTRRLPFIQSRAAWPLMAMTLLVMVVGVSLPFSPLASYLQLQRCRXAISPWLIAILAGYMTLTQLVKGFYSRRYGWQ

SEQ ID NO: 73096 - protein, 457 aa, Salmonella paratyphi A
VTAFSTLNVLPAAQLNNLTELGYLEMTPVQAAALPVILAGNDVRVQARTGSGKTAAFGLGLLHRIDVSLFQTQALVLCPTRELADQVAGELRRLARFLPNTKILTLCGGQPFGAQRDSLQHAPHIIVATPGRQLDHLQKETVSLDALHILVMDEADRMLDMGFSDAIDEVIRFAPATRQTLLFSATWPEAIAAISGRVQQQPIRIEIDTVDALPAIEQQFFETSAHEKISLLQTLLSQHQPASCVVFCNTKKDCQAVCDALNAVGQSALALHGDLEQRDRDQTLVRFANGSARILVATDVAARGLDIKSLELVVNYELAWDPEVHVHRIARTARAGSSGLAISFCAPEEAQRANILSEMLQLKLNWLNAPARQPLLPLAAEMATLCIDGGKKAKMRPGDILGALTGDIGLDGADIGKINVHPMHVYVAVRQAVAQKAWKQLQNGKIKGKSCRVRLLK

SEQ ID NO: 73097 - protein, 172 aa, Salmonella paratyphi A
AIAPVITIDGPSGAGKGTLCKAMAEALQWHLLDSGAIYRVLALAALHHHVDLASEDALVPLASHLDVRFVSTDGNLEVILEGEDVSGEIRTQEVANAASQVAAFPRVAEALLRRQRAFREAPGLIADGRDMGTVVFTDSPVKIFLDASSEERAHRRMLQVQENGFSVNSEHL

SEQ ID NO: 73098 - protein, 216 aa, Salmonella paratyphi A
ELIETTSYWHLLGEGTHTVNGKTVVVNLRAWKKKLYLCLMSVKLEASRFYVSFACSFAFAERELMEGNAKLIRLIARDEALHLTGTQHMLNLLRTAWTDPEMAEIAEECKQECYDLFVQAAQQEKEWADYLFRDGSMIGLNKDILCQYVEYITNIRMQAVGLDLPFQTRSNPIPWINTWLVSDNVQVAPQEVEVSSYLVGQIDSEVDTDDLSNFQL

SEQ ID NO: 73099 - protein, 317 aa, Salmonella paratyphi A
VRLPAFYRWLLLVVGLSISGISLAQDAGWPRQIQDSRGVHTLDHKPARIVSTSVTLTGSLLAIDAPVVASGATTPNNRFADDQGFMRQWSDVAKARHVARLYIGEPNAETVAAQMPDLILISATGGDSALALYDQLSAIAPTLVINYDDKSWQSLLTQLGEITGQEKQAAARIAEFEAQLTTVKQRIALPPAPVSALVYTPAAHSESWTPESTQGKLLTQVGFTLATLPKGCQTSKSQGKRHDIIQLGGENLAAGLNGESLFLFAGDNNDVRPFTANPLLAHLPAVQNKRVYALGTETFRLDYYSATLLLNRLAALF

SEQ ID NO: 73100 - protein, 309 aa, Salmonella paratyphi A
VRRVITTGRRCVRAATVYALSASSGRGHRQPRRYLPYRLVNSGVPQKMTESVARLRGDQLTLGYGSYTVAKNLNVSIPDGHFTAIIGPNGCGKSTLLRTLSRLMTPVDGHVWLDGEQIQHYASKEVARRIGLLAQNATTPGDITVQELVARGRYPHQPLFTRWRKEDADAVASAMRATGITSLAAQSVDTLSGGQRQRAWIAMVLAQETSIMLLDEPTTWLDISHQIDLLELLSDLNREKGYTLAAVLHDLNQACRYATHLIALREGNIVAQGAPKEIVTAELIEKIYGLRCMIIDDPVAGTPLVVPLG

SEQ ID NO: 73101 - protein, 457 aa, Salmonella paratyphi A
MLHNIHVYKKLYSHMNTWFLFMDRRRFMKTSNFQKWLMVILLAIGGGTIFKSMYLREVFYYPWNEFMGVNNTDSGLLMSWLGFVGIVSSSIAGVIIDKVNNTRLIISFTFLAVGVTTLWQSTAPGLATQYVIIGILSFLANGLFLVSMVRATRLIGNASDQGKLFGFLESGRGIAGSAISAVAVAWFAMSATEVEGIGSVLHAYGFLYLALGVLMWFAMPRDNHNSASGEEKAKEKISVHDILAVMKVKEVWFAAFSIFATISFYQGSSYLVPYLSDVYGMTAEHAGIIGMIRAYVLAILIAPVVGLLADKVGSAIKVMNWLFIAGVIGVAMFLVIPQDPAMVWVLIGTLMIVGSINFALRGIMYAQIEEMKVPVRLTGTVMGIMATVGFSPEMFIHALFGYWLDAYKVQGYTYMFIFMGAMFALAVFTSLLLLRNAKTAFKKMDGKPADTFRTAAE

SEQ ID NO: 73102 - protein, 425 aa, Salmonella paratyphi A
SSVKKIGLFACTGVVAGNMMGSGIALLPANLASIGGIAIWGWVISIIGAMSLAYVYARLATKNPQQGGPIAYAGEISPAFGFQTGVLYYHANWIGNLAIGITAVSYLSTFFPALNNPIPAVIACIAIVWLFTFINMLGGAGSSRLTTIGLFLVLIPVVLTAVAGWHWFDIATYHANWNTSTTTDSHAIVKSILLCLWAFVGVESAAVSTGMVKNPKRTVPLATMLGTALAGIIYIAATQVIAGMFPASVMASSGAPFAISTSTILGGWAAPLVSAFTAFACLTSLGSWMMLVGQAGVRPPTDGNFPKIYGEMDKNGIPKKGLLLAAVKMTALMILITIMNSSGGKASDLFGELTGIAVLLTMLPYFYSCVDLIRFEGFNIRNSVSLICSVLACAFCFIALMGASSFELSGTFIVSLIILMFYGRK

SEQ ID NO: 73103 - protein, 363 aa, Salmonella paratyphi A
MGFKCGIVGLPNVGKSTLFNALTKAGIEAANFPFCTIEPNTGVVPMPDPRLDQLAEIVKPQRILPTTMEFVDIAGLVKGASKGEGLGNQFLTNIRETEAIGHVVRCFENDNIIHVAGKVNPAEDIDVINTELALADLDTCERAIHRVQKKAKGGDKDAKAELAALEKCLPHLAEAGMLRSLDLTDEDKAAIRYLSFLTLKPTMYIANVNEDGFENNPYLDQVREIAAKEGSVVVPVCAAVEADITELEDDERDEFMAELGLEEPGLNRVIRAGYRLLNLQTYFTAGVKEVRAWTIPVGATAPQAAGKIHTDFEKGFIRAQTIAFDDFITYKGEQGAKEAGKMRAEGKDYIVKDGDIMNFLFNV

SEQ ID NO: 73104 - protein, 147 aa, Salmonella paratyphi A
MLGTWLSDATITLQESVETWPQALEICGKPLLDAGVIAPEYITAIVQQHQKLGPYYVLAPGLAMPHARPEEGAKGLGLSLLKLQRGVSFGADEFDPVDIIIMLAAPDKHSHIEMISALAELFSSDVDMEKLHQAKNLEDIKKIIDRF

SEQ ID NO: 73105 - protein, 419 aa, Salmonella paratyphi A
  MISC_FEATURE (267)..(267): X=any amino acid
LNFVVDILKVPSVLVGLIALIGLVAQKKAFSDVVKGTIKTILGFIVLGGGATVLVGSLNPLGGMFEHAFNIQGIIPNNEAIVSIALEKYGASTALIMAFGMVANIVVARFTRLKYIFLTGHHTFYMACMIGVILTVAGFEGVGLVFTGSLILGLVMAFFPALAQRYMRRITGTDDIAFGHFGTLGYVLSGWIGSLCGKGSRSTEEMNLPKNLSFLRDSSISISLTMMIIYLIMAVSAGREYVEATFSGGQNYLVYAIIMAITFAAGXFIILQGVRLILAEIVPAFTGFSEKLVPNARPALTCPVVYPYAPNAVLIGFLFSFLGGLVGLFLLGQMKLVLILPGVVPHFFTGATAGVFGNATGGRRGAMIGAFANGLLITFLPVLLLPVLGAIGFANTTFSDADFGVIGILLGNLARYLSR

SEQ ID NO: 73106 - protein, 302 aa, Salmonella paratyphi A
MRKVYAGFVAGQIEAGSPIIALEADLMSSMAMDSVARDYPQHVINCGIMEANVIGTAAGLALTGRKPFVHTFTAFASRRCFDQLFMALDYQRNNVKVIASDAGVTACHNGGTHMSFEDMGIVRGLAHSVVLEVTDAVMFANILRQLMDLDGFYWLRTIRKQATSIYAPGSTFTIGKGNVLREGDDITLIANGIMVAEALEARATGAGRRDAAVIDMFTLKPIDRMLVKNYAEKTRRIVTCENHSIHNGLGSAVGQVLVENCPVPMRRVGVKERYGQVGTQDFLQQEYGLTAEAIVEAAKSLL

SEQ ID NO: 73107 - protein, 495 aa, Salmonella paratyphi A
  MISC_FEATURE (265)..(265): X=any amino acid
KWAMPDTLVIIFFVAILTSIATWVVPVGMFDSQEVQYQVDGQTKTRKVVDPHSFRIVTNEAGEAQYHRVQFFTTGDERPGLMNFPFEGLTSGSKFGTAVGIIMFMLVIGGAFGIVMRTGTVDNGILALIRHTRGNEVLFIPVLFVLFSLGGAVFGMGKNAVAFAIIIAPLMVRLSYDSITTVLVTYIATQIAFASSWMNPFCVVVAQGIAGVPVLSGSGLRIVVWIVATLIGLVFTLVYASRVKKNPLLSRVHESDRYFREQAGXSSSSALSLRDWLVLLVLTGVMIWVVWGVIVHAWFIPEIASQFFTMGVVIGLIGVIFRLNGMTVNVMASSFTEGARMMIAPALLVGFAKGILLLVGNGEAGEPSVLNTLLNSIAHGISGLNNAIAAWFMLLFQAVFNFFVTSGSGQAALTMPLLAPLGDLVGVNRQVTVLAFQFGDGFSHIIYPTSASLMATLGVCRVDFRNWLKVGASLLGLLFIMSSVVVIGAQMMGYH

SEQ ID NO: 73108 - protein, 448 aa, Salmonella paratyphi A
QTVLAKIVADKAIWVEARKQQQPLASFQNEIQPSTRHFYDRSRARTAFILECKKASPSKGVIRDDFDPARIANIYQHYASAISVLTDEKYFQGSFDFLPIVSQSAPQPILCKDFIIDPYQIYLARYYQADACLLMLSVLDDEQYRQLSAVAHSLKMGVLTEVSNDEERERAIALGAKVVGINNRDLRDLSIDLNRTRQLAPKLGHGVTVISESGINTYGQVRELSHFANGFLIGSALMAHDDLNAAVRRVLLGENKVCGLTRAQDAKAACDAGAIYGGLIFVPSSPRAVSVEQAREVISGAPLQYVGVFQNADIADVCQKAAVLALSAVQLHGSEDQAYVNALREALPKQVQIWKALSVSDALPARDYHHVDKYIFDNGQGGSGQRFDWSLLQGQPLDNVLLAGGLAADNCVQAAQARCAGLDFNSGVESQPGIKDARLLASVFQTLR

SEQ ID NO: 73109 - protein, 523 aa, Salmonella paratyphi A
  MISC_FEATURE (117)..(117): X=any amino acid
  MISC_FEATURE (136)..(136): X=any amino acid
  MISC_FEATURE (232)..(232): X=any amino acid
  MISC_FEATURE (234)..(234): X=any amino acid
  MISC_FEATURE (381)..(381): X=any amino acid
  MISC_FEATURE (400)..(400): X=any amino acid
  MISC_FEATURE (464)..(464): X=any amino acid
NIDSFTWNLADQLRTNGHNVVIYRNHIPAQTLIDRLATMENPVLMLSPGPGVPSEAGCMPELLTRLRAKLRIIGICLGHQAIVEAYGGYVGQAGEILHGKAHSIEHDGQAMLRDMEXPLTGARYHSLVGSNVPAGXPLNAHFNGMVMAVLMMRDRVCGFQFHPESILTTQGARLLEQTLAQARKSWEPTNTPTANSEKLYQAQTLTQQESHQLFSAVVRANLSLNSLAPRWXAXKIRGSIPMKLPRPPLVAGKCRPRSRAPEYLFADIVGTGGDGSNSINISTASAFVAAACGLKVAKHGNRSVSSKSGSSDLLAAFGINLDMNADKSRQALDELGVCFLFAPKYHTGFRHAMPVRQQLKTRTLFNVLGPLINPAHPPGRXLASIARNWVLPIAETYGYXAISARRWYHSGGMDEVSLHAPTIVAELHDGEIKSYQLTAEDFGLTPYHQDQLAGARRKKTVTFXRGYYQGKGDAAHEAAVAPNVAMLMRLHGQEDLKANAQTVLDVLRNGTAYDRVTALAARG

SEQ ID NO: 73110 - protein, 293 aa, Salmonella paratyphi A
LSDTNYAVIYDLHSHTTASDGLLTPETLVHRAVEMRVGTLAITDHDTTAAIPAAREEISRCGLALNLIPGVEISTVWENHEIHIVGLNIDIAHPAMRDFLAHQTQRRQARGRLIAERLEKAHIPGAWEGALRLANGGAVTRGHFARFLVECGKAATMADVFKKYLARGKTGYVPPQWCTIEQAIEVIHHSGGKAVLAHPGRYDLSAKWLKRLVAHFADHHGDAMEVAQCQQSPNERTQLATLAVQHHLWASLGSDFHQPCPWIELGRKLWLPAGVEGVWQTWEQPQISTVREV

SEQ ID NO: 73111 - protein, 241 aa, Salmonella paratyphi A
  MISC_FEATURE (3)..(3): X=any amino acid
MSXKLQKVLARAGHGSRRKSESIIEAGRVSVDGKIATLGDRVEVTPGLKIRIDGHLISVKESAEQICRVLAYYKPEGELCTRNDPEGRPTVFDRLPKLRGARWIAVGRLDVNTCGLLLFTTDGELANRLMHPSREVEREYAVRVFGQVDESKLRDLSRGVQLEDGPAAFKTIKFSGGEGINQWYNVTLTEGRNREVRRLWEAVGVQVSRLIRVRYGDIPLPKGPRGWTELDLAQTNYLRGL

SEQ ID NO: 73112 - protein, 172 aa, Salmonella paratyphi A
CRQVAYRIARNYPRLDGVLHNAGLLAEIAPMSEQDRQIWQHVMQVNVNATFMLTQRLLPVLLKSASRLLLFTSSRRWRPGDANWAPYATSKFATEGMMQVLADEYQNRSLRVNCINPGGSAPVCASAFPTEDPQKLKTPADIMPLYLWLMGDSRRKTGMTFDAQPGRKPGIA

SEQ ID NO: 73113 - protein, 252 aa, Salmonella paratyphi A
KHDVAQRLQQRVTAIMRYAVQNDYIDSNPASDMAGALSTTKARHYPALPSSRFPEFLARLAAYRGRVMTRIAVELSLLTFVRSSELRFARWDEFDFDKSLWRIPAKREEIKGVRYSYRGMKMKEEHIVPLSRQAMILLEQLKQISGDKELLFPGDHDATKVMSENTVNSALRAMGYDTKTEVCGHGFRTMARGALGESGLWSEDAIERQLSHSERNSVRAAYIHTSEHLDERRLMVQWWADYLDANKIKPIS

SEQ ID NO: 73114 - protein, 417 aa, Salmonella paratyphi A
  MISC_FEATURE (333)..(333): X=any amino acid
  MISC_FEATURE (396)..(396): X=any amino acid
ALSLLTILYHHVPSVTSMPVYLGQLDALLQPYVRILTQDAIDIRIKRFWRYLDRTLPDAFMHANIGPADTPVTRAILRADAELKQVAPNLTFIYDAEITPDDLLLEVAKNICECSKPHISNGPVNDKIFTKGHYGIVSCYNSLPLGAADSTLVRLNLKAVSERSTSVDDFFSRTLPHYCRQQIAIINSRCEFLYEKSHFFENSFLVQEGLIDPNVFAPMFGMYGLADVESACENAGLNRRYRKNETANELGYRISAQLADFVENTHEVWWKQRALLHAQSGISSDIGTTPGRVCRYGMNRTLSTHLQTVAPHHAFYHAGISDILTLERNHQAXSQRWSSFVLAAFKAGMREFTANVSGNDLVRVTGYMVRLSDLAKFRAERAATNTTWLGEEAATXIPASWNDATGVSHAQQMRFSQ

SEQ ID NO: 73115 - protein, 520 aa, Salmonella paratyphi A
EVAKRRTFAIISHPDAGKTTITEKVLLFGQAIQTAGTVKGRGSSQHAKSDWMEMEKQRGISITTSVMQFPYHDCLVNLLDTPGHEDFSEDTYRTLTAVDCCLMVIDAAKGVEDRTRKLMEVTRLRDTPILTFMNKLDRDIRDPMELLDEVENELKIGCAPITWPIGCRQLFKGVYHLYKDETYLYQTGKGHTIQEVRIVKGLNNPDLDAAVGEDLAHELRDELELVQGASNEFDEELFLAGEITPVFFGTALGNFGVDHMLDGLVAWAPPDPRQTDTRTVEASEEKFTGFVFKIQANMDPKHRDAWAFMRVVSGKYEKGMNYAQVVPAKDVVISDALTFMAGDRSHVEEAYPGDILGLHNHGTIQIGDTFTQGEMMKFTGIPNFAPELFRRIRLKDPLKQKQLLKGLVQLSEEGAVQVFRPISNNDLIVGAVGVLQFDVVVARLKSEYNVEAIYESVNVATARWVESADAKKFEEFKRKNETQLALDGGDNLTYIAPTMVNLNLTQERYPDVQFRKTREH

SEQ ID NO: 73116 - protein, 224 aa, Salmonella paratyphi A
MLSLHGDELAIPFDFIAPSLDVMLENLNNSLFYFINATPDSAQWTISLAIFIAKDVINIVPLLAVVLWLWGPRDRVCAQRQLIVKIGIALIISLAVSWTMGHLFPHDRPFVDHIGYNFLHHAADDSFPSDHSTVIFTFALAFLFWHRLWSGIVMMAIAMTIAWSRVYLGVHWPLDMIGALLVAMLGCLSAQLIWQWYGAPLYQALQRCYRFCFALPIRKGWVRD

SEQ ID NO: 73117 - protein, 228 aa, Salmonella paratyphi A
  MISC_FEATURE (106)..(106): X=any amino acid
  MISC_FEATURE (130)..(130): X=any amino acid
MQKLKQQVFDANMDLPRYGLVTFTWGNVSAIDRERGLVVIKPSGVAYETMKVDDMVVVDMDGKVVEGRYRPSSDNATHLALYHRYPSLAGVVHTHSTHATAWAQAXWAIPALGTTHATISLADIPCTRRXAKEEVQGEYELNTGKVIIETLGEVEPLHTPGIVVYQHGPFAWGKDAHDAVHNAVVMEEVARMAWIARGINPGLNPIDDYLMNKHFMRKHGPNAYYGQK

SEQ ID NO: 73118 - protein, 149 aa, Salmonella paratyphi A
MQVILLDKVANLGSLGDQVNVKAGYARNFLVPQGKAVPATKKNVEYFEARRAELEAKLADVLAAANARAEKINALETVTIASKAGDEGKLFGSIGTRDIADAVTAAGVDVAKSEVRLPNGVLRTTGEHEVNFQVHSEVFAKVIINVVAE

SEQ ID NO: 73119 - protein, 75 aa, Salmonella paratyphi A
MARYFRRRKFCRFTAEGVQEIDYKDIATLKNYITESGKIVPSRITGTRAKYQRQLRRAIKRARYLSLLPYTDRHQ

SEQ ID NO: 73120 - protein, 104 aa, Salmonella paratyphi A
MTNRLALSGTVCRAPLRKVSPSGIPHCQFVLEHRSVQEEAGFHRQAWCQMPVIVSGHENQAITHSITVGSRITVQGFISCHKAKNGLSKMVLHAEQIELIDSGD

SEQ ID NO: 73121 - protein, 130 aa, Salmonella paratyphi A
  MISC_FEATURE (69)..(69): X=any amino acid
MRHYEIVFMVHPDQSEQVPGMIERYSAAITGEGKIHRLEDGGRRQLAYPINKLHKAHYVLMNLKAPQKXSDELETTFRFNDAVIRSMVMRTKHAVTEASPMVKAKDERRELAVIFANETADDAEAGDSEE

SEQ ID NO: 73122 - protein, 335 aa, Salmonella paratyphi A
  MISC_FEATURE (217)..(217): X=any amino acid
NLTPQDLKAYGINDVQDIVYNPSYDTLYQEELNPGLEGYERGVLTNLGAVAVDTGIFTGRSPKDKYIVRDDTTRDTLWWSDKGKGKNDNKPLSQETWQHLKGLVTIQLSGKRLFIVDAFCAQMADTRLSVRFITEVACRTTFVKNMFIRPTDEELVGFKPDFIVMNGAKCTNPQWKEQGLNSENFVAFNLTERIQLIGGTWYGGEMKKGMFSVMNYXCRSKGIASMHCSANVGEKGDVAVFFGLFGTGKTTLSTDPKRRLIGDDEHGWDDDGVFNFEGGLTPKPIKLSKEAEPEIYHAIRRDALLENVTCAKTAPVDFDDGSKTENTRVSYPIYQ

SEQ ID NO: 73123 - protein, 564 aa, Salmonella paratyphi A
MESVALSRTTRWGMLLTGLLQGVLCYLLMAWLVPQNSDWLFYGMPATIALSSMLLLTVVSFKQRALWGWLGLTFVVVLAMSGWLKWQVEAVEKWRLAELLWLYGLRLVLMAMLVLPWMQYQLHSQTGSARYPQFYLRLWHNVLTLFIVLVANGLFWLVLLLWSALFRLVGIRFFSTLFFETEAFIYVTIGLITALAVILARTQSALVAAVQKLRTLIATGLLPVVSLLALLFIVTYPTTERFLPVSAARLLYHATLIAALLVAIVNGPRKAYCPIRAYYAIGLSASLWLDPGYIWLLARLGVNGVRIQQYGWTPDRLYGALTASVLLVWSFGYLIGLLRRGRDPGEWQGKVILSVSLLTLVILLLLASPVLDVWRISVNSHMARYHSGKITADQISLYMLDHSGKPGQEALKSLRDDEAFTQNRKRNRELMTFLQRNKVSPTADDLARVVMIAPGSQKPDAAFWAFVKEQSYSDDSCLEPDACVLVSQDLNGDGQPEQVLYNFIVAESQVYGLKEGKWTQKAFARLPDGFSKTQLLHAIAGHQLDSAPKAWRDIIVDGQRLDVD

SEQ ID NO: 73124 - protein, 293 aa, Salmonella paratyphi A
MIMPQHDQLHRYLFENFAVRGELVTVSETLQQILDNHTYPQPVKTVLAELLVATSLLTATLKFAGDITVQLQGDGPLSLAVINGNNQQQMRGVARVQGDIPDNADLKTLVGNGYLVITITPEEGERYQGVVGLEGDTLAACLEDYFLRSEQLPTRLFIRTGDVDGKPAAGGMLLQVMPAQNAQAEDFDHLAMLTETIKSEELLTLPANDVLWRLYHEEEVTLYDPQDVEFKCTCSRERCAALKTLPDEEVDSILAEEGEIDMHCDYCGNHYLFNAMDIAEIRNNASPADPQVH

SEQ ID NO: 73125 - protein, 131 aa, Salmonella paratyphi A
KEKSSVEVRLDKWLWAARFYKTRALAREMIEGGKVHYNGQRSKPSKIVELNATLTLRQGNDERTVIVKAITEQRRPASEAAALYEETAESVEKREKMAARKLNALTMPHPDRRPDKKERRDLLRFKHGDSE

SEQ ID NO: 73126 - protein, 238 aa, Salmonella paratyphi A
  MISC_FEATURE (12)..(12): X=any amino acid
  MISC_FEATURE (42)..(42): X=any amino acid
  MISC_FEATURE (164)..(164): X=any amino acid
  MISC_FEATURE (168)..(168): X=any amino acid
ADLGEGCATTAXVLTLVSSANIASGFHAGDAQTMLTCVREAXKNGVAIGAHPSFPDRDNFGRTAMVLPPETYYAQTLYQIGALGAIVQAQGGVMRHVKPHGMLYNQAAKDPRLAQAIAKAVHDYDPSLILVGLAGSELIRAGERCRLVTRQEVFADRGYQADGXSGPXHATWALIHDEEQALAKRWTMVQAGRVKSVTGVWTTVTAQTVCIHGDGEYALAFARRLRAAFNARNIHVIA

SEQ ID NO: 73127 - protein, 207 aa, Salmonella paratyphi A
MSTIIMDLCSYTRLGLSGYLVSRGVKKREINDIETVDELAIACGAHQPSVVFINEDCFIHTPSDSQQIKQIINQHPDTLFIVFMAIANVHFDEYLLVRKNLLISSKSIKPDSLDTILGDILKKESGISGTINLPTLSLSRTESSMLRMWMEGQGTIQISDRMNIKAKTVSSHKGNIKRKIKTHNKQVIYHVVRLTDNVTNGIFVNMR

SEQ ID NO: 73128 - protein, 261 aa, Salmonella paratyphi A
VIPMSETKNELEILLEKAATEPAHRPAFFRTLLESTVWVPGSASEGEAIVEDSALDLQHWEKEDGTTVIPFFTSLEALQQAVEDEQAFVVMPARTLFEMTLGETLFLNAKLPTGKEFMPREISLLLAEEGSPLSTQEVLEGGESLILSEVAEPPSQMIDSLTTLFKTIKPVKRAFLCAIKEHADAQPNLLIGIEADGEIEEIIHAAGNVATDTLPGDEPIDICQVRKGAQGISHFITEHIAPFYERRWGGFLRDFKQNRII

SEQ ID NO: 73129 - protein, 485 aa, Salmonella paratyphi A
MQNRLLSAKATLPDYDRAGWRARMVHLGFGAFHRAHQGVYTDILAAEQHSDWGYYEVNLIGGEQQIADLKQQDNLYTVAEMSAEAWTARVVGVVKAALHVQVDGLERVLAAMCEPQIAIVSLTITEKGYCHSPATGQLLLEHPMIAADLQNPHQPLTAPGIIVEALARRKAAGLPAFYVMSCDNMPENGHVTRQVVNDLRPEVDAELAIWIEQNVTFPSTMVDRIVPAVTPETLDKIEQLTGVRDPAGVACEPFRQWVIEDTFVAGRPLWENAGATLVADVVPFEEMKLRMLNGSHSFLAYLGYLAGYQHINDCMADDNYRLTAQALMLREQAPTLKVQGVDLQRYADQLIARYRNPALRHRTWQIAMDGSQKLPQRMLDSVRWHLANHSDFDLLALGVAGWMRYVGGVDEQGKAIDVSDPLLPVIQRAVANSEEGASRVKALLGLADIFGNDFQAARFTQKVQEAYDSLLTYGAKASVAKYAER

SEQ ID NO: 73130 - protein, 167 aa, Salmonella paratyphi A
MTGMSNVSKLAGEPSGQEFLVFTLGNEEYGIDILKVQEIRGYDQVTRIANTPAFIKGVTNLRGVIVPIVDLRVKFCEGDVEYDDNTVVIVLNLGQRVVGIVVDGVSDVLSLTAEQIRPAPEFAVTLSTEYLTGLGALGERMLILVNIEKLLNSEEMALLDIAASHVA

SEQ ID NO: 73131 - protein, 368 aa, Salmonella paratyphi A
LNDFHVSEPYTLGIELEMQVINPPGYDLSQDSSTLIDAVKPQLTAGEIKHDITESMLEMATGVCRDIDQAAGQLSAMQHVILQAASEHHLGICGGGTTPFQKWQRQEVCDNERYQRTLENFGYLIQQATVFGQHVHVGCANGDDAIYLLHGLSHFVPHFIALSAASPYMQGADTRFACARLNIFSAFPDNGPMPWVSNWQEFTGLFRRLSYTTMIDSIKDLHWDIRPSPAFGTVEVRVMDTPLTLDHAINMAGLIQATAHWLLTERPFKPQEQDYLLYKFNRFQACRYGLESVLIDVYTGDRRRLADDTLRLLDNVTLSARKLRRSAIDALRLQVKKGGNEAQYMREFIADGGSLIGLVQKHCEIWAG

SEQ ID NO: 73132 - protein, 652 aa, Salmonella paratyphi A
MFGKLSLDAVPFHEPIVMVTIAAIIVGGLAILAAITYFGKWTYLWKEWLTSVDHKRLGIMYIIVAIVMLLRGFADAIMMRSQQALASQAEAGFLPPHHYDQIFTLHGVIMIFFVRCPFVIGLMNLVVPLQIGARDVAFPFLNNLSFWFTVVGVILVNLSLGVGEFAQHRAAAYPPLSGIEYSPSVGVDYWIWALQLSGIGTTLTGINFFVTILKMRAPGMTMFKMPVFTWASLCANVLIIASFPILTVTVALLTLDRYLGTHFFTNDMGGNMMMYINLIWAWGHPEVYILILPVFGVFSEIAATFSRKRLFGYTSLVWATVCITVLSFIVWLHHFFTMGAGANVNAFFGITTMIIAIPTGVKIFNWLFTMYQGRIVFHSAMMWTIGFIVTFSVGGMTGVLLAVPGADFVLHNSLFLIAHFHNVIIGGVVFGCFAGMTYWWPNAWLQANETWGKRAFWFWIIGFFVAFMPLYVLGFMGMTRRLSQQIDPQFHTMLMVAAAGPALIALGILCQLIQIFVSIRDRDQNRDLTGDPWGGRTLEWSTSSPPPFYNFAVVPHVHERDAFWEMKEKGEAYQQPGQYGEIHMPKNSGAGIVIAAFATVFGFAMIWHIWWLAIVGFAGMIISWIVKSFDEDVDYYVPVPEVEKLESQHFDE

SEQ ID NO: 73133 - protein, 317 aa, Salmonella paratyphi A
  MISC_FEATURE (248)..(248): X=any amino acid
  MISC_FEATURE (292)..(292): X=any amino acid
MRLRKYNKSLGWLSLIAGTALLSGCNSALLDPKGQIGLEQRSLILTAFGLMLIVVIPAILMAVGFAWKYRASNKDAKYSPNWSHSNKVEAVVWTVPILIIIFLAVLTWKTTHALEPSKPLAHDEKPITIEVVSMDWKWFFIYPEQGIATVNEIAFPADTRFYSQVTTKIVCKSFLNLRLGSQNYYMAGILTRLHLIVKVPGIQVGISPAYSARVSSGMMFISYFYPQTAQHSDQWSFKVYIISTHHEXYARRVDKVAMPSEYNKVEYVSSVKPDLFKDVINKFMDHGKSMTXPNLEGEHSSHEGMEGMDMSHAESAN

SEQ ID NO: 73134 - protein, 56 aa, Salmonella paratyphi A
  MISC_FEATURE (14)..(14): X=any amino acid
MNKQTEHDTREHLXATGEQLCMQRGFTGMGLSELLKTAQVTKGSFYHYFRGSSRVE

SEQ ID NO: 73135 - protein, 330 aa, Salmonella paratyphi A
  MISC_FEATURE (301)..(301): X=any amino acid
MSLKTIKYFSTLIVAVVAVLAAWWLWNYYMQSPWTRDGKIRAEQVSVTPQVSGSITQLNIKDNQFVNAGDVLFVIDKTPFHIAELNAQAQLAKAQSDLAKANNEADRRRHLSRNYISAEDLDSANLNVKAMQASVDVALATLKQAQWQLSQTEVKAPVSGWVTNLSTRTGDYASTGKPLFALVDSHSFYVMGYFEETKLRHIREGEPALITLYSGNVKLQGHVGSIGRAIYDQSVESDSGLVPDIKPNVPWVRLGQRVPVRIEFDALPQDITLVSGTTCSVAIGQGNETLPAGPAKYALVXSDSGQWALRVAQYHCHVSRADIRLLSQSG

SEQ ID NO: 73136 - protein, 80 aa, Salmonella paratyphi A
MLVKCILNATGLPLQDLMLGASVYFPPFFKAFALGFVIWLFIHRLLRDRIYSDEIWHPLLMDLSLFTLCVCLGLVLLIAW

SEQ ID NO: 73137 - protein, 146 aa, Salmonella paratyphi A
VKLESPLGSDLARLVRIWRALIDHRLKPLELTQTHWVTLHNIHQLPPDQSQIQLAKAIGIEQPSLVRTLDQLEDKGLISRQTCASDRRAKRIKLTEKAAALIAEMEEVIHKTRGEILAGISSEEIELLIKLVAKLEHNIMELHSHD

SEQ ID NO: 73138 - protein, 244 aa, Salmonella paratyphi A
MVKCRRYIYTNMTLNNQPFAYKATGGALFISVLLVFIIYIVSLSLIEHGHPGLGFTLFGLLIAIIPFMAVKGLQYQAMMTSLNGVHFGFQCSMRRAWWYMFALPVLLMVALYIVLYIISLVTIAVGGLVFNIVFLGLLAIIGIGVINGITYSKWMTLFGNGANFGIHRFSIQVNVKTCIRGCVLAMLTLFPFAVVIGYLIAPVFTDMILLSMMGNAQAGGALISAYYGQIMACYFFSAGFNLVG

SEQ ID NO: 73139 - protein, 166 aa, Salmonella paratyphi A
MNNVASPTLTVRRITTADNAAIARVIRQVSAEYGLTADKGYTVADPNLDELYQVYSQSGAAYWVVEQNGCVVGGGRAPLSCSEPDICELQKMYFLPVIRGQGLAKKLALMALDHAREQGFKRCYLETTAFLREAIALYERLGFEHISEPLGCTGHVDCEVRMLKDL

SEQ ID NO: 73140 - protein, 269 aa, Salmonella paratyphi A
MTVRQRLLSYFFNRLRMNYPQILSPVLNFLHCPTPQAWIVQARDPQNLPLLLTDHLICELKAAQTALLLVRKYVADKSGADALLAWLQPYEAFAFRQGPEPDFVALHRQISKSAMPQTDDPWGRQLIDRMVLLIKEELHHFWQVREVMQARNIPYVKITASRYAKGMLKAVRTHEPLTLIDKLICGAYIEARSCERFAALAPRLDEDLQTFYLSLLRSEARHYQDYLALAQQISAEDISARRYFGEVEADLILSPDREFRFHSGVPAAG

SEQ ID NO: 73141 - protein, 334 aa, Salmonella paratyphi A
MSTFYQKPFLKLLDFTASELTALLQLAAKLKADKKNGKEEQKLVGKNIALIFEKDSTRTRCSFEVAAYDQGARVTYLGSSGSQIGHKESIKDTARVLGRMFDGIQYRGYGQEIVETLAEYSGVPVWNGLTDEYHPTQLLADLLTMQEHLPGKAFNEMTLVYAGDARNNMGNSMLEAAALTGLDLRLVAPKACWPQAALVAECSAMAKKNGGAITLTEDIASGVKGADFIYTDVWVSMGEPKEKWAERIALLRDYQVNSQMMALTGNPQVKFLHCLPAFHDDETTLGKKMAEEYGLHGGMEVTDEVFESAASIVFDEAENRMHTIKAVMVATLSK

SEQ ID NO: 73142 - protein, 348 aa, Salmonella paratyphi A
  MISC_FEATURE (308)..(308): X=any amino acid
GSEMNDKIRVGLIGYGYASKTFHAPLIMGTPGLELAAVSSSDETKVKADWPAVSVVSEPRHLFNDPHIDLIVIPTPNDTHFPLAKRALEAGKHVVVDKPFTVTLSQARELDAARSTGRVLSVFHNRRWDSDFLTLKALLADGVLGEVSLFESHFDRFRPQVRDVGAEQGGPGSGIWYDLAPHLLDQAIQLFGCRSSMTVDLAQLRPGAQSTDYFHAILSYPQRRVILHGTMLAAAESARYIVHGSRGSYVKYGLDPQEERLKNGERLPQEDWGYDMRDGVLTLVEGETRKEENWLTLPGNYPAYYAAXRDALNGNGENPVPQARRIQIMELIELGMESAKHRATLCLA

SEQ ID NO: 73143 - protein, 734 aa, Salmonella paratyphi A
  MISC_FEATURE (373)..(373): X=any amino acid
MLNQELELSLNMAFARAREHRHEFMTVEHLLLALLSNPSAREALEACSVDLVALRQELEAFIEQTTPVLPASEEERDTQPTLSFQRVLQRAVFHVQSSGRSEVTGANVLVAIFSEQESQAAYLLRKHEVSRLDIVNFISHGTRKDEPSQSSDLGNQPTGDEQAGGEERMENFTTNLNQLARVGGIDPLIGREKELERAIQVLCRRRKNNPLLVGESGVGKTAIAEGLAWRIAAGRVPEVMADCTIYSLDIGSLLGGTKYRGDFEKRFKALLKQLEQDTNSILFIDEIIPIIGAGAASGGQVDAANLIKPLLSSGKIRVIGSTTYQEFSNIFEKDRALARRFQKIDITEPSVEETVQIINGLKPKYEAHHDVRXYREAVRAAVELAVKYINDRHLPDKAIDVIDEAGARARLMPVSKRKKTVNVADIESVVARIARIPEKSVSQSDRDTLKNLGDRLKMLVFGQDNAIEALTEAIKMSRAGLGHEHKPVGSFLFAGPTGVGKTEVTVQLSKALGIELLRFDMSEYMERHTVSRLIGAPPGYVGFDQGGLLTDAVIKHPHAVLLLDEIEKAHPDVFNLLLQVMDNGTLTDNNGQADFRNVVLVMTTNAGVRETERKSIGLIHQDNSTDAMGEIKKVFTPEFRNRLDNIIWFDHLSGEVIHQVVDKFIVELQAQLDQKGVSLEVSQEARDWLAEKGYDRAMGARPMARVIQDNLKKPLANELLFGSLVDGGQVTVAL

SEQ ID NO: 73144 - protein, 344 aa, Salmonella paratyphi A
  MISC_FEATURE (342)..(342): X=any amino acid
MTLNGKSPVKFVKYLLILAVCCILLGAGSIYGLYRYIEPQLPDVATLKDVRLQIPMQVYSADGELIAQYGEKRRIPVTLDQIPPEMINAFIATEDSRFYEHHGIDPVSIFRAATSALFSGHASQGASTITQQLARNFFLSPERTLMPRIKEAFLAIRIEQLLNKNEILELYLNKIYLGYRAYGLARAAQVYFGKTVDQLSLSEMAVIAGLPKAPSTFNPLYSMDRAIRAVTVVLSRMLSEGYITQAQYDQARSEPIDANYHAPEIAFSAPYLSEMVRQEMYNRYGETPMKMVYRIYTTITRKVQQAAQQAVRNNVLDYDMRHGYRGPANVLWKVVHTAWERXKI

SEQ ID NO: 73145 - protein, 264 aa, Salmonella paratyphi A
TGDKEITVMAFKTWQIGLHIQQHEALAIAVIRGASGWSLQRWWRLPLMNASTAEGTIPDPQSLAHVLRPWSRELPLRHRIYLSFPANRTLQRAFPHPPMRLREREQVAWLSQTMARDVDMDPDLLVFDFQDDALSPAFNVTAVQSKEISELLTLAQTLNVRIAAVTPDACALQRCCPFIPSGRQCLVWRDESQWLWATRYAWGRKSAREATTLHDLAATLSVVPEHISLCAEVCRPWRAVTVRQPPVPPDGYRFAIALGLAMGE

SEQ ID NO: 73146 - protein, 278 aa, Salmonella paratyphi A
MNNLPVVRSPWRILILVLGFTFLYAPMLMLVIYSFNSSKLVTVWAGWSTRWYGELFRDTAMMSAVGLSLTIAACAATMAVVLGTIAAVVMVRFGRFRGANGFAFMITAPLVMPDVITGLSLLLLFVALGHAIGWPSDRGMLTIWLAHVTFCTAYVAVVIARLRELDRSIEEAAMDLGAAPLKVFFVITLPMIMPAVISGWLLAFTLSLDDLVIASFVSGPGATTLPMLVFSSVRMGVNPEINALATLILGVVGIVGFIAWYLMARAEKQRIRDIQRAR

SEQ ID NO: 73147 - protein, 133 aa, Salmonella paratyphi A
MAIILIRGLDVLMIMNTLGIRGMGEFIHRSVQTWSLTLVFLASLVLVFVEIYCAFSLVKGRSWARWVYLATQIIVSGYLWAASLGYGYPELFSIAGESKRDILHSLVMQKLPDLLILFLLFIPAPSRRFFRLQ

SEQ ID NO: 73148 - protein, 237 aa, Salmonella paratyphi A
  MISC_FEATURE (7)..(7): X=any amino acid
AALLASXPLAASAAEKINFGVSATYPPFESLDASNKIVGFDIDLATALCKQMQAECTFTNHAFDSLIPALKFRKYDAVISGMDITPERSKQVAFSNPYYANSALVIAKKDTYKTFTDLKGKRIGMENGTTHQKYLQDKHPEVKTVAYDSYQNAIIDLKNGRIDGVFGDTAVVNEWLKTNPQLGPATEKVTDPQYFGTGLGIAVRPDNKALLEKLNNALAAIKADGTYQKISDQWFPQ

SEQ ID NO: 73149 - protein, 419 aa, Salmonella paratyphi A
NLIKQLQERGLVAQVTDEDALAERLAQGPIALYCGFDPTADSLHLGHLVPLLCLKRFQQAGHKPVALVGGATGLIGDPSFKAAERKLNTEETVQEWVAKIRKQVAPFLDFDCGENSAIAANNYDWFGSMNVLTFLRDIGKHFSVNQMINKEAVKQRLNRDDQGISFTEFSYNLLQGYDFACLNKLHGVALQIGGSDQWGNITSGIDLTRRLHQNQVFGLTVPLITKADGTKFGKTEGGAVWLDPKKTSPYKFYQFWINTADADVYRFLKFFTFMDIEEINALEEEDKNSGKAPAQYVLAEQVTRLVHGEEGLVAAKRITECLFSGSLSALSEADFEQLAQDGVPMVEMEKGADLMQALVDAELQPSRGQARKTIASNAVTINGEKQSDPEYIFNDEDRLFGRYTLLRRGKKNYCLICWK

SEQ ID NO: 73150 - protein, 113 aa, Salmonella paratyphi A
MPRRRVIGQRKILPDPKFGSELLAKFVNILMVDGKKSTAESIVYSALETLAQRSGKSELEAFEVALENVRPTVEVKSRRVGGSTYQVPVEVRPVRRNALAMRWGDPLESTSVI

SEQ ID NO: 73151 - protein, 124 aa, Salmonella paratyphi A; identical to SEQ ID NO: 42609

SEQ ID NO: 73152 - protein, 95 aa, Salmonella paratyphi A
MLHTLPHCASGVDFPALLRLLKEGDALLLLQDGVTVAIEGNRFLESLRDAPITVYALKEDIDARGLGGQISDSVVRVDYTEFVRLTVKYANQMAW

SEQ ID NO: 73153 - protein, 333 aa, Salmonella paratyphi A
ALALGMSAAHASDNDTLYFYNWTEYVPPGLLEQFTKETGIKVIYSTYESNETMYAKLKTYKDGAYDLVVPSTYYVDKMRKEGMIQKIDKSKLTNFHNLDPEMLNKPFDPNNDYSVPYIWGATAIGVNSDAIDPKTITSWADLWKPEYKNSLLLTDDAREVFQMAVRKLGYSGNTTDPKEIEAAYEELKKLMPNVAAFNSDNPANPYMEGEVNLGMVWNGSAFVARQAGTPLEVVWPKEGGIFWMDSLAIPANAKNKEGALKLINFLLRPDVAKEVAETIGYPTPNLAARKCLSPEVANDKSLYPDAQTISKGEWQNDVGDAAAIYEEYYQKLK

SEQ ID NO: 73154 - protein, 385 aa, Salmonella paratyphi A
QFYHSGGLMSHVDDGFRSLTLKRFPQTDDVNPLLAWEAADEYLLQQLDETEIRGPVLILNDTFGALSCALADHSPYSIGDSYLSELGTRENLRHNGIAESSVTFLDSTADYPQAPGVVLIKVPKTLALLEQQLRALRKVVTAQTRIIAGEARDIHTSTLELFEKVLGPTTTTLAWKKARLINCTFSHPQLADAPQTLSWKLEDTGWTIHNHANVFSRTGLDIGARFFMQHLPENLDGEIVDLGCGNGVIGLSLLAKNPQANVVFVDESADAVDFQRLNVETKLPEAFERCEFMINNALSGVEPFRFNAVFCNPPFHQKHALTDNIAWEMFHHARRCLKINGELYIVANRHLDYFHKLKKIFGNCATIATNNKFVILKAVKQGRRR

SEQ ID NO: 73155 - protein, 915 aa, Salmonella paratyphi A
LYDKSLEKDNCGFGLIAHIEGEPSHKVVRTAIHALARMQHRGAILADGKTGDGCGLLLQKPDRFFRIVAEERGWRLAKNYAVGMIFLNKDPELAAASRHIVEEELQQETLSIVGWRDVPTNEGVLGEIALSSLPRIEQIFVNAPAGWRPRDMERRLFIARRRIEKRLQDDKDFYICSLSNLVNIYKGLCMPADLPRFYLDLADLRLESAICLFHQRFSTNTVPRWPLAQPFRYLAHNGEINTITGNRQWARARTYKFQTPLIPDLQSAAPFVNETGSDSSSLDNMLELLLAGGMDIIRAMRLLVPPAWQNNPDMDQDLRAFFDFNSMHMEPWDGPAGIVMSDGRFAPVTLDRNGLRPARYVITKDKLITCASEVGIWDYQPDEVVEKGRVGPGELMVIDTRGGRILHSAETDDDLKSRHPYKAWMEKNVRRLVPFEELPDEEVGSRELDDDLLASYQKQFNYSAEELDSVIRVLGENGQEAVGSMGDDTPFAVLSSQPRIIYDYFRQQFAQVTNPPIDPLREAHVMSLATSIGREMNVFCEAEGQAHRLSFKSPILLYSDFKQLTTMSEHHYRADWLDITFDVTETTLDATVKALCDKAEQMVRNGTVLLVLSDRNIDKNRLPVPAPMAVGAVQTRLVDQSLRCDANIIVETGSARDPHHFAVLLGFGATAIYPYLAYETLGRLIDTQAIAKNYRTVMQNYRNGINKGLYKIMSKMGISTIASYRCSKLFEAVGLHDDVINLCFQGVVSRIRTRAFDDFQQDLLNLSKRAWLAKPISPGGLLKYVHGGEYHAYNPDVVRTLQQAVQSGEYSDYQEYAKLFNERPASTARFLLAIHPDGEAVTIDEVETASELFKRFDTAPCLSGALSPEAHEAGRNGMNSLASTPTPAKREDPARYGTNKVSRIRQVASAVLRVT

SEQ ID NO: 73156 - protein, 443 aa, Salmonella paratyphi A
MSTTDSIVSSQAKQSSWRKSDTTWTLGLFGTAIGAGVLFFPIRAGFGGLIPILLMLVLAYPIAFYCHRALARLCLSGSNPSGNITETVEEHFGKTGGVVITFLYFFAICPLLWIYGVTITNTFMTFWENQLQMPALNRGFVALFLLLLMAFVIWFGKDLMVKVMSYLVWPFIASLVLISLSLIPYWNSAVIDQVDLSNIALTGHDGILVTVWLGISIMVFSFNFSPIVSSFVVSKREEYEKEFGREFTERKCSQIISRASMLMVAVVMFFAFSCLFTLSPQNMADAKAQNIPVLSYLANHFASLSGTKSTFATVLEYGASIIALVAIFKSFFGHYLGTLEGLNGLVLKFGYKGDKTKVSMGKLNTISMIFIMGSTWVVAYANPNILDLIEAMGAPIIASLLCLLPMYAIRKAPSLAKYRGRLDNVFVTLIGLLTILNIVYKLF

SEQ ID NO: 73157 - protein, 264 aa, Salmonella paratyphi A
MKQYLELMQKVLDEGTQKNDRTGTGTLSIFGHQMRFNLQEGFPLVTTKRCHLRSIIHELLWFLQGDTNIAYLHENNVTIWDEWADENGDLGPVYGKQWRAWPTPDGRHIDQIATVLSQLKNDPDSRRIIVSAWNVGELDKMALAPCHAFFQFYVADGKLSCQLYQRSCDVFLGLPFNIASYALLVHMMAQQCDLDVGDFVWTGGDTHLYSNHMEQTHLQLSREPRALPKLVIKRKPDSLFDYRFDDFEIEGYDPHPGIKAPVAI

SEQ ID NO: 73158 - protein, 944 aa, Salmonella paratyphi A
LLLLVALWGPAVQADIGWQPLQETIRKSDKDTRQYQAIRLDNDMVVLLVSDPQAVKSLSALVVPVGSLEDPEAHQGLAHYLEHMCLMGSKKYPQADSLAEYLKRHGGSHNASTAPYRTAFYLEVENDALPGAVDRLADAIAAPLLNKKYAERERNAVNAELTMARTDGMRMAQVSAETINPAHLGSHFSGGNLETLSDKPGNPVQQALIAFHEKYYSANLMKAVIYSNKPLPELARIAADTYGRVPNKQIKKPEINVPVITEAQKGIIIHYVPALPRKVLRVEFRIDNNSAQFRSKTDELVSYLIGNRSPGTLSDWLQKQGLVEGISADSDPIVNGNSGVFAISATLTDKGLANRDEVVAAIFSYLNMLREKGIDKRYFDELAHVLDLDFRYPSITRDMDYVEWLADTMIRVPVAHTLDAANIADRYDPAAIKNRLAMMTPQNARIWYISPQEPHNKTAYFVDAPYQVDKISEQTFKNWQQKAQGIALSLPELNPYIPDDFTLVKNDKNYVRPELIVDKADLRVVYAPSRYFASEPKADVSVVLRNPQAMDSARNQVLFALNDYLAGMALDQLSNQAAVGGISFSTNANNGLMVNANGYTQRLPQLLLALLEGYFSYDATEEQLAQAKSWYTQMMDSAEKGKAYEQAIMPVQMILQVPYFSRDERRALLPSITLKEVMAYRNALKTGARPEFLVIGNMSEAQATSLAQDVQKQLAANGSAWCANKDVVVEKKQSVIFEKAGSSTDSALRASLVPVGYDEYVSAAYSAMLGQIVQPWFYNQLRTEEQLGYAVFAFPMSVGRQWGMGFLLQSNDKQPSYLWQRYQAFFPDAEGTEAMKPEEFAQIQQAIITQMRQAPQTLGEEASRLSKDFDRGNMRFDSRDKIIAQIKLLTPQKLADFFHLAVVEPQGMAILSQIAGSQNGKAEYVHPTGWKVWDNVSALQQTLP

SEQ ID NO: 73159 - protein, 393 aa, Salmonella paratyphi A
LKQLLMMSGFDRYYQIVKCFRDEDLRADRQPEFTQIDVETSFMTAPQVREVMEALVRHLWLEVKGVDLGDFPVMTFAEAERRYGSDKPDLRNPMELVDVADLLKSVEFAVFAGPANDPKGRVAALVVPGGAQLSRKQIDDYGNFVKIYGAKGLAYIKVNERAKGLDGINSPVAKFLTADIVEAILERTGAQDGDMIFFGADNKKVVADALAARLKLGKDLSLTDEDKWAPLWVIDFPMFEDDGEGGLTAMHHPFTAPVDMTASELKTAPEEAVANAYDMVINGYEVGGGSVRIHNGEMQQTVFGILGINEQEQRIEVGFLLDALKYGTPPHAGLAFGLDRLTMLLTGTDNIRDVIAFPKTTAAACLMTEAPSFANQAALTELGIPVVKKAENN

SEQ ID NO: 73160 - protein, 199 aa, Salmonella paratyphi A
MKKHYPVQYETGDIVFTCIGAALFGQISTASQCWSNHVGIIIGHNGDDYLVAESRVPLSTVTTLSLFIQRSAGQRYAVRRLCGGLTVEQKLAIMEQVPARLNKFYHTGFKYESSRQFCSKFVFDIYKEALCIPVGDIETFEELLHSNPDAKLTFWKFWFLGSIPWDRKTVTPASLWQHPNLELISACGIENPQREAEGE

SEQ ID NO: 73161 - protein, 390 aa, Salmonella paratyphi A
  MISC_FEATURE (352)..(352): X=any amino acid
MAFASLIERQRIRLLLALLFGACGTLAFSPYDVWPAAIVSLIGLQALTFNRRPLQSAAIAYCWGLGLFGSGINWVYVSIAQFGGMAGPVNVFLVVLLAAYLSLYTGLFAGILSRLWPKTNWLRVAIAAPAVWQITEFLRGWVLTGFPWLQFGYSQVDGPLKGLAPVMGVEAINFLLMMVSGLLALALATRNWRPTVSAVILFALPFPLRYIQWFTLEPAKADSVSLVQGDIPQSLKWDENQLLNTLKIYLNETRPELGKSQIIIWPESAIPDLEINQQPFLRSLDEMLREKNSTLITGIVDARLNKQNRYDTYNTIITLGKDNPYSYDSPNRYNKNHLVPFGEFVPLESILXPWRRFFDLPMSSFSRGPYIQPQLHAHDYKLTAAICYEI

SEQ ID NO: 73162 - protein, 292 aa, Salmonella paratyphi A
MSDDNSHSSDTVNSKKGFFSLLLSQLFHGEPKNRDELLALIRDSGQNELIDEDTRDMLEGVMDIADQRVRDIMIPRSQMITLKRNQTLDECLDVIIESAHSRFPVISEDKDHIEGILMAKDLLPFMRSDAEAFSMDKVLRTAVVVPESKRVDRMLKEFRSQRYHMAIVIDEFGGVSGLVTIEDILELIVGEIEDEYDEEDDIDFRQLSRHTWTIRALGSIEDFNDAFGTHFSDEEVDTIGGLVMQAFGHLPARGETIDIDGYQFKVAMADSRRIIQVHVRIPDDSPQPKLDE

SEQ ID NO: 73163 - protein, 390 aa, Salmonella paratyphi A
MTNQPTEIAIIGGGMVGGALAWCLAHQGFTVMVIEHAAPARFAADSQPDVRISAISAASVALLKGLGVWEAVQGMRSHPYRRLETWEWENAHVVFDAAELKLPLLGYMVENNVLQQALWQALEAHPGVTLRVPASLAALHRRHDGYALELADGEWVTPKLVIGADGANSQVRQMAGIGIHAWQYAQSCMLITVKCENAPGDSTWQQFTPTGPRAFLPLFDDWASLVWYDAPARIRQLQGLSMTQLQVEINQHFPARLGAVMPVAAGAFPLTRRHALQYAQQGLALVGDAAHTIHPLAGQGVNLGYRDVDALIDVLASARSYGESWASHSVLKRYQTRRMADNFMMQSGMDLFYAGFSNELPPLRILRNMGLMAAHAGRAKRQALKYALGL

SEQ ID NO: 73164 - protein, 580 aa, Salmonella paratyphi A
IKESYAFAVLGEPKYAFNFDHFDYVNPAAPKGGQMTLSAIGTFDNFNRYSLRGNPGVRTEALYDTLFTTSDDEPGSYYPLIADHARYAADYSWVEISINPRARFHDGTPITARDVAFTFHKFMTESVPQFRLVYKGTTVKAIAPLTVRIELAKPGKEDMLSLFSLPIMPEKFWKNHKLSDPLSTPPLASGPYRITQWKMGQYIVYSRVKNYWAANLPVNRGRFNLDTIRYDYYLDDNVAFEAFKAGAFDLRLENDAKNWATRYIGKNFDNHYIIKEEQKNESAQDTRWLAFNIQRPVFKDRRVREAVTLAFDFEWMNKALFYNAWSRTNSYFQNTEYAARNYPDADELVLLAPMKKDLPPEVFTQIYQPPVSNGDGYDRENLLKADALLTQAGWVINGQQRVNSVTGKPLTFELLLPASSNSQWVLPFQHNLQRLGITMTIRQVDNSQLTNRMRSRDYDMMPRLWRAMPWPSSDLQISWASEYIDSSYNAPGVQSPVVDKLIAQIIAAQGDKAKLVPLGRALDRVLTWNYYMLPMWYMAQDRLAWWDKFSHPAIRPVYTIGLDTWWYDVNKAAKLPAARR

SEQ ID NO: 73165 - protein, 453 aa, Salmonella paratyphi A
RSNKAMTFFVCFLAALAGLLFGLDIGVIAGALPFITDEFQITAHTQEWVVSSMMFGAAVGPVGSGWLSFKLGRKKSLMIGAILFVAGSLFSAAAPNVEVLIISRVLLGLAVGVASYTAPLYLSEIAPEKIRGSMISMYQLMITIGILGAYLSDTAFSYSGAWRWMLGVIIIPAILLLIGVFFLPDSPRWFAAKRRFHDAERVLLRLRDTSAEAKRELDEIRESLQVKQSGWALFKENSNFRRAVFLGILLQVMQQFTGMNVIMYYAPKIFELAGYTNTTEQMWGTVIVGLTNVLATFIAIGLVDRWGRKPTLTLGFLVMAIGMGILGTMMHIGIHSPSAQYFAIAMLLMFIIGFAMSAGPLIWVLCSEIQPLKGRDFGITCSTATNWIANMIVGATFLTMLNNLGNANTFWVYAGLNVLFILLTLWLVPETKHVSLEHIERNLMKGRKLREIG

SEQ ID NO: 73166 - protein, 382 aa, Salmonella paratyphi A
MAKHLFTSESVSEGHPDKIADQISDAVLDAILQQDPKARVACETYVKTGMVLVGGEITTSAWVDIEEITRNTVREIGYVHSDMGFDANSCAVLSAIGKQSPDINQGVDRADPLEQGAGDQGLMFGYATNETDVLMPAPITYAHRLVQRQAEVRKNGTLPWLRPDAKSQVTFQYDDGKIVGIDAVVLSTQHAEDIDQKSLQEAVMEEIIKPILPSEWLNTSTKFFINPTGRFVIGGPMGDCGLTGRKIIVDTYGGMARHGGGAFSGKDPSKVDRSAAYAARYVAKNIVAAGLADRCEIQVSYAIGVAEPTSIMVETFGTEKVPAEQLILLVREFFDLRPYGLIQMLDLLHPIYKETAAYGHFGRENFPWEKTDKAQLLPMLPV

SEQ ID NO: 73167 - protein, 222 aa, Salmonella paratyphi A
MSTLGHQYDNSLVSNAFGFLRLPMNFQPYDSDADWVITGVPFDMATSGRAGGRHGPAAIRQVSTNLAWEHHRFPWNFDMRERLNVVDCGDLVYAFGDAREMSEKLQAHAEKLLSAGKRMLSFGGDHFVTLPLLAAHAKHFGKMALVHFDAHTDTYANGCEFDHGTMFYTAPKEGLIDPHHSVQIGIRTESDKDNSFTVLDAAQVNDRSSDDILAQVNRIVGD

SEQ ID NO: 73168 - protein, 463 aa, Salmonella paratyphi A
FERAGVMVVGDVMLDRYWYGPTCRISPEAPVPVVKVNTVEERPGGAANVAMNIASLGANARLVGLTGIDDAAALSKTLAEVNVKCDFVSVPTHPTITKLRVLSRNQQLIRLDFEEGFEGVDPQPLHERINQALGSIGALVLSDYAKGALTSVQTMISLARQAGVPVLIDPKGTDFERYRGATLLTPNLSEFEAVAGKCKSEDELVERGMKLIADYDLSALLVTRSEQGMTLLQPNKAPLHMPTQAQEVYDVTGAGDTVIGVLAATLAAGNTLEEACYFANAAAGVVVGKLGTSTVSPIELENAVGRADTGFGVMTEEELRQAVASARKRGEKVVMTNGVFDILHAGHVSYLANARKLGDRLIVAVNSDASTKRLKGESRPVNPLEQRMIVLGALESVDWIVSFEEDTPQRLIAGILPDLLVKGGDYKPEEIAGSEEVWPTGGEVMVLNFEDGCSTTNIIKKIQ

SEQ ID NO: 73169 - protein, 217 aa, Salmonella paratyphi A
MNQTLLSSFGTPFERVELALDALREGRGVMVLDDEDRENEGDMIFPAEIMTVEQMALTIRHGSGIVCLCITEDRRKQLDLPMMVENNTSAYGTGFTVTIEAAEGVTTGVSAADRVTTVRAAIKDGAKPSDLNRPGHVFPLRAQAGGVLTRGGHTEATIDLMTLAGFKPAGVLCELTNDDGTMARPECIAFAGQHNMAVVTIEDLVAYRQRMSAKPAD

SEQ ID NO: 73170 - protein, 229 aa, Salmonella paratyphi A
MSALCPLPTPPASEALLLAQARQLSGYTLGELAAMAGITTPKDLKRDKGWIGVLLEIWLGATAGCKPEQDFAALGLELKTIPVDSLGRPLETTFVCVAPLTGNSGVTWETSHVRHKLKRVLWVPVEGNRSIPLAERRVGSPLLWSPSEEEDRQLRLDWEELMDMIVLGQVERITARHGEVLQLRPKAVNARALTEAIGARGEPILTLPRGFYLKKNFTQALLARHFLLQ

SEQ ID NO: 73171 - protein, 370 aa, Salmonella paratyphi A
MTDNPNKKTFWDKIHIDPTMLLILLALLVYSALVIWSASGQDIGMMERKIGQIAMGLVVMVVMAQIPPRVYEGWAPYLYIICIILLVAVDAFGAISKGAQRWLDLGIVRFQPSEIAKIAVPLMVARFINRDVCPPSLKNTAIALVLIFMPTLLVAAQPDLGTSILVALSGLFVLFLSGLSWRLIGVAIVLIAAFIPILWFFLMHDYQRQRVMMLLDPETDPLGAGYHIIQSKIPIGSGGLRGKGWLHGTQSQLEFLPERHTDFIFAVLAEELGLVGILILLALYILLIMRGLWIAARAQTTFGRVMAGGLMLILFVYVFVNIGMVSGILPVVGVPLPLVSYGASALIVLMAGFGIVMSIHTHRKMLSKSV

SEQ ID NO: 73172 - protein, 155 aa, Salmonella paratyphi A
VKLQLVAVGTKMPDWVQTGFTEYLRRFPKDMPFELIETSAGKRGKNADIKRILDKEGEQMLPAAGKNRIVTLDIPASPWDTPQLANELERWKQDGRDVSLLIGGPEGLSPACKAAAEQSWSLSALTPPSPLVRVLVAESLYRAWSITTNHPYHRE

SEQ ID NO: 73173 - protein, 321 aa, Salmonella paratyphi A
  MISC_FEATURE (252)..(252): X=any amino acid
  MISC_FEATURE (260)..(260): X=any amino acid
MSKPIVMERGVKYRDADKMALIPVKNVVTERDALLRKPEWMKIKLPADSTRIQGIKAAMRKNGLHSVCEEASCPNLAECFNHGTATFMILGAICTRRCPFCDVAHGRPVAPDAEEPQKLAQTIADMSLRYVVITSVDRDDLRDGGAQHFADCITAIRAKSPEIKIETLVPDFRGRMDRALDILNATPPDVFNHNLENVPRIYRQVRPGADYNWSLKLLERFKEAHPEIPTKSGLMVGLGETNAEIIEVMRDXYRHGVTMXTLGQYLQPSRHHLPVQRYVSPEEFDEMKAEALAMGFTHAPVGPFVRSSYHADLQAKAWEVK

SEQ ID NO: 73174 - protein, 266 aa, Salmonella paratyphi A
  MISC_FEATURE (211)..(211): X=any amino acid
ILNLTPSAISQSIQKLRTIFPDPLFIRKGQGVTPTTYVRHLHEYISQGLESILGALDLTGSYDKQRTITIGTTLRVGALVMPIIYQPSGPRYPQLSCATIPVDDAESQLSQFQTDLIINTHSYNNRSIQYHVLFSDTLEIVCRQHHPCLRTPLLKRRLNSADHTFLMLEGQHLSLCASDCQETFPDQQISFSSYNIFTIASLIASSDLLGXCPPASYDLFSRCWPLERLPYAPVNSEQVEFSLHYNKLSLRDPVLENVIDIIREAF

SEQ ID NO: 73175 - protein, 196 aa, Salmonella paratyphi A
  MISC_FEATURE (140)..(140): X=any amino acid
  MISC_FEATURE (142)..(142): X=any amino acid
MQKVVLATGNAGKVRELASLLSDFGLDVVAQTELGVDSAEETGLTFIENAILKARHAAKMTGLPAIADDSGLAVDVLGGAPGIYSARYSGENATDQQNLEKLLHTLRDVPDDKRQARFHCVLVYLRHAEDPTPIVCHGKXNXSHYSPRRLENGEFDYDPIFFVPSEGKTAAELTREEKSAISHRGQALKLLLDALR

SEQ ID NO: 73176 - protein, 233 aa, Salmonella paratyphi A
  MISC_FEATURE (171)..(171): X=any amino acid
MYRNFSFAAALLAAAFSGQALADGINNFSQAKAASVKVNADAPGSFYCGCQIRWQGKKGVVDLESCGYKVRKNENRARRIEWEHVVPAWQFGHQRQCWQDGGRKNCAKDPVYRKMESDMHNLQPAIGEVNGDRGNFMYSQWNGGEGQYGQCAMKVDFKANSPEPPARARGXRPTYFYMRDQYQLKLSRQQTQLFNVWDKQYPVTAWECERDRISQGPGNHNPYVQRACQARKS

SEQ ID NO: 73177 - protein, 255 aa, Salmonella paratyphi A
IAKRRGHDADFFIMRIPRIYHPELLTSGTQISLCEDAANHIGRVLRMGPGQALQLFDGSNQVFDAEIISASKKSVEVQVMKGEIDDRESPLHIHLGQVMSRGEKMEFTIQKSIELGVSLITPLFSERCGVKLDNERLNKKRQQWQKIAIAACEQCGRNRVPKIRPPMAGAWCAEQDSGLKLNLHPRAHASINTLPLPVERVRLLIGPEAGCSADEIAMTARYQFTDILLGPRVLRTETTALTAITALQVRFGDLG

SEQ ID NO: 73178 - protein, 138 aa, Salmonella paratyphi A
MSDTLLAFDFGTKSIGVAIGQRITGTARPLPAIKAQDGTPDWTLIERLLKEWQPDEIIVGLPLNMDGTEQPLTARARKFANRIHGRFGVTVTLHDERLSTVEARSGLFERGGYRALNKGKVDSASAVIILESYFEQGY

SEQ ID NO: 73179 - protein, 339 aa, Salmonella paratyphi A
VPGYARYRSFSEDVYMNMEEIVTLSVKHNVSDLHLCNAWPARWRKQGRMETAPFTAPDVDRLLLDWLNDAQQYQWRTHGQLDFAVSLSGTRRLRSAFKHQQGTSLALRLLPERCPDLAEIQTPPIVPALLASENGLILVTGATGCGKSTTLAAMVGHLNQHADKHILTLEDPIEYRYTSKRCLIQQREVGQHCATFAAGCRGLREDPDVILLGELRDSETIRLALTAAETGHLVLATLHTRGAAQAVERLVDSFPAQEKEPVRSQLAGSLRAVLSQKLEVDRQEGRVALFELLINTPATGNLIREGKLHQLAHVIQTGQQQGMMTFAQSAQWRQAQGRL

SEQ ID NO: 73180 - protein, 220 aa, Salmonella paratyphi A
  MISC_FEATURE (101)..(101): X=any amino acid
  MISC_FEATURE (105)..(105): X=any amino acid
  MISC_FEATURE (135)..(135): X=any amino acid
  MISC_FEATURE (181)..(181): X=any amino acid
  MISC_FEATURE (183)..(183): X=any amino acid
  MISC_FEATURE (185)..(185): X=any amino acid
IRDKISAAASRCGRSSEEVTLLAVSKTKPASDIAEAIAAGQRAFGENYVQEGVEKIRHFQEAKVEGLHWHFIGLLQSTKVGWGRHVDWCIPIDRLRIASRXASSXPDNLPALNVLIQINISDGYSKSGIPLGTGXLAARWNYFPWRFAWLMAIPAPESDYVRQFEVARQMAVAFAGLKARXPXRXYPISGMSDDMEAAIAAGSTMVRIGTAIFGARDYTK

SEQ ID NO: 73181 - protein, 213 aa, Salmonella paratyphi A
MKPYQRQFIEFALNKQVLKFGEFTLKSGRKSPYFFNAGLFNTGRDLALLGRFYAEALVDSGIEFDLLFGPAYKGIPIATTTAVALAEHHDKDLPYCFNRKEAKDHGEGGSLVGSALQGRVMLVDDVITAGTAIRESMEIIQAHRATLAGVLISLDRQERGRGEISAIQEVERDYGCKVISIITLKDLIAYLEEKLDMAEHLAAVRAYREEFGV

SEQ ID NO: 73182 - protein, 287 aa, Salmonella paratyphi A
MIRSMTAYARREIKGEWGSATWEMRSVNQRYLETYFRLPEQFRSLEPVVRERIRTRLTRGKVECMLRFEPDASAQGELILNEKLAKQLVSAANWVKMQSDEGEINPVDILRWPGVMAAQEQDLDAIAAEILAALDGTLDDFIVARETEGQALKALIEQRLEGVSAEVAKVRAHMPEILQWQRERLVAKLEDAQVQLENNRLEQELVMMAQRIDVAEELDRLEAHVKETYNILKKKEAVGRRLDFMMQEFNRESNTLASKSINADVTNSAIELKVLIEQMREQIQNIE

SEQ ID NO: 73183 - protein, 453 aa, Salmonella paratyphi A
  MISC_FEATURE (363)..(363): X=any amino acid
MAKTLYEKLFDAHVVFEAPNETPLLYIDRHLVHEGTSPAFDGLRAHHRPVRQPGKTFATMDHNVSTQTKDINASGEMARIQMQELIKNCNEFGVELYDLNHPYQGIVHVMGPEQGVTLPGMTIVCGDSHTATHGAFGAGFGIGTSEVEHVLATQTLKQGRAKTMKIEVTGSAAPGITAKDIVLAIIGKTGSAGGTGHVVEFCGELSRALSMEGRMTLCNMAIEMGAKAGLVAPDETTFNYVKGRLHAPKGCDFDEAVEYWKTLKTDDGATFDTVVTLRAEEIAPQVTWGTNPGQVISVTDIIPDPASFSDPVERASAEKALAYMGLQPGVPLTDVAIDKVFIGSCTNSRIEDLRAAAEVPKGXKVAPGVQALVVPGSGPVKAQAEAEGLDKIFIEAGFEWRLPGCSMCLAMNNDRLNPGERCASTSNRNFEGRQGRGGRTHLVSPAMAAAAAV

SEQ ID NO: 73184 - protein, 87 aa, Salmonella paratyphi A
MMRRILSVLLENESGALSRVIGLFSQRGYNIESLTVAPTDDPTLSRMTIQTVGDEKVLEQIEKQLHKLVDVLRVSQLGQGAHVEREI

SEQ ID NO: 73185 - protein, 335 aa, Salmonella paratyphi A
  MISC_FEATURE (327)..(327): X=any amino acid
MSVVPVADVLQGRVAVDQEVTVRGWVRTRRDSKAGISFLAVYDGSCFDPVQAVINNSLPNYNEEVLHLTTGCSVVVTGKVVASPGQGQSFEIQATKVEVAGWVEDPDTYPMAAKRHSIEYLREVAHLRPRTNLIGAVARVRHTLAQALHRFFDEQGFFWVSTPLITASDTEGAGEMFRVSTLDLENLPRNDQGRVDFDKDFFGPESFLTVSGQLNGDTYACALSKIYTLWPTCRAENCNTSRHLGRFWMLEPHVAFAIWKTTLVWGSMLNYVFKAVLEERAYDMKFFAERVYKDAIARLERFVSTDFAQVDYHDAVAILARCGQTSXHPVFWGVD

SEQ ID NO: 73186 - protein, 400 aa, Salmonella paratyphi A
MTQFASPVLHSLLDTDAYKLHMQQAVFHHYYDVQVAAEFRCRGDDLLGIYADAIREQVDAMQHLRLQEDEFQWLSGLPFFKPDYLNWLREFRYNPAQVCVTNDNGKLNIRLTGPCGEVIMWEVPLLAVISELVHHYRSPNAGVDQALDALESKLVDFTALTANLDMSRFHLMDFGTRRRFSREVQQAIVKRLQQESWFVGTSNYDLARRLGLTPMGTQAHEWFQAHQQISPDLATSQRAALAAWLNEYPDQLGIALTDCITMDAFLRDFGIEFASRYQGLRHDSGDPVAWGEKAIAHYEKLGIDPLTKTLVFSDNLDLQKAVELYRHFASRVQLSFGIGTRLTCDIPQVKPLNIVIKLVECNGKPVAKLSDSPGKTICHDKAFVRALRKAFDLPQVRKAS

SEQ ID NO: 73187 - protein, 777 aa, Salmonella paratyphi A
  MISC_FEATURE (552)..(552): X=any amino acid
  MISC_FEATURE (578)..(578): X=any amino acid
  MISC_FEATURE (613)..(613): X=any amino acid
YRHDYRAPDYQITDIDLTFDLDAEKTVVTAISQAVRHARLMRPLRLDGEDLTLVSIHVNDAPWTVYKEEEGALIISDLPERFTLRIVNEISPAANTALEGLYQSGDALCTQCEAEGFRHITWYLDRPDVLARFTTKIIADKSKYPFLLSNGNRVAQGELENGRHWVQWQDPFPKPCYLFALVAGDFDVLRDTFTTRSGREVALELYVDRGNLDRAPWAMTSLKNSMKWDEARFGLEYDLDIYMIVAVDFFNMGAMENKGLNIFNSKYVLARTDTATDKDYLDIERVIGHEYFHNWTGNRVTCRDWFQLSLKEGLTVFRDQEFSSDLGSRAVNRISNVRTMRGLQFAEDASPMAHPIRPDKVIEMNNFYTLTVYEKGAEVIRMIHTLLGEENFQKGMQLYFERHDGSAASVDDFVQAMEDASNVDLSHFRRWYSQSARRIVTVKDDYNPETEQYTLTISQRTPATADQAEKQPLHIPFAIELYDNEGNVIPLQKGGHPVNALLNVTQAEQTFTFDNVYFQPVPALLCEFSAPVKLEYKWSDQQLTFLMPCAQXFLRWDAAQSLLATYIKLNVARHQQGXTYRFRCMSLIVPRSTVDEKIDPALAAEILTPVGQXIAELFEVIDPIAIAQVREALTRTLAAELADEFLAIYNANHLDEYRVDHGDIGKRTCRMLACAFLAFGETELANTLVSKQYRDANNMTDALAALSAAVAAQLPCRDTLMQEYDDKWHQDGLVMDKWFILQSTSPARNVLETVRRLLKHGSFSMRNTKRMPFMNWR

SEQ ID NO: 73188 - protein, 178 aa, Salmonella paratyphi A
MSMKKYLAMITGSLLVSSSAMAVSDNTITFQGEVSDETCSVVINGNQAKPVVLLPTVSTKELSEQGKTAGPITFDIGLSGCTGSKDKTTKISTVFVGNQVTSNGNLGNTGSAKNVEVQLLDTSGEPINLTGGFTGDGDLQLEPNASEASATYTARYYSTGKAEAGTVAATLQYAVSYK

SEQ ID NO: 73189 - protein, 353 aa, Salmonella paratyphi A
MLSGELAVDPSNAGTTGLLDLVTRNWKRSLLQMAGLRSDILSPVKETGTLLGHISQKAAEQCDLQAGTPVIVGGGDVQLGCLGLGVVRPAQTAVLGGTFWQQVVNLPAPVTDPNMNVRINPHVIPGMVQTESISFFTGLTMRWFRDAFCAEEKLIAERLGIDAYSLLEDMASRVPPGAHGVMPIFSDVMRFKRWYHAAPSFINLSIDPEKCNKATLFRALEENAAIVSACNLQQIAAFSGVQADSLVFAGGGSKGKLWSQILADVTGLTVHVPVVKEATALGCAIAAGVGVGVWPSLAETGEKLVRWDREHKPNPENFAVYQQAREKWQAVYQDQRALVDGGLTTSLWKAPGL

SEQ ID NO: 73190 - protein, 314 aa, Salmonella paratyphi A
MTMSDNTLVSDYGMCEEEQVARIAWFYYHDGLTQSEISERLGLTRLKVSRLLEKGHQSGIIRVQINSRFEGCLEYENALRNHFALQNIRVLPALPDADIGLRLGIGAAHMLMESLRPQQLLAVGFGEATMTTLKRLSGFISAQQIRLVTLSGGVGPYMTGIGQLDAACSVSIMPAPLRSSQEIACTLRNENSVRDVMLTAQAADAAIVGIGAINQKDQASILKSGYITQGEQLMIGRKGAVGDILGYFFDAHGEIIPDIKIHNELIGLKLNSLSTIPTVIGVRGEQKAEAIIGYRGNYINALVTDQKTAGKIIQ

SEQ ID NO: 73191 - protein, 278 aa, Salmonella paratyphi A
AAPAAGSTLDKIAKNGVIVVGHRESSVPFSYYDNQQKVVGYSQDYSNAIVEAVKKKLNKPDLQVKLIPITSQNRIPLLQNGTFDFECGSTTNNLERQKQAAFSDTIFVVGTRLLTKKGGDIKDFPDLKGKAVVVTSGTTSEILLHKLNEEQKMGMRIISAKDHGDSFRTLESGRAVAFMMDDALLAGERAKAKKPDNWEIVGKPQSQEAYACMLRKNDPEFKKLMDDTIAQAQTSGETEKWFDKWFKNPIPPKNLNMNFELSDEMKALFKAPNDKALN

SEQ ID NO: 73192 - protein, 311 aa, Salmonella paratyphi A
  MISC_FEATURE (97)..(97): X=any amino acid
  MISC_FEATURE (110)..(110): X=any amino acid
ALPIIIDCDPGHDDAIALVLALASPELEVKAITSSAGNQTPEKTLRNVLRMLTLLKRPDIPVAGGAVKPLMRELIIADNVHGESPLDGTALPEPSFXPQSGTAVELMAKXLRESSQPVTIVSTGPQTNVALLLNSHPELHAKIARIVIMGGAMGLGNWTPAAEFNIYVDPGSRQKIVFQSGIPVVMAGLNVTHKAQIHAADIEAFRAIGNPISTIVAELLDFFMEYHKDEKWGFVGAPLHDPCTIAWLLKPEIFTTVERWVGVETQGKYTQGMTVVDYYFLTGNKPNATVMVDVDRQDLVDLLAERLQYYA

SEQ ID NO: 73193 - protein, 363 aa, Salmonella paratyphi A
RTAGNTALCTVGKSGNDLHYRGYDILDLAEHCEFEEVAHLLIHGKLPTRRRLNAYKSKLKGCRDYPANVRTVLEALPAASHPMDVMRTGVSALGCTLPEKEAHTVSGARDITDKLLATLSSILLYWYHYSHNGERIQPETDDDSIGGHFLHLLHGEKPTQSWEKAMHISLVLYAEHEFNASTFTSRVIAGTGSDVYSAIIGAIGAARPKHGGANEVSLEIQQRYETPDEAEADIRKRVENKEVVIGFGHPVYTIADPRHQVIKRVAKQLSEEGGSLKMYHIADRLETVMWETKKMFPNLDWFSAVSYNMMGVPTEMFTPLFVIARVTGWAAHIMKQRQDNKIIRPSANYTGPEDRPFVSIDDR

SEQ ID NO: 73194 - protein, 208 aa, Salmonella paratyphi A
MTPFTQSQRIKALFWVSLFHLLVIISSNYLVQLPITIFGFHTTWGAFSFPFIFLATDLTVRIFGAPLARRIIFAVMIPALLVSYVVSSLFYMGAWQGFAALGNFNLFVARIAAASFMAYALGQILDVHVFNRLRQNRRWWLAPTASTLFGNISDTLAFFFIAFWRRRAFMAGHWMEIALVDYCFKVLISIIFFLPMYGVLLNMLLKKL

SEQ ID NO: 73195 - protein, 454 aa, Salmonella paratyphi A
MALWGGRFTQAADQRFKQFNDSLRFDYRLADEDIVGSVAWSKALVTVGVLTADEQRQLEEALNVLLEEVRANPQQILQSDAEDIHSWVEGKLIDKVGQLGKKLHTGRSRNDQVATDLKLWCKETVRELLTANRLLQSALVETAQVNQDAVMPGYTHLQRAQPVTFAHWCLAYVEMLARDESRLQDTLKRLDVSPLGCGALAGTAYEIDREQLAGWLGFASATRNSLDSVSDRDHVLELLSDAAIGMVHLSRLAEDLIFFNSGEAGFVELSDRVTSGSSLMPQKKNPDALELIRGKCGRVQRALTGMMMTLKGLPLAYNKDMQEDKEGLFDALDTWLDCLHMAALVLDGIQVKRPRCQEAAQQGYSNATELADYLVAKGVPFREAHHIVGEAVVEAIRQGKPLEAVPLADLQKFSRVIGDDVYPILSLQSCLDKRAAKGGVSPQQVAQAIDDARA

SEQ ID NO: 73196 - protein, 323 aa, Salmonella paratyphi A
MGLVKQGARVAVIERYHNVGGGCTHWGTIPSKALRHAVSRIIEFNQNPLYSDHSRLLRSSFADILNHADNVINQQTRMRQGFYERNHCEILQNAHFIDEHTLALECHDGTVETLTAEKFVIACGSRPYHPNDVDFSHPRIYDSDSILSLHHEPRHVIIYGAGVIGCEYASIFRGMDVKVDLINTRDRLLAFLDQEMSDSLSYHFWNSGVVIRHNEEYEKIEGCDDGVIMHLKSGKKLKADCLLYANGVTGNTDSWRLENIGLETDSRGQLKVNSMYQTALPHVYAVGDVIGYPSLASAAYDQGRIAAQALVKGEATAHLIEDI

SEQ ID NO: 73197 - protein, 461 aa, Salmonella paratyphi A
MTRQNENYNRYLLSDWRPENPAFWENKGKGIARRNLWISVSCLLLAFCVWMLFSAVAVNLNKIGFNFTTDQLFLLTALPSLSGAILRVPYSFMVPLFGGRKWTVLSTVILIIPCAWLGFAVQNPATPFGVFMLIALLCGFAGANFASSMGNISFFFPKARQGSALGINGGLGNLGVSVMQLLAPLVIFLPIFTFLGVRGVAQPDGSLLALTNAAWIWVPLLAVATLAAWFGMNGIGSSKASVASQLPVLKRLHLWLLSLLYLATFGSFIGFSAGFAMLAKTQFPDVNILQLAFFGPFIGAGRSAGGVISDKFGGVRVTLINFIFMALFTALLFLTLPGSGAGSFSAFYLVFMGLFLTAGLGSGSTFQMIAVIFRQITLYNVKLRGGSDEQAQPKAVTDTAAALGFISAIGAVGGFFIPKAFGTSLALTGSPWAPMKIFLLFYIACVLLTWLVYGRRKPKQQ

SEQ ID NO: 73198 - protein, 495 aa, Salmonella paratyphi A
  MISC_FEATURE (177)..(177): X=any amino acid
  MISC_FEATURE (411)..(411): X=any amino acid
  MISC_FEATURE (471)..(471): X=any amino acid
MFRQWLTLVIIVLVYIPVAIDATVLHVAAPTLSMTLGASGNELLWIIDIYSLVMAGMVLPMGALGDRIGFKRLLMLGGTLFGLASLTAAFSHTASCLIATRVLLAIGAAMIVPATLAGIRATFCEEKHRNMALGVWAAVGSGGRRLGGSIGGILLEHFYWGSVFLINVPIVLVVMAXPPRYVPRQAGRRDQPLNLGHAVMLIVAILLLVYSVKTALKGHLSLWVISLTLLTGALLLGLFIRTQLATSRPMIDMRLFTHRIILSGVVMAMTAMITLVGFELLMAQELQFVHGLSPYEAGVFMLPVMVASGFSGPIAGALVSRLGLRLVATGGMALSALSFYGLAMTDFSTQQWQAWGLMALLGFSAASALLASTSAIMAAAPAEKAAAAGATRNDGYELGAGLGIAFSVCCXSRSFSASIRLPAGLEAQEIARASSSMGEAVQLANSCRPRRGRAILDAARHAFIWSHRWRXAAPGSMLLLLAVGMWFSLAKAQRR

SEQ ID NO: 73199 - protein, 292 aa, Salmonella paratyphi A
MTSQKATLIGLVAIVLWSTMVGLIRGVSEGLGPVSGAAMIYSLSGLLLIFTVGLPDIRRFPGRYLIAGSVLFVSYEICLALSLGYAATRHQAIEVGMVNYLWPSLTILFAILFNGQKTNWLIVPGLLIALTGVCWVLGGENGLNAEEIINNVATSPLSYLLAFLGAFIWATYCTVTNKYARGFNGITVFVLLTALALWLHYFLTPQPAMIFSLPVIAKLFTAALTLGFAYAAWNVGILHGNVTIMAVGSYFTPVMSSALAALLLSSPLSFSFWQGAVMVCVGSLLCWLATRR

SEQ ID NO: 73200 - protein, 274 aa, Salmonella paratyphi A
MEMLEERCFGGWQQRWRHHAATLNCAMTFSIFLPPTQDNEPPPVLYWLSGLTCNDENFTTKAGAQYAAELGIVLVMPDTSPRGEQVADDSGYDLGHGAGFYLNATQPPWASHYRMYDYLRDELPALIQTQFNVSDRCAISGHSMGGHGALIMALKNPGKYTSVSAFAPIVNPSRVPWGIKALTAYLGEDESAWTEWDSCELMLASQPQDAIPVLIDQGDSDQFLADQLQPPYLRKPARQTAWPMTLRIQPGYDHSYYFIASFIEDHLRFHARYL

SEQ ID NO: 73201 - protein, 306 aa, Salmonella paratyphi A
MELKDYYAIMGVKPTDDLKTIKTAYRRLARKYHPDVSKEPDAEARFKEVAEAWEVLSDEQRRAEYDQLWQHRNDPQFNRQFQQHEGQPYNAEDFDDIFSSIFGQHGRHSHHRHAARGHDIEIEVAVFLEETLEEHQRTISYSVPVYNAFGLVEREIPKTLNVKIPAGVSNGQRIRLKGQGTPGENGGPNGDLWLVIHIAPHPLFDIVNQDLEVVLPLAPWEAALGAKVSVPTLKERILLTIPPGSQAGQRLRIKGKGLASKKHTGDLYAIIKIVMPPKPDEKTAALWQQLADAQSSFDPRQQWGKA

SEQ ID NO: 73202 - protein, 204 aa, Salmonella paratyphi A
  MISC_FEATURE (91)..(91): X=any amino acid
  MISC_FEATURE (197)..(197): X=any amino acid
QMFRALVASLLTLPVWLYAAPRVITLSPANTELAFAAGITPVGSSSYSDYPPEAQKIEQVSTWQGMNLERIVALKPDLVVAWRGGNAERRXNQLTSLGIKVMWVDAVTSNRIADALRQLAVWSPQPEKAQQAAQTLLNEYAALKVEYAGKLKSAVFLQFGMNLCLPVGKGSIQHQVFDTCGGENIFADSRVSWPQVXREQVLVR

SEQ ID NO: 73203 - protein, 273 aa, Salmonella paratyphi A
MQQLQNVIETAFERRADITPANVDTVTREAVNQVISLLDSGALRVAEKIDGQWVTHQWLKKAVLLSFRINDNQVIDGAESRYFDKVPMKFADYDEARFQKEGFRVVPPAAVRQGAFIARNTVLMPSYVNIGAYVDEGTMVDTWATVGSCAQIGKNVHLSGGVGIGGVLEPLQANPTIIEDNCFIGARSEVVEGVIVEEGSVISMGVYLGQSTKIYDRETGEVHYGRVPAGSVVVFGNLASKDGKYSLYCAVIVKKVDAKTRGKVGINELLRTI

SEQ ID NO: 73204 - protein, 436 aa, Salmonella paratyphi A
  MISC_FEATURE (2)..(2): X=any amino acid
  MISC_FEATURE (397)..(397): X=any amino acid
PXEAESMSGTYNATIRRVVVSAWIGNSIEYYDFLLYGLASALVFGPLFFPGASTLTETLSSFTSIGVGYISRTLGALFYGNRGDTLGRKNTLLITLGGMGAVTFSIGCLPSYASIGAWAPALLVILRFLQGFMVGGEWGGAMLMVVEYAAGKHRGRLSALSQTGGLTGQLLATGVFIVVTPITEEALLSWGWRIPFLLSAPLVLPGLYMRHRLDETPVFRAFKKQQAINHRQQREERPVVKVVREQWRSILLIIILRFAESVPFFLATVFAVSWATTQLGIASLTILYIVMFTCLLAYPMHVLFGIMSDRRGCRQVYIFGALFVAAMAFPFFWLLESRSLILMTMGYVLLINIGHNSLNAVQPSFFAGLFHPPVCYSGSSIGAQLGAVVAGGFTPFXSKALSAVYDNSWTLVAGYVVLMRWASAFAAKIAPKPFYR

SEQ ID NO: 73205 - protein, 376 aa, Salmonella paratyphi A
LDTKMAQDIVARTMRIIDTNINVMDARGRIIGSGDRERIGELHEGVLLVLSQGRVVDIDDAVARHLHGVRQGINLPLRLEGEIVGVIGLTGEPEHLRKYGELVCMTAEMMLEQSRLMHLLAQDSRLREELVMNLIQAEENTPALVEWAQRLGIDLNHRRVAAVVEVDSGQLGVDSAMAELQQLQNALTTPERNNLIAIVSLTEMVVLKPALNPFGRWDAEDHRKRVEQLISRMKENGQLRFRVALGNYFTGPGSIARSYRTARTTMMVGKQRMPESRSYFYQDLMLPVLLDSLRGGWQANELARPLVKLKAMDNNGLLRRTLTAWFRHNVQPLATSKALFIHRNTLEYRLNRISELTGLDLGNFDDRLLLYVALQL

SEQ ID NO: 73206 - protein, 490 aa, Salmonella paratyphi A
  MISC_FEATURE (474)..(474): X=any amino acid
MKKTTLAMSALALSLGLALSPLSATAAETSSSTMTAQQMPSLDPMLEKVMPSVVSINVEGSTTVNTPRMPRNFQQFFGDDSPFCQDGFSFQNSPFCQGGGNGGNGGQQQKFMALGSGVIIDAAKGYVVTNNHVVDNASVIKVQLSDGRKFDAKVVGKDPRSDIALIQIQNPKNLTAIKLADSDALPGGYTVAIGNPFGLGETVTSGIVSALGVAALNVENYENFIQTDAAINRGNSGGALVNLNGELIGINTAILAPDGGNIGIGFAIPSNMVKNLTSQMVEYGQVKRGELGIMGTELNSELAKAMKVDAQRGAFVSQVMPNSSAAKAGIKAGDVITSLNGKPISSFALRAQVGTMPVGSKISLGLLREGKAITVNLELQQSSQSQVDSSTIFSGIEGAEMSNKGQDKGVVVSSVKANSPAAQIGLKKGDVIIGANQQPVKNIAELRKILDSKPSVLALNIQRGDSSIYLLMQXSPLSPFHHGRGQHFSV

SEQ ID NO: 73207 - protein, 232 aa, Salmonella paratyphi A
MKIGIIGAMEEEVTLLRDKIDNRQTITLGGCEIYTGQLNGTEVALLKSGIGKVAAALGATLLLGHCKPDVIINTGSAGGLASTLKVGDIVVSDEARYHDADVTAFGYEYGQLPGCPAGFKADDKLIAAAESCIRELNLNAVRGLIVSGDAFINGSVGLAKIRHNFPDAVAVEMEATAIAHVCHNFNVPFVVVRAISDVADQQSHLSFDEFLAVAAKQSTLMVETLVQKLAHG

SEQ ID NO: 73208 - protein, 254 aa, Salmonella paratyphi A
MKLNIRAQSAQNLHNNSPIVLVHGLFGSLDNLGVLARDLVTDHDIIQVDMRNHGLSPRDPVMDYPAMAQDLLDTLDAQQIEKATFIGHSMGGKAVMALTALAPDRIDRLVAIDIAPVDYHVRRHDRIFAAINAVSESDATSRQQAAGIMRQHLNEEGVIQFLLKSWAEGEWRFNVPVLWEQYPHIVGWETIPPWEHPALFIPGGNSPYVTEAYRDALLAQFPLRRAHVIAGAGHWVHAEKPEAVLRAIRRYLHD

SEQ ID NO: 73209 - protein, 97 aa, Salmonella paratyphi A
MAKEQTDRTTLDLFAHERRPGRPKTNPLSRDEQLRINKRNQLKRDKVRGLKRVELKLNAQAVDALNELAEARNISRSELIEEILMKQLMALRATGLV

SEQ ID NO: 73210 - protein, 134 aa, Salmonella paratyphi A
MELRNTAFHLLRQLFQQHTARWQHELPELTKPQYAVMRVIAEHPGIEQVDLTEAAVSTKATLAEMLSRMENRGLVKRENDPLDKRRRFVYLTAQGQTLLAAAIPLGDRVDDEFLGRLSAEEREQFTRLVRKMMT

SEQ ID NO: 73211 - protein, 441 aa, Salmonella paratyphi A
SSALNGIAGLDHEDMAEDMTPLYQAIVDHVPAPDVDLDGPLQMQISQLDYNNYVGVIGIGRIKRGKVKPNQQVTIIDSEGKTRNAKVGKAWTHLGLERIDSDIAEAGDIIAITGLGELNISDTICDPQNVEALPALSVDEPTVSMFFCVNTSPFCGKEGKFVTSRQILDRLNKELVHNVALRVEETEDADAFRVSGRGELHLSVLIENMRREGFELAVSRPKVIFREIDGRKQEPYENVTLDVEEQHQGSVMQALGERKGDLKNMNPDGKGRVRLDYVIPSRGLIGFRSEFMTMTSGTGLLYSTFSHYDDIRPGEVGQRQNGVLISNGQGKAVAFALFGLQDRGKLFLGHGAEVYEGQIIGIHSRSNDLTVNCLTGKKLTNMRASGTDEAVILVPPIKMSLEQALEFIDDDELVEVTPTSIRIRKRHLTENDRRRANRGQK

SEQ ID NO: 73212 - protein, 313 aa, Salmonella paratyphi A
LIFLWPCGLAIIAALTMGFFYKLNEQRFAFIIEEIAQRKKTGNQIVATNNKQSISTVNNLNDACRFIHPDGWAASLYLKNGFIMKSLNTLVILTSVISTSVFAGAYVENREPINLASDQMEFMLRVGYNSDMGAGIMLTNTYTLQRMMNLKHGYNEIEGWYPLFKPTDKLTIQPGGLINDKSIGSGGAVYLDVNYKFTPWFNLTVRNRYNHNNYSSTDLNGELDNNDSYEIGNYWNFIITDKFSYTFEPHYFYNINDFNSSNGTKHHWEITNTFRYRINEHWLPYFELRWLDRNVGPYHREQNQIRIGAKYFF

SEQ ID NO: 73213 - protein, 192 aa, Salmonella paratyphi A
RNKIILAMAAAVMMYGASVFAADTTPTAGPFGSGKILFTGTITNPPCDIAPGDDAITVPFGQISYRKLNTADATTESKPFTIHLQNCAFDPNIPDTSGSAGKMSKVTVSFSGESQCREKAYTTSGSAQHVCVQLLKSDNTAIIEPNTQMPEGDAQQLQAGNNELNFYARLIALDNGVTPGDFTASVTYTLKY

SEQ ID NO: 73214 - protein, 117 aa, Salmonella paratyphi A
MHVKYLAGIVGDALLMAGCSSSNELTAAGQNVRFVEDKPGAECQLIGTATGKQSNWFSGQHGEEGGSMRGAANDLRNQAAAMGGNVLYGVSSPSQGMLSSFVPTASEMNGQVYKCPN

SEQ ID NO: 73215 - protein, 547 aa, Salmonella paratyphi A
MAAKDVKFGNDARVKMLRGVNVLADAVKVTLGPKGRNVVLDKSFGAPTITKDGVSVAREIELEDKFENMGAQMVKEVASKANDAAGDGTTTATVLAQSIITEGLKAVAAGMNPMDLKRGIDKAVAAAVEELKALSVPCSDSKAIAQVGTISANSDETVGKLIAEAMDKVGKEGVITVEDGTGLQDELDVVEGMQFDRGYLSPYFINKPETGAVELESPFILLADKKISNIREMLPVLEAVAKAGKPLLIIAEDVEGEALATLVVNTMRGIVKVAAVKAPGFGDRRKAMLQDIATLTGGTVISEEIGMELEKATLEDLGQAKRVVINKDTTTIIDGVGEEAAIQGRVAQIRQQIEEATSDYDREKLQERVAKLAGGVAVIKVGAATEVEMKEKKARVEDALHATRAAVEEGVVAGGGVALIRVASKIADLKGQNEDQNVGIKVALRMEAPLRQIVLNCGEEPSVVANTVKGGDGNYGYNAATEEYGNMIDMGILDPTKVTRSALQYAASVAGLMITTECMVTDLPKSDAPDLGAAGGMGGMGGMGGMM

SEQ ID NO: 73216 - protein, 324 aa, Salmonella paratyphi A
MSETATWQPSASIPNLLKRAAIMTEIRRFFADRGVLEVETPCMSQATVTDIHLFPFETRFVGPGHSQGMNLYLMTSPEYHMKRLLAAGCGPVFQLCRSFRNEEMGRHHNPEFTMLEWYRPHYDMYRLMNEVDDLLQQVLDCQPAESLSYQQAFQRHLEIDPLSADKTQLREAAAKLDLSNIADTEEDRDTLLQLLFTMGVEPHIGKEKPTFIYHFPASQASLAQISTEDHRVAERFEVYYKGIELANGFHELTDAREQQQRFEQDNRKRARGLPQQPIDQNLLDALAAGLPDCSGVALGVDRLVMLALGAESLADVIAFTVDRA

SEQ ID NO: 73217 - protein, 493 aa, Salmonella paratyphi A
MSLIGLILMIFTSVFGFANSPSAFYLMGYSAIPWYIFSALLFFIPFALMMAEMGSAYRKEEGGIYSWMNNSVGPRYAFIGTFMWFSSYVIWMVSTAAKIWVPFSTFVFGADMTQHWRIAGLEPTQVVGLLAVGWMILVTCVAARGINKIARITAVGGIAVMCLNLVLLLVSVAILLLNGGHFAQEINFTSSPNPGYHSGLAMLSFVVFAIFAYGGIEAVGGLVDKTEKPEKNFAKGIVFAAIVISIGYSLAIFLWGVSTNWQQILSNSAVNLGNITYILMSSLGTTLGNALNLSPEAAMTVGVWFARITGLSMFLAYTGAFFTLSYSPLKAIIQGTPKALWPAPMTTLNANGMPATAMWLQCVLVSLFILLVSFGGDTASAFYNKLTLMANVSMTLPYLFLALAFPFFKARQDLERPFVLFKTKASTLVATGVVVLVVTFANVFTIIQPVIEAGDWDSALWMIGGPIFFSLLAMAIYQNYSSRMSADPEWAAE

SEQ ID NO: 73218 - protein, 106 aa, Salmonella paratyphi A
MNDSSRDPIITEDEIRALNFTPEDILEIEKVILSSVHVARRKVAMVVGMTIGTLRDRDEDKWKHVSDIYCAYVVRCLVFRGELVGYGDLFRMRYSEINLPVADLDA

SEQ ID NO: 73219 - protein, 302 aa, Salmonella paratyphi A
MRNRTLADLDRVVALGGGHGLGRVLSSLSSLGSRLTGIVTTTDNGGSTGRIRRSEGGYAWGDMRNCLNQLITEPSVSSAMFEYRFGGNGELSGHNLGNLMLKALDHLSVRPLEAINLIRNLLKVDAQLIPMSELPVDLMAIDDQGHEIYGEVNIDQLATPPQEIMLTPNVPATREAVQAINDADLILIGPGSFYTSLMPCLLLDELALALRRTPAPMVYIGNLGRELSLPAASLTLVDKLAMMEQYIGKKVIDAVVVGPRVDVSAVNDRLVIQEVLEASDIPYRHDRQLLHNALEKALQALG

SEQ ID NO: 73220 - protein, 329 aa, Salmonella paratyphi A
MASQLTDAFARKFYYLRLSITDVCNFRCTYCLPDGYKPGGVTNNGFLTVDEIRRVTRAFASLGTEKVRLTGGEPSLRRDFTDIIAAVGENDAIRQIAVTTNGYRLARDAANWREAGLTGVNVSVDSLDARQFHAITGQDKFRQVMAGIDAAFDAGFEKVKVNTVLMRDVNHHQLDTFLAWIQPRPIQVRFIELMETGEGSDLFRKHHISGQVLRDELIKRGWIHHVRQRSDGPAQVFCHPDYAGEIGLIMPYEKDFCATCNRLRVSSVGKLHLCLFGDGGVSLRDLLQDDAQQYALEERISDALREKKQTHFLHQSNTGITQNLSYIGG

SEQ ID NO: 73221 - protein, 170 aa, Salmonella paratyphi A
MSQVSAEFIPTRIAILTVSSRRGEEDDTSGHYLRDSAQEAGHEVVAKAIVKENRYAIRAQVSAWIASDEVQVVLITGGTGLTEGDQAPEALLPLFDCEVEGFGEVFRMLSFEEIGTATLQSRAVAGVANNTLIFAMPGSTKACRTAWENIIAPQLDARTRPCNFHPHLKK

SEQ ID NO: 73222 - protein, 346 aa, Salmonella paratyphi A
  MISC_FEATURE (323)..(323): X=any amino acid
LPDLASESAKKEEQENKGKSFKEQGADYFINSATQGFDNLTPEALESQARTYLQNQITSSAQSYLEGVMSPYGKIRTSLSVGEGGDLDGSSLDYFVPWYDNEKTLLFSQLSAQRKEDRTIGNFGLGVRQNVGNWLLGGNAFYDYDFTRGHRRLGLGTEAWTDYLKFSGNYYHPLSDWKDSEDFDFYEERPARGWDIRMESWLPFYPQLGAKLVYEQYYGDEVALFGTDNLQKDPHAVTLGLEYTPGTGDNNDFSVKATVNYQIGTPLAQLDPENVKIQHSLMGSRTDFVDRNNFIILEYREKDPLDVTLWLKATPPTNTRNAXLKIRLRPRWGWRNVSWTVNALIN

SEQ ID NO: 73223 - protein, 502 aa, Salmonella paratyphi A
RCLMIFLNEALNMVPVVALVGRPNVGKSTLFNRLTRTRDALVADFPGLTRDRKYGRAEVEGREFICIDTGGIDGTEDGVETRMAEQSLLAIEEADVVLFMVDARAGLMPADEAIAKHLRSREKPTFLVANKTDGLDPDQAVVDFYSLGLGEIYPIAASHGRGVLSLLEHVLLPWMDDVAPQEEVDEDAEYWAQFEAEQNGEEAPEDDFDPQSLPIKLAIVGRPNVGKSTLTNRILGEERVVVYDMPGTTRDSIYIPMERDEREYVLIDTAGVRKRGKITDAVEKFSVIKTLQAIEDANVVLLVIDAREGISDQDLSLLGFILNSGRSLVIVVNKWDGLSREVKEQVKETLDFRLGFIDFARVHFISALHGVDTRNLFESVREAYDSSTRRVSTAMLTRIMTMAVEDHQPSLVRGRRVKLKYAHAGAITPPIVVIHGNQVKDLPDSYKRYLMNYFRKSLEVMGTPIRIQFKEGENPYANKRNTLTPAQMRKRKRLMKHIKKSK

SEQ ID NO: 73224 - protein, 392 aa, Salmonella paratyphi A
MQLRKLLLPGLLSVTLLSGCSLFSGEEDVVKMSPLPQVENQFTPTTVWSTSVGNGIGEFYSNLHPVMADNVVYAADRAGVVKALNADDGKEIWSVNLGEKDGWFSRSSALLSGGVTVAGGHVYIGSEKAEVYALNTSDGTTAWQTKVAGEALSRPVVSDGIVLIHTSNGQLQALNQADGAIKWTVNLDMPSLSLRGESAPATAFGAAIVGGDNGRVSAVLMQQGQMIWQQRISQATGPTEIDRLSDVDTTPVVVNGVVYALAYNGNLTALDLRSGQIMWKRELGSVNDFIVDGDRIYLVDQNDRVLALTTDGGVTLWTQSDLLHRLLTSPVLYNGDLVVGDSEGYLHWINVDDGRFVAQQKVDSSGFLTEPTVADGKLLIQAKDGTVSAITR

SEQ ID NO: 73225 - protein, 181 aa, Salmonella paratyphi A
MQFNIPTLVTLFRVILIPFFVVVFYLPFAWAPMVSALIFCIAAITDWFDGFLARRWNQSTRFGAFLDPVADKVLVAIAMVLVTEHYHSWWVTLLAATMIAREIIISALREWMAELGKRSSVAVSWIGKVKTTAQMVALAWLLWRPNIWVEYAGIALFFVAAVLTLWSMLQYLRLARGDLLD

SEQ ID NO: 73226 - protein, 240 aa, Salmonella paratyphi A
MQENDFFTWRRAMLLRFQEMAATEDVYTELQYQTQRLEFDYYALCVRHPVPFTRPKISLRTTYPQAWVTHYQSENYFAIDPVLKPENFRQGHLHWDDVLFHEAQALWDAAQRFGLRRGVTQCVMLPNRALGFLSFSRSSLRCSSFTYDEVELRLQLLARESLSALTRFEDDMVMAPEMRFSKREKEILKWTAEGKTSSEIAIILSISENTVNFHQKNMQKKFNAPNKTQIACYAAGTGLI

SEQ ID NO: 73227 - protein, 249 aa, Salmonella paratyphi A
MSAIEVTNLVKKFHGQTVLHGIDLEVKPGEVVAIIGPSGSGKTTLLRCINLLEQPEAGTIKVGDIIIDTARPFSQQKGLIRQLRQHVGFVFQSFNLFPHRTVLENIIEGPVIVKGEPKAEATAARELLAKVGLAGKETRYPRRCSGGQQQRVAIARAPAMRPEVILFDEPTSALDPELVGEVLNTIRHVAQEKRTMVIVTHEMGFARDVADRAIFMDQGQIVEQGPAKTLFADPQHPVPRQFLEKFLVK

SEQ ID NO: 73228 - protein, 152 aa, Salmonella paratyphi A
MFRGATLVNLDSKGRLTVPTRYREQLIESATGQMVCTIDIHRPCLLLYPLPEWEIIEQKLSRLSSMNPVERRVQRLLLGHASECQMDGAGRLLIAPVLRQHAGLTKEVMLVGQFNKFELWDETTWYQQVKEDIDAEQSATETLSERLQDLSL

SEQ ID NO: 73229 - protein, 313 aa, Salmonella paratyphi A
MMENFKHTTVLLDEAVNGLNIRPDGIYIDGTFGRGGHSRLILSQLGEEGRLLAIDRDPQAIAVAQAISDPRFSIIHGPFSALADYVAERQLTGKIDGILLDLGVSSPQLDDRARFFHFMRDGRWDMRMDPTRGQSAAEWLQTAEEADIAWVLKTFGEERFAKRIARAIVERNREQPMTRTKELAEVVAAATPVKDKFKHPATRTFQAVRIWVNSELEEIEQALKSSLSVLAPGGRLSIISFHSLEDRIVKRFMREQSRGPQVPAGLPMTEAQLKKLGGRELRALGKLMPGEKEVAENPRARSSVLRIAERTNA

SEQ ID NO: 73230 - protein, 583 aa, Salmonella paratyphi A
  MISC_FEATURE (522)..(522): X=any amino acid
MKAAAKTQKSKRQEEQTNFISWRFALLCGCILLALVFLLGRAAWLQIIAPDMLVRQGDMRSLRVQEVSTSRGMITDRSGRPLAVSVPVKAIWADPKEVHDAGGISVGDRWKALSTALNISLDQLSARINANPKGRFIYLARQVNPDMADYIKKLKLPGIHLREESRRYYPSGEVTAHLIGFTNVDSQGIEGVEKSFDKWLTGQPGERIVRKDRYGRVIEDISSTDSQAAHNLALSIDERLQALVYRELNNAVAFNKAESGSAVLVDVNTGEVLAMANSPSYNPNNLAGTPKDAMRNRTITDVFEPGSTVKPMVVMTALQRGIVNENTVLNTVPYRINGHEIKDVARYSELTLTGVLQKSSNVGVSKLALAMPSSALVDTYSRFGLGKATNLGLVGERSGLYPQKQRWSDIERATFSFGYGLMVTPLQLARAYATIGSYGIYRPLSITKVDPPVPGERIFPESTVRTVVHMMESVALRGGGGVKAAIKGYRIAIKTGTAKKVGPDGRYINKYIAYTAASRRQXQPRFAEVVVINDPQRVKYYGGACPRVFGAIMGGVLRTMNIEPDALATGEKNEFVINQGEGT

SEQ ID NO: 73231 - protein, 492 aa, Salmonella paratyphi A
  MISC_FEATURE (196)..(196): X=any amino acid
VADRNLRDLLAPWVAGLPARELREMTLDSRVASAGDLFVAVVGHQADGRRYIPQRYARRTAIIVEAKDEATDVEIREMHGVPVVYLSQLNERLSALAGRFYHEPSENMRLVAVTGTNGKTTTTQLLGAWSQLLGETSAVMGTVGNGLLGKVIPTENTTGSAVDVQHVLASLVAQGEPSAAMEVSSHGLVQHRVGRXNFAASVFTNLSRDHLDYHGDMAHYEAAKWMLYSTHHHGQAIVNADDEVGRRCWHRYPDAVAVSMEGHINPNCHGRWLKAEALGVPRPRSRFVLLQVWGEGEIESRLMGRLTSATYLLALATLLALGYPLTDLLKTAARLQPVCGRMEVFTAPGKPTVVVDYAHTPDALEKALQAARMLRRKIVVRLGCGGDRDKGKRPLMGAIAEEFADIVVVTDDNPRTEEPRAIINDILAGMLDAGQVRVMEGRAEAVTNAIMQAKDNDVVLIAGKGHEDYQIVGTQRLDYSDRVTAARLLGVI

SEQ ID NO: 73232 - protein, 450 aa, Salmonella paratyphi A
MISVTLSKIADVLGAEHRGADLTLDTVITDTRKVTPGCLFVALKGERFDAHDFADKAKANGAGALLVSRPLDIDLPQVIVKDTRQAFAQLAAWVRMQVPARVVALTGSSGKTSVKEMTAAILSQCGNTLYTAGNFNNDIGVPITLLRLNHDYDYAVIELGANHQGEIAWTVSLYRPEAALVNNWRAAHLEGFGSLAGVAKAKGEIYTGLPENGIAIMNADNNDWLNWQSIIGDRQVWRFSPNAANSDFTAANIHVTSHGTEFTLQTPMGSIDVLLPLPGRHNIANALAAAALSMAVGATLTAIKAGLAALKAVPGRLFPIQLSENQLVLDDAYNANVGSMTAAVQVLSEMPAYRVLVVGDMAELGAESEACHIQVGERKSAGIDRVLSTGKLSQAISRPAAVGEHFADKGASLRLLVCFRSNPMMTILVKGSRSAAMEDVVHALQEKGSC

SEQ ID NO: 73233 - protein, 352 aa, Salmonella paratyphi A
LVKYYSGFNVFSYLTFRAIVSLLTALFISLWMGPRMIARLQKLSFGQVVRNDGPESHFSKRGTPTMGGIMILTAIVISVLLWAYPSNPYVWCVLVVLIGYGIIGFVDDYHKVVRKDTKGLIARWKYFWMSVIALGVAFALYLVGKDTPATQLVVPFFKDVMPQLGLFYILLSYFVIVGTGNAVNLTDGLDGLAIMPTVFVAAGFALVAWATGNMNFANYLHIPYLRYAGELVIVCTAIVGAGLGFLWFNTYPAQVFMGDVGSLALGGALGIIAVLLRQEFLLVIMGGVFVVETLSVILQVGSFKLRGQLIFRMAPIHHHYELKGWPEPRVIVRFWIISLMLVLIGLATLKVR

SEQ ID NO: 73234 - protein, 358 aa, Salmonella paratyphi A
  MISC_FEATURE (33)..(33): X=any amino acid
  MISC_FEATURE (72)..(72): X=any amino acid
  MISC_FEATURE (81)..(81): X=any amino acid
  MISC_FEATURE (100)..(100): X=any amino acid
  MISC_FEATURE (281)..(281): X=any amino acid
  MISC_FEATURE (353)..(353): X=any amino acid
  MISC_FEATURE (354)..(354): X=any amino acid
  MISC_FEATURE (357)..(357): X=any amino acid
ADYQDKNVVIIGLGLTGLSCVDFFLARGLTLSXDTLVTPPGLDKLPQEVERHVGGLNDEWLLAADLNRSQPXQSSAHPSHXLGPALAVEIVGDIELLLAXDEAPIVAITGSNGKSTVTTLVARMAKAAGVNVGVGGNIGLPALMLLDADRELYVLELSSFQLETTSSLQAAAATVLNVTEDHMDRYPFGLQQYRAAKLRVYEKAKVCVVNADDALTMPVRGADERCVSFGVNMGDYHLNRQQGETWLRVKGEKVLNVKEMKLSGQHNYTNALRRWAWRMRXVCRAHSLKALTTFTGLAHPSSWRLEHNGVRWINDSKATNVGSSEAALNGLHVDCTLHLLLCGDGKSQTFLRXXAIXP

SEQ ID NO: 73235 - protein, 183 aa, Salmonella paratyphi A
MTKQPEDWLDDVPGDDIEDEDDEIIWVSKSEIKRDAEELKRLGAELVDLGKNALDKIPLDTDLRDAIELAQRIKMEGRRRQLQLIGKMLRQRDVEPIRQALDKLKNRHNQQVVLFHKLEHLRDRLIVEGDDAVAEVLTLWPHADRQQLRSLIRNAKKEKEGNKPPKSARQIFQYLRELAENEG

SEQ ID NO: 73236 - protein, 551 aa, Salmonella paratyphi A
LCATGMTDSDFGKPIIAVVNSFTQFVPGHVHLRDLGKLVAEQIEASGGVAKEFNTIAVDDGIAMGHGGMLYSLPSRELIADSVEYMVNAHCADAMVCISNCDKITPGMLMASLRLNIPVIFVSGGPMEAGKTKLSDQIIKLDLVDAMIQGADPKVSDDQSNQVERSACPTCGSCSGMFTANSMNCLTEALGLSQPGNGSLLATHADRKQLFLNAGKRIVELTKRYYEQDDESALPRNIPNKAAFENAMTLDIAMGGSTNTVLHLLAAAQEAEIDFTMSDIDKLSRKVPQLCKVAPSTQKYHMEDVHRAGGVLGILGELDRAGLLNRNVKNVLGLTLPQTLEQYDITVTQDEAVKKMFRAGPAGIRTTQAFSQDCRWDSLDDDRAACIRSLEYAYSKDGGLAVLYGNFAENGCIVKTAGVDDSILKFTGPAKVYESQDDAVEAILGGKVVEGDVVVIRYEGPKGGPGMQEMLYPTSFLKSMGLGQSCALITDGVFSGGTSGLSIGHVSPEAPAGGTIALIEDGDTIAIDIPNRSIQLQLSEAEIAARRERRK

SEQ ID NO: 73237 - protein, 307 aa, Salmonella paratyphi A
MTTKKADYIWFNGEMVRWEDAKVHVMSHALHYGTSVFEGIRCYDSHKGPVVFRHREHMQRLRDSAKIYRFPVSQSIDELMEACRDVIRKNNLTSAYIRPLVFVGDVGMGVNPPPGYTTDVIIAAFPWGAYLGAEAVDQGIDAMVSSWNRAAPNTIPTAAKAGGNYLSSLLVGSEARRHGYQEGIALDVNGYISEGAGENLFEVKDGVLFTPPFTSSALPGITRDAIIKLAKELGIEVREQVLSRESLYLADEVFMSGTAAEITPVRSVDGIQVGEGVCGPVTKRIQQAFFGLFTGETEDKWGWLDPV

SEQ ID NO: 73238 - protein, 548 aa, Salmonella paratyphi A
  MISC_FEATURE (327)..(327): X=any amino acid
MNGAQWVVHALRAQGVKTVFGYPGGAIMPVYDALYDGGVEHLLCRHEQGAAMAAIGYARSTGKTGVCIATSGPGATNLITGLADALLDSVPVVAITGQVSAPFIGTDAFQEVDVLGLSLACTKHSFLVQSLAELPRIMAEAFEVANAGRPGPVLVDIPKDIQLASGELEPWFTTVDNEATFPQADVEQARQMLEQAKKPMLYVGGGVGMAKAVPALRKFIEVTQMPVTCTLKGLGAVEADYPYYLGMLGMHGTKAANFAVQECDLLIAVCARFDDRVTGKLNTFAPNASVIHMDIDPAEMNKLRQAHVALQGDLNSLLPALQQPLKXSAWRQSCAELRAEHAWRYDHPGETIYAPLLLKQLSERKPADSVVTTDVGQHQMWSAQHMTYTRPENFITSSGLGTMGFGLPAAVGAQVARPNDTVICISGDGSFMMNVQELGTVKRKQLPLKIVLLDNQRLGMVRQWQQLFFQERYSETTLTDNPDFLMLASTSAIPGQHITRKDQVEAALDTMLASEGPYLLHVSIDELENVWPLVPPGASNSEMLEKLS

SEQ ID NO: 73239 - protein, 633 aa, Salmonella paratyphi A
  MISC_FEATURE (49)..(49): X=any amino acid
  MISC_FEATURE (80)..(80): X=any amino acid
  MISC_FEATURE (154)..(154): X=any amino acid
  MISC_FEATURE (155)..(155): X=any amino acid
QMTQESIRRLLVISGDAAWCRERAEAIRAALPGDWLWGPPDAPAPAVLXPQALQTLLGREFRHAIFDAWQGFDAAAFAAXAGPLQAGSWLLLLMPPYETWESRPDIDSLAGGLARQPIPTPQFAQHLKRTLSRDPQTLLWRQRQPFCWPSYPSXXTSATATSEPQPEQAAILSRLCEMPARRGDGDCPRGRGKSALAGQFISRMADTAIVTAPAKTATDILAAFAGERFCFMAPDALLASGARADWLVVDEAAAIPAPLLLQLVSRFPRILLTTTVQGYEGTGRGFLLKFCARFSQLHRFTLRQPVRWAPECPLENIVSEALIFDDEAFAQAPHGAIAISAFYQQAWGETPALPRAVYQLLSGAHYRTSPLDLRRMMDAPGQHFLQATANNRVAGALWLVEEGGLSAELSQAVWCGFRVRVEILVAQSLAAHGSDPSSATLVGRRVSRIAVHPAASAKASGQQLIACACMQAAQCDYLSVSFGYTPELWRFWQRCGFVLVRMGNHREASSGCYTAMALLPLSDAGKRLAQQEHRRLRRDADILTQWNGEAIPLAALDEQALNDEDWRELVGFAFAHRPLLTSLGCLHRLLQYSALPLPALRGRLEEKASDAELCARLRISGRKALLALQRAQA

SEQ ID NO: 73240 - protein, 703 aa, Salmonella paratyphi A
  MISC_FEATURE (503)..(503): X=any amino acid
  MISC_FEATURE (529)..(529): X=any amino acid
MARTTPIARYRNIGISAHIDAGKTTTTERILFYTGVNHKIGEVHDGAATMDWMEQEQERGITITSAATTAFWSGMAKQYEPHRINIIDTPGHVDFTIEVERSMRVLDGAVMVYCAVGGVQPQSETVWRQANKYKVPRIAFVNKMDRMGANFLKVVGQIKTRLGANPVPLQLAIGAEEGFTGVVDLVKMKAINWNDADQGVTFEYEDIPADMQDLANEWHQNLIESAAEASEELMEKYLGGEELTEEEIKQALRQRVLNNEIILVTCGSAFKNKGVQAMLDAVIDYLPSPVDVPAINGILDDGKDTPAERHASDDEPFSALAFKIATDPFVGNLTFFRVYSGVVNSGDTVLNSVKTARERFGRIVQMHANKREEIKEVSRGHIAAAIGLKDVTTGDTLCDPENPIILERMEFPEPVISIAVEPKTKADQEKMGLALGRLGKEDPSFRVWTDEESNQTIIAGMGELHLDIIVDRMKREFNVEANVGKPQVAYRDDSRESYRHRRXTRETVGGRGQYGHVVIDMYPAGAGLXPETLRVHHDIKGGVILASTIPAVDKGIQEQLKSGPLAGYPVVDLGVRLHFGSYHDVDSSELAFKLAASIAFKEGFKKAKPVLLEPIMKVEVETPEENTGDVIGDLSRRRGMLKGQESEVTGVKIHAEVPLSEMFGYATQLRSLTKGRASYTMEFLKYDDAPNNVAQAVIEARGK

SEQ ID NO: 73241 - protein, 652 aa, Salmonella paratyphi A
FTNDLDHGPYISETVRVDPTNDRLSALVEIYRMMRPGEPPTRESAESLFENLFFSEDRYDLSAVGRMKFNRSLLRDEIEGSGILSKDDIIDVMKKLIDIRNGKGEVDDIDHLGNRRIRSVGEMAENQFRVGLVRVERALKERLSLGDLDTLMPQDMINAKPISAAVKEFFGSSQLSQFMDQNNPLSEITHKRRISALGPGGLTRERAGFEVRDVHPTHYGRVCPIETPEGPNIGLINSLSVYAQTNEYGFLETPYRRVVDGVVTDEIHYLSAIEEGNYVIAQANSNLDDEGHFVEDLVTCRSKGESSLFSRDQVDYMDVSTQQVVSVGASLIPFLEHDDANRALMGANMQRQAVPTLRADKPLVGTGMERVVAVDSGVTAVAKRGGTVQYVDASRIVIKVNEDEMYPGEAGIDIYNLTKYTRSNQNTCINQMPCVSLGEPVERGDVLADGPSTDLGELALGQNMRVAFMPWNVNNFEDSILVSERVVQEDRFTTIHIQELACVSRDTKLGPEEITADIPNVGEAALSKLDESGIVYIGAEVTGGDILVGKVTPKGETQLTPEEKLLRAIFGEKASDVKDSSLRGTNGVSGTVIDVQVFTRDGVEKDKRALEIEEMQLKQAKKDLSEELQILEAGLFSRIRAVLVSGGVEAEK

SEQ ID NO: 73242 - protein, 165 aa, Salmonella paratyphi A
  MISC_FEATURE (102)..(102): X=any amino acid
  MISC_FEATURE (103)..(103): X=any amino acid
MALNLQDKQAIVAEVSEVAKGALSAVVADSRGVTVDKMTELRKAGREAGVYMRVVRNTLLRRVVEGTQFECLKDTFVGPTLIAYSMEHPGAAARLFKEFAKXXHKFEVKAAAFEGELIPASQIDRLATLPTYEEAIARLMATMKEASAGKLVRTLAAVRDAKEAA

SEQ ID NO: 73243 - protein, 234 aa, Salmonella paratyphi A
  MISC_FEATURE (85)..(85): X=any amino acid
MAKLTKRMRVIREKVDATKQYDINEAIALLKELATAKFNESVDVAVNLGIDARKSDQNVRGATVLPHGTGRSVRVAVFTQGPNAXKAKALGAELVGMEDLADQIKKGEMNFDVVIASPDAMRVVGQLGQVLGPRGLMPNPKVGTVTPNVAEAVKNAKAGQVRYRNDKNGIIHTTIGKVDFDADKLKENLEALLVALKKAKPSQAKGVYIKKVSISTTMGAGVAVDQAGLSASAN

SEQ ID NO: 73244 - protein, 181 aa, Salmonella paratyphi A
MSEAPKKRWYVVQAFSGFEGRVATSLREHIKLHNMEELFGEVMVPTEEVVEIRGGQRRKSERKFFPGYVLVQMVMNDASWHLVRTVPRVMGFIGGTSDRPAPISDKEVDAIMNCLQQVGDKPRPKTLFEPGEMVRVNDGPFADFNGVVEEVDYEKSRLKVSVSIFGRATPVELDFSQVEKA

SEQ ID NO: 73245 - protein, 394 aa, Salmonella paratyphi A
VSKEKFERTKPHVNVGTIGHVDHGKTTLTAAITTVLAKTYGGAARAFDQIDNAPEEKARGITINTSHVEYDTPTRHYAHVDCPGHADYVKNMITGAAQMDGAILVVAATDGPMPQTREHILLGRQVGVPYIIVFLNKCDMVDDEELLELVEMEVRELLSQYDFPGDDTPIVRGSALKALEGDAEWEAKIIELAGFLDSYIPEPERAIDKPFLLPIEDVFSISGRGTVVTGRVERGIIKVGEEVEIVGIKETQKSTCTGVEMFRKLLDEGRAGENVGVLLRGIKREEIERGQVLAKPGTIKPHTKFESEVYILSKDEGGRHTPFFKGYRPQFYFRTTDVTGTIELPEGVEMVMPGDNIKMVVTLIHPIAMDDGLRFAIREGGRTVGAGVVAKVLG

SEQ ID NO: 73246 - protein, 399 aa, Salmonella paratyphi A
MYQPVALFIGLRYMRGGAADRFGRFVSWLSTIGITLGVMALVTVLSVMNGFERELQNNILGLMPQASLSAEHGSLNPSQMPEKAVNLQGVNRIAPLTTGDVVLQSARSVAVGVMLGIDPAQKDPLTPYLVNVKQSELQPGKYNVILGEQLAGQLGVNRGDQIRLMVPSASQFTPMGRLPSQRLFTVIGTFAANSEVDGYEMLVNIQDASRLMRYPAGNITGWRLWLDEPLQVDTLSQQTLPQGTKWQDWRERKGELFQAVRMEKNMMGLLLSLIVAVAAFNIITSLGLMVMEKQGEVAILQTQGLTPRQIMMVFMVQGARAGIIGALLGVRWGALLASQLNNLMPIIGAFLDGAALPVAIEPLQVIVIALVAMAIALLSTLYPSWRVPPLQPAEALRYE

SEQ ID NO: 73247 - protein, 1134 aa, Salmonella paratyphi A
  MISC_FEATURE (816)..(816): X=any amino acid
  MISC_FEATURE (817)..(817): X=any amino acid
  MISC_FEATURE (818)..(818): X=any amino acid
  MISC_FEATURE (833)..(833): X=any amino acid
  MISC_FEATURE (904)..(904): X=any amino acid
  MISC_FEATURE (1058)..(1058): X=any amino acid
TLPTKAGDQCQLGELTGAACATLVAEIAERHAGPVVLIAPDMQNALRLHDEIRQFTDQMVMNLADWETLPYDSFSPHQEIISSRLSTLYQLPSMQRGVLIVPVNTLMQRVCPHSYLHGHALVMKKGQRLSRDRSAAQLDSAGYRHVDQVMEHGEYATRGALLDLFPMGSEQPYRLDFFDDEIDSLRLFDADTQRTLEEVEAINLLPAHEFPTDKAAIELFRSQWRDTFEVKRDAEHIYQQVSKGTLPAGIEYWQPLFFSEPLPPLFSYFPANTLVVNTGSLETSAERFQADTLARFENRGVDPMRPLLPPEALWLRVDELFSELKRWPRLQLKTDHLPEKAANTNLGFQKLPDLSIQAQQESALDALRKFLESFSGPVIFSVESEGRREALGELLARIKIAPKRILRLDEAQDAGRYLMIGAAEHGFIDTQRNLALICESDLLGERVARRRLDSRRTINPDTLIRNLAELHVGQPVVHLEHGVGRYAGMTTLEAGGIKGEYLMLTYANDAKLYVPVSSLHLISRYAGGAEESAPCIKLGGDLGSRARQKAAEKVRDVAAELLDIYAQRAAKEGFAFKHDREQYQLFCDSFPFETTPDQAQAINAVLSDMCQPLAMDRLVCGDVGFGKTEVAMRAAFLAVENHKQVAVLVPTTLLAQQHYDNFRDRFANWPVRIEMLSRFRSAKEQTQIWRKPPEGKIDILIGTHKLLQSDVKLRDLGLLIVDEEHRFGVRTKSEIKAMRATVDILTLTATLSRGRLNMAMSGMRDLSIIATPPARRLAVKPLSASYDSLVVREAILREILRGGQVYYLYNDVEHIXXXRERLAELVPEAESLXATGQMRERELERVMNDFHHQRFNVLVCTTIIETGIDIPTANTIIIERADHFGLAQLHQTRGRVGRSQPSAXRLAVTPHPKAMTTDAQKRLEAIASLEDLGAGFALATHDLEKSGAGELLGEEQSGSMETIGFSLYMELLENAVDALKAGREPSLEDLTSQQTEVELRMPSLLPDDFIPDVNTRLSFYKRIASAKNENELEEIKVELIDRFACCPIRRVICLDIAXSRTGAKARHPKTEGNEKGGTIEFAEKNHVDPAWLIGLLQKQPQHFRLDGPTRLKFIQDLSERKTRIDWVRQFMQQL

SEQ ID NO: 73248 - protein, 322 aa, Salmonella paratyphi A
MFNNTRLSRWWALLALTATIMLALPAQANTWPLPPPGSQLVGENKFHVVEDDGGSLEALAKKYNVGFLACLQANPGIDPYVPRAGSVLTIPLQTLLPDAPREGIVINLAELRLYYYQPGKNTVTVYPSLGLGQLGGDTLTQRMVTTFRIKRANPTWTPTANIRARYKAQGIDLPAVVPAGPDNPMGHHAIRLAAYGVAICLHGTNAILALVMRVSSGCIRLRDGDIETLFRQSRREPKVNIINTPIKASVEPGGVRLVEVHQPLSKNIGDDPQVLPIVLNGPMQAFKNAPQTDAAVMEHVMEVRSGMPVDVTRQSEAKPQSL

SEQ ID NO: 73249 - protein, 211 aa, Salmonella paratyphi A
MTTDTTSCAKKSRGRPKVFDREAALDKAMTLFWQHGYEATSLADLVEATGAKAPTLYAEFTNKEGLFRAALDRYITRFASKHEAQLFCEEKSVESALEDYFTEIAACFTSTDTPAGCFMINTSATLAASSRDIARTVKSRHAMQEQTLIQFLRQRQERGEIPAHCNPQALAEYINCILQGMSISAREGATFEQLMQITRTTLRIWPELIKS

SEQ ID NO: 73250 - protein, 433 aa, Salmonella paratyphi A
  MISC_FEATURE (326)..(326): X=any amino acid
LTTPLKKIVIVGGGAGGLEMATQLGHKLGRKKKAKITLVDRNHSHLWKPLLHEVATGSLDEGVDALSYLAHARNHGFQFQLGSVMDIDREAKTITIAELRDEKGELLVPERKIAYDTLVMALGSTSNDFNTPGVKEHCIFLDNPHQARRFHQEMLNLFLKYSANLGANGKVNIAIVGGGATGVELSAELHNAVKQLHSYGYKGLTNDALNVTLVEAGERILPALPPRISSAAHNELTKLGVRVVTQTMVTSADEGGLHTKEGEYIQADLMVWAAGIKAPDFMKEIGGLETNRINQLVVEPTLQTTRDPDIYAIGDRSCARPEGGYXSPSAQAAHQMATCAMNNILAQMNGKSAEAYQYKDHGSLVSLSNFSTVGSLMGNLTRGSMMIEGRIARFLYISLYRMHQIALHGYFKTGLMMLVGSINRVIRPRLKLH

SEQ ID NO: 73251 - protein, 251 aa, Salmonella paratyphi A
MVEDSQETTHFGFQTVAKEQKADMVAHVFHSVASKYDVMNDLMSFGIHRLWKRFTIDCSGVRRGQTVLDLAGGTGDLTAKFSRMVGETGKVILADINDSMLKMGREKLRNIGVIGNVEYVQANAEALPFPDNTFDCITISFGLRNVTEKEKALRSMFRVLKPGGRLLVLEFSKPIIEPLSKAYDAYSFHILPRIGSMVANDADSYRYLAESIRMHPDQDTLKAMMQDAGFESVDYYNLTAGVVALHRGYKF

SEQ ID NO: 73252 - protein, 336 aa, Salmonella paratyphi A
MSEGWNIAILGATGRSEALLETLAERQFPVGEIYALARHESAGEHLRFGGKSVIVQDAADFDWTQAQLAFFVAGAEASAAWIDDATNAGCLVIDSSGLFALEPDVPLVVPEVNPYVLADYRNRNVIAVADSLTSQLLAALKPLIDQGGLSRIAVTSMLSASAQGKKAVDALAGQSAKLLNGIPIDEDDFFGRQLAFNMLPLLPDREGSVRQERRIVDEVRKILQDDGVMISASVVQSPVFYGHAQMVSFEALRPLAAEEAREAFSRGEDIVLSEETDYPTQVGDASGNPQLSIGCVHNDYGMPEQIQFWSVADNVRFGGALMAVKIAEKLVQEYLY

SEQ ID NO: 73253 - protein, 377 aa, Salmonella paratyphi A
VKILVDENMPYARELFSRLGEVKAVPGRPIPVEELNHADALMVRSVTKVNESLLSARPINFVGTATAGTDHVDEAWLKQAGIGFSAAPGCNAIAVVEYVFSALLMLAERDGFSLRDRTIGIVGVGNVGSRLQTRLEALGIRTLLCDPPRPHAGDEGDFRTLDELVQEADVLTFHTPLYKDGPYKTLHLADETLIRRLKPGVILINACRGPVVDNAALLARLNAGQPLSVVLDVWEGEPDLNVALLEAVDIGTSHIAGYTLEGKARGTTQVFEAYSAFIGREHVSALETLLPAPEFDRITLHGPLDQPTLKRLAHLVYDVRATIRPLRKVAGIPGEFDKLRKNYLERREWSSLYVMCDDEGADALLCKLGFNAVHHPA

SEQ ID NO: 73254 - protein, 403 aa, Salmonella paratyphi A
ALFSAAMFFVLAGVFMGVQLELDGTKLVVDTAADIRWQWIFIGTAVVFFFQLLRPMFQKAVKHVSGPKFILPAIDGSTVKQKLFLMALLVIAVAWPFMVSRGSVDIATMTMIYIILGLGLNVVVGLSGLLVLGYGGFYAIGAYTFALLNHYYGLGFWTCLPLAGLVSAAAGFLLGFPVLRLRGDYLAIVTLGFGEIVRILLLNNTEITGGPNGISQIPKPTLFGLEFSRNTREGGWDTFSNFFGVKYDPSDRVIFLYLVALLLVVLSLFVINRLLRMPLGRAWEALREDEIACRSLGLSPTRIKLTAFTISAAFAGFAGTLFAARHVVSPESFTFAESAFVLAIVVLGGMGSQFAVILAAVLLVVSRDFNEYSMLMLGGLMVLMMIWRPQGLLPMTRPQLKLK

SEQ ID NO: 73255 - protein, 423 aa, Salmonella paratyphi A
LRHTALGLALSLAFTGQALASTTIPFWHSMEGELGKEVDSLAQRFNQANPDYKIVPVYKGNYEQNLSAGIAHFRTGNAPGILQVYEVGTATMMASKAIKPVYEVFKDAGINFDESQFVPTVAGYYTDAKSGHLLSQPFNSSTPVLYYNKDAFKKAGLDPEQPPKTWQELADYTAKLRAAGMKCGYASGWQGWIQLENFSAWNGLPFASKNNGFDGTDAVLEFNKPEQVKHIALLEEMNKKGDFSYVGRKDESTEKFYNGDCAMTTASSGSLANIRQYAKFNYGVGMMPYDADIKGAPQNAIIAEPSLWVMQGKYKETYTGVAKFLDFLAKPENAAEWHQKTGYLPITTAAYELTREQGYYDKNPGADIATRQMLNKPPLPFTKGLRLGNMPQIRTIVDEELESVWTGKKTPQQALDTAVERGN

SEQ ID NO: 73256 - protein, 600 aa, Salmonella paratyphi A
  MISC_FEATURE (378)..(378): X=any amino acid
  MISC_FEATURE (465)..(465): X=any amino acid
  MISC_FEATURE (499)..(499): X=any amino acid
  MISC_FEATURE (556)..(556): X=any amino acid
  MISC_FEATURE (565)..(565): X=any amino acid
  MISC_FEATURE (591)..(591): X=any amino acid
  MISC_FEATURE (592)..(592): X=any amino acid
  MISC_FEATURE (597)..(597): X=any amino acid
  MISC_FEATURE (599)..(599): X=any amino acid
KVPSLVRDTRVEGLRALRDESDKDGMRIVIEVKADAVREVVLNNLYSQTQLQVFFGINMVALHHGQPKIMNLKDIISAFVPHRREVVTRRTIFEMRKARDRAHILEALAIALANIDPIIELIRRANAAEAKAALISRPWDLGNVAAMLERAGDDAASGMLEPEFGVRDGQYYLTEQQAQAILDLRLQKLTGLEHEKLLDEYKELLEQIAELLHILAAPIRLMEVIREEMELIRDQFGDERRTEITANSADINIEDLISQEDVVVTLSHQGYVKYQPLTDYEAQRRGGKGKSAARIKEEDFIDRLLVANTHDTILCFSSRGRLYWMKVYQLPEASRGRAVVRIVNLLPLEANERITAILPVREYEEGVNVFMATAAVPXRKTALTEFSRPRSPGIIAVNLNDGDELIGVDLTSGSDEVMLFSAAGKVVRFKEDAVRAMGRTRPVCAVLKLAGDDKVVSLIIPRGEXRYSDRNAKRYGNVPQRTSIPTKSRATRALSLSKXPSRTVRVGAVQVDDCDQIMMITDAGTLVRTRVSEISVVGRNTQGVILIPTGEDENVXVCNALLNRXMDEELDAIDGSVAEGDEDIAPEAESXXRRCGXRXR

SEQ ID NO: 73257 - protein, 216 aa, Salmonella paratyphi A
MNNMNVIIADDHPIVLFGIRKSLEQIEWVNVVGEFEDSTALINNLPKLDAHVLITDLSMPGDKYGDGITLIKYIKRHFPSLSIIVLTMNNNPAILSAVLDLDIEGIVLKQGAPTDLPKALAALQKGKKFTPESVSRLLEKISAGGYGDKRLSPKESEVLRLFAEGFLVTEIAKKLNRSIKTISSQKKSAMMKLGVENDIALLNYLSSVTLSPTDKE

SEQ ID NO: 73258 - protein, 887 aa, Salmonella paratyphi A
  MISC_FEATURE (602)..(602): X=any amino acid
MSQSDTTVSTRFSLLPGSITRFFLLLIIVLLVTMGVMVQSAVNAWLKDKSYQIVDITHAIHKRVDTWRYVTWQIYDNIAATTTPSTGEGLQETRLKQDVYYLEKPRRKTEALIFGSHDSATLEMTQRMSTYLDTLWGAENVPWSMYYLNGQDNSLILISTLPLKDLSSGFKESTIGNIVDSRRAEMLQQANALDERESFSSLRKLAWQNGHYFTLRTTFNQPGHLATVVAFDLPINDLIPPGMPLDSFRIEPDATQATGRSSEKEAPDSVTISFNGSKIEISSALNSTGMRLIWQVTFGTLLLDTLQNILLPLLLNIGLLALALFVATFRHQPGRTTESTSGNAANNELRLTRINEEIVSLCRWGLLVYDQEGNRTVISNKIADHLLPHLNLQNITSMAEQHQGVIQATINNELYEIRLFRSQIAPRTQIFIIRDQDREVLVNKKLKQAQRLYEKNQQGRAAFMQNISNTLKEPVRQLAVNAAAVTTPESLKLADQADVLVRMIDEIQLANMLENDAWKSEATLFSLQDLIDEVVPEVLPAIKRKGLQLLINNHLSGNDERWGDRDALRRILLLLIQYAVTTTAMGKITLEVEQDESMRSVXTFRILDTGEGVTLNEIDNLHFPYMNETQGDRYGKANPLTFWLCNQLARKLGGHLNIKARETLGTRYTVHVKMLPHDQHTQVEERLLDDVSVMVDVTSNEVRAIVLRQLENWGATCITPDERQISQEYDLFLTDNPSNLTASGLLLSDDESGVRKIGPGQLRVNFNMSNAMQEAVLQLIEEQWRRKRIPASPLGGDENAELHASGYYALFVDTVPDDVKRLYTEAATSDFAALAQTAHRLKGVFAMLNLVPGKQLCETLEHLIREKDAPGIEKYISDIDAYVKSLL

SEQ ID NO: 73259 - protein, 318 aa, Salmonella paratyphi A
MLQFILRRLGLVIPTFIGITLLTFAFVHMIPGDPVMIMAGERGISPERHAQLLAELGLDKPMWQQYLHYIWGVMHGDLGISLKSRIPVWDEFVPRFKATLELGVCAMIFAVAVGIPVGVLAAVKRGSIFDHTAVGLALTGYSMPIFWWGMMLIMLVSVHWNLTPVSGRVSDMVFLDDTNPLTGFMLIDTAIWGEEGNFIDALAHMILPAMVLGTIPLAVIVRMTRSSMLEVLGEDYIRTARAKGLTRMRVIIVHALRNAMLPVVTVIRLQVGTLVAGAILTETISSWPRLGRLLIDALQSRDYPVVQGCVLTVATMNI

SEQ ID NO: 73260 - protein, 517 aa, Salmonella paratyphi A
AMTVAASVQAKTLVYCSEGSPEGFNPQLFTSGTTYDASSVPIYNRLVEFKTGTTEVIPGLAEKWDISEDGKTYTFHLRKGVKWQSSKDFKPTRELNADDVVFSFDRQKNEQNPYHKVSGDSYEYFEGMGLPDLISEVKKVDDHTVQFVLTRPEAPFLADLAMDFASILSKEYADNMLKAGTPEKVDLNPVGTGPFQLVQYQKDSRILYKAFDGYWGTKPKIDRLVFSITPDASVRYAKLQKNECQVMPYPNPADIARMKEDKNINLMEQAGLNVGYLSYNVQKKPLDDVKVRQALTYAVNKEAIIKAVYQGAGVAAKNLIPPTMWGYNDDIKDYGYDPEKAKALLKEAGLEKGFTIDLWAMPVQRPYNPNARRMAEMIQADWAKIGVQAKIVTYEWGEYLKRAKDGEHQTVMMGWTGDNGDPDNFFATLFSCDAAQQGSNYSKWCYKPFEDLIQPARATDDHNKRIELYKQAQVVMHDQRPALIIAHSTVYEPVRKEVKGYVVDPLGKHHFENVSVE

SEQ ID NO: 73261 - protein, 582 aa, Salmonella paratyphi A
  MISC_FEATURE (161)..(161): X=any amino acid
  MISC_FEATURE (569)..(569): X=any amino acid
  MISC_FEATURE (578)..(578): X=any amino acid
PGFVCMRYIKSMTQQKLSFLLALYIGLFMNCAVFYRRFGSYAQEFTIWKGLSAVVELGATVLVTFFLLRLLSLFGRRVWRVLARLVVLFSAGASYYMTFLNVVIGYGIIASVMTTDIDLSKEVVGLHFVLWLIAVSVFRLIFIWSNHCRYTLLRQLRTPGXRFRSAAVVILAGVMVWAPIRLLDVQQKKFERATGIDLPSYGGVVANSYLPSNWLSALGLYAWAQVDESSDNNSLINPARKFTYVAPKDGDDTYVVFIIGEHDRWDHMGIFGYERNTTPKWRREKNLAAFRGYSCDTATKLSLRCMFVREGGADNNPQRTLKEQNVFAVLKQLGFSSDLYAMQSEMWFYSNTMADNISYREQIGAEPRNRGKTVDDMLLIDEMQNSLAQNPEGKHLIILHTKGSHFNYTQRYPRTTLNGKPECIGVDSGCTKAQMINSYDNSVTYVDHFITSVFDQLRDKKAIVFYAADHGESINEREHLHGTPRNMAPPEQFRVPMLVWMSDKYLASPQHAQMFAHLKQQAEIKVPRRHVELYDTIMGCLGYTSPNGGINQNNNWCHIPDAQKVAAKXVAADFLADXIVFC

SEQ ID NO: 73262 - protein, 246 aa, Salmonella paratyphi A
MTNNAAAPLYSLRGLPLIGWRDMSHALNYLFADGQLKQGTLVAINAEKLLTAEDNPEVRALIGAAEFKYADGISVVRSIRKKFPQAQVSRVAGADLWEALMARAGKEGTPVFLVGGKPEVLAQTEAKLRTQWNVNIVGSQDGYFTPEQRQALFARIHASGAKIVTVAMGSPKQELLMRDCREVHPHALYMGVGGTYDVFTGHVKRAPKIWQNLGLEWLYRLLSQPKRITRQMRLLRYLRWHYTGDL

SEQ ID NO: 73263 - protein, 220 aa, Salmonella paratyphi A
MAYRDQPLGELALSIPRASALFRQYDMDYCCGGKQTLARAAARHDVDIDIIEAQLAQLAEQPSEKDWRAVPLATLIDHIVVRYHDRHREQLPELILQATKVERVHGTKPNVPRGLTKYLTALHEELSSHMMKEEQILFPMIKQGMGRQATGPISVMESEHDEAGELVDVIKHVTQNVTPPPEACTTWKAMYNGINEMIDDLMEHISLENNVLFPRALAGE

SEQ ID NO: 73264 - protein, 935 aa, Salmonella paratyphi A
  MISC_FEATURE (49)..(49): X=any amino acid
  MISC_FEATURE (82)..(82): X=any amino acid
  MISC_FEATURE (131)..(131): X=any amino acid
  MISC_FEATURE (400)..(400): X=any amino acid
  MISC_FEATURE (431)..(431): X=any amino acid
  MISC_FEATURE (498)..(498): X=any amino acid
  MISC_FEATURE (745)..(745): X=any amino acid
  MISC_FEATURE (786)..(786): X=any amino acid
  MISC_FEATURE (803)..(803): X=any amino acid
DKIEVRGARTHNLKNINLVIPRDKLIVVTGLSGSGKSSLAFDTLYAEEXRRYVESLSAYAGSFLSLMEKPDVDHIEGLSPDXQIEQKSTSHNPRSTVGTITEIHDYLRLLFCPRAEPRCPNHDVPLGKNRXPDVDNVLSQPEQNAWMLLAPIIKERKGEHTKTLENLASQGYIRARIDGEVCDLSDPPKLELQKKHTIEVVIDRFKVRNDLSQRLAESFETALELSGGTRLLPDMDDEKAEVLLFSANFACPICGYSMRELEPRLFSFNNPAAPARPVTGSAFINISIPDRVIQNPDLSLAGGAIRGWDRRNFYYFQMLKSLAEHYKFDVDAPWASLSANVHKVVLYGSGKENIEFKYMNDSAIPPSPPSVSKACLHNMERRYKETESSGARRAGEVHQXRPCASCEGMRLNAKRAMYLWKIRAALLFPIXALAMRMDFFTNLKLSGQRAKIAEKVLKERCDRLKFLVNVGLNYLTLSRSAETLSGAKPSVFVWRARXAPGLVGVMYVLDEPSIGLHQRDNERLLGTLIHLRNLGNTVIVVEHDEDAIRAADHVIDIGPGAGVHGGEVVAEGPLEAIMAVPESLTGQYMSGKRKIEVPKQRVPANPEKVLKLTGARGNNLKDVTLTLPVGLFTCITGVSGSGKSTLINDTLFPIAQRQLNGATIAEPASYRDIQGLEHFDKVIDIDQSPIRSPAFQPATYTVSLPRFVSFLLACGCSRSPATRRGIQLQRARRFRQACQVRWRHXSRNALSAGIYVPCDQCKGKRYNRETLEIKYKGKTIHEVWIXPLKKRVSSLMRFRRWRXVQTLMDVGLTYIRLGQSATTLSGGEAQRVKLARELSKRGTGQTLYILDEPTTGLHFADIQQLLDVLHQLRDQGNTIVVIEHNLDVIKTADWIVDLGPEAARRRRNSRRRYAGNRGGVRRRRHTARFLKPMLK

SEQ ID NO: 73265 - protein, 471 aa, Salmonella paratyphi A
MAGNKPFNKPQTDARDRDPQVAGIKVPPHSIEAEQSVLGGLMLDNERWDDVAERVVAEDFYTRPHRHIFTEMGRLQESGSPIDLITLAESLERQGQLDSVGGFAYLAELSKNTPSAANISAYADIVRERAVVRDMIAVAHEIADAGYDPQGRNSDELLDLAESRVFQIAENRANKDEGPKSIDQILDATVARIEQLFQQPHDGVTGVDTGYQDLNKKTAGLQRSDLIIVAARPSMGKTTFAMNLCENAAMLQDKPVLIFSLEMPGEQIMMRMLASLSRVDQTRIRTGQLDDEDWARISGTMGILLEKRNMYIDDSSGLTPTEVRSRARRIFREHGGLSLIMIDYLQLMRVPSLSDNRTLEIAEISRSLKALAKELQVPVVALSQLNRSLEQRADKRPVNSDLRESGSIEQDADLIMFIYRDEVYHENSDLKGIAEIIIGKQRNGPIGTVRLTFNGQWSRFDNYAGPQYDDE

SEQ ID NO: 73266 - protein, 719 aa, Salmonella paratyphi A
MSFVSTGNKTVGSDRPAITTPPIVGENKGVSSDAVVASVTDAAEQMAEQAVESLFGDLPEPSGLVKAAVAAAQATAVAAGISDIAGAAQDVMSSLISGPEVHNVTVSGSAVPPQMLLFASLNGSEALGTLFTYVVQLKTPDTLNLGYVSPAANLPLKPMVGKDLCVNIELDGGGKRHISGLVTAARVVGHEGRSVTYELRMEPWLKLLTHTSDYKAFQNKTVVDILDEVLAEYPYPVEKRLVESYPVRTWQVQYGETDFDFLQRLMQEWGIYWWFEHSEDSHTLVLADAISAHKACPDSPLVEWHQEGLKLDKEFIHTITANESLRTGQWVLDDFDFTKPRSLLANTVANPRETGHATYEHYEWPGDYFDKSEGEMLTRIRMEAQRSPGSRVLGGGNIRTLMTGYTFTLENYPTAEVNQEYLLMQTLLFVQDNAQHSGQNQHFTFSTRFELHPTREVYRPQRTISKPHTKGPQSAIVTGPAGQEIWTDQYGRVKVQFGWDRYGKMDENSSCWIRVSYPWAGKGFGMIQIPRIGQEVLVDFKNGDPDLPIIVGRTYNQDTMPPWGLPGAATQSGIYSHTIGGGPTNAKALRFEDKPGSEEVWLHAEKDQRIEVNNNESHWVGNNRVKVIDQSEIATIGAVRDHKVQYDDTSLAGGNKTIQTVKELYLAAGDSITLSCGDTVLYMSSKGEFYVTCKTFNITATDADGQINTIKGQLDLNMD

SEQ ID NO: 73267 - protein, 437 aa, Salmonella paratyphi A
  MISC_FEATURE (288)..(288): X=any amino acid
KHPNLVIILADDLGYGDLAHYGHRIVKTPNIDKLAQEGVKFTDYYAATPLCSPSRAGLLTGRMPFRTGIRSLDTGSKDVALGRNELTIANLLKQQGYDTAMMGKLHLNAGGDRTDQPQAKDMGFDYTLVNPAGFVTDATLDNAKERPRYGVVHPTGWIRNGQHIGRADKMSGEFVSSEVVNWLDNKKDDNPFFLYVAFTEVHSPLASPKKYLDMYSQYMTDYQKQHPDLFYGDWADKPWRGTGEYYANISYMDEQVGKVLDKIKAMGEEDNTIVIFTSDNGPVTRSAXGIRAELAGETDGLRGRKDNLWEGGIRVPAIIKYGKHIPQGMVTDTPVYGLDWLPTLANMMDFKLPTDRTYDGQSLVPLLKDKTLKRQKPLIFGIDMPFQDDRDGDWKMIIDRQNKPKYLYNLKTDRFETLNQIGKQPQIEKQLYGKFLK

SEQ ID NO: 73268 - protein, 226 aa, Salmonella paratyphi A
MIQYLNVFFYDIYPYICATVFFLGSLLRYDYGQYTWRASSSQMLDKRGMVIWSNLFHIGILGIFFGHLFGMLAPHWMYAWFLPIAVKQQMAMILGGVCGVLTLIGGAGLLWRRLTNQRVRATSTTPDIIIMSILLIQCLLGLSTIPFSAQYPDGSEMMKLVGWAQSIVTFRGGSSEMLSGVAFVFRVHLVLGMTIFLLFPFTRLVHVWSAPFEYFTRRYQIVRTRR

SEQ ID NO: 73269 - protein, 505 aa, Salmonella paratyphi A
  MISC_FEATURE (367)..(367): X=any amino acid
  MISC_FEATURE (435)..(435): X=any amino acid
MKIRSQVGMVLNLDKCIGCHTCSVTCKNVWTGREGMEYAWFNNVETKPGIGYPKNWEDQQEWQGGWVRDVNGKIRPRLGGKMGVISKIFANPVIPQIDDYYEPFTFDYQHLHTAPESKHQPTARPRSLIDGKRMDKVIWGPNWEELLGGEFEKRARDRNFDNIQKRMYGQFENTFMMYLPRLCEHCLNPSCVATCPSGAIYKREEDGIVLIDQDKCRGWRLCISGCPYKKIYFNWKSGKSEKCIFCYPRIESGQPTVCSETCVGRIRYLGVLLYDADRIEEAASTEHETDLYERQCDVFLDPHDPAVIEEALKQGIPQNVIDAAQRSPVYKMAMDWKLALPLHPEYRTLPMVWYVPPLSPIQSYADXGRVAAQWNILPAVETLRIPVQYLANMLSAGDTGPVIRALKRMMAMRHYMRSQTVEGVTDTRAIDEWVXSVQQVEEMYRYLAIANYEDRFVIPPADGEIWREALPESKRLRLNFGDGCHGSDTKFNLFNSSRIEPSIIT

SEQ ID NO: 73270 - protein, 650 aa, Salmonella paratyphi A
SPMTWGEQTDVPESADWYNSAYIIAWGSNVPQTRTPDAHFFTEVRYKGTKTIAITPDYSEVAKLCDQWLAPKQGTDSALAMAMGHVILKEFHLDNPSDYFLNYCRRYTDMPMLVLLDERADGSYVPGRMMRASDLMDGLGEANNPEWKTVALNSTGELVAPNGSIGFRWGEKGKWNLEPVAAGVETELSLSLLGQHDDVAGVAFPYFGGNENPHFASVRQEPVLVRQLPVKRLTLADGSERMVVSVYDLVLANYGLDRGLDDGHSANNYNDVKAYTPAWGEQITGVPRRHIETIAREFAETAHKTHGRSMIILGAGVNHWYHMDMNYRGMINMLVFCGCVGQTGGGWAHYVGQEKLRPQTGWLPLAFALDWNRPPRQMNSTSFFYNHASQWRYEKLTAQEFVSPLAIPAKFSGHLIDFNVHAERMGWLPSAPQLNLNPLSVKASADKAGLSAADYTVQALKSGAIRFACEQPDSGHNHPRNLFVWRSNLLGSPGKGHEYMLKYLLGTDSGIQGEALGSSEGIKPEEVEWQSAAIEGKLDLLVTLDFRMSSTCLFSDIVLPTATWYEKDDMNTSDMHPFIHPLSAAVDPAWESKSDWEIYKGIASVFSEVCVGHLGQETDVVLHPLQHDSPAELAQPFDILDWRKGECELI

SEQ ID NO: 73271 - protein, 1066 aa, Salmonella paratyphi A
  MISC_FEATURE (180)..(180): X=any amino acid
  MISC_FEATURE (223)..(223): X=any amino acid
TNGDLPSKADVQNQLDTLNKQKDLSAQDKLVQQDLIDTLATLEKIERVKEETVQLRQKVAQAPEKMRQATAALNALSDVDNDDEMRKTLSALSLRQLELRVAQVLDDLQNSQNDLAAYNSQLVSLQTQPERVQNAMYSASQQIQQIRNRLTSITSREALPPCEQVLLHAQQALLNVEMRXERKSLEGTTAFQDTLQRQRDYVTASSNRLEQQLQLLQEAVGQXDRLTLTDKTAQELISPDETARIQANPLVKQELDINHQLSQRLIVATENGNMLMQQNIKVKNWLDRALQSERNIKEQIAVLKGSLLLSRILYQQQQTLPSADELEDMTNRIADLRLEQFEINQQRDALFQSDAFVDKLEEGHTSEVNDEVHDALLQVVEMRRELLDQLNKQLGNQLMMAINLQVNQQQLMSVSKNLKAILTQQIFWVNSNRPMDWDWLKAFPQTLKEQFSAMKITVNWQKAWPAVFIAFLAGLPLLLIAGLIRWRLKWLKAYQQKLAAAVGSLRNDSQLNTPKAILIDLIRALPVCLIILAIGLILLTMQLNISDLLWAFSKKLAMFWLVFGLCWKVLEKEGVAIRHFGMPAQLTSHWRRQIVRISLALLPLHFWSVVAELSPLNLMDDVLGQAVIFLNLLVITLLVWPLCRESWRDKESHGIRLVTVTILSIIPVALMVLTATGYFYTTLRLAGRGLETVYLVIIWNLLYQTVLRGLSVAARRIAWRRALARRQNLVKEGAEGAEPQEEPTIALEQINQQTLRITMLLMLALFGVMFWAIWSDLITVFSYLDSITLWHYNGSEAGAAVVKSVTMGSLLFAIIAAMVAWALIRNLPGLLEVLVLSRLNMRQGASYAITTILNYVIIAVGAMTVFGSLGVSWDKLQWLAAALSVGLGFGLQEIFGNFVSGLIILFERPVRIGDTVTIGTYSGTVSKIRIRATTITDFDRKEVIIPNKAFVTERLINWSLSDTTTRLVIRLGVAYGSDLEKVKRVLLQAAMEHPKVMHDPEPAVFFTTFGASTLDHELRLYVRELRDRSHTVDELNRAIDRLCRENDINIAFNQLEVHLHNAKGDE

SEQ ID NO: 73272 - protein, 55 aa, Salmonella paratyphi A
MSLENAPDEVKLAVDLIVLLEENRLPARTVLRALEIVMRDYENKLKSTEDDSQTE

SEQ ID NO: 73273 - protein, 171 aa, Salmonella paratyphi A
MLLQTLEERLATLRQRCAPLAQHATLSARFDRHLFRTRSTLLQGYLEEADANLAALRQAVKHEQLPQVAWLAEHLASQLEAISRETATWSLRQWDAAAPGLGRWQRRRIQHQEFERRLLAMTQERKIRLAQATGLVEQQTLQKEVEIYEGRLARCRHALEKIENVLARLTR

SEQ ID NO: 73274 - protein, 67 aa, Salmonella paratyphi A
MMNCPKCGHSAHTRSSFQVTDSTKERYCQCQNINCGSTFVTHETVVRFIVTPALVNNAPPHPTVSGQ

SEQ ID NO: 73275 - protein, 150 aa, Salmonella paratyphi A
FRPEIPPNTATIIVFCATTASSCTSIEPMGFTWDDKRYAAQGLDYHEFAAVQRHHDYAAFVAAENPQRLFALTTKGTAAHSAVSYQDGDYLMFGPETRACPPAFSDALPKEQKIRIPMMPDSRSMNLSNAVSVVVYEAWRQLGYPGAVLR

SEQ ID NO: 73276 - protein, 143 aa, Salmonella paratyphi A
  MISC_FEATURE (88)..(88): X=any amino acid
MQEIMQFVGRHPILSIAWIALLVAVLFTTFKGLTSKVKVITRGETTRLINKEDAVVVDLRQRDDFRKGHIAGATNLLPSEIKANNVAXLEKHKDKPIIVVDGSGMQCQESANALTKAGFEKVFVLKEGVRGWSGENLPLVRGK

SEQ ID NO: 73277 - protein, 82 aa, Salmonella paratyphi A
MANIEIYTKATCPFCHRAKALLNSKGVSFQEIAIDGDAKREEMIKRSGRTTVPQIFIDAQHIGGCDDLYALDARGGLDPLLR

SEQ ID NO: 73278 - protein, 339 aa, Salmonella paratyphi A
MNQSNASMTVIGAGSYGTPLAITLARNGHQVVLWGHDPKHIATLEHDRCNVAFLPDVPFPDTLHLESDLATALAASRNILVVVPSHVFSDVLRQIKPLMRPDARLVWATKGLEAETGRLLQDVAREALGDQIPLAVISGPTFAKELAAGLRTAISLASTDETFADDLQQLLHCGKSFRVYINADFIGVQLGGAVKNVIAIGAGMSDGIGFGANARTALITRGLTEMSRLGARLGADPATFMGMAGLGDLVLTCTDNQSRNRRFGMMLGQGMDVKGAQDKIGQVVEGYRNTKEVRELAHRFGVEMPITEEIYQVLYCGKNAREAALTLLGRARKEELSRH

SEQ ID NO: 73279 - protein, 273 aa, Salmonella paratyphi A
MPCEELEIVWKNIKAEARALADCEPMLASFYHATLLKHENLGSALSYMLANKLASPIMPAIAIREVVEEAYAADPEMIASAACDIQAVRTRDPAVDKYSTPLLYLKGFHALQAYRIGHWLWNEGRRALAIFLQNQVSVSFQVDIHPAAKIGRGIMLDHATGIVVGETAVIEDDVSILQSVTLGGTGKTSGDRHPKIREGVMIGAGAKILGNIEVGRGAKIGAGSVVLQPVPPHTTAAGVPARIVGKPGSDKPSMDMDQHFNGIHHTFEYGDGI

SEQ ID NO: 73280 - protein, 238 aa, Salmonella paratyphi A
MGRKWANIVAKKTAKDGATSKVYAKFGVEIYAAAKQGEPDPESNSALKFVIERAKQAQVPKHVIDKAIDKAKGGGDETFVQGRYEGFGPNGSMVIAETLTSNVNRTIANIRTIFNKKGGNIGAAGAVSYMFDNTGVIVFKGTDPDHIFEILLDAEVDVRDVTEEEGNIVIYTEATDLHKGIAALKAAGITEFSTTELEMIAQSEVELSPEDLEIFEGLVDALEDDDDVQKVYHNVANL

SEQ ID NO: 73281 - protein, 256 aa, Salmonella paratyphi A
MKSNTSQQRPYQEVGAMIRDLIVQTPYRPGERLPPEREIAERLNVTRTVVREALIMLEIKGLVEVRRGAGIYVLDSADNNEMEGADVNHCNDAGPFELLQARQLLESNIAEFAALQATREDIIKMRQALQLEERELASSAPGGSESGDMQFHLAIAEATHNSMLVELFRQSWQWRENNPMWLQLHSHLGDTLYRKSWLGDHKQILAALIKKDARAVLVMWQHLENVKQRLLEFSNVDDIYFDGYLFESWPLDNVDA

SEQ ID NO: 73282 - protein, 564 aa, Salmonella paratyphi A
  MISC_FEATURE (8)..(8): X=any amino acid
  MISC_FEATURE (16)..(16): X=any amino acid
  MISC_FEATURE (451)..(451): X=any amino acid
PLLRCTVXRRLCGNGXTRRAPLDCTIHSGYVTGLVGPDSAGKTTLMRMLAGLLKADGGSASVLGFDPIQNDSELHAVLGYMPQKFGLYEDLTVMENLNLYADLRSVTGEIREKTFARLLEFTALGPFTGRLAGKLSGGMKQKLGLACTLVGEPKVLLLDEPGVGVDPISRRELWQMVHELAGDGMLILWSTSYLDEAEQCRDVLLMNEGELLYQGEPKALTQTMAGRSFLMSSPQENNRKLLQRALRLPQVSDGMIQGRSVRLILKKEATAADIRQAEGMPEITLNETAPRFEDAFIDLLGGAGTSESPLGSILHTVEGTAGETVIEAQELTKKFGDFAATDHVNFVVQRGEIFGLLGPNGAGKSTTFKMMCGLLVPTSGKALVLDMDLKVSSGKARQHLGYMAQKFSLYGNLTVEQNLRFFSGVYGLRGRAQNEKIQRMSEAFGLKSIAXHPTDALPLGFKQRLALACSLMHEPDILFLDEPTSGVDPSTRREFWLHINSMVEKGVTVMVTTHFMDEAEYCDRIGLVYRGKLIASGTTDDLKAQAADEQQADPTMEQAFITLI

SEQ ID NO: 73283 - protein, 88 aa, Salmonella paratyphi A
MDIHNKARIHWACRRGMRELDISIMPFFEHEYDSLSDEEKRIFVRLLQSDDPDLFNWLMNHGKPADAELEQMVRLIQTRNRERGPVAI

SEQ ID NO: 73284 - protein, 326 aa, Salmonella paratyphi A
MAFISFPPRHPSSSARLPLTLIALDDWALSTITGVDSEKYIQGQVTADVSQMTEQQHLLAAHCDAKGKMWSTLRLFRERDGFAWIERRSVREAQLTELKKYAVFSKVVIAPDDERVLLGVAGFQARAALANVFSELPNSENQVVRDGASTLLWFEHSAERFLLVTDVATANMLTEKLHAKAELNNSQQWLALDIEAGIPVIDAANSGQFIPQATNLQALGGISFKKGCYTGQEMVARAKFRGANKRALWLLAGKASRVPEAGEDLELQMGENWRRTGAILAATQLDDGQLLVQAVMNNDLEAESVFRVRDDANTLHIVPLPYSLEE

SEQ ID NO: 73285 - protein, 505 aa, Salmonella paratyphi A
MSEQNAQGADEVVDLNNEMKARREKLAALREQGIPFPNDFRRDRTSDQLHAEFDAKEAEELEALNIEVSVAGRMMTRRIMGKASFVTLQDVGGRIQLYVARDDLPEGVYNEQFKKWDLGDILGAKGKLFKTKTGELSIHCTELRLLTKALRSLPDKFHGLQDQEARYRQRYLDLISNDESRNTFKTRSKILAGIRQFMVARGFMEVETPMMQVIPGGASARPFITHHNALDLDMYLRIAPELYLKRLVVGGFERVFEINRNFRNEGISVRHNPEFTMMELYMAYADYKDLIELTESLFRTWAQDVLGTTQVPYGDEVFDFGKPFEKLTMREAIKKYRPETDMADLDNFDSAKAIAESIGIHVEKSWGLGRIVTEIFDEVAEAHLIQPTFITEYPAEVSPWRRRNDVNPEITDRFEFFIGGREIGNGFSELNDAEDQAQRFLDQVNAKAAGDDEAMFYDEDYVTALEHGLPPTAGLGIGIDRMVMLFTNSTRIRDVILFPAMRPVK

SEQ ID NO: 73286 - protein, 365 aa, Salmonella paratyphi A
  MISC_FEATURE (26)..(26): X=any amino acid
MFEINPVNNRIQDLTERTNVLRGYLXYDAKKERLEEVNAELEQPDVWNEPERRRALGKERSSLEAIVDTLDQMTQGLDDVSGLLELAVEADDEETFNEAVAELNTLEEKLAQLEFRRMFSGEYDSADCYLDIQAGSGGTEAQDWASMLLRMYLRWAEARGFKTEVIEESEGEVAGIKSATIKISGEYAYGWLRTETGVHRLVRKSPFDSGGRRHTSFSSAFVYPEVDDDIDIDINPADLRIDVYRASGAGGQHVNRTESAVRITHIPTGIVTQCQNDRSQHKNKDQAMKQMKAKLYELEMQKKNAEKQAMEDTKSDIGWGSQIRSYVLDDSRIKDLRTGVETRNTQAVLDGSLDQFIEASLKAGL

SEQ ID NO: 73287 - protein, 574 aa, Salmonella paratyphi A
  MISC_FEATURE (90)..(90): X=any amino acid
  MISC_FEATURE (155)..(155): X=any amino acid
  MISC_FEATURE (263)..(263): X=any amino acid
  MISC_FEATURE (280)..(280): X=any amino acid
  MISC_FEATURE (296)..(296): X=any amino acid
VKQQRQLRRREADETAELPADLPPLLRRLYASRGVRSARELERSVKGMLPWQQLSGIDNAVEILYNAFREGTRIIVVGDFEADGATSTAXSVLGMRALGCDNISYLVPNRFEDGYGLSPEVVDQAKARAQLIVTVDNGISSHAGVAHAKTLGIPXIVTDHHLPGDTLPDAEAIINPNLATANFPSKSLAGVGVAFYLMLALRTFLRDKGWFDEQHCAPNLAELLDLVALGTVADVVDWTLINRILTWQGLSRIRAGNMTSGNXALLEISNRDPQPACRQXLGFALGPRLQCRQAGXMSVGVALLLCDNLGEARVLASELDALNQTRKEIEQGMQAEALILCEKLERSSETLPGGLAMYHPEWHQGVVGILASRIKERFHRPVIAFAPAGDGTLKGSGRSIQGLHMRDALERLDTLYPDLMIKFGGHAMAAGLSLEEHKFEQFQQRFGELVTEWLDPALLQGEVISDGPLSAAEMSMEVAQLLRDAGPWGQMFPEPLFDGRFRLLQQRLVGERHLKVMVEPVGAARCWMASHFNIDTTCWPDNGVREVELAYKLDINEFRGNRSLQIIIDDIWPL

SEQ ID NO: 73288 - protein, 237 aa, Salmonella paratyphi A
MKKRFMMFTLLAAAFSGVAHADDAAIRQSLAKLGVQSTEIQASPVAGMKTVLTHSGVLYVTDEAKHIIQGPMYDVSGAHPVNVTNKLLMSQLNALEKEMIVYKAPDEKHVITVFTDITCGYCHKLHEEMKDYNALGITVRYLAFPRQGWESQAEQDMKSIWCAKDKNKAFDDAMAGKGVKPASCDVNIADHYALGVQLGVSGTPAIVLSNGYVVPGYQGPKEMKAFLDEHQKQTSGK

SEQ ID NO: 73289 - protein, 298 aa, Salmonella paratyphi A
MEQDLARIEQFLDALWLERDLAENTLSAYRRDLSMVVAWLHHRGKTLATAQADDLQTLLAERVEGGYKATSSARLLSAMRRFFQHLYREKYREDDPSAQLASPKLPQRLPKDLSEVQVERLLQAPLIDQPLELRDKAMLEVLYATGLRVSELVGLTMSDISLRQGVVRVIGKGNKERLVPLGEEAVYWLETYLEHGRPWLLNGVSIDVLFPSQRAQQMTRQTFWHRIKHYAVLAGIDSEKLSPHVLRHAFATHLLNHGADLRVVQMLLGHSDLSTTQIYTHVATERLRQLHQQHHPRA

SEQ ID NO: 73290 - protein, 137 aa, Salmonella paratyphi A
MVLWQSDLRVSWRAQWISLLIHGLVAAVILLMPWPLSYTPLWMILLSLVVFDCVRSQRRINTCQGEIKLLMDGRLRWQGQDWTLLHPPWLLKSGMVLRLRAESGRHQHLWLAADSMEEAEWRELRRILLQQPISGQH

SEQ ID NO: 73291 - protein, 370 aa, Salmonella paratyphi A
MQIYMINFIMYCVALSGRKYMQRSLDSLAGMATSAFGAGTSAAMRQATSPKTILEYIINFFTCGGIRRRNETQYQELIETMAETLKSTMPDRGAPLPENIILDDMDGCRVEFNLPGENNEAGQVIVRVSKGDHSETREIPLVSFEKICRALLFRCEFSLPQDSVILTAQGGMNLKGAVLTGANLTAENLCDADLSGANLEGAVLFMADCEGANFKGANLSGTSLGDSNFKNACLEDGIMCGATLDHANLTGANLQHASLLGCSMIECNCSGANMDHTNLSGATLIRADMSGATLQGATIMAAIMEDAVLTRANLRKASFISTNLDGADLAEANLNNTCFKDCTLTHLRTEDATMSTSTQTLFNEFYSENI

SEQ ID NO: 73292 - protein, 132 aa, Salmonella paratyphi A
MQTQIKVRGYHLDVYQHVNNARYLEFLEEARWDGLENSDTLQWMTARNIAFVVVNININYRRPAVLSDLLTVTSQVQQLNGKSGVLSQTITLEPEGQVVADALITFVCIDLKTQKALPLEGELREKLEQMVQ

SEQ ID NO: 73293 - protein, 90 aa, Salmonella paratyphi A
MNKSQLIEKIAAGADISKAAAGRALDAIIASVTESLKEGDDVALVGFGTFAVKERAARTGRNPQTGKEITIAAAKVPSFRAGKALKDAVN

SEQ ID NO: 73294 - protein, 796 aa, Salmonella paratyphi A
SDYLADTKLRESSMNPERSERIEIPVLPLRDVVVYPHMVIPLFVGREKSIRCLEAAMDHDKKIMLVAQKEASTDEPGVNDLFTVGTVASILQMLKLPDGTVKVLVEGLQRARISALSDNGEHFSAKAEYLDSPAIDEREQEVLVRTAISQFEGYIKLNKKIPPEVLTSLNSIDDPARLADTIAAHMPLKLADKQSVLEMSDVNERLEYLMAMMESEIDLLQVEKRIRNRVKKQMEKSQREYYLNEQMKAIQKELGEMDDAPDENEALKRKIDAAKMPKEAKEKAEAELQKLKMMSPMSAEATVVRGYIDWMVQVPWNARSKVKKDLRQAQEILDTDHYGLERVKDRILEYLAVQSRVNKIKGPILCLVGPPGVGKTSLGQSIAKATGRKYVRMALGGVRDEAEIRGHRRTYIGSMPGKLIQKMAKVGVKNPLFLLDEIDKMSSDMRGDPASALLEVLDPEQNVAFSDHYLEVDYDLSDVMFVATSNSMNIPAPLLDRMEVIRLSGYTEDEKLNIAKRHLLPKQIERNALKKGELTVDDSAIIGIIRYYTREAGVRSLEREISKLCRKAVKQLLLDKSLKHIEINGDNLHDYLGVQRFDYGRADSENRVGQVTGLAWTEVGGDLLTIETACVPGKGKLTYTGSLGEVMQESIQAALTVVRRAEKLGINPDFYEKRDIHVHVPEGATPKDGPSAGIAMCTALVSCLTGNPVRADVAMTGEITLRGQVLPIGGLKEKLLAGHRGGIKTVLIPFENKRDLEEIPDNVIADLDIHPVKRIEEVLTLALQNEPSGMQVVTAK

SEQ ID NO: 73295 - protein, 420 aa, Salmonella paratyphi A
MTDKRKDGSGKLLYCSFCGKSQHEVRNRIAGPSVYICDECVDLCNDIIREEIKEVAPHRERSALPTPHEIRTHLDDYVIGQEQAKKVLAVAVYNHYKRLRNGDTSNGVELGKSNILLIGPTGSGKTLLAETLARLLDVPFTMADATTLTEAGYVGEDVENIIQKLLQKCDYDVQKAQRGIVYIDEIDKISRKSDNPSITRDVSGEGVQQALLKLIEGTVAAVPRRGGRKHPQQEFLQVDTSKILFICGGAFAGLDKVIANRVETGSGIGFGATVKAKSDKASEGELLSQVEPEDLIKFGLIPEFIGRLPVVATLNELSEEALIQILKEPKNALTKQYQALFNLEGVDLEFRDEALDAIARKAMARKTGARGLRSIVEAALLDTMYDLPSMEDVEKVVIDESVIAGQSKPLLIYGKPEAQA

SEQ ID NO: 73296 - protein, 429 aa, Salmonella paratyphi A
  MISC_FEATURE (129)..(129): X=any amino acid
  MISC_FEATURE (144)..(144): X=any amino acid
ALGGGLKSRHVTMLSIAGVIGASLFVGSSVAIAEAGPAVLLAYLFAGLLVVMIMRMLAEMAVATPDTGSFSTYADKAIGPWAGYTIGWLYWWFWVLVIPLEANIAAIILNSWIPGIPVWLFSLVLSLSXTGIKFLSVKNYGYFXFWLALCKVIAILAFSLGPTAISGFYPYAEVSGISRLWDPHGGFMPNGFGAVLSAMLITMFSFMGAEIVTMAAAESDTLDKHIVRATNSVIWRISIFYLCSIFVVVALIPWNMPGLKSVGSYRSVLELLHIPHAKFIMDCVILLSVTSCLNSALYTASRMLYSLSRRGDAPAIMGKTNRSKTPWVAVLLSTGAAFLTVIVNYYAPAKVFKFLIDSSGAIALLVYLVIAISQLRMRKILLAQGGEIKLKMWLYPWLTWLVIGFICFVLVVMLFRPAQQLEVISTGLL

SEQ ID NO: 73297 - protein, 99 aa, Salmonella paratyphi A
MTELEQLQASAEQAAALLKAMSHPKRLLILCMLCGSPKTSAGELARITGLSPSATSQHLARMREEGLIDSQRDAQRIHYFIKNEAVNTIIATLKNLYCP

SEQ ID NO: 73298 - protein, 149 aa, Salmonella paratyphi A
MGLFNFVKDAGEKLWDAVTANHDKDDQAKKVQEHLNKTGIPDTDKVNVQIADGKATVTGDGLSQEAKEKILVAVGNIAGISSVDDQVKTTTPAAESQFYTVKSGDTLSAISKQVYGNANLYNKIFEANKPMLKSPEKIYPGQVLRIPEE

SEQ ID NO: 73299 - protein, 327 aa, Salmonella paratyphi A
  MISC_FEATURE (258)..(258): X=any amino acid
SVPLRIMTLLRYIISYLQKVFYFPQSKFSRAFLHPRYWLTWFGVGVLWLLVQLPYPVLRFLGTRTGKLARPFLKRRESIAQKNIELCFPTLSREERGKLIAENFHSLGMALLETGMAGSWPDSRVRKWFDVDGLDNLTRAQAQNRGVMVVGVHFMSLELGGRVMGLCQPMMATYRPHNNPLMEWVQTRGRMRSNKAMIGRNNLRGIVGALKKGEAVWFAPDQDYGPKGSSFAPFFAVENVATTNGTYVLSRLSGAACXPVTMVRKTDNSGYRLYITPEMEGYPADENQAAAYMNKIIEKEIMRAPEQYLWIHRRFKTRPLGEASLYI

SEQ ID NO: 73300 - protein, 411 aa, Salmonella paratyphi A
MADSRPERRFTRIDRLPPYVFNITAELKMAARRRGEDIIDFSMGNPDGATPPHIVEKLCTVAQRPDTHGYSTSRGIPRLTRAISHWYQERYDVDIDPETEAIVTIGSKEGLAHLMLATLDHGDTVLVPNPSYPIHIYGAVIAGAQVRSVPLVEGVDFFNELERAIRESYPKPKMMILGFPSNPTAQCVELEFFEKVVALAKRYDVLVVHDLAYADIVYDGWKAPSIMQVPGARDVAVEFFTLSKSYNMAGWRIGFMVGNKTLVSGRRIKSYHDYGTFTPLQVAAIAALEGDQQCVRDIAEQYKRRRDVLVKGLHEAGWMVEMPKASMYVWAKIPEQYAAMGSLEFAKKLLNEAKVCVSPGIGFGDYGDTHVRFALIENRDRIRQAVRGIKAMFRADGVLPSHPKPVEASTE

SEQ ID NO: 73301 - protein, 417 aa, Salmonella paratyphi A
  MISC_FEATURE (149)..(149): X=any amino acid
MMNFRGNRMINNDPLFDLLNKEQQRQQHSLELIASENFASPAVLAAQGSVLTNKYAEGYYQHRYYGGCKFIDEVEMLAITRAQQLFGARYVNVQPHSGSQANQAVYLALLKPGDKILGMSLQCGGHLTHGSPVNQSGKWFNAFHYGVDXHSGLIDMDEVETIAKRGAPRLIIAGGSAYPRHYDFARFRRIADAVGAILLVDMAHFAGLVAGGCFPLAAAYADVITTTTHKTLRGPRGGMILANDARLAKKIDSAIFPGLQGGPLMHVIAAKAVALGEALQPEFKRYAGQVIENAQAMCQQLAQRGLTLLTGGTDCHLGIIDLRPQGLTGAQVEYFLELAGITVNKNTLPGDPQPPSITSGIRIGSAACATRGMNADDFTLIADWISEIIFAIKTPNITDICADIRQKVTKLTTNYPL

SEQ ID NO: 73302 - protein, 481 aa, Salmonella paratyphi A
  MISC_FEATURE (280)..(280): X=any amino acid
  MISC_FEATURE (281)..(281): X=any amino acid
VTIIYTNDLHAHVEPYKVPWIADGKRDIGGWANIATLVKQEKAKNKATWFFDAGDYFTGPYISSLTKGKAIIDILNTMQYDAATIGNHEFDHGWDNTLLQLSRAKFPIVQGNIFYEDSSKSFWDKPYTIVEKDGVKIGVIGLHGVFAFNDTVSAATRVGIEARDEIKWLQRYIDELKGKVDLTVALIHEGTPARQSSMGNTDVRRALDKDIQTASQVKGLDILITGHAHVGTPEPIKVGNTLILSTDSGGIDVGKLVLDYQGKAASVYREELRAEDHFCXXVEADLQTKQVIDGWNKKLDKVVQQTVAQSPVELTRAYGESSSLGNLAADALLFTAGKDTQLALTNSGGIRNEIPAGAVTMGAVISTFPFPNELVTMDLTGKQLRSLMEHGAGLSNGVLQVSKGLEMKYDSSKPVGQRVTVLTLNGKPIDDATVYHIATNSFLADGGDGFAAFTEGQARNTSGGYYVSNAIVDYFKAGNTI

SEQ ID NO: 73303 - protein, 418 aa, Salmonella paratyphi A
YFDQLDRVRYEGPQSTNPLAFRHYNPDELVLGKRMEDHLRFAACYWHTFCWNGADMFGVGAFNRPWQQPGEALELAKRKADVAFEFFHKLNVPFYCFHDVDVSPEGASLKEYKNNFAQMVDVLAAKQEQSGVKLLWGTANCFTNPRYGSAATNPDPEVFSCAATQVVTAMNATHKLGGENYVLWGGREGYETLLNTDLRQEREQIGRFMQMVVEHKHKMGFQGTLLIEPKPQEPTKHQYDYDVATVYGFLKQFGLEKEIKVNIEANHATLAGHSFHHEIATAIALGIFGSVDANRGDAQLGWDTDQFPISVEENALVMYEILKAGGFTTGGLNFDAKVRRQSTDKYDLFYGHIGAMDTMALSLKIAARMVEDGELGQQILKGQLSLGKLAQYAEQHHLAPVHQSGHQELLENLVNRYL

SEQ ID NO: 73304 - protein, 414 aa, Salmonella paratyphi A
MTFSLFGDKFTRHSGITRLMEDLNDGLRTPGAIMLGGGNPAHIPAMQDYFQTLLTDMVESKAADALCNYDGPQGKTALLNALAVLLRETLGWDIEPQNIALTNGSQSAFFYLFNLFAGRRAMGSTKKVLFPLAPEYIGYADSGLEDDLFVSARPNIELLPEGQFKYHVDFEHLHIGEETGMICVSRPTNPTGNVITDEELMKLDRLANQHNIPLVIDNAYGVPFPGIIFSEARPLWNPNIILCMSLSKLGLPGSRCGIIIANDKTISAIANMNGIISLAPGGMGPAMMCEMIKRNDLLRLSETVIKPFYYQRVQQTIAIIRRYLSEERCLIHKPEGAIFLWLWFKDLPITTELLYQRLKARGRAMVPGHYFFPGLDKPWPHTHQCMRMNYVPEPDKIEAGVKILAEEIERAWRE

SEQ ID NO: 73305 - protein, 300 aa, Salmonella paratyphi A
MANLYDLKKFDLNLLVIFECIYQHLSISKAAETLYITPSAVSQSLQRLRTQFNDPLFIRSGKGITPTVTGINLHYHLENNLNSLEQTINIMNQSSLKKKFIIYSPQMLITQYAMKLVKYIRKDPQVEIEHHDILTTDELPEDLLAYRKADVVVSMAPLNNRSIVCTHFNRLECILVCSENHPRLGDTATIDEILQESFTQLVSRATGMKEYHSLIDDVLGERIIGLRSKSVMTIANSISSTELIGFLPQTFVDYYSSSIKLKKVATPFTTAPIQFYLMYNRASLNNSGFAELIEHITKKR

SEQ ID NO: 73306 - protein, 187 aa, Salmonella paratyphi A
MSLINTKIKPFKNQAFKNGEFIEVTEKDTEGRWSVFFFYPADFTFVCPTELGDVADHYEELQKLGVDVYSVSTDTHFTHKAWHSSSETIAKIKYAMIGDPTGALTRNFDNMREDEGLADRATFVVDPQGIIQAIEVTAEGIGRDASDLLRKIKAAQYVAAHPGEVCPAKWKEGEATLAPSLDLVGKI

SEQ ID NO: 73307 - protein, 576 aa, Salmonella paratyphi A
  MISC_FEATURE (22)..(22): X=any amino acid
  MISC_FEATURE (44)..(44): X=any amino acid
  MISC_FEATURE (489)..(489): X=any amino acid
VNIQALLSEKVSQAMIAAGAPXDCEPQVRQSAKVQFGDYQANGXMAVAKKLGMAPRQLAEQVLTHLDLSGIAARVEIAGPGFINIFLEPAFLAEQVQQALTSDRLGVSQPTRQTIVVDYSAPNVAKEMHVGHLRSTIIGDAAVRTAGVLGHHVIRANHVGDWGTSSVCLIAWLEKQQQENAGDMALADLEGFYRDAKKHYDEDEAFAERARNYVVKLQSGDTYFREMWRKLVDITMTQNQITYDRLNVTLTRDDVMGESLYNPMLPGIVADLKAKGWRLKAEGATVVFLDEFKNKEGDPMGVIIQKKDGGYLYTTTDIACAKYRYETLHADRVLYYIDSRQHQHLMQAWTIVRKAGYVPDSVPLEHHMFGMMLGKDGKPFKTRTGGTVKLADLLDEALERARRLVAEKNPDMPADELEKLANAVGIGAVKYADLSKNRTTDYIFDWDNMLAFEGNTAPYMQYAYTRVLSVFRKADIDEQALASAPVYHXRRSEAARCPSAQFEETLTVVAREGTPHVMCAYLYDVAGLFSGFYEHCPILSAENDAVRNSRLKLAQLTAKTLKLGLDTLGIETVERM

SEQ ID NO: 73308 - protein, 105 aa, Salmonella paratyphi A
MAEWSGEYISPYAEHGKKSEQVKKITVSIPLKVLKILTDERTRRQVNNLRHATNSELLCEAFLHAFTGQPLPDDADLRKERSDEIPEAAKEIMREMGIDPETWEY

SEQ ID NO: 73309 - protein, 376 aa, Salmonella paratyphi A
TRKQATIAVRSGLNDDEQYGCVVPPIHLSSTYNFTGFNEPRAHDYSRRGNPTRDVVQRALAELEGGRGAVLTNTGMSAIHLVTTVFLKPGDLLVAPHDCYGGSYRLFDSLATRGCYCVRFVDQGDENAQAALEEKPKLVLCSKSSNPLLRVVDIAKICRLAREGGAVSVVDNTFLSPALQNPLALGADLVLHSCTKYLNGHSDVVAGVVIAKDPEVVTELAWWANNIGVTGGAFDSYLLLRGLRTLVPRMELAHATRGIVKYLQTQPLVKKLYHPSLPENQGHEIAARHEKGFGAMLSFELDGDEETLRRFLGGLSLFTLAESLGGVESLISHAATMTHAGMSPQRAAAGISETLLRISTGIEDGEDLIADLGNGF

SEQ ID NO: 73310 - protein, 394 aa, Salmonella paratyphi A
MTINPVSRKVAWLRVVTLAIAAFIFNTTEFVPVGLLSDIAESFHMQTAQVGIMLTIYAWVVAVMSLPFMLLTSQMERRKLLICLFVLFIASHVLSFLAWNFTVLVISRIGIAFAHAIFWSITASLAIRLAPAGKRAQALSLIATGTALAMVLGLPIGRVVGQYFGWRTTFFAIGMGALITLLCLIKLLPKLPSEHSGSLKSLPLLFRCPALMSLYVLTVVVVTAHYTAYSYIEPFVQNVAGLSANFATVLLLLLGGAGIIGSLVFGKLGNRHASSLVSIAIALLVVCLLLLLPAADSEAHLAILSIFWGIAIMVIGLGMQVKVLALAPDATDVEMALFSGIFNIGMGAGALVGNQVSLHWSMSAIGYIGAIPACAALVWAVLIFRKWPVTLEEQ

SEQ ID NO: 73311 - protein, 305 aa, Salmonella paratyphi A
MDLTQLEMFNAVALTGSITQAAAKVHRVPSNLTTRIRQLEADLGVSLFIRENQRLRLSPAGHNFLRYSQQILALVDEARMVVAGEEPQGLFSLGALESTAAVRIPALLAGYNQRYPKIQFALTTGPSGAMLDGVLEGKLNAAFIDGPLMHPGLEGIPAYQEEMMIVAPHGHSVVSRASEVNGYNIYAFRANCSYRRHFESWFHADGATPGTIHEMESYHGLLACVIAGAGIALMPASMLNSMPGHHQVEAWPLAEKWRWLNTWLMWRRGAMTRQLEAFIELLNAQLRAPTEDETACEVNEKQVTK

SEQ ID NO: 73312 - protein, 151 aa, Salmonella paratyphi A
MVAVVLPVNAVIVVSLQYAVGRRLTAVNIRPMMTTGTVFFIAGLIGFIFSGDNLFFWGLSAAVFTIGEIIYTPGEYMLIDNIAPAGMKASYFSAQSLGWLGAAVNPLASGVILTTLPAWSLFVVLIIAIVFAWALMLKGMRITPTQQAITC

SEQ ID NO: 73313 - protein, 221 aa, Salmonella paratyphi A
MMDLFKAIGLGLVVLLPLANPLTTVALFLGLAGNMNSAERNRQSYMASVYVFAIMMVAYYAGQLVMNTFGISIPGLRIAGGVIVAFIGFRMLFPQQKAHESPEAKSKSEELADEPTANIAFVPLAMPSTAGPGTIAMIISSASTVRHGGEFPDWVIMVAPPIIFLAVAVILWGCLRSSGAIMRLVGKGGIEAISRLMGFLLVCMGVQFIINGVLEIIKTYH

SEQ ID NO: 73314 - protein, 109 aa, Salmonella paratyphi A
MEGKSMKSKLLPCALLLATSFAWAAPATTGIDQYELKSFIADFTHFKPGDTVPQMYRTDEYNIKQWKLRNLPAPDAGTHWTYMGGAYVLINDTDGKIIKAYDGEIFYHR

SEQ ID NO: 73315 - protein, 573 aa, Salmonella paratyphi A
MTQVAKKILVTCALPYANGSIHLGHMLEHIQADVWVRYQRMRGHEVNFICADDAHGTPIMLKAQQLGITPEQMIGEMSQEHQTDFAGFNISYDNYHSTHSDENRELSELIYTRLKENGFIKNRTISQLYDPEKGMFLPDRFVKGTCPKCKSADQYGDNCEVCGATYSPTELIEPKSVVSGATPVMRDSEHFFFDLPSFSEMLQAWTRSGALQEQVANKMQEWFESGLQQWDISRDAPYFGFEIPNAPGKYFYVWLDAPIGYMGSFKNLCDKRGDTTSFDEYWKKDSDAELYHFIGKDIVYFHSLFWPAMLEGSHFRKPTNLFVHGYVTVNGAKMSKSRGTFIKASTWLKHFDADSLRYYYTAKLSSRIDDIDLNLEDFVQRVNADIVNKVVNLASRNAGFINKRFDGVLAAELADPQLYKTFTDAAAVIGEAWESREFGKAIREIMALADVANRYVDEQAPWVVAKQEGRDADLQAICSMGINLFRVLMTYLKPVLPTLSERVEAFLNSELNWDAIEQPLLGHKVNTFKALYNRIDMKQVEALVEASKEEVKAAAATGYRPVSRLPDSGNHHL

SEQ ID NO: 73316 - protein, 210 aa, Salmonella paratyphi A
KSMKIVEVKHPLVKHKLGLMRENDISTKRFRELASEVGSLLTYEATADLETEKVTIEGWNGPVEIDQIKGKKITVVPILRAGLGMMEGVLENVPSARISVVGMYRNEETLEPVPYFQKLVSNIDDRMALIVDPMLATGGSVIATIDLLKKAGCSSIKVLVLVAAPEGIAALEKAHPDVELYTASIDQGLNEHGYIIPGLGDAGDKIFGTK

SEQ ID NO: 73317 - protein, 732 aa, Salmonella paratyphi A
MKLNKTYINIRDKWWGLPLILPSILLPVLSSANTYALTSTGNVVLFYLPLAFMLSLMLFFGWAALPGIVLAIFWRRYPQTGLYETLSVTMHFIITIVLSWGGYRVFSPRRNNVSHGDAHLLFQRMFWQVFCSATLFLVIYQFAAFVGMYESKASLMGVMPFNINTLINYQALLVGNLVGVPLCYFIIRTLRNPLHLRGYYQQLKLQIDSKATKKENVIWLAVLTTLMFILCMPLTDNSSIFSTNYTLSLLLPVMLWGAMRYGYKFISIIWAVVLITSIHYYQRYMPWYSGYDTQLAITSSSYLVFSFIVNYMSVLATRQRVVSGRARRLAYLDPVVHLPNLRALNRALKNAPWSTICFLHVPGLELLGKNYGVMLRIQYKQKLSHWITPMLASNECVYQMSGHDLVLRLNTEAHQQRIEALDKHIKQFRFIWDGLPLQPPVGVSYCCVRSPVSHLYLLLGELSTSSDLSLTTNAPEDLQRRGAMHLQRDLKGRIAMMNRLQQALEHDHFFLMAQPIFGVRGDVYHEILLRLRDDNGDVINPDNFLPVAHEFGLSSAIDLWVIENTLRFMAASREYMPAHRFAINLSPTSVCRARFPAEVKQLVRQYQIEPWQLVFEVTESNSLTNAEQAQLTLGQLQQFGCQIAIDDFGTYASYARLKNVDADILKIDGSFIRNIVSNSLDYQIVASICHLARMKNMQVVAEYVESEEIRSVVLSLGIDYLQGYLIGEPQLL

SEQ ID NO: 73318 - protein, 1400 aa, Salmonella paratyphi A
  MISC_FEATURE (270)..(270): X=any amino acid
  MISC_FEATURE (404)..(404): X=any amino acid
SALVGLSSIMVSADALANAGNDTGSGVTVSGTTGSGWIAIGTDATANTYTNVDEAAAMGYHASAMGKWSTAIGSYSQSTGDSSLALGVKSTSAGDRAIAMGASSSASGSYSACMPNSSGAKSVALGYKSVASGATSSALGYQATASGDDSAAFGNGAKAVGTNSVALGSGSIAQEDNSVAVGNSTTQRQITYVAKGDINSTSTDAVTGAQIYSLSQSVADRLGGGASVNSDGTVNAPLYEVGTGIYNNVGSALSALNTSITNTEASVQDXPKTRCCGMTAPAPLASHTGNVSKITNLAAGTLAADSTDAVNGSQLFDTNEKVDRNTADIATNTDSINQNTADITANTDSINQNTTDIAANTTSINQNTTDIATNTTSINSLATPSPRSPTMPCYGMQPLGIQRXAQRKRQKLTNLAAGTLAADSTDAVNGSQLFDTNEKVDKNTADIATNTDSINQNTADITANTDSINQNTTDIAANTTSINQNTTDIATNTTNINSLSDSVTTLTDDALLWDAASGHSALSTTEAPAKSPNLAAGTLTADSTDAVNGSQLFDTNEKVDQNTADITTNTNSINQNTTDIATNTTNINNLSDSITTLTDDALLWDAASAAFSANHNGSDSKITNLSSDNLSWNETTSSFSASHGSSTTNKITNVAAGELSEESTDAVNGSQLFETNEKVDQNTTDIAANTTNITQNSTAIENLNTSVSDINTSITGLTDNALLWDEDTGAFSANHGGSTSKITNVAAGALSEDSTDAVNGSQLYETNQKVDQNTSAIADINTSITNLGTDALSWDDEEGAFSASHGTSGTNKITNVAAGEIASDSTDTVNGSQLYETNMLISQYNESISQLAGDTSETYITENGTGVKYIRTNDNGLEGQDAYATGNGATAVGYDAVASGAGSLALGQNSSSSIEGSIALSSGSTSNRAITTGIRETSATSDGVVIGYNTTDRELLGALSLGTDGESYRQITNVADGSEAQDAVTVRQLQNAIGAVTTTPTKYYHANSTEEDSLAVGTDSLAMGAKTIVNADAGIGIGLNTLVMADAINGIAIGSNARANHANSIAMGNGSQTTRGAQTDYTAYNMDTPQNSVGEFSVGSEDGQRQITNVAAGSADTDAVNVGQLKVTDAQVSRNTQSITNLNTQVSNLDTRVTNIENGIGDIVTTGSTKYFKTNTDGADANAQGVDSVAIGSGSIAAAENSVALGTNSVADEANTVSVGSSTQQRRITNVAAGVNNTDAVNVAQLKASEAGSVRYETNADGSVNYSVLNLGDGSGGTTRIGNVSAAVNDTDAVNYAQLKRSVEEANTYTDQKMGEMNSKIKGVENKMSGGIASAMAMAGLPQAYAPGANMTSIAGGTFNGESAVAISVSMVSESGGWVYKLQGTSNSQGDYSAAIGAGF

SEQ ID NO: 73319 - protein, 191 aa, Salmonella paratyphi A
AQVSLRPNNRLSDMQAIMEQTQAFENRVLERLNAGKTVRSFLITAVELLTEAVNILVLQVFRKDDYAVKYAVEPLLDGDGRLGDLSVRLKLIYGLGVLSRTEYEDAELLMALREELNHDGNEYAFTDDEILGPFGELHCVMALRHPPHFDTSDAALYAMQIQRYQQAVRSTMVLSLTELISKISLKKAFQK

SEQ ID NO: 73320 - protein, 382 aa, Salmonella paratyphi A
  MISC_FEATURE (131)..(131): X=any amino acid
MKALHFGAGNIGRGFIGKLPADAGIQLTFADVNQVVLDALNARHSYQVHVVGANEQVDYVSAVNAVSSIGDDVVDLIAHVDLITTAVGPVVLERIAPAIAKGLVKRKAQGVDAPLNIIACENMVRGTTQLXRHVMNALPEDAKAWVEEHVGFVDSAVDRIVPPSASATNDPLEVTVETFSEWIVDKTQFKGALPNIPGMELTDNLMAFVERKLFTLNTGHAITAYLGKLAGHQTIRDAILDESIRAVVKGAMEESGAVLIKRYGFDADKHAAYIQKILGRFENPYLKDDVERVGRQPLRKLSAGDRLIKPLLGTLEYGLPHVNLVKGIAAAMHFRSDEDPQAQELAALITEKGPQRRVAQISGLDANSDVVAEAVNAYNATK

SEQ ID NO: 73321 - protein, 168 aa, Salmonella paratyphi A
  MISC_FEATURE (78)..(78): X=any amino acid
  MISC_FEATURE (82)..(82): X=any amino acid
  MISC_FEATURE (153)..(153): X=any amino acid
MKLIGSYTSPFVRKISVLLLEKGITFEFINELPYEADNGVAQYNPLGKVPALVTEKGEYWFDSPIIAEYIELLDIAPXHPAXPDGSVKVRRLEALADGLMDQRLVSVREQRSGAQQSERTARTGKINRSWICSKYLATDVKRYVIWRFGCCAXLFNSPVGPWCVAPHW

SEQ ID NO: 73322 - protein, 320 aa, Salmonella paratyphi A
MDNFLALTLSGTTPRVTQGKGAGFRWRWLSHGLLELTPDAPVDRALILSAGIHGNETAPVEMLDKLLSALYSGSLTLTWRVLVVLGNPQALAAGIRYCHSDMNRMFGGRWQSFAESDETRRARELELSLETFFSSGQARVRWHLDLHTAIRGSHHLRFGVLAQRDRPWETGFLAWLGAAGLEALVFHQAPGGTFTHFSSEHFGALSCTLELGKALPFGQNDLTQFSVTSQALSALLSGVETSTCSSPGRYRVVSQITRHSDKFALYMDAQTLNFTAFAKGTLLAEEGDKRVTVTHDVEYVLFPNPSVAADLRAGLMLERL

SEQ ID NO: 73323 - protein, 158 aa, Salmonella paratyphi A
MRKLTALFVASTLAMGAANLAHAAETTTAAPVEAMMQHKGKFGPHHDMMFKNLNLTDAQKQQIRDIMKAHPEQMKRPPLEERRAMHDIIASDTFDKAKAEAQITKMEAAKANMLAHMETQNKIYNVLTPEQKKQYNANFEKRLTERPAQEGKMPAAAE

SEQ ID NO: 73324 - protein, 275 aa, Salmonella paratyphi A
MTLQQEIIQALGAKPHINPEEEIRRSVDFLKAYLKTYPFLKSLVLGISGGQDSTLAGKLSQMAIAELREETGDNALQFIAVRLPYGVQADEQDCQDAIAFIQPDRVLTVNIKGAVLASEQALREAGIELSDFVRGNEKARERMKAQYSIAGMTHGVVVGTDHAAEAITGFFTKYGDGGTDINPLHRLNKRQGKQLLAALGCPEHLYKKVPTADLEDDRPSLPDEAALGVTYDNIDDYLEGKTLDSAIAKTIEGWYVKTEHKRRLPITVFDDFWKR

SEQ ID NO: 73325 - protein, 452 aa, Salmonella paratyphi A
MSNVIASLEKVLLPFAVKIGKQPHVNAIKNGFIRLMPLTLAGAMFVLINNVFLSFGEGAFFYSMGIRLDASTIETLNGLKGIGGNVYNGTLGIMSLMAPFFIGMALAEERKVDALAAGLLSVAAFMTVTPYSVGEAYAVGANWLGGANIISGIIIGLVVAEMFTFIVRRNWVIKLPDSVPASVSRSFSALIPGFIILSIMGIIAWALSNYGSNFHQIIMDTISTPLASLGSVVGWAYVIFVPLLWFFGIHGSLALTALDSGIMTPWALENISIYQQYGSVDAALEAGKTFHIWAKPMLDSYIFLGGSGATLGLIIAIFLASRRADYRQVAKLALPSGIFQINEPILFGLPIIMNPVMFIPFILVQPILAAITLVAYYLGIIPPITNIAPWTMPTGLGAFFNTNGSVAALLVALFNLAVATLIYLPFVVVANKAQNAIEQEESEEDIANALKF

SEQ ID NO: 73326 - protein, 115 aa, Salmonella paratyphi A
MFDLENVVDNQTAAEELEEVVMGLIINSGQARSLAYGALRKAKEGDFEAAKAMMDQSRIALNEAHLVQTKLIEGDQGEGKMKVSLVLVHAQDHLMTSMLARELIAELIELHEKLK

SEQ ID NO: 73327 - protein, 481 aa, Salmonella paratyphi A
  MISC_FEATURE (283)..(283): X=any amino acid
  MISC_FEATURE (297)..(297): X=any amino acid
  MISC_FEATURE (314)..(314): X=any amino acid
  MISC_FEATURE (356)..(356): X=any amino acid
  MISC_FEATURE (358)..(358): X=any amino acid
  MISC_FEATURE (366)..(366): X=any amino acid
  MISC_FEATURE (372)..(372): X=any amino acid
  MISC_FEATURE (377)..(377): X=any amino acid
MSHSSAPERATGAVITEWRPEDPAFWQQRGHRVASRNLWISVPCLLLAFCVWMLFSAVAVNLPKVGFNFTTDQLFMLTALPSVSGALLRVPYSFMVPLFGGRRWTAFSTGILIVPCVWLGFALQDTSTPFSTFIIISLLCGFAGANFASSMANISFFFPKQKQGGALGLNGGLGNMGVSVMQLVAPLVVSLSIFAAFGSHGVEQPDGSQLYLANAAWIWVPFLAIFTLAAWFGMNELATSKASLKEQLPVLKRGHLWIMSLLYLATSGSFIGFSAGGGLMSVXKRTFPGMGQETWKXSVFFGSALIGGAGRFPXRAATNSGTPSGGGKLASSLNKHLARKGAYFTTGPVGPGKITXLXRPLRGGLXPPSKGXILGHXSRTAGLGSGSTFQMISVIFRKLTMDRVKAEGGSDERAMREAATDTAAALGFISAIGAIGGFFIPKAFGSSLALTGSPVGAMKVFLIFYIACVVITWAVYGRHSK

SEQ ID NO: 73328 - protein, 129 aa, Salmonella paratyphi A
MTIAMLLTLHLICVALSVSLFVARYWWRYCAHALAARRWTRIVPPVIDTLLLLSGIGLIVKTHILPFTESGSWLTEKLFGVIIYIVLGFIALDYRQARSQQARFIAFPLALVVLYIIIKLATTKIPLLG

SEQ ID NO: 73329 - protein, 282 aa, Salmonella paratyphi A
MKQKVVNIGDIKVANDLPFVLFGGMNVLESRDLAMRICEHYVTVTQKLGIPYVFKASFDKANRSSIHSYRGPGLEEGMKIFQELKQTFGVKVITDVHEASQVQPVADVVDVIQLPAFLARQTDLVEAMAKTGAVINVKKPQFVSPGQMGNIVDKFHEGGNDKVILCDRGANFGYDNLVVDMLGFSVMKKVSGNSPVIFDVTHALQCRDPFGAASGGRRGQVTELARAGMAVGLAGLFLESHPDPANAKCDGPSALPLAKLEQFLTQIKAIDDLVKSFDELDT

SEQ ID NO: 73330 - protein, 598 aa, Salmonella paratyphi A
MFKRCFSPLTLVNQLALIVMLSTAIGVAGMAVSGWLVQGVQGSAHAINKAGSLRMQSYRLLAAVPLDAKDQKLLDEMEQTAFSPELTRAAERDGQQKQLKALQDYWHNELSPGLQHAQKRHAVAEDVTRFVAGLDRLVTSFDHTTELRIERVVLVHRVMAIFMALLLVFTIIWLRVRLLQPWKQLLSMARAVSQRDFTQRANISGRNEMAALGSALNNMSEELAESYAVLEQRVQEKTAGLEHKNQILSFLWQANRRLHSQAPLCERLSPVLNGLQNLTQLHDIELRVYDLEDEDNHQEFTCQSDISCDDKGCHLCPRSALPMINGGTTLKWRLTDSHTQYGILLATLPYGRHLSHDQQQLVDTLVEQLTATLALDRHQERQQQLIVMEERATIARELHDSIAQSLSCMKMQVSCLQMQGDVLPESSRELLSQIRNELNCSWAQLRELLTTFRLQLTEPGLRPALEASCQEFSARFGFTVKLDYQLPPRLVPSHQAIHLLQIAREALSNALKHSHADDVVVTVTQCGKQVKLKVQDNGCGVPENAERSNHYGMIIMRDRAESLRGDCQVPRRETGGTEVTVTFIPETNFTETQGDTHE

SEQ ID NO: 73331 - protein, 326 aa, Salmonella paratyphi A
MELKNVVIYSPEKKPVGDAFLYFCSEDGKDFYDSLDKFTKKYKLCIDPDTGIVRSVAEDVSRLYPAGFTVVETDVLPDGFDIYGGWRFINGKVKPVPVDYQAKAEETRKKLLNDADNRIRDWRTELTLGTISDENKAVLILWMNYINTLKSLDISNVTTEAKYKAIKWRSTGCGVKRVWLLRIPWLRWIVPSFRRIRGFTVWGQQTDNGAYLSPVNAIHYLAERLAGTGGNTDVVIMMVTGQTHENFMKGLNSLVDVFPAPAFTQVRRLAESAATLATEKMQIPAKAGQDCRLPFRCPFRPAGQPYPLPLSVRRRKRLAPDSAWTG

SEQ ID NO: 73332 - protein, 312 aa, Salmonella paratyphi A
MKKHAIAVMMIAVFSESVYAESTLFIPDVSPESVTTSLSVGVLNGKSRELVYDTDTGRKLSQLDWKIKNVATLQGDLSWKPYSFMTLDARGWTSLASGSGHMVDHDWMSSEQPGWTDRSIHPDTSANYANEYDLNVKGWLLQGDNYKAGVTAGYQETRFSWTARGGSYIYDNGRYIGNFPHGVRGIGYSQRFEMPYIGLAGDYRINDFECNVLFKYSDWVNAHDNDEHYMRKLTFREKTENSRYYGASIDAGYYITSNAKIFAEFAYSKYEEGKGGTQIIDKTSGNTAYFGGDAAGIANNNYTVTAGLQYRF

SEQ ID NO: 73333 - protein, 200 aa, Salmonella paratyphi A
NYALTYRSEVKIDFKGNYSSDLPIAINQFNLPIPTATGGATQSGYLTLNLPEMWEVSGYNRVAPQWAIHYSLAYTSWSQFQELKAKSTAGDTLFEKHEGFKDAYRIALGTTYYYDDNWTFRTGIAFDDSPVPAQNRSISIPDQDRFWLSAGTTYAFNKDASVDVGVSYMHGQSVKINEGPYQFESEGKAWLFGTNFNYAF

SEQ ID NO: 73334 - protein, 213 aa, Salmonella paratyphi A
MYNFNFNVLDPYVVRPVAVAWRDYVPQPARNGLSNFTGNLEEPAIMVNYFLQGDPYQGMVHFTRFFLNTLLGMGGFIDVAGMANPKLQRVEPHRFGSTLGHYGVGYGPYMQLPFYVSFTLREDGGDMADTLYPVLSWLTWPMSIGKWTIEGIETRAQLLDSDGLLRQSSDPYIMVREAYFQRHDFIANGGKLKPQENPNAQAIQDELKEIDSE

SEQ ID NO: 73335 - protein, 640 aa, Salmonella paratyphi A
MEHLKYRPDIDGLRAIAVLSVVIFHYFPSLLPGGFVGVDIFFVISGYLITSIILKSASNKSFSYLDFYKRRVLRIFPALSIVLVSCLIVGWIYLFQDDYKLLGKHVFSGSFFISNFTLWSESGYFDSKSYLKPLLHLWSLGIEEQFYIIWPVVILLCFRSKNHNRNIVLSCATIFIISYAISIFTMASDGGANYYSPASRFWELMAGAIISTLRFIGITTSLSKLMSLLGIILIALSITMIDEKMSFPGYIAIIPVLGASLIIASNGNDLVVSKLLSVRPVVFFGLISYPLYLWHWPIYSFYRSIFAGSPDYHELTLLLLLSFFLAILTYYLIEKPLRNSRSKYITAILLTLSVFGTGLIGAFIFHINGVKDREINKSAGEYASVTDVYNYYKYGELLRGGICHSVQLTAAISNGCIKNGKHNIFIIGDSYAAALFNGLSHYIDNKGSDYIISQMTDGNAPPLFVDGKDDLQRSVITLNNNRINEIKRVQPEVVLLTWSVRGTNGVHDKKLAIDALSLTIKKIKEASPDSRIIFIGPVPEWNANLVKIISNYLSEFKKTPPLYMTYGLNSEISEWDSYFSNNVPKMGIEYISAYKALCNESGCLTRVGNGPDFITAVDWGHLTKPGSDFLFNKIGNKIIK

SEQ ID NO: 73336 - protein, 255 aa, Salmonella paratyphi A
LRILRRLQSPRHRLQDAIDNREINVHYQPIVSLSSGKIVGAEALARWQQADGTFLSPEIFIALAEQTGLTDPLTRLIIETVFEDMGSWLKSHPEQHISINLEASDLASETLPTLLSTLLNRSQISPSQIALELTEREFADPKTSAPIVARYRNAGHAIYIDDFGTGYSSLSYLQNLDVDVLKIDKSFVDALEYKNVTPHIIEMAKTLKLKMVAEGIETTRQEQWLRSHGVHYGQGWLYSKPLPATAFILWAEQRL

SEQ ID NO: 73337 - protein, 189 aa, Salmonella paratyphi A
  MISC_FEATURE (89)..(89): X=any amino acid
MKLVHIVSGLAVAISLAACADKSADIQTPAPNPNMSITANQSTIQQPNVSGTVWIRQKVALAPDAVLTVTLSDRSLADAPSKAVAKSRXRTEGKQAPFSFVLPFNPSDIQPNARILLSAAITVDNKLVFITDSVKPVINNGGTKADLTLVPVQQTAVSVQAGGGATTTVPSTSPTQVNPSSAVPAPTQY

SEQ ID NO: 73338 - protein, 474 aa, Salmonella paratyphi A
  MISC_FEATURE (390)..(390): X=any amino acid
TQTDWSGVPDLWSQLLGGLMLTLLLLRPMTLMGLDARVARNLGLALSLARLAALSLAIVLSALLVNAVGIIGFIGLFAPLLAKMLGARVCWRADAAPLIGALILWLSDQIILWLTRVWMEVSTGSVTALIGAPLLLWRPRLKSMSAPDMNASDRVAAERRHVLAFAVAGGALLLLATWVALSFGRDGTAWTWASGTVLEELMPWRWPRILAALMAGVMLSVAGCIIQRLTGNPMASPEVLGISSGAAFSVVLMLFLVPGNAFGWLLLPESLGAAATLLIIMIAAGRGLLAERMLLAGMALSTAFTMLLMMLQASGDPRMADVLTWISGSTYNATGGQVTRTAIVMVILLAIVPLCRRWLTILPLAAMARARWAMALTPSRIGCWPGSVVXRQTATMTIGPLSFVGLMAPHIARMLGFRRTMPHMVISALAGGVLLVFADWCGRMALFPYQIPAGLLSSFIGAPYFIYLLRKQSR

SEQ ID NO: 73339 - protein, 250 aa, Salmonella paratyphi A
MMPLKRYNLAAVLLLLLGGYGSAQAAIAPDRTRLVFRGEDKSISVDLKNANSKLPYLAQSWVEDEKGVKITSPLIVVPPVQRIEPSAIGQVKIQGMPALASLPKDRETLFYYNVREIPPQSDKPNTLQIALQTRIKVFYRPQALSKIDMQHPWQYKITLQRQGNGYQVSNTTGYYVVLSNASNRMDGTPARSFSPLVIAPKSNVTLGGDASELGRSPVLTYVNDYGARLPLIFNCTGNSCAVDEAKSRKS

SEQ ID NO: 73340 - protein, 830 aa, Salmonella paratyphi A
  MISC_FEATURE (243)..(243): X=any amino acid
SVVGIILTVGQGNSYAEALIQFNTRFLDVKDDASLDLSRFSRKGYIMPGSYNLQVLVNQSQIAQDNVITYSVDNNDPDNTYPCLPPELVSLLGLKPEIADKMIWINAGQCLQPDQLEGMETQTDLSQSTLTVIIPQAYLEYSDEEWDHPSRWDEGIPGVLFDYNVNSQCEHAEHDDGDEYTSAARHGGCQLGAWVCAADWQANYRHENDSEDRDNFRSSSEQNWDWRPLLRWGRLPETAGRTXTLGEGSLESDIFDGFNYVGRQPIHRDQMLPPNLRGYAPDISGRGAHQRQVTVTQRGRVIYESQVPAGPFRIQDINETVSGDLHVKIEEQSGQVQEYDVSTASIPFLTRPGQVRYKLAAGRPQDWDHNMEGGFFTSAEASWGIANGWSLYAVPSVSRIIQALALGLGRDLALLGAFSVDVTHSRATLPEGSYGDGTIQGNSFRATYAKDFDDIDSRLTFAGYRFSEENYMTMDEFIDTHNDDNDRQRTGHDKEMYTLTYSQNFSAINVNAYINYTHRTYWNQPNQDSYNLTLSHYFDVGEVRGISLSVNGFRNEYDDERDDGVYVSLSIPWGNDRTLSYNGSFSDDNNSNQVGYYERIDDRNNYQINAGRADNGATLDGYYRHQASYADIDVSANYQEGDYTSGGLNIQGGATLTAKGGALHRPSVNGGSRLLVDVGDEANVPISGYSTPVYTNVFGKAVIVDVNDYYRNQVKIDITQLPEDAEAILSVAQATLTEGAIGYRRMEVLSSKKAMASIRLRDGGTPPFGAEVYNSRQQQLGIVGEGGSVYLIGINPGERLQVTWEGKTQCEAALPIRCRAICLAGLLLPC

SEQ ID NO: 73341 - protein, 487 aa, Salmonella paratyphi A
  MISC_FEATURE (361)..(361): X=any amino acid
  MISC_FEATURE (481)..(481): X=any amino acid
KQGIEVNNNLCEHFAYSRQELFHLIRVEGIKTFEELLAKHGKGYGCEVCKPTVGSLLASCWNEYILKPQHTPLQDTNDNFLANIQKDGTYSVIPRSAGGEITPEGLVAVGRIAREFNLYTKITGSQRIGLFGAQKDDLPEIWRQLIEAGFETGHAYAKALRMAKTCVGSTWCRYGVGDSVGFGVELENRYKGIRTPHKMKFGVSGCTRECAEAQGKDVGIIATEKGWNLYVCGNGGMKPRHADLLAADLDRDTLIKYLDRFMMFYIRTADKLTRTAPWLDNLEGGIEYLKSVIIDDKLGLNEHLEEEMARLRAAVVCEWTETVNSPAAQVRFKHFINSDKRDPTVQVVPEREQHRPATAVXTHPGHSGGGKRMSQWQNICKIDDILPGTGVCALSGGEQVAIFRPYHSDQVFAISNIDPFFEASVLSRGLIAEHQGELWVASPLKKQRSRLSDGLCMEDEQFSVKHYDARVKDGVVQLRGXLFLGGA

SEQ ID NO: 73342 - protein, 457 aa, Salmonella paratyphi A
VDHLPIFCQLRDRDCLIVGGGDVAERKARLLLEAGARLTVNALNFIPQFTVWANEGMLTLVEGPFDETLLDSCWLAIAATDDDTVNQRVSDAAESRRIFCNVVDAPKAASFIMPSIIDRSPLMVAVSSGGTSPVLARLLREKLESLLPQHLGQVARYAGQLRARVKKQFATMGERRRFWEKFFVNDRLAQSLANADEKAVNATTERLFSEPLDHRGEVVLVGAGPGDAGLLTLKGLQQIQQADIVVYDRLVSDDIMNLVRRDADRVFVGKRAGYHCVPQEEINQILLREAQKGKRVVRLKGGDPFIFGRGGEELETLCHAGIPFSVVPGITAASGCPAYSGIPLTHRDYAQSVRLVTGHLKTGGELDWENLAAEKQTLVFYMGLNQAATIQEKLIAFGMQADMPVALVENGTSVKQRVVHGAVTQLGELAQQVESPALIIVGRVVALRDKLNWFSNH

SEQ ID NO: 73343 - protein, 426 aa, Salmonella paratyphi A
  MISC_FEATURE (73)..(73): X=any amino acid
  MISC_FEATURE (162)..(162): X=any amino acid
  MISC_FEATURE (163)..(163): X=any amino acid
  MISC_FEATURE (166)..(166): X=any amino acid
MQKKKLISIAIALTLQSYYIPAIAAENNDDEKECPSNIASLPKEKRAKLSPTCLATLPENDNHWGWIAGGVSXLVAGVAIGVENNGGGDSTHSYIPLTPDDGATLTPPTMAQCHAPDDGSDDNVTPPTIVGDDDVTPPMIAADDDVTPPDDSGDDDVPPPEXXLRXDVPPLDDSGDDDVTPPDDSGDDDVTPPDDSGDDDVTPPDDSGDDDVTPPDDSGDDDVTPPDDSGDDDVTPPDDSGDDDVTPPDDDDTPPDDSVITFSNGVTIDKGKDTLAFDSFKLDSGSVLEGAVWNYSEQNNQWQLTTLDGKTLNVTGWDVTDANAAVIEGTQENGLYWKYDSRGYLILADDKTTVISGDDQAHTSDRGMDISGQDRTGVIISGDRTVNTLTGGSSVTDGAIGMVITGDGTTNTISGHSTMDNATGAL

SEQ ID NO: 73344 - protein, 266 aa, Salmonella paratyphi A
  MISC_FEATURE (263)..(263): X=any amino acid
MTITDGGTGAHITGDNAVIDNAGDTTVSGTGSTALYIDGDNALIINEGNQTISGGAIGTRIDGNDARIANTGDIAVDGAGSAAAIINGDNSSLTQAGDLLVTGGAMGIITYGTGNEAKNTGNATVRDADSVGFVVAGEQNTFKNKGNINISLNGTGALVSGNASQATLDGDINVTATEDGDNVYRGATGLDMTGNNNTLNIIGSVTVNGDYDKDSVMAGSSDTLMGMSISGSNNAVDLSGTLNINVSDMSNRERTISEYRWPXCGR

SEQ ID NO: 73345 - protein, 842 aa, Salmonella paratyphi A
  MISC_FEATURE (670)..(670): X=any amino acid
NSGKITAYATTGTSSRNAIAAANGQGSTVNNEAEGTITLVSSLTPFSNTGAGNFPLIWYKNTLYAMLAEDYGEVSNDAGATIYLQGAGVYGVSASKGTALNAGDIYLDGFVPTLDDENNITDKTYWTPPKLYVTSAAMVAGTTDSGYGDATATNTGTINVNNAGFGMMALNGGTAINQGVINLTADAGVEGTDPNQLVGMAALNGGTVVNDTTGKINIYADYGKPFLTDGNSLIVNYGTVCFGDDCQDSDEYNPTNSDVSIPYTDGATLADTGTSTTLDNKAVVTGDVNNAGVVGGESITVLDSGTLTNNDSGVINSNTTVSGNLVNDGVINRYVTQNGGDIVNNGTIDSRSLTTNGVLTNGTDGTMTSGAKVTGANSAIINDGTFYLASATDAKNASMLEINDFAQFFNTGTLILDNNKNAIHLNANNGTLYNTGTMELTATSNKGAINYWGAGAAFINDGTVNATTAALAYAGGAQGSAPEKHAFFWNQSNGVINYDADNGRAVDFSAYNNYVAVNDGTMNISGNNAYGMYGGKNAQLVNNNTINLGTEGTTAHGMVAMGWIKNATADAVIENNGTINIYANNSYAFSWRVRGHVVNNGTVVIADGVTGSGIIKQGDSVNVEGTNGNNGNSDEAHYADYTLPGTPVEPGSNTTSGSAPGSSSGRPTTXNGYVVGTSADGSAGKLKVSNASMEGVGINTGFTRSTAITTVSFDNVVEGSNLTDASAIQSTSVVWNAQGSQDSDGNVDVTMTKNAYADVATDGSVSDVAQALDAATPTTSCYTSLNVGTTAELNSALKQVSGSQATTVFREARVLSNRFNMLADAAPQIKDGLAFNVVAKGD

SEQ ID NO: 73346 - protein, 213 aa, Salmonella paratyphi A
NINAGLFDYPVLMAADILLYQTNLVPVGEDQKQHLELSRDIPQSFNGLYGDIFKVPEPFIPKSGARVMSLLEPTKKMSKSDDNRNNVIGPAEDPKSVVKKIKRAVTDSDEPPVVRYDVKEKVGVSNLLDILSAVTGQSIPELEKQFEGKMYGHLKGEVAEAVSGMLSELQERYHRFRNDEAFLQKVMKDGAEKASARAAETLKAVYEAIGFVA

SEQ ID NO: 73347 - protein, 362 aa, Salmonella paratyphi A
  MISC_FEATURE (286)..(286): X=any amino acid
MAKLRVGIVFGGKSAEHEVSLQSAKNIVDAIDKTRFDVVLLGIDKAGQWHVNDAENYLQNADDPAHIALRPSAISLAQVPGKHQHQLINAQNGQPLPTVDVIFPIVHGTLGEDGSLQGMLRVANLPFVGSDVLSSAACMDKDVAKRLLRDAGLNIAPFITLTRTNRHAFSFAEVESRLGLPLFVKPANQGSSVGVSKVANEAQYQQAVALAFEFDHKVVVEQGIKGREIECAVLGNDNPQASTCGEIVLNSEFYAYDTKYIDDNGAQVVVPAQLPSGVNDKIRAIXAYQTLGCAGMARVDVFLTADNEAVINEINTLPGFTNISMYPKLWQASGLGYTDLISRLIELALERHAANNALKTTM

SEQ ID NO: 73348 - protein, 595 aa, Salmonella paratyphi A
SDNMYPDSLQGYPTVRGIARTAAKLTIRQNGYVIYQNYVSPGAFAITDLNPTSSSGDLEVTVDEKDGSQQRYTVPYSTVPLLQREGRVKYDLVAGDFRSGNSQQSSPFFFQGTVIAGLPAGLTAYGGTQLADRYRAVVVGAGQNLGDWGAVSVDVTHARSNLADDSTHQGKSLRFLYAKSLNNTGTNFQLLGYRYSTRGFYTLDDVAYRSMEGYDYEYDSDGRRHKVPVAQSYHNLRYSKKGRFQVNISQNLGDYGSLYLSGSQQNYWNTADTNTWYQLGYASGWQDISYSLSWSWNESVGISGADRILAFNMSAPFSVLTGRRYARDTILDRTYATFNANRNRDGDNSWQSGVGGTLLEGRNLSYSVTQGRSSTNGYSGSAALAWQATYGTLGVGYNYDRDQHDYNWQLSGGVVGHADGITFSQPLGDTNVLIKAPGAKGVRIENQTGVKTDWRGYAVMPYATVYRYNRVALDTNTMDNHTDVENNVSSVVPTEGALVRAAFDTRIGVRAIITARLGGRPLPFGAIVRETASGITSMVGDDGQIYLSGLPLKGELFIQWGEGKNARCIAPYALAENSLKQAITIVSATCIRPAS

SEQ ID NO: 73349 - protein, 102 aa, Salmonella paratyphi A
  MISC_FEATURE (82)..(82): X=any amino acid
IWMFPEGSVRGRRLLPFKTGAFHAVIAVWVPIIPVCVSNTSNKVNLNRLNNGLVIVEMLPPVDVSEYGKDQVRELAAHCVRXMEQKIAELDKEVAEVKRPGK

SEQ ID NO: 73350 - protein, 231 aa, Salmonella paratyphi A
  MISC_FEATURE (230)..(230): X=any amino acid
LFEVEFNDPRPVLDILNAIAHMPLPPYIDRPDEEPDRELYQTVYSEKPGAVARRTAGLHFDEPLLAALREKGVEMAFVTLHVGAGTFQPVRVDTIEDHIMHSEYAEVPQEVVDAVLAAKARGNRVIAVGTTSVRSLESAAQAAKSDLIEPFFGDTQIFIYPGYQYKVIDALITNFHLPESTLIMLVSAFAGYQHTMNAYKTAVEQKYRFFSYGDAMFITYNPRAISERPXE

SEQ ID NO: 73351 - protein, 179 aa, Salmonella paratyphi A
MTRRYLRILLVGSLLSLTACAPQSEVRQMHQSISTLNKEMTQLNQETVKITQQNKLNAESTRGVYLLPGANTPARLESQIGTLRMTLLEITPVADARHATLRIQGESRDPLPAFSATVEYGQIQGTTENYQEVNAQSLLVNAPTSLLAPSDVNISLPLKGITPAQLGFIRIHDIQPVNQ

SEQ ID NO: 73352 - protein, 374 aa, Salmonella paratyphi A
MKFELDTTDGRARRGRLVFDRGVVETPAFMPVGTYGTVKGMTPEEVEATGAQIILGNTFHLWLRPGQEIMKLHGDLHDFMQWKGPILTDSGGFQVFSLGDIRKITEQGVHFRNPINGDPIFLDPEKSMEIQYDLGSDIVMIFDECTPYPADWDYAKRSMEMSLRWATSRDRFDSLGNKNALFGIIQGSVYEDLRDISVKGLVEIGFDGYAVGGLAVGEPKADMHRILEHVCPQLPADKPRYLMGVGKPEDLVEGVRRGIDMFDCVMPTRNARNGHLFVTDGVVKIRNAKHKSDTSPLDAECDCYTCRNYSRAYLHHLDRCNEILGARLNTIHNLRYYQRLMAGLRKAIEEGKLESFVTEFYQRQGRPFPPLNVD

SEQ ID NO: 73353 - protein, 366 aa, Salmonella paratyphi A
MQDEFYMARALKLAQRGRFTTHPNPNVGCVIVNNGDIVGEGYHHRAGEPHAEVHALRMAGAKAKSATAYVTLEPCSHHGRTPPCCDALIAAGVARVVAAMQDPNPQVAGRGLYRLQQAGIAVSHGLMMSEAEALNKGFLKRMRTGFPYLQLKLGASVDGRTAMAARSQWITSPQARRDVQRLGAQSHAILTSSATVLADDPALTVRWAELDASTQASYPQENLRQPVRIVIDSQNRVTPAHRIVQQPGETWIARTQEDSRAWPDSVRTISVPAHNGHLDLVVLMMQLGRQQINSIWVEAGPGLAGALLQAGLVDELIVYVAPKLLGTQARGLCELPGLEKLADAPQFTFSEIRHVGPDVCLHMVSA

SEQ ID NO: 73354 - protein, 115 aa, Salmonella paratyphi A
MAIIPKNYARLESGYREKALKLFPWVCGRCSREFVYSNLRELTVHHIDHDHTNNPEDGSNWELLCLYCHDHEHSKYTEADQYGSTVIAGEDAQKDVGEATYNPFADLKAMMNKKK

SEQ ID NO: 73355 - protein, 97 aa, Salmonella paratyphi A
MFCVIYRSSKRDQTYLYVEKKDDFSQVPEALMKGFGQPQLAMMLPLDGRKKLVNAELEKVKQALSEQGYYLQLPPPPEDLLKQHLSSVGQNTSPADR

SEQ ID NO: 73356 - protein, 218 aa, Salmonella paratyphi A
MYQHRNWQGALLDYPVSKVVCVGSNYANHIKEMGSATPEEPVLFIKPETALCDIRQPLEIPADMGAVHHEVELAVLIGATLRQRTEDHVRKAIAVMGWRLDLTLRDIQGKMKKAGQPWEKAKGFDNACPISGFIPVAAFCGDPQNTVIGLNVNGEVRQQGSTADMIHPIVPLIAYMSRYFTLKAGDVVLTARAAVGPLLSGDELDIRFNGETLSTRVL

SEQ ID NO: 73357 - protein, 250 aa, Salmonella paratyphi A
MTEAQRHQILLDMLAQLGFVTVENVIERLGISPATRRDINKLDESGKLKKVRNAQEAITQQRPRWTPMNLHQAQNHDEKVRIAKAASQLVNPGESVVINCGSTAFLLGREMCGKPVQIITNYLPLANYLIDQEHDSVIIMGGQYNKSQSITLSPQGSENSLYAGHWMFTSGKGLTADGLYKTDMLTAMAEQKMLSVVGKLVALVDSSKIGERAGMLFSRADQIAMLITGKNANPQVLQQLEAQGVSILRV

SEQ ID NO: 73358 - protein, 429 aa, Salmonella paratyphi A
MKALNREVIDYFKEHVNPGFLEYRKSVTAGGDYGAVEWQAGSLNTLVDTQGQEFIDCLGGFGIFNVGHRNPVVVSAVQNQLAKQPLHSQELLDPLRAMLAKTLAALTPGKLKYSFFCNSGTESVEAALKLAKAYQSPRGKFTFIATSGAFHGKSLGALSATAKSTFRRPFMPLLPGFRHVPFGNIDAMSMAFSEGKKTGDEIAAVILEPIQGEGGVILPPQGYLTEVRKLCDEFGALMILDEVQTGMGRTGKMFACEHENVQPDILCLAKALGGGVMPIGATIATEEVFSVLFDNPFLHTTTFGGNPLACAAALATINVLLEQNLPAQAEQKGDTLLDSFRQLAREYPNLVHEARGKGMLMAIEFVDNETGYRFASEMFRQRVLVAGTLNNAKTIRIEPPLTLTIELCEQVLKSARNAMAAMQVSVEEV

SEQ ID NO: 73359 - protein, 546 aa, Salmonella paratyphi A
  MISC_FEATURE (368)..(368): X=any amino acid
MKNINPTQTSAWQALQKHYDEMKDVTIAELFANDSDRFAKFSATFDDLMLVDFSKNRITEETLAKLQDLAKETDLAGAIKSMFSGEKINRTEDRAVLHVALRNRSNTPIIVDGKDVMPEVNAVLEKMKTFSQAIISGQWKGYTGKAITDVVNIGIGGSDLGPFMVTEVLRPYKNHLTMHFVSNVDGTHIAEVLKKVNPETTLFLVASKTFTTQETMTNAHSARDWFLKTAGDEKHVAKHFAALSTNAKAVGEFGIDTANMFEFWDWVGGRYSLWSAIGLSIILSVGFDNFVELLSGAHAMDKHFSTTPAEKNLPILLALIGIWYNNFFGAETEAILPYDQYMHRFAAYFQQGNMESNGKYVDRNGNAXIYQTGPIIWGEPGTNGQHAFYQLIHQGTKMVPCDFIAPAITHNPLSDHHQKLLSNFFAQTEALAFGKSREVVEQEYRDQGKDPAQLEHVVPFKVFEATRPTNSILLREITPFSLGALIALYEHKIFTQGVILNIFTFDQWGVELGKQLANRILPELGDDKAISSHDSSTNGLINRYKA

SEQ ID NO: 73360 - protein, 283 aa, Salmonella paratyphi A
  MISC_FEATURE (38)..(38): X=any amino acid
  MISC_FEATURE (64)..(64): X=any amino acid
  MISC_FEATURE (66)..(66): X=any amino acid
GCEPWGDAKLKLDHLVKRCLTLAAGILSCPHFAHVTRXKERIRLSRTCHYMMGVFRLKVTVRRXPXNEQGEDVVIPGLFAVAKSPVYRVHGANRLGGNSLLDLVVFGARRGCIYRESIAEHGRVRDASESDVEGSLERLNRWNNNRNGEDPVAIRKALQECMQHNFSVFREGDAMAKGLEQLKVIRERLKNARLDDTSSEFNTQRVECLELDNLMETAYATAVSANFRTESRGAHSRFDFPERDDANWLCHTLYQPQTESMTRRSVNMEPKLRPAFPPKIRTY

SEQ ID NO: 73361 - protein, 936 aa, Salmonella paratyphi A
  MISC_FEATURE (4)..(4): X=any amino acid
KDAXGITMQNSALKAWLDSSYLSGSNQSWIEQLYEDFLTDPDSVDANWRLTFQQLPGTGVKPDQLHSKTREYFRRQALAGSRHSSTISDPDTNVKQVKVLQLINAYRFRGHQHANLDPLGLWKQERVADLDPSFHDLTEADFQETFNVGSFASGKETMKLGELLDALKQTYCGPIGAEYMHITSTEEKRWIQQRIESGRAAFSADEKKRFLNELTAAEGLERYLGAKFPGAKRFSLEGGDALIPMLKEMVRHAGNSGTREVVLGMAHRGRLNVLINVLGKKPQDLFDEFAGKHKEHLGTGDVKYHMGFSSDIETEGGLVHLALAFNPSHLEIVSPVVMGSVRARLDRLDEPSSNKVLPITIHGDAAVTGQGVVQETLNMSKARGYEVGGTVRIVINNQVGFTTSNPLDARSTPYCTDIGKMVQAPIFHVNADDPEAVAFVTRLALDFRNTFKRDVFIDLVCYRRHGHNEADEPSATQPLMYQKIKKHPTPRKIYADKLEADKVATLEDATEMVNLYRDALDAGECVVKEWRPMNMHSFTWSPYLNHEWDEAYPNKVEMKRLQELAKRISTVPEAIEMQSRVAKIYGDRQAMAAGEKLFDWGGAENLAYATLVDEGIPVRLSGEDSGRGTFFHRHAVIHNQTNGSTYTPLQHIHSGQGQFKVWDSVLSEEAVLAFEYGYATAEPRTLTIWEAQFGDFANGAQVVIDQFISSGEQKWGRMCGLVMLLPHGYEGQGPEHSSARLERYLQLCAEQNMQVCVPSTPAQAYHMLRRQARGMRRPLVVMSPKSLLRHPLAVSTLDELANGSFQPAIGEIDELDPKAVKRVVMCSGKVYYDLLEQRRKNSQKDVAIVRIEQLYPFPHKAVQEALQPHAHVHDFVWCQEEPLNQGAWYCSQHHFREVIPFGAALRYAGRPASASPAVGYMSVHQKQQQDLVNDAL

SEQ ID NO: 73362 - protein, 287 aa, Salmonella paratyphi A
VLINKDTRVICQGFTGSQGTFHSEQAIAYGTQMVGGVTPGKGGTTHLGLPCFNTVPKAVEATGRPHSVIYVPAPFCKDSILEAIDAGIKLIITITEGIPTLDMLTVKVKLDEAGVRMIGPNCPGVITPGECKIGIMPGHIHKPGKVGIVSRSGTLTYEAVKQTTDYGFGQSTCVGIGGELIPGSNFIDILKLFQEDPQTEAIVMIGEIGGSAEEEAAAYIKDHVTKPVVGYIAGVTAPKGKRMGHVAPSLAGGEGTADEKFAALEAAGVKTVRSLADNRRSAKAIIK

SEQ ID NO: 73363 - protein, 506 aa, Salmonella paratyphi A
  MISC_FEATURE (453)..(453): X=any amino acid
MLDIVELSRLQFALTAMYHFLFVPLTLGMAFLLAIMETVYVLSGKQIYKDMTKFWGKLFGINFALGVATGLTMEFQFGTNWSYYSHYVGDIFGAALAIEGLMAFFLESTFVGLFFFGWDRLSKVQHMCVTWLVALGSNLSALWILVANGWMQNPIAADFNFETMRMEMVSFSELVLNPVAQVKFVHTVASGYVTGAMFILGISAYYMLKGRDFAFAKRSFAIAASFGMAAVLSVIVLGDESGYEMGDVQKTKLAAIEAEWETQPAPASFTLFGIPDQDKQENHLAIQIPYALGIIATRSVDTPVIGLKDLMVQHEERIRNGMKAYELLEHVRAGSTDQAVRDQFNSMKKDLGYGLLLKRYTPNVTDATEAQIQQATKDSIPRVAPLYFAFRIMVACGFLLLAIIALSFWSVIRNRIGEKKWLLRAALYGIPLPWIAVEAGWFVAEYGRQPWAXRRVLPTAVANSSLTVGDLLFSMFLICGLYTLFLVAELFLMFKFARLGPSSLKT

SEQ ID NO: 73364 - protein, 387 aa, Salmonella paratyphi A
MTNSNRIKLTWISFLSYALTGALVIVTGMVMGNIADYFHLPVSSMSNTFTFLNAGILISIFLNAWLMEIVPLKTQLRFGFILMVLAVAGLMFSHSLALFSAAMFVLGLVSGITMSIGTFLITQLYEGRQRRSRLLFTDSFFSMAGMIFPMVAAFLLARSIEWYWVYACIGLVYLAIFILTFGCEFPALGKHAQHSQAPVVKEKWGIGVLFLAVAALCYILGQLGFISWVPEYAKGLGMSLNDAGALVSDFWMSYMFGMWAFSFILRFFDLQRILTVLAGMAAVLMYLFITGTQAHMPWFILTLGFFSSAIYTSIITLGSQQTKVASPKLVNFILTCGTIGTMLTFVVTGPIVAHSGPQAALLTANGLYAVVFVMCFALGFVSRHRQH

SEQ ID NO: 73365 - protein, 199 aa, Salmonella paratyphi A
MSDKFGEGRDPYLYPGLNVMRNRLGIHQAQRLAQAAYEMTALRATIELGPLVRGLPHLCAIHRQLYQDIFDWAGQLREVDIYQGDTRFCHFAYIEKEGNALMQDLEEEGYLVGLAHEKFVERLAHYYCEINVLHPFRLGSGLAQRIFFEQLALHAGYALSWQGIAVDTWNQANQSGAMGDLSALQAIFQKAISEARETE

SEQ ID NO: 73366 - protein, 693 aa, Salmonella paratyphi A
  MISC_FEATURE (114)..(114): X=any amino acid
  MISC_FEATURE (165)..(165): X=any amino acid
MWRRLIYHPEINYALRQTLVLCLPVRVGLLIGQLHLGLLFSLVPACCNIAGLDTPHKRFFKRLIIGASLFAGCSLVTQLLLAESIPLPLILTGLTLVLGVTAEISPLHARLLQXSLIAAIFTLSLAEIMPVWSRLSFMALGTLWYGVFNWFWFWLWREQRCAVHXVCLYRELADYCEAKYSLLTQHIDPEKALPPLLIRQQKAVDLITQCTNRMHMLSAHNNNDYKRLLRAFQEAMDLQEHISVSLHQPEEVQKLVERSHAEEVIRWNAQTVAARLRVLADDILYHRLPTRFSMEKQIGALEKIANQHPENPVGQFCYWHFSRIARVLRTQRPLYARDLMADKQRRLPLLPALKNYMSLKSPALRNAGRISVMMSIASLMGSALHLPKPYWILMTVLFVTQNGYGDARTYSHRSVGTLVGLVIAGVTLHLHIPESITLAVMLVLTLASYLIIRKNYGWATVGFTVTAVYTIQLLTLNGEQFIVPRLIDTLIGCLIAFGGMVWLWPQWQSGLLRKNAHDALEADQEAIRLILSNDPQATPLAYQRMRVNQAHNTLFNSLNQAMQEPGFNTHYLSDMKLWVTHSQFIVEHINAMTTLAREHTMLTPDLAQRYLESCEIAIQRCQQRLEYDRPGGSGDVNILESPDMPSHGLLSTLEQHLQRIIGHLNTMHTISSMAWRQRPHHGIWLSKRLRDTK

SEQ ID NO: 73367 - protein, 588 aa, Salmonella paratyphi A
  MISC_FEATURE (584)..(584): X=any amino acid
  MISC_FEATURE (585)..(585): X=any amino acid
MTIAITDVVLRDAHQSLFATRLRLDDMLPIAAALDDVGYGSLECWGGATFDACIRFLGEDPWVRLRELKKAMPKTPLQMLLRGQNCLGYRHYADDVVERFVERAVKNGMDVFRVFDAMNDPRNMKAALQTCATTRRDAQGTLSYTTSPAHTLQTWLDLTEQLLETGVDSIAIKDMSGILTPMAAFELVSEIKKRFEVRLHLHCHATTGMAEMALLKAIEAGVDGVDTAISSMSATYGHPAPKRWVATLAGTEHDTGLDILKLESIAAYFREVRKKYHAFEGQLKGYDSRILVAQVPGGMLTNLESQLKQQNAADKLDQVLAEIPRVREDLGFIPLVTPTSQIVGTQAVLNVLTGERYKTIAKETAGILKGEYGHTPVPVNAALQARVLEGGAPVTCRPADLLKPELAELEADVRRQAQEKGITLAGNAIDDVLTVALFPQIGLKFLENRHNPAAFEPLPQAEARSRWQKAEKPAASGIYTVEVEGKAFVVKVSDGGDISQLTAAVPASAPRAAAPQARHPGSPRRLAGNIWKVIATEGQTVAEGDVLLILEAMKMETEIRAAQAGTVRGIAVKSGDASPSAPPXXTLA

SEQ ID NO: 73368 - protein, 429 aa, Salmonella paratyphi A
MDKTAALASDILRGIGGEQNILRLENCMTRVRVEVQDDSQLDIPRLKALPGVSGYVKQGEQHQLIVGPGKAAQVVDAMRVQIAAGGVKPDDAMVRTKSEAKAKYKAPMSDALRKLANVFIPLIPAFIASGLITGIINILKRPDIVGDVAVHYPNLLGLMGIFGSAVFAIMNILVGVNTAKVFGGSQALGGVMAGILSSPQLAQITLFGEVLQPGRGGVIAVLLVVALMCWIERQFRKLLPGSLELILNPLLTTVITGAVAIVALQPLGGWISDAIAHGASWAIDRGGFLVGAVLAGTFLALVLTGLHQGLVPIHVELVQAHGYNALFPILAMAGVGQIRRAIAVLMKTRNARLKKVIKGALLVGLLGIGEPLIFGSRLPLGKPFIGLLAGAVGGALISYWKVATVITFGISGSAGINNCCGKVLFYLLG

SEQ ID NO: 73369 - protein, 301 aa, Salmonella paratyphi A
MSTDKTYCGFIAIVGRPNVGKSTLLNKLLGQKISITSRKAQTTRHRIVGIHTEGPYQAIYVDTPGLHMEEKRAINRLMNKAASSSIGDVELVIFVVEGTRWTPDDEMVLNKLRDGKAPVILAVNKVDNVQEKADLLPHLQFLASQMNFLDIVPISAETGMNVDTIAGIVRKHLPEAIHHFPEDYITDRSQRFMASEIIREKLMRFLGAELPYSVTVEIERFVTNERGGYDINGLILVEREGQKKMVIGNKGAKIKTIGIEARKDMQEMFEAPVHLELWVKVKSGWADDERALRSLGYVDDL

SEQ ID NO: 73370 - protein, 294 aa, Salmonella paratyphi A
MNLGTLVSETRNPQTMDLDALPTPELVKRFNEQDTLVAKAVKATLPDVARAVDAAAALKSGGRIIYMGAGTSGRLGVLDASECPPTFGVPHGLVVGLIAGGPGALLKAVEGAEDSQQAGEDDLVALNLQEQDLVVGLAASGRTPYVIGGLRYARQSGCTTVAVSCNPDSPIAREANIAISPVVGPEALTGSTRLKSGTAQKMVLNMISTGAMVKFGKVYQNLMVDMKATNVKLVDRACRMVVEATGIGREEAEALLKQTDFEVKPAILMALTGLDAAAAREKLAAHQGFLRAAL

SEQ ID NO: 73371 - protein, 304 aa, Salmonella paratyphi A
RIFLQASEISFCRRHHVSQELPMNCLIRIRQRYPDLAQSHRKLADYLLAQPDTARHLSSQQLAAEAGVTNSSVVKFAQKLGFKGFPALKLAISDVWPSNPNPHSVPVHNQIRGDDPMRLVGEKLIKENVAAMHATSGRNSEEKLLESVTMMRHARRIVITGIGASGLVAQNFAWKLLKIGINAVVERDMHALLATVQALAPEDLLLAISYSGERRELNLAADETLRAGAKILAITGFSPNALQQRATHCLYTIAEEQATRSAAISSTHAQMMLTDLLFMALVQQDLERAPERIRHSEALVKKLV

SEQ ID NO: 73372 - protein, 86 aa, Salmonella paratyphi A
MALLITKKCINCDMCEPECPNEAISMGDNIYEINSDKCTECVGHYETPTCQKVCPIPNTILQDPAHVETEEQLWDKFVLMHHADKL

SEQ ID NO: 73373 - protein, 126 aa, Salmonella paratyphi A
MAILGLGTDIVEIARIEAVISRSGERLARRVLSDNEWAIWETHQQPVRFLAKRFAVKEAAAKAFGTGIRNGLAFNQFEVFNDELGKPRLRLWGEALTLAEKLGVAHMHVTLADERHYACATVILES

SEQ ID NO: 73374 - protein, 342 aa, Salmonella paratyphi A
MTHSLKPWNTFGIDHCAKHIVCAENEQQLLSAWQQATREGLPVMILGEGSNVLFLENYAGTVILNRLKGIEVNETADAWHLHVGAGENWHQLVRYGWDNNMPGLENLALIPGCVGSSPIQNIGAYGVELQCVCDYVDCVELETGKRLRLSAAECRFGYRDSIFKNEYQDRVAIVAVGLRLSKQWQPVLTYGDLTCLDPKTVTAQQVFDAVCHMRTTKLPDPKVNGNAGSFFKIPVVAADIAMELLERFPNAPHYPQADGSVKLAAGWLIDQCQLKGVTIGGAAVHSPTSLVLINANDATSKDVVALAHHVRQKVGEKFNVWLELEVRFIGQFGEVNAVESIA

SEQ ID NO: 73375 - protein, 246 aa, Salmonella paratyphi A
MSNWPYPHIVAHRGGGKLAPENTLAAIDVGARYGHTMIEFDAKLSKDGEIFLLHDDNLERTSNGWGVAGELNWQDLLRVDAGGWFSGEFKGEPLPLLSQVAERCRKHGMMANIEIKPTTGSGRLTGRVVALAARELWAGMTPPLLSSFEIEALEAAQAAVPELPRGLLLDKWREDWRELTTRLGCVSLHLNHKLLDETRVQEIKAAGLRILVYTVNQPQRAAELLRWGVDCICTDRIDDIGPHFQF

SEQ ID NO: 73376 - protein, 578 aa, Salmonella paratyphi A
  MISC_FEATURE (188)..(188): X=any amino acid
  MISC_FEATURE (204)..(204): X=any amino acid
  MISC_FEATURE (214)..(214): X=any amino acid
  MISC_FEATURE (231)..(231): X=any amino acid
  MISC_FEATURE (404)..(404): X=any amino acid
  MISC_FEATURE (408)..(408): X=any amino acid
  MISC_FEATURE (529)..(529): X=any amino acid
  MISC_FEATURE (530)..(530): X=any amino acid
  MISC_FEATURE (571)..(571): X=any amino acid
  MISC_FEATURE (574)..(574): X=any amino acid
MKPTFMRWVAIAALLAGGTFSAVANPPVAPPVSYGVEEDVFHPVRATQGMVASVDAMATQVGVDILKQGGNAVDAAVAVGYALAVTHPQAGNLGGGGFMLLRTKDGATTAIDFREMAPAHRDMFLDDQGNADAKKSLTSHLASGTPGTVAGFSLALEKYGTMPLNKVVRPAIQLAEEGFVVTMRLADXLKTYGSEVIPNHENSXAFFWKDGERXKKGDKLVQKNLAKSWKXLAENGPAAFYKGAIATRLPGEMQKNGGLMTKEDLASYKAVERTPISGDYRGYQVFSMPPPSSGDIHIVQILNILENFDMKKYGFGSAMPCKSWAEAEKYAYADRSEYLGDPDFVKVPWQALTNKAYAKTLADQIDINKAKPSSQIKPGKLAPYESNQTTHFSVVDKDGNAWRXPIPXNTTFGTGIVAGNTGILLNNQMDDFSAKPGVPNVYGLVGGDANAVEPKKRPLSSMSPTIVVKDGKTWLVTGSPGGSRIITTVLQMVVNSIDFGMNVAEATNAPRFHHQWLPDELRVEKGFSXXTIKLLEQKGQKVALKEAMGSTQSIMVGPDGHCMARPTAFPXMTXRRGY

SEQ ID NO: 73377 - protein, 342 aa, Salmonella paratyphi A
GGVRMKGFLQTVTGPVAHTDMGLTLPHEHLFNDLSSVVDEPHYAFSQQLVGKKVSADLQWGLKHDPYCCADNMDRKEIDDVIFEINNFMSLGGRTIVDATGSESIGRDAQALREVALKTGLNIVASSGPYLEKFESTRIHKPVELLASLIDKELNQGIGETDIRAGMIGEIGVSPAFTQTERNSLRAASLAQCNNPHTAMNIHMPGWLRLGDEVLDIVLEEMNVSPAKVSLAHSDPSGKDVAYQRKMLDRGVWLEFDMIGLDITFPKEGVAPGVQETADAVANLIALGYADQIVLSHDVFLKQMWAKNGGNGWGFVPKCLLAYLAARGVDNDTLSSSVLIQP

SEQ ID NO: 73378 - protein, 320 aa, Salmonella paratyphi A
LIWITFNDSAFYLLKIIMIVRPQQHWIRLIFVWHGSVLSKIFSRLLLNFLLSIAVIIMLPWYTMLGIKFTLAPFSILGVYAIFLGFRNNACYARYVEARHLWGQLMTRFRSILREVKTTLPDERGIEDFVRLQIAFAHCLRMTLRRQPQTQVLGNYLDQEALQKVVASHSPANRILLLMGEWLAIRAAAGKLSDILFHSLNNRLNDMSSVLAGCERIANTPVPFAYTLILHRTVYLFCIMLPFALVVDLHYMTPFISVLISYTFIALDALAEELEDPFGTENNDLPLDAICNAIEIDLLQMNDERDIPAKRIPDKRYQLT

SEQ ID NO: 73379 - protein, 545 aa, Salmonella paratyphi A
EPKKGEAKVQKVKNWSPVWIFPIVTALIGAWILFYHYSHQGPEVTLITTNAEGIEGGKTTIKSRSVDVGVVESATLTDDLTHVQIKARLHSGMEKLLHKDSVFWVVKPQVGREGISGLGTLLSGAYIELQPGSKGSQPESYQLLDSPPLAPPDAKGIRVILDSKKAGQLSPGDPVLFRGYRVGSVETSSFDPQKRTMSYQLFIKAPNDRLVTSNVRFWKDSGIAVDLTSAGMRVEMGSLTTLFGGGVSFDVPEGLEQGQPSAEKTAFNLYDDQKSIQDSLYTDHIDYLMFFKDSVRGLQPGAPLEFRGIRLGTVSKVPSLASKMRQVFNDDYRIPVLVRIEPERLKAQLGENADVGAHLTELLTGGFISRLKTGNLVTGALYVDLDFYPKEPPITGLREFDGYEIIPTVSSGLAQIQQRLVETLDKINNLPLNPMIEQATNTLSESQRTMRRLQTTLDNMNKIISSQSMQQLPADMQTTLRELNRSMQGFQPGSAAYNKMVADMQRLDQVLRELQPVLKTLNEKSNALVFEAKDKKDPEPKRAKQ

SEQ ID NO: 73380 - protein, 583 aa, Salmonella paratyphi A
TLTITKLAWRDLVPDSESYQEIFAQPHATDENDTLLSDTQPRLQFALEQLIQPWASSSFMLTKAPEEQEYLTLLSDAVRALQTDAGQLTGGHYDVSGHTVHYRAAQNAQDNFATVTQVVSADWVEAEQLFGCLRQYNGDITLQPGLVHQANGGVLIISLRTLLAQPLLWMRLKAIVSPERFDWVAFDESRPLPVSVPSMPLKLKVILVGERESLADFQEMEPELAEQAIYSEFEDNLQIADAEAMTLWCQWVTRILYAIILPPPAPDAWPVLIREAVRYTGEQDTLPLCPLWIARQFKERRLYAKAIPWRAEALSLMLARREWREGFLAERMQDEILQEQILIETEGERVGQINALSVIEFPGHPSPLANRSRISCVVHIGDGEFNDIERKAELGGNIHAKGMMIMQAFLMSELQLEQQIPFSASLTFEQSYSEVDAIALNGGNSQLISALANVPVNQNIAITGSVDQFGRAQPVGGLNEKIEGFFAICEQRELNGKQGVIIPAANVRHLSLKSELLQAVKEEKFTIWAVDDVTDALPLLLNLVWDGEGQTTLMQTIQERIAQATQQEGRHRFPWPLRWLNAF

SEQ ID NO: 73381 - protein, 669 aa, Salmonella paratyphi A
  MISC_FEATURE (337)..(337): X=any amino acid
  MISC_FEATURE (341)..(341): X=any amino acid
LTTIAAISLLLDKKDCMRQQPHYLELLSPARDAAIAREAILHGADAVYIGGPGFGARHNASNSLRDIADLVPFAHRYGARIFVTLNTILHDDELGSPQRLITDLYDTGVDALIVQDMGILELDIPPIELHASTQCDIRSVEKAKFLADVGFSQIVLACELNLSQIAAIHQATDATIEFFIHGALCVAYSGQCYISHAQTGASANRGDCSQACRLPYTLKDDQGRVVSYEKHLLSMKDNDQTANLGALIDAGVRSFKIEGRYKDMSYVKNITAHYRQMLDAIIEQRGDLARASVGRTEHFFVPSTEKTFHRGTPTYFVNARKGDIGAFDSPKFIGLRXVRCXNVAKDYLDVEATEPLVLAMVLNVLIKREVVGFRANTVEKTGHNRYRVWPNDMPADLHKVRPHHPLNRNLDHNWQQALTKTSSERRVAVDIMLGGWQEQLILTLTSEDGVCITHTLDGVFEEANNSEKALNNLKAGLAKLGQTPYYARDMQVTLPAALFVPNSLLNQFRREAIDMLDAARLAHYQRGRRKPVAQLRRSIRQTHLSFLANVYNHKAREFYHRYGVQLIDAAYEAHQEKGEVPVMITKHCLRFAFNLCPKQAKGNIKSWKATPMQLVHGDEVLTLKFDCRPCEMHVIGKIKNHILKMPQPGSVVASVSPEALMKTLPKRRG

SEQ ID NO: 73382 - protein, 328 aa, Salmonella paratyphi A
QSDRVLNLAAGYFGIVLGTIGMGFAWRYASQIWAISHWPGDIMVILAMIIWALLTLAFLSRLARFPHSVMAEVRHPVMSSFVSLFPATTMLVAIGFVPWYRPLAVALFSVGSVIQLRMRPGRRAGLCAERIPEEATTPGLYLPTVANNFISAMACGALGYNDAGLVFLGAGVFSWLSLEPVILQRLRSCGELPAVLRTSLGIQLAPALVACSAWLSVNGGEGDTLAKMLFGYGLLQLLFMLRLMPWYLSQPFNASFWSFSFGVSALATTGLHLGHGSESGLFHILAVPLFIFTNAIIALLLVRTFLLLVQGTLLIRTERAALLKTEEK

SEQ ID NO: 73383 - protein, 102 aa, Salmonella paratyphi A
MVKCVSSFLLFSLLSVQAISAENHIDLHQPKDFVDITTVAPDVQVDMRYFSSHNFIGRPIKGYNAPVCLLTRPAPQRSKAGSPDRYAPFGTYLKIYDCYRPQ

SEQ ID NO: 73384 - protein, 213 aa, Salmonella paratyphi A
  MISC_FEATURE (150)..(150): X=any amino acid
MQLNSTEISELIKQRIAQFNVVSEAHNEGTIVSVSDGVIRIHGLADCMQGEMISLPGNRYAIALNLERDSVGAVVMGPYADLAEGMKVKCTGRILEVPVGRGLLGRVVNTLGAPIDGKGPVDNDGFSAVEAIAPGVIDRQSVDQPVQTGXKAVDSMIPIGRGQRELIIGDRQTGKTALAIDAIINQRDSGIKCIYVAIGQKASTISNVVRKLE

SEQ ID NO: 73385 - protein, 177 aa, Salmonella paratyphi A
MSEFVTVARPYAKAAFDFAVEHQSVERWQDMTAFAAEVTKNEQMAELLAAALAPETLAESFIAVCGEQLDENGQNLIRVMAENNRLNALPDVLEQFIHLRAASEATSEVEVTSATALSEEQLSKISAAMEKRLSRKVKLNCKIDKSVMAGVIIRAGDMVIDGSVRGRLERLADVLQS

SEQ ID NO: 73386 - protein, 156 aa, Salmonella paratyphi A
VNLNATILGQAIAFILFVWFCMKYVWPPLMAAIEKRQKEIADGLASAERAHKDLDLAKASATDQLKKAKAEAQVIIEQANKRRAQILDEAKTEAEQERTKIVAQAQAEIEAEGKRAREELRKQVAILAVRGAEKIIERSVDEAANSDIVDKLVAEL

SEQ ID NO: 73387 - protein, 609 aa, Salmonella paratyphi A
  MISC_FEATURE (344)..(344): X=any amino acid
  MISC_FEATURE (356)..(356): X=any amino acid
  MISC_FEATURE (358)..(358): X=any amino acid
  MISC_FEATURE (379)..(379): X=any amino acid
ITLAAIGVVYGDIGTSPLYTLRECLSGQFGFGVERDAVFGFLSLIFWLLIFVVSIKYLTFVMRADNAGEGGILTLMSLAGRNTSARTTSMLVIMGLIGGSFFYGEVVITPAISVMSAIEGLEIVAPQLDTWIVPLSIIVLTLLFMIQKHGTGMVGKLFAPIMLTWFLTLAVLGLRSIIANPEVLHALNPVWAVRFFLEYKTVSFIALGAVVLSITGVEALYADMGHFGKFPIRLAWFTVVLPSLVLNYFGQGALLLKHPEAIKNPFFLLAPDWALIPLLILARCDGDASQAVISGVLLTRQAVRLGYLIPMRIIHTSEMESGQIYIPFVNWLLYFAVVVVIVSXEHYSNWAAAYGXIXTGTMVLTSILSTTVARKNWHXNKYLLALILIAFLCVDIPLFSANLDKLLSGGCVPLSLGLIMFTIMTTWKSERFRLLRRMHEHGNSLEAMIRRLEKSPPVRVPGTAVYMSRALSVIPFALLHNLKHNKVLHERVILLTLRTEDAPYVHNVRRVQIEQSSPTFWRVVASYGWRETPNVEEVFHRCGLEGLSCRMMETSFFMSHESLIVANARGICVCVAKLYLLLQRNPCARRISFEIPPNRVIELGTQVEI

SEQ ID NO: 73388 - protein, 271 aa, Salmonella paratyphi A
MASENMTPQEYIGHHLNNLQLDLRTFSLVDPQNPPATFWTLNIDSMFFSVVLGLLFLVMFRSVAKKATSGVPGKFQTAIELIVGFVHGSVKDMYHGKSKLIAPLALTIFVWVFLMNLMDLLPIDLLPYIAEHWLGLPATRVVPSADVNITLSMALGVFILILFYSIKMKGIGGFAKELTLQPFNHWAFIPVNLILEGVSLLSKPVSLGLRLFGNMYAGELIFILIAGLLPWWSQWILNVPWAIFHILIITLQAFIFMVLTIVYLSMASEEH

SEQ ID NO: 73389 - protein, 207 aa, Salmonella paratyphi A
VLNKLSRLLADAGISLTDHQKTLLVAYVDMLHKWNKAYNLTSVRDPNEMLVRHILDSIVVAPYLQGQRFIDVGTGPGLPGIPLAIVLPDAHFTLLDSLGKRVRFLRQVQHELKLENITPVQSRVEAYPSEPPFDGVISRVFASLNDMVSWCHHLPGEKGRFYALKGQLPGDEIASLPDNFSVESVEKLPVPQLEGERHLVIIKSNKV

SEQ ID NO: 73390 - protein, 621 aa, Salmonella paratyphi A
FDVIIIGGGHAGTEAAMAAARMGQQTLLLTHNIDTLGQMSCNPAIGGIGKGHLVKEVDASGGLMAKAIDQAGIQFRILNASKGPAVRATRAQADRVLYARRRTALENQPNLMIFSQAVEDLIVENDRVVGAVTQMGLQIRRKRWVLTVGTFLDGKIHIGLDNYSGGRAGDPPSIPLSRRLRELRTRQPPENRTPPRIDARTIDFSVLAQQHGDNPMPVFSFMGNASQHPQQVPCYITHTNEKTHDVIRNNLDRSPMYAGVIEGIGPRYCPSIEDKVMRFADRNQHQIFLEPEGLTSNEIYPNGISTSLPFDVQMQIVRSMQGMENAKIVRPGYAIEYDFFDPRDLKPTLESKFIHGLFFAGQINGTTGYEEAAAQGLLAGLNAARLSADKERWAPARSQAYLGVLVDDLCTLGTKEPYRMFTSRAEYRLMLREDNADLRLTEMGRELGLVDDERWARFNEKLENIERERQRLKSTWVTPSAESADEVNAHLTTPLSREASGEDLLRRPEMTYAQLTSLAAFAPALEDEQAAEQVEIQVKYEGYIARQQDEIEKQLRNENTLLPATLDYRQVSGLSNEVIAKLNDHKPASIGQASRISGVTPAAISILLVWLKKQGMLRRSA

SEQ ID NO: 73391 - protein, 393 aa, Salmonella paratyphi A
LNPYFGEFGGMYVPQILMPALNQLEEAFVSAQKDPEFQAQFADLLKNYAGTPTALTKCQNITAGTRTTLYLKREDLLHGGAHKTNQVLGQALLAKRMGKSEIIAETGAGQHGVASALASALLGLKCRIYMGAKDVERQSPNVFRMRLMGAEVIPVHSGSATLKDACNEALRDWSGSYETAHYMLGTAAGPHPYPTIVREFQRMIGEETKAQILDKEGRLPDAVIACVGGGSNAIGMFADFINDTSVGLIGVEPGGHGIETGEHGAPLKHGRVGIYFGMKAPMMQTADGQIEESYSISAGLDFPSVGPQHAYLNSIGRADYVSITDDEALEAFKTLCRHEGIIPALESSHALGTALKMMREQPEKEQLLVVNLSGRGDKDIFTVHDILKARGEI

SEQ ID NO: 73392 - protein, 179 aa, Salmonella paratyphi A
  MISC_FEATURE (157)..(157): X=any amino acid
MKQFLDFLPLVVFFAFYKLYDIYAATSALIVATAIVLIYSWVRYRKIEKMALITFVLVAVFGGLTLFFHNDEFIKWKVTVIYALFAGALLISQWVMKKPLIQRMLGKELALPQQVWSKLNLAWALFFIACGLANIYIAFWLPQNIWVNFKVFGLTAXTLIFTLLSGVYIYRHLPQEDKS

SEQ ID NO: 73393 - protein, 132 aa, Salmonella paratyphi A
MTTMDNTPQGELVLRTLAMPADTNANGDIFGGWLMSQMDIGGAILAKEIAHGRVVTVRVEGMTFLRPVAVGDVVCCYARCVKRGTTSISINIEVWVKKVASEPIGQRYKATEALFIYVAVDPDGKPRPLPVQ

SEQ ID NO: 73394 - protein, 201 aa, Salmonella paratyphi A
MLRLFSWPEPAKYVFSFWGFIDLVTILPLYVMWLWPEISLNYMFAWRAMRAIRVLRILKLLRFMPSLRVFWSAIISARHQLILFYSFIAIVMIIFGALMYLIEGPKYGFTTLNASVYWAIVTVTTVGYGDITPHTPLGRIVASVLILIGYSVIAIPTGLITTHMSSAFQKRHWQRKCPQCQQSQHEHSAQYCNRCGSKLPD

SEQ ID NO: 73395 - protein, 212 aa, Salmonella paratyphi A
MKKFTVAALALTTLLSGSAFAHEAGEFFMRAGPATVRPTEGAGGTLGHLNGFDVSNNTQLGLTFIYMATDNIGVELLAATPFRHKVGTGATGDIATVHLLPPTLMAQWYFGDSSSKVRPYVGVGVNYTTFFDNDFNDNGKKTGLSDLSFKDSWGAAGQVGVDYLINRDWLIGASVWYMDIDTTANYKMGGVQQHDSVRLDPWVFMFSAGYRF

SEQ ID NO: 73396 - protein, 508 aa, Salmonella paratyphi A
MRIGIPKERLPNETRVAATPKTVEQLLKLGFSVAIESGAGQLASFDDKAFAQAGADIVDGNAIWQSEIILKVNAPEEDEIALLNPGTTLVSFIWPAQNPGLMEKLAERKVTVMAMDSVPRISRAQSLDALSSMANIAGYRAIVEAAHEFGRFFTGQITAAGKVPPAKVMVIGAGVAGLAAIGAANSLGAIVRAFDTRPEVKEQVQSMGAEFLELDFKEDARSAMGYAKVISEALIKAEKEHYDAQEKKIDIILTTELIPGKQAQKLITRDMVDSYKAGSVLVDLAAQNGGNCEYTVANQVVTTDNGVKVIGYTDLPGRLPTQSSQLYGTNLVNLLKLLCKEKDGNIDVDFDDVVIRGVTVIRDGDITWPAPPIQVFPRSTAAPKAAPAPKEPEKPASPWRKYALMALAIILFGWLADVAPKEFLGHFTVFALACVVGYYVVWNVSHALHTPLMSVTNAISGIIVVGALLQIGQGGWVSFLSFIAVLIASINIFGGFTVTQRMLKMFRK

SEQ ID NO: 73397 - protein, 458 aa, Salmonella paratyphi A
MEKKLGLGALTALVLSSMLGAGVFSLPQNMAAVASPAALLIGWAITGVGILLLAFAMLILTRIRSELDGGIFTYAREGFGELIGFCSAWGYWLCAVIANVSYLVIVFSALSFFTDTPALRLFGDGNTWQAIVGASVLLWIVHFLILRGVQTAASINLVATLAKLLPLCAFIVLAIMMFKLDTFTLDFTGVELGIPVWEQVKNTMLITLWVFIGVEGAVVVSARAKNKRDVGRATLLAVLAALGIYLLVTLLSLGVLARPELAEMRNPSMAGLMVKMMGPWGEIIIAAGLIVSVCGAYLSWTIMAAEVPFLAAAYKSFPGIFARQNAQGAASASLWLTNICVQICLVLIWLTCSDYNTLLTIASEMILVPYFLVGAFLLKIAARPLHRAVGIGACIYGLWLLYASGPMHLLLSVVLYAPGLLVFLYARRTHKHDNVLNRQEVVLIGLLLVAAVPATWML

SEQ ID NO: 73398 - protein, 383 aa, Salmonella paratyphi A
MKRKVLALVIPALLAAGAAHAAEIYNKDGNKLDLYGKVDGLHYFSDDSSKDGDQTYMRFGFKGETQINDQLTGYGQWEYNVQANTTESEGANSWTRLAFAVLKFGDYGSFDYGRNYGVLYDVEGWTDMLPEFGGDSYTYADNYMTGRANGVATYRNTDFFGLVDGLNFALQYQGKNDSKAADDVNIGTNNRNDGDDIRYDNGDGFGISTTYDIGMGFTQALAYTTSDRTNEQVNAGGTIAGGDKADAWTAGLKYDANNIYLATMYSETRNMTPYGKTDKDYAGGVANKTQNFEVTAQYQFDFGLRPAVSFLMSKGKDLTYNNVNGDDKDLVKYADVGATYYFNKNFSTYVDYKINLLDDDDPFYKDAGISTDDIVALGMVYQF

SEQ ID NO: 73399 - protein, 90 aa, Salmonella paratyphi A
MSHTIRDKQKLKARTSKIQGQVIALKKMLDEPHECAAVLQQIAAISGAVNGLMREVIKGHLTEHIVHQSDEARREEDLDVILKVLDSYIK

SEQ ID NO: 73400 - protein, 168 aa, Salmonella paratyphi A
MTPHIKQLRIILMGEFPTLLQQGNGWFFIPSAILLGILHGLEPGHSKTMMAAFIIAIKGTVKQAVMLGLAATLSHTAIVWLIALGGMYLSRAFTAQSVEPWLQLISAIIILSTACWMFWRTWRGEQQWLAGNHHHDHDHDHDHDHDHHGHIHPEGATSKAYQDAQGIL

SEQ ID NO: 73401 - protein, 388 aa, Salmonella paratyphi A
  MISC_FEATURE (297)..(297): X=any amino acid
  MISC_FEATURE (368)..(368): X=any amino acid
VMKEVVIVGALRTPIGCFQGTLARHSAVELGSMVVKALIERTGVDANAIDEVILGQVLTAGAGQNPARQSAIKGGLPTTVSAITINDVCGSGLKALHLATQAIQCGEADIVIAGGQENMSRAPHVLNDSRSGALPDADNLVDSLVHDGLWDAFNDYHIGVMAENLAREYGISRELQDAYALSSQQKARAAIDTGRFKDEIVPIVTQRNGQTAIVDTDEQPRPTQCGGLALLHPAFDSLGSVTAGNASSINDGAAAVMMMSEGYEALGLACLARIRMPRRFDPALMGIAPVYATRAVXERAAGQLTEVDLIEANEAFAAQALSVGKMLEWDERRVNVNGGGLRLGHPIGASGCRILVSLVHEMVKRDAXRLATLCIGGGQGVALTIERD

SEQ ID NO: 73402 - protein, 272 aa, Salmonella paratyphi A
MEPQPPRLKPGKILDTLGAMQKSLTRASQRIVQYILAFPRQVTQSSIADLSRDTQAGEATVIRFCRTLGYKGFQDFKMDLAIELATTESDDSSPLLDAEVSESDDAHAIGLKLQNTISNVLSETLNLLDMQQVLGVVDALRHCHSVYIFGVGSSGITALDMKHKLMRIGLRGDAVSNNHFMYMQATLLKAGDVAMGVSHSGTSPETVHSLRLARQAGATTVAITHNLGSPLCEEADFCLINGNRQGMLQGDSIGTKAAHVFVFNLLYTLLVQ

SEQ ID NO: 73403 - protein, 406 aa, Salmonella paratyphi A
WYSEITRPQKNALFSAWLGYVFDGFDFMLIFYIMYLIKADLGLTDMEGAFLATAAFIGRPFGGALFGLLADKFGRKPLMMWSIVAYSVGTGLSGLASGVIMLTLSRFIVGMGMAGEYACASTYAVESWPKHLKSKASAFLVSGFGIGNIIAAYFMPSFAEAYGWRAAFFVGLLPVLLVIYIRARAPESKEWEEAKLSGPGKHSQSAWSVFSLSMKGLFNQAQFPLTLCVFIVLFSIFGANWPIFGLLPTYLAGEGFDTGVVSNLMTAAAFGTVLGNIVWGLCADRIGLKKTFSIGLLMSFLFIFPLFRIPQDNYLLLGACLFGLMATNVGVGGLVPKFLYDYFPLEVRGLGTGLIYNLAATSGTFNSMAATWLGITMGLGLALTFIVAFWTATILLIIGLSIPDRL

SEQ ID NO: 73404 - protein, 509 aa, Salmonella paratyphi A
DSLIHPLLMRNGDSRPLQRPTTPLPSLDLLTPPPSEVEPVDTFALEQMARLVEARLADFRIKADVVNYSPGPVITRFELNLAPGVKAARISNLSRDLARSLSTVAVRVVEVIPGKPYVGLELPNKKRQTVYLREVLDNAKFRENPSPLTVVLGKDIAGDPVVADLAKMPHLLVAGTTGSGKSVGVNAMILSMLYKAQPEDVRFIMIDPKMLELSVYEGIPHLLTEVVTDMKDAANALRWSVNEMERRYKLMSALGVRNLAGYNEKIAEAARMGRPIPDPYWKPGDSMDVQHPVLEKLPYIVVLVDEFADLMMTVGKKVEELIARLAQKARAGIHLVLATQRPSVDVITGLIKANIPTRIAFTVSSKIDSRTILDQGGAESLLGMGDMLYSGPNSTMPVRVHGAFVRDQEVHAVVQDWKARGRPQYVDGITSDSESEGGGGGFDGGEELDALFDQAVNFVTQKRKASISGVQRQFRIGYNRAARIIEQMEAQGIVSAQGHNGNREVLVRR

SEQ ID NO: 73405 - protein, 444 aa, Salmonella paratyphi A
  MISC_FEATURE (212)..(212): X=any amino acid
VSNLSLDFSDNTFQPLAARMAAENLAQYIGQQHLLAAGKPLPRAIEAGHLHSMILWGPPGTGKTTLAEVIARYASADVERISAVTSGVKEIREAIERARQNRNAGRRTILFVDEVHRFNKSQQDAFLPHIEDGTITFIGATTENPSFELNSALLSRARVYLLKSLTTDDIEQVLDQAMQDKTRGYGDQDIVLPDETRRAIAELVNGDARRAXITLEMMADMAEADDSGKRVLLPALLTEIAGERSVLINKGDRFYDLISALHKSVRGSPDAALYWYARIITAGGDPLYVARRCLAIASEDVGNADPRAMQVAIAAWDCFTRVGPAEGERAIAQAIVYLACAPKSNAVYTAFKAALADARERPDYDVPVHLRNAPTKLMKEMGYGQEYRYAHDEPNAYAAGEVYFPPEIAQTRYYHPTNRGLEGKIGEKLAWLAEQDQNSPTKRY

SEQ ID NO: 73406 - protein, 428 aa, Salmonella paratyphi A
MLDPNLLRNEPDAVAEKLARRGFKLDVDKLRALEERRKVLQVNTENLQAERNSRSKSIGQAKARGEDIEPLRLEVNKLGEELDAAKALDTLLAEIRDIALTSNLPADEVPVVKDENDNVKSSRWGYPREFDFEIRDHVTLGEMHSGLDFAAAVKLTGSRFVVMKGQIARMHRALSQFMLDLHTEQHGYSENYVPYLVNHDTLYGTGQLPKFAGDLFHTRPLEEEADSSNYALIPTGEVPLTNLVRDEIIDEDQLPIKMTAHTPCFRSEAGSYGRDTRGLIRMHQFDKVEMVQIVRPEDSMAALEEMTGHAEKVLQLLGLPYRKIILCTGDMGFGACKTYDLEVWVPAQNTYREISSCSNVWDFQARRMQARCRSKSDKKTRLVHTLNGSGLAVGRTLVAVMENYQQADGRIEVPEVLRPYMNGLEYIG

SEQ ID NO: 73407 - protein, 801 aa, Salmonella paratyphi A
EVSRRGLVKTTALGAWAMASSAFTLPFTRIANAAEAISPAKTGEKVVWSACTVNCGSRCPLRMHVVDGEIKYVETDNTGNDDYDGLHQVRACLRGRSSRWRVYSPDRIKYPMKRVGKRGEGKFERISWDEAYDIIATNMQRLIKEYGNESIYLNYGTGTLGGTLTRSWPPGKTLVARLMNCCGGYLNHYGDYSSAQIAAGLNYTYGGWADGNSPSDIENSKLVVLFGNNPGENPHSGGGITWFLEQARERSNARMIVIDPRYTDTAAGREDEWIPIRPGTDAALVAGIAWVLINENLVDQPFLDNYCIGYDEKTLPADAPPNGHYKAYILGQGEDGIAKTPEWAAQITGIPADRIIKLAREIGSAKPAYICQGWGPQRHANGEIATRAISMLAILTGNVGINGGNSGAREGSYALPFERMPTLENPVETSISMFMWTDAIERGPEMTALRDGVRGKDKLDVPIKMIWNYAGNCLINQHSEINRTHEILQDDKKCEMIVVIDCHMTSSAKYADILLPDCTASEQMDFALDASCGNMSYVIFTDQAIKPRFECKTIYEMTSELAKRLGVEQQFTEGRTQEEWMRHLYEQSRKSIPNLPTFEEFRKQGIFKQRDPEGHHVAYKDFREDPQANPLTTPSGKIEIYSQALADIAATWELPEGDVIDPLPIYTPGFENYNDPLTDKFPLQLTGFHYKARVHSTYGNVDVLKAACRQEMWINPMDAQKRGINNGDKVRIFNDRGEVHIEAKVTPRMMPGVVALGEGAWYDPDAKRVDQGGCINVLTTQRPSPLAKGNPSHTNLVQVEK

SEQ ID NO: 73408 - protein, 317 aa, Salmonella paratyphi A
  MISC_FEATURE (15)..(15): X=any amino acid
MYNGFSGRDITWRLXRMANWAQKLKLHHLQTLVALGEQGNLTHVARMMNISQPALSKWLSQLEDEIGITLFERHSKGLRPSEGGKLLIQHAQRLINDLERSQYEIARFKQGGLVGSLKIGCSPVATDCVSQAILSLLNEMPTLHLNIEEKVMTPLLHDLLAGQVDVVVGRVGGRALQLPLNYQVLYTEPVCFVARPHHQLARRAQIAWSDLAHWRWIVWPTGTPIRISIDNALVDNGVMLPENTIESASMNVSTNFRQSSDMISILSLRVAQRYASQGQLAILNLPRIEQKGSVGMFWRKNETPSLALSRFLYFLAQ

SEQ ID NO: 73409 - protein, 495 aa, Salmonella paratyphi A
  MISC_FEATURE (143)..(143): X=any amino acid
EYLLEMRGINKSFPGVKALDNVNLNVRPHSIHALMGENGAGKSTLLKCLFGIYQKDSGSIVFQGKEVDFHSAKEALENGISMVHQELNLVLQRSVMDNMWLGRYPTKGMFVDQDKMYQDTKAIFDELDIDIDPRARRTLSVSXMQMIEIAKAFSYNAKIVIMDEPTSSLTEKEVNHLFTIIRKLKERGCGIVYISHKIEEIFQLCDEITILRDGQWIATQPLEGLDMDKIIAMMVGRSLNQRFPDKENKPGDVILEVRHLTSLRQPSIRDVSFDLHKGEILGIAGLVGAKRTDIVETLFGIREKSSGTITLHGKKINNHTANEAINHGFALVTEERRSTGIYAYLDIGFNSLISNIRNYKNKVGLLDNSRMKSDTQWVIDSMWVKTPGHRTQIDSLSGGNQQKVIIGRWLLTQPEILMLDEPTRGIDIGAKFEIYQLIAELAKKGKGIIIISSEMPELLGITDRILVMSNGLVSGIVDTKTTTQNEILRLASLHL

SEQ ID NO: 73410 - protein, 79 aa, Salmonella paratyphi A
  MISC_FEATURE (67)..(67): X=any amino acid
MDVQTIFVILAFLLLPLFCFCEAWKGWRTGAVDKVVKNARKPVYVYRHADPVQYWSYLFLYTGCGFXFTGMIIYLLFYR

SEQ ID NO: 73411 - protein, 251 aa, Salmonella paratyphi A
MKIKTGVGILALSALTTMMISAPALAKIEEGKLVIWINGDKGYNGLAEVGKKFEQDTGIKVTVEHPDKLEEKFPQVAATGDGPDIIFWAHDRFGGYAQSGLLAEVTPDKAFQDKLYPFTWDAVRYNGKLIAYPIAVEALSLIYNKDLVPNPPKTWEEIPALDKELKAKGKSAIMFNLQEPYFTWPLIAADGGYAFKFENGKYDVKDVGVDTARAKAGLTFLIDMIKNKNMSADTDYSIAEAAFNKGETAMT

SEQ ID NO: 73412 - protein, 70 aa, Salmonella paratyphi A
MMNKDEAGGNWKQFKGKMKEQWGKLTDDDMTVIEGKRDQLVGKIQERYGYQKDQAEKEVVDWETRNNYRW

SEQ ID NO: 73413 - protein, 369 aa, Salmonella paratyphi A
  MISC_FEATURE (286)..(286): X=any amino acid
MASVQLRNVTKAWGDVVVSKDINLDIHDGEFVVFVGPSGCGKSTLLRMIAGLETITSGDLFIGETRMNDIPPVERGVGMVFQSYALYPHLSVAENMSFGLKLAGAKKEVMNQRVNQVAEVLQLAHLLERKPKALSGGQRHAVAIGRTLVAEPRVFLLDEPLSNLDAALRVQMRIEISRLHKRLGRTMIYVTHDQVEAMTLADKIVVLDAGRVAQVGKPLEAVPLSGGPLCRGLYRLAEDELPPVKVTATAIEQVQVELPNRQQIWLPVESRGVQVGANMSLGIRLXHLLPSDIADVTLGSEVQVVEQLGHDTQIHIQIPAIRQNLVYRQNDVVLVEEGATFAIGLPPERCHLFREMASACRRLHQEPGV

SEQ ID NO: 73414 - protein, 420 aa, Salmonella paratyphi A
FHGYARSGIGWTGSGGEQQCFQVTGAQSKYRLGNECETYAELKLGQEVWKEGDKSFYFDTNVAYSVNQQNDWESTDPAFREENVQGKNLIEWLPGSTIWAGKRFYQRHDVHMIDFYYWDISGPGAGIENIDLGFGKLSLAATRSTEAGGSYTFSSQNIYDEVKDTANDVFDVRLAGLQTNPDGVLELGVDYGRANTTDGYKLVDGASKDGWMFTAEHTQSMLKGYNKFVVQYATDAMTTQGKGQARGSDGSSSFTEELPDGTKINYANKVINNNGDMWRILDHGAISLGDKWGLMYVGMYQNIDWDNNLGTEWWTVGVRPMYKWTPIMSTLLEVGYDNVKSQQTGDRNNQYKITLAQQWQAGDTIWSRPAIRIFATYAKWDEKWGYIKDGDNISRYAAATNSGISTNSRAPTMEWTFGAQ

SEQ ID NO: 73415 - protein, 332 aa, Salmonella paratyphi A
MQPETQSSALPAYRFSIAPMLDWTDRHCRYFLRLLSRQTLLYTEMVTTGAIIHGKGDYLAYSEEEHPVALQLGGSDPAQLAHCAKLAEARGYDEINLNVGCPSDRVQNGMFGACLMGNAQLVADCVKAMRDVVSIPVTVKTRIGIDDQDSYAFLCDFINTVSGQGECEMFIIHARKAWLSGLSPKENREIPPLDYPRVYQLKRDFPHLTMSINGGIKSLEEAKEHLRHMDGVMVGRERYQNPGILAAVDREIFGADTTDADPVAVVRAMYPYIERELSQGAYLGHITRHMLGLFQGIPGARQWRRYLSENAHKAGADVAVLEQALKLVADKR

SEQ ID NO: 73416 - protein, 122 aa, Salmonella paratyphi A
MANNTTGFTRIIKAAGYSWKGFRAVWTHEAAFRQESLAVLLGVIIACWLDVDAITRVLLIGSVLLIMIVEILNSAIEAVVDRIGSEYHELSGRAKDMGSAAVLLSIFVALMTWGILLWSHFR

SEQ ID NO: 73417 - protein, 669 aa, Salmonella paratyphi A
MEPIEQQLTELRTTLRHHEYLYHVMDAPEIPDAEYDRLMRELRELEAQRPDLITPDSPTQRVGAAPLTAFNQIRHEVPMLSLDNVFDEESFLAFNKRVQDRLKSTENVIWCCELKLDGWAVSILYENGVLVSAATRGDGTTGEDITSNVRTIRAIPLKLHGDNIPARLEVRGEVFLPQAGFEKINEDAPATGGKVFANPRNAAAGSLRQLDPRITAKRPLTFFCYGVGILEGGELPDTHLGRLLQFKAWGYRVSERVTLCDSPQAVLDFYHNVEKDRPTLGFDIDGVVIKVNSLALQEQLGFVRPRAWAVAFKFPAQEQMTFVRDVEFQVGRTGRYTRWARLEPVQVAGVLVSNATLHNADEIERLGLRIGDKVVIRRAGDVIPQVVNVVLSERPEETRPIVFPTHCPVCGSDVERVEGEAVTRCTGGLICGAQRKESLKHFVSRRAMDVDGMGDKIIDQLVEREYVHTPADLFRLTAGKLTGLDRMGPKSAQNVVNALEKAKATTFARFLYALGIREVGEATAAGLAAYFGTLEALQAATIDELQKVPDVGIVVATHVFNFFAEESNRDVIVQLLAEGVHWPAPVVINVQEIDSPFAGKTVVLTGSLSQMSRDDAKARLVALGGKWQAAYSKKTDLVIAGEAAGSKLAKAQELGINVIDEAEMIRLLG

SEQ ID NO: 73418 - protein, 413 aa, Salmonella paratyphi A
MTDNRVENSSGRAARKLRLALMGPAFIAAIGYIDPGNFATNIQAGASFGYQLLWVVVWANLMAMLIQILSAKLGIATGKNLAEQIRDHYPRPVVWFYWVQAEIIAMATDLAEFIGAAIGFKLILGVSLLQGAVLTGIATFLILMLQRRGQKPLEKVIGGLLLFVAAAYIVELFFSQPDMAQLGKGMVIPALPNPEAVFLAAGVLGATIMPHVIYLHSSLTQHLHGGTRQQRYSATKWDVAIAMTIAGFVNLAMMAETAAAFHFSGHTASADLDQAYLTLEPLLTHAAATVFGLSLVAAGLSSTVVGTLAGQVVMQGFVRFHIPLWVRRTITMLPSFIVILMGLDPTRILVMSQVLLSFGIRVALVPLLIFTSNLRLMGELVNTRRVKQIGWIIVVLVVALNIWLLVGTVMGLS

SEQ ID NO: 73419 - protein, 327 aa, Salmonella paratyphi A
MMQDLRLILIIVGAIAIIALLVHGFWTSRKERSSMFRDRPLKRMKSKRDDDSYDDDVEEDEGVGEVRVHRVNHAPGQSQEHDAPRQSPQHQYQPPYASAQPRPARREPQAPMQQPVQQPVQPAPQPQQVQPSAPPVQPPQQQPAPPSQAPQPVAQPAPPPSAQTFQPAEPVVEAEPVVEEAPVVEKPQRKEAVIIMNVAAHHGSELNGEVLLNSIQQSGFKFGDMNIFHRHLSPDGSGPALFSLANMVNPGTFDPEMTDFTTPGVTIFMQVPSYGDALQNFKLMLQSAQHIADEVGGVVLDDQRRMMTPQKLREYQDRIREVMDANA

SEQ ID NO: 73420 - protein, 471 aa, Salmonella paratyphi A
  MISC_FEATURE (219)..(219): X=any amino acid
  MISC_FEATURE (296)..(296): X=any amino acid
  MISC_FEATURE (302)..(302): X=any amino acid
  MISC_FEATURE (438)..(438): X=any amino acid
MKIKTRFAPSPTVYLHVGGARTALYSWLFARHHGGEFVLRIEDTDLERSTPEAIEAIMDGMNWLNLEWDEGPIFQTKRFDRYNAVIDEMLEAGTAYKCYCSKERLEQLREDQMAKGEKLRYDGRCVTVHEHHADDEPCVVRFANPQTVPLIFDDQIRGPIEFSNQELDDLIIRRTDGLPDLQFCVVVDDWDMEITHVIRGEDHINNTPRQINILKALNXRCRCYAHVSMINGDEVKSCLNVHGAVSVMQYRDDGYLPEALLNYLVRLGWSSGDQEIFTREEMIKLFSLGAVSKSAXRVQHRXTLWLNHHYINTLAPEYVATHLQWHIEQENIDTRNGPQLAELVKLLGERCKTLKEMSQSCRYFYEDFSEFDADARKNTSARWRRQPLEVVRDKLSAITDWSAENVHHAIQATADELEVGMGKVGMPLRVAVTGAGQXACAGCHRTCIGKTRSIERINKALGFIAERESQQ

SEQ ID NO: 73421 - protein, 437 aa, Salmonella paratyphi A
MPLVIVAIGVILLLLLMIRFKMNGFIALVLVALAVGLMQGMPLDKVIGSIKAGVGGTLGSLALIMGFGAMLGKMLADCGGAQRIATTLIAKFGKKHIQWAVVLTGFTVGFALFYEVGFVLMLPLVFTIAAAGIIPLLYVGVAWPRRSSVTHGFLPSHPGPTAIATIFHADMGKTLLFGTILAIPTVILAGPVYARFLKGIDKPIPEGLYSAKTFTEEEMPGFGVSVWTSLVPVILMAMRAVAEMILPKGHAFLPVAEFLGDPVMATLIAVLIAMFTFGLNRGRSMDQINDTLVSSIKIIAMMLLIIGGGGAFKQVLVDSGVDKYIASMMHETNVSPLLMAWSIAAVLRIALGSATVAAITAGGIAAPLIATTGVSPELMVIAVGSGSVIFSHVNDPGFWLFKEYFNLTIGETIKSWSMLETIISVCGLIGCLLLGMV

SEQ ID NO: 73422 - protein, 709 aa, Salmonella paratyphi A
IAGEIQANAGQVEAAVRLLDEGNTVPFIARYRKEITGGLDDTQLRNLETRLGYLRELEDRRQAILKSISEQGKLTDELAGAINATLSKTELEDLYLPYKPKRRTRGQIAIEAALTLADLLWNEPSHDPDVKAAKYIDGDKGVADTKARLDGARYILMERFAEDAALLAKVRDYLWKNAHLVATVVSGKEEEGAKFRDYFDHHEPIANVPSHRALAMFRGRNEGILQLSLNADPQFDEPPKESYCEQIIMDHLGLRLNNAPADSWRKGVVSWTWRIKVLMHLETELMGTVRERAEDEAINVFARNLHDLLMAAPAGLRATMGLDPGLRTGVKVAVVDGTGKLVATDTIYPHTGQAAKAATVIAALCEKYHVELVAIGNGTASRETERFYLDVQKQFPNVTAQKVIVSDGASVYSASELASQEFPDLDVSLRGASSIARRLQDPLAELVKIDPKSIGVGQYQHDVSQTQLARKLDAVVEDCVNAVGVDLNTASVPLLTRVAGLTRMMAQNIVAWRDENGQFQNRQQLLKVSRLGPKAFEQCAGFLRINHGDNPLDASTVHPEAYPVVERILAATQQALKDLMGNSNELRHLKAADFTDDKFGVPTVSDIIKELEKPGRDPRPEFKTAQFADGVETMNDLLPGMILEGAVTNVTNFGAFVDIGVHQDGLVHISSLSTKFVDDPHTVVKAGDIVKVKVLEVDLQRKRIALTMR

SEQ ID NO: 73423 - protein, 75 aa, Salmonella paratyphi A
MQFTPDTAWKITGFAREISPAYRQKLLSLGMLPGSSFNVVRVAPLGDPIHIETRRVSLVLRKKDLALIEVEAVSC

SEQ ID NO: 73424 - protein, 455 aa, Salmonella paratyphi A
  MISC_FEATURE (305)..(305): X=any amino acid
TMRYRFPDNFWWGSACSALQTEGDSLNGGKSQTTWDVWFERQPDRFHQGVGPAETSTFYRHWKQDIALLKQLKHNSFRTSLSWARLIPDGVGEVNPQAVSFYNHVIDELLAQGITPFITLLHFDMPMVMQEKGGWENRDVVEAFGRYAQTCFTLFGDRVKHWFTFNEPIVPVEGGYLYDFHYPNVVDFKRAATVAYHTVLAHSTAVRRAYDGEIGIVLNLTPSYPRSQHPADVQAAHHADLLFNRSFLDPVLKGEYPADLVALLKTYDQLPACQPGDRQLIADAIDLLGINYYQPRRVKCRDTGXIRQAPFMPEWLFDYYDMPGRKMNPYRGWEIYAPGIYDIITNLRDNYGNPRCFISENGMGVENEQRFVQAGQIHDDYRIDFISEHLKWLHKGISEGCHCLGYHMWTFIDNWSWLNGYKNRYGFVQLDLATQTRTVKKSGEWFAATAEHNGF

SEQ ID NO: 73425 - protein, 247 aa, Salmonella paratyphi A
MKTLSKSSHIPLYQQVVEWIRESIYSGELVEDDRIPSEFQIMDMLEVSRGTVKKAVDQLVREGVLVQVQGKGTFVKKENVAYPLGEGLLSFAEALASQKINFTTSVITSRLEPANRFVAEKLSIKPGQDVLFLKRLRCIGDEKVMLIENRINIDLCPGIIDVDFTRENLFSAIERLSDKKISFSESRYAAKLIGNERGHYLDIGEDAPVLHLEQLVFFSRGLAIDFGNVWLKGNKYYLGTILQRLDA

SEQ ID NO: 73426 - protein, 391 aa, Salmonella paratyphi A
  MISC_FEATURE (331)..(331): X=any amino acid
  MISC_FEATURE (332)..(332): X=any amino acid
  MISC_FEATURE (362)..(362): X=any amino acid
  MISC_FEATURE (363)..(363): X=any amino acid
DTRFESCIKCTVCTTACPVSRVNPGYPAPKQAGPDGEHCSKDGALYDEALKYCINCKRCEVACPSDVKIGDIIQCARAKYDTTRPSLRNFILSHTDLMGSVSTPFAPVVNTATALKPVRQLLDYALKIDHRRTLPKYSFGTFRRWYRSVAAQQAKYKDQVAFFHGCFVNYNHPQLGKDLIKVLNAMGTGVQLLSKEKCCGVRDCANGFTDKARKQAISNVESLRRAIAVKGIPVIATSSTCTFALRDEYPEVLDVDNAGLRESYRAGHPLLWRKLDAGKTLPLNPLPLKVVYHTPCHMEKMGWTLYTLELLRQIPGLELTVLDSQCCGIAXXLWIKKENYPTSQSIGAPLFRQIEESGPTLXXTDCETCKWQIEMSTSKRCEHPITLLGNA

SEQ ID NO: 73427 - protein, 201 aa, Salmonella paratyphi A
MLAFTLRFIKNKRYLATLAGALVIIAGLTSQHAWSGNGLPQINGKALAALAKQHPVVVLFRHAERCDRSDNTCLSDSTGITVNGAQDARALGKAFSADIQNYNLYSSNTVRTIQSATWFSAGRSFTVDKKMMDCGSGIYASINTLLKKSQNKNIVIFTHNHCLTYIAKNKRGVKFDPDYLNALVMHAENGKLFLDGEFVPG

SEQ ID NO: 73428 - protein, 340 aa, Salmonella paratyphi A
MNICVNSLYRLSTPQFHSLYSEEVSDETLALLIGEVENGNQNCIDLLCNLALRNDNLGHKVEKLLFDLFSGKRSGSPDIDKKINQACLVLHQIANNDITKNNTEWKKLHAPSRLLYMAGSATTDLSKKIEIAHKIMGDQFAQTDQEQVGVENLWCGARMLSSDELAAATQGLAQESPLLSVNYPIGLIHPTTKENILSTQLLEKIAQSGLSHNEVFLVNTGDHWLLCLFYKLAEKIKCLIFNTYYDLNENTKQEIIEAAKIAGISENEDIDFIETNLQNNVPNGCGLFCYHTIQLLSNAGQNDPATTLREFAENFLTLSVEEQTLFNTQTRRQIYEYSLQ

SEQ ID NO: 73429 - protein, 267 aa, Salmonella paratyphi A
MNALLSNPFKEGLRKGDTQIGLWLSSTTSYMAEIAATSGYDWLLIDGEHAPNTVQDLYHQLQAIAPYASQPVIRPIEGSKALIKQVLDIGAQTLLIPMVDTAEQARQVVSATRYPPLGQRGVGASVARAARWGRIDNYMAQANESLCLLVQVESKVALENLDAILEVEGIDGVFIGPADLSASLGYPDNAGHPEVQRIIEACIYRIRAAGKAAGFLAVDPAMAQKCLAWGANFVAVGVDTMLYTEALDNRLVMFKSVQSVSTAKRSY

SEQ ID NO: 73430 - protein, 340 aa, Salmonella paratyphi A
VNGIRVLILGVNGFIGNHLTERLLDEENYEVYGMDIGSNAISRFLLHPRFHFVEGDISIHSEWIEYHVKKCDVVLPLVAIATPIEYTRNPLRVFELDFEENLRIIRYCVKYRKRVVFPSTSEVYGMCTDASFDEDKSNLIVGPVNKPRWIYSVSKQLLDRVIWAYGEKEGLRFTLFRPFNWMGPRLDSLNAARIGSSRAITQLILNLVEGTPIKLIDGGQQKRCFTDIRDGIEALFRIIVNEGDRCDGKIINIGNPDNEASIQELATLLLDSFDKHPLRCHFPPFAGFQVVESRSYYGKGYQDVAHRKPVSTMARRCLDWEPSIAMRDTVEETLDFFLRT

SEQ ID NO: 73431 - protein, 331 aa, Salmonella paratyphi A
  MISC_FEATURE (217)..(217): X=any amino acid
MSNLSGTDKSVILLMTIGEDRAAEVFKHLSTREVQALSTAMANVRQISNKQLTDVLSEFEQEAEQFAALNINANEYLRSVLVKALGEERASSLLEDILETRDTTSRIETLNFMEPQSAADLIRDEHPQIIATILVHLKRSQAADILALFDERLLHDVMLRIATFDGVQQAALAELTEVLNGLLDGQNLKRSKMGGVKNAAEIINLMKTQQEEAVITXVREFDGELAQKIIDEMFLFENLVDVDDRSIQRLLQEVDSESLLIALKGAEPPLREKFLRNMSPARADILRDDLAKRGPVRLSQVENEQKAILLIVRRLAETGEMVIGSGEDTYV

SEQ ID NO: 73432 - protein, 352 aa, Salmonella paratyphi A
MSEKTEQPTEKKLRDGRKEGQVVKSIEITSLFQLIALYLYFHFFTEKMILILIESITFTLQLVNKPFSYALTQLSHALIESLTSALLFLGAGVIVATVGSVFLQVGVVIASKAIGFKSEHINPVSNFKQIFSLHSVVELCKSSLKVIMLSLIFAFFFYYYASTFRALPYCGLACGVLVVSSLIKWLWVGVMAFYIVVGILDYSFQYYKIRKDLKMSKDDVKQEHKDLEGDPQMKTRRREMQSEIQSGSLAQSVKQSVAVVRNPTHIAVCLGYHPTDMPIPRVLEKGSDAQANYIVNIAERNCIPVVENVELARSLFFEVERGDKIPETLFEPVAALLRMVMKIDYAHSTETP

SEQ ID NO: 73433 - protein, 359 aa, Salmonella paratyphi A
  MISC_FEATURE (292)..(292): X=any amino acid
  MISC_FEATURE (293)..(293): X=any amino acid
IIFGPLIVLCMLLIVKRLVFGLGSVSDLNGGFPWGVWIAFDLLIGTGFACGGWALAWAVYVFNRGQYHPLVRPALLASLFGYSLGGLSITIDVGRYWNLPYFYIPGHFNVNSVLFETAVCMTIYIGVMALEFAPALFERLGWKVSLKRLNKVMFFIIALGALLPTMHQSSMGSLMISAGYKVHPLWQSYEMLPLFSVLTAFIMGFSIVIFEGSLVQAGLKGNGPDEKNLFVKLTNTISVLLAIFVVLRFGELIYRDKLSYAFAGDFYSAMFWIEVVLMVFPLVVLACGETAXXLSYAVLSALSALLGCATWRLTYSLVAFNPGGGYHYFPTWEELLISIGFVAIEICAYIVLIRLLPIL

SEQ ID NO: 73434 - protein, 516 aa, Salmonella paratyphi A
  MISC_FEATURE (503)..(503): X=any amino acid
  MISC_FEATURE (515)..(515): X=any amino acid
MSQRITIDPVTRIEGHLRIDCEIENGVVSKAWASGTMWRGMEEIMKNRDPRDAWMIVQRICGVCTTTHAISSVRAAESALNIDVPVNAQYIRNIILAAHTTHDHIVHFYQLSALDWVDITSALKADPEKASAMLDGVSSWHLNSAQEFTKVQNKIKDLVASGQLGIFANGYWGHPAMQLPPEVNLIAVAHYLQALECQRDANRVVALLGGKSPHIQNLAVGGVANPINLDSIGTLNLERLMYIKSFIDKLSDFVEQVYKVDTAVIAAYYPEWLERGKGAVNYLSAPEFPTDGKNGSFLFPGGYITNADLSTYRPITSHSDEFLIKGIQESAKHAWYKDEAPHAWEGTTIPAYDGWSDDGKYSWVKSPTFYGKTVEVGPLANMLCKLAAGRESTQTKLNEIIALYQKLTGKTLEMAQLHSTLGRIIGRTVHCCELQNVLQDQYNALIVNIGKGDYTTFVKPNIPATASFKGVGFLEAPPLMLSHWMVIKDGIISNYQAVVHPLXTQVPRNYTMTWXP

SEQ ID NO: 73435 - protein, 294 aa, Salmonella paratyphi A
MSHLYDPTTQYYTGEYPKQKQPAPVAQAKMTPVPDCGEKSYVGSGRLKDRKALVTGGDSGIGRAALIAYAREGADVAINYLPAEEEDAQQVKALIEECGRKAVLLPGDLSDESFARSLVHKAREALGGLDILALVAGKQTAIPEIKDLTSEQFQQTFAVNVFALFWITQEAIPLLPKGASIITTSSIQAYQPSPHLLDYAATKAAILNYSRGLAKQVAEKGIRVNIVAPGPIWTALQISGGQTQDKIPQFGQQTPMKRAGQPAEWRPVYVYLASQESSYVTAEVHGVCGGEHLG

SEQ ID NO: 73436 - protein, 467 aa, Salmonella paratyphi A
  MISC_FEATURE (428)..(428): X=any amino acid
QSTFLFHDYETFGTHPALDRPAQFAALRTDNDFNVIGEPEVFYCKPADDYLPQPGAVLITGITPQEAREKGENEAAFARRIHALFTVPKTCVVGYNNVRFDDEVTRNIFYRNFYDPYAWSWQHDNSRWDLLDVMRACYALRPEGINWPENDDGLPSFRLEHLTQANGIEHSNAHDAMADVYATIAMAQLVKTRQPRLFDYLYSHRSKHKLAALIDVPQMKPLVHVSGMFGAWRGNTSWVAPLAWHPENRNAVIMVDLAGDISPLLELDSDTLRERLYTAKADLGDHAAVPVKLVHINKCPVLAQANTLRPEDADRLGINRQHCLDNLKVLRENPQVRDKVVAIFAEAEPFATSDNVDAQLYDGFFSDADRAAMKIVLETEPRNLPALDITFVDKRIEKLLFNYRARNFPGTLDDAEQQRWLEHRRQYXRQSFYNSMPMNLQMLSQQYAEDKTKLGLLKSLWQYATEI

SEQ ID NO: 73437 - protein, 597 aa, Salmonella paratyphi A
QKAGETLTPADRDFSNADFRNITFSKILPLSFMERDGDIIKRFNFSNSKFTYSDISHLHFDECRFTYSTLSDVVCSNTKFSNSDMNEVFYQYSITTQQQPSFIDTTLKNTLIRHKANLSGVILNEPDNSSPPSVSGGENFIRPGDIWPQMPLLWTENAVDGFLNHEHNNGKSILITIDSLPDKYSQEKVRAMEDLVKSLRSGRLTEACIRPVESSLVSVLAPPYTQSTLISEWLGPVQERFFAHQCQTYNDVPLPAPDTYYQQRIRPVLLDSFDRNNAAMTTHSGLFNQVILHCMTGVGCTDGTRQKAAALYERYLAHPTVSPHIHNGLFGNYDGSPDWTTRAADNFLLLSSQDSDTAMMLSTDTLLTMLNPTPDTAWDNFYLLRAGENVSTAQISPVELFRHDFPVFLAAFNQQAVQRRFGELIDIILSAEEHGELNQQFIAATTQKHSTVKLIDDASVSRLNTIFAPLLPEGKLSPAHYQHILSAYHLTDATPQKQAETLFCLSTAFARYSSSAIFGTEHDSPPALRGYAEALMQKDWELSPAIFPSSEQFTDWSDRFHGLHGAFTCTSVVADSMQRHARKYFPSVLSSILPLAW

SEQ ID NO: 73438 - protein, 298 aa, Salmonella paratyphi A
  MISC_FEATURE (141)..(141): X=any amino acid
  MISC_FEATURE (194)..(194): X=any amino acid
MDFTQQLQACVTQANQALSRFIAPLPFQNTPVVEAMQYGALLSGKRCRPFLVYATGQMFGVSTATLDAPAAAVECIHAYSLIHDDLPAMDDDDLRRGLPTCHIKFAKPNAIWREDALQTLRLPLISDAPMPEVADAIVSRXIAELQTPAVSAGMCGGQALDLAAEGQRITLDALERIHRHKKALIRAAVRLGRXARAIKGRNTLPILDRYAESIRLAFQVQDDILDVVGDTATLGKRQGADQQLGKSTYPALLGLEQARNKARDLIEDARQSLHQLAAQSLDTSALEALANYIIQRDK

SEQ ID NO: 73439 - protein, 367 aa, Salmonella paratyphi A
MTSRNYLLLTPGPLTTSRTVKEAMLFDSCTWDDDYNIGVVEQIRQQLTALATASEGYTSVLLQGSGSYAVEAVLGSALGPQDKVLIVSNGAYGARMVEMAGLMGIAHHAYDCGEVARPDVQAIDAILNVDPTISHIAMVHSETTTGMLNPIDEVGALAHRYGKTYIVDAMSSFGGIPMDIAALHIDYLISPANKCIQGVPGFAFVIAREQKLAACKGVPRSLSLDLYAQWRCMEDNHGKWRFTSPTHTVLAFAQALKELAKEGGVAARHQRYQQNQRSLVAGMRALGFNTLLDDELHSPIITAFYSPEDPQYRFSEFYRRLKEQGFVIYPGKVSQSDSSASGNIGEVYAADITALLTAIRTAMYWTK

SEQ ID NO: 73440 - protein, 607 aa, Salmonella paratyphi A
  MISC_FEATURE (283)..(283): X=any amino acid
  MISC_FEATURE (521)..(521): X=any amino acid
  MISC_FEATURE (522)..(522): X=any amino acid
  MISC_FEATURE (524)..(524): X=any amino acid
  MISC_FEATURE (553)..(553): X=any amino acid
  MISC_FEATURE (571)..(571): X=any amino acid
  MISC_FEATURE (572)..(572): X=any amino acid
MSFDIAKYPTLALVDSTQELRLLPKESLPKLCDELRRYLLDSVSRSSGHFASGLGTVELTVALHYVYNTPFDQLIWDVGHQAYPHKILTGRRDKIGTIRQKGGLHPFPWRGESEYDVLSVGHSSTSISAGIGIAVAAEKEGKYRHTVCVIGDGAIHARYAFEAMNHAGDIRPDMLVILNDTEMSISTNVARSTNHLRSYFPVSFTLLWRRRKKGLPPYRPIKELLKRTEEHIKGMVVPGTLFEELGFNYIGPVDGHDVMGLISTLKNMRDLKGPQFLHIMTKXGAAMSPAEKDPITFHAVPKFDPSSGCLPKSSGGLPGYSKIFGDWLCETAAKDSKLMAITPAMREGSGMVEFSRKFPDRYFDVAIAEQHAVTFAAGLAIGGYKPVVAIYSTFLQRAYDQVIHDVAIQKLPVMFAIDRAGIVGADGQTHQGAFDLSYLRCIPDMVIMTPSDENECRQMLFTGYHYNDGPTAVRYPRGNAQGVALTPLEKLPIGKGLVKRHGEKLAILNFGTLMPEAAKVXXRXTPRWSDMRFVKPLDDTLILEMAAHMTRWXRWEENAIMGALAARKRMXXWPIVKPVPVLNIGLPDLFIPQGTQEEARAELGLDA

SEQ ID NO: 73441 - protein, 325 aa, Salmonella paratyphi A
MACGEFSLIARYFDRVRSSRLDVETGIGDDCALLNIPEKQTLAISTDTLVAGIHFLPDIDPADLAYKALAVNLSDLAAMGADPAWLTLALTLPDVDEAWLAAFSDSLFEQLDYYDMQLIGGDTTRGPLSMTLGIHGYIPAGRALKRSGAKPGDWIYVTGTPSDSAAGLAVLQNRLQVSEETDAHYLIQRHLRPTPRILHGQALRDIASAAIDLSDGLISDLGHIVKASGCGARVDVDALPKSDAMMRHVDDGQALRWALSGGEDYELCFTVPELNRGALDVAIGQLGVPFTCIGQMSADIEGLNFVRDGMPVTFDWKGYDHFATP

SEQ ID NO: 73442 - protein, 56 aa, Salmonella paratyphi A
MLRIALFELSKRSDVPYKVAINEAIELAKTFGAEDSHKFVNGVLDKAAPVIRPNKK

SEQ ID NO: 73443 - protein, 537 aa, Salmonella paratyphi A
RALSQWAQAISYVAGHYRVACSPGSIQANAPWFRGKSRTTALTQLARQAGLSFHAPDIDKTAFSQWRLPLVVELRDGQLLVIEHVNGEEAADVFVIEEEGQRNRLTFSELLPEIPYVAALRPLSALKDSRVDRYISRFKPDWMRELVLQDIRPYLPVMVAAFLINVLSLAGIVFSMQVYDRVIPAQSYPTLYVLLFGVLVAVLFGFLLREARTHIMDVLGKRADMRISDRVFGHALRLANSAIPRSTGSFISQLRELEQIREMITSSTLATIVDLPFFFLFMIVLAIIAPPLAWIGPVAALLMILPGVALQKKLAVLANQAAHEATYRNAVLVESVQGLEDIKLMQAENRFLQQWNSYIRITGESGLRTRKLTQGLISWGMSVQSLVYAAVIMFGAPMVIEGSMTHRAVVAASMLGSRMIAPMANLCGVWRAGQQVKAAKMGLDNIMQLPTETQHDDSLIHRDILHGHYLFENAQFRYHNDDQRIPAPRTSGIMPGERIAILGRNGAGKSTLLQAMAGGLEMIQGDARLDNLTLSHI

SEQ ID NO: 73444 - protein, 160 aa, Salmonella paratyphi A
MTKKKAHKPGSATIALNKRARHEYFIEEEFEAGLALQGWEVKSLRAGKANIGDSYVILKDGEAWLFGANFTPMAVASTHVVCDPTRTRKLLLNQRELDSLYGRINREGYTVVALSLYWKNAWCKVKIGVAKGKKQHDKRSDLKEREWQLDKARIMKNAGR

SEQ ID NO: 73445 - protein, 273 aa, Salmonella paratyphi A
MNNRVHQGHLARKRFGQNFLNDRFVIDSIVSAINPQKGQAMVEIGPGLAALTEPVGERLDKLTVIELDRDLAARLQTHPFLGPKLTIYQQDAMTMNFGELSAQLGQPLRVFGNLPYNISTPLMFHLFSYTDAIADMHFMLQKEVVNRLVAGPNSKAYGRLSVMAQYYCQVIPVLEVPPSAFTPPPKVDSAVVRLVPHATMPYPVKDIRVLSRITTEAFNQRRKTIRNSLGNLFSVETLTEMGIDPAMRAENISVAQYCQMANYLSENAPLKES

SEQ ID NO: 73446 - protein, 159 aa, Salmonella paratyphi A
MISLIAALAVDRVIGMENAMPWNLPADLAWFKRNTLNKPVVMGRHTWESIGRPLPGRKNIVISSQPGTDDRVQWVNSVDEAIAACADAPEIMVIGGGRVYEQFLPKAQKLYLTHIDAEVEGDTHFPDYEPDDWESVFSEFHDADAQNSHSYCFEILERR

SEQ ID NO: 73447 - protein, 449 aa, Salmonella paratyphi A
MLKSPLLWKMITLGGAMILLLIPLMMVRHTIVERADYRSHVEAAIRQSTSGPQKVVGPLVAVPVTELYTVLEEEKEVQYKRSYLYFWLPESLLVEGNQNVEARKIGIYQGQVWHTDMAIKAEFDVARLHELNRPNITLGKPFIVVGVGDARGISAVKAPQVNGEMLTVEPGTGLLESRECIHIPLPDSQWATRNLTLAMSLNLSGTGSFSLVPVGRSSEMTLTSNWPHPNFVGDFLPGKREISGSGFQAQWQTNQFATNLGEQFADAQKVDWDNLPAFSVAVSTPADQYQLTDRATKYAILLITLTFMAFFVFETLTGQRLHLMQYLLVGLSLVMFYLLLLALSEHIGFTPAWIAASLVGALMNSVYLQAVLKGWRNSVLFTLALLALDGVMWGLLRSEDSSLLLGTGVLLLALGGVMFLTRHLDWYSLSCQQRKSLPPVKDDELRLWK

SEQ ID NO: 73448 - protein, 802 aa, Salmonella paratyphi A
MENVDLSVFEKGGQAEGTYNVDIYINNTSVETKNIAFKNKKSADNKLSLQPCLSVEQLKQWGVKTENFPELKNDPNGCTDLSLLAGAVAKFNVIGNRLDLAIPQIALIADPREFVPTSEWDEGINAFLLNYSFTGSQDHDIDENRTENSEYANLRPGINIGAWRFRNYSTWNHDSDGQNSWDSAYTYVSRDIEFLKGQLIAGENNTPADVFDSISFKGVQISSDDDMLPDSMKGFAPVIRGVAKSSAQVTVEQNGYTIYKTNVPAGPFAINDLYPTGGSGDLYVTIKESDGSEQHFIVPYASVPVLQREGHLKYDLTVGRTRSSDTHSAQQNFAELTALYGLAGGITSYGGIESTLSNDVYHAALIGTGLNLGDLGALSLDVTNSWSKIKAGDVVSDTLTGQSWRIRYSKDIQSTGTNFTVAGYRYSTKDYYALEDVLDTYSDNSHYDHVRNRTDLSLSQDIIYGSISLTLYNEDYWNDTHTTSLGIGYNNTWHNVSYGINYSYTLNADNSQDEDDDTEDSNDQQISINISIPLDAFMPSTYATYNMNSAKDGDTTHTVGLNGTALAQKNLSWSVQEGYSSQEKATSGNVSATYNGTYADINGGYSYDNHIRRLNYGVQGGVLLHRNGLTLSQPMDDAIILVKAPGAAGVPVNNETGVDTDFRGYAVVPYASPYHRNEVSLDTTGIRKNIELIDTSKTLVPTRGAVVRAEYKTNIGYKALMVLTRINNLPVPFGATVSSLTKPDNHSSFVGDAGQAWLTGLEKQGRLLVKWGPTAADRCQVSYRIPSSPSASGVEILHEQCQ

SEQ ID NO: 73449 - protein, 140 aa, Salmonella paratyphi A
MKRYTPDFPEMMRLCETNFSQLRRLLPRNDAPGETVSYQVGNVQYRLTIVESTRYTTLVTIEQTAPAITYWSLPSLTVRLYHDAMVAEVCSSQQIFRFKARYDYPNKKLHQRDEKHQINQFLADWLRFCLAHGAMAIPVY

SEQ ID NO: 73450 - protein, 275 aa, Salmonella paratyphi A
LESLLTLPLAGEARVRILQITDTHLFAEKHETLLGVNTWESYQAVLEAIRAQQYEYDLIVATGDLAQDQSAAAYQHFAEGIASFRAPCVWLPGNHDFQPAMYSALQEAGISPAKRVLIGEQWQILLLDSQVFGVPHGELSEFQLEWLERNAADAPERQTLLLLHHHPLPAGCSWLDQHSLRNAGELDSVLANFPCVKYLLCGHIHQELDLDWNGRRLLASPSTCVQFKPHCANFTLDTIAPGWRTLELQANGVLETEVHRLQDTRFRPDTASEGY

SEQ ID NO: 73451 - protein, 240 aa, Salmonella paratyphi A
MGGSAIMAKVRPYIGTTTTWFVGQAAHIGRFMMHCALMLLFSALLYWRGEQVAMGIRHFACRLAAKRGDAAVLLAAQAIRAVALGVVVTALVQAVLGGVGLAISGVPYATLLTVVMILSCLVQLGPLPVLIPAIIWLYWTGDTTWGTVLLVWSAVVGTLDNVIRPVLIRMGADLPLLLILSGVIGGLIAFGMIGLFIGPVLLAVTWRLFSAWVHEVPAPTNEPEELLEELDDIEEANKQS

SEQ ID NO: 73452 - protein, 252 aa, Salmonella paratyphi A
MKTVTVKNLIIGEGMPKIIVSLMGRDINSVKAEALAYREATFDILEWRVDHFMDIASTQSVLTAARVIRDAMPDIPLLFTFRSAKEGGEQTITTQHYLSLNRAAIDSGLVDMIDLELFTGDADVKATVDYAHAHNVYVVMSNHDFHQTPSAEEMVLRLRKMQALGADIPKIAVMPQSKHDVLTLLTATLEMQQHYADRPVITMSMAKEGVISRLAGEVFGSAATFGAVKQASAPGQIAVNDLRSVLMILHNA

SEQ ID NO: 73453 - protein, 248 aa, Salmonella paratyphi A
MLSIKDLQVSVEEKAILRGLNLEIRPGEVHAIMGPNGSGKSTLSATLAGREDYEVTGGSVTFKGKDLLELSPEERAGEGIFMAFQYPVEIPGVSNQFFLQTALNAVRAYRGQASLDRFDFQDLMEEKIALLKMPEDLLTRSVNVGFSGGEKKRNDILQMAVLEPELCILDESDSGLDIDALKIVAEGVNALRDDKRAFIIVTHYQRILDYIKPDYVHVLYQGRIVRSGDFTLVKQLEEQGYGWLTEQQ

SEQ ID NO: 73454 - protein, 356 aa, Salmonella paratyphi A
  MISC_FEATURE (25)..(25): X=any amino acid
LNIVEVGEQIRKDITVVMGAPKCPXTEVREEYKRGFGVPTLIAVHPENDPKGEGMAIAKAWLRHGGHRAGVLESSFVAEVKSDLMGEQTILCGMLQAGSLLCFDKLVAEGTDPYAEKLIQFGWETITEALKQGGITLMMDRLSNPAKLRVTALSEQLKEIMAPLFQKHMDDIISGEFSSGMMADWANDDKKLLTWREETGKTAFETAPQFEGKIGEQEYFDKGVLMIAMVKAGVELAFETMVDSGIIEESAYYESLHELPLIANTIARKRLYEMNVVISDTAEYGNYLFSYACVPLLKPFMAELQPGDLGSAIPEGAVDNAQLRDVNDAIRSHAIEQVGKKLRGYMTDMKRIAVAG

SEQ ID NO: 73455 - protein, 306 aa, Salmonella paratyphi A
MFGLSDYYIPHLSLYLICAGVLVFVGAMDDRFDISVKIRAVVQAVIAVVMMVIAKLHLGSLGYIFGPWELVLGPFGYFLTLFAVWAAINAFNMVDGIDGLLGGLSSVSFAAMGLILWFDGQTSLAMWCFAMIAAILPYIMLNLGILGRRYKVFMGDAGSTLIGFTVIWLLLETTQGKTHSISPVTALWIIAIPLMDMVAIMYRRLRKGMSPFSPDRQHIHHLVMRAGFTSRQAFVLITLAAAILAGVGVTAEYSHFVPEWVMLVLFLLAFFLYGYCIKRAWKVARFIKRVKRRLRRQRENRPNLTK

SEQ ID NO: 73456 - protein, 419 aa, Salmonella paratyphi A
MNLTELKNTPVSELITLGESMGLENLARMRKQDIIFAILKQHAKSGEDIFGDGVLEILQDGFGFLRSADSSYLAGPDDIYVSPSQIRRFNLRTGDTISGKIRPPKEGERYFALLKVNEVNYDKPENARNKILFENLTPLHANSRLRMERGNGSTEDLTARVLDLASPIGRGQRGLIVAPPKAGKTMLLQNIAQSIAYNHPDCVLMVLLIDERPEEVTEMQRLVKGEVVASTFDEPASRHVQVAEMVIEKAKRLVEHKKDVIILLDSITRLARAYNTVVPASGKVLTGGVDANALHRPKRFFGAARNVEEGGSLTIIATALIDTGSKMDEVIYEEFKGTGNMELHLSRKIAEKRVFPAIDYNRSGTRKEELLTTQEELQKMWILRKIIHPMGEIDAMEFLINKLAMTKTNDDFFEMMKRS

SEQ ID NO: 73457 - protein, 673 aa, Salmonella paratyphi A
MRLNPGQQHAVEFVTGPCLVLAGAGSGKTRVITNKIAHLIRGCGYQARHIAAVTFTNKAAREMKERVGQTLGRKEARGLMISTFHTLGLDIIKREYAALGMKSNFSLFDDTDQVALLKELTEGLIEDDKVLLQQLISTISNWKNDLKTPAQAAAGAKGERDRIFAHCYGLYDAHMKACNVLDFDDLILLPTLLLQRNDEVRRWQNKIRYLLVDEYQDTNTSQYELVKLLVGQRARFTVVGDDDQSIYSWRGAVPQNLVLLSQDFPALQVIKLEQNYRSSGRILKAANILIANNPHVFEKRLFSELGYGAELKVLSANNEEHEAERVTGELIAHHFVNKTQYKDYAILYRGNHQSRVFEKFLMQNRIPYKISGGTSFFSRPEIKDLLAYLRVLTNPDDDSAFLRIVNTPKREIGPATLQKLGEWAMTRNKSLFTASFDMGLSQKLTGRGYDSLTRFTHWLGEIQRLAEREPVAAVRDLIHGIDYESWLYETSPSPKAAEMRMKNVNQLFSWMTEMLEGNELDEPMTLTLVVTRFTLRDMMERGESEEELDQVQLMTLHASKGLEFPYVYMVGMEEGFLPHQSSIDEDNIEEERRLAYVGITRAQKELTFTLCKERRQYGELVRPEPSRFLLELPQDDLIWEQERKVVSAEERMQKGQSHLANLKAMMAAKRAKS

SEQ ID NO: 73458 - protein, 383 aa, Salmonella paratyphi A
MQRKKILIVGAGLSGAVIARQLAEQGHVVNIIDQRSHIGGNAYDARDEHTGIMVHVYGPHIFHTDNETVWNYVNKYAEMMPYINKVKATVNGQVFSLPINLHTINQFFGVACSPDDARKLLLQKCDSTILEPQNFEQQALRFIGKELYEAFFKGYTIKQWGLHPSALPASVLKRIPVRFNYDDNYFNHKFQGIPKFGYTQMVKSIVEHENIAVELCRSFTQEMRTDYDHVFFSGALDAFYSCQYGRLEYRTLDFKKIICQSDYQGCAVMNYCSIDTPYTRITEHKYFSPWERHEASICYQEYSRECEAGDIPYYPVRRADKMDLLNKYLSRAKKEKNITFIGRLGTYRYLDMDITIAEALQTADVYLTSLYEQKEMPAFTVTV

SEQ ID NO: 73459 - protein, 236 aa, Salmonella paratyphi A
MKISCKNVGVILPIFNSSHRSFKKTFLQAASGGRIGSSNTGIIEVEALKKIDFTLTEGNRLALIGHNGSGKTTLLRVLAGAYKPTSGKYECIGRVTSLIDPMMGMDGELTGLENIKLRGLFLGLSKNEIKNITEDVIEFSELGDFIKIPVRTYSSGMVLRLGFSISTAINPEILLMDEWMSVGDSDFKRKAEMRLNSFISKAGIMVMATHDDELAKSVCNKFIRLEHGEIVSKGGF

SEQ ID NO: 73460 - protein, 213 aa, Salmonella paratyphi A
MSKPVIVLWSDANFFSPYVLSAWVALQEKGLSFTLKTRDLDQGEHLQPGWRGYALTQRVPVLEADNFELSESSAIAEYLEERFAPPQWERIYPHDLQKRRARQIQAWLRSDLLPLREERPTDVVFAGAKKAPLSEAGKASAAKLFATAEALLGQGTQNLFGEWCIADTDLALMINRLALHGDDVPASLAAYATFQWQRASVQRFIALSSKRSG

SEQ ID NO: 73461 - protein, 458 aa, Salmonella paratyphi A
NSGLLGIKDIVFMNVIAILSLRQIPNVAPYGASAMLLWVIAAFCLFFPLAMVCGELSTGWPKDGGIFVWIKEAFGKRIAWIVVVCFLFSCVLFFPLMLQFGFTALGYMIGGGLAENKAFIGIGSAVIFWLLTLMNIRGMEWTKIINSISAWCGVFIPSANLILLAVVWLCTGHQMQTDYTTAKNWIPDLGHWDTIVFLSSMMFAFAGLEVAPMIAGRTRNPQRDFPRAMASSAAVIVGIYMVGTWALNTLLPAGKTDIVAGVMQAMHAAADTLHMPWLIPVMAICMFFGALGQINSWLVGPIYMLQEASREDNLLGDRIGKLHPVWKTPAFALTVQAIIVTVLCFSTFISPSVAAAYWMLTALTTITYFIPYLVMFPAFWRLRKTQPDTPRSFKIPGKVLPAILPALGFLSIAFAVALLFIPPSQIDMGGYFQYAGKIIGGAVLAVVVAEYIYHRAQK

SEQ ID NO: 73462 - protein, 296 aa, Salmonella paratyphi A
MQILITGGTGLIGRHLIPRLLTLGHQVTVVTRNPDNARQILDSRVTLWKGLAEREHLNEIDAIINLAGEPIADKRWTSHQKERLCQSRWAITQKLVDLIHASATPPSVLISGSATGYYGDLGDVVVTEDEPPHNEFTHKLCARWEQIACRAQSDQTRVCLLRTGVVLAPQGGILGKMVPPFRLGLGGPVGNGRQYLAWIHIDDMVNGILWLLDNDLRGPFNMVSPYPVHNEHFAHALGRALPPAIIRIPATAIRLLMGESSVLVLGGQRALPKRLEAAGFAFRWYDLEEALADVIR

SEQ ID NO: 73463 - protein, 227 aa, Salmonella paratyphi A
MLYGFSGVILQGAIVTLELALSSVVLAVLIGLVGAGAKLSQNRVTGLIFEGYTTLIRGVPDLVLMLLIFYGLQIALNVVTDSLGIDQIDIDPMVAGIITLGFIYGAYFTETFRGAFMAVPKGHIEAATAFGFTHGQTFRRIMFPAMMRYALPGIGNNWQVILKATALVSLLGLEDVVKATQLAGKSTWEPFYFAVVCGLIYLVFTTVSNGVLLLLERRYSVGVKRAD

SEQ ID NO: 73464 - protein, 260 aa, Salmonella paratyphi A
MKKLALSLSLVLAFSSATAAFAAIPQKIRIGTDPTYAPFESKNAQGELVGFDIDLAKELCKRINTQCTFVENPLDALIPSLKAKKIDAIMSSLSITEKRQQEIAFTDKLYAADSRLVVAKNSDIQPTVASLKGKRVGVLQGTTQETFGNEHWAPKGIEIVSYQGQDNIYSDLTAGRIDAAFQDEVAASEGFLKQPVGKDYKFGGPAVKDEKLFGVGTGMGLRKEDNELREALNKAFAEMRADGTYEKLAKKYFDFDVYGG

SEQ ID NO: 73465 - protein, 762 aa, Salmonella paratyphi A
MEDYIREKTHKSSDKNDREDNVSRYKGLPSRNLSVAIREYAPGAEIILDGRVFRSAGVSLHWHNLNADTNEAQRLDSAWRCHKCGTLGYEEGIGGSGDLFCTNSACGERITLDNRRQVLQPAGFVTDAHTPVTNNIETMKFIPVVPAWVFVKAERVPLPNPLMGFMASGADGHVFQQSMGEGGHGYALCLSCGRAESMLNATDTPKSMEAHYPPRPGKSDRDSQNQRIICPGSTALNKNVTLGALARTDVFELILRRPQNGEYIPDNSDEGRIVAMTLAVALRRALASVLGVSATELGYAVRPVRLDNEQSVLAVQLYDIISGGAGFASSAPLHIEAVLKGMVKQLGCRHCDTACSECLLDSQTRHDHDQLDRKAAQAWLGEDFSHYIGLPEAEKFSLADAQYCPGSIEDAIRRAINDGARKLTLWMNGPLNEWDLYARQFRTAIQNYRLKDEVEVTLVVPGHIEDPELLQEIAQFAAIGVQLCQSELNTDTPVVAQVAFNDRLMTLISRSPEATIPGPNWHLNSQMVIRSHAFEPITLSKAELLSDAAGSRGLVNDIEIHKQLNGPVSQFGQRFWGVLTGAQEDIQTLLKENQVTRIHYSDRYLQNPVALALLGGLLKPLKSILAQDAQVTIDTLFKSKERPGNKPFHDWMSEADFQDFADQWFAASMGRAVVVNTVGSPRDIPHHRKLMVTFSNGQALKIRFDQGMGYWRIVFARAYRDFDFNDDVAFQLGNMAKACVEGQVVNSEESWATDVLVQVIVP

SEQ ID NO: 73466 - protein, 120 aa, Salmonella paratyphi A
MRQIPQNHIHTRSTPFWNKETAPAGIFERHLDKGTRPGVYPRLSVMQGAVKYLGYADEHCSEPEEIMVINAGEFGVFPPEKWHNIEVMTDDTYFNIDFFVAPEVLMEGATSRKVIHAGRE

SEQ ID NO: 73467 - protein, 60 aa, Salmonella paratyphi A
MGKATYTVTVTNNSNGVSVDYETEAPMTLLVPEVAAEVVKDLVNTVRSYDTENEHDVCGW

SEQ ID NO: 73468 - protein, 82 aa, Salmonella paratyphi A
MGILSWIIFGLIAGILAKWIMPGKDGGGFFMTIILGIVGAVVGGWISTFFGFGKVDGFNFGSFAVAVIGAIVVLLIYRKIKS

SEQ ID NO: 73469 - protein, 309 aa, Salmonella paratyphi A
MENVTFVSNSHQRPAADNLQKLKSLLTNTRQQIKSQTQQVTIKNLYVSSFTLVCFRSGKLTISNNHDTIYCDEPGMLVLKKEQVVNVTLEEVNGHMDFDILEIPTQRLGALYALIPNEQQTKMAVPTEKAQKIFYTPDFPARREVFEHLKTAFSCTKDTSKGCSNCNNKSCIENEELIPYFLLFLLTAFLRLPESYEIILSSAQITLKERVYNIISSSPSRQWKLTDVADHIFMSTSTLKRKLAEEGTSFSDIYLSARMNQAAKLLRIGNHNVNAVALKCGYDSTSYFIQCFKKYFKTTPSTFIKMANH

SEQ ID NO: 73470 - protein, 389 aa, Salmonella paratyphi A
MEHLHMKTRTQQIEELQKEWTQPRWEGITRPYSAEEVVKLRGSVNPECTLAQLGAAKMWRLLHGEAKKGYINSLGALTGGQALQQAKAGIEAIYLSGWQVAADANLASSMYPDQSLYPANSVPAVVDRINNTFRRADQIQWASGIEPNDPRYVDYFLPIVADAEAGFGGVLNAFELMKSMIEAGAAAVHFEDQLASVKKCGHMGGKVLVPTQEAIQKLVAARLAADVMGVPTLVIARTDADAADLITSDCDPYDSGFITGERTSEGFYRTHAGIEQAISRGLAYAPYADLVWCETSTPDLELARRFADAIHAKYPGKLLAYNCSPSFNWQKNLDDKTIASFQQQLSDMGYKYQFITLAGIHSMWFNMFDLAHHTLRAGHEHYVEKVHNP

SEQ ID NO: 73471 - protein, 124 aa, Salmonella paratyphi A
VGSQKLVDLRELKLHGDSVSLEELRRILRPWLRMPEPPDTVVLGCTHSPLLRDELLQVLPEGTRLVDSGAAIARRTAWLLEHEAPDAKSTDANIAYCMAMTPGAEQLLPVLQRYGFETLEKLAV

SEQ ID NO: 73472 - protein, 84 aa, Salmonella paratyphi A; identical to SEQ ID NO: 72724

SEQ ID NO: 73473 - protein, 134 aa, Salmonella paratyphi A
  MISC_FEATURE (25)..(25): X=any amino acid
  MISC_FEATURE (107)..(107): X=any amino acid
  MISC_FEATURE (127)..(127): X=any amino acid
  MISC_FEATURE (129)..(129): X=any amino acid
GILTRFPSTTPFGLALGVDSPCPDXRWTGTLGLPASGLFTRFIVTYVSIRTSDTSSNPTGHLHRLTERSPTQQHLSVAAAASVHGLAPLHLPRRPTRPVSYYAFFKXWLLLSQHPGCLGLPTSFPTXPXLWDLS

SEQ ID NO: 73474 - protein, 139 aa, Salmonella paratyphi A
  MISC_FEATURE (51)..(51): X=any amino acid
  MISC_FEATURE (90)..(90): X=any amino acid
  MISC_FEATURE (96)..(96): X=any amino acid
  MISC_FEATURE (116)..(116): X=any amino acid
ISLSLGWRQPGHHYAIRAGRNLPDKEFRYLRTVIVTAAVYRGFDQELRLRXPHQLTFRHRAGVTPYTSTFVFAQCCVFNKQLQPAGIFDXLQLHEXITSPTCQACLLPKLRHHFAXFLHPSSLKRLGILYLTTCVGLGY

SEQ ID NO: 73475 - protein, 122 aa, Salmonella paratyphi A
  MISC_FEATURE (19)..(19): X=any amino acid
  MISC_FEATURE (25)..(25): X=any amino acid
MLSALISSAFSYRAVPLAXQPEHQXCVHSGPLVLGAAPLSSPAPTADRDRTVSRRSKPSSRTTLNGEQPYPWDLLQPQDVMSRHRGAKHRRRYELLGGISLLSPEYLLSVERWPFHSEPPDH

SEQ ID NO: 73476 - protein, 485 aa, Salmonella paratyphi A
  MISC_FEATURE (142)..(142): X=any amino acid
VTTFLRQRHGQFIAGERQAGNGTNFSVTNPATGKIIADVVSATPTQAEEAMQSARRAFDVWRKMPTLQRGALLLKLADTLAAHREELAQLESVCSGKTILLSRGLELDQSVAFLRYFAGWAGKITGETLNVSLPSMGEERYXTFTQRQPIGVVVGIVPWNFSIMIVIWKLAPALVCGCTIVIKPSEYTPLTLLRVAELAKEAGFPDGVINVVNGAGGEIAQQLIAHPDCAKVSFTGSVATGEKVRRSATSSGKRVTLEPGGKNAALFLNDLTEQAMVNGILEAGYLNQGQICAAAERFYLPQEKLDTVMTLLRQRLSEIVPGSPLDEKTVMGPLANQVQLEKVLRLIQRAREEGDTIVYGGETLPGEGYFLQPTAVKVRSKNSTLIHEETFGPVCSFIGYQNEKEALSHINDSPFGLAASVWSENMSKALHYAEDIDAGMVWVNMHTFLDPAVPFGGMKGSGIGREFGSAFIDDYTELKSVMVRY

SEQ ID NO: 73477 - protein, 619 aa, Salmonella paratyphi A
  MISC_FEATURE (611)..(611): X=any amino acid
SQDAPFGTLLGYAPGGVAIYSSDYNSLDPWDDDDAAFRSYIDDEYMGHKWQCVEFARRFLFLNYGVVFTDVGMAWEIFSLRFLREVVNDNILPLQAFPNGSAAPPEGALLIWQKGGEFNETGHVAIITQLLDNKIRIAEQNVYPHAIAARQQWTRELEMVVENGCYTLRDTFDDTTILGWMIQTDDTQYSLSQPDIANQSLRFAARLPEKGQFDGPWLDESDPLQKAYVQANGHVINQDPYQYFTITESAEQELIKATNELHLMYLHATDKVLKDDNLWRYSIIPKILWPRLRLSCSAVRHHMITGRMDFCMDERGLKVYEYNADSASCHTEAGLILEKWAEQGYTGKGHNPAEGLINELAGAWKHSKARPFVHIMQDDDIEEDYHAQFMQQALHQAGFASKILRGLGELRWDDAGQLIDGDGRLVNCVWKTWAWETAMEQIREVSETEYAAVPIRTGHPENEVRLIDVLLRPEVLVFEPLWTVIPGNKAILPILWSLFPHHRYLLDTDFTVNDELVQTGYAVKPIAGRCGSNIDLVSHQEELLDKTSGKFATQKNIYQQLWCLPKVAGKYIQVCTFTVGGNYGGTCLRGDDSLVIKKESDIEPLIVIKAXRGHSRRDI

SEQ ID NO: 73478 - protein, 483 aa, Salmonella paratyphi A
IATAQVSVARPNWDKSRLVSRIVHLGCGAFHRAHQALFTHHLLEKSDSDWGICEVNLMPGNDARLIANLKAQNLLYTVAERGAESTELKIIGSMKEALHPEFDGHAGILAAMARPETAIVSLTVTEKGYCTDPASGELDVNNPLIQNDLAHPQQPKSAIGYIVEALNMRREQGLKAFTVLSCDNVRENGHVAKAAVLGLAKARDAALAAWIADNVTFPCTMVDRIVPAATEETLQLVADQLGVYDPCAIACEPFRQWVIEDNFVNGRPDWDTVGAQFVADVVPFEMMKLRMLNGSHSFLAYLGYLGGYDTIADTMTNPAYRRARCRVMLDEQAPTLSMPEDRSEGYANLLIARFTNPSLKHRTWQIAMDGSQKLPQRLLDAVRLHLQQAMTYRRLTLGVAGWMRYVGGVDEQGKTIDVVDPLLAQYQAIHQQYQTPEEAVRGLLAIESIFGSDLPKNLEFVQAVTDAYQQLLQNGAKATVEAL

SEQ ID NO: 73479 - protein, 258 aa, Salmonella paratyphi A
MLRFSANLSMLFTEYDFLERFDKAALSGFRGVEFMFPYDNDIEVLKRKLRDNNLEHTLHNLPAGDWAAGERGIACIPGREEEFRDGVAAAIRYARALGNKKINCLVGKTPSGFSATEIHDTLVENLRYAANMLAKEDILLLIEPINHFDMPGFHLTGTQQALALIKDIGSRNIKIQYDIYHMQRMEGELTQTMTAWADKIGHLQIADNPRRASPGTGEINYDFIFNVIKQSDYDGWVGCEYKPLTTTEAGLSWINQYR

SEQ ID NO: 73480 - protein, 291 aa, Salmonella paratyphi A
MKLGFIGLGIMGSPMAINLARAGHQLHVTTIGPVADELLSLGAVNVETARQVTEFADIIFIMVPDTPQVEEVLFGEHGCAKTSLQGKTIVDMSSISPIETKRFAQRVNEMGADYLDAPVSGGEIGAREGTLSIMVGGEQKVFDRVKPLFDILGKNITLVGGNGDGQTCKVANQIIVALNIEAVSEALVFASKAGSDPVRVRQALMGGFASSRILEVHGERMINRTFEPGFKIALHQKDLNLALQTAKAGLNLPNTATCQELFNTCAANGGSQLDHSAMVQALELMANHKLS

SEQ ID NO: 73481 - protein, 484 aa, Salmonella paratyphi A
  MISC_FEATURE (119)..(119): X=any amino acid
MEHQRELYQQRGYSEDLLPKTETQRNWKAFNYFTLWMGSVHNVPNYVMVGGFFILGLSTFNIMLAIIISALFIAAAMVMNGAAGSKYGVPFAMILRGSYGVRGALFPGLLRGGIAAIMXFGLQCYAGSLAFLILIGKIWPGFLTLGGDFKLLGLSLPGLITFLIFWIINVGIGFGGGKVLNKFTAILNPCIYIVFGGMAIWAISLVGIGPILDYLPSAVQKAEHSVFLFLVVINAVVAVWAAPAVSASDFTQNAHSFRAQALGQTLGLIVAYILFAVASVCIIAGASIHYGMDTWNVLDIVQRWDSLFASFFAVLVILMTTISTNATGNIIPAGYQIAALAPTKLNYKNGVMIASIISLLICPWKLMENQDSIYLFLDIIGGMLGPVIGVMLAHYFVVMRGKINLDELYTASGDYKYYDNGFNLTAFSVTLVAVILSLGGKFIPFMEPLSRVSWFVGVIVAFVAYALLKKRTGFENTGEKKLAG

SEQ ID NO: 73482 - protein, 453 aa, Salmonella paratyphi A
MSFDLIIKNGTVILENEARVIDIAVQGGKIAAIGENLGEAKNVLDATGLIVSPGMVDAHTHISEPGRTHWEGYETGTRAAAKGGITTMIEMPLNQLPATVDRETIELKFDAAKGKLTIDAAQLGGLVSYNLDRLHELDEVGVVGFKCFVATCGDRGIDNDFRDVNDWQFYKGAQKLGEMDQTVLVHCENALICDELGEEAKREGRVTAHDYVASRPVFTEVEAIRRVLYLAKAAGCRLHVCHISSPEGVEEVTRARQEGQDVTCESCPHYFVLDTDQFEEIGTLAKCSPPIRDQENQKGMWEKLFNGEIDCLVSDHSPCPPEMKAGNIMQAWGGIAGLQNCMDVMFDEAVQKRGMSLPMFGKLMRTNAADIFGLKHKGRIAPGKDADLVFIQPDSSYVLKNEDLEYRHKVSPYVGRTIGARITKTILRGDVIYDIEHGFPVPPKGQFILKHQQ

SEQ ID NO: 73483 - protein, 122 aa, Salmonella paratyphi A
  MISC_FEATURE (19)..(19): X=any amino acid
  MISC_FEATURE (25)..(25): X=any amino acid
MLSALISSAFSYRAVALAXQPEHQXCVHSGPLVLGAAPLSSPAPTADRDRTVSRRSKPSSRTTLNGEQPYPWDLLQPQDVMSRHRGAKHRRRYELLGGISLLSPEYLLSVERWPFHSEPPDH

SEQ ID NO: 73484 - protein, 348 aa, Salmonella paratyphi A
MASGIQPDAGQILNSLINSVLVVDDALAIHYANPAAQQLLAQSSRKLFGTPLPELLSYFSLNIDLMRESLAAGQGFTDNEVTLVIDSRSHILSLTAQRLPDDFILLEMAPMDNQRRLSQEQLQHAQQIAARDLVRGLAHEIKNPLGGLRGAAQLLSKALPDPALTEYTKVIIEQADSVRNLVDRLLGPQHPGMHITESIHKVAERVVALVSMELPDNVRLIRDYDPSLPELPHDPEQIEQVLLNIVRNALQALGPEGGEITLRTRTAFQLTLHGTRLPAARIDVEDNGPGIPPHLQDTLFYPMVSGREGGTGLGLSIARNLIDQHAGKIEFTSWPGHTEFSVYLRIRK

SEQ ID NO: 73485 - protein, 469 aa, Salmonella paratyphi A
  MISC_FEATURE (417)..(417): X=any amino acid
MSAEHVLTMLNEHEVKFVDLRFTDTKGKEQHVTIPAHQVNAEFFEEGKMFDGSSIGGWKGINESDMVLMPDASTAVIDPFFADSTLIIRCDILEPGTLQGYDRDPRSIAKRAEDYLRATGIADTVLFGPEPEFFLFDDIRFGASISGSHVAIDDIEGAWNSSTKYEGGNKGHRPGVKGGYFPVPPVDSAQDIRSEMCLVMEQMGLVVEAHHHEVATAGQNEVATRFNTMTKKADEIQIYKYVVHNVAHRFGKTATFMPKPMFGDNGSGMHCHMSLAKNGTNLFSGDKYAGLSEQALYYIGGVIKHAKAINALANPTTNSYKRLVPGYEAPVMLAYSARNRSASIRIPVVASPKARRIEVRFPDPAANPYLCFAALLMAGLDGIKNKIHPGEAMDKNLYDLPPEEAKEIPQVAGSLEXTVNALDLDREFLKAGGVFTDEAIDAYIALRREEDDRVRMTPHPVEFELYYSV

SEQ ID NO: 73486 - protein, 328 aa, Salmonella paratyphi A
MNDNAFTFQTLHPETIMDALFEQGIRVDSGLTPLNSYENRVYQFQDEDRRRFVVKFYRPERWSVDQIREEHQFALELVKDEVPVAAPLAFNGQTLLAHQGYHYAIFPSVGGRQFEADNIDQMEAVGRYLGRLHQTGRKRPFTFRPDIGLAEYLFEPRQVFEDAALIPSGQKAAFLKATDTLLSAVTECWRTDFATLRLHGDCHAGNILWRDGPLFVDLDDARNGPAIQDLWMLLNGNKAEQRMQLETIIEAYEEVSEFDTAEIGLIEPLRAMRLVYYLAWLIRRWGDPAFPKNFPWLTGEDYWQRQTTTFIEQTKILHEPPLQLTPMY

SEQ ID NO: 73487 - protein, 927 aa, Salmonella paratyphi A
MVQIPENPLILVDGSSYLYRAYHAFPPLTNSAGEPTGAMYGVLNMLRTLIMQYQPTHAAVVFDAKGKTFRDELFEHYKSHRPPMPDDLRAQIEPLHAMVKAMGLPLLAVSGVEADDVIGTLAREAEKVGRPVLISTGDKDMAQLVTPNITLINTMTNTILGPDEVVNKYGVPPELIIDFLALMGDSSDNIPGVPGVGEKTAQALLQGLGGLDTLYAEPEKIAGLTFRGAKTMAGKLAQNKDVAYLSYKLATIKTDVELELTCEQLEVQQPIADELLGLFKKYEFKRWTADVESGKWLQAKGAKPAAKPQETVVIDESPSEPAAALSYENYVTILDDVTLESWIEKLKKAPVFAFDTETDSLDNIAANLVGLSFAIEPGVAAYVPVAHDYLDAPDQISRQRALELLKPLLEDEKVRKVGQNLKYDRGVLQNYGIELRGIAFDTMLESYILNSVAGRHDMDSLSDRWLKHKTITFEDIAGKGKNQLTFNQIALEEAGRYAAEDADVTLQLHLKMWPELQQHKGPLNVFENIEMPLVPVLSRVEANGVKIDPAVLHKHSEEITLRLAELEKKAHDIAGEAFNLSSTKQLQTILFEKQGIKPLKKTPGAAPSTSEEVLEELALDYPLPKVILEYRGLAKLKSTYTDKLPLMINPKTGRVHTSYHQAVTATGRLSSPIPNLQNIPVRNEEGRRIRQAFIAPEDYLIVSADYSQIELRIMAHLSRDKGLLTAFAGKDIHRATAAEVFGLRWDSVTGEQRRSAKAINFGLIYGMSAFGLSRQLNIPRKEAQKYMDLYFERYPGVLEYMERTRAQAKEQGYVETLEGRRLYLPDIKSSNARGARGAERAAINAPMQGTAADIIKRAMIAVDAWLQAEQPRVRMIMQVHDELVFEVHKDDLDAVAKRIHQLMENCTRIDVPLLVEVGSGENWDQAH

SEQ ID NO: 73488 - protein, 356 aa, Salmonella paratyphi A
MFSEIMRYILDLGPTVMLPLVIIVFSKLLGMKLGDCFKSGLHIGIGFVGIGLVIGLMLDSIGPAAKAIAEHFQINLHVIDVGWPGSSPMTWASQIALVAIPVAIGVNVLMLVTRMTRVVNVDIWNIWHMTFTGAMLHLATGSYWLGILGVVVHAAFVYKLGDWFAKDTRDYFGLEGIAIPHGSSAYLGPVAVLVDTIIEKIPGLNRIHFSADDVQKRFGPFGEPVTVGFVMGLVIGVLAGYDAKAVLQLAVKTAAVMLLMPRVIKPIMDGLTPIAKHARKRLQAKFGGQEFLIGLDPALLLGHTSVVSASLIFIPLTILIAVLVPGNQVLPFGDLAPSVSLLRWRLRYTRATCSAR

SEQ ID NO: 73489 - protein, 341 aa, Salmonella paratyphi A
MKSVVIHAEGDVRVEERPLPQLQAEDDVLVKVVSSGLCGSDIPRIFAQGAHYYPITLGHEFSGYVESYGTGVTDMQPGDASACVPLLPCFHCPQCERGYFSLCKQYQFVGSRSEGGNAEYVVVKRANLFRLPSDMPIEDGAFIEPITVGLHAFHLAQGCEGKNVIIVGAGTIGLLALQCARELGAEAVTAIDINPQKLELAKRSAATHTCNSREMTADDIQTALSDIQFDQLVLETAGTPQTVSLAIDIAGPRAQLALVGTLHHDLTLTTRTFGLILRKELTLLGSWMNYSAPWPGEEWETAAALLAEKRLQLTPLIAHRGDAESFAEAVKALNAAPMQGK

SEQ ID NO: 73490 - protein, 284 aa, Salmonella paratyphi A
MFIISSKNMLQKAQHAGYAVPAFNIHNLETLQVVVETAAEMRSPLIVAGTPGTFSYAGMGNIVAIAGDLAREYNLPLAIHLDHHESLADIESKVMAGIRSVMIDGSHFPFEENVALVKSVVDFCHRYDTSVEAELGRLGGIEDDLVVDSKDALYTNPQQAREFVARTGIDSLAVAIGTAHCMYAAEPKLDSERLAEIRALVDIPLVLHGASGLPESDIRQAISLGVCKVNVATELKIAFSDALKEYFLQNPKANDPRHYMQPAKQAMKEVVRKVIHVCGCEGQL

SEQ ID NO: 73491 - protein, 287 aa, Salmonella paratyphi A
MKQNESADNSQGQLFIVPTPIGNLADITQRALEVLQAVDLIAAEDTRHTGLLLQHFGINARLFALHDHNEQQKAETLVAKLKEGQNIALVSDAGTPLINDPGYHLVRTCREAGIRVVPLPGPCAAIAALSAAGLPSDRFCYEGFLPAKSKGRRDALKAIETEPRTLIFYESTHRLFDSLEDIVAVLGESRYVVLARELTKTWETIHGAPVGELLAWVKEDENRRKGEMVLIVEGHKAQEDDLPADALRTLALLQAELPLKKAAALAAEIHGVKKNALYKYALEQQEE

SEQ ID NO: 73492 - protein, 304 aa, Salmonella paratyphi A
MIYTLTLNSAIDMNIFSDPLQPNIVNRTHHTEFCPNGKGVNVALVLDHFQIPAHILGIFGGFTGHYIVESLRTKKMPVTPAWVEEPTRINIFIHDGQQEYKLVNPGSYIPDECKQQIITIISQLPDAEYLVISGSLPQGIESRFYAEIMHICQQKNIGVILDISHPSLRQLLEFKPLLIKPNDEEVKAIFGLTVSDDNDAKNALTTLHALGAQNVLLTLGAKGMYFSNGIDYWFCSAPTVDLVSSACAGDAALAAFLSQWLSTGEVEYALSLASATGADVASSAGLGQLAAIETLLSQIHVRKL

SEQ ID NO: 73493 - protein, 448 aa, Salmonella paratyphi A
KIIAVTGCPTGIAHTFMAEEALKNAAKKLSVEIKVETNGASGVENAIQPADLVDIAGVIIAADKDVLPDRFNGLPVVEVPVKEAIHHPADVINKVINGEAPIRKGESTTSTEIIEKESLGRQIYKHLMSGVSNMLPFVVAGILIAVSFLWGIYSADPNSAEYNATAAMLMKIGQQAFSIMVPVFTAYIAFSISGRPGMVAGFVGGLLANATGAGFLGGIIAGFAAGYLMLWVKDRLEGLPRQYEGLKSIFIMPLIGVLVIGVLMSLLGQPVAAINNSMMNWLASLQEANPILLGIVVGAMCSFDFGGPVNKAAYVTGTLLLGQGNFYFMAGVSAACITPPLVIALATTFFPKGFSEEERAAGMVNYILGCTHITEGAIPFAAKDPLRVIPMMMIASSISAVLSYSLRIQVPAPHGGFLILPLVSQPLAWVLYILAGSACGAVMLGLWR

SEQ ID NO: 73494 - protein, 292 aa, Salmonella paratyphi A
MNNYTIKDITRASGGFSMLAVDQAEAMRLMFAAAGAKTPVADSVLTDFKVNAAKILSPYASAVLLDQQFCYRQAVEQNAVAKSCAMIVAADDFIPGNGIPVDNVVIDKKINAQAVKRDGAKALKLLVLWRSDEDAQQRLDMVKEFNELCHSNGLLSIIEPVVRTPRCGDKFDREQAIIDAAKELGDSGADLYKVEMPLYGKGARSDLLTASQRLNGHINMPWVILSSGVDEKLFPRAVRVAMEAGASGFLAGRAVWSSVIGLPDTELMLRDVSAPKLQRLGEIVDEMMVKRR

SEQ ID NO: 73495 - protein, 280 aa, Salmonella paratyphi A
MHSGGKTIQLNAGHYQAKIVTVGAGLAELIHHGRHVVIPHKPEEIPMAHLGKVLIPWPNRVTNGCYSYNGKVFQLAVNDPVSQTAIHGLLAWRDWQINYQSAAEASLTIFLPPSYGYPFALISEVIYRLDAANGLHVSIRTQNIGDESAPYGAGAHPYLTCNLQSIDSCVLTLPASEELPADRDFSASCLLGETRLDHAVKTATTPAEWEVRLTSPTQNMSTFLRSNQPWLQIYTGEKLSRKGLAVEPMSCPPDAFNSGIALIHLAPKAIHQLHFSIGCD

SEQ ID NO: 73496 - protein, 211 aa, Salmonella paratyphi A
MKRRDTIVRYTAPERINHWIVAFCFVLAAVSGLGFLFPSFNWLMHILGTPQLARILHPFVGVVMFASFIIMFFRYWHHNLINRDDIFWAKNIRKIVVNEEVGDTGRYNFGQKCVFWAAIIFLVLLLVSGVIIWRPYFAPAFSIPVIRFALMLHSFAAVALIVVIMVHIYAALWVKGTITAMVEGWVTRSWAKKHHPRWYREVRKTTEKETE

SEQ ID NO: 73497 - protein, 306 aa, Salmonella paratyphi A
  MISC_FEATURE (124)..(124): X=any amino acid
  MISC_FEATURE (221)..(221): X=any amino acid
SIRIIPQDELGSSEKRTADMIPPLLFPRLKNVYNRRAERLRELAENNPLGDYLRFAALIAHAQEVVLYDHPLEMDLTARIKEANDQGKPPLDIHVLPRDKHWQKLLHSLIAELKPEMNGPALAXIENLEKASEQELEQMASALFASDFASVSSDKAPFIWAALSLYWAQMASLIPGKARAEYGEARQYCPVCGSMPVSSMVQIDTTQGLRYLHCNLCETEXHVVRVKCSNCEQSRDLHYWSLENEQAAVKAESCGDCGTYLKILYQEKDPKVEAVADDLASLVLDARMELGTFARSSINPFLFPGE

SEQ ID NO: 73498 - protein, 147 aa, Salmonella paratyphi A
KEAILYDALRYLSQQVDIWRRRLLLDESLSAEQKLLARYSPLSECVSNNRYPGCLFIAACTFYPDPTHPIHQLANQQKRAAHDFTHELLTTLEIDDPAMVARQMELVLEGCLSRMLVNRSQADVDTAQRLAEDILRFAQCRQGGALT

SEQ ID NO: 73499 - protein, 536 aa, Salmonella paratyphi A
MKHSLPCRALRKRPMKLGTTVILMVSAVLFSVLVVVHLIYFSQISSMTRDLADKALAVARSLADSPAIREGLKKPPAESGIQPLAEAVSQHNGFLFIVVTNMQGIRYSHPETQRIGQPFKGDDILLALQGKENVAINRGFLAKALRVFTPVYDEHHRQIGVVAIGLELSHVTQQINNSRGSIIWSILFGALVGLLGTYALVKVLKRILFGLEPYEISTLFEQRQAMLQSIKEGVIAVDGSGEVTLINHARQALLDYRKTQDDARLLHPQVVDISEVLRDGTRAADEEIIVKGRLLLVNTFRCASNGEIIGAISTFRDKTEVRQLMQRLDGMVNYADALRERSHEFMNKLHVILGLLHLKSYKQLEAYIIKTANNYQEEIGLLLGKIKSPIIAGFLLSKITRASDFGHSLVISSDSQLLDNNNEDQVTVLITALGNLIENALEALSQESGGEISVSLHYRHGWLHCEVSDDGPGIEPERIEAIFEKGVSSKGAERGVGLALVKQQVEALGGVISVESEPGIFTQFFVQLPWDGKRTS

SEQ ID NO: 73500 - protein, 531 aa, Salmonella paratyphi A
EFIYQAPFPMGEDKTEYYLLTSDYVSVSEFNGESILNVEPQALTLLAQQAFHDASFMLRPEHQQQVAAILNDPEASENDKYVALQFLRNSEIAAKSDLPTCQDTGTAIIMGKKGQRVWTGGGDERASKGVFNTYIEDNLRYSQNAPLDMYKEVNTGSNLPAQIDLYAVDGDEYKFLCVAKGGGSANKTYLYQETKALLTPGKLKNFLVEKMRTLGTAACPPYHIAFVIGGTSAESTLKTVKLASTHYYDALPTEGNEHGQAFRDLHLEQELLEEAQKLGLGAQFGGKYFAHDIRVIRLRVTGASCPVGMGVSCSADRNIKAKINREGIWIEKLEHNPGQYIPPALRQAGEGDAVKVDLNRPMKEILAQLSQYPVSTRLSLTGTIIVGRDIAHAKLKERIESGEDLPQYIKDHPIYYAGPAKTPAGYPSGSLGPTTAGRMDSYVDLLQSHGGSMIMLAKGNRSQQVTDACKKHGGFYLGSIGGPAAVLAQQSIKHLECVEYPELGMEAIWKIEVEDFPAFILVDDKGNDFFQ

SEQ ID NO: 73501 - protein, 286 aa, Salmonella paratyphi A
MRLLKRVIVVVLLGVILFMVRDDIRYVYQLILKYGDKPSALRLSSYKAVIQQKPVAGVKSNLSGLTYSAEDRMLFAVINNPPELVWLTTEGQLVGRMPLQGIHDPESIAWSGGNQFQIGSEKDGAVYKTQVDIQRGAMQIISMVKLEGYDKAKNKGLEGTAWDAKNERLYAAKERKPIIIKEVEMSKNGITRALPSAITASVSDVSGLEYHAPTDSLLVLSDESKMILEVSSEWRVRDRLFLTAEWSGLRDDIPQPEGIAMDNENNLYIVSEPNLFYKFSCDIQND

SEQ ID NO: 73502 - protein, 98 aa, Salmonella paratyphi A
  MISC_FEATURE (15)..(15): X=any amino acid
WRKSAAMNTAGQWTXPVKGNLMRIEIMIDKEQKISQATLDALESELYRNLRPLYPKTAIRIRKASANGVELSGLKLDEDKKRVMEIMQQVWEDDSWLH

SEQ ID NO: 73503 - protein, 192 aa, Salmonella paratyphi A
  MISC_FEATURE (144)..(144): X=any amino acid
LATEMMGEEDGYLAESINKDIEECNAIIEQFIDYLRTGQEMPMEMADLNSVLGEVIAAESGYEREINTALQAGSIQVKMHPLSIKRAVANMVVNAARYGNGWIKVSSGTESHRAWFQVEDDGPGIKPEQRKHLFQPFVRGDTPXSTSGTGLGLAIVQRIIDNHNGMLEIGTSERGGLSIRAWLPVPVARVQG

SEQ ID NO: 73504 - protein, 547 aa, Salmonella paratyphi A
  MISC_FEATURE (203)..(203): X=any amino acid
MHHATPLITTIVGGLVLAFILGMIANKLRISPLVGYLLAGVLAGPFTPGFVADTKLAPELAELGVILLMFGVGLHFSLKDLMAVKSIAIPGVVAKIAVATLLGMALSPVLGWSLMTGIVFGLCLSTASTVVLLRALEERQLLDSQRGQIAIGWLIVEDLVMVLTLVLLPAVAACVEKRRCRHSSLAVDMGIIIGKVVAFMQSXCWVGRRLVPLDLGPQAAHRSRELFTLSVLALALALRLAAVELFDVSFALAVLRWNGLNESELSHRAAHDTLPLRDAFAVLFFVSVGMLFDPLVLIQQPLAVLATLAIIVFGKSIAAFFLVRMFGHSPRTALTIAASLAQIGEFPLFSPDSVWALNLLPRRDRTWCWASAILSIMLNPVLFTLLEKYLAKTETLEEQTLEEAIEEEKQIPVDICNHALLVGFWPRRQSAGRKITGGGIPLVVIETSRTRVDELRERGIRAVLGNAANEEIMNLAHLDCARWLLLTIPNGYEAGEIVASAREKSPDIEIIARAHYDDEVKYITERGANQVVMGEREIARAMLELLE

SEQ ID NO: 73505 - protein, 393 aa, Salmonella paratyphi A
RLVLSKGREKSLLRRHPWVFSGAVSRLEGKANLGETIDIVDHQGKWLARGAWSPASQIRARVWTFDKAESIDIAFFTRRLRQAQQWRDWLAKKDGLDSYRLIAGESDGLPGVTIDRFGYFLVLQLLSAGAEYQRAALISALQTCYPDCAIYDRSDVAVRKKEGMALTQGPVTGELAPALLPIEEHGMKLLVDIQGGHKTGYYLDQRDSRLRTRRYVENQRVLNCFSYTGGFAVSALMGGCRQVVSVDTSQDALDIARQNVELNQLDLSKAEFVRDDVFKLCAAYREHGEKFDVIIMDPPKFVENKSQLMGACRGYKDINMLAIQLLNPGGILLTFSCSGLMTSDLFQKIIADAAIDAGRDVQFIEQFRQPPIHPVIATYPEGLYLKGFACRVM

SEQ ID NO: 73506 - protein, 454 aa, Salmonella paratyphi A
MVKLSMTLRLTISFIAILILACTGISWTLYNALSKELTYRDDMTLINRAAQMQQLLLDGARPENLPLYFNRMVDTKQDILLIHSATGHNVAINHSGIPDQRFNEIPLAKNITRETLFRQAVQGTELTAVRVNARSGDDPLTLTIARLATERRQMLAQYRRNSLLISLIAILVCSALSPLVIRNGLRAITSLSRLTAATDSGTLRQPLGTQALPVELRPLGQALNTMRQKLSDDFERLNQFADDLAHELRTPVNILLGKNQVMLSQERSAEEYQQALVDNIEELEGLSRLTENILFLARAEHQNIAVKKQPVSLNALVENMLDYLSLLAEEKRICFINQCQGTVWADEILLQRVLSNLLTNAIRYSDENAVIRIESAYDDNVAEIRVANPGSHPADADKLFRRFWRGDNARHTAGFGLGLSLVNAIALLHGGSASYRYADEHNIFSVRLPDSGDS

SEQ ID NO: 73507 - protein, 165 aa, Salmonella paratyphi A
MDYQNNVSEERVAEMIWDAVSEGATLKDVHGIPQDMMDGLYAHAYEFYNQGRLDEAETFFRFLCIYDFYNPDYTMGLAAVCQLKKQFQKACDLYAVAFTLLKNDYRPVFFTGQCQLLMRKAAKARQCFELVNERTEDESLRAKALVYLEALKTAETEQHSEQEKE

SEQ ID NO: 73508 - protein, 263 aa, Salmonella paratyphi A
  MISC_FEATURE (72)..(72): X=any amino acid
  MISC_FEATURE (139)..(139): X=any amino acid
VMKPTTISLLQKCKQEKKLATITAYDYTSAKLFADEGINVMLVGDSLGMTIQGHDSTLPVTVEDIAYHTRLXTRGAPNCLLLSDLPFICTPTPEQACENAAIVMRAGANMVKIERGAWLVDTVKMLTERACRFCGHLAXRHQSVNIFGGYKIQGRATPGRVLLDDALALEAPALNCLVLECVPVELAKRVTEALSIPVIGIGAGNVTDGQILVMHDAFGITGGHIPKFAKNFLAEAGDMRAAVQQYMAEVESGVYPGEEHSFH

SEQ ID NO: 73509 - protein, 156 aa, Salmonella paratyphi A
  MISC_FEATURE (59)..(59): X=any amino acid
  MISC_FEATURE (92)..(92): X=any amino acid
AYIALGSNLASPLEQVNAALKAIADIPDSRIVAVSSFYRTPPLGPQDQPDYLNAAVALXTALAPEELLNHTQRIELQQGRVRKAERWGPRRXDLDIMLFGDEVINTDRLTVPHYDMKNRRFMLWPLFEIAPGGIFPDGTSLHQHLTHLGGAKPGHW

SEQ ID NO: 73510 - protein, 452 aa, Salmonella paratyphi A
VLSREESEAEQAIARPHMTIIPREQHAISRKDISENALKVLYRLNKAGYEAYLVGGGVRDLLLGKKPKDFDVTTNATPDQVRKLFRNCRLVGRRFRLAHVMFGPEIIEVATFRGHHEGSESDRTTSQRGQNGMLLRDNIFGSIEEDAQRRDFTINSLYYSVADFTVRDYVGGMQDLKEGVIRLIGNPETRYREDPVRMLRAVRFAAKLNMRISPETAEPIPRLATLLNDIPPARLFEESLKLLQAGNGYETYQQLREYHLFQPLFPTITRYFTENGDSAMERIIAQVLKNTDNRIRNEMRVNPAFLFAAMFWYPLLEMAQKIAQESALAYYDVSRLAMNDVLDEACRSLAIPKRLTTLTRDIWQLQLRMSRRQGKRAWKLMEHPKFRAAFDLLELRAQVENNTELQRLAQWWAEFQASAPPEQKGMLNELDDDPAPRRRRSRPRKRARREGT

SEQ ID NO: 73511 - protein, 252 aa, Salmonella paratyphi A
  MISC_FEATURE (224)..(224): X=any amino acid
FFIARSMTDSHYIGRFAPSPSGNLHFGSLIAALASYLQARAQREFGRVRIEDIDPPREVPGAAATILRHVEHYGLHWDGEVLWQSQRHEAYREALAWLHEQGLSYYCTCPRSRIQRLGGIYDGHCRTLCHGPENAAVRIKQQHPVMHFHDALRGDIQADPQLASEDFIIHRRDGLFAYNLAVVVDDHFQGVTEIVRGADLIEPTVRQLSLYKQFGWRAPGYVHXSWRLNEQGAKLSKQNHAPALATGDRARY

SEQ ID NO: 73512 - protein, 46 aa, Salmonella paratyphi A
MEDEDFGYCESCGVEIGIRRLEARPTADLCIDCKTLAEIREKQMAG

SEQ ID NO: 73513 - protein, 829 aa, Salmonella paratyphi A
EAVEFNEQFLLNSSANIDISRYAYGNPVLAGTYRVKVNLNNALKSTSEITFNENGTPRASACLTPLLLTQAGVDPAAMRDDVEVDDNTTCLDIKKYYPGATANYDSGKQAMDLNFPQIYILKRPAGYVDPSLWEDGVPAAIVSYDMNAWHSEGNGTTSDTAYVELRYGLNMGPWRLRSRGSLNWNKDTGSEYNNQDVYLQRDITALKAQMVIGDSYTRGDAFDSFSLSGIRMYNDDRMLPMGSSNYAPVIRGVANSNAKVTVMQSGNKIYETTVTPGAFEINDLSTTGYGNDLLVTVEEADGSKRSFTVPFSSVTQMLPPGATRWDIGVGELNDDSLHDKPQVGYAQFYYGLNNTFTGYIGAQYTDMNFYAGLLGLAMNTGIGAFAFDVTQSHASIDDLGTLSGQNYRLTYSKMIEATNTSFNVAAYRFSTEDYLSLNDAASLQDSVKHQQYAQQSYRSGDELYDDYQRTKNQVQISINQPLNQGETTWGSVYVSGTWQDYWNDAGSTANYSVGYNNSFAYGAISVSLQRAYDQNGSKDDSVYLSFSIPLSMFSHNGERSGGFSNINMGLRSDMKGGTNVNSTASGNTKDSDISYSVSATSSSGNYGNLNQVSGFGSLNSSYGPFRLSASFGDDNSQQYSASYSGGMVLHSGGVAFTPGSIGETDAVALVKASAHKAAGLGYSSSEIGSSGYGILPYMSAYRENRVSLDISTLENDVEIKSTSTVTVPQRRRCAGEFETDEGRSLILELLRSDKGFIPLGADVLNEKNETVGTVGQAGQAYVRGVEPQGELRVVWGSGKETTCTVRYQLAETTAKAGLTPVLSNQLCHL

SEQ ID NO: 73514 - protein, 250 aa, Salmonella paratyphi A
MVNTVITKGFKTTCFAAAAFTAFATFQVNADIVISGTRIVYPASSKDVIVNLDNRGNKPLLVQTWLDDGRDGVDPQELKLPFVITPPVSRIDPQKGQSLRITYMGSTLPQDRESLFWFNVLEIPPKSKAKEGESLNQLQLAFRTRIKLFFRPDGLKGTPGDAAANLKWSQKKEDNTLSLFAQNDSAYNVSISNVKLKVGGKEYTVDSKSVLPFSGVSMPVKGLSNNINGTVIYSTINDNGGTNKREAKID

SEQ ID NO: 73515 - protein, 75 aa, Salmonella paratyphi A
MKKTAAIISACMLTFALSACSGPNYVMHTNDGRSIVTDGKPQTDNDTGMISYKDANGNKQQINRTDVKEMVALEN

SEQ ID NO: 73516 - protein, 444 aa, Salmonella paratyphi A
  MISC_FEATURE (23)..(23): X=any amino acid
MTDYASFAKVSGQLDELCMISIXFLLGRSMSGANSAISRRRLLQGAGHWLLSVSQVGLAAVSQVVAVRIWPASSYTRVTVESNRLLKYKQFALSNPDRVVVDIEDVNLNSVLKGIGAQIRSDDPYIKSARVGQFDPKTVRMVFELKQNVKPQLFALAAVAGFKERLVMDLYPANAQDMQDPLLALLEDYNKGDLDKQVPPSQRRPQPGKAGRDRPIVIMLDPGHGGEDPGAIGKYKTREKDVVLQIARRLRALIEKEGNMKVYMTRNEDIFIPLKVRVAKAQKQRADLFVSIHADAFTSRQPSGSSVFALSTKGATSTAAKYLAQTQNASDLIGGVSKSGDRYVDHTMFDMVQSLTIADSLKFGKAVLKQLGKINDLHKNKVEQAGFAVLKAPDIPSILVETAFISNIEEERKLKTATFQQQVAESILAGIKAYFADGATLARR

SEQ ID NO: 73517 - protein, 412 aa, Salmonella paratyphi A
KRYIIPFALLCSLFFLWAVANNLNDILLPQFQQAFTLTNFQAGLIQSAFYFGYFVIPIPAGILMKKLSYKAGIITGLFLYAFGAALFWPAPEIMNYTLFLIGLFIIAAGLGCLETAANPFVTVLGPESGGRFRLNLAQTFNSFGAIIAVVFGQSLILSNVPHQSQEALDKMTPDQLSAYKHSLVLSVQTPYMIIVAIVLVVALLIMLTKFPALQSDDHSDAKQSSFLSSLSRLIRIRHWRWAVLAQFCYVGAQTACWSYLIRYAIEEIPGMTPGFAANYLTGTMVCFFIGRFTGTWLISRFAPHKVLAAYALLAMLLCLISAFSGGHIGLLALTLCSAFMSIQYPTIFSLGIKNLGQDTKYGSSFIVMTIIGGGIVTPVMGFVSDAAGKIPTAELVPALCFAVIFIFARFRS

SEQ ID NO: 73518 - protein, 140 aa, Salmonella paratyphi A
MLKTISPLISPTLLKVLAEMGHGDEIIFSDAHFPAHSLGPQVIRADGLSVSDLLRAIIPLFELDSYAPPLVMMAAVEGDTLDPSVEARYRDALSLEAPCPDIVRIDRYAFYERAQKAFAIVITGECAKYGNILLKKGVTP

SEQ ID NO: 73519 - protein, 426 aa, Salmonella paratyphi A
MFKPELLSPAGTLKNMRYAFAYGADAVYAGQPRYSLRVRNNEFNHENLQLGINEAHALGKKFYVVVNIAPHNAKLKTFIRDLKPVVEMGPDALIMSDPGLIMLVREHFPQMPIHCSVQLMAVNWATVKFWQQMGLTRVILSRACRLEEIEEIRQQVPDMEIEIFVHGALCMAYSGRCLLSGYINKRDPNQGTCTNACRWEYNVQEGKEDVVGNIVHKHNRFPVQNVEPTLGIGAPTDKVFMIEEAQRPGEYMTAFEDEHGTYIMNSKDLRAIAHVERLTKMGVHSLKIEGRTKSFYYCARTAQVYRKAIDDAAAGKPFDPTLLETLEGLAHRGYTEGFLRRHTHDDYQNYEYGYSVSERQQFVGEFTGERKGQLAAVTVKNKFSVGDSLELMTPQGNINFTLEQMENAKGDAMPVAPGDGYTVWMP

SEQ ID NO: 73520 - protein, 1007 aa, Salmonella paratyphi A
  MISC_FEATURE (360)..(360): X=any amino acid
  MISC_FEATURE (417)..(417): X=any amino acid
  MISC_FEATURE (418)..(418): X=any amino acid
  MISC_FEATURE (421)..(421): X=any amino acid
  MISC_FEATURE (422)..(422): X=any amino acid
MRFFALFIYRPVATILIAAAITLCGILGFRLLPVAPVPQVDFPVIMVSASLPGASPETMASSVATPLERSLGRIAGVNEMTSSSSLGSTRIILEFNFDRDIEPAARDVQAAINAAQSLLPGGMPSRPTYRKANPSDAPIMILTLTSESWSQGKLYDFASTQLAQTIAQIDGVGDVDVGGSSLPAVRVGLNPQALFNQGVSLDEVREAIDSANVRRPQGAIEDSVHRWQIQTNDELKTAAEYQPLIIHYNNGAAVRLGDVASVTDSVQDVRNAGMTNAKPAILLMIRKLPEANIIQTVDGIRAKLPELRAMIPAAIDLQIAQDRSPTIRASLQEVEETLAISVALVILVVFLFLRSGRARXIPAVAVPVSLIAPSPAMYLCGFSLNNLSLMALTIATGFVVDDAIVVLENTPRHLEAXXVHXXGDYRVQRSVGLTVISMSLSLVAVFSAAALMGGLPGRLLREFAVTLSVAIGISLVVSLTLTPMMCFWMLKSSKPRTQPRKRGVGRLLVALQQGYGTSLKWVLNHTRLVGVVFLGTVALNIWLYIAIPKTFFPEQDTGVLMGGIQADQSISFQAMRGKLQDFMKIIRDDPAVNNVTGFTGGSRVNSGMMFITLKPRGERKETAQQIIDRLRVKLAKEPGARLFLMAVQDIRVGGRQANASYQYTLLSDSLPALREWEPKIRKALSALRNWRTVNSDQQDNGAEMNLIYDRDTMSRLGIDVQAANSLLNNTFGQRQISTIYQPMNQYKVVMEVDPRYTQDISALEKMFVINRDGKAIPLSYFAQWRPANAPLSVNHQGLSAASTIAFNLPTGTSLSQATEAINRTMTQLGVPSTVRGSFSGTAQVFQQTMNSQLILIVAAIATVYIVLEILYESYVHPLTILSTLPSASVGALLALELFNAPFSLIALIGIMLLIGIVKKNAIMMVDFALEAQRSGPDAGTSHFPACLLRFRPIMMTTLARCSAHCHLVLSGGDGSELRQPLGITIVGGLVMSQLRRSIPRRWCYLFF

SEQ ID NO: 73521 - protein, 393 aa, Salmonella paratyphi A
  MISC_FEATURE (373)..(373): X=any amino acid
FYKQLTNDLETARAEGLFKEERIITSAQQADITVADGSHVINFCANNYLGLANHPELINAAKAGMDSHGFGMASVRFICGTQDSHKALEQKLASFLGMEDAILYSSCFDANGGLFETLLGAEDAIISDALNHASIIDGVRLCKAERYRYANNDMAELEARLKEAREAGARHVLIATDGVFSMDGVIANLKGVCDLADKYDALVMVDDSHAVGFVGENGRGSHEYCDVMGRVDIITGTLGKALGGASGGYTAARKEVVEWLRHVSRPYLFSNSLAPAIVAASIKVLEMVEAGAELRVALWANAAVPEQMSAAGFTLAGADHAIIPVMLGDAVVAQKFARELQKEGIYVTGFFYPVVPKGQARIRTQMSAGHTPXANYRAVDAFTHLVNNWGVIA

SEQ ID NO: 73522 - protein, 316 aa, Salmonella paratyphi A
MRVLIVKTSSMGDVLHTLPALTDAQQAIPGIQFDWVVEEGFAQIPSWHSAVDRVIPVAIRRWAKAWFSAPIKAERIAFHRAVCAYQYDAVIDAQGLVKSAALVTRLAHGIKHGMDWSTAREPLASLFYNRKHHIAKQQHAVERTRDVFAKSLGYDKPQSQGDYAIAKHFLHCQQAVYDPYAVFLHATTRDDKHWPEANWRDVIGLVGNTGLRIKLPWGALMEEARAKRLAKALDYVDVLPRMSLEEVARVLAGAKFVVSVDTGLSHLSAALDRPNITLYGPTDPGLIGGYGKNQMACCSPEQNLANLDATSVFGKI

SEQ ID NO: 73523 - protein, 381 aa, Salmonella paratyphi A
MIKKIIFTVTPIFSIPPRGAAAVETWIYQVAKRLSIPNAIACIKNAGYPEYNKINDNCDIHYIGFSKVYKRLFQKWTRLDPLPYSQRILNIRDKVTTQEDSVIVIHNSMKLYRQIRERNPKAKLVMHMHNAFEPELPDKDAKIIVPSQFLKAFYEERLPAAAVSIVPNGFCAEAYKRNPQDNLRQQLNIAEDATVLLYAGRISPDKGILLLLQAFKQLRTLRSNIKLVVVGDPYASRKGEKAEYQKKVLDAAKEIGTDCIMAGGQSPDQMHNFYHIADLVIVPSQVEEAFCMVAVEAMAAGKAVLASKKGGISEFVLDGITGYHLAEPMSSDSIINDINRALADKERHQIAEKAKSLVFSKYSWENVAQRFEEQMKNWFDK

SEQ ID NO: 73524 - protein, 290 aa, Salmonella paratyphi A
FSVEYSILSNNLKMPMVGFGVFKVTDKEECQQSVLSAIRSGYRLIDTAAVYGNEDAVGDAVREAIATGLCTREELFITSKLWVQDMANYDLAKAGIEASLKKSGLDYFDLYLLHQAMGDYFSAWRALEDAYKAGKLKAIGVSNFYAHVLANFCETVRITPMVNQVELHPYFAQPAALETMKHYNVQPEAWPLGGGRHKPYENVMLQRIADAHQKTIAQVVLRWNVQRGVTVIPKSTRQERIEENFAIWDFSLTDNEMAQINALDLGYVGEAVKHFNPEFVRGCLGVKIHD

SEQ ID NO: 73525 - protein, 122 aa, Salmonella paratyphi A
MKIALPLSLNLPSMGLRLSTVIERCRLVSRSEYLISAGIRKNSPNGSIHPNSLTKKFVAARKLTGINFSENPPPFHEIRSLSGRLYKDAYGEGFAQKLLGHTSENTTKIYLDGRDEKAYMML

SEQ ID NO: 73526 - protein, 135 aa, Salmonella paratyphi A
MELQLMLNHFFERVRKDANFNTFLIDLEYNNIAYYIYFVATGNVKIITHAGHFISIKSNRKLIKVNSTPNTQLIKLTSAKHFSGEHSYEKYCTDLATAGVFKWIVELNQKTRQYWSKDNQLLYIKMWSCRFNKPG

SEQ ID NO: 73527 - protein, 494 aa, Salmonella paratyphi A
DPYINVDPGTMSPIQHGEVFVTEDGAETDLDLGHYERFIRTKMSRRNNFTTGRIYSDVLRKERRGDYLGATVQVIPHITNAIKERVLEGGEGHDVVLVEIGGTVGDIESLPFLEAIRQLAVDIGREHALFMHLTLVPYLAAAGEVKTKPTQHSVKELLSIGIQPDILICRSDRAVPANERAKIALFCNVPEKAVISMKDVDSIYKIPGLLKSQGLDDYICKRFSLNCPEANLSEWEQVIYEEANPASEVTIGMVGKYIELPDAYKSVIEALKHGGLKNRVTVNIKLIDSQDVETRGVEILKDLDAILIPGGFGYRGVEGKIATGYARENNIPYLGICLGMQVALIEFARNVAGMDNANSTEFVPDCKYPVVALITEWRDEDGNVEVRSEKSDLGGTMRLGAQQCQLSDDSLVRQLYGAPTIVERHRHRYEVNNMLLKQIEAAGLRVAGRSGDDQLVEIIEVPNHPWFVACQFHPEFTSTPRDGHPLFAGFVKAA

SEQ ID NO: 73528 - protein, 432 aa, Salmonella paratyphi A
MSKIVKVIGREIIDSRGNPTVEAEVHLEGCFVGMAAAPSGASTGSREALELRDGDKSRFLGKGVTKAVGAVNGPIAQAILGKDAKDQAGIDKIMIDLDGTENKSNFGANAILAVSLANAKAAAAAKGMPLYEHIAELNGTPGKYSMPVPMMNIINGGEHADNNVDIQEFMIQPVGAKTVKEAIRMGSEVFHHLAKVLKGKGMNTAVGDEGGYAPNLGSNAEALAVIAEAVKAAGYELGKDITLAMDCAASEFYKDGKYVLAGEGNKAFTSEEFTHFLEELTKQYPIVSIEDGLDESDWDGFAYQTKVLGDKIQLVGDDLFVTNTKILKEGIEKGIANSILIKFNQIGSLTETLAAIKMAKDAGYTAVISHRSGETEDATIADLAVGTAAGQIKTGSMSRSDRVAKYNQLIRIEEALGEKAPYNGRKEIKGQA

SEQ ID NO: 73529 - protein, 121 aa, Salmonella paratyphi A
IMSTTLYKDFTFEAAHRLPHVPEGHKCGRLHGHSFMVRLEITGEVDPHTGWIMDFADLKAAFKPTYDRLDHYYLNDIPGLSNPTSEVLAKWIWDQVKPVVPLLSAVMVKETCTAGCVYRGE

SEQ ID NO: 73530 - protein, 763 aa, Salmonella paratyphi A
VGDDLYIKTTGSQGRGITANAMRDASRAKNTIVVGNRAHIVTTGDSSEGLRTGQSGSLIRLGDDATIETSGASSTGIYAASSSRTELGNNATITVNGASAHAVYATNATVNLGENATISVNSASKAASYSKAPAGLYALSRGAINLAGGAAITMAGDNSSESYAISTETGGIVDGSSGGRFVIDGDIRAAGATAASGTYRSRTSTIKLNMTDNSRWDGASYITSATAGTGVISVQMSDATWNMTSSSTLTDLTLNSGATINFSHEDGEPWQTLTINEDYVGNGGKLVFNTVLSDDDSETDRLQVLGNTSGNTFVAVNNIGGAGAQTIEGIEIVNVAGNSNGTFEKASRIVAGAYDYNMVQKGKNWYLTSYIESDESIIPDPVDPVIPDPVIPDPVDPVSVDPVIPDPVISDSVGPEPVDPVILDLTISDIGQSDTPPITEHQFRPEVGSYLANNYAANTLFMTRLHDRLGETSYTDMLTGEKKVTSLWMRNVGAHTRFNDGSGQLKTRINSYVLQLGGDLAQWSTDGLDRWHIGAMAGYANSQNRTQSSVSDYHSRGQVTGYSVGLYGTWYANNIDRSGAYVDTWMLFNWFDNKVMGQDQAAEKYKSKGITASVEAGYSFRLGESVHQSYWLQPKAQVVWMGVQADDNREANGTLVKDDTAGNLLTRMGVKAYINGHNAIDDNKSREFQPFVEANWIHNTQPASVKMDDVSSDMRGTKNIGELKVGIEGQITPRLNVWGNVAQQVGDQGYSNTQGLLGVKYSF

SEQ ID NO: 73531 - protein, 202 aa, Salmonella paratyphi A
MMRKPSQIVHCISCDLSCQLFPDSAVRVQYCHNAAFSIWPDGNAFLKKGFIEKLLLDRHNHLSSGFIFVDFSFPNLRRFTDLQWADSLANSGMHIVLISDRSLTPLANYWILKSNKIQGIIYSDDDDIVQQQKMHRLFTGRLANSKRGRTLNYTEFILLKRFVSGISIQQIVNIDIKKLYVHKLRLENKLGHSIHKIISNIL

SEQ ID NO: 73532 - protein, 246 aa, Salmonella paratyphi A
MGSTRKGMLNVLIAAVLWGSSGVCAQYIMEQSRMSSQFLTMIRLLFAGLILVTFSFMHGDKIFSILKNRKDALSLLIFSVVGALTVQLTFLLTIEKSNAATATVLQFLSPTIIVAWFALARRTRPGILVLTAILTSLIGTFLLVTHGNPTSLSISSGALFWGIASAFAAAFYTTWPSRLIAQYGTLPVVGWSMSFGGLILLPFYAKEGTHFAVSGSLILAFFYLVVIGTSLTFSLYLKGAQLIGGP

SEQ ID NO: 73533 - protein, 413 aa, Salmonella paratyphi A
  MISC_FEATURE (96)..(96): X=any amino acid
  MISC_FEATURE (107)..(107): X=any amino acid
  MISC_FEATURE (163)..(163): X=any amino acid
KVVVPVEGKKITLQNGKLNVPENPIIPFIEGDGIGVDVTPAMLKVVDAAVEKAYKGERKISWMEIYTGEKSTQVYGQDVWLPAEALDLIRDYRVDXKGPLTTPVGGXIRSLNVALRQELDLYVCLRPVRYYQGTPSPVKHPELTDMVIFRENSEDIYAGIEWXADSADAEKVIKFLREEMGVKKIRFPEHCGIGIRPCSEEGTKRLVRAGIEYAITNDRDSVTLVHKGNIMKFTEARLKDWGYQLARDEFGGELIDGGPWLKIKNPNTGKEIVVKDVIADAFLQQILLRPAEYDVIACMNLNGDYISDALAAQVGGIGIAPGANIGDECALFEATHGTAPKYAGQDKVNPGSIILSAEMMLRHMQWFEAADLIVKGMEGRLPRKTVTYDFERLMEGAKLLKCSEFGDAIIANM

SEQ ID NO: 73534 - protein, 358 aa, Salmonella paratyphi A
MGLVNITLSEKGTLMATLPANVEGDIPAIGFISHVDTSPDFSGKNVNPQIVENYRGGDIALGIGDEVLSPVMFPVLHQLLGQTLITTDGKTLLGADDKAGVAEIMTALAVLKGNPIPHGEIKVAFTPDEEVGKGAKHFDVEEFGAQWAYTVDGGGVGELEFENFNAASVNIKIVGNNVHPGTAKGVMVNALSLAARIHAEVPADEAPETTEGYEGFYHLASMKGTVDRAEMHYIIRDFDRKQFEARKRKMMEIAKKVGKGLHPDCYIELVIEDSYYNMREKVVEHPHILDIAQQAMRDCHITPEMKPIRGGTDGAQLSFMGLPCPNLFTGGYNYHGKHEFVTLEGMEKAVQVIVRIAD

SEQ ID NO: 73535 - protein, 472 aa, Salmonella paratyphi A
PLSLRVRFLLATAGVVLVLSLAYGIVALVGYSVSFDKTTFRLLRGESNLFYTLAKWENNKISVELPENLDMQSPTMTLIYDETGKLLWTQRNIPWLIKSIQPEWLKTNGFHEIETNVDATSTLLSEDHSAQEKLKEVREDDDDAEMTHSVAVNIYPATARMPQLTIVVVDTIPIELKRSYMVWSWFVYVLAANLLLVIPLLWIAAWWSLRPIEALAREVRELEDHHREMLNPETTRELTSLVRNLNQLLKSERERYNKYRTTLTDLTHSLKTPLAVLQSTLRSLRNEKMSVSKAEPVMLEQISRISQQIGYYLHRASMRGSGVLLSRELHPVAPLLDNLISALNKVYQRKGVNISMDISPEISFVGEQNDFVEVMGNVLDNACKYCLEFVEISARQTDDHLHIFVEDDGPGIPHSKRSLVFDRGQRADTLRPGQGVGLAVAREITEQYAGQIIASDSLLAGARMEVVFGRQH

SEQ ID NO: 73536 - protein, 457 aa, Salmonella paratyphi A
  MISC_FEATURE (25)..(25): X=any amino acid
  MISC_FEATURE (26)..(26): X=any amino acid
  MISC_FEATURE (53)..(53): X=any amino acid
  MISC_FEATURE (54)..(54): X=any amino acid
  MISC_FEATURE (134)..(134): X=any amino acid
  MISC_FEATURE (420)..(420): X=any amino acid
MELSSLTAVSPVDGRYGDKVSALRXXFSEYGLLKFRVQVEVRWLQKLAAHASXXKEVPAFAADANGYLDTLVATSNEEDAARIKTIARTTNHDRERGEYFLKEKVSAIPALHDVSEFIHFACTSEDINNLSHGXCSKTARDEVILPYWRQVINAVKDLATQYRDIPLLSRTHGQPATPSTLGKEMANVTYRMERQFRQLNQVEILGKINGAVGNYNAHIAAYPEVDWHQFSEEFVTSLGIQWNPYTTQIEPHDYIAELFDCIARFNTILIDFDRDVWGYIALNHFKQKTIAGEIGSSTMPHKVNPIDFENSEGNLGLSNAVLHHLANKLPVSRWQRDLTDSTVLRNLGVGIGYALIAYQSTLKGVSKLEVNRDHLLDELDHNWEVLAEPIQTVMRRYGIEKPYEKLKELTRGKRVDAEEXNSLIDSLALPEAEKTRLKAMTPANYIGRAVTLVDELK

SEQ ID NO: 73537 - protein, 368 aa, Salmonella paratyphi A
MSESPKKVIVGMSGGVDSSVSAWLLQQQGYQVEGLFMKNWEEDDGEEYCTAAADLADAQAVCDKLGIELHTVNFAAEYWDNVFELFLEEYKAGRTPNPDILCNKEIKFKAFLEFAAEDLGADYIATGHYVRRADVNGKSRLLRGLDGNKDQSYFLYTLGHEQIAQSLFPVGELEKPQVRKIAEDLGLVTAKKKDSTGICFIGERKFRDFLGRYLPAQPGKIITVDGDEIGEHQGLMYHTLGQRKGLGIGGTKDGSEDPWYVVDKDVENNVLIVAQGHEHPRLMSVGLIAQQLHWVDREPFTGTLRCTVKTRYRQTDIPCTINALDDDRIEVIFDEPVAAVTPGQSAVFYSGEVCLGGGIIEQRLPLTV

SEQ ID NO: 73538 - protein, 415 aa, Salmonella paratyphi A
  MISC_FEATURE (354)..(354): X=any amino acid
MLEQMGIAAKAASYKLALLSSGEKNRVLEKIADELEAQMESILSANVQDVEQARANGLSEAMLDRLALTPARLKAIADDVRQVCNLADPVGQVIDGGLLDSGLRLERRRVPLGVVGVIYEARPNVTVDVASLCLKTGNAVILRGGKETHRTNAATVRVIQKALKACGLPEAAVQAIDNPDRSLVNEMLRMDKYIDMLIRGGAGLHKLCREQSTIPVITGGIGVCHIFVDSSADMPPALKIIVNAKTQRPSTCNTVETLLVHQDIAERFLPVLSKQMAESGVTLHGDETVMQVLACPAKLVPLKPEELDNEFLSLDLNVVVVENMDALSGHIREHGTQHSDAILTCDMHNVRVSXNEVDSAAVYVNASTRFTDGGQFGLGAEVAVSTQKLHARGPMGLEALTTYKWIGFGDGTIRA

SEQ ID NO: 73539 - protein, 156 aa, Salmonella paratyphi A
MMFNWKTMFVGLLLVSLIVSGRLANHYRDNAISYKEQRDNKASELEKANATITDMQQRQLDADALDAKYTKELADEKAENDALRRKLDNGGRVLVKGKCPVPSSAETSSASGMGNDATVELSPVAGRNVLGIRDGIISDQTALRTLQEYIRTQCLK

SEQ ID NO: 73540 - protein, 44 aa, Salmonella paratyphi A
  MISC_FEATURE (26)..(26): X=any amino acid
MMLWFTDSRFGKSTVAGALEEALHQXGVSTYLLDAIMCARLCRI

SEQ ID NO: 73541 - protein, 363 aa, Salmonella paratyphi A
MKKQNNLRSLAAQAVEQVVEQGQSLSNVLPPLQQKVADKDKALLQELCFGVLRTLSQLEWLINKLMSRPMTGKQRTVHYLIMVGFYQLLYTRVPPHAALAETVEGAVSIKRPQLKGLINGVLRQFQRQQETLLNEFATSDARFLHPGWLVKRLQNAYPTQWQRIIEANNQRPPMWLRVNRTHHTRDGWLGLLEDAGMKGYPHPDYPDAVRLETPAPVHALPGFAEGWVTVQDASAQGCAVFLAPQNGEHILDLCAAPGGKTTHILEVAPEADVLAVDIDEQRLSRVYDNLKRLGMKATVKQGDGRYPAQWCGEQQFDRILLDAPCSATGVIRRHPDIKWLRRDRDIAELAQLQAEILDTVWPR

SEQ ID NO: 73542 - protein, 458 aa, Salmonella paratyphi A
  MISC_FEATURE (52)..(52): X=any amino acid
  MISC_FEATURE (88)..(88): X=any amino acid
MKIIILGAGQVGGTLAENLVGENNDITMVDNNDERLRSLQDKFDLRVVQGHXSHTSVIAEASADDAEYLVAVTSSDETNMVACQVDYXLFNTPNRIARIRSPDYDADADKLFHSEAVPIDHLIAPEQLVIDNIYRLIEYPGALQVVNFAEGKSVLAVVKAYYGGPLIGNALSTMRAHMPHIDTRVAAIFRHDRPIRPQGSTIVEAGDEVFFIAASQHIRAVMSELQRLEKPYKRIMLVGGGNIGAGLARRLEKDYSVKLIERDQQRAAELAEKLQNTIVFFGDASDQELLAEEHIDQVDLFIAVTNDDEANIMSAMLAKRMGAKKVMVLIQRRAYVDLVQGSVIDIAISPQQATISALLSHVRKADIVGVSSLRRGVAEAIEAVAHGDESTSRVVGRVIDEIKLPPGTIIGAVVRGNDVMIANDNLRIEQGDHVIMFLTDKKFITDVERLFQPSPFFL

SEQ ID NO: 73543 - protein, 123 aa, Salmonella paratyphi A
MIQEQTMLNVADNSGARRVMCIKVLGGSHRRYAGVGDIIKITIKEAIPRGKVKKGDVLKAVVVRTKKGVRRPDGSVIRFDGNACVILNNNSEQPIGTRIFGPVTRELRNEKFMKIISLAPEVL

SEQ ID NO: 73544 - protein, 84 aa, Salmonella paratyphi A
MIDKIRTLQVLLVSREMEKSFVVAIERFVNDPIYGRFIKRTTRMHVHDETTKCGIGDVVEIRECRPLSKTKSWTLVRVVEKAVL

SEQ ID NO: 73545 - protein, 136 aa, Salmonella paratyphi A
MLQPKRTKFRKMHKGRNRGLAAGADVSFGSFGLKAVGRGRLTARQIEAARRAMTRAVKRQGKIWIRVFPDKPITEKPLAVRMGKGKGNVEYWVALIQPGKVLYEMDGVPEELAREAFKLAAAKLPIKTTFVTKTVM

SEQ ID NO: 73546 - protein, 233 aa, Salmonella paratyphi A; identical to SEQ ID NO: 42750

SEQ ID NO: 73547 - protein, 122 aa, Salmonella paratyphi A
MWLLDQWAERHIIEAQRKGEFDNLPGRGEPLILDDDSHVPAELRAGYRLLKNAGCLPPELEQRRDAIQLLDILNSIREDDPRYHQVSRQLSLLELKLRQAGLSTDFLHGEYAEKLLHKINDN

SEQ ID NO: 73548 - protein, 110 aa, Salmonella paratyphi A [sequence omitted]

SEQ ID NO: 73549 - protein, 127 aa, Salmonella paratyphi A
MRHRKSGRQLNRNSSHRQAMFRNMAGSLVRHEIIKTTLPKAKELRRVVEPLITLAKTDSVANRRLAFARTRDNEIVAKLFNELGPRFAARAGGYTRILKCGFRAGDNARWAYIELVDRSEKTEAAAE

SEQ ID NO: 73550 - protein, 92 aa, Salmonella paratyphi A
MPRSLKKGPFIDLHLLKKVEKAVESGDKKPLRTWSRRSTIFPNMIGLTIAVHNGRQHVPVFVPDEMVGHKLGEFAPTRTYRGHAADKKAKKK

SEQ ID NO: 73551 - protein, 329 aa, Salmonella paratyphi A [sequence omitted]

SEQ ID NO: 73552 - protein, 273 aa, Salmonella paratyphi A
  MISC_FEATURE (98)..(98): X=any amino acid
MAVVKCKPTSPGRRHVVKVVNPELHKGKPFAPLVEKNSKSGGRNNNGRITTRHIGGGHKQAYRIVDFKRNKDGIPAVVERLEYDPNRSANIALVLYRXSERRYILAPKGLKAGDQIQSGVDAAIKAGNTLPMRNIPVGSTVHNVEMKPGKGGQLARSAGTYVQIVARDGAYVTLRLRSGEMRKVEADCRATLGEVGNAEHMLRVLGKAGAARWRGVRPTVRGTAMNPVDHPHGGGEGRNFGKHPVTPWGVQTKGKKTRSNKRTDKFIVRRRSK

SEQ ID NO: 73553 - protein, 206 aa, Salmonella paratyphi A
MARYLGPKLKLSRREGTDLFLKSGVRAIDTKCKIEQAPGQHGARKPRLSDYGVQLREKQKVRRIYGVLERQFRNYYKEAARLKGNTGENLLALLEGRLDNVVYRMGFGATRAEARQLVSHKAIMVNGRVVNIASYQVSPNDVVSIREKAKKQSRVKAALELAEQREKPTWLEVDAGKMEGTYKRKPERSDLSADINEHLIVELYSK

SEQ ID NO: 73554 - protein, 100 aa, Salmonella paratyphi A; identical to SEQ ID NO: 59326

SEQ ID NO: 73555 - protein, 127 aa, Salmonella paratyphi A
MAKAPVRARKRVRKQVSDGVAHIHASFNNTIVTITDRQGNALGWATAGGSGFRGSRKSSFAAQVAAERCLDAVKEYGIKNLEVMVKGPGPGRESTIRALNAAGFRITNITDVTPIPHNGCRPPKKRR

SEQ ID NO: 73556 - protein, 200 aa, Salmonella paratyphi A
MELVLKDAQTLTVSETTFGRDFNEALVHQVVVAYAAGARQGTRAQKTRAEVTGSGKKPWRQKGTGRARSGSIKSPIWRSGGVTFAARPQDHSQKVNKKMYRGALKSILSELVRQDRLIVVEKFSVEAPKTKLLAQKLKDMALEDVLIITGELDENLFLAARNLHKVDVRDATGIDPVSLIAFDKVVMTADAVKQVEEMLA

SEQ ID NO: 73557 - protein, 209 aa, Salmonella paratyphi A
  MISC_FEATURE (179)..(179): X=any amino acid
  MISC_FEATURE (181)..(181): X=any amino acid
MIGLVGKKVGMTRIFTEDGVSIPVTVIEVEANRVTQVKDLANDATRAVQVTTGAKKANRVTKPEAGHFAKAGVEAGRGLWEFRLAEGEEYTVGQSISVELFADVKKVDVTGTSKGKGFAGTVKRWNFRTQDATHGNSLSHRVPGSIGQNQTPGKVFKGKKMAGQMGNERVTVQSLDVVXRXRERNLLLVKGGVPGATGCDLIVKPAVKA

SEQ ID NO: 73558 - protein, 118 aa, Salmonella paratyphi A
MARIAGINIPDQKHAVIALTSIYGVGKTRSKAILAAAGIAENVKISELSEEQIDTLRDEVAKFVVEGDLRREISMSIKRLMDLGCYRGLRHRRGLPVRGQRTKTNARTRKGPRKPIKK

SEQ ID NO: 73559 - protein, 111 aa, Salmonella paratyphi A
  MISC_FEATURE (82)..(82): X=any amino acid
WSSGLMQNQRIRIRLKAFDHRLIDQSTAEIVETAKRTGALGYRGPIPLPTRKERFTVLISPHVNKDARDQYANIRTHKRLAXIVETNHEKTRDALMRLRPGAGCRRAISLG

SEQ ID NO: 73560 - protein, 428 aa, Salmonella paratyphi A
MAKQPGLDFQSAKGGLGELKRRLLFVIGALIVFRIGSFIPIPGIDAAVLAKLLEQQRGTIIEMFNMFSGGALSRASIFALGIMPYISASIIIQLLTVVHPTLAEIKKEGESGRRKISQYTRYGTLVLAIFQSIGIATGLPNMPGMQGLVMNPGFAFYFTAVVSLVTGTMFLMWLGEQITERGIGNGISIIIFAGIVAGLPPAIAHTIEQARQGDLHFLVLLLVAVLVFAVTFFVVFVERGQRRIVVNYAKRQQGRRVYAAQSTHLPLKVNMAGVIPAIFASSIILFPATIASWFGGGTGWNWLTTISLYLQPGQPLYVLLYASAIIFFCFFYTALVFNPRETADNLKKSGAFVPGIRPGEQTAKYIDKVMTRLTLVGALYITFICLIPEFMRDAMKVPFYFGGTSLLIVVVVIMDFMAQVQTLMMSSQ

SEQ ID NO: 73561 - protein, 144 aa, Salmonella paratyphi A
MRLNTLSPAEGSKKAGKRLGRGIGSGLGKTGGRGHKGQKSRSGGGVRRGFEGGQMPLYRRLPKFGFTSRKAAITAEVRLSDLAKVEGGVVDLNTLKAANIIGIQIEFAKVILAGEVTTPVTVRGLRVTKGARAAIEAAGGKIEE

SEQ ID NO: 73562 - protein, 167 aa, Salmonella paratyphi A
MAHIEKQAGELQEKLVSLNRVSKTVKGGRIFSFTALTVVGDGNGRVGFGYGKAREVPAAIQKAMEKARRNMINVALNNGTLQHPVKGVHTGSRVFMQPASEGTGIIAGGAMRAVLEVAGVHNVLAKAYGSTNPINVVRATIDGLENMNSPEMVAAKRGKSVEEILGK

SEQ ID NO: 73563 - protein, 177 aa, Salmonella paratyphi A
MSRVAKAPVVVPAGVDVKINGQVITIKGKNGELTRTLNDAVEVKHADNALTFGPRDGYADGWAQAGTARALLNSMVIGVTEGFTKKLQLVGVGYRAAVKGNVVNLSLGFSHPVDHQLPAGITAECPTQTEIVLKGADKQVIGQVAADLRAYRRPEPYKGKGVRYADEVVRTKEAKKK

SEQ ID NO: 73564 - protein, 156 aa, Salmonella paratyphi A
MGEEVEIVGIKETQKSTCTGVEMFRKLLDEGRAVRNVGVLLRGIKREEIERGQVLAKPGTIKPHTKFESEVYILSKDEGGRHTPFFKGYRPQFYFRTTDVTGTIELPEGVEMVMPGDNIKMVVTLIHPIAMDDGLRFAIREGGRTVGAGVVAKVLG

SEQ ID NO: 73565 - protein, 130 aa, Salmonella paratyphi A; identical to SEQ ID NO: 42945

SEQ ID NO: 73566 - protein, 101 aa, Salmonella paratyphi A
MAKQSMKAREVKRVALADKYFAKRAELKAIISDVDATDEDRWNAVLKLQTLPRDSSPSRQRNRCRQTGRPHAFLRKFGLSRIKVREAAMAAEIPGLKKASW

SEQ ID NO: 73567 - protein, 179 aa, Salmonella paratyphi A
MAKLHDYYKDEVVNKLMTEFNYNSVMQVPRVEKITLNMGVGEAIADKKLLDNAAADLTAISGQKPLITKARKSVAGFKIRQGYPIGCKVTLRGERMWEFFERLITIAVPRIRDFRGLSAKSFDGRGNYSMGVREQIIFPEIDYDKVDRVRGLDITITTTAKSDEEGRALLAAFDFPFRK

SEQ ID NO: 73568 - protein, 104 aa, Salmonella paratyphi A
MAAKIRRDDEVIVLTGKDKGKRGKVKNVLSSGKVIVEGINLVKKHQQAVPALNQPGGIVEKEAAIQVSNVAIFNTATGKADRVGFRFEDGKKVRFFKSNSETIK

SEQ ID NO: 73569 - protein, 272 aa, Salmonella paratyphi A
MEIYAVFGNPIAHSKSPFIHQQFAQQLDIVHPYGRVLAPINNFINTLDAFFAAGGKGANITVPFKEEAFARSDELTERASLAGAVNTLKRLEDGRLLGDNTDGIGLLSDLERLNFIRPGLRILLIGAGGASRGVLLPLLSLDCAVTITNRTASRAEALAKIFAHTGSVHATDMDKLDGCEFDLIINATSSGIRGEIPAIPASLIHPSLCCYDMFYQKGNTPFLSWCVQQGAKRYADGLGMLVGQAAHAVLLWHGVLPQVEPVIELLQQELLA

SEQ ID NO: 73570 - protein, 558 aa, Salmonella paratyphi A
GLIRLPSRQRRAQELSFAEQIVSEASSVIAILDSRGKICRFNRLCEEYTGLKERDVIGQSVFKLFMSRRDGCSRHYIENFFRNGNAYEIERWIKTRKGQRLFLFRNKFVHNGSGKNEIFLICAGTDITEERRTQERLRILANTDTVTGLPNRNAIHEFINHAIASAGESQVGIVYLDLDNFKKINDAYGHMFGDQLLQAVSLALLSCLEEDQLLARLGGDEFIVLAAHTSQAALEAVASRILTRLRQPFRIGLIEVYTGCAIGISLAPRHGQDSESLIRTADTAMYNAKESGRGQFCVFSPEMNQRVFDYHWLDTNLRKALENDQLLIHYQPKITWRGEVRSLEALVRWQSPERGLIPPLEFISYAEESGLIVPLGRWVILDVVRQIAKWRDKGINLRVAVNFSARQLADQTLFTALKQALYDLNFEYCPIDVELTESCLIENDTLALSVIQQFSQLGAQIHLDDFGTGYSSLSQLARFPIDAVKLDQAFVRDIHKQPLSQSLVRAIVAVAQALNLQVIAEGVENAKEDAFLTKNGVNERQGFLFAKPMPAVSFERWY

SEQ ID NO: 73571 - protein, 665 aa, Salmonella paratyphi A
  MISC_FEATURE (6)..(6): X=any amino acid
  MISC_FEATURE (112)..(112): X=any amino acid
  MISC_FEATURE (283)..(283): X=any amino acid
  MISC_FEATURE (419)..(419): X=any amino acid
  MISC_FEATURE (436)..(436): X=any amino acid
  MISC_FEATURE (462)..(462): X=any amino acid
  MISC_FEATURE (527)..(527): X=any amino acid
  MISC_FEATURE (538)..(538): X=any amino acid
  MISC_FEATURE (591)..(591): X=any amino acid
MFQDHXHVAQLKQQLHSQTPRAEGVVKATEKGFGFLEVDAQKSYFIPPPQMKKVMHGDRIVAVIHTEKERESAEPEELIEPFLTRFVGKVQGKNDRLSIVPDHPLLKDAISXSARRSAEFKEGDWAVAEMRRHPLKGDRSFYADLTQYITFADDHFVPWWVTLARHNLEKEAPNGVATEMLDEGLERQDLTALNFVTIDSASTEDMDDALYAEELADGRLQLTVAIADPTAWIADSKLDNAAKIRAFTNYLPGFNIPMLPRDVSDDLCSLRQRKCRPALAVAXSIAADGTIDDDIAFFAATIESKAKLVYDNVSDWLENNGTWQPENEGIAQQIRLLHRICLSRSEWRHHHALVFKDRPDYRFVLGEKGEVLDIVAEPAGIANRIVEESMIAANPLSPRILAIIGFRFSAYLQSLHHGXFDSSRNSRMRLCRLCLXLTIMCSVNVSIAGRRLSVRLVRAFCXICRTRILSDAQHSRVFSCISRHCVRLSSSFCRIIMHRCRAVNFGSWILRAYASWYFSYSVSCAIXLPSPAIGFIKXEAIALFANDYHPTNGGTSPVNRMGARMYATGLYARFLNDKAGTNTRFRGRNYXRQPRWMRVRLVDKRRSPISLPHSCTAVRDELVCSQENGTVQIKGETVYKVTDVIDVTIAEVRMETRSIIARPAA

SEQ ID NO: 73572 - protein, 379 aa, Salmonella paratyphi A
GNPMEQCRKAGKSHWYHETQSTISSQTPLSLMPEAAYVNDRFLLDLAVAETALSPFESWLKPARQLADVLFPRTVLNDRLHTFSAYERMSTALTAAQVFGVQRLCRHYAARLAPLPGPDASRESNQRLAQITQYARQLAGSPSVINTRAREQLAEVGLTARDTVLINQIIGFIGFQARVAAIFQAFCRLPVRELPGQEMQRFARAARFQNPQTTWRPAASLVEYPLAHTKVRRQYSSSQCQIMAPVLMRDPSSFALLERILTSTLHTASPPSLLPLITLLTSRINGSAACFNEQATQPAWRRAVITLRQEDDDIARWELEPALTQAIQWLTRAPDHFSAAHFFPLLTRGVSSEQAINMLGWCGVCGWLNRLKIALGETY

SEQ ID NO: 73573 - protein, 262 aa, Salmonella paratyphi A
  MISC_FEATURE (98)..(98): X=any amino acid
  MISC_FEATURE (135)..(135): X=any amino acid
  MISC_FEATURE (174)..(174): X=any amino acid
  MISC_FEATURE (197)..(197): X=any amino acid
MGFLSGKRILVTGVASKLSIAYGIAQAMHREGAELAFTYQNDKLKGRVEEFAAQLVSTSFLPCDVAEDASIDAMFADGVTVWPKFDGFVHSIGFAPGXSWTGDYVNAVTREALKSLHDISSYSFVAMAKAAAPCXIPGSALLTLSYLGAGAPVPNYNVMGLAKLLWKLTCRYMXNAMGPEVARSTPSLRAQIRTLAXPVIIDFRNMLAHCEAVTPIRRTVTIEDVGNSAASLCSDLSAGISGEVVHVDGGFSIAAMNELELK

SEQ ID NO: 73574 - protein, 268 aa, Salmonella paratyphi A
MVETLLEVRNLSKTFRYRTGWFRRQTVDAVKPLSFTLRERQTLAIIGENGSGKSTLAKMLAGMIEPTSGELLIDDHPLHYGDYSFRSQRIRMIFQDPSTSLNPRQRISQILDFPLRLNTDLEPEQRRKQIVETMRMVGLLPDHVSYYPHMLAPGQKQRLGLARALILRPKVIIADEALRSLDMSMRSQLINLMLELQEKQGISYIYVTQHIGMMKHISDQVLVMHQGEVVERGSTADVLASPLHELTRRLIAGHFGEALTADAWRKDR

SEQ ID NO: 73575 - protein, 253 aa, Salmonella paratyphi A
MLSIATHRAGAALLLIMPLAVWVSGWQWQPGHQVWWLKTLFWITETVTKPWGVITHVILCGWFLWCLRFRLRAAIMLFAILGGAIIVGQGVKSWVKERVQEPRPFVVWLEKTHHIPVDEFYTLKRTERGHLVKEQLAGQQNIPVFLRQHWQKETGFAFPPGHTMFAASWALLAVGLLWPRRRTFTIAFLFVWATGVMGSRLLLGMHWPRDLVVATLISWLLVTLATWLAQRICGPLMPPREEAQEIAEREQES

SEQ ID NO: 73576 - protein, 59 aa, Salmonella paratyphi A
MSDIEAQRIAARIDTVLDILVAGDYHSAINNLEILRAELLDQVKDGISPSQAPGSPWEI

SEQ ID NO: 73577 - protein, 62 aa, Salmonella paratyphi A
MPLQEASKNLASLCGVKQPTVWRWLHGGGIDAKYVAAIVKATGGRIKARELRPDLADLLAAS

SEQ ID NO: 73578 - protein, 117 aa, Salmonella paratyphi A
MDKKSARIPRATRARRKLKELGATRLVVHRTPRHIYAQVIAPNGSEVLVAASTVENVIAEQLKYTGNKDAAAAVGKRVLNAALEKGIKDVSFDRSGFQYHGRVQALQMLPREAGLQF

SEQ ID NO: 73579 - protein, 213 aa, Salmonella paratyphi A
MAAVRTGTLFALGLNYADHASELDVTPPKEPLVFIKAPNTFTEHHQTSVRPNNVEYMHYEAELVVVIGKTARKVSEAEAMEYVASYTVCNDYAIRDYLENYYRPNLRVKSRDGLTPIGPWIVDKEAVSDPHNLTLRTFVNGELRQEGTTADLIFSIPFLISYLSEFMTLQPGDMIATGTPKGLSDVVPGDEVVVEVEGVGRLVNRIVSEESAK

SEQ ID NO: 73580 - protein, 103 aa, Salmonella paratyphi A
MLSYYMLNRSYIYSTSSARFINKDFEMFKFVKIAVVAGVLATLTACTGHIENKKITAATIIFCTLQFLFLKLLAVAARLPINNRNDCADTKKPGFSRFFYRSD

SEQ ID NO: 73581 - protein, 838 aa, Salmonella paratyphi A
AENYFNPAFLSDDPSAVADLSTFSRNAQAAGMYRVDVYLNNTFLATRDIAFQAVKTTGKSAPTDDSGLRACLTPEMLKNMGVNTGAFPLLAKAAAGSCPDLASAIPAARTRFDFAQQRLDISIPQAAMVASARGYIPPQYWDEGINALLFNYTFTGANSQDRSLGGSAENSYFLGLNSGLNLGAWRLRDYSTWNANSGDQNSDSDWQHISTHLERDVVFLQGELTAGDSYTPSALFDSLPFRGLQLASDDNMLPDSMKGFAPTIHGIARSNAQVTIRQNGYIINQRYVPPGAFTINDLYPTAASVDLTVEVKESDGSINRYNVPYSAVPILQREGRLKYAATVAEYRSDSSQKEKVKFSQATLIWGLPHGFTLYGGTQLSSHYHALAIGSGANLGDWGAVSLDVTQATSTLADNNTYQGQSLRFLYAKSLAQSGTNLQLMGYRYSTSGFYTLDDTTWKRMSGYDDDNRTDSDKSRPEWADYYNLYYTRRGKVQLDINQQLGGLGSLFITGSQQSYWHTDEKDSLLQVGYSDTLAGIAWSVSYNNNKSQAMRSADQIFALNISVPLSQWLQHDDEVTHHHNVYATFSTSTDKQHNVTQNAALSGTLLDENNLSYNIQQGYQNHGIGETAPPSLEYDGAKGNANIGYNVSDNGDYQQVNYGLSGGLVAHAHGVTLSQPLGNTNILIAAPGAANVGVVDQPGIHTDARGYAVVPYATTYRQNRMALDVNAMADDVDIDDAVTRVVPTEGALVLARFKARVGVRALVTLNHNGKPVPFGATVTVNDRHAEAIVDEAGEVYLSGLSAQGVLHVRWGNLPDQQCVASYHLSSSRQILSRQHAEC

SEQ ID NO: 73582 - protein, 42 aa, Salmonella paratyphi A
  MISC_FEATURE (32)..(32): X=any amino acid
MKAKELREKSVEELNTELLNLLREQFNLRMTXQVASCNSLTC

SEQ ID NO: 73583 - protein, 476 aa, Salmonella paratyphi A
MDNIDNKYNPQLCKIFLAISDLIFFNLALWLSLGCVYFIFDQVQRFIPQDQLDTRVITHFILSVVCVGWFWIRLRHYTYRKPFWYELKEIFRTIVIFAIFDLALIAFTKWQFSRYVWVFCWTFAIILVPFFRALTKHLLNKLGIWKKKTIILGSGQNARGAYSALQSEEMMGFDVIAFFDTDASDAEINMLPVIKDTGTIWDLNRTGDVHYILAYEYTELEKTHFWLRELSKHHCRSVTVVPSFRGLPLYNTDMSFIFSHEVMLLRIQNNLAKRSSRFLKRTFDIVCSIIILIIASPLMIYLWYKVTRDGGPAIYGHQRVGRHEKLFPCYKFRSMVMNSQEVLKELLANDPIARAEWEKDFKLKNDPRITAVGRFIRKTSLDELPQLFNVLKGDMSLVGPRPIVSDELERYCDDVDYYLMAKPGMTGLWQVSGRNDVDYDTRVYFDSWYVKNWTLWNDIAILFKTAKVVLRRDGAY

SEQ ID NO: 73584 - protein, 467 aa, Salmonella paratyphi A
MSKQQIGVVGMAVMGRNLALNIESRGYTVSVFNRSREKTEEVIAENPGKKLVPYYTVKEFVESLETPRRILLMVKAGAGTDAAIDSLKPYLEKGDIIIDGGNTFFQDTIRRNRELSAEGFNFIGTGVSGGEEGALKGPSIMPGGQKDAYELVAPILTKIAAVAEDGEPCVTYIGADACHYVKMVHNGIEYGDMQLIAEAYSLLKGGLNLSNEELANTFTEWNNGELSSYLIDITKDIFTKKDEDGNYLVDVILDEAANKGTGKWTSQSALDLGEPLSLITESVFARYISSLKAQRVAASKVLSGPKAQPAGDKAEFIEKVRRALYLGKIVSYAQGFSQLRAASDEYHWELNYGEIAKIFRAGCIIRAQFLQKITDLYAENAGIANLLLAPYFKKIADEYQQALRDVVAYAVQNGIPVPTFSAAVAYYDSYRAAVLPANLIQAQRDYFGAHTYKRTDKEGIFHTEWLE

SEQ ID NO: 73585 - protein, 130 aa, Salmonella paratyphi A
MHHNPFLIKAPSSGGAFPFQPLADIAIVGEWPVWRKGFLPPILRYWIAHAKWPAGHNALYRQGGKKIKKSPALWQGQEIWRGGYCSFIVASRLISSVADETNGVVSAFSEPPRCQSRLTANRSAAPGYDR

SEQ ID NO: 73586 - protein, 710 aa, Salmonella paratyphi A
  MISC_FEATURE (157)..(157): X=any amino acid
IQPDRDLFSWPQYWAACFGPAPFLPMSREEMDQLGWDSCDIILVTGDAYVDHPSFGMAICGRMLEAQGFRVGIIAQPGWNSKDDFMRLGKPNLFFGVTAGNMDSMINRYTADRNVRHDDAYTPDNVRAKRPGPATLVYTQRCKEAWKDVPMILVGHXGQSRRTAHYDYWSDTVRRSVLVDSKADMLMFGNGERPLVEVAHRLAMGETIDQIRDVRNTAIMVKEALPGWSGVDSTRLDTPGKIDPIPHPYGEDLPCADNKPVAPKKQEAKAITVQPPRPKPWEKTYILLPSFEKVKGDKVLYPCVRILHHETNPGCARALMQKHGDRYVWINPPAIPLSTEEMDSVFALPYQRVPHPAYGNARIPAYEMIRFSINIMRGCFGGCSFCSITEHEGRIIQSRSEDSIINEIEAIRDTVPGFTGVISDLGGPTANMYMLRCKSPRAEQTCRRLSCVYPDICPHMDTDHTPTINLYRRARELKGIKKILIASGVRYDIAVEDPRYIKELASHHVGGYLKIAPEHTEEGPLSKMMKPGMGSYDRFKELFDLYSKQAGKEQYLIPYFISAHPGTRDEDMVNLALWLKRHRFRLDQVQNFYPSPLANSTTMYYTGKNPLGKIGYKSEDVVVPKGDRQRRLHKALLRYHDPANWPLIRQALEAMGKKHLIGGRRECLVPAPTIEEMRDVARTAIPRPALTKHTPVEHQRQGLAANKKRG

SEQ ID NO: 73587 - protein, 30 aa, Salmonella paratyphi A
MRLMLDGVFNHSGDSHAWFDRHNRSTGARA

SEQ ID NO: 73588 - protein, 43 aa, Salmonella paratyphi A
MATQSVSSGSSPATELLRKPFLLHLCIFRRCFHLVERGINFLQ

SEQ ID NO: 73589 - protein, 162 aa, Salmonella paratyphi A
  MISC_FEATURE (15)..(15): X=any amino acid
MWRVFCLELRVGSAXHRRPAVVLPDGHHPVSVKRRAAAAAVARIRAIIQVAALLASLLALERLFRDDLQDGSLEQLMLLPVPLPALVLAKVLAHWAVTGLPLMMLSPLVALLLGMDVYGWKIMALTLLLGTPALGFLAAPGARADGRAASAAASCWAFWCCR

SEQ ID NO: 73590 - protein, 56 aa, Salmonella paratyphi A
MLTHLEQLQQHQGNTIKISYTTHEQFKKLTADSQAVIRSGECSPYANVILCAGVTF

SEQ ID NO: 73591 - protein, 133 aa, Salmonella paratyphi A
MRSVLTISVGLLFGLALSSVAHANDHKILGVIAMPRNETNDLALKIPVCRIVKRIQLTADHGDIELSGASVYFKTARPSQSLNVPSSIKEGQTTGWININSDNDNKRCVSKITFSGHTVNSSDMARLKVIGDD

SEQ ID NO: 73592 - protein, 83 aa, Salmonella paratyphi A
MKKVLALVVAAAMGLSSAAFAAETATPAKTATPAKTTQNTQHHKKQHKKTVEQKAQAAKKHQKKDGKKAPAKSTSKTTSQPAA

SEQ ID NO: 73593 - protein, 160 aa, Salmonella paratyphi A
MMIAAVGSPAPNMFHQPFNADVFVVDIRQAAVNHFRQVVRRDIRRHTYCDTGRTVHQQIRNFGRHDVRNFFRTVIVIHEIHRLFFEIGHQFVGDFRQTDLRITHCRRGVAVNRTEVTLTIHQHVTQREWLPIRTMVSYTAESPWGWYLPITSPTTRADFL

SEQ ID NO: 73594 - protein, 273 aa, Salmonella paratyphi A
MSYARHLPVLMYHHVSDKPGQITLSPRTFRAQMKWLAESGWKIVTAAEVEAFYHGARLPRKSVMLTFDGGWLDNWLQVFPVLQEFNLHAHLFLVTSLISDGSVRIPAGEPVYSHDECQMLVKQGRADEVMLRWSEVREMHLSGLVEFHSHTHTHRRWDQKPVSRNPSDLLRVDILLSRKRMREMLGYCSQHLCWPEGWYCSDYIHVAEELGFTYLYTTERRMNNPVIGSQRIGRINTKERKNVGWLKRRLFYHTTPGFSSLLARHKGARRIAD

SEQ ID NO: 73595 - protein, 149 aa, Salmonella paratyphi A
MGIFSIANQHIRFAVKLACAIVLALFIGFHFQLETPRWACLTAAIVAQAPAFAPAGEPYSGAIRYRGMLRIIGTFIGCIAALIIIISMIRAPLLMILVCCVWVGFCTWISSLVRIENSYAWGLSGYTALIIVITIQTEPLLTPQFALER

SEQ ID NO: 73596 - protein, 78 aa, Salmonella paratyphi A
MENLNMDLLYMAAAVMMGLAAIGAAIGIGILGGKFLEARRQPDLIPLLRTQFFIVMGLVDAIPMIAVGLGLYVMFAVA

SEQ ID NO: 73597 - protein, 59 aa, Salmonella paratyphi A
VTTIVSVRRNGHVVIAGDGQATLGNTVMKGNVKKVRRLYNDKVIAGFAGGTADAFTLFE

SEQ ID NO: 73598 - protein, 156 aa, Salmonella paratyphi A
MKKQQGYTLIETVVAMSLIIILSATGLYGWQRWQQQQRLWQTACQVRDYLLQLREDAHWHNRDHILRVVSEGGSWCFVSSVATQTSCTPSSPFVFTPDWRDVVLADITPSLAFFGLRNTAWAGHIVLKNAAGEWRLVVSSWGRIRLCERNEAATCQ

SEQ ID NO: 73599 - protein, 135 aa, Salmonella paratyphi A
MLVSRVSAIGHNHSDVAGALQDAICTTFCTRHNALHARAFVYENFRNFQIVNVSAIVVFSVSNGRFQNFLDQYSRFLVGVGQNIQSLRHFLTANQVSNKANLLSRRTSMAMFSDSFHLFLLPYFFFAFLSAAWPR

SEQ ID NO: 73600 - protein, 59 aa, Salmonella paratyphi A
MAKTIKITQTRSAIGRLPKHKATLLGLGLRRIGHTVEREDTPAVRGMVNAVSFMVKVEE

SEQ ID NO: 73601 - protein, 65 aa, Salmonella paratyphi A
MDNIMNKFNSVLLALVFAISAITFSSSAMATESGNKGFPGISFPWCKIWPAGISIPELPLGKICW

SEQ ID NO: 73602 - protein, 341 aa, Salmonella paratyphi A
  MISC_FEATURE (87)..(87): X=any amino acid
AQRIINGEVPEGLKGRRVVALDMGALVAGAKYRGEFEERLKGVLNDLAKQEGNVILFIDELHTMVGAGKADGAMDAWNMLKPALAWXYCHCVGATTLDEYRQYIEKDAALERRFQKVFVAEPSVEDTIAILRGLKERYELHHHVQITDPAIVAAATLSHRYIADRQLPDKAIDLIDEAASSIRMQIDSKPEELDRLDRRIIQLKLEQQALMKESDEASKKRLDMLNEELDDKERQYSELEEEWKAEKASLSGTQTIKADWEQAKIAIEQARRVGDLARMSELQYGKIPELEKQLEAATQSEGKTMRLLRNKVTDAEIAEVLARWTGIPVARMLEGEREKLL

SEQ ID NO: 73603 - protein, 56 aa, Salmonella paratyphi A
MSITSERERVVAPPIQPCDDDNTQDTTVFRSVPQHWTLTPQQRAFIDAFADEVSQK

SEQ ID NO: 73604 - protein, 220 aa, Salmonella paratyphi A
  MISC_FEATURE (30)..(30): X=any amino acid
  MISC_FEATURE (115)..(115): X=any amino acid
  MISC_FEATURE (131)..(131): X=any amino acid
  MISC_FEATURE (150)..(150): X=any amino acid
HYRYDEYGRVVEKRGRNRTQHYRWDADTGXRKWRSSGGAPYGVYGYVYDAPGRGWRSTSWMRKESPYNRTTFLWDGMRLAQECRLGRSSSLYIYSDQGSHEPLARVDRAAAGERXEVLYYHTDVNGARRRXTDGRGNIVWEAGYQVWGNXRMEKETRPVQQNLRFQGQYLDRETGLHYNLYRFYDPDIGKFISGDPISIRGGINLYQYAPNPIKWIDPLG

SEQ ID NO: 73605 - protein, 303 aa, Salmonella paratyphi A
MSHPLWSHFDILFKHFNSGTSYSGPAAIRLRASCGQPSHTRLYQPANNECYLFDNLAKLGFTQHLMMDHNGEFGGFLKEVRENGGMQSELMNQSGLPTALLSFDGSPVYDDLAVLNRWLTGEEREANSRSATFFNLLPLHDGNHFPGVSKTVDYKIRAQKLFDELDAFFTELEKSGRKVMVVVVPEHGGALKGDRMQISGLRDIPSPSITNVPAGVKFFGMKAPHEGAPIDINQPSSYLAISELVVRAVDGKLFTEDSVNWNKLTSNLPQTAPVSENANAVVIQYQGKPYVRLNGGDWVPYPQ

SEQ ID NO: 73606 - protein, 682 aa, Salmonella paratyphi A
  MISC_FEATURE (306)..(306): X=any amino acid
  MISC_FEATURE (307)..(307): X=any amino acid
VEMVEILSTLSMDIDTLRAALLFPLADANVVSEDVLRESVGKSIVTLIHGVRDMAAIRQLNATHNDSVSSEQVDNVRRMLLAMVDDFRCVVIKLAERIAHLREVKEAPEDERVLAAKECTNIYAPLANRLGIGQLKWELEDYCFRYLHPAEYKRIAKLLHERRLDREHYIEEFVGHLRAEMKNEGVQAEVYGRPKHIYSIWRKMQKKHLAFDELFDVRAVLFVAERLQDCYAALGIVHTHYRHLPDEFDDYVANPKPNVYQSIHTVCLGPGGKTVEIQIRTKQMHEDAELGVAAHWKYKEGAASAXXVSGHEDRIAWLRNVIAWQEEMADSGEMLDEVRTQVFDDRVYVFTPKGDVVDLPAGSTPLDFAYHIHSDVGHACIGAKIGGRIVPFTYQLQMGDQVEIITQKQPNPSRDWLNPNLGYVTTSRGRSKIHAWFRKQDRDKNILAGRQILDDELAHLGISLKEAEKHLLPRYNFNELEELLAAIGGGDIRLNQMVNFLQSQFNKPSAEEQDAAALKQLQQKTYAPQNRRKDDGRVVVEGVGNLMHHIARCCQPIPGDEIVGFITQGRGISVHRADCEQLAELRSHAPERIVEAVWGESYSAGYSLVVRVQANDRSGLLRDITTILANEKVNVLGVAAASDIKQQIATIDMTIEIYNLQVLGRVLGKLNQVPDVIDARRL

SEQ ID NO: 73607 - protein, 88 aa, Salmonella paratyphi A
MRLRKPGAIWSSGRLSGRRLSVHQTQDVIQSFRLREDLLQLLTVETVFADHFINELCALGLCAKSPPICMTLCCGSSRKPPEDVPVVA

SEQ ID NO: 73608 - protein, 150 aa, Salmonella paratyphi A
MMFNIPFSEPTCILTAPTTVNLGDWYRSDVEKDQTTEVPFQITGTCTGTIAVSFVAKSSYTNADKNLFTNSITSNSSVTAAGGVGVKISSPAYSQIHADSSPEAIAVGEIIGMPVTSVNANFKAKLVKTGTEAVTPGIFGSSVTFQVTYE

SEQ ID NO: 73609 - protein, 55 aa, Salmonella paratyphi A
MLLVEPSFVAQKCSQRQHQIKRHTDARQRLRREFAVARLGLIIASASGNVSPGRW

SEQ ID NO: 73610 - protein, 37 aa, Salmonella paratyphi A
MDFVVVAKKGVADLDNRALSEALEKLWRRHCRLARGS

SEQ ID NO: 73611 - protein, 128 aa, Salmonella paratyphi A
MLNSAMSVVILAAGKGTRMYSDIPKVLHTLAGKPMVQHVIDAATKLGAAQVHLVYGHGGELLKQTLKDDKLNWVLQAEQLGTGHAMQQAAPFFSDDEDILMLYGDVPLISVETLQPCAMPNRRVVLGY

SEQ ID NO: 73612 - protein, 43 aa, Salmonella paratyphi A
NDASDTYSGSAADTVSALFHQYRRLLADVAHNRRNVGMIMMRG

SEQ ID NO: 73613 - protein, 407 aa, Salmonella paratyphi A
MLIISYIALCLLFIVYLYTLSVRIEGKIINVMVPYLIITVPTLYVFEGIFVYLSEVQNYTVEYLFFYTCYITYIASFVISYLYTQRKPIYNKSNTKNKPRYVFTSLLFTFLAFIIYLPVLMEFREYILSPRRIYELTRTGYGIYFYPSLMFSLVASICAFFTYKKSKLFCISIVLFNCILIFLHGNKGPIFSIFIAFILYLSYIENKKIKFMFLVKSFAVIAVIVTAFFAYTFTDGNPIENMANYSDYTRNAVLVASSNFDFMYGKLLMESEVYSRIPRAIWPDKPEDFGALYLAKVFFPDAFYRNQGAPAFGYGELYADFGLFTPVWLVISGVFKGVLAKYFSNKTQETKSAHYFIMFLFCIGISVIPVSMGWLFPEHLMIAFMVYIASSFVFSEHIRFVLLRNNK

SEQ ID NO: 73614 - protein, 304 aa, Salmonella paratyphi A
MRKVSISILFMLVSLTWGTTWLAMRIAVETIPPVFATGMRFMFAAPFLIIIAWLRKKTLLFPPGQRLFQFVICIFYFSIPFSLMIYGETYVNSGLAAIIFANMPVAVLIASVLFLNEKAKLMQIAGLTIAITALTGILLEEANTSTESHWQGITALISAVLIHAIIYTQCKKRSCTVSVITFNALPCLLAGLILSATGWFFERPQVSTFSVHSILATLYLGAFAGVFGILCYFALQQKANAFQASLVFLIFPLIAVSLEDYIYGYAISTHSMLLIIPLAIGIFLTLVARNIPVTSRCRDNSSQE

SEQ ID NO: 73615 - protein, 434 aa, Salmonella paratyphi A
MKFPGKRKSKHYFPVNARDPLLQQIQPEQETNASWVVGIDQTLVDIEAKVDDDFITRYGLSAGHSLVIEDEVAEKLYQELTRENLITHQFAGGTIGNTMHNYSVLADDRSVLLGVMCSNIEIGSYAYRYLCNTSSRTDLNYLQAVDGPIGRCFTLIGESGERTFAISPGHMNQLRAESIPEAVIAGASALVLTSYLVRCKPGEPMPDATMKAIEYAKKHNVPVVMTLGTKFVIADNPQWWQAFLKENVSILAMNEEEAEVGPGENDPLLARIKALDWVDLVLCTAGPIGLYMAGFTEEEAKRKTQHPLLPGAIAEFNQYEFSRAMRHKDCINPLRVYSHIAPYMGGPEKIMNTNGAGDGALAACLHDITANSYHRSNVPNSSKSQFTWLTYSSLAQVCKYANRVSYQVLNQHSPRLTRGLPEREDSLEESYWDR

SEQ ID NO: 73616 - protein, 97 aa, Salmonella paratyphi A
MAKKVQAYVKLQVAAGMANPSPPVGPALGQQGVNIMEFCKAFNAKTDSIEKGLPIPVVITVYADRSFTFVTKTPAAVLLKKAAGIKSGCQAEQRQSR

SEQ ID NO: 73617 - protein, 121 aa, Salmonella paratyphi A
MSITKDQIIEAVSAMSVMDVVELISAMEEKFGVSAAAAVAVAAGPAEAAEEKTEFDVILKAAGANKVAVIKAVRGATGLGLKEAKDLVESAPAALKEGVSKDDAEALKKSLEEAGAEVEVK

SEQ ID NO: 73618 - protein, 173 aa, Salmonella paratyphi A
MIKSAPLRGQMNPGRENMNIIKANVAAPDARVAITIARFNQFINDSLLDGAVDALTRIGQVKDDNITVVWVPGAYELPLATEALAKSGKYDAVVALGTVIRGGTAHFEYVAGGASNGLASVAQDSGVPVAFGVLTTESIEQAIERAGTKAGNKGAEAAVTALEMINVLKAIKA

SEQ ID NO: 73619 - protein, 323 aa, Salmonella paratyphi A
MIRFAVLGTNWITRQFVDAAHETGKFRLAAVYSRSLEQAQSFANDYPVEHLFTSLEAWAQRDAVEAVYIASPNSLHFSQTQHFLQHKKHVMCEKPLALTWAEVDAAIACARDNQRVLFEAFKTACLPNFLLLRESLPKIGRMHKAFLNYCQYSSRYQRYLNGENPNTFNPAFSNGSIMDIGYYCLASAIALWGEPRSVQASANLLESGVDAHGVVVMDYGDFSVTLQHSKVSDSVLASEIQGERGSLVIEKLSECQKVCFAPRRADAGSDQPQHINTMLYEAGAFAQLIENHAVEHPGLSLSRATAKWLTEIRRQTGVIFPAD

SEQ ID NO: 73620 - protein, 322 aa, Salmonella paratyphi A
MNTVGTPLLWGGFAVVVVIMLSIDLLLQGRRGAHAMSMKQAAGWSILWVTLSLLFNAAFWWYLAETQGREVADPQALAFLTGYLIEKSLAVDNVFVWLMLFSYFSVPPTLQRRVLVYGALGAIVLRTIMIFAGTWLITQFEWLLYVFGAFLLFTGVKMALAKEDESGISEKPMVRWLRGHLRMTDTIENEHFFVRKNGLLYATPLLLVLIMVEFSDAIFAVDSIPAIFAVTTNPFIVLTSNLFAILGLRAMYFLLSGVAERFSMLKYGLAVILVFIGIKMLIVDFYHIPIAISLGVVFGILTITLVINAWVNHQRDKKLRAQ

SEQ ID NO: 73621 - protein, 82 aa, Salmonella paratyphi A
MTTITLVNEQNSTGNPFSAHMLCEQRAIQEITYELLQSQQHVSNKDIIAKLIEKLETEKDVVQLDIYRNALEAVLFQTPDDI

SEQ ID NO: 73622 - protein, 279 aa, Salmonella paratyphi A
MFRYLCNQKAALLTAILLMAAGVLTLCFPESWYPQETEWQLTAEKEITGIHGGLSGLTWNPDSRTLFAVTDHPSSVVELDTEGNVLRVIPSDGDHDFEAIEYLGGNRYALSRERTLTTHCIDSSTTVLPPATYSLTLDVNRHSDNAGFEGLAWGRGEHALMVAQEKKPLRLYVTDRSPDALSVSDSLTHRASLPWFLKDISGLHYDRNNGLLYVLSHESAVVVVSDLDGGRKVMSLRRGHCGLRRDIPQAEGIASDDRDTLWIVSEPNLFYRFTRTASS

SEQ ID NO: 73623 - protein, 111 aa, Salmonella paratyphi A
MRLEDCADNSSIKQLMFSFTPQSGFWSNQNQVFKNDATTGAAQNVGIVIFSADYKTNVLNSDGSSNVVYDVSGKSSSLYLTDYQFYARYQNTGAVVSGVVTSNVLVDVSYE

SEQ ID NO: 73624 - protein, 388 aa, Salmonella paratyphi A
MKITISGTGYVGLSNGLLIAQHHDVVALDIVPARVELLNDRISPIVDKEIQQFLKEDNIRFRATLDKFDAYQNADYVIIVTPTDYDPKTNYFNTFSVESVIQDVISINPAAVMIIKSTVPVGFTAAMRQKFTTENIIFSPEFLREGKALLDNLYPSRIVIGEQSERAREFAALLQEGAIKQEIPTLFTDSTEAEAIKLFANTYLAMRVAYFNELDSYAETLGLNTRQIIEGVCLDPRIGNHYNNPSFGYGGYCLPKDTKQLLANYQSVPNNIISAIVEANRTRKDFIADSILARKPKVVGIYRLIMKSGSDNFRASSIQGIMKRIKAKGVEVIIYEPVMQEETFFNSRLERDLHCFKQQADVIISNRMAAELLDVAEKVYTRDLFGSD

SEQ ID NO: 73625 - protein, 327 aa, Salmonella paratyphi A
MTVDSNASSGRGNDPEQIDLIELLLQLWRGKMTIIVAVIIAILLAVGYLMIAKEKWTSTAIITQPDAAQVATYTNALNVLYGGNAPKISEVQANFISCFSSAFSALSEALDNQKEREKLTIEQSVKGQTLPLSVSYVSTTAEGAQRRLAEYIQQVDEKVAKELEVDLKDNITLQTKMLQESLETQEVVAQEQKDLRIKQIEEALAYADEAKITQPQIQQTQDVTQDTMFLLGSDALKSMIQNEATRPLVFSPAYYQTKQTLLDIKNLKVTADTVHVYRYVMKPTLPVRRDSPKTAITLVLAVLLGGMIGAGIVLGRNALRSYKPKAL

SEQ ID NO: 73626 - protein, 145 aa, Streptococcus pneumoniae
  MISC_FEATURE (71)..(71): X=any amino acid
MKLTYDDKVQIYELRKQGYSLEKLSNKFGINNSNLRYMIKLIDHYGIEFVKKGKNRYYSPDLKQEMIHKVXHEGWTKDRVSLEYCLPSRTILLNWLAQYRKNGYTIVEKTRGRVPRAENAILKKLRELRLKEEKEKEERQKLFKN

SEQ ID NO: 73627 - protein, 145 aa, Streptococcus pneumoniae
  MISC_FEATURE (71)..(71): X=any amino acid
MKLTYDDKVQIYELRKQGYSLEKLSNKFGINNSNLRYMIKLIDRYGIEFVKKGKNRYYSPDLKQEMIHKVXHEGWTKDRVSLEYGLPSRTILLNWLAQYRKNGYTIVEKTRGRVPRAENAILKKLRELRLKEEKEKEERQKLFKN

SEQ ID NO: 73628 - protein, 1263 aa, Streptococcus pneumoniae
GEKGDQGERGLTGAKGEKGDRGERGLTGAQGAKGEKGDRGERGLTGAQGAKGEKGDRGERGLTGAQGAKGEKGDRGERGLTGAQGLKGEKGAQGERGLTGAQGAKGEKGDQGERGLTGAQGAKGEKGDQGERGLTGAQGAKGEKGAQGERGLTGTQGAKGEKGDRGERGLTGAQGAKGEKGDRGERGLTGAQGAKGEKGAQGERGLTGAQGAKGEKGDQGERGLTGAQGEKGDRGERGLTGAKGEKGDQGERGITGAKGEKGAQGERGLTGAQGAKGEKGDQGERGLTGAQGEKGAQGQAGRDGVTPTVTVKDNKNDGTHTITINDGRGNVTSTVVRDGFDGASPLVATQRNDADKTTTVIFYYDKNGNNELDASDKKLKEVVIADGAKGEKGDKGEQGLQGRDGEQGPKGEDGKTPTVKVTDGQDGTHTITINDGKGGITTTVVRDGFDGASPLVSTHRNEADKTTTVIFYYDLNDNNQFDEGDTKLKEVVIADGKQGPKGDKGDNGKDGFTPEVTVTDNNNGTHTITITQPDNRPSLTTIVKNGEDGKTPKVKAERDDAKKQTTLTFYIDKDGDGSYTAGKDELVQTTVVKDGQDGAAGASGRDGKEVLNGKVDPTTEGKDGDTFVNTQTGDVFVKKGNTWEPAGNIKGPKGDKGADGAKGEKGAQGERGLTGAQGVKGEKGDQGERGLTGSKGEKGDQGERGLTGAQGAKGDKGEQGLQGRDGAQGPKGADGQRGPAGPQGPKGEQGNPGTPGKDGKSLIAVKNGVLVTITPVEGRPQTTFVEDGQKGADGKTPTVTITEGQNGTHTLTVHNPGSPDVTTTIRDGATGQAGRDGKDVLNGKVNPQPNQGKNGDKYINIETGDVYVKNNGNWDKEGNIKGPKGDKGADGAKGEKGDQGERGLTGAQGAKGADGAVGRDGRDGKDVLNGKANPEAHQGKDGDKYVNTETGDVFVKNNGNWDKEGNIKGPKGDKGADGAKGEKGDRGERGLTGAQGAKGADGAAGRDGRDGRDGKDVLNGKVNPEANQGKDGDKYVNTETGDVFVKNNGNWDKEGNIKGSKGDKGERGEDGKTPEVTVTPGKDGHSTDITFTVPGKDPVTVNVKDGENGLNGKTPKVDLLRVQGKNGNPSHTIVTFYTDENNDGKYTPGTDELLGSEMIKDGAKGADGRDGKSLLTVKDGKETKVYQEDPANPGQPLNPEKPLAVIRDGVDGKSPTVTAVRKDEAGHKGVEITVDNHDGSQPTTVFVQDGAKGKTGATGQDGQ

SEQ ID NO: 73629 - protein, 149 aa, Streptococcus pneumoniae
  MISC_FEATURE (68)..(68): X=any amino acid
  MISC_FEATURE (109)..(109): X=any amino acid
MGSFRPVAGNLHLHRTKISPSLSLRQCPNHYAFRAGRNLPDKEFRYLRTVIVTAAVYWGFNSYLRLRXALLLTFQHRAGVTPYTSSYDLAESCVFDKQLLGPIHCGLTXSQHPLLPKLRGHFAEFLNEEFSRSPEATSPRLPVSVLRYG

SEQ ID NO: 73630 - protein, 122 aa, Streptococcus pneumoniae
  MISC_FEATURE (26)..(26): X=any amino acid
  MISC_FEATURE (106)..(106): X=any amino acid
MLSAFIPSLHSYPAMPLARQLVHQRXVHSGPLVLGADPLKFPTPATDRDRTVSRRSEPSSRAALMGEQPNPWDRLQPQDATSRHRGAKPPRRCELLGEISLLSPGXLLSVERWPFHTEPPDH

SEQ ID NO: 73631 - protein, 145 aa, Streptococcus pneumoniae
  MISC_FEATURE (71)..(71): X=any amino acid
MKLTYDDKVQIYELRKQGYSLEKLSNKFGINNSNIRYMIKLIDRYGIEFVKKGKNRYYSPDLKQEMIHKVXHEGWTKDRVSLEYGLPSRTILLNWLAQYRKNGYTIVEKTRERVPRSENAILKKLRELRLKEEKEKEERQKLFKN

SEQ ID NO: 73632 - protein, 30 aa, Streptococcus pneumoniae
MTSNHHAPYDLGYTRATMAGTTSRKPVTAS

SEQ ID NO: 73633 - protein, 145 aa, Streptococcus pneumoniae
  MISC_FEATURE (71)..(71): X=any amino acid
MKLSYDDKVQIYELRKQGYSLEKLSNKFGINNSNIRYMIKLIDRYGIEFVKKGKNRYYSPDLKQEMIHKVXHEGWTKDRVSLEYGLPSRTILLNWLAQYRKNGYTIVEKTRGRVPRAENAILKKLRELRLKEEKEKEERQKLFKN

SEQ ID NO: 73634 - protein, 645 aa, Streptococcus pneumoniae
  MISC_FEATURE (569)..(569): X=any amino acid
  MISC_FEATURE (586)..(586): X=any amino acid
  MISC_FEATURE (617)..(617): X=any amino acid
  MISC_FEATURE (641)..(641): X=any amino acid
TITTQRGQDGQSTVVTITTSGKDPVTFTVKDGKNGKDGRAPKIKVEDITSPSRIRRDTDAAATPTRNGIRVTVYDDVNDNGVYDEGVDKVLNSKDIYNGIDGRDGSAPTITTKDNGDGTHTITVQNPDGSESTTVVKDGKDGKTANITTTENPDGSHTITVTNPDGSTKETVVKNGKDGKTPKVEVTDNNDGTHTVKVTDGDGNVTNAIIKDGKDGKAATATTTENPDGSHTVTITNPDGTKNEFVVKNGRDGVDGRTPTASVRDNGDGSHTIVITNPEGVTTETTVRDGKSPKVTITDEQNGTHKISVLNGDGTTTETIIKDGKSPVATVRDNQDGTYTIRVENGNGTVSETTVRDGKSPTAKVVDNGDGTHTITVVNSDGITTTTTVRDGREPKLEVIDNNDGSHTIKVTGADGKGTTTTIFDGKSPKANIVDNGDGTHTLTIVDSDGREYKSIIKDGKDGKDSVSPTVTVKNNNDGTHVVTITNPDGSKTEMVIKDGKDGKSPKVSVEDNGDGSHTITIINSDGTVTKTVIKDGKDGRDGRDGRDGKDGKDGKCGCQDQTSNTIKXQTSSSNTKCADTRSTGXTCASATNTKCTDTRSASTTNSSCFNTRSTGXTSTSGSRTTSSTNTGSTSNSSKCXPSST

SEQ ID NO: 73635 - protein, 66 aa, Streptococcus pneumoniae
  MISC_FEATURE (26)..(26): X=any amino acid
MLSAFIPSLHSYPAMPLARQLVHQRXVHSGPLVLGADPLKFPRPATDRDRTVSRRSEPSSRAALMG

SEQ ID NO: 73636 - protein, 441 aa, Streptococcus pneumoniae
DPSSQNLLLQFVLLFILTVLNAFFSATEMAMVSLNRARVEQKAEEGDRRYIRLLKVLENPNHFLSTIQVGITLITILSGASLTNTLGRVIASWLGNGETAQAVATFLSLAFLTYISIVFGELYPKRIALNLKDALAIRTAPIINGIGKLVSPFVWLLAASTNFLSHLTPMSFDDADEKMTRDEIAYMLTNSEETLDADEIEMLQGVFSLDELMAREVMVPRTDAFMVDIQDDSQAIIQSILKQNYSRIPVYDGDKDNVIGIIHTKSLLKAGFVDGFDNIVWKRILQDPLFVPETIFVDDLLKELRNTQRQMAILLDEYGGMAGLVTLEDLLEEIVGEIDDETDKAAIDVHQIGEDTYIVQGTMTLNDFNNYFDVELESDDVDTIAGYYLTGVGTIPTTEKLSYELVSQNKQFILTNDKVKNGRVTKVKVQITEVEIEEETE

SEQ ID NO: 73637 - protein, 229 aa, Streptococcus pneumoniae
MNNNFNNFNNMDDLFNQLMGGMRGYSSENRRYLINGREVTPEEFAHYRATGQLPGNAETDVQMPQQASGMKQDGVLAKLGRNLTAEAREGKLDPVIGRNKEIQETSEILSRRTKNNPVLVGDAGVGKTAVVEGLAQAIVNGDVPAAIKNKEIISIDISGLEAGTQYRGSFEENVQNLVNEVKEAGNIILFFDEIHQILGAGSTGGDSGSKGLADILKPALSRGELTVIG

SEQ ID NO: 73638 - protein, 297 aa, Streptococcus pneumoniae
MNFVLSSLSEGLLWSIVAIGDYLTFRILDIADMTAEGAFPLGAAVVVSQIQAGANPWLATLLALLAGMVAGLVSGMLHTKMKIPALLTGIVTLTGLYSINIKIMGSVPNLSLGDSATVFKQLASLGLTNEGAVFSLSLVCFLLVCLVLTLLMKTEIGLVLRSTGDNIPMSEANGVNVDTMKIVGYMISNGLIALCGSLFAQNDGFSDVTSGTGTIVVGLSSVIIAEVLIHDLTIGGRLLSIGIGAIVYRLIILNIYEIPNLDQNLVRLFNAILLALVLFAPELQKRLKIRGLKLRNE

SEQ ID NO: 73639 - protein, 193 aa, Streptococcus pneumoniae
MKTSLKLYFTALVASFLLLLGACSTNSSTSQTETSSSAPTEVTIKSSLAEVKLSKVPEKIVTFDLGAADTIRALGFEKNIVGMPTKTVPTYLKDLVGTVKNVGSMKEPDLEAIAALEPDLIIASPRTQKFVDKFKEIAPTVLFQASKDDYWTSTKANIESLASAFGETGTQKAKEELAKLDKSIQEVATKNES

SEQ ID NO: 73640 - protein, 60 aa, Streptococcus pneumoniae
MNKRVQAFLAKMQEKELDGIIINNLKNVYYLTGFWGSNGTVFISRDRQVLVTDSRYIIAA

SEQ ID NO: 73641 - protein, 265 aa, Streptococcus pneumoniae
MANRKIVVALGGNAILSSDPSAKAQQEALVETAKHLVKLIKNGDDLIITHGNGPQVGNLLLQHLASDSEKNPAFPLDSLVAMTEGSIGFWLKNALQNALLDEGIEKNVASVVTQVVVDKNDPAFVNLSKPIGPFYSEEEAKAEAEKSGATFKEDAGRGWRKVVASPKPVDIKEIETIRTLLNNGQVVVAAGGGGIPVVKENNGHLTGVEAVIDKDFASQRLAELVDADLFIVLTGVDYVFVNYNKPNQEKLEHVNVAQLEEYIKQ

SEQ ID NO: 73642 - protein, 330 aa, Streptococcus pneumoniae
MEELNDQQIVRREKMAALREQGIDPFGKRFERTANSQELKDKYTNLDKEQLHDKNETATIAGRLVTKRGKGKVGFAHLQDREGQIQIYVRKDAVGEENYEIFKKADLGDFLGVEGEVMRTDMGELSIKATHITHLSKALRPLPEKFHGLTDVETIYRKRYLDLISNRESFERFVTRSKIISEIRRYLDQKGFLEVETPVLHNEAGGAAARPFITHHNAQNIDMVLRIATELHLKRLIVGGMERVYEIGRIFRNEGMDATHNPEFTSIEVYQAYADFQDIMDLTEGIIQHAAKSVKGDGPVNYQGTEIKINDPFKRVHMVDAIREILGVDS

SEQ ID NO: 73643 - protein, 166 aa, Streptococcus pneumoniae
MKTAFIIIDVQNVLVETGFQTKSLLEKISYLQNQARSKNIEIIYVQHIENSEAQTSEDWQLSALLNRKPAEKVFQKKYNSIFKETGLKEYLDKQGIEKLVLCGMQTEYCVDTSVKVAFEYGYQLIVPEGAVTTFDGDDIPAETINEFYEDIWEERFADVLDYKHIF

SEQ ID NO: 73644 - protein, 375 aa, Streptococcus pneumoniae
MWMEELSNGKYKFFERYKDPYTEKLKKVSVTMEKKTPQARNQAAILLQEKINKKLSTKQVESITFEEIYNLFYKSWAQTVKESTKHNCKSVDKKMKEVIPSDTILANLDRRFLQEAIEKIIESNGYITAKKVRHRLRGIFNYAVQYSYIENNEVDYTTIPQKPKTLEELEKKRNNFLTMQEIKALVDVLNRREYHQKYADMVLVLTLTGMRYGELTALQLKNIDFENNKIEITGNFDSVNKIKTLPKTTNSIRTIKVSESVIEAIQRQIVRLSERFQPLSSDDYIFCFEKWNQPTTIACFIQILKKYGKQAKIEKNLSSHIFRHSHISFLAESGLPIKSIMDRVGHSNAKMTLEIYSHTTEDMEDKLVNKLDTIF

SEQ ID NO: 73645 - protein, 392 aa, Streptococcus pneumoniae
MTLSKKQLQLRAKILETVYTLGPISRIEIATKTGITPATTSSITNDLIKENILLELGEDEHDTSVGRKKILLDIQAKRFYYIGCELSEKHFTFALGDNLGNILKEEKEIVTKQLIQEKGNQLINQTLKQFLNNCSDYEIEAIGIALPGRYLDDYKITTNNPLWQHIDLEMIQSHFDKPLFFSNNVNCMAIGKRLFSRQQNDPNFAYFHFARGMHCSYIYDGNIYGKGNLMIGEIGHTVVSSEGEECSCGRKGCLQTFAGESWLIKKSKILYHQSPYSLLPSLVKNADDIDIQVILTAYQLGDTGIITLIHQALLYLSQTILNISMMIDSQKIYLHSPLLTNQHIIQKLYSEMNYKPKLLYNRLPEVIIEPYNDFTAAHSAIALCLYHTILHS

SEQ ID NO: 73646 - protein, 557 aa, Streptococcus pneumoniae
MVLDKASCDLLQYLMDQETSKTIMAISKDLKESRRKIYYHIDKINAALVDEALHIISIPRIGIHLTEEQRDACCKLLSEVDSYDYIMSAHERMMIMLLWIGISKERITIEKLIELTEVSRNTVLNDLNSIRYQLTLEQYQVILQVSKSQGYHLHAHPLNKIQYLQSLLYHIFMEENATFVSILEDKMKERLDDECLLSVEMNQFFKEQVPLVEQDLGKKINHHEITFMLQVLPYLLLSCHNVEQYQERHQDIEKEFSLIRKRIEYQVSKKLGERLFQKFEISLSGLEVSLVAVLLLSYRKDLDIHAESDDFRQLKLALEEFIWYFESQIRMEIENKDDLLRNLMIHCKALLFRKTYGIFSKNPLTKQIRSKYGELFLVTRKSAEILEGAWFIRLTDDDIAYLTIHIGGFLKYTPSSQKNMKKVYLVCDEGVAVSRLLLKQCKLYFPNEQIDTVFTTEQFKSVEDIAQVDVVITTNDDLDSRFPILRVNPILEAEDILKMLDYLKHNIFRNKSKSFSENLSSLISSYIVDSKLASKFQEEVQTLINKEIVVQAFLEDI

SEQ ID NO: 73647 - protein, 217 aa, Streptococcus pneumoniae
MVKYGVVGAGYFGAELARYMQKNDGAEITLLYDPDNAEAIAEELGAKVASSLDELVSSDEVDCVIVATPNNLHKEPVIKAAQHGKNVFCEKPIALSYQDCREMVDACKENNVTFMAGHIMNFFNGVHHAKELINQGVIGDVLYCHTARNGWEEQQPSVSWKKIREKSGGHLYHHIHELDCVQFLMGGMPETVTMTGGNVAHEGEHFGDEDDMIFVNM

SEQ ID NO: 73648 - protein, 573 aa, Streptococcus pneumoniae
MHRKTVIDFRTLGERYTFTQPIKELKTRNVEEVADLLAQVESYQEQGYYVVGYVSYEAAPAFEEKLAVHKDPLLGEYLLYFTVHDSVETSPIPLTYEDIDLPSNWQEVTSAADYEKAIAQIHHHLRQGDTYQVNYTVQLKQKLNANPFAIYNRMVVEQEAGYNAYVEHDEMAVISMSPELFFEQNDRELTTRPMKGTTQRGVTDQEDLEQASWLEQDPKNRSENMMIVDLLRNDMNRISEVGSEHVERLCQVEQYSTVWQMTSTIKSQLREDVDLVEIFHSLFPCGSITGAPKIATMEIIKDLEPQPRGVYCGTIGLLLPNGRRIFNVAIRTIQLHKGQAIYGVGGGITWDSTWESEYREVHQKAAVLYRKQARFQLITTGKISQKQLMFEEQHLERLRKASRYFAYPFDPEILRQKIEAECQTCDANQDYRLRISLSKSGEIEFSRQILTPLSPSFCQAKLCLQEANLNQSFTYFKTTYRPHLSIEEQEKIYHNGKGELLETSIGNLVLKIDGKLYTPPIRLGILPGIYHQYLLETGQVEEKVLTLADFAQAEAIYGCNAVRGLYELQVIGL

SEQ ID NO: 73649 - protein, 392 aa, Streptococcus pneumoniae
MKKSVYIIGSKGIPAKYGGFETFVEKLTAFQQDKAIQYYVACMRENSAKSGTTEDVFEHNGAICYNVDVPNIGPARAIAYDIAAINRAIEIAKENKDEDPIFYILACRIGPFIHGIKKKIQEIGGTLLVNPDGHEWLRAKWSAPVRRYWKISEGLMVKHADLLVCDSKNIEKYIQEDYKQYQPKTTYIAYGTDTTRSVLKSSDEKVRSWFKEKNVSENEYYLVVGRFVPENNYESMIRGFLASNSKKDFVLITNVEQNKFYNQLLAKTGFDKDPRVKFVGTVYEQELLKYIRENAFAYFHGHEVGGTNPSLLEALASTKLNLLLDVGFNREVAEDGAIYWKKDNLHEIIETSEQKTQKEIDEKDILSIKQVTERFSWELIVNEYEKLFLCEK

SEQ ID NO: 73650 - protein, 382 aa, Streptococcus pneumoniae
MIVLQYFKILARFVFMFLISAVLLPFKIKPNKIVFINFNGKGYGDNPKSICEYLRTTYPDLDLVWLARDNEGFPDGVRVVKYGTFQAFYEQASSKVWVYNVRAFARILKKRGQIYIQTWHGASSFKLIEKQADLPINYVLEAKYDARVTDIMISDSRKQTEEFQKYFWYSGEIFEVGMPRNDALFHYKEDYDKLNNIRKELSIHSDDYVILYAPTFRDDGDASYLDINFERLLQCVEHGIKKKCKFLIRLHPNHSHLCNNISFNKNIINATFYSDMQELTLLADVLVTDYSSSIFDFMLLNKPYVRYVNDLEKYAELRGVSDTYYELPDSIIKTAEELYDLLPKKIENFDYDSIKKYRNEILCPIFNGTASENVGGRIIQEL

SEQ ID NO: 73651 - protein, 2159 aa, Streptococcus pneumoniae
MEKYFGEKQERFSFRKLSVGLVSATISSLFFMSVLASSSVDAQETAGVHYKYVADSELSSEEKKQLVYDIPTYVENDDETYYLVYKLNSQNQLAELPNTGSKNERQALVAGASLAALGILIFAVSKKKVKNKTVLHLVLVAGMGNGVLVSVHALENHLLLNYNTDYELTSGEKLPIPKEISGYTYIGYIKEGKTTSDFEVSNQEKSAATPTKQQKVDYNVTPNFVDHPSTVQAIQEQTPVSSTKPTEVQVVEKPFSTELINPRKEEKQSSDSQEQLAEHKNLETKKEEKISPKEKTGVNTLNPQDEVLSGQLNKPELLYRDETIETKIDFQEEIQENPDLAEGTVRVKQEGALGKKVEIVRIFSVNNEEVSREIISTSTTAPVSRIVEKGTKKAQVIKEQAETGAEHKEVQSGAIVEPAIQPELPAAVLTDKGESAVQPELPEAVVSDKGVPEVQPALPEAVMTDKGDPEQVEPLPEYTGVQAGAIVEPEKVEPEYAGVQAGAIVEPEQVAPLPEYTGVQAGAIVEPEKVEAPKEYTGVQAGAIVEPEKVEAPKEYTGVQAGAIVEPEKVEPSKEYTGVQAGAIVEPEQIAPLPEYTGVQAGAIVEPEKVEALKEYTGKIEQPSAEDTKPNNENTNTPEEMSIQKKSSALINMNFITDSSKVTGVGSATFIAPNVLLTVAHNFINNSTDNTTGEFRGDKSKNVYEWVTPDGQKGTFTANNIHFYNKKDYPKGFIYDLAVIKLPETTGREHVELVKNYSKVNLNDKLNVHGYPAGKYTHLKDATVEMEQEYANNTYGVQYQGGNPGMSGGGIFNANGEVIGVHQNGAQNRSGGLILSPTQLAWIKSIIAGNEIPPVYDELYRHKDEKKDDAKDEKEVIKKLELRNISSVELYSKDGNKYRHVTSLASLPSNAENYFMKVKSENFKDVMLPVTSITNDTKDNRDVYKIVASANSLIQHENNNVLENYTYYLPKTQQSETGVYTSFKNLVDAMNSNPNGTFRLGATMDAREVELPDGQESYVNNVFHGILVGTNNEKYYAIYNLKKPLFGELNGATVEKLSLKDVNISAKDDTATLAKEANNNTHIDNVHADGAIAGERSIGGLVSQVNNSTISNSSYTGRITNTYKTVASYQIGGLVGKLSGPRGLIDKSFASIDLSSNATQGDQSIGGIVGAVENSALISNSYAEGNLNNVQRFANVGGVVGNLWDPVGGLEKSGRLSNVLSDVNVTNGNAIAGYNFNGIKANGTYSNKNNKVVNVVQEDDEILTKDSTVQRGEVLEDAQIKEKKATFVSKNTIKTEDFNFSSRYVTDYKNLENADSSKEKVYKNIEKLLPFYNRETIVKYGNLVETSSNLYNKELLSVVPMKDKEVISDINKNKSSINKLLLYYADNTSETLNVNYQTDFSNVAEYRIGGTNLIYTPNTLLRNYQNILDEVLPALNSVEYKSEAIRKVLDVSKDVSLTELYLEEQFNTTKTNLKDSLTKLLTADAAIAENNNKVIDNYVIEKIKNNKEALLLGLTYLERWYDFKYRDTKAKDLVMYHLDFFGKSNSSALDNVIELGKSGYNNLLAKNNVITYNVLLAKNYKTNNLFDALEKYRKAFVPDKTNNEWFKEQTKAYIVEEKSTIKEVSDKQSIAGSPYSIGVYDRLTSPSWKYPSMVLPLLTLPEKSVFIIANISTIGFGAYDRYRSKEHPAGTDLNDYVEKKAKEAAVRFRDHYDYWYRILDDKNKEKLYRSVLVYDAFRFGTDEKEDKDTYQATFETNHPAIKHFFGPAGNNVVHNSNGAYATGDAFYYMAYRMLDKDGAVTYTHEMTHNSDREIYLGGYGRRNGLGPEFYAKGLLQAPDHPNDPTVTINSILKYDQSEESTRLQVADPTQRFGSVDDLNKYMHNMFDVIYMLEILEGKAVAKLDTNQKYDLLRKIENEYKPDPDGNSVYATNVVRRLKPEELTKLTTFNSLIEHDIITRRGYVDEATYKRNGYYTINLFSPIYSALSSKIGTPGDLMGRRIAFELLAAKGYKDGMVPYISNQYEKEAKAQGKVITSYGKQIGLVTDEIVLSKVFNNQYNSWIDFKKDMYKEREDKFGKLNKVSFIDPNGSWARQQKVTIDNINRLEKMIEDAVKFDAEDEVAKLYPETNSRVLKLKKAIFKAYLDQTGDFRSSIFENKK

SEQ ID NO: 73652 - protein, 144 aa, Streptococcus pneumoniae
SSEQEITIYSPINQEELGTVPAMTQTEADEAMQAARAALPAWRALSAVERAAYLHKTAAILERDKEEIGTILAKEVAKGITAAIGEVVRTADLIRYAAEEGLRITGQAMEGGGFEAASKNKLAVVRREPVGIVLAIAPPFNLSV

SEQ ID NO: 73653 - protein, 426 aa, Streptococcus pneumoniae
MPNCIIEIIAQICYDINMNKSRLGRGRHGKTRHVLLALIGILAISICLLGGFIAFKIYQQKSFEQKIESLKKEKDDQLSEGNQKEHFRQGQAEVIAYYPLQGEKVISSVRELINQDVKDKLESKDNLVFYYTEQEESGLKGVVNRNVTKQIYDLVAFKVEETEKTSLGKVHLTEDGQPFTLDQLFSDASKAKEQLIKELTSFIEDKKIEQDQSEQIVKNFSDQDLSAWNFDYKDSQIILYPSPVVENLEEIALPVSAFFDVIQSSYLLEKDAALYQSYFDKKYQKVVALTFDDGPNPATTPQVLETLAKYDIKATFFVLGKNVSGNEDLVKRIKSEGHVVGNHSWSHPILSQLSLDEAKKQITDTEDVLTKVLGSSSKLMRPPYGAITDDIRNSLDLSFIMWDVDSLDWKSKNEASILTEIQHQVA

SEQ ID NO: 73654 - protein, 397 aa, Streptococcus pneumoniae
MTIKINNLFFVCLSFFGIVLSSSQVIVNLGLSSIIQYISYFMLMLCVFLTLIKNTLNVFANRIIYFLIISFLFIIGINLQNLPLSRKIYLSFSMLIISSLSTLPIKLINNLSDLRRISYYLLHSIFLSVFLGLVFKISLVTVAVEGIGFSYGFNGGLTHKNFYAITILVSYILLYVSRKYDAKHQIDSFVLWLDLFLLLISNTRTVYIILVVFWIIINRNFINNIKKEHRLVVTATTIVISLLALTFFFKHIINNSESYSHRVLGVVNFFKYYESDRFHLFFGDAELAFGNTTKGYGHNIRSVLGWDGTVEMPLLSVMIKNGYVGLVGYIIVLFKFISSIISVKNSTKKNIGLSIFIPLLLSATVENYIVNISFVFMPVCFCILCSIKNIKLVNNRK

SEQ ID NO: 73655 - protein, 378 aa, Streptococcus pneumoniae
MWMEELPNGKYKFFERYKDPYTEKLKKVSVTMEKKTPQARNQAAILLQEKIKQKLGEKQHSVSNITFEKLYEEFEENWKHGVKNSTVYASKNVKKEILKQIEGDYLVRNLDRRLLQKVIDQLLQDGRSHNYVSKIKFKLNQIMKFAIRMNYIDTNEMLFVETPRKVITSDELRKKNTKYLDQKEFKLFIQNLKDEALCDYRITKYIRIAKVLFLTGMRYGELAALNYKEDIDFSKKTIHIKHTYDFRQKERTTPKTIKSDRVITAPQKVLDIIKEQIIENATNGFDTDFIFINTLGEPITNARVICALKRHGQKIGIEKNITTHTFRHSHISLLAELGIPLTAIMDRVGHSDSKTTLEIYSHVTQKMVSDISSKLDKI

SEQ ID NO: 73656 - protein, 243 aa, Streptococcus pneumoniae
MIGFLAHPFKDFKENVLYFIPVAIGMLLGIGLFSYPIEYLLENYQVFVLWSFAGAIIGTVPSLLKESTRESDRDKIDLAWLWTTFIISGLGLYALNFVVGTLSASFLNFVLAGALLALGVLVPGLSPSNLLLILGLYAPMLTGFKTFDFLGTFFPIGIGAGATLIVFSKLMDYALNNYHSRVYHFIIGIVLSSTLLILIPNAGNAESIQYTGLSLVGYVIIAFFFALGIWLGIWMSQLEDKYK

SEQ ID NO: 73657 - protein, 242 aa, Streptococcus pneumoniae
MSNVDKIRKIHIIVCWMYIFLSFRAIINDTEYFLLIFLAFIYSIVSLPLYSVKNKIVSICLVINSILLMSFPILINKFFPESFLTYIVLISVFITELIIFHLIGKDFDTKLTNEYKKISQFRSKVSQSPWIKYLEISSFILTIFPSILYGTVDNHVLTLIFLIKICVDTTIKFLFIRLFDTSTLMKRRIFFLFALDVIAYLFLGYLLVIQKAGYLFSVLLLFSNFSVPFIKEKEYELFKNSK

SEQ ID NO: 73658 - protein, 536 aa, Streptococcus pneumoniae
  MISC_FEATURE (534)..(534): X=any amino acid
KLVDINILYSSQEANLANLRKKQAKNPGKKVNVSARVLSSYIFSSLLMLICFSNIAIHFPFEEMPIYFSSMVAILLVLAFSTSFTAFYNVFYESKDLASYRPYAFKESEIIMAKGLSVLLPALTGIVPILAYFLALYISLAPSLWLGLPLMLLSLTLLFVSVTLVTVVAVHFLAQTRVFRKYQSIFSNVMIGIGVLIPLIFIFFLQSTFGSIVDKVRDIPFLLYPLHIFYKIAVEPFSTEALVGLLAWIGLTLFLLYLTKKKVLPRFYDVILLNSEEKVKKERRSKERISTTKKGFFRMVLRYHLTLLGQGTGVITVLFTSAFLPYLMMISLISKIRDSQIVPDIHPPYWLPLFFVGVFIAVVNNNITSLHSIALSLERENVDFLKSLPFDFARYVKVKFWIIFAVQSFLPVLTLLGLSLYLGLSILSMIYLLVVWIIASVILSCHHYFKDVKNLSTNWSSITDLVNRSNGIVAIVLLFIYSAILMALVIGSIFLVQSLSPILAINLGVGALISCLLLLFLAIIITCHAYWQKXKK

SEQ ID NO: 73659 - protein, 660 aa, Streptococcus pneumoniae
MKLKLCIIGFFFCLIATIGLVTISDTEIPIPLPIDGAFSIQGKSNLSNNEIYEMVRDLSKTEKVTIYKPIVQSSGQLKYVNFDDVNNEQLKSAPIVGMYYTLGKMDVDSLKPLTMTGLQTVYMAYPWYIGGILQFTGTLRILLMGSIYLTLLVVLFVVRTRQIKEGVIRRSLGLPIYDLRREYGISLIFELIMMALLMISYSSFLGNGFFTYSSKLFFSLLLTNFILFQIIDLITFVLFWLTIQIEKPIEIIKNKAKNKLIFVVWLAIISIIILVSGVFLQETKSSQSSINIQIQNLVPWDTVKDWRRIEFLGIESNSTKNREVNDSDGQYLQIVAALKNLDFLYIERSSAYVPDFMKTSHVIENFSKQLENDGITNPEINKELIYINQTGANLQNKVNGTNYHLLDNKIATIYIPEKWKENQKSIENTVVAEQFIGTNYTREQLAVQIIPDGEKIFYFNEDADNNLKMKDILPLANVADSKDNIVVVLDTDKMMENNKFSLASNILYKSLFSPEAVKKINEMTVLLNFSMNPVDVYQIVKLKIQSLEHQILLSQILQKIIYSIVFILIYQYVQLFITLKQNEYVKKIILGLSKTYIAISSLKYFMMTITMVILFTFLMTGQIELLYIGAASLLVLMLSIIMSFRKLSESYTKILKGDES

SEQ ID NO: 73660 - protein, 185 aa, Streptococcus pneumoniae
MTSEYQKMIAGEFYRPSDPELRALAQASRQKQAAFNKEENPLKGAEIIKTWFASTGKNLYINTRLMVDYGVNIHLGENFYSNWNLTMLDICPIRIGDNAMIGPNCQFLTPLHPLDPQERNSGIEYGKPITIGDNFWTGGGVIVLPGVTLGNNVVAGAGAVITKSFGDNVVLAGNPARVIKEIPVK

SEQ ID NO: 73661 - protein, 243 aa, Streptococcus pneumoniae
MIDIHSHIVFDVDDGPKSREESKALLAESYRQGVRTIVSTSHRRKGMFETPEEKIAENFLQVREIAKEVASDLVIAYGAEIYYTPDVLDKLEKKRIPTLNDSRYALIEFSMNTPYRDIHSALSKILMLGITPVIAHIERYDALENNEKRVRELIDMGCYTQVNSSHVLKPKLFGERYKFMKKRAQYFLEQDLVHVIASDMHNLDGRPPHMAEAYDLVTQKYGEAKAQELFIDNPRKIVMDQLI

SEQ ID NO: 73662 - protein, 230 aa, Streptococcus pneumoniae
MKEQNTIEIDVFQLVKSLWKRKLMILIVALVTGAGAFAYSTFIVKPEYTSTTRIYVVNRNQGDKPGLTNQDLQAGTYLVKDYREIILSQDVLEEVVSDLKLDLTPKGLANKIKVTVPVDTRIVSISVNDRVPEEASRIANSLREVAAQKIISITRVSDVTTLEEARPAISPSSPNIKRNTLIGFLAGVIGTSVIVLHLELLDTRVKRPEDIENTLQMTLLGVVPNLGKLK

SEQ ID NO: 73663 - protein, 211 aa, Streptococcus pneumoniae
MKNGNRIYSWRLFMYGIIKRLGDILLSLIGIIILCPVFMIIAIAIKLDSEGPVIFKQKRFGIHKEYFYILKFRSMKIDAPKNVAPRNLYNPEQWITKVGAFLRKTSLDELPQLFNILVGNMSIVGPRPAGINELDLIAERDKYGANDILPGLTGWAQINGRDTLSVEMKTELDGYYVKHLSLIMDIRCIVKTIPYVLKRKGIVEGSGKKES

SEQ ID NO: 73664 - protein, 409 aa, Streptococcus pneumoniae
MKILFVCQHYKPEPFRLSDICEDLVRKGHEVSVLAGIPNYPEGKIYADYRHNKKRREIIEGVTIYRSYTIPRKKSVVFRLLNYFSFAISSTLGVLLGRYKTKDGSNFDCVFVNQLSPVMMAWAGMAYKKKYKKPMFLYCMDVWPDSLTVGGVKQDGLIFKLFKFISKKVYRASDYIFVTSPSFKNYFVKQFDISEQKITYLPQYAEDLFIPDESIVNKESVDLTFAGNIGKAQNLETILKAASLIEKNTNLPKKIHFHFVGDGTELLSMKALAHELELKNISFYGRRSLEEMPSFYKKSDAMLVSLIGDSIVSRTIPGKVQSYMAAGKPIIGAISGDAKIIVEEANCGYVSPERDVKQLAKNICKFSMLSIKRQRELGKKARCYYENHFSKEQFMLELETCLERESKKE

SEQ ID NO: 73665 - protein, 365 aa, Streptococcus pneumoniae
MKKVVVVFGTRPEAIKMCPLVKELRTRKNIETLVCVTGQHRQMLDQVLDTFGIIPDFDLSIMKDKQTLFDVTIGILEGMKAILESEKPDLVLVHGDTSTTFASSLAAFYLQIPIGHVEAGLRTYDIYSPYPEEFNRQAVGVLAQYHFTPTQLSKDNLLREGKTPESIFVTGNTAIDALQTTIQEDYTHPELEWIGESRFILITAHRRENLGEPMRHMFRAIRRIIEEYSDVKAIYPIHMNPRVRQIAEEELSGCERIKMIEPLEVLDFHNFLSRSYLILTDSGGIQEEAPSLGKPVLVMRDTTERPEGIEAGTLKLVGADENNIYRHFKELLENDSVYQAMSQASNPYGDGTACKKIADILEGEV

SEQ ID NO: 73666 - protein, 351 aa, Streptococcus pneumoniae
MSQFTGKTLLITGGTGSFGNAVLKRFLETDVSEIRIFSRDEKKQDDMRHEFQVKVPEVAGKIRFYLGDVRDLASVKNAMHGVDYVFHAAALKQVPSCEFFPVEAVKTNILGTENVLTAAIEAGVKQVICLSTDKAAYPVNAMGTSKAMMEKIAVAKSRTVNPEHTKICVTRYGNVLCSRGSVVPLWIEQIKQGNALTITEPSMTRFVMTLEEAVDLVLFAFEEGKSGDILVQKAPACTIEVLAKAVSEIFASEQDIKIIGIRHGEKRYETLLTNEECANAIDLGDFYRVPSDNRNLNYDKYFKDGSTNRNLLTEFNSNNTDLMDVEQVKRKLLELDEIQTAIRDMVADEEM

SEQ ID NO: 73667 - protein, 394 aa, Streptococcus pneumoniae
MKIKTDYSDIHFKDNGKLKLLIIVGTRPEIIRLSSVITKCRKYFDVILAHTGQNYDYNLNGIFFDNLGLDTPDVYMDAVGDDLGATVGNIINTSYKLMNQIKPDALLILGDTNSCLSAIAAKRLHIPIFHMEAGNRCKDECLPEETNRRIVDVISDVNLAYSEHARKYLHECGLPKERTYVTGSPMAEVLHKNLSAIESSDIHERLGLKKGGYILLSAHREENIDTDKNFISLFTAINQLAEKYNMPILYSCHPRSKKRLQESGFKLDKRVIQHEPLGFHDYNCLQMNAFVVVSDSGTLPEESSFFTSQGYPFPAVCIRTSTERPESLDKAGFILAGIDENSLLQAVETAVSLAQDEDFGLPVPDYVEENVSTKVVKIIQSYTGIVDKIVWRKS

SEQ ID NO: 73668 - protein, 410 aa, Streptococcus pneumoniae
MKLFWTNNIYRQLLLNSCFSSFGDSIFYLAIINYVAQYNFAPLAILLISISEMVPLLSQLFLGILGDFQENRVKHALWIAKIKILLYAILTVFLVLSPFSLVSVIMIVIINLISDTLSYLSAYMMNALYISVIKDDLHDAMGFRQSLMRVVRIVANLAGAFLINVISIQTISLINTLTFVIAFLGLYVIRHTLYEVEKRIEMSHTALSFKKYFQHLKQSLAVLLRLKDTVILLFLTTSMIAILDVSPRLIALRFIQQTLAQLSIGQLLALLSIIMSCGAILGNMTSSNLFKNIRFTHLLVFCEISLLTLITSILCQAYIVIFMTSFISSTIIGILSPRLQAAVFAHIPSDKMGTVGSALSTVDILAPSLLSLLALSIASGVSVQLALIFLYLILIALIFCQWLVKFNTHN

SEQ ID NO: 73669 - protein, 283 aa, Streptococcus pneumoniae
MSRTKLRALLGYLLMLVACLIPIYCFGQMVLQSLGQVKGHATFVKSMTTEMYQEQQNHSLAYNQRLASQNRIVDPFLAEGYEVNYQVSDDPDAVYGYLSIPSLEIMEPVYLGADYHHLGMGLAHVDGTPLPLDGTGIRSVIAGHRAEPSHVFFRHLDQLKVGDALYYDNGQEIVEYQMMDTEIILPSEWEKLESVSSKNIMTLITCDPIPTFNKRLLVNFERVAVYQKSDPQTAAVARVAFTKEGQSVSRVATSQWLYRGLVVLAFLGILFVLWKLARLLRGK

SEQ ID NO: 73670 - protein, 2140 aa, Streptococcus pneumoniae
MKKSTVLSLTTAAVILAAYAPNEVVLADTSSSEDALNISDKEKVAENKEKHENIHSAMETSQDFKEKKTAVIKEKEVVSKNPVIDNNTSNEEAKIKEENSNKSQGDYTDSFVNKNTENPKKEDKVVYIAEFKDKESGEKAIKELSSLKNTKVLYTYDRIFNGSAIETTPDNLDKIKQIEGISSVERAQKVQPMMNHARKEIGVEEAIDYLKSINAPFGKNFDGRGMVISNIDTGTDYRHKAMRIDDDAKASMRFKKEDLKGTDKNYWLSDKIPHAFNYYNGGKITVEKYDDGRDYFDPHGMHIAGILAGNDTEQDIKNFNGIDGIAPNAQIFSYKMYSDAGSGFAGDETMFHAIEDSIKHNVDVVSVSSGFTGTGLVGEKYWQAIRALRKAGIPMVVATGNYATSASSSSWDLVANNHLKMTDTGNVTRTAAHEDAIAVASAKNQTVEFDKVNIGGESFKYRNIGAFFDKSKITTNEDGTKAPSKLKFVYIGKGQDQDLIGLDLRGKIAVMDRIYTKDLKNAFKKAMDKGARAIMVVNTVNYYNRDNWTELPAMGYEADEGTKSQVFSISGDDGVKLWNMINPDKKTEVKRNNKEDFKDKLEQYYPIDMESFNSNKPNVGDEKEIDFKFAPDTDKELYKEDIIVPAGSTSWGPRIDLLLKPDVSAPGKNIKSTLNVINGKSTYGYMSGTSMATPIVAASTVLIRPKLKEMLERPVLKNLKGDDKIDLTSLTKIALQNTARPMMDATSWKEKSQYFASPRQQGAGLINVANALRNEVVATFKNTDSKGLVNSYGSISLKEIKGDKKYFTIKLHNTSNRPLTFKVSASAITTDSLTDRLKLDETYKDEKSPDGKQIVPEIHPEKVKGANITFEHDTFTIGANSSFDLNAVINVGEAKNKNKFVESFIHFESVEEMEALNSNGKKINFQPSLSMPLMGFAGNWNHEPILDKWAWEEGSRSKTLGGYDDDGKPKIPGTLNKGIGGEHGIDKFNPAGVIQNRKDKNTTSLDQNPELFAFNNEGINAPSSSGSKIANIYPLDSNGNPQDAQLERGLTPSPLVLRSAEEGLISIVNTNKEGENQRDLKVISREHFIRGILNSKSNDAKGIKSSKLKVWGDLKWDGLIYNPRGREENAPESKDNQDPATKIRGQFEPIAEGQYFYKFKYRLTKDYPWQVSYIPVKIDNTAPKIVSVDFSNPEKIKLITKDTYHKVKDQYKNETLFARDQKEHPEKFDEIANEVWYAGAALVNEDGEVEKNLEVTYAGEGQGRNRKLDKDGNTIYEIKGAGDLRGKIIEVIALDGSSNFTKIHRIKFANQADEKGMISYYLVDPDQDSSKYQKLGEIAESKFKNLGNGKEGSLKKDTTGVEHHHQENEESIKEKSSFTIDRNISTIRDFENKDLKKLIKKKFREVDDFTSETGKRMEEYDYKYDDKGNIIAYDDGTDLEYETEKLDEIKSKIYGVLSPSKDGHFEILGKISNVSKNAKVYYGNNYKSIEIKATKYDFHSKTMTFDLYANINDIVDGLAFAGDMRLFVKDNDQKKAEIKIRMPEKIKETKSEYPYVSSYGNVIELGEGDLSKNKPDNLTKMESGKIYSDSEKQQYLLKDNIILRKGYALKVTTYNPGKTDMLEGNGVYSKEDIAKIQKANPNLRALSETTIYADSRNVEDGRSTQSVLMSALDGFNIIRYQVFTFKMNDKGEAIDKDGNLVTDSSKLVLFGKDDKEYTGEDKFNVEAIKEDGSMLFIDTKPVNLSMDKNYFNPSKSNKIYVRNPEFYLRGKISDKGGFNWELRVNESVVDNYLIYGDLHIDNTRDFNIKLNVKDGDIMDWGMKDYKANGFPDKVTDMDGNVYLQTGYSDLNAKAVGVHYQFLYDNVKPEVNIDPKGNTSIEYADGKSVVFNINDKRNNGFDGEIQEQHIYINGKEYTSFNDIKQIIDKTLNIKIVVKDFARNTTVKEFILNKDTGEVSELKPHRVTVTIQNGKEMSSTIVSEEDFILPVYKGELEKGYQFDGWEISGFEGKKDAGYVINLSKDTFIKPVFKKIEEKKEEENKPTFDVSKKKDNPQVNHSQLNESHRKEDLQREEHSQKSDSTKDVTATVLDKNNISSKSTTNNPNKLPKTGTASGAQTLLAAGIMFIVGIFLGLKKKNQD

SEQ ID NO: 73671 - protein, 151 aa, Streptococcus pneumoniae
MNRREAVEFVNMCMIKNGDKVLVQDRVNPDWSGITFPGGHVERGESFVDAVIREVKEETGLIISKPQLCGIKNWYDDKDYRYVVLFYKTEHFTGELQSSDEGKVWWEDFENLSHLKLATDDMSDMLRVFLEEDLSEFFYYKNGDDWLYDLK

SEQ ID NO: 73672 - protein, 752 aa, Streptococcus pneumoniae
MLCQNCKINDSTIHLYTNLNGKQKQIDLCQNCYKIIKTDPNNSLFKGMTDLNNRDFDPFGDFFNDLNNFRPSSNTPPIPPTQSGGGYGGNGGYGSQNRGSAQTPPPSQEKGLLEEFGINVTEIARRGDIDPVIGRDDEIIRVIEILNRRTKNNPVLIGEPGVGKTAVVEGLAQKIVDGDVPHKLQGKQVIRLDVVSLVQGTGIRGQFEERMQKLMEEIRKREDIILFIDEIHEIVGAGSASDGNMDAGNILKPALARGELQLVGATTLNEYRIIEKDAALERRMQPVKVDEPTVDETITILKGIQKKYEDYHHVQYTDAAIEAAATLSNRYIQDRFLPDKAIDLLDEAGSKMNLTLNFVDPKVIDQRLIEAENLKSQATREEDFEKAAYFRDQIAKYKEMQKKKITDQDTPSISEKTIEHIIEQKTNIPVGDLKEKEQSQLIHLAEDLKSHVIGQDDAVDKIAKAIRRNRVGLGTPNRPIGSFLFVGPTGVGKTELSKQLAIELFGSADSMIRFDMSEYMEKHSVAKLVGAPPGYVGYDEAGQLTEKVRHNPYSLILLDEVEKAHPDVMHMFLQVLDDGRLTDGQGRTVSFKDAIIIMTSNAGTGKTEASVGFGAAREGRTNSVLGELGNFFSPEFMNRFDGIIEFKALSKDNLLQIVELMLADVNKRLSSNNIRLDVTDKVKEKLVDLGYDPKMGARPLRRTIQDYIEDTITDYYLENPSEKDLKAVMTSKGNIQIKSAKKAEVKSSEKEK

SEQ ID NO: 73673 - protein, 448 aa, Streptococcus pneumoniae
MNYEKYLNYLDYETEIEDAYHNLLLEYKISDNFSDEHWLYNLPSNITQSKGFKIHLSASILNANLVAKKFFDFIFSREKKINFKILVSIKELSLQNTGLNGYSQVGKFITIYPKDNKEFQRLLHKLEILYKGVKGVNIPSDFRFQLSEVVYYRYGEFVKDSTFKDKRDKKIPSNVNVPIRDYYIPRYNTIPDQYIILEVISKNAKGGVYKVFNTQKRVYSLLKEASDLSLVDFTNRDSVNRLINEREILVELEKEEFTPKVFNDFYIKNSYFVEFEFIIADKLSEYNMVSGSYDWFLTLIDYMEIINSKYNLSYRDLSFNNILIDNRNNIYIIDFEHALRKETQIEEKKLPLFGTPGFYETNLNLLNNQPEDIMGLVLLLYWSQNLDDFNVFSKMSFLEAMEYAMNFNSRRLDTLDKSDWLYDIYKKAFNYKYDTFSELKKDFIEVLK

SEQ ID NO: 73674 - protein, 103 aa, Streptococcus pneumoniae
MIEAQGFLVDKQTRCIHYHSKLDIIALQCYDCKKYYACYRCHDSLEHHPFEPYPLSLIQDKPILCGVCLKLLTYKQYKESLSCPFCFSRFNPGCQNHKERYFK

SEQ ID NO: 73675 - protein, 790 aa, Streptococcus pneumoniae
MFRRLGQDFQLRKVKKILKQINALKGKMSSLSDQELVAKTVEFRQRLSEGESLDDILVEAFAVVREADKRILGMFPYDVQVMGAIVMHYGNVAEMNTGEGKTLTATMPVYLNAFSGEGVMVVTPNEYLSKRDAEEMGQVYRFLGLTIGVPFTEDPKKEMKAEEKKLIYASDIIYTTNSNLGFDYLNDNLASNEEGKFLRPFNYVIIDEIDDILLDSAQTPLIIAGSPRVQSNYYAIIDTLVTTLVEGEDYIFKEEKEEVWLTTKGAKSAENFLGIDNLYKEEHASFARHLVYAIRAHKLFTKDKDYIIRGNEMVLVDKGTGRLMEMTKLQGGLHQAIEAKEHVKLSPETRAMASITYQSLFKMFNKISGMTGTGKVAEKEFIETYNMSVVRIPTNRPRQRIDYPDNLYITLPEKVYASLEYIKQYHAKGNPLLVFVGSVEMSQLYSSLLFREGIAHNVLNANNAAREAQIISESGQMGAVTVATSMAGRGTDIKLGKGVAELGGLIVIGTERMESQRIDLQIRGRSGRQGDPGMSKFFVSLEDDVIKKFGPSWVHKKYKDYQVQDMTQPEVLKGRKYRKLVEKAQHASDSAGRSARRQTLEYAESMNIQRDIVYKERNRLIDGSRDLEDVVVDIIERYTEEVAADHYASRELLFHFIVTNISFHVKEVPDYIDVTDKTAVRSFMKQVIDKELSEKKELLNQHDLYEQFLRLSLLKAIDDNWVEQVDYLQQLSMAIGGQSASQKNPIVEYYQEAYAGFEAMKEQIHADMVRNLLMGLVEVTPKGEIVTHFP

SEQ ID NO: 73676 - protein, 511 aa, Streptococcus pneumoniae
MSKELNILQIGLANWENHYDIPENMSWYYFYPNSSKALREIIEKEDINRFHAVLIEDGQYSRDLFSYVKYFEPYTLFYNQNLQINDREVVDFLKKRCAQAIDFLSPQQLINDLSKSLFGGGYGDKLFPPTIQVNPNFTGAISYQGLDYVSLEGEFGQDFAQLAYWAYNIMVQKTLPIELWLEYEKEGNCDFRLVIRKMWSGSVDDFFEEVIVSEKDLEQALFMDSRDGDYFLSISVEARGRGTIKLGNLHQRWSRKQFGKFVLGGNILHDSKRDEINYFFHPGDFKPPLTVYFAGYRPAEGFEGYFMMKTLGCPFILFSDPRLEGGAFYLGTDELEGKVKDTITHYLDYLGFDHKDLILSGLSMGTFPALYYGASFEPHAIIVGKPLANLGTIASRGRLDAPGVSNLAFDCLIHHTGGTSSQDMTELDQRFWKIFKQANFSKTTFGLSYMKDEEMDPQAYEQLVSYLCNTGAKILSKGTAGRHNDDTDTNISWFLHFYRMVLETGFGREKR

SEQ ID NO: 73677 - protein, 526 aa, Streptococcus pneumoniae
MYYFIPAWYGSERTWHADITPWYFSHFRLEFDDTFHQIRLFQEQDIDSRLLVLAYQPHLRYFLYRHGVLEMDTYSVFDVMQDFHNLHTQVLSIRDIEWDDDCEFIYSPFTIIVQKNGKKFAKVEHGVEGFISDIQYFEPNGQIHMHHIVDDRGFVSSIIFFEDGQAAYQEYLNLKGEWQFRERLKEGGQVEVNPILGYRFKMLTYQNMGDLVAEFFENYLQTYVKDQDIFMLPSHSHHDQLVLDRLPSTNPKLLSLFIGRNPQDTFRDLDVTFEKSDLILVDREDSLRLLQELYPERMHQCYHLSSFDTRLRLGRSQTKKESIIYFQLDFEQGIDNQALLQVLSFVAENKDTEVIFGAFAASQEQMNEVEGIVESFIQENIQSENLGKAIDYGDAENPLEENQHQDLRLQFVNLNDELDLIKTLEFVRLIVDLNRHPHLYTQIAGISAGIPQINLVETVYVEHLKNGYLLADVTEFSKAAHYYTDRLKEWNESLIYSIDKIKEHTGQQFLGKLEKWIEEVKNVKGT

SEQ ID NO: 73678 - protein, 4776 aa, Streptococcus pneumoniae
MTETVEDKVSHSITGLDILKGIVAAGAVISGTVATQTKVFTNESAVLEKTVEKTDALATNDTVVLGTISTSNSASSTSLSASESASTSASESASTSASTSASTSASESASTSASTSISASSTVVGSQTAAATEATAKKVEEDRKKPASDYVASVTNVNLQSYAKRRKRSVDSIEQLLASIKNAAVFSGNTIVNGAPAINASLNIAKSETKVYTGEGVDSVYRVPIYYKLKVTNDGSKLTFTYTVTYVNPKTNDLGNISSMRPGYSIYNSGTSTQTMLTLGSDLGKPSGVKNYITDKNGRQVLSYNTSTMTTQGSGYTWGNGAQMNGFFAKKGYGLTSSWTVPITGTDTSFTFTPYAARTDRIGINYFNGGGKVVESSTTSQSLSQSKSLSVSASQSASASASTSASASASTSASASASTSASASASTSASVSASTSASASASTSASASASTSASESASTSASASASTSASASASTSASASASTSASESASTSASASASTSASESASTSASASASTSASASASTSASGSASTSTSASASTSASASASTSASASASISASESASTSASESASTSTSASASTSASESASTSASASASTSASASASTSASASASTSASASTSASESASTSASASASTSASASASTSASASASTSASASASTSASVSASTSASASASTSASASASTSASESASTSASASASTSASASASTSASASASTSASASASTSASASASTSASESASTSASASASTSASASASTSASASASTSASASASTSASASASISASESASTSASASASTSASASASTSASASASTSASESASTSASASASTSASASASTSASASASTSASASASTSASASASTSASASASTSASESASTSASASASTSASESASTSASASASTSASASASTSASASASTSASASASTSASASASTSASASASTSASASTSASESASTSASASASTSASASASTSASASASTSASESASTSASASASTSASASASTSASASASTSASASASTSASASASISASESASTSASASASTSASVSASTSASASASTSASESASTSASASASTSASESASTSASASASTSASASASISASESASTSASASASTSASASASTSASASASTSASESASTSTSASASTSASESASTSASASASTSASASASTSASASASTSASASASTSASASTSASESASTSASASASTSASASASTSASASASTSASASASTSASASASTSASASASTSASASASTSASASASTSASESASTSASASASTSASASASTSASASASTSASASASTSASVSASTSASESASTSASASASTSASASASTSASESASTSASASASTSASESASTSASASASTSASASASTSASASASTSASASASTSASASASTSASASASTSASASASTSASASASTSASASASTSASASASTSASASASTSASASASTSASASASISASESASTSASASASTSASASASTSASVSASTSASASASTSASASASISASESASTSASASASTSASASASTSASASASTSASASASISASESASTSASASASTSASASASTSASASASTSASASASTSASASASTSASASASTSASASASTSASASASTSASASASTSASESASTSASASASTSASASASTSASASASTSASVSASTSASESASTSASASASTSASASASTSASASASTSASESASTSASASASTSASASASTSASESASTSASASASTSASASASTSASASASTSASASASASTSASASASTSASASASTSASASASISASESASTSASESASTSTSASASTSASESASTSASASASTSASASASTSASASASTSASASTSASESASTSASASASTSASASASTSASASASTSASASASTSASASASTSASVSASTSASASASTSASASASTSASESASTSASASASTSASASASTSASASASTSASASASTSASASASTSASESASTSASASASTSASASASTSASASASTSASASASTSASASASISASESASTSASASASTSASASASTSASASASTSASESASTSASASASTSASASASTSASASASTSASASASTSASASASTSASASASTSASESASTSASASASTSASESASTSASASASTSASASASTSASASASTSASASASTSASASASTSASASASTSASASTSASESASTSASASASTSASASASTSASASASTSASESASTSASASASTSASASASTSASASASTSASASASTSASASASISASESASTSASASASTSASVSASTSASASASTSASESASTSASASASTSASESASTSASASASTSASASASISASESASTSASASASTSASASASTSASASASTSASESASTSTSASASTSASESASTSASASASTSASASASTSASASASTSASASASTSASASTSASESASTSASASASTSASASASTSASASASTSASASASTSASASASTSASASASTSASASASTSASASASTSASASASTSASASASTSASASASTSASESASTSASASASTSASASASTSASASASTSASVSASTSASESASTSASASASTSASASASTSASASASTSASESASTSASASASTSASASASTSASESASTSASASASTSASASASTSASASASTSASASASASTSASASASTSASASASTSASASASISASESASTSASASASASTSASASASTSASASASTSASASASISASESASTSASESASTSTSASASTSASESASTSASASASTSASASASTSASASASTSASASTSASESASTSASASASTSASASASTSASASASTSASASASTSASASASTSASVSASTSASASASTSASASASTSASESASTSASASTSASESASTSASASASTSASASASTSASASASTSASESASTSASASASTSASASASTSASESASTSASASASTSASASASTSASASASTSASESASTSASASASTSASESASTSASASASTSASASASTSASGSASTSTSASASTSASASASTSASASASISASESASTSASESASTSTSASASTSASESASTSASASASTSASASASTSASASASTSASASTSASESASTSASASASTSASASASTSASASASTSASASASTSASVSASTSASASASTSASASASTSASESASTSASASASTSASASASTSASASASTSASASASTSASASASTSASESASTSASASASTSASASASTSASASASTSASASASTSASASASISASESASTSASASASTSASASASTSASASASTSASESASTSASASASTSASASASTSASASASTSASASASTSASASASTSASASASTSASESASTSASASASTSASESASTSASASASTSASASASTSASASASTSASASASTSASASASTSASASASTSASASTSASESASTSASASASTSASASASTSASASASTSASESASTSASASASTSASASASTSASASASTSASASASTSASASASISASESASTSASASASTSASVSASTSASASASTSASESASTSASASASTSASESASTSASASASTSASASASISASESASTSASASASTSASASASTSASASASTSASESASTSTSASASTSASESASTSASASASTSASASASTSASASASTSASASASTSASASTSASESASTSASASASTSASASASTSASASASTSASASASTSASASASTSASASASTSASASASTSASASASTSASESASTSASASASTSASASASTSASASASTSASASASTSASVSASTSASESASTSASASASTSASASASTSASESASTSASASASTSASESASTSASASASTSASASASTSASASASTSASASASTSASASASTSASASASTSASASASTSASASASTSASASASTSASASASTSASASASTSASASASTSASASASISASESASTSASASASTSASASASTSASVSASTSASASASTSASASASISASESASTSASASASTSASASASTSASASASTSASASASISASESASTSASASASTSASASASTSASASASTSASASASTSASASASTSASASASTSASASASTSASASASTSASASASTSASESASTSASASASTSASASASISASESASTSASASASTSASASASTSASASASTSASESASTSTSASASTSASESASTSASASASTSASASASTSASASASTSASASASTSASASTSASESASTSASASASTSASASASTSASASASTSASASASTSASASASTSASASASTSASASASTSASASASTSASESASTSASASASTSASASASTSASASASTSASASASTSASVSASTSASESASTSASASASTSASASASTSASESASTSASASASTSASESASTSASASASTSASASASTSASASASTSASASASTSASASASTSASASASTSASASASTSASASASTSASASASTSASASASTSASASASTSASASASTSASASASISASESASTSASASASTSASASASTSASVSASTSASASASTSASASASISASESASTSASASASTSASASASTSASASASTSASASASISASESASTSASASASTSASASASTSASASASTSASASASTSASASASTSASASASTSASASASTSASASASTSASASASTSASASASTSASASASTSASASASTSASASASTSASASASTSVSNSANHSNSQVGNTSGSTGKSQKELPNTGTESSIGSVLLGVLAAVTGIGLVAKRRKRDEEE

SEQ ID NO: 73679 - protein, 308 aa, Streptococcus pneumoniae
MSEKLVEIKDLEISFGEGSKKFVAVKNANFFINKGETFSLVGESGSGKTTIGRAIIGLNDTSNGDIIFDGQKINGKKSREQAAELIRRIQMIFQDPAASLNERATVDYIISEGLYNHRLFKDEEERKEKVQNIIREVGLLAEHLTRYPHEFSGGQRQRIGIARALVMQPDFVIADEPISALDVSVRAQVLNLLKKFQKELGLTYLFIAHDLSVVRFISDRIAVIYKGVIVEVAETEELFNNPIHPYTQALLSAVPIPDPILERKKVLKVYDPSQHDYETDKPSMVEIRPGHYVWANQAELARYQKGLN

SEQ ID NO: 73680 - protein, 516 aa, Streptococcus pneumoniae
MSNKPIADMIETIEHFAQTQPSYPVYNVLGQEHTYGDLKADSDSLAAVIDQLGLPEKSPVVVFGGQEYEMLATFVALTKSGHAYIPIDSHSALERVSAILEVAEPSLIIAISAFPLEQVSTPMINLAQVQEAFAQGNNYEITHPVKGDDNYYIIFTSGTTGKPKGVQISHDNLLSFTNWMITDKEFATPSRPQMLAQPPYSFDLSVMYWAPTLALGGTLFTLPSVITQDFKQLFAAIFSLPIAIWTSTPSFADMAMLSEYFNSEKMPGITHFYFDGEELTVKTAQKLRERFPNARIINAYGPTEATVALSAVAVTDEMLATLKRLPIGYTKADSPTFIIDEEGNKLPNGEQGEIIVSGPAVSKGYMNNPEKTAEAFFEFEDLPAYHTGDVGTMTDEGLLLYGGRMDFQIKFNGYRIELEDVSQNLNKSRFIESAVAVPRYNKDHKVQNLLAYVILKDGVREQFERDIDITKAIKEDLTDIMMSYMMPSKFLYRDSLPLTPNGKIDIKGLINEVNKR

SEQ ID NO: 73681 - protein, 453 aa, Streptococcus pneumoniae
MKEKQFWNRILEFAQERLTRSMYDFYAIQAELIKVEENVATIFLPRSEMEMVWEKQLKDIIVVAGFEIYDAEITPHYIFTKPQDTTSSQVEEATNLTLYDYSPKLVSIPYSDTGLKEKYTFDNFIQGDGNVWAVSAALAVSEDLALTYNPLFIYGGPGLGKTHLLNAIGNEILKNIPNARVKYIPAESFINDFLDHLRLGEMEKFKKTYRSLDLLLIDDIQSLSGKKVATQEEFFNTFNALHDKQKQIVLTSDRSPKHLEGLEERLVTRFSWGLTQTITPPDFETRIAILQSKTEHLGYNFQSDTLEYLAGQFDSNVRDLEGAINDITLIARVKKIKDITIDIAAEAIRARKQDVSQMLVIPIDKIQTEVGNFYGVSIKEMKGSRRLQNIVLARQVAMYLSRELTDNSLPKIGKEFGGKDHTTVIHAHAKIKSLIDQDDNLRLEIESIKKKIK

SEQ ID NO: 73682 - protein, 378 aa, Streptococcus pneumoniae
MIHFSINKNLFLQALNITKRAISSKNAIPILSTVKIDVTNEGVTLIGSNGQISIENFISQKNEDAGLLITSLGSILLEASFFINVVSSLPDVTLDFKEIEQNQIVLTSGKSEITLKGKDSEQYPRIQEISASTPLILETKLLKKIINETAFAASTQESRPILTGVHFVLSQHKELKTVATDSHRLSQKKLTLEKNSDDFDVVIPSRSLREFSAVFTDDIETVEIFFANNQILFRSENISFYTRLLEGNYPDTDRLIPTDFNTTITFNVVNLRQSMERARLLSSATQNGTVKLEIKDGVVSAHVHSPEVGKVNEEIDTDQVTGEDLTISFNPTYLIDSLKALNSEKVTISFISAVRPFTLVPADTDEDFMQLITPVRTN

SEQ ID NO: 73683 - protein, 64 aa, Streptococcus pneumoniae
MYQVGNFVEMKKPHACTIKSTGKKANRWEITRVGADIKIKCSNCEHVVMMGRYDFERKMNKIID

SEQ ID NO: 73684 - protein, 371 aa, Streptococcus pneumoniae
MALTAGIVGLPNVGKSTLFNAITKAGAEAANYPFATIDPNVGMVEVPDERLQKLTEMITPKKTVPTTFEFTDIAGIVKGASKGEGLGNKFLANIREVDAIVHVVRAFDDENVMREQGREDAFVDPLADIDTINLELILADLESVNKRYARVEKMARTQKDKESVAEFNVLQKIKPVLEDGKSARTIEFTDEEQKVVKGLFLLTTKPVLYVANVDEDVVSEPDSIDYVKQIREFAATENAEVVVISARAEEEISELDDEDKKEFLEAIGLTESGVDKLTRAAYHLLGLGTYFTAGEKEVRAWTFKRGMKAPQAAGIIHSDFEKGFIRAVTMSYEDLVKYGSEKAVKEAGRLREEGKEYIVQDGDIMEFRFNV

SEQ ID NO: 73685 - protein, 1169 aa, Streptococcus pneumoniae
MVTLLDLFSENDQIKKWHQNLTDKKRQLILGLSTSTKALAIASSLEKEDRIVLLTSTYGEAEGLVSDLISILGEELVYPFLVDDAPMVEFLMSSQEKIISRVEALRFLTDSSKKGILVCNIAASRLILPSPNAFKDSIVKISVGEEYDQHAFIHQLKENGYRKVTQVQTQGEFSLRGDILDIFEISQLEPCRIEFFGDEIDGIRSFEVETQLSKENKTELTIFPASDMLLREKDYQRGQSALEKQISKTLSPILKSYLEEILSSFHQKQSHADSRKFLSLCYDKTWTVFDYIEKDTPIFFDDYQKLMNQYEVFERELAQYFTEELQNSKAFSDMQYFSDIEQIYKKQSPVTFFSNLQKGLGNLKFDKIYQFNQYPMQEFFNQFSFLKEEIERYKKMDYTIILQSSNSMGSKTLEDMLEEYQIKLDSRDKTSICKESVNLIEGNLRHGFHFVDEKILLITEHEIFQKKLKRRFRRQHVSNAERLKDYNELEKGDYVVHHIHGIGQYLGIETIEIKEIHRDYVSVQYQNGDQISIPVEQIHLLSKYISSDGKAPKLNKLNDGHFKKAKQKVKNQVEDIADDLIKLYSERSQLKGFAFSADDDDQDAFDDAFPYVETDDQLRSIEEIKRDMQASQPMDRLLVGDVGFGKTEVAMRAAFKAVNDHKQVVILVPTTVLAQQHYTNFKERFQNFAVNVDVLSRFRSKKEQTATLEKLKNGQVDILIGTHRVLSKDVVFADLGLMIIDEEQRFGVKHKETLKELKKQVDVLTLTATPIPRTLHMSMLGIRDLSVIETPPTNRYPVQTYVLEKNDSVIRDAVLREMERGGQGYYLYNKVDTIVQKVSELQELIPEASIGYVHGRMSEVQLENTLLDFIEGQYDILVTTTIIETGVDIPNANTLFIENADHMGLSTLYQLRGRVGRSNRIAYAYLMYRPEKSISEVSEKRLEAIKGFTELGSGFKIAMRDLSIRGAGNLLGKSQSGFIDSVGFELYSQLLEEAIAKRNGNANANTRTKGNAELILQIDAYLPDTYISDQRHKIEIYKKIRQIDNRVNYEELQEELIDRFGEYPDVVAYLLEIGLVKSYLDKVFVQRVERKDNKITIQFEKVTQRLFLAQDYFKALSVTNLKAGIAENKGLMELVFDVQNKKDYEILEGLLIFGESLLEIKESKEKNSI

SEQ ID NO: 73686 - protein, 88 aa, Streptococcus pneumoniae
MRLDKYLKVSRIIKRRTVAKEVADKGRIKVNGILAKSSTDLKVNDQVEIRFGNKLLLVKVLEMKDSTKKEDAAGMYEIISETRVEENV

SEQ ID NO: 73687 - protein, 425 aa, Streptococcus pneumoniae
MREPDFLNHFLKKGYFKKHAKAVLALSGGLDSMFLFKVLSTYQKELEIELILAHVNHKQRIESDWEEKELRKLAAEAELPIYISNFSGEFSEARARNFRYDFFQEVMKKTGATALVTAHHADDQVETIFMRLIRGTRLRYLSGIKEKQVVGEIEIIRPFLHFQKKDFPSIFHFEDTSNQENHYFRNRIRNSYLPELEKENPRFRDAILGIGNEILDYDLAIAELSNNINVEDLQQLFSYSESTQRVLLQTYLNRFPDLNLTKAQFAEVQQILKFKSQYRHPIKNGYELIKEYQQFQICKISPQADEKEDELVLHYQNQVAYQGYLFSFGLPLEGELIQQIPVSRETSIHIRHRKTGDVLIKNGHRKKLRRLFIDLKIPMEKRNSALIIEQFGEIVSILGIATNNLSKKTKNDIMNTVLYIEKIDR

SEQ ID NO: 73688 - protein, 652 aa, Streptococcus pneumoniae
MKKQNNGLIKNPFLWLLFIFFLVTGFQYFYSGNNSGGSQQINYTELVQEITDGNVKELTYQPNGSVIEVSGVYKNPKTSKEGTGIQFFTPSVTKVEKFTSTILPADTTVSELQKLATDHKAEVTVKHESSSGIWINLLVSIVPFGILFFFLFSMMGNMGGGNGRNPMSFGRSKAKAANKEDIKVRFSDVAGAEEEKQELVEVVEFLKDPKRFTKLGARIPAGVLLEGPPGTGKTLLAKAVAGEAGVPFFSISGSDFVEMFVGVGASRVRSLFEDAKKAAPAIIFIDEIDAVGRQRGVGLGGGNDEREQTLNQLLIEMDGFEGNEGIIVIAATNRSDVLDPALLRPGRFDRKVLVGRPDVKGREAILKVHAKNKPLAEDVDLKLVAQQTPGFVGADLENVLNEAALVAARRNKSIIDASDIDEAEDRVIAGPSKKDKTVSQKERELVAYHEAGHTIVGLVLSNARVVHKVTIVPRGRAGGYMIALPKEDQMLLSKEDMKEQLAGLMGGRVAEEIIFNVQTTGASNDFEQATQMARAMVTEYGMSEKLGPVQYEGNHAMLGAQSPQKSISEQTAYEIDEEVRSLLNEARNKAAEIIQSNRETHKLIAEALLKYETLDSTQIKALYETGKMPEAVEEESHALSYDEVKSKMNDEK

SEQ ID NO: 73689 - protein, 428 aa, Streptococcus pneumoniae
MTSVVVVGTQWGDEGKGKITDFLSANAEVIARYQGGDNAGHTIVIDGKKFKLHLIPSGIFFPEKISVIGNGMVVNPKSLVKELSYLHEEGVTTDNLRISDRAHVILPYHIELDRLQEEAKGDNKIGTTIKGIGPAYMDKAARVGIRIADLLDKDIFRERLERNLAEKNRLFEKLYDSKAIVFDDIFEEYYEYGQQIKKYVIDTSVILNDALDNGKRVLFEGAQGVMLDIDQGTYPFVTSSNPVAGGVTIGSGVGPSKIDKVVGVCKAYTSRVGDGPFPTELFDEVGERIREVGHEYGTTTGRPRRVGWFDSVVMRHSRRVSGITNLSLNSIDVLSGLDTVKICVAYDLDGQRIDYYPASLEQLKRCKPIYEELPGWSEDITGVRNLEDLPENARNYVRRVSELVGVRISTFSVGPGREQTNILESVWS

SEQ ID NO: 73690 - protein, 420 aa, Streptococcus pneumoniae
MEEVEVAEVKNARVSLTGEKTKPMKLAEVTSINVNRTKTEMEEFNRVLGGGVVPGSLVLIGGDPGIGKSTLLLQVSTQLSQVGTVLYVSGEESAQQIKLRAERLGDIDSEFYLYAETNMQSVRAEVERIQPDFLIIDSIQTIMSPEISGVQGSVSQVREVTAELMQLAKTNNIAIFIVGHVTKEGTLAGPRMLEHMVDTVLYFEGERHHTFRILRAVKNRFGSTNEIGIFEMQSGGLVEVLNPSQVFLEERLDGATGSSIVVTMEGTRPILAEVQALVTPTMFGNAKRTTTGLDFNRASLIMAVLEKRAGLLLQNQDAYLKSAGGVKLDEPAIDLAVAVAIASSYKDKPTNPQECFVGELGLTGEIRRVNRIEQRINEAAKLGFTKIYVPKNSLTGITLPKEIQVIGVTTIQEVLKKVFA

SEQ ID NO: 73691 - protein, 339 aa, Streptococcus pneumoniae
MENLVKSTSDTYIPEEIMSFSDLKLFALSSNKELAERVAQEIGIELGKSSVRQFSDGEIQVNIEESIRGKHVFILQSTSSPVNDNLLEILIMVDALKRASAESVNVVMPYYGYARQDRKARAREPITSKLVANMLEVAGVDRLLTIDLHAAQIQGFFDIPVDHLMGAPLIADYFERRGMVGSDYVVVSPDHGGVTRARKLAEFLKTSIAIIDKRRSVDKMNTSEVMNIIGKVEGKTCILIDDMIDTAGTICHAADALAEAGAVEVYASCTHPVLSGPATDNIQKSAIKKLVVLDTIYLPEERLIDKIEQISIAHLLGDAIVRIHEKRPLSPLFDIEKKI

SEQ ID NO: 73692 - protein, 877 aa, Streptococcus pneumoniae
MDKKKLLLIDGSSVAFRAFFALYQQLDRFKNAAGLHTNAIYGFQLMLSHLLERVEPSHILVAFDAGKTTFRTEMYADYKGGRAKTPDEFREQFPFIRELLDHMGIRHYELAQYEADDIIGTLDKLAEQDGFDITIVSGDKDLIQLTDEHTVVEISKKGVAEFEAFTPDYLMEEMGLTPAQFIDLKALMGDKSDNIPGVTKVGEKTGIKLLLEHGSLEGIYENIDGMKTSKMKENLINDKEQAFLSKTLATIDTKAPIAIGLEDLVYSGPDVENLGKFYDEMGFKQLKQALNMSSADVAEGLDFTIVDQISQDMLSEESIFHFELFGENYHTDNLVGFAWSCGDQLYATDKLELLQDPIFKDFLEKTSLRVYDFKKVKVLLQRFGVDLQAPAFDIRLAKYLLSTVEDNEIATIASLYGQTYLVDDETFYGKGVKKAIPEREKFLEHLACKLAVLVETEPILLEKLSENGQLELLYDMEQPLAFVLAKMEIAGIVVKKETLLEMQAENELVIEKLTQEIYELAGEEFNVNSPKQLGVLLFEKLGLPLEYTKKTKTGYSTAVDVLERLAPIAPIVKKILDYRQIAKIQSTYVIGLQDWILADGKIHTRYVQDLTQTGRLSSVDPNLQNIPARLEQGRLIRKAFVPEWEDSVLLSSDYSQIELRVLAHISKDEHLIKAFQEGADIHTSTAMRVFGIERPDNVTANDRRNAKAVNFGVVYGISDFGLSNNLGISRKEAKAYIDTYFERFPGIKNYMDEVVREARDKGYVETLFKRRRELPDINSRNFNIRGFAERTAINSPIQGSAADILKIAMIQLDKALVAGGYQTKMLLQVHDEIVLEVPKSELVEMKKLVKQTMEEAIQLSVPLIADENEGATWYEAK

SEQ ID NO: 73693 - protein, 389 aa, Streptococcus pneumoniae
MDLTKRFNKQLDKIQVSLIRQFDQVISEIPGVLRLTLGEPDFTTPDHVKEAAKRAIDQNQSYYTGMSGLLTLRQAASDFVKEKYQLDYAPENEILVTIGATEALSATLTAILEEGDKVLLPAPAYPGYEPIVNLVGAEIVEIDTTENGFVLTPEMLEKAILEQGDKLKAVILNYPANPTGITYSREQLEALAAVLRKYEIFVVCDEVYSELTYTGEAHVSLGTMLRDQAIIINGLSKSHAMTGWRLGLIFAPATFTAQLIKSHQYLVTAANTMAQHAAVEALTAGKNDAEPMKKEYIQRRDYIIEKMTALGFEIIKPDGAFYIFAKIPAGYNQDSFAFLKDFAQKKAVAFIPGAAFGRYGEGYVRLSYAASMETIKEAMKRLEEYMREA

SEQ ID NO: 73694 - protein, 77 aa, Streptococcus pneumoniae
MTEKEIFDRIVTIIQERQGEDFVVTESLSLKDDLDADSVDLMEFILTLEDEFSIEISDEEIDQLQNVGDVVKIIQGK

SEQ ID NO: 73695 - protein, 1242 aa, Streptococcus pneumoniae
MMDKRIFVEKKADFQVKSESLVRELQHNLGLSSLKSIRIVQVYDVFDLAEDLFAPAEKHIFSEQGTDHVLDEVSVQADLANYAFFAIESLPGQFDQRAASSQEALLLLGSSSDVTVNTAQLYLVNKDIDATELEAVKNYLLNPVDSRFKDITTGIAKQEFSESDKTIPKLTFFESYTAEDFARYKAEQGMAMEVDDLLFIQDYFKSIGRVPTETELKVLDTYWSDHCRHTTFETELKHIDFSASKFQKQLQSTYDKYIAMREELGRSEKPQTLMDMATIFGRYERANGRLDDMEVSDEINACSVEIEVDVDGVKEPWLLMFKNETHNHPTEIEPFGGAATCIGGAIRDPLSGRSYVYQAMRISGAGDITAPISETRAGKLPQQVISKTAAHGYSSYGNQIGLATTYVREYFHPGFVAKRMELGAVVGAAPKGNVVREKPEAGDVIILLGGKTGRDGVGGATGSSKVQTVESVETAGAEVQKGNAIEERKIQRLFRNGNVTRLIKKSNDFGAGGVCVAIGELADGLEIDLNKVPLKYQGLNGTEIAISESQERMAVVVRPEDVDTFVAECNKENIDAVVVATVTEKPNLVMHWNGETIVDLERRFLDINGVRVVVDAKVVDKDVKLPEERQTSAETLESDTLTVLSDLNHASQKGLQTIFDCSVGRSTVNHPLGGRYQLTPTEASVQKLPVQHGVTHTASVIAQGFNPYVAEWSPYHGAAYAVIEATARLVAAGANWSKARFSYQEYFERMDKQAERFGQPVAALLGSIEAQIQLGLPSIGGKDSMSGTFEELTVPPTLVAFGVTTADSRKVLSPEFKAVGENIYYIPGQALSAEIDFDLIKKNFAQFEASQADHKVTSASAVKYGGVVESLALATFGNYIGAEVTLPELKTALTAQLGGFVFTSPEEIAGVEKIGQTKADFTLTVNGVKLDGHKLDSAFQGTLEEVYPTEFTQAKELEEVPAVASDVVIKAKEKVEKPVVYIPVFPGTNSEYDSAKAFEKEGAEVNLVPFVTLNEEAIVKSVETMVDNIDKTNILFFAGGFSAADEPDGSAKFIVNILLNEKVRVAIDSFIARGGLIIGICNGFQALVKSGLLPYGNFEDANNTSPTLFYNDANQHVAKMVETRIANTNSPWLAGVQVGDIHAIPVSHGEGKFVVTAEEFAELRDNGQIFSQYVDFNGKPSMDSKYNPNGSVHAIEGITSKNGQIIGKMGHSERYEDGLFQNIPGNKDQHLFASAVKHFTGK

SEQ ID NO: 73696 - protein, 432 aa, Streptococcus pneumoniae
MINRYSRPEMANIWSEENKYRAWLEVEILSDEAWAELGEIPKEDVALIRKKADFDIDRILEIEQETRHDVVAFTRAVSETLGEERKWVHYGLTSTDVVDTAYGYLYKQANDIIRRDLENFTNIIADKAKEHKFTIMMGRTHGVHAEPTTFGLKLATWYSEMKRNIERFEHAAAGVEAGKISGAVGNFANIPPFVEEYVCNKLGIRAQEISTQVLPRDLHAEYFAVLASIATSIERMATEIRGLQKSEQREVEEFFAKGQKGSSAMPHKRNPIGSENMTGLARVIRGHMITAYENVALWHERDISHSSAERIITPDTTILIDYMLNRFGNIVKNLTVFPENMIRNMNSTFGLIFSQRAMLTLIEKGMTREQAYDLVQPKTAYSWDNQVDFKPLLEADSEVTSRLTQEEIDEIFNPVYYTKRVDDIFERLGLGD

SEQ ID NO: 73697 - protein, 284 aa, Streptococcus pneumoniae
MTYEYKSHIYLAETALNVKDLASQTAFYQQVIGLEILSQTETESILGLGGKVLVQLIQAQESGEVREHYGLYHLAILLPTRKALADVLKHLTDLQIPLVGGADHGYSEAIYLEDLEGNGIELYRDKPVSTWDIREDGRIIGVTEALAAQDIYELGERVEPFILAEGTRMGHIHLSVKDSRKSSQFYQKVLGLEDKFSVPSASWIAAGDYHHHLAVNEWRGKGLASRKQGLPGLAYYVIEVAHKKELLTIAQRAQEVDAPIKWMTSSKLEITDSDGIVTRIRLAR

SEQ ID NO: 73698 - protein, 203 aa, Streptococcus pneumoniae
MSRYTGPSWKQARRLGLSLTGTGKELARRNYVPGQHGPNNRSKLSEYGLQLAEKQKLRFTYGVGEKQFRNLFVQATKIKGGILGFNFMLLLERRLDNVVYRLGLATTRRQARQFVNHGHILVDGKRVDIPSYRVTPGQVISVREKSLKVPAILEAVEATLGRPAFVSFDAEKLEGSLTRLPERDEINPEINEALVVEFYNKML

SEQ ID NO: 73699 - protein, 328 aa, Streptococcus pneumoniae
MAKDIRVLLYYLYTPIENAEQFAADHLAFCKSIGLKGRILVADEGINGTVSGDYETTQKYMDYVHSLPGMEELWFKIDEENEQAFKKMFVRYKKEIVHLGLEDNDFDNDINPLETTGAYLSPKEFKEALLDKDTVVLDTRNDYEYDLGHFRGAIRPDIRNFRELPQWVRDNKEKFMDKRVVVYCTGGVRCEKFSGWMVREGYKDVGQLHGGIATYGKDPEVQGELWDGKMYVFDERIAVDVNHVNPTIVGKDWFDGTPCERYVNCGNPFCNRRILTSEENEDKYLRGCSHECRVHPRNRYVSKNELTQAEVIERLAAIGESLDQAATV

SEQ ID NO: 73700 - protein, 616 aa, Streptococcus pneumoniae
MNKKLTDYVIDLVEILNKQQKQVFWGIFDIFSMVVSIIVSYILFYGLINPAPVDYIIYTSLAFLFYQLMIGFWGLNASISRYSKITDFMKIFFGVTASSVLSYSICYAFLPLFSIRFIILFILLSTFLILLPRITWQLIYSRRKKGSGDGEHRRTFLIGAGDGGALFMDSYQHPTSELELVGILDKDSKKKGQKLGGIPVLGSYDNLPELAKRHQIERVIVAIPSLDPSEYERILQMCNKLGVKCYKMPKVETVVQGLHQAGTGFQKIDITDLLGRQEIRLDESRLGAELTGKTILVTGAGGSIGSEICRQVSRFNPERIVLLGHGENSIYLVYHELIRKFQGIDYVPVIADIQDYDRLLQVFEQYKPAIVYHAAAHKHVPMMERNPKEAFKNNIRGTYNVAKAVDEAKVSKMVMISTDKAVNPPNVMGATKRVAELIVTGFNQRSQSTYCAVRFGNVLGSRGSVIPVFERQIAEGGPVTVTDFRMTRYFMTIPEASRLVIHAGAYAKDGEVFILDMGKPVKIYDLAKKMVLLSGHTESEIPIVEVGIRPGEKLYEELLVSTELVDNQVMDKIFVGKVNVMPLESINQKIREFRTLSGDELKQAIIAFANQTTHIE

SEQ ID NO: 73701 - protein, 463 aa, Streptococcus pneumoniae
MAKNTKLWGGRFEGTVEDWVERFGASISFDQKLAKFDVIGSLAHVQMLGQTGILSLEESEKIQVGLKELLEELEAGQLDFDIANEDIHMNMEVLLTEKIGPLAGKLHTARSRNDQVATDMHLYLKEQLGYVLDKLAHLKGVLLDLAENHVATIMPGYTHLQHAQPISFAYHLMAYYNMFQRDSERFEFNQKHTDLCPLGAAALAGTTFPIDRQLSSDLLEFKQPYTNSLDAVSDRDFILEFLSNASILMMHMSRFCEEMINWCSFEYQFITLSDTFTIGSSIMPQKKNPDMAELIRGKTGRVYGHLFGLLTVMKSLPLAYNKDLQEDKEGMFDTVETILNSLDVLAGMLSSLQVNKEKMQESTEKDFSNATELADYLAGKGLPFREAHEVVGRLVLDSIKSAKNLQDWTLEELQTYHSLITEDIYVYLQPKTAVQRRNSLGGTGFDQVEYQIAVAKKANEAKK

SEQ ID NO: 73702 - protein, 619 aa, Streptococcus pneumoniae
MNKKKMILTSLASVAILGAGFVASQPTVVRAEESPVASQSKAEKDYDAAKKDAKNAKKAVEDAQKALDDAKAAQKKYDEDQKKTEEKAALEKAASEEMDKAVAAVQQAYLAYQQATDKAAKDAADKMIDEAKKREEEAKTKFNTVRAMVVPEPEQLAETKKKSEEAKQKAPELTKKLEEAKAKLEEAEKKATEAKQKVDAEEVAPQAKIAELENQVHRLEQELKEIDESESEDYAKEGFRAPLQSKLDAKKAKLSKLEELSDKIDELDAEIAKLEDQLKAAEENNNVEDYFKEGLEKTIAAKKAELEKTEADLKKAVNEPEKPAPAPETPAPEAPAEQPKPAPAPQPAPAPKPEKPAEQPKPEKTDDQQAEEDYARRSEEEYNRLTQQQPPKAEKPAPAPKTGWKQENGMWYFYNTDGSMATGWLQNNGSWYYLNSNGAMATGWLQYNGSWYYLNANGAMATGWAKVNGSWYYLNANGAMATGWLQYNGSWYYLNANGAMATGWAKVNGSWYYLNANGAMATGWLQYNGSWYYLNANGAMATGWAKVNGSWYYLNANGAMATGWVKDGDTWYYLEASGAMKASQWFKVSDKWYYVNGLGALAVNTTVDGYKVNANGEWV

SEQ ID NO: 73703 - protein, 391 aa, Streptococcus pneumoniae
MKHTRPSIVNKRIDGRLTMSDNSKTRVVVGMSGGVDSSVTALLLKEQGYDVIGIFMKNWDDTDENGVCTATEDYKDVVAVADQIGIPYYSVNFEKEYWDRVFEYFLAEYRAGRTPNPDVMCNKEIKFKAFLDYAMTLGADYVATGHYARVARDEDGTVHMLRGVDNGKDQTYFLSQLSQEQLQKTMFPLGHLKKPEVRKLAEEAGLSTAKKKDSTGICFIGEKNFKNFLSNYLPAQPGRMMTVDGRDMGEHAGLMYYTIGQRGGLGIGGQHGGDNAPWFVVGKDLSKNILYVGQGFYHDSLMSTSLEASQVHFTREMPEEFTLECTAKFRYRQPDSKVTVHVKGDKAEVIFAEPQRAITPGQAVVFYDGEECLGGGLIDNAYRDGQVCQYI

SEQ ID NO: 73704 - protein, 637 aa, Streptococcus pneumoniae
MIYHFTEEYDIIVIGAGHAGVEASLAASRMGCKVLLATINIEMLAFMPCNPSIGGSAKGIVVREVDALGGEMAKTIDKTYIQMKMLNTGKGPAVRALRAQADKELYSKEMRKTVENQENLTLRQTMIDEILVEDGKAVGVRTATHQEYAAKAVIVTTGTALRGEIIIGDLKYSSGPNHSLASINLADNLKELGLEIGRFKTGTPPRVKASSINYDVTEIQPGDEVPNHFSYTSRDEDYVKDQVPCWLTYTNGTSHEIIQNNLHRAPMFTGVVKGVGPRYCPSIEDKIVRFADKERHQLFLEPEGRNTEEVYVQGLSTSLPEDVQRDLVHSIKGLENAEMMRTGYAIEYDMVLPHQLRATLETKKISGLFTAGQTNGTSGYEEAAGQGIIAGINAALKIQGKPELILKRSDGYIGVMIDDLVTKGTIEPYRLLTSRAEYRLILRHDNADMRLTEMGREIGLVDDERWARFEIKKNQFDNEMKRLDSIKLKPVKETNAKVEEMGFKPLTDAVTAKEFLRRPEVSYQDVVAFIGPAAEELDDKIIELIETEIKYEGYISKAMDQVAKMKRMEEKRIPANIDWDDIDSIATEARQKFKLINPETIGQASRISGVNPADISILMVYLEGKNRSISKTLQKSK

SEQ ID NO: 73705 - protein, 610 aa, Streptococcus pneumoniae
MPAQNLRAVSLLANLSKKIAQSTISSISNSCLTNCSITKKKLAPSKLRSSNMAYTLKPEEVGVFAIGGLGEIGKNTYGIEYQDEIIIVDAGIKFPEDDLLGIDYVIPDYSYIVDNIDRVKAVLITHGHEDHIGGIPFLLKQANVPIYAGPLALALIRGKLEEHGLLRNAKLYEINHNTELTFKNLKATFFRTTHSIPEPLGIVIHTPQGKIVCTGDFKFDFTPVGEPADLHRMAALGEEGVLCLLSDSTNAEVPTFTNSEKVVGQSIMKIIQGIEGRIIFASFASNIFRLQQATEAAVKTGRKIAVFGRSMEKAIVNGIDLGYIKAPKGTFIEPNEIKDYPAGEVLILCTGSQGEPMAALSRIANGTHRQVQLQPGDTVIFSSSPIPGNTTSVNKLINIISEAGVEVIHGKVNNIHTSGHGGQQEQKLMLRLIKPKYFMPVHGEYRMQKVHAGLAVDTGVEKDNIFIMSNGDVLALTADSARIAGHFNAQDIYVDGNRIGEIGAAVLKDRRDLSEDGVVLAVATVDFKSQMILSGPDILSRGFVYMRESGDLIRQSQRILFNAIRIALKNKDASVQSVNGAIVNAIRPFLYENTEREPIIIPMILTPDEE

SEQ ID NO: 73706 - protein, 336 aa, Streptococcus pneumoniae
MKDRYILAFETSCDETSVAVLKNDDELLSNVIASQIESHKRFGGVVPEVASRHHVEVITACIEEALAEAGITEEDVTAVAVTYGPGLVGALLVGLSAAKAFAWAHGLPLIPVNHMAGHLMAAQSVEPLEFPLLALLVSGGHTELVYVSEAGDYKIVGETRDDAVGEAYDKVGRVMGLTYPAGREIDELAHQGQDIYDFPRAMIKEDNLEFSFSGLKSAFINLHHNAEQKGESLSTEDLCASFQAAVMDILMAKTKKALEKYPVKTLVVAGGVAANKGLRERLATEITDVNVIIPPLRLCGDNAGMIAYASVSEWNKENFANLDLNAKPSLAFDTME

SEQ ID NO: 73707 - protein, 317 aa, Streptococcus pneumoniae
MDRNIDQELVSIIIPTHNRYESLIRAVKSCLHQSYKNIEVIIIDDNYSNVNLRNKIIHQFGYTNHRIKLILSNEDLGATNARNIGIKNSRGKYISFLDDDDEYMPDRILKLMACFKKSRMKNLALVYSYGIIIYPNGTREEEKTDFVGNPLFVQMVHNIAGTSFWLCKKEVLELINGFEKIDSHQDGVVLLKLLAQGYQIDIVREFLVNYYAHSKENGITGVTQKTINADEEYYNYCRKYFNLLSFNERILVTKKYYSLNIKRLLLIGDKCKALKVIKKAREEKIFNEFLFLKYMLLYNFSFFYCIYDNYVQLKFRK

SEQ ID NO: 73708 - protein, 284 aa, Streptococcus pneumoniae
MKIKKWLGLAALATVAGLALAACGNSEKKADNATTIKIATVNRSGSEEKRWDKIQELVKKDGITLEFTEFTDYSQPNKATADGEVDLNAFQHYNFLNNWNKENGKDLVAIGDTYISPIRLYSGLNGSANKYTKVEDIPANGEIAVPNDATNESRALYLLQSAGLIKLDVSGTALATVANIKENPKNLKITELDASQTARSLSSVDAAVVNNTFVTEAKLDYKKALFKEQADENSKQWYNIIVAKKDWETSPKADAIKKVIAAYHTDDVKKVIEESSDGLDQPVW

SEQ ID NO: 73709 - protein, 230 aa, Streptococcus pneumoniae
MESLIQTYLPNVYKMGWAGQAGWGTAIYLTLYMTVLSFIIGGFLGLVAGLFLVLTAPGGVLENKVVFWILDKITSIFRAVPFIILLAILSPLSHLIVKTSIGPNAALVPLSFAVFAFFARQVQVVLAELDGGVIEAAQASGATFWDIVGVYLSEGLPDLIRVTTVTLISLVGETAMAGAVGAGGIGNVAIAYGFNRYNHDVTILATIVIILIIFAIQFLGDFLTKKLSHK

SEQ ID NO: 73710 - protein, 200 aa, Streptococcus pneumoniae
MATTESLGRRRGNRRAYLSIDKKELSRYNLGSCFLIIDKIMEVHMKTISLVYISLSGNTESFVTRLKDYLLSQYKRIEVQKIHIKDLVKEGKNFYEMDHPYVAFLPTYLEGGNGVDNGDVEILTTPVGDFIAYGNNASKCFGVVGSGNRNFNNQYCLTAKQYSQRFGFPVLADFEMRGMLEDIKHVAAIIADLYELEKEN

SEQ ID NO: 73711 - protein, 420 aa, Streptococcus pneumoniae
MSQAISLNQSTWASKLKAMGPGILMATAAVGGSHIVSSTQAGGSYGWSLLLLVILANVFKYPFFRFGAEYTADTGKTLVEGYAEKGKPYLWIFFILNVFSAMVNTAGVAILCSAIIASAFPMIGLSITQWSLILVAIIWAMLLFGGYKLLDGMVKWIMSALTIATVLAVIIAAVKHPEYSSDFVEKTPWQMAALPFIVSLLGWMPAPIEISAINSLWSAEKRKTVNFNTEDALFDFNTGYIGTAILAVFFVALGALIQYPTGQAVEAASAKYISQFVGMYASVLGEWSRYLITFIAFLCIFGTVITVIDGYSRVNQESLRLLISQKEDNRKSLNIWMTITAIIGIVIIKFFAGQVSTMLRFAMIGSFLTTPFFALLNYALVTRENKNLPSWLKHLAIAGLIFLFGFAIFFIYALAIGKAG

SEQ ID NO: 73712 - protein, 649 aa, Streptococcus pneumoniae
MSHIIELPEMLANQIAAGEVIERPASVVKELVENAIDAGSSQIIIEIEEAGLKKVQITDNGHGIAHDEVELALRRHATSKIKNQADLFRIRTLGFRGEALPSIASVSVLTLLTAVDGASHGTKLVARGGEVEEVIPATSPVGTKVCVEDLFFNTPARLKYMKSQQAELSHIIDIVNRLGLAHPEISFSLISDGKEMTRTAGTGQLRQAIAGIYGLVSAKKMIEIENSDLDFEISGFVSLPELTRANRNYISLFINGRYIKNFLLNRAILDGFGSKLMVGRFPLAVIHIHIDPYLADVNVHPTKQEVRISKEKELMTLVSEAIANSLKEQTLIPDALENLAKSTVRNREKVEQTILPLKENTLYYEKTEPSRPSQTEVADYQVELTDEGQDLTLFAKETLDRLTKPAKLHFAERKPANYDQLDHPELDLASIDKAYDKLEREEASSFPELEFFGQMHGTYLFAQGRDGLYIIDQHAAQERVKYEEYRESIGNVDQSQQQLLVPYIFEFPADDALRLKERMPLLEEVGVFLAEYGENQFILREHPIWMAEEEIESGIYEMCDMLLLTKEVSIKKYRAELAIMMSCKRSIKANHRIDDHSARQLLYQLSQCDNPYNCPHGRPVLVHFTKSDMEKMFRRIQENHTSLRELGKY

SEQ ID NO: 73713 - protein, 155 aa, Streptococcus pneumoniae
MNTYEGNLVANNIKIGIVVARFNEFITSKLLSGALDNLKRENVNEKDIEVAWVPGAFEIPLIASKMAKSKKYDAIICLGAVIRGNTSHYDYVCSEVSKGIAQISLNSEIPVMFGVLTTDTIEQAIERAGTKAGNKGSECAQGAIEMVNLIRTLDA

SEQ ID NO: 73714 - protein, 401 aa, Streptococcus pneumoniae
MEYRKIQEALEALQKGRLVLVIDDKDRENEGDLICSAQAATTENVNFMATYAKGLICMPMSESLANQLMLSPMVENNTDNHKTAFTVSIDYKETTTGISAEERGLTARMCVAEDITPSDFRRPGHMFPLIAKKGGVLERNGHTEATVDLLKLAGLKECGLCCEIMNHDGKMMRTDDLIQFSKKHNIPLITIKELQEYRKVYDQLVERVSTVNMPTRYGNFKAISYIDKLNGEHHLALIMGNIEDEANVLCRVHSECLTGDVLGSLRCDCGQQFDKAMKMIVENGSGVLLYLRQEGRGIGLINKLKAYHLQDQGMDTLDANLALGFEGDLRKYHIGAQMLKDLGLQSLHLLTNNPDKVEQLEKYGITISSRISIEIEANPYDSFYLETKKNRMGHILNMEEK

SEQ ID NO: 73715 - protein, 211 aa, Streptococcus pneumoniae
MFTGIIEEIGKVERIQKDSRNCKLSIKASKILTDIHLGDSIAVNGICLTVTHFNHQSFTVDVMNETWSRTALTLLKHGSEVNLERALSVNGRLGGHVVTGHIDGTGKISSIKKDDNAVWHQINTQKEILDLIVEKGSITIDGISLTVAKVSKVNFSVSVIPHTLEQTILKSKQVGSTVNLENDILGKYVQKLMDNSPKSEISKELLYQNGF

SEQ ID NO: 73716 - protein, 366 aa, Streptococcus pneumoniae
MSDSKYMKLAIKLAQKGAGYVNPNPMVGAVIVKDNHIIGQGYHEFFGGPHAERNALKNCRESPVGATLYVTLEPCCHFGKTPPCIDAIIDSGITRVVIGSLDCNPIVSGKGVKILEENNLQVTVGILENECLNLIKSFRKYITQHVPYVFMKYAMSMDGKIATKTNQSKWITEEEARKHVHQLRHYVSAIMVGVNTVIQDDPLLTCRLEEGKNPIRIICDTHLRTPLTSKIVKTANDIKTYIATSSEDKNKMKLYQNHGCEILSIKKKGNHIDLSSLMQHLGNMQIDSLVLEGGSLMNWSALEQQIVDELKIYIAPKIFGGSAKFPVGGEGISLPNDAIRLKPYAFSQIGNDYLIESEVIYPCSQE

SEQ ID NO: 73717 - protein, 943 aa, Streptococcus pneumoniae
MQDKIVIHGARAHNLKNIDVEIPRDKLVVVTGLSGSGKSSLAFDTLYAEGQRRYVESLSAYARQFLGNMEKPDVDAIDGLSPAISIDQKTTSKNPRSTVGTTTEINDYLRLLYARVGTPYCINGHGAINASSVEQIVDKVLELPERQRLQILAPVIRKKKGQHKSVIEKVQKDGYVRVRVDGEVYDVTEVPELSKSKQHNIDVVVDRIVIKEGIRSRLFDSIEAALRIAEGYVIIDTMDDSELLFSEHYACPVCGFTVPELEPRLFSFNAPFGSCSECDGLGIKLEVDTDLVVPDASKTLREGALAPWNPISSNYYPNMLEQAMKVFGVAMDKPFEDLSEEDKNLILYGSDGKEFHFHYENEFGGVRDIDIPFEGVINNIKRRYHETNSDYTRTQMRLYMNELTCGTCQGYRLNDQALSVRVGGQQGPHIGEISDLSIADHLDLVSQLTLSENEAIIARPILKEIKDRLTFLNNVGLNYLTLSRSAGTLSGGESQRIRLATQIGSNLSGVLYILDEPSIGLHQRDNDRLIASLKKMRDLGNTLIVVEHDEDTMREADYLIDVGPGAGVFGGEIVAAGTPKQVARNSKSITGQYLSGKRVIPVPEERRVGNGRFIEVIGARENNLQNVTARFPLGKFIAVTGVSGSGKSTLINSILKKAIAQKLNRNSDKPGKFKTITGIEHVDRLIDIDQSPIGRTPRSNPATYTGVFDDIRDLFAQTNEAKIRGYKKGRFSFNVKGGRCEACSGDGIIKIEMHFLPDVYVACEVCHGTRYNSETLEVHYKEKNISQVLDMTVNDAVEFFQHIPKIQRKLQTIKDVGLGYVTLGQPATTLSGGEAQRMKLASELHKRSTGKSFYILDEPTTGLHTEDIARLLKVLARFVDDGNTVLVIEHNLDVIKTADHIIDLGPEGGVGGGTIIVTGTPEEVAANEASYTGHYLKGKLHHE

SEQ ID NO: 73718 - protein, 88 aa, Streptococcus pneumoniae
MGFTEETVRFKLDDSNKKEISETLTDVYASLNDKGYNPINQIVGYVLSGDPAYVPRYNNARNQIRKYERDEIVEELVRYYLKGQGVDL

SEQ ID NO: 73719 - protein, 139 aa, Streptococcus pneumoniae
MRIMGLDVGSKTVGVAISDPLGFTAQGLEIIQINEEQGQFGFDRVKELVDTYKVERFVVGLPKNMNNTSGPRVEASQAYGAKLEEFFGLPVDYQDERLTTVAAERMLIEQADISRNKRKKVIDKLAAQLILQNYLDRKF

SEQ ID NO: 73720 - protein, 101 aa, Streptococcus pneumoniae
MSHDHNHDHEERELITLVDEQGNETLFEILLTIDGKEEFGKNYVLLVPVNAEEDEDGQVEIQAYSFIENEDGTEGELQPIPEDSEDEWNMIEEVFNSFMEE

SEQ ID NO: 73721 - protein, 196 aa, Streptococcus pneumoniae
MNNPKPQEWKSEELSQGRIIDYKAFNFVDGEGVRNSLYVSGCMFHCEGCYNVATWSFNAGIPYTAELEEQIMADLAQPYVQGLTLLGGEPFLNTGILLPLVKRIRKELPDKDIWSWTGYTWEEMMLETPDKLELLSLIDILVDGRYDRTKRNLMLQFRGSSNQRIIDVQKSLKSGQVVIWDKLNDGKESYEQVKRE

SEQ ID NO: 73722 - protein, 102 aa, Streptococcus pneumoniae
MANKKIRIRLKAYEHRTLDTAAAKIVESATRTGAQVAGPIPLPTERSLYTIIRATHKYKDSREQFEMRTHKRLIDIVNPTQKTVDALMKLDLPSGVNVEIKL

SEQ ID NO: 73723 - protein, 208 aa, Streptococcus pneumoniae
MTKGILGKKVGMTQIFTEAGELIPVTVIEATPNVVLQVKTVETDGYNAIQVGFDDKREVLSNKPAKGHVAKANTAPKRFIREFKNVEGLEVGAEITVETFAAGDVVDVTGTSKGKGFQGVIKRHGQSRGPMAHGSRYHRRPGSMGPVAPNRVFKGKNLAGRMGGDRVTIQNLEVVQVVPEKNVILIKGNVPGAKKSLITIKSAVKAGK

SEQ ID NO: 73724 - protein, 207 aa, Streptococcus pneumoniae
MANVTLFDQTGKEAGQVVLSDAVFGIEPNESVVFDVIISQRASLRQGTHAVKNRSAVSGGGRKPWRQKGTGRARQGSIRSPQWRGGGVVFGPTPRSYGYKLPQKVRRLALKSVYSEKVAENKFVAVDALSFTAPKTAEFAKVLAALSIDSKVLVILEEGNEFAALSARNLPNVKVATATTASVLDIANSDKLLVTQAAISKIEEVLA

SEQ ID NO: 73725 - protein, 98 aa, Streptococcus pneumoniae
MNLYDVIKKPVITESSMAQLEAGKYVFEVDTRAHKLLIKQAVEAAFEGVKVANVNTINVKPKAKRVGRYTGFTNKTKKAIITLTADSKAIELFAAEAE

SEQ ID NO: 73726 - protein, 277 aa, Streptococcus pneumoniae
MGIRVYKPTTNGRRNMTSLDFAEITTSTPEKSLLVALKSKAGRNNNGRITVRHQGGGHKRFYRLVDFKRNKDNVEAVVKTIEYDPNRSANIALVHYTDGVKAYIIAPKGLEVGQRIVSGPEADIKVGNALPLANIPVGTLIHNIELKPGRGGELVRAAGASAQVLGSEGKYVLVRLQSGEVRMILGTCRATVGVVGNEQHGLVNLGKAGRSRWKGIRPTVRGSVMNPNDHPHGGGEGKAPVGRKAPSTPWGKPALGLKTRNKKAKSDKLIVRRRNEK

SEQ ID NO: 73727 - protein, 93 aa, Streptococcus pneumoniae
MGRSLKKGPFVDEHLMKKVEAQANDEKKKVIKTWSRRSTIFPSFIGYTIAVYDGRKHVPVYIQEDMVGHKLGEFAPTRTYKGHAADDKKTRRK

SEQ ID NO: 73728 - protein, 114 aa, Streptococcus pneumoniae
MAEITSAKAMARTVRVSPRKSRLVLDNIRGKSVADAIAILTFTPNKAAEIILKVLNSAVANAENNFGLDKANLVVSEAFANEGPTMKRFRPRAKGSASPINKRTAHITVAVAEK

SEQ ID NO: 73729 - protein, 217 aa, Streptococcus pneumoniae
MGQKVHPIGMRVGIIRDWDAKWYAEKEYADYLHEDLAIRKFVQKELADAAVSTIEIERAVNKVNVSLHTAKPGMVIGKGGANVDALRAKLNKLTGKQVHINIIEIKQPDLDAHLVGEGIARQLEQRVAFRRAQKQAIQRAMRAGAKGIKTQVSGRLNGADIARAEGYSEGTVPLHTLRADIDYAWEEADTTYGKLGVKVWIYRGEVLPARKNTKGGK

SEQ ID NO: 73730 - protein, 137 aa, Streptococcus pneumoniae
MLVPKRVKHRREFRGKMRGEAKGGKEVAFGEYGLQATTSHWITNRQIEAARIAMTRYMKRGGKVWIKIFPHKSYTAKAIGVRMGSGKGAPEGWVAPVKRGKVMFEIAGVSEEIAREALRLASHKLPVKCKFVKREAE

SEQ ID NO: 73731 - protein, 68 aa, Streptococcus pneumoniae
MKLNEVKEFVKELRGLSQEELAKRENELKKELFELRFQAATGQLEQTARLKEVKKQIARIKTVQSEAK

SEQ ID NO: 73732 - protein, 86 aa, Streptococcus pneumoniae
MERNNRKVLVGRVVSDKMDKTITVVVETKRNHPVYGKRINYSKKYKAHDENNVAKEGDIVRIMETRPLSATKRFRLVEVVEEAVII

SEQ ID NO: 73733 - protein, 122 aa, Streptococcus pneumoniae
MIQTETRLKVADNSGAREILTIKVLGGSGRKFANIGDVIVASVKQATPGGAVKKGDVVKAVIVRTKSGARRADGSYIKFDENAAVIIREDKTPRGTRIFGPVARELREGGFMKIVSLAPEVL

SEQ ID NO: 73734 - protein, 101 aa, Streptococcus pneumoniae
MFVKKGDKVRVIAGKDKGTEAVVLTALPKVNKVIVEGVNIVKKHQRPTNELPQGGIIEKEAAIHVSNVQVLDKNGVAGRVGYKFVDGKKVRYNKKSGEVLD

SEQ ID NO: 73735 - protein, 180 aa, Streptococcus pneumoniae
MANRLKEKYLNEVVPALTEQFNYSSVMAVPKVDKIVLNMGVGEAVSNAKSLEKAAEELALISGQKPLITKAKKSIAGFRLREGVAIGAKVTLRGERMYEFLDKLVSVSLPRVRDFHGVPTKSFDGRGNYTLGVKEQLIFPEINFDDVDKTRGLDIVIVTTANTDEESRALLTGLGMPFAK

SEQ ID NO: 73736 - protein, 89 aa, Streptococcus pneumoniae
MAKKSMVAREAKRQKIVDRYAEKRAALKAAGDYEGLSKLPRNASPTRLHNRCRVTGRPHSVYRKFGLSRIAFRELAHKGQIPGVTKASW

SEQ ID NO: 73737 - protein, 132 aa, Streptococcus pneumoniae
MVMTDPIADFLTRIRNANQAKHEVLEVPASNIKKGIAEILKREGFVKNVEIIEDDKQGVIRVFLKYGPNGEKVITNLKRVSKPGLRVYKKREDLPKVLNGLGIAILSTSEGLLTDKEARQKNVGGEVIAYVW

SEQ ID NO: 73738 - protein, 178 aa, Streptococcus pneumoniae
MSRIGNKVIVLPAGVELANNDNVVTVKGPKGELTREFSKDIEIRVEGTEVTLHRPNDSKEMKTIHGTTRALLNNMVVGVSEGFKKELEMRGVGYRAQLQGSKLVLAVGKSHPDEVEAPEGITFELPNPTTIVVSGISKEVVGQTAAYVRSLRSPEPYKGKGIRYVGEFVRRKEGKTGK

SEQ ID NO: 73739 - protein, 118 aa, Streptococcus pneumoniae
MISKPDKNKLRQKRHRRVRGKLSGTADRPRLNVFRSNTGIYAQVIDDVAGVTLASASTLDKEVSKGTKTEQAVAVGKLVAERANAKGISEVVFDRGGYLYHGRVKALADAARENGLKF

SEQ ID NO: 73740 - protein, 164 aa, Streptococcus pneumoniae
MAFKDNAVELEERVVAVNRVTKVVKGGRRLRFAALVVVGDHNGRVGFGTGKAQEVPEAIRKAVDDAKKNLIEVPMVGTTIPHEVLSEFGGAKVLLKPAVEGSGVAAGGAVRAVVELAGVADITSKSLGSNTPINIVRATVEGLKQLKRAEEIAALRGISVSDLA

SEQ ID NO: 73741 - protein, 60 aa, Streptococcus pneumoniae
MAQIKITLTKSPIGRIPSQRKTVVALGLGKLNSSVIKEDNAAIRGMITAVSHLVTVEEVN

SEQ ID NO: 73742 - protein, 146 aa, Streptococcus pneumoniae
MKLHELKPAEGSRKVRNRVGRGTSSGNGKTSGRGQKGQKARSGGGVRLGFEGGQTPLFRRLPKRGFTNINAKEYAIVNLDQLNVFEDGAEVTPVVLIEAGIVKAEKSGIKILGNGELTKKLTVKAAKFSKSAEEAITAKGGSVEVI

SEQ ID NO: 73743 - protein, 436 aa, Streptococcus pneumoniae
MFFKLLREALKVKQVRSKILFTIFIVLVFRIGTSITVPGVNANSLNALSGLSFLNMLSLVSGNALKNFSIFALGVSPYITASIVVQLLQMDILPKFVEWGKQGEVGRRKLNQATRYIALVLAFVQSIGITAGFNTLAGAQLIKTALTPQVFLTIGIILTAGSMIVTWLGEQITDKGYGNGVSMIIFAGIVSSIPEMIQGIYVDYFVNVPSSRITSSIIFVIILIITVLLIIYFTTYVQQAEYKIPIQYTKVAQGAPSSSYLPLKVNPAGVIPVIFASSITAAPAAILQFLSATGHDWAWVRVAQEMLATTSPTGIAMYALLIILFTFFYTFVQINPEKAAESLQKSGAYIHGVRPGKGTEEYMSKLLRRLATVGSLFLGVISILPIAAKDVFGLSDVVAFGGTSLLIIISTGIEGIKQLEGYLLKRKYVGFMDRTE

SEQ ID NO: 73744 - protein, 212 aa, Streptococcus pneumoniae
MNLLIMGLPGAGKGTQAAKIVEQFHVAHISTGDMFRAAMANQTEMGVLAKSYIDKGELVPDEVTNGIVKERLSQDDIKETGFLLDGYPRTIEQAHALDKTLAELGIELEGIINIEVNPDSLLERLSGRIIHRVTGETFHKVFNPPVDYKEEDYYQREDDKPETVKRRLDVNIAQGEPIIAHYRAKGLVHDIEGNQDINDVFSDIEKVLTNLK

SEQ ID NO: 73745 - protein, 90 aa, Streptococcus pneumoniae
MLSLCLEASNRNLWRCFCVAKDDVIEVEGKVVDTMPNAMFTVELENGHQILATVSGKIRKNYIRILAGDRVTVEMSPYDLTRGRITYRFK

SEQ ID NO: 73746 - protein, 38 aa, Streptococcus pneumoniae
MKVRPSVKPICEYCKVIRRNGRVMVICPANPKHKQRQG

SEQ ID NO: 73747 - protein, 121 aa, Streptococcus pneumoniae
MARIAGVDIPNDKRVVISLTYVYGIGLATSKKILAAAGISEDVRVRDLTSDQEDAIRREVDAIKVEGDLRREVNLNIKRLMEIGSYRGIRHRRGLPVRGQNTKNNARTRKGKAVAIAGKKK

SEQ ID NO: 73748 - protein, 127 aa, Streptococcus pneumoniae
MAKPTRKRRVKKNIESGIAHIHATFNNTIVMITDVHGNAIAWSSAGALGFKGSRKSTPFAAQMASEAAAKSAQEHGLKSVEVTVKGPGSGRESAIRALAAAGLEVTAIRDVTPVPHNGARPPKRRRV

SEQ ID NO: 73749 - protein, 311 aa, Streptococcus pneumoniae
MIEFEKPNITKIDENKDYGKFVIEPLERGYGTTLGNSLRRVLLASLPGAAVTSINIDGVLHEFDTVPGVREDVMQIILNIKGIAVKSYVEDEKIIELDVEGPAEVTAGDILTDSDIEIVNPDHYLFTIGEGSSLKATMTVNSGRGYVPADENKKDNAPVGTLAVDSIYTPVTKVNYQVEPARVGSNDGFDKLTLEILTNGTIIPEDALGLSARILTEHLDLFTNLTEIAKSTEVMKEADTESDDRILDRTIEELDLSVRSYNCLKRAGINTVHDLTEKSEAEMMKVRNLGRKSLEEVKLKLIDLGLGLKDK

SEQ ID NO: 73750 - protein, 128 aa, Streptococcus pneumoniae
MAYRKLGRTSSQRKAMLRDLTTDLLINESIVTTEARAKEIRKTVEKMITLGKRGDLHARRQAAAFVRNEIASENYDEATDKYTSTTALQKLFSEIAPRYAERNGGYTRILKTEPRRGDAAPMAIIELV

SEQ ID NO: 73751 - protein, 249 aa, Streptococcus pneumoniae
MGGFYFIIHDIIEANGGRKMVKVRLYLVRHGKTMFNTIGRAQGWSDTPLTAEGERGIQELGIGLRESDLQFERAYSSDSGRTIQTMGIILEELGLQGKIPYRMDKRIREWCFGSFDGAYDGDLFMGIIPRIFNVDHVHQLSYAELAEGLVEVDTAGWAEGWEKLSGRIKEGFEMIAKEMEDQGGGNALVVSHGMTIGTIVYLINGMHPHGLDNGSVTILEYEDGQFRVEVVGDRSYRELGREKMEEGSI

SEQ ID NO: 73752 - protein, 326 aa, Streptococcus pneumoniae
MNQDRNKLLSKIAYLYYIENLNQSQIAAKLGIYRTSISRMLTEARNAGIVKIEIENFDTNMFKLENYVKEKYGLESLEIIPNEFDDNPTILSERISQVAAGVLRNLIDDNMKIGFSWGKSLSNLVDLIHSKSVRNVHFYPLAGGPSHIHAKYHVNTLIYEMSRKFHGECTFMNATIVQENKLLADGILQSRYFENLKNSWKDLDIAVVGIGDFSNKGKHQWLDMLTEDDFKELTKVKTVGEICCRFFDSKGKEVYENLQERTIAISLEDLKNIPQSLAVAYGDTKVSSILSVLRANLVNHLITDKNTILKVLEEDGDLTFREILGE

SEQ ID NO: 73753 - protein, 815 aa, Streptococcus pneumoniae
MLTMVNTEVARTTIKTEYFGSLTERMNKYREDVLNKKPYIDAERAVLATRAYERYKEQPNVLKRAYMLKEILENMSIYIEEESMIAGNQASSNKDAPIFPEYTLEFVLNELDLFEKRDGDVFYITEETKEQLRSIAPFWENNNLRARAGALLPEEVSVYMETGFFGMEGKMNSGDAHLAVNYQKLLQFGLRGFEERARKAKVALDLTDPASIDKYHFYDSIFIVIDAIKVYAKRFVALAKSLAENANPKRKKELLEIADICSRVPYEPATTFAEAIQSVWFIQCILQIESNGHSLSYGRFDQYMYPYMKADLESGKETEDSIVERLTNLWIKTITINKVRSQSHTFSSAGSPLYQNVTIGGQTRDKKDAVNPLSYLVLKSVAQTHLPQPNLTVRYHAGLDARFMNECIEVMKLGFGMPAFNNDEIIIPSFIAKGVLEDDAYDYSAIGCVETAVPGKWGYRCTGMSYMNFPKVLLITMNDGIDPASGKRFAPSFGHFKDMKNFSELENAWDKTLRYLTRMSVIVENSIDLSLEREVPDILCSALTDDCIGRGKHLKEGGAVYDYISGLQVGIANLSDSLAAIKKLVFEEERISPSQLWHALETDYAGEEGKVIQEMLIHDAPKYGNDDDYADKLVTAAYDIYVDEIAKYPNTRYGRGPIGGIRYSGTSSISANVGQGRGTLATPDGRNAGTPLAEGCSPSHNMDQHGPTSVLKSVSKLPTDEIVGGVLLNQKVNPQTLAKEEDKLKLIALLRTFFNRLHGYHIQYNVVSRETLIDAQKHPEKHRDLIVRVAGYSAFFNVLSKATQDDIIGRTEHTL

SEQ ID NO: 73754 - protein, 222 aa, Streptococcus pneumoniae
MEFMLDTLNLDEIKKWSEILPLAGVTSNPTIAKREGSINFFERIKDVRELIGSTPSIHVQVISQDFEGILKDAHEIRRQAGDDIFIKVPVTPAGLRAIKVLKKEGYHITATAIYTVIQGLLAIEAGADYLAPYYNRMENLNIDSNSVIRQLVLAIDRQNSPSKILAASFKNVAQVNNALAAGAHAVTAGADVFESAFAMPSIQKAVDDFSDDWFVTQNSRSI

SEQ ID NO: 73755 - protein, 833 aa, Streptococcus pneumoniae
MSFYNHKEIEPKWQGYWAEHHTFKTGTDASKPKFYALDMFPYPSGVGLHVGHPEGYTATDILSRYKRAQGYNVLHPMGWDAFGLPAEQYAMDTGNDPAEFTAENIANFKRQINALGFSYDWDREVNTTDPNYYKWTQWIFTKLYEKGLAYEAEVPVNWVEELGTAIANEEVLPDGTSERGGYPVVRKPMRQWMLKITAYAERLLNDLDELDWSESIKDMQRNWIGKSTGANVTFKVKGTDKEFTVFTTRPDTLFGATFTVLAPEHELVDAITSSEQAEAVADYKHQASLKSDLVRTDLAKEKTGVWTGAYAINPVNGKEMPIWIADYVLASYGTGAVMAVPAHDQRDWEFAKQFDLPIVEVLEGGNVEEAAYTEDGLHVNSDFLDGLNKEDAIAKIVACLEEKGCGQEKVTYRLRDWLFSRQRYWGEPIPIIHWEDGTSTAVPETELPLVLPVTKDIRPSGTGESPLANLTDWLEVTREDGVKGRRETNTMPQWAGSSWYYLRYIDPHNTEKLADEDLLKQWLPVDIYVGGAEHAVLHLLYARFWHKFLYDLGVVPTKEPFQKLFNQGMILGTSYRDHRGALVATDKVEKRDGSFFHIETGEELEQAPAKMSKSLKNVVNPDDVVEQYGADTLRVYEMFMGPLDASIAWSEEGLEGSRKFLDRVYRLITSKEILAENNGALDKAYNETVKAVTEQIESLKFNTAIAQLMVFVNAANKEDKLYVDYAKGFIQLIAPFAPHLAEELWQTVAETGESISYVAWPTWDESKLVEDEIEIVVQIKGKVRAKLMVAKDLSREELQEIALADEKVKAEIDGKEIVKVISVPNKLVNIVVK

SEQ ID NO: 73756 - protein, 138 aa, Streptococcus pneumoniae
MITIKKQEIVKLEDVLHLYQAVGWTNYTHQPEMLEQALSHSLVIYLALDGDAVVGLIRLVGDGFSSVLVQDLIVLPIYQRQGIGSALMKEALEDYKDAYQVQLVTEETERTLGFYRSMGFEILSTYNCIGMTWMNRKK

SEQ ID NO: 73757 - protein, 258 aa, Streptococcus pneumoniae
MNRNKIMFGFFKKDKAVEVEVPTQVPAHIGIIMDGNGRWAKKRMQPRVFGHKAGMEALQTVTKAANKLGVKVITVYAFSTENWTRPDQEVKFIMNLPVEFYDNYVPELHANNVKIQMIGETDRLPKQTFEALTKAEELTKNNTGLILNFALNYGGRAEITQALKLISQDVLDAKINPGDITEELIGNYLFTQHLPKDLRDPDLIIRTSGELRLSNFLPWQGAYSELYFTDTLWPDFDEAALQEAILAYNRRHRRFGGV

SEQ ID NO: 73758 - protein, 267 aa, Streptococcus pneumoniae
MTQDLQKRTLFAGIALAIFLPILMIGGLLLQIAIGIVAMLAMHELLKIRGLATMTMEGLLTLFATFALTIPLENYLTFLPVDGNVVAYSVLISIMLGTTVFSKSYTIEDAVFPLAMSFYVGFGFNALLDARVAGLDKALLALCIVWATDSGAYLVGMNYGKRKLAPRVSPNKTLEGALGGILGAILVTIIFMIVDSTVALPYGIYKMSVFAIFFSIAGQFGDLLESSIKRHFGVKDSGKFIPGHGGVLDRFDSMLLVFPIMHLFGLF

SEQ ID NO: 73759 - protein, 617 aa, Streptococcus pneumoniae
MKQSKMPIPTLREMPSDAQVISHALMLRAGYVRQVSAGVYSYLPLANRVIEKAKNIMRQEFEKIGAVEMLAPALLSAELWRESGRYETYGEDLYKLKNREKSDFILGPTHEETFTAIVRDSVKSYKQLPLNLYQIQPKYRDEKRPRNGLLRTREFIMKDAYSFHANYDSLDSVYDEYKAAYERIFTRSGLDFKAIIGDGGAMGGKDSQEFMAITSARTDLDRWVVLDKSVVSFDEIPVEVQEEIKAELLKWIVSGEDTIAYSSESSYAANLEMATNEYKPSNRVVAEEEVTRVATPDVKSIDEVAAFLNVPEEQTIKTLFYIADGELVAALLVGNDQLNEVKLKNHLGADFFDVASEEEVANVVQAGFGSLGPVGLPENIKIIADRKVQDVRNAVVGANEDGYHLTGVNPGRDFTAEYVDIREVREGEISPDGQGVLNFARGIEIGHIFKLGTRYSASMGADVLDENGRAVPIIMGCYGIGVSRLLSAVMEQHARLFVNKTPKGEYRYAWGINFPKELAPFDVHLITVNVKDEEAQALTEKLEASLMGAGYEVLTDDRNERVGVKFSDSDLIGLPIRITVGKKAADGIVEVKIKATGDTIEVHADNVLETLEILSKK

SEQ ID NO: 73760 - protein, 459 aa, Streptococcus pneumoniae
MLRFPKDFVWGSSTSGPQTEGRVAGDGKGDNLWDYWFQVEPNRYYNGIGSDKTSTFYENWERDIELLLETGHTVFRTSIQWSRIFPQGCGKVNPQGVDFYRKVFEAIKAKGIRLLVNLYHFDLPFALQEDGDGWENKATVSAYEDYARFCFETYGDLVDQWITFNEPIVPVEFGYFYDAHYPHKVDAEAAVKVAYHTQLASSRAVKACHELLPDSKIGIVLNLTPAYPRSQHPADVKAARIAALFQAQSFLDPSVLGTYPQELVEILHEHGLLPDATEEELELIRDNTVDFLGVNYYQPLRVMAPRFAKHPESPLLPEHFYEPYVMPGRKINSHRGWEIYEQGIYDIAQNIKENYGNIEWMLTENGMGVEGEEKFRQDGMIQDDYRIDFVKGHLRELHRAIEDGANCKGYLIWTFIDCWSWLNSYKNRYGLVELDLETQERRLKKSGHWFKELSDNNGF

SEQ ID NO: 73761 - protein, 602 aa, Streptococcus pneumoniae
MCGIVGVVGNTNATDILIQGLEKLEYRGYDSAGIFVLDGADNHLVKAVGRIAELSAKTAGVEGTTGIGHTRWATHGKPTEDNAHPHRSETERFVLVHNGVIENYLEIKEEYLAGHHFKGQTDTEIAVHLIGKFAEEDGLSVLEAFKKALHIIRGSYAFALIDSENPDVIYVAKNKSPLLIGLGEGYNMVCSDAMAMIRETNQYMEIHDQELVIVKADSVEVQDYDGNSRERASYTAELDLSDIGKGTYPYYMLKEIDEQPTVMRKLIQAYTDDAGQVVIDPAIIKAVQDADRIYILAAGTSYHAGFASKKMLEELTDTPVELGISSEWGYGMPLLSKKPLFIFISQSGETADSRQVLVKANEMGIPSLTVTNVPGSTLSREANYTMLLHAGPEIAVASTKAYTAQIAALAFLAKAVGEANGNAKAQAFDLVHELSIVAQSIESTLSEKETIEAKVRELLETTRNAFYIGRGQDYYVAMEASLKLKEISYIQCEGFAAGELKHGTIALIEEGTPVLALLSDPVLANHTRGNIQEVAARGAKVLTIAEENVAKDTDDIVLTTVHPYLSPISMVVPTQLVAYFATLHRGLDVDKPRNLAKSVTVE

SEQ ID NO: 73762 - protein, 137 aa, Streptococcus pneumoniae
MPTINQLVRKPRKSKVEKSKSPALNVGYNSHKKVQTNVSSPQKRGVATRVGTMTPKKPNSALRKFARVRLSNLIEVTAYIPGIGHNLQEHSVVLLRGGRVKDLPGVRYHIVRGALDTAGVNDRKQGRSKYGTKRPKA

SEQ ID NO: 73763 - protein, 156 aa, Streptococcus pneumoniae
MSRKNRAPKRDVLPDPLYNSQLVTRLINRVMLDGKRGTAASIVYGAFEQIKEATGNDALEVFETAMENIMPVLEVRARRVGGSNYQVPVEVRPERRTTLGLRWLVTIARLRGEHTMQDRLAKEILDAANNTGAAVKKREDTHRMAEANRAFAHFRW

SEQ ID NO: 73764 - protein, 693 aa, Streptococcus pneumoniae
MAREFSLEKTRNIGIMAHVDAGKTTTTERILYYTGKIHKIGETHEGASQMDWMEQEQERGITITSAATTAQWNNHRVNIIDTPGHVDFTIEVQRSLRVLDGAVTVLDSQSGVEPQTETVWRQATEYGVPRIVFANKMDKIGADFLYSVSTLHDRLQANAHPIQLPIGSEDDFRGIIDLIKMKAEIYTNDLGTDILEEDIPAEYLDQAQEYREKLIEAVAETDEELMMKYLEGEEITNEELKAGIRKATINVEFFPVLCGSAFKNKGVQLMLDAVIDYLPSPLDIPAIKGINPDTDAEEIRPASDEEPFAALAFKIMTDPFVGRLTFFRVYSGVLQSGSYVLNTSKGKRERIGRILQMHANSRQEIDTVYSGDIAAAVGLKDTTTGDSLTDEKAKIILESINVPEPVIQLMVEPKSKADQDKMGIALQKLAEEDPTFRVETNVETGETVISGMGELHLDVLVDRMRREFKVEANVGAPQVSYRETFRASTQARGFFKRQSGGKGQFGDVWIEFTPNEEGKGFEFENAIVGGVVPREFIPAVEKGLVESMANGVLAGYPMVDVKAKLYDGSYHDVDSSETAFKIAASLSLKEAAKSAQPAILEPMMLVTITVPEENLGDVMGHVTARRGRVDGMEAHGNSQIVRAYVPLAEMFGYATVLRSASQGRGTFMMVFDHYEDVPKSVQEEIIKKNKGED

SEQ ID NO: 73765 - protein, 1463 aa, Streptococcus pneumoniae
MSNSFEILMNQLGMPAEMRQAPALAQANIERVVVHKISKVWEFHFVFSNILPIEIFLELKKGLSEEFSKTGNKAVFEIKARSQEFSNQLLQSYYREAFSEGPCASQGFKSLYQNLQVRAEGNQLFIEGSEAIDKEHFKKNHLPNLAKQLEKFGFPTFNCQVEKNDVLTQEQEEAFHAENEQIVQAANEEALRAMEQLEQMAPPPAEEKPVFDFQAKKAAAKPKLDKAEITPMIEVTTEENRLVFEGVVFDVEQKVTRTGRVLINFKMTDYTSSFSMQKWVKNEEEAQKFDLIKKNSWLRVRGNVEMNNFTRDLTMNVQDLQEVVHYERKDLMPEGERRVEFHAHTNMSTMDALPEVEEIVATAAKWGHKAVAITDHGNVQSFPHGYKAAKKAGIQLIYGIEANIVEDRVPIVYNEVEMDLSEATYVVFDVETTGLSAIYNDLIQVAASKMYKGNVIAEFDEFINPGHPLSAFTTELTGITDDHVKNAKPLEQVLQEFQEFCKDTVLVAHNATFDVGFMNANYERHDLPKISQPVIDTLEFARNLYPEYKRHGLGPLTKRFGVALEHHHMANYDAEATGRLLFIFIKEVAEKHGVTDLARLNIDLISPDSYKKARIKHATIYVKNQVGLKNIFKLVSLSNTKYFEGVSRIPRTVLDAHREGLILGSACSEGEVFDVVVSQGVDAAVEVAKYYDFIEVMPPAIYAPLIAKEQVKDMEELQTIIKSLIEVGDRLGKPVLATGNVHYIEPEEEIYREIIVRSLGQGAMINRTIGHGEHAQPAPLPKAHFRTTNEMLDEFAFLGEELARKLVIENTNALAEIFEPVEVVKGDLYTPFIDKAEETVAELTYKKAFEIYGNPLPDIVDLRIEKELTSILGNGFAVIYLASQMLVQRSNERGYLVGSRGSVGSSFVATMIGITEVNPLSPHYVCGQCQYSEFITDGSYGSGFDMPHKDCPNCGHKLSKNGQDIPFETFLGFDGDKVPDIDLNFSGEDQPSAHLDVRDIFGEEYAFRAGTVGTVAAKTAYGFVKGYERDYGKFYRDAEVERLAQGAAGVKRTTGQHPGGIVVIPNYMDVYDFTPVQYPADDVTAEWQTTHFNFHDIDENVLKLDVLGHDDPTMIRKLQDLSGIDPNKIPMDDEGVMALFSGTDVLGVTPEQIGTPTGMLGIPEFGTNFVRGMVDETHPTTFAELLQLSGLSHGTDVWLGNAQDLIKQGIADLSTVIGCRDDIMVYLMHAGLEPKMAFTIMERVRKGLWLKISEEERNGYIEAMKANKVPEWYIESCGKIKYMFPKAHAAAYVMMALRVAYFKVHHPIYYYCAYFSIRAKAFDIKTMGAGLEAIKRRMEEISEKRKNNEASNVEIDLYTTLEIVNEMWERGFKFGKLDLYRSQATEFLIDGDTLIPPFVAMDGLGENVAKQLVRAREEGEFLSKTELRKRGGLSSTLVEKMDEMGILGNMPEDNQLSLFDELF

SEQ ID NO: 73766 - protein, 76 aa, Streptococcus pneumoniae
MLGSMFVGLLVGFLAGAMTNRGERMGCFGKMFLGWIGAFLGHLLFGTWGPVLSGTAIIPAVLGAMIVLAIFWRRGS

SEQ ID NO: 73767 - protein, 240 aa, Streptococcus pneumoniae
MRLDKFLVACAVGSRTEVKNLLKAGRVTVNGKKEKSAKFQIDEKIDEIRFDGQVLEYEEFVYYMMNKPKGVISATEDPKHRTVLDLLDDLARSKEVFPVGRLDINTHGLLLLTNDGQLAHVLLSPKRHVDKTYLAQVKGIMTQEDVETFAEGIPLKDFTCQPARLEILSTDAEKNQSQIRVTIAEGKFHQIKRMVGYCGKEVVDLQRLTMGTLVLDENLERGEWRRLTKEELEILRANII

SEQ ID NO: 73768 - protein, 332 aa, Streptococcus pneumoniae
MTIMSIGIIIASHGEFAAGIHQSGSMIFGEQEKVQVVTFMPNEGPDDLYAKFNNAVAAFDAEDEVLVLADLWSGSPFNQASRVMGENPERKFAIITGLNLPMLIQAYTERLMDAAAGVEKVAANIIKEAKDGIKALPEELNPVEEVASAAAAPVAQTAIPEGTVIGDGKLKINLARLDTRLLHGQVATAWTPDSKANRIIVASDNVAKDDLRKELIKQAAPGNVKANVVPIQKLIEISKDPRFGETHALILFETPQDALRAIEGGVPIKTLNVGSMAHSTGKTLVNTVLSMDKEDVATFEKMRDLGVEFDVRKVPNDSKKDLFDLINKANVK

SEQ ID NO: 73769 - protein, 339 aa, Streptococcus pneumoniae
MKAVVVNPESTGVAIEEKVLRPLETGEALVEVEYCGVCHTDLHVAHGDFGQVPGRVLGHEGIGIVKEIAPDVKSLKVGDRVSVAWFFEGCGTCEYCTTGRETLCRTVKNAGYSVDGGMAEQCIVTADYAVKVPDGLDPAQASSITCAGVTTYKAIKEAKVEPGQWVVLYGAGGLGNLAVQYAKKVFNAHVIAVDINNDKLALAKEVGADIVINGLEVEDVAGLIKEKTDGGAHSAVVTAVSKVAFNQAVDSIRAGGRVVAVGLPSEMMELSIVKTVLDGIQVIGSLVGTRKDLEEAFQFGAEGLVVPVVQKRPVEDAVAIFDEMEKGQIQGRMVLDFTH

SEQ ID NO: 73770 - protein, 270 aa, Streptococcus pneumoniae
MTKKIIAVDLDGTLLNSDSQISDFTKKTIKKVAEKGHQVIITTGRPYRMSKDFYRELGLDTPMINFNGSLTHLPDQVWDFEKCLTVDKKYLLDMVQRSEDIQADFIAGEYRKKFYITNPNEEIANPKLFGVEAFQPEDQFQPELVTKNPNCILLQTRASDKYALAKDMNAFYQHQLSINTWGGPLNILECTPKGVNKAFALDYLLKIMNRDKKDLIAFGDEHNDTEMLAFAGKGYAMKNANPELLPYADEQISLTNDQDGVAKTLQDLFL

SEQ ID NO: 73771 - protein, 314 aa, Streptococcus pneumoniae
MSSKANHAKTVICGIINVTPDSFSDGGQFFALEQALQQARKLIAEGASMLDIGGESTRPGSSYVEIEEEIQRVVPVIKAIRKESDVLISIDTWKSQVAEAALAAGADLVNDITGLMGDEKMPHVVAEARAQVVIMFNPVMARPQHPSSLIFPHFGFGQAFTEEELADFETLPIEELMEAFFERALARAAEAGIAPENILLDPGIGFGLTKKENLLLLRDLDKLHQKGYPIFLGVSRKRFVINILEENGFEVNPETELGFRNRDTASAHVTSIAARQGVEVVRVHDVASHRMAVEIASAIRLADEAENLDLKQYK

SEQ ID NO: 73772 - protein, 270 aa, Streptococcus pneumoniae
MDQLQIKDLEMFAYHGLFPSEKELGQKFIVSAILSYDMTKAATDLDLTASVHYGELCQQWTTWFQETSEDLIETVAYKLVERTFESYPLVQEMKLELKKPWAPVHLSLDTCSVTIHRRKQRAFIALGSNMGDKQANLKQAIDKLRARGIHILKESSVLATEPWGGVEQDSFANQVVEVETWLPAQDLLETLLAIESELGRVREVHWGPRLIDLDLLFVEDQILYTDDLILPHPYIAERLFVLESLQEIAPHFIHPILKQPIRNLYDALKK

SEQ ID NO: 73773 - protein, 148 aa, Streptococcus pneumoniae
MNKTTFMAKPGQVERKWYVVDATDVPLGRLSAVVASVLRGKNKPTFTPHTDTGDFVIVINAEKVKLTGKKATDKIYYTHSNHPGGLKQISAGELRSKNAVRLIEKSVKGMLPHNTLGRAQGMKLKVFVGAEHTHAAQQPEVLDISGLI

SEQ ID NO: 73774 - protein, 130 aa, Streptococcus pneumoniae
MSQAQYAGTGRRKNAVARVRLVPGTGKITVNKKDVEEYIPHADLRLVINQPFAVTSTVGSYDVFVNVVGGGYAGQSGAIRHGIARALLQVDPDFRDSLKRAGLLTRDSRKVERKKPGLKKARKASQFSKR

SEQ ID NO: 73775 - protein, 478 aa, Streptococcus pneumoniae
MTTFKDGFLWGGAVAAHQLEGGWQEGGKGISVADVMTAGRHGVAREITLGVLEGKYYPNHEAIDFYHRYKEDIALFAEMGFKCFRTSIAWTRIFPKGDELEPNEEGLQFYDNLFDECLKNGIEPVITLSHFEMPYHLVTEYGGWKNRKLIDFFARFAEVVFKRYKDKVKYWMTFNEINNQANYQEDFAPFTNSGIVYEEGDNREAIMYQAAHYELVASARAVKIGHEINPDFQIGCMIAMCPIYPVTCNPKDILMAMKAMQKRYYFADVHVLGKYPEHIFKYWERKGISVDFTDQDKEDLLGGTVDYIGFSYYMSFAIDSHRENNPYFDYLETEDLVKNNYVKASEWEWQIDPEGLRYALNWFTDHYHLPLFIVENGFGAIDQVAADGMVHDDYRIEYLGAHIREMKKAVVEDGVDLMGYTPWGCIDLVSAGTGEMRKRYGFIYVDKDDNGKGSYNRSPKKSFGWYKEVISSNGESVE

SEQ ID NO: 73776 - protein, 209 aa, Streptococcus pneumoniae
MTKSDTIIELKKQKIVAVIRGNTKEEGLQASIACIKGGIKAIEIAYTNQYAGQIIKELVDLYQDDQSVCIGAGTVLDAVTARDAILAGANYVVSPSFHAETAKMCNLYSTPYIPGCITLTEITTALEAGSEIIKLFPGSALSPAYISAVKAPIPQVSVMVTGGVDLNNIPQWFAAGADAVGIGGELNKLASQGNFDRISEIAQQYVTLR

SEQ ID NO: 73777 - protein, 271 aa, Streptococcus pneumoniae
MTNTSFSIEQFSLKGKIALITGASYGIGFAIAKSYAEAGATIVFNDINQDLVNKGIEAYREVGIEAHGYVCDVTDEDGIQAMVKQIEQEVGVIDILVNNAGIIRRVPMCEMSAADFRKVIDIDLNAPFIVSKAVIPSMIKKGHGKIINICSMMSELGRETVSAYAAAKGGLKMLTRNIASEYGGANIQCNGIGPGYIATPQTAPLRELQEDGSRHPFDQFIIAKTPAARWGNPEDLMGPAVFLASDASNFVNGHILYVDGGILAYIGKQPE

SEQ ID NO: 73778 - protein, 316 aa, Streptococcus pneumoniae
MTKEFHHVTVLLHETIDMLDVKPEGIYVDATLGGAGHSEYLLSKLSEKGHLYAFDQDQNAIDNAQKRLAPYIEKGMVTFIKDNFRHLQARLREAGVQEIDGICYDLGVSSPQLDQRERGFSYKKDAPLDMRMNQDASLTAYEVVNHYDYHDLVRIFFKYGEDKFSKQIARKIEQAREVKPIETTTELAEIIKLVKPAKELKKKGHPAKQIFQAIRIEVNDELGAADESIQQAMDMLALDGRISVITFHSLEDRLTKQLFKEASTVEVPKGLPFIPDDLKPKMELVSRKPILPSAEELEANNRSHSAKLRVVRKIHK

SEQ ID NO: 73779 - protein, 105 aa, Streptococcus pneumoniae
MAEKMEKTGQILQMQLKRFSRVEKAFYFSIAVTTLIVAISIIFMQTKLLQVQNDLTKINAQIEEKKTELDDAKQEVNELLRAERLKEIANSHDLQLNNENIRIAE

SEQ ID NO: 73780 - protein, 750 aa, Streptococcus pneumoniae
MKWTKRVIRYATKNRKSPAENRRRVGKSLSLLSVFVFAIFLVNFAVIIGTGTRFGTDLAKEAKKVHQTTRTVPAKRGTIYDRNGVPIAEDATSYNVYAVIDENYKSATGKILYVEKTQFNKVAEVFHKYLDMEESYVREQLSQPNLKQVSFGAKGNGITYANMMSIKKELEAAEVKGIDFTTSPNRSYPNGQFASSFIGLAQLHENEDGSKSLLGTSGMESSLNSILAGTDGIITYEKDRLGNIVPGTEQVSQRTMDGKDVYTTISSPLQSFMETQMDAFQEKVKGKYMTATLVSAKTGEILATTQRPTFDADTKEGITEDFVWRDILYQSNYEPGSTMKVMMLAAAIDNNTFPGGEVFNSSELKIADATIRDWDVNEGLTGGRMMTFSQGFAHSSNVGMTLLEQKMGDATWLDYLNRFKFGVPTRFGLTDEYAGQLPADNIVNIAQSSFGQGISVTQTQMIRAFTAIANDGVMLEPKFISAIYDPNDQTARKSQKEIVGNPVSKDAASLTRTNMVLVGTDPVYGTMYNHSTGKPTVTVPGQNVALKSGTAQIADEKNGGYLVGLTDYIFSAVSMSPAENPDFILYVTVQQPEHYSGIQLGEFANPILERASAMKDSLNLQTTAKALEQVSQQSPYPMPSVKDISPGDLAEELRRNLVQPIVVGTGTKIKNSSAEEGKNLAPNQQVLILSDKAEEVPDMYGWTKETAETLAKWLNIELEFQGSGSTVQKQDVRANTAIKDIKKITLTLGD

SEQ ID NO: 73781 - protein, 326 aa, Streptococcus pneumoniae
MFISISAGIVTFLLTLVGIPAFIQFYRKAQITGQQMHEDVKQHQAKAGTPTMGGLVFLITSVLVAFFFALFSSQFSNNVGMILFILVLYGLVGFLDDFLKVFRKINEGLNPKQKLALQLLGGVIFYLFYERGGDILSVFGYPVHLGFFYIFFALFWLVGFSNAVNLTDGVDGLASISVVISLFAYGVIAYVQGQMDILLVILAMIGGLLGFFIFNHKPAKVFMGDVGSLALGGMLAAISMALHQEWTLLIIGIVYVFETTSVMMQVSYFKLTGGKRIFRMTPVHHHFELGGLSGKGNPWSEWKVDFFFWGVGLLASLLTLAILYLM

SEQ ID NO: 73782 - protein, 701 aa, Streptococcus pneumoniae
MNNNFNNFNNMDDLFNQLMGGMRGYSSENRRYLINGREVTPEEFAYYRATGQLPGNAESDVQMQQQASGMKQDGVLAKLGRNLTAEAREGKLDPVIGRNKEIQEASEILSRRTKNNPVLVGDAGVGKTAVVEGLAQAIVNGDVPAAIKNKEIVSIDISGLEAGTQYRGSFEENVQNLVNEVKEAGNIILFFDEIHQILGAGSTGGDSGSKGLADILKPALSRGELTVIGATTQDEYRNTILKNAALARRFNEVKVNAPSAENTFKILQGIRDLYQQHHNVILPDEVLKAAVDYSVQYIPQRSLPDKAIDLVDVTAAHLAAQHPVTDVHAVEREIETEKDKQEKAVEAEDFEAALNYKTRIAELERKIENHTEDMKVTASVNDVAESVERMTGIPVSQMGASDIERLKDMAHRLQDKVIGQDKAVEVVARAICRNRAGFDEGNRPIGNFLFVGSTGVGKTELAKQLALDMFGTQDAIIRLDMSEYSDRTAVSKLIGTTAGYVGYDDNSNTLTERVRRNPYSIILLDEIEKADPQVITLLLQVLDDGRLTDGQGNTVNFKNTVIIATSNAGFGYEANLTEDADKPELMDRLKPFFRPEFLNRFNAVIEFSHLTKEDLSKIVDLMLAEVNQTLAKKDIDLVVSQAAKDYITEEGYDEVMGVRPLRRVVEQEIRDKVTDFHLDHLDAKHLEADMEDGVLVIREKV

SEQ ID NO: 73783 - protein, 535 aa, Streptococcus pneumoniae
MQEKWWHNAVVYQVYPKSFMDSNEDGVGDLPGITSKLDYLAKLGITAIWLSPVYDSPMDDNGYDIADYQAIAAIFGTMEDMDQLIAEAKKRDIRIIMDLVVNHTSDEHAWFVEACENPNSPERDYYIWRDEPNDLDSIFSGSAWEYDEKSGQYYLHFFSKKQPDLNWENEKLRQKIYEMMDFWIDKGIGGFRMDVIDMIGKIPDEKVVNNGPMLHPYLKEMNQATFGDKDLLTVGETWGATPEIAKLYSDPKGQELSMVFQFEHIGLQYQEGQPKWHYQKELNIAKLKEIFNKWQTELGVEDGWNSLFWNNHDLPRIVSIWGNDQEYREKSAKAFAILLHLMRGTPYIYQGEEIGMTNYPFETLDQVEDIESLNYAREALEKGVPIEEIMDSIRVIGRDNARTPMQWDESKNAGFSTGQPWLAVNPNYEMINVQEALANPDSIFYTYQKLVQIRKENSWLIRADFELLDTADKVFAYIRKDGDRRFLVVANLSNEEQDLTVEGNVKSVLIENTLAQEVFEKQILVPWDAFCVELL

SEQ ID NO: 73784 - protein, 412 aa, Streptococcus pneumoniae
MKIAVAGTGYVGLSIAVLLSQQHQVMAVDIIPEKVELINQRKSPIQDDYIEKYLAKKDLNLVATLDAKEAYQDADFVVIAAPTNYDPKKNFFDTSAVESVIETALKYNPDAIMVIKSTVPVGYTESARKKFQTENILFSPEFLRESKALYDNLYPSRIILGTDKNNERLVSAAETFARLLQEGALKENIDTLYMGFTEAEAVKLFANTYLALRVSYFNELDTYSEMKGLDTQAIIDGVGLDPRIGSHYNNPSFGYGGYCLPKDTKQLLANYEDIPEELIGAIVRSNSTRKDFIADQVLKMVDYYDYSAHNIFDERVEKDIIIGIYRLTMKSNSDNFRQSSIQGIMKRIKAKGVRVVIYEPTLESGSTFFGSSVINDLEEFKRLSNAIVANRYDNSLEDVKEKVYTRDIFERD

SEQ ID NO: 73785 - protein, 201 aa, Streptococcus pneumoniae
MLEAVHTEKQWERSATELPPFIIKRLPVRLTFDNNYFNDRYQVIPIGGYNVIIENILKDVEVGLGVDCFDYREELEASANKVAFTGMIDQYFDYKHGELEYRSLRFKHEVLDEENHQGNAVVNYTDREIPYTRIIEHKKFEYGLQPKTVITHEYPADWKRGDEPYYPINDEKNNAIFSKYHEEASQNDKVIFCGRLADYKY

SEQ ID NO: 73786 - protein, 719 aa, Streptococcus pneumoniae
MNKPTILRLIKYLSISFLSLVIAAIVLGGGVFFYYVSKAPSLSESKLVATTSSKIYDNKNQLIADLGSERRVNAQANDIPTDLVKAIVSIEDHRFFDHRGIDTIRILGAFLRNLQSNSLQGGSALTQQLIKLTYFSTSTSDQTISRKAQEAWLAIQLEQKATKQEILTYYINKVYMSNGNYGMQTAAQNYYGKDLNNLSLPQLALLAGMPQAPNQYDPYSHPEAAQDRRNLVLSEMKNQGYISAEQYEKAVNTPITDGLQSLKSASNYPAYMDNYLKEVINQVEEETGYNLLTTGMDVYTNVDQEAQKHLWDIYNTDEYVAYPDDELQVASTIVDVSNGKVIAQLGARHQSSNVSFGINQAVETNRDWGSTMKPITDYAPALEYGVYESTATIVHDEPYNYPGTNTPVYNWDRGYFGNITLQYALQQSRNVPAVETLNKVGLNRAKTFLNGLGIDYPSIHYSNAISSNTTESDKKYGASSEKMAAAYAAFANGGTYYKPMYIHKVVFSDGSEKEFSNVGTRAMKETTAYMMTDMMKTVLSYGTGRNAYLAWLPQAGKTGTSNYTDEEIENHIKTSQFVAPDELFAGYTRKYSMAVWTGYSNRLTPLVGNGLTVAAKVYRSMMTYLSEGSNPEDWNIPEGLYRNGEFVFKNGARSTWSSPAPQQPPSTESSSSSSDSSTSQSSSTTPSTNNSTTTNPNNNTQQSNTTPDQQNQNPQPAQP

SEQ ID NO: 73787 - protein, 113 aa, Streptococcus pneumoniae
MERDMASIIFSAKDIFEQEFGREVRGYNKVEVDEFLDDVIKDYETYAALVKSLRQEIADLKEELTRKPKPSPVQAEPLEAAITSSMTNFDILKRLNRLEKEVFGKQILDNSDF

SEQ ID NO: 73788 - protein, 474 aa, Streptococcus pneumoniae
MTKANFGVVGMAVMGRNLALNIESRGYTVAIYNRSKEKTEDVIACHPEKNFVPSYDVESFVNSIEKPRRIMLMVQAGPGTDATIQALLPHLDKGDILIDGGNTFYKDTIRRNEELANSGINFIGTGVSGGEKGALEGPSIMPGGQKEAYELVADVLEEISAKAPEDGKPCVTYIGPDGAGHYVKMVHNGIEYGDMQLIAESYDLMQHLLGLSAEDMAEIFTEWNKGELDSYLIEITADILSRKDDEGQDGPIVDYILDAAGNKGTGKWTSQSSLDLGVPLSLITESVFARYISTYKEERVHASKVLPKPAAFNFEGDKAELIEKIRQALYFSKIISYAQGFAQLRVASKENNWNLPFADIASIWRDGCIIRSRFLQKITDAYNRDADLANLLLDEYFLDVTAKYQQAVRDIVALAVQAGVPVPTFSAAITYFDSYRSADLPANLIQAQRDYFGAHTYQRKDKEGTFHYSWYDEK

SEQ ID NO: 73789 - protein, 344 aa, Streptococcus pneumoniae
MYHSLGNQFDTRTRTSRKIRRERSCSDMDREPVTVRSYANIAIIKYWGKKKEKEMVPATSSISLTLENMYTETTLSPLPANVTADEFYINGQLQNEVEHAKMSKIIDRYRPAGEGFVRIDTQNNMPTAAGLSSSSSGLSALVKACNAYFKLGLDRSQLAQEAKFASGSSSRSFYGPLGAWDKDSGEIYPVETDLKLAMIMLVLEDKKKPISSRDGMKLCVETSTTFDDWVRQSEKDYQDMLIYLKENDFAKIGELTEKNALAMHATTKTASPAFSYLTDASYEAMDFVRQLREKGEACYFTMDAGPNVKVFCQEKDLEHLSEIFGQRYRLIVSKTKDLSQDDCC

SEQ ID NO: 73790 - protein, 335 aa, Streptococcus pneumoniae
MIAVKTCGKLYWAGEYAILEPGQLALIKDIPIYMRAEIAFSDSYRIYSDMFDFAVDLRPNPDYSLIQETIALMGDFLAVRGQNLRPFSLAIYGKMEREGKKFGLGSSGSVVVLVVKALLALYNLSVDQNLLFKLTSAVLLKRGDNGSMGDLACIAAEDLVLYQSFDRQKVAAWLEEENLATVLERDWGFSISQVKPTLECDFLVGWTKEVAVSSHMVQQIKQNINQNFLTSSKETVVSLVEALEQGKSEKIIEQVEVASKLLEGLSTDIYTPLLRQLKEASQDLQAVAKSSGAGGGDCGIALSFDAQSTKTLKNRWADLGIELLYQERIGHDDKS

SEQ ID NO: 73791 - protein, 336 aa, Streptococcus pneumoniae
MTTNRKDEHILYALEQKSSYNSFDEVELIHSSLPLYNLDEIDLSTEFAGRKWDFPFYINAMTGGSNKGREINQKLAQVAETCGILFVTGSYSAALKNPTDDSFSVKSSHPNLLLGTNIGLDKPVELGLQTVEEMNPVLLQVHVNVMQELLMPEGERKFRSWQSHLADYSKQIPVPIVLKEVGFGMDAKTIERAYEFGVRTVDLSGRGGTSFAYIENRRSGQRDYLNQWGQSTMQALLNAQEWKDKVELLVSGGVRNPLDMIKCLVFGAKAVGLSRTVLELVETYTVEEVIGIVQGWKADLRLIMCSLNCATIADLQKVDYLLYGKLKEANDQMKKA

SEQ ID NO: 73792 - protein, 331 aa, Streptococcus pneumoniae
MKKQAYVIIALTSFLFVFFFSHSLLEILDFDWSIFLHDVEKTEKFVFLLLVFSMSITCLLALFWRGIEELSLRKMQANLKRLLAGQEVVQVVDPDLDASFKSLSGKLNLLTEALQKAENQSLAQEEEIIEKERKRIARDLHDTVSQELFAAHMILSGISQQALKLDREKMQTQLQSVTAILETAQKDLRVLLLHLRPVELEQKSLIEGIQILLKELEDKSDLRVSLKQNMTKLPKKIEEHIFRILQELISNTLRHAQASCLDVYLYQTDVELQLKVVDNGIGFQLGSLDDLSYGLRNIKERVEDMAGTVQLLTAPKQGLAVDIRIPLLDKE

SEQ ID NO: 73793 - protein, 61 aa, Streptococcus pneumoniae
MVESFFGILKSEMFYGYEKTFKSLNQLEQAIIDYIDYYNNKRIKVKLKGLSPVQYRTKSFG

SEQ ID NO: 73794 - protein, 145 aa, Streptococcus pneumoniae
MKLEKHLIKLNKQFSNKEEAICYCGQVLYEGGYVNEDYIEAMIERDKELSVYMGNFIAIPHGTDAAKNDVLKSGITVVQVPRGVDFGNVSNPQVATVLFGIAGIGNEHLEIIQKISIFCADVDNVLKLADAQSKEEVLRLFDAVE

SEQ ID NO: 73795 - protein, 378 aa, Streptococcus pneumoniae
MKHSVHFGAGNIGRGFIGEILFKNGFHIDFVDVNNQIIHALNEKGKYEIEIAQKGQSRIEVTNVAGINSKEHPEQVIEAIQKTDIITTAIGPNILPFIAELLAKGIEARRVAGNTQVLDVMACENMIGGSQFLYQEVKKYLSPEGLTFADNYIGFPNAAVDRIVPAQSHEDSLFVVVEPFNEWVVETKRLKNPDLRLKDVHYEEDLEPFIERKLFSVNSGHATSAYIGAHYGAKTILEALQNPNIKSRIESVLAEIRSLLIAKWNFDKKELENYHKVIIERFENPFIVDEVSRVARTPIRKLGYNERFIRPIRELKELSLSYKNLLKTVGYAFDYRDVNDEESIRLGELLAKQLVKDVVIQVTGLDDQELIEQIVEYI

SEQ ID NO: 73796 - protein, 788 aa, Streptococcus pneumoniae
MEVYFSGTIERIIFENPSNFYRILLLEIDDTDAEDFDDFEIIVTGTMADVIEGEDYTFWGQIVQHSKYGEQLQISRYDRAKPTSKGLVKYFSSSHFKGIGLKTAQKIVDTYGENTIDEILQHPEKLEGIAGLSAKNREAFVSTLRLNYGTEMVLAKLANYGIPNKLAFQIQDFYKEETLDVVENYPYQLVEDIKGLGFTIADQLAEELGIESQAPERFRAGLVHSLFQACMETGDTYVEARDLLEQTLTLLESSRPVELDPSQVAQELSYLIEEDKVQQIDTKIFDNSLFFAEEGIRSHLIRILEKGEQKRQDLETIQKHITTVEQELGIEYDNIQKQAICDAIQNKVFILTGGPGTGKTTVINGIIAVYALLEGLDFRKKSNLPILLAAPTGRAARRMNELTGLPSATIHRHLGMTGDDDTSHLEDYLDAEFIIVDEFSMVDTWLANQLFSNISSNSKILIVGDSDQLPSVSPGQVLADLLHIPLIPQTRLEKIYRQSKESTIVTLASQIRQGILPADFTQKKADRSYFEIASGHIPATIEKILGAALRNGIPARDIQVLAPMYRGTAGIDAINQLMQDLLNPPQKDQLSFEAPQCHYRKRDKVIHLVNDAEINVFNGDLGAITDLIPGKYTESKQDEIVIDFDSNEVSYPRNEWYKIRLAYAMSIHKSQGSEFPVVILPITSASRRMLERNLIYTAITRAKSKLILLGELQAFDYATQHIGTARKTYLIERFSDLLENVEEKQQAVSETVTSSASEQSYILTEENWDRIPAMIGITDTDLKEIFGK

SEQ ID NO: 73797 - protein, 204 aa, Streptococcus pneumoniae
MNLFKNFLKEWGLFLLILSLLALSRIFFWSNVRVEGHSMDPTLADGEILFVVKHLPIDRFDIVVAHEEDGNKDIVKRVIGMPGDTIRYENDKLYINDKETDEPYLADYIKRFKDDKLQSTYSGKGFEGNKGTFFRSIAQKAQAFTVDVNYNTNFSFTVPEGEYLLLGDDRLVSSDSRHVGTFKAKDITGEAKFRFWPITRIGTF

SEQ ID NO: 73798 - protein, 778 aa, Streptococcus pneumoniae
MNKKILETLEFDKVKALFEPHLLTEQGLEQLRQLAPTAKADKIKQAFAEMKEMQALFVEQPHFTILSTKEIAGVCKRLEMGADLNIEEFLLLKRVLLASRELQSFYANLENVSLEELAFWFEKLHDFPQLQGNLQAFNDAGFIENFASEELARIRRKIHDSESQVRDVLQDLLKQKAQMLTEGIVASRNGRQVLPVKNTYRNKIAGVVHDISASGNTVYIEPREVVKLSEEIASLRADERYEMLRILQEISERVRPHAAEIANDAWIIGHLDLIRAKVRFIQERQAVVPQLSENQEIQLLHVCHPLVKNAVANDVYFGQDLTAIVITGPNTGGKTIMLKTLGLTQVMAQSGLPILADKGSRVGIFEEIFADIGDEQSIEQSLSTFSSHMTNIVDILGKVNQHSLLLLDELGAGTDPQEGAALAMAILEDLRLRQIKTMATTHYPELKAYGIETAFVQNASMEFDTATLRPTYRFMQGVPGRSNAFEIAKRLGLSEVIVGDASQQIDQDNDVNRIIEQLEEQTLESRKRLDNIREVEQENLKMNRALKKLYNELNREKETELNKAREQAAEIVDMALSESDQILKNLHSKSQLKPHEIIEAKAKLKKLAPEKVDLSKNKVLQKAKKKRAPKVGDDIVVLSYGQRGTLTSQLKDGRWEAQVGLIKMTLEEKEFDLVQAQQEKAVKKKQVNVVKRTSGRGPQARLDLRGKRYEEAMNELDTFIDQALLNNMAQVDIIHGIGTGVIREGVTKYLQRNKHVKSFGYAPQNAGGSGATIVTFKG

SEQ ID NO: 73799 - protein, 445 aa, Streptococcus pneumoniae
MEPWPCHSNVLSGCFFHKGVLMLDIKRIRTDFEAVAEKLATRGVDAAVLNEMKEIDAKRRNILVKVETLKAERNTVSAEIAQAKRNKENTDDKIAAMQNLSAEVKALDAELAEIDAKLTEFTTTLPNIPADSVPVGADEDDNVEVRRWGTPREFDFEPKAHWDLGEDLGILDWERGGKVTGARFLFYKGLGARLERAIYNFMLDEHGKEGYTEVITPYIVNHDSMFGTGQYPKFKEDTFELSDTNFVLIPTAEVPLTNYYRDEILDGKDLPIYFTAMSPSFRSEAGSAGRDTRGLIRLHQFHKVEMVKFAKPEESYEELEKMTANAENILQKLNLPYRVVALSTGDMGFSATKTYDLEVWIPAQNNYREISSCSNTEDFQARRAQIRYRDEADGKVKLLHTLNGSGLAVGRTVAAILENYQNEDGSVTIPEALRPYMGGAEVIKP

SEQ ID NO: 73800 - protein, 454 aa, Streptococcus pneumoniae
MKVVKFGGSSLASASQLEKVLNIVKSDSERRFVVVSAPGKRNAEDTKVTDALIKYYRDYVAGNDISKSQSWIIDRYAAMVSELGLKPAVLEKISKSIHALATLPIEENEFLYDTFLAAGENNNAKLIAAYFNQNGIDARYMHPREAGIVVTSEPGHARIIPSSYDKIEELTNTNEVLVIPGFFGVTKENQICTFSRGGSDITGSIIAAGVKADLYENFTDVDGIFAAHPGIIHQPHSIPELTYREMRELAYAGFSVLHDEALLPAYRGKIPLVIKNTNNPDHPGTRIVLKHSNDEFPVVGIAGDSGFVSINMSKYLMNREVGFGRKVLQILEELNIGWEHMPTGIDDLSIILRSRQLTPIKEEEILRQLVQKAKVDHAEIEHDLSIIMIVGEKMKSHIGVTATATRALSENKINIQMMSQGSSEVSIMFVVNKDQEKAAIKALYNAFFGESKED

SEQ ID NO: 73801 - protein, 261 aa, Streptococcus pneumoniae
MEHIIYQLEEDLAILTLNRPEVANGFHIPMCEEILEALTLAEENPAVHFILINANGKVFSVGGDLVEMKRAVDEDDIPSLTKIAELVNTISYKIKQIAKPVLMEVDGAVAGAAANMAVAADFCLATDKAKFIQAFVGVGLAPDAGGIHLLSRSIGVTRAAQLAMTGEALTAEKALEWGLVYRVSEAEKLEKTREQLLKKLRRASSNSYAAIKKLVWESQFKDWQGYATLELNLQKSLAQTEDFKEGVRAHSERRRPKFIGK

SEQ ID NO: 73802 - protein, 324 aa, Streptococcus pneumoniae
MAFAKISQVAHYVPEQVVTNHDLAQIMDTNDEWISSRTGIRQRHISRTESTSDLATEVAKKLMAKAGITGEELDFIILATITPDSMMPSTAARVQANIGANKAFAFDLTAACSGFVFALSTAEKFIASGRFQKGLVIGSETLSKAVDWSDRSTAVLFGDGAGGVLLEASEQEHFLAESLNSDGSRSECLTYGHSGLHSPFSDQESADSFLKMDGRTVFDFAIRDVAKSIKQTIDESPIEVTDLDYLLLHQANDRILDKMARKIGVDRAKLPANMMEYGNTSAASIPILLSECVEQGLIPLDGSQTVLLSGFGGGLTWGTLILTI

SEQ ID NO: 73803 - protein, 74 aa, Streptococcus pneumoniae
MAVFEKVQEIIVEELGKDASEVTLESTFDDLDADSLDLFQVISEIEDAFDIQIEAENDLKTVGDLVAYVEEQAK

SEQ ID NO: 73804 - protein, 324 aa, Streptococcus pneumoniae
MKTRITELLKIDYPIFQGGMAWVADGDLAGAVSKAGGLGIIGGGNAPKEVVKANIDKIKSLTDKPFGVNIMLLSPFVEDIVDLVIEEGVKVVTTGAGNPSKYMERFHEAGIIVIPVVPSVALAKRMEKIGADAVIAEGMEAGGHIGKLTTMTLVRQVATAVSIPVIAAGGIADGEGAAAGFMLGAEAVQVGTRFVVAKESNAHPNYKEKILKARDIDTTISAQHFGHAVRAIKNQLTRDFELAEKDAFKQEDPDLEIFEQMGAGALAKAVVHGDVEGGSVMAGQIAGLVSKEETAEEILKDLYYGAAKKIQEEASRWTGVVRND

SEQ ID NO: 73805 - protein, 306 aa, Streptococcus pneumoniae
MTKTAFLFAGQGAQYLGMGRDFYDQYPIVKETIDRASQVLGYDLRYLIDTEEDKLNQTRYTQPAILATSVAIYRLLQEKGYQPDMVAGLSLGEYSALVASGALDFEDAVALVAKRGAYMEEAAPADSGKMVAVLNTPVEVIEEACQKASELGVVTPANYNTPAQIVIAGEVVAVDRAVELLQEAGAKRLIPLKVSGPFHTSLLEPASQKLAETLAQVSFSDFTCPLVGNTEAAVMQKEDIAQLLTRQVKEPVRFYESIGVMQEAGISNFIEIGPGKVLSGFVKKIDQTAHLAHVEDQASLVALLEK

SEQ ID NO: 73806 - protein, 243 aa, Streptococcus pneumoniae
MKLEHKNIFITGSSRGIGLAIAHKFAQAGANIVLNSRGAISEELLAEFSNYGIKVVPISGDVSDFADAKRMIDQAIAELGSVDVLVNNAGITQDTLMLKMTEADFEKVLKVNLTGAFNMTQSVLKPMMKAREGAIINMSSVVGLMGNIGQANYAASKAGLIGFTKSVAREVASRNIRVNVIAPGMIESDMTAILSDKIKEATLAQIPMKEFGQAEQVADLTVFLAGQDYLTGQVIAIDGGLSM

SEQ ID NO: 73807 - protein, 414 aa, Streptococcus pneumoniae
MKRMKLNRVVVTGYGVTSPIGNTPEEFWNSLATGKIGIGGITKFDHSDFDVHNAAEIQDFPFDKYFVKKDTNRFDNYSLYALYAAQEAVNHANLDVEALNRDRFGVIVASGIGGIKEIEDQVLRLHEKGPKRVKPMTLPKALPNMASGNVAMRFGANGVCKSINTACSSSNDAIGDAFRSIKFGFQDVMLVGGTEASITPFAIAGFQALTALSTTEDPTRASIPFDKDRNGFVMGEGSGMLVLESLEHAEKRGATILAEVVGYGNTCDAYHMTSPHPEGQGAIKAIKLALEEAEISPEQVAYVNAHGTSTPANEKGESGAIVAVLGKEVPVSSTKSFTGHLLGAAGAVEAIVTIEAMRHNFVPMTAGTSEVSDYIEANVVYGQGLEKEIPYAISNTFGFGGHNAVLAFKRWENR

SEQ ID NO: 73808 - protein, 161 aa, Streptococcus pneumoniae
MNLNDIKDLMTQFDQSSLREFSYKNGTDELQFSKNEARPVPEVATQVAPAPVLATPSPVAPTSAPAETVAEEVPAPAEASVATEGNLVESPLVGVVYLAAGPDKPAFVTVGDSVKKGQTLVIIEAMKVMNEIPAPKDGVVTEILVSNEEMVEFGKGLVRIK

SEQ ID NO: 73809 - protein, 140 aa, Streptococcus pneumoniae
MIDIQGIKEALPHRYPMLLVDRVLEVSEDTIVAIKNVTINEPFFNGHFPQYPVMPGVLIMEALAQTAGVLELSKPENKGKLVFYAGMDKVKFKKQVVPGDQLVMTATFVKRRGTIAVVEAKAEVDGKLAASGILTFAIGN

SEQ ID NO: 73810 - protein, 455 aa, Streptococcus pneumoniae
MFRKILIANRGEIAVRIIRAARELGIATVAVYSTADKEALHTLLADEAVCIGPGKATESYLNINAVLSAAVLTEAEAIHPGFGFLSENSKFATMCEEVGIKFIGPSGHVMDMMGDKINARAQMIKAGVPVIPGSDGEVHNSEEALIVAEKIGYPVMLKASAGGGGKGIRKVEKPDDLVSAFETASSEAKANYGNGAMYIERVIYPARHIEVQILGDEHGHVIHLGERDCSLQRNNQKVLEESPSIAIGKTLRHEIGAAAVRAAEFVGYENAGTIEFLLDEASRNFYFMEMNTRVQVEHPVTEFVSGVDIVKEQICIAAGQPLSVKQEDIVLRGHAIECRINAENPAFNFAPSPGKITNLYLPSGGVGLRVDSAVYPGYTIPPYYDSMIAKIIVHGENRFDALMKMQRALYELEIEGVQTNADFQLDLISDRNVIAGDYDTSFLMETFLPKYQEKE

SEQ ID NO: 73811 - protein, 288 aa, Streptococcus pneumoniae
MALFSKKDKYIRINPNRSVREKPQAKPEVPDELFSQCPGCKHTIYQKDLGSERICPHCSYTFRISAQERLALTIDMGTFKELFTGIESKDPLHFPGYQKKLASMREKTGLHEAVVTGTALIKGQTVALGIMDSNFIMASMGTVVGEKITRLFEYATVEKLPVVLFTASGGARMQEGIMSLMQMAKISAAVKRHSNAGLFYLTILTDPTTGGVTASFAMEGDIILAEPQSLVGFAGRRVIENTVRESLPEDFQKAEFLLEHGFVDAIVKRRDLPDTIASLVRLHGGSPR

SEQ ID NO: 73812 - protein, 255 aa, Streptococcus pneumoniae
MNIAKIVREAREQSRLTTLDFATGIFDEFIQLHGDRSFRDDGAVVGGIGWLGDQAVTVVGIQKGKSLQDNLKRNFGQPHPEGYRKALRLMKQAEKFGRPVVTFINTAGAYPGVGAEERGQGEAIARNLMEMSDLKVPIIAIIIGEGGSGGALALAVADRVWMLENSIYAILSPEGFASILWKDGTRAMEAAELMKITSHELLEMDVVDKVISEVGLSSKELIKSVKKELQTELARLSQKPLEELLEERYQRFRKY

SEQ ID NO: 73813 - protein, 146 aa, Streptococcus pneumoniae
MTRTSSMTSPLLESRRQLRKCAFQALMSLEFGTDVETACRFAYTHDREDTDVQLPAFLIDLVSGVQAKKEELDKQITQHLKAGWTIERLTLVERNLLRLGVFEITSFDTPQLVAVNEAIELAKDFSDQKSARFINGLLSQFVTEEQ

SEQ ID NO: 73814 - protein, 480 aa, Streptococcus pneumoniae
MNFETVIGLEVHVELNTNSKIFSPTSAHFGNDQNANTNVIDWSFPGVLPVLNKGVVDAGIKAALALNMDIHKKMHFDRKNYFYPDNPKAYQISQFDEPIGYNGWIEVELEDGTTKKIGIERAHLEEDAGKNTHGTDGYSYVDLNRQGVPLIEIVSEADMRSPEEAYAYLTALKEVIQYAGISDVKMEEGSMRVDANISLRPYGQEKFGTKTELKNLNSFSNVRKGLEYEVQRQAEILRSGGQIRQETRRYDEANKATILMRVKEGAADYRYFPEPDLPLFEISDEWIEEMRTELPEFPKERRARYVSDLGLSDYDASQLTANKVTSDFFEKAVALGGDAKQVSNWLQGEVAQFLNAEGKTLEQIELTPENLVEMIAIIEDGTISSKIAKKVFVHLAKNGGGAREYVEKAGMVQISDPAILIPIIHQVFADNEAAVADFKSGKRNADKAFTGFLMKATKGQANPQVALKLLAQELAKLKEN

SEQ ID NO: 73815 - protein, 488 aa, Streptococcus pneumoniae
MTFNNKTIEELHNLLVSKEISATELTQATLENIKSREEALNSFVTIAEEQALVQAKAIDEAGIDADNVLSGIPLAVKDNISTDGILTTAASKMLYNYEPIFDATAVANAKTKGMIVVGKTNMDEFAMGGSGETSHYGATKNAWDHSKVPGGSSSGSAAAVASGQVRLSLGSDTGGSIRQPAAFNGIVGLKPTYGTVSRFGLIAFGSSLDQIGPFAPTVKENALLLNAIASEDAKDSTSAPVRIADFTSKIGQDIKGMKIALPKEYLGEGIDPEVKETILNAAKHFEKLGAIVEEVSLPHSKYGVAVYYIIASSEASSNLQRFDGIRYGYRAEDATNLDEIYVNSRSQGFGEEVKRRIMLGTFSLSSGYYDAYYKKAGQVRTLIIQDFEKVFADYDLILGPTAPSVAYDLDSLNHDPVAMYLADLLTIPVNLAGLPGISIPAGFSQGLPVGLQLIGPKHSEETIYQVAAAFEATTGYHKQQPVIFGGDN

SEQ ID NO: 73816 - protein, 100 aa, Streptococcus pneumoniae
MKITQEEVTHVANLSKLRFSEEETAAFATTLSKIVDMVELLGEVDTTGVAPTTTMADRKTVLRPDVAEEGTDRDRLFKNVPEQDNYYIKVPAILDDGGDA

SEQ ID NO: 73817 - protein, 514 aa, Streptococcus pneumoniae
MNIQEEIKKRRTFAIISHPDAGKTTITEQLLYFGGEIREAGTVKGKKTGTFAKSDWMDIEKQRGISVTSSVMQFDYDGKRVNILDTPGHEDFSEDTYRTLMAVDAAVMVVDSAKGIEAQTKKLFEVVKHRGIPVFTFMNKLDRDGREPLDLLQELEEILGIASYPMNWPIGMGKAFEGLYDLYNQRLELYKGDERFASLEDGDKLFGSNPFYEQVKDDIELLNEAGNEFSEEAILAGELTPVFFGSALTNFGVQTFLEIFLKFAPEPHGHKKTDGEIVDPYDKDFSGFVFKIQANMDPRHRDRIAFVRIVSGEFERGMSVNLPRTGKGAKLSNVTQFMAESRENVINAVAGDIIGVYDTGTYQVGDTLTVGKNKFEFEPLPTFTPEIFMKVSAKNVMKQKSFHKGIEQLVQEGAVQLYKNYQTGEYMLGAVGQLQFEVFKHRMEGEYNAEVVMSPMGKKTVRWIKPEDLDERMSSSRNILAKDRFDQPVFLFENDFALRWFADKYPDVELEEKM

SEQ ID NO: 73818 - protein, 62 aa, Streptococcus pneumoniae
MAKVCYFTGRKTVSGNNRSHAMNQTKRAVKPNLQKVTVLIDGKPKKVWASARALKSGKVERV

SEQ ID NO: 73819 - protein, 566 aa, Streptococcus pneumoniae
MEKISLESPKTGSDLVLETLRDLGVDTIFGYPGGAVLPFYDAIYNFKGIRHILGRHEQGCLHEAEGYAKSTGKLGVAVVTSGPGATNAITGIADAMSDSVPLLVFTGQVARAGIGKDAFQEADIVGITMPITKYNYQVRETADIPRIITEAVHIATTGRPGPVVIDLPKDISALETDFIYSSEVNLPSYQPTLEPNDMQIKKILKQLSKAKKPVLLAGGGISYAEAATELNEFAERYQIPVVTSLLGQGTIATSHPLFLGMGGMHGSFAANIAMTEADFMISIGSRFDDRLTGNPKTFAKNAKVAHIDIDPAEIGKIISADIPVVGDAKKALQMLLAEPTVHNNTEKWIEKVTKDKNRVRSYDKKERVVQPQAVIERIGELTNGDAIVVTDVGQHQMWTAQYYPYQNERQLVTSDGLGTMGFGIPAAIGAKIANPDKEVVLFVGDGGFQMTNQELAILNIYKVPIKVVMLNNHSLGMVRQWQESFYEGRTSESVFDTLPDFQLMAQAYGIKNYKFDNPETLAQDLEVITEDVPMLIEVDISRKEQVLPMVPAGKSNHEMLGVQFHA

SEQ ID NO: 73820 - protein, 166 aa, Streptococcus pneumoniae
MRCWGCSSMRRMLTAKLQNRSGVLNRFTGVLSRRQVNIESISVGATEDPNVSRITIIIDVASHDEVEQIIKQLNRQIDVIRIRDITDKPHLEREVILVKMSAPAEKRAEILAIIQPFRATVVDVAPSSITIQMTGNAEKSEALLRVIRPYGIRNIARTGATGFTRD

SEQ ID NO: 73821 - protein, 340 aa, Streptococcus pneumoniae
MTVQMEYEKDVKVAALDGKKIAVIGYGSQGHAHAQNLRDSGRDVIIGVRPGKSFDKAKEDGFDTYTVAEATKLADVIMILAPDEIQQELYEAEIAPNLEAGNAVGFAHGFNIHFEFIKVPADVDVFMCAPKGPGHLVRRTYEEGFGVPALYAVYQDATGNAKNIAMDWCKGVGAARVGLLETTYKEETEEDLFGEQAVLCGGLTALIEAGFEVLTEAGYAPELAYFEVLHEMKLIVDLIYEGGFKKMRQSISNTAEYGDYVSGPRVITEQVKENMKAVLADIQNGKFANDFVNDYKAGRPKLTAYREQAANLEIEKVGAELRKAMPFVGKNDDDAFKIYN

SEQ ID NO: 73822 - protein, 311 aa, Streptococcus pneumoniae
MIQVEPGFKTGEEDTAIAIGLRKNDNRISQINASIETISKDDQVALMDRMIKEQPAEATTTEETSSSFFSQVAKILSENWQQLLRGAGITLLISIVGTIIGLIIGLAIGVFRTAPLSENKVIYGLQKLVGWVLNVYIEIFRGTPMIVQSMVIYYGTAQAFGINLDRTLAAIFIVSINTGAYMTEIVRGGILAVDKGQFEAATALGMTHNQTMRKIVLPQVVRNILPATGNEFVINIKDTSVLNVISVVELYFSGNTVATQTYQYFQTFTIIAVIYFVLTFTVTRILRFIERRMDMDTYTTGANQMQTEDLK

SEQ ID NO: 73823 - protein, 479 aa, Streptococcus pneumoniae
MNKSMIRYLLSKLLLIEAVLLLVPVAIAVYYRESSQVFTALFSTIGILVLLGGSGNLQKPKNQRIYAKEGVLIVALCWILWSFFGGLPFVFSGQIPSLIDAFFEISSGFTTTGASILNDVSVLSRSLLFWRSFTHLIGGMGVLVFALAIMDNAKNSHLEVMKAEVPGPVFGKVVSKLKNTAQILYLLYLALFSLFVIIYYLAGMPLYDSFVIAMGTAGTGGFTVYNDGIAHYGSSLITYLVSIGVLVFGVNFNLYYYLMLRRIKAFFGDEELRAYLVIVLVSTGLISLNTLYLYPGFSKSFEMTFFQVSNIITTTGFGYGDITNWPLFSQFILLFLMAIGGSAGSTAGGLKIIRGLILSKIAKNQILSILSPHRVLTLHVNQTVIDKDTQHKILKYFVIYAMILLALIFIVSLDSNDFLVVTSAVFSCFNNIGPILGTTSSFSIFSPISKILLSFAMIAGRLEIYPILLLFMKRTWSKR

SEQ ID NO: 73824 - protein, 449 aa, Streptococcus pneumoniae
MKIILVGGGKVGFALCRSLVAEKHDVLLIEQDEAVLNHIVSRFDIIGILGNGADFAILEQASVQDCDIFIALTEHDEVNMIAAVLAKKMGAKETIVRVRNPEYSNSYFKEKNILGFSLIVNPELLAARAIANIIDFPNALSVERFAGGRVSLMEFVVKSTSGLCQMPISDFRKKFGNVIVCAIERDHQIIIPSGDMTVRDKDRIFVTGNRVDMILFHNYFKSRAVKSLLIVGAGRIAYYLLGILKDSRIDTKVIEINPEIASFFSEKFPNLYIVQGDGTAKDILLEESAQHYDAVATLTGVDEENLITSMFLDRVGVQKNITKVNRTSLLEIINAPDFSSIITPKSIAVDTIMHFIRGRVNAQYSDLQAMHHLANGQIETLQFHIKEANKMTAKPLSQLKLKKGVLIAAIIRKGKTIFPTGEDMLEVGDKLLVTTLLPNITKIYDLIAR

SEQ ID NO: 73825 - protein, 291 aa, Streptococcus pneumoniae
MIKDIQGDKMNNNLLVLQSDFGLVDGAVSAMIGVALEESPTLKIHHLTHDITPYNIFEGSYRLFQTVDYWPEGTTFVSVVDPGVGSKRKSVVAKTAKNQYIVTPDNGTLSFIKKHVGIVAIREISEVANRRQNTEHSYTFHGRDVYAYTGAKLASGHITFEEVGPELSVDQIVELPVVATIIEDHLVKGAIDILDVRFGSLWTSITREEFYKLEPEFGDRFEVTIYHADMLVYQNQVVYGKSFADVRIGQPILYINSLYRLGLAINQGSFAKAYNVGVGSSWTIEIKKIEG

SEQ ID NO: 73826 - protein, 180 aa, Streptococcus pneumoniae
MWLFFCNGKRKQVMTNHIVLFEPQIPQNTGNIARTCAATNSPLHIIKPMGFPIDDRKMKRAGLDYWDKLEIYFYESLEDFMSQMKGKLYLISKFAEKVYSDVDLSTNEDHYFLFGREDKGLPEDFMREHPEKALRIPMNDEHVRSLNVSNTVCMIVYEALRQQNFAGLELVHTYEVDKLK

SEQ ID NO: 73827 - protein, 216 aa, Streptococcus pneumoniae
MKDKQTFLMKGSFALLLFVILGYMVKFYPETLVNFDQSIQTAIRGDLPDYLTILFRALTRLIDIPVIITWVVITAFVFYRKRWKIESFFMLGNLALAGLLIVTFKNIYQRPRPAILHLVEEKGFSFPSGHSLAVTLMVGTLIVILSQRIKNPVWRKIVQIVLGLYLVSVLVSRVYLGVHYPSDVLASLCVGLGVLFIEFPFYDKLRFQWRFKGKQK

SEQ ID NO: 73828 - protein, 535 aa, Streptococcus pneumoniae
MSTKYIFVTGGVVSSIGKGIVAASLGRLLKNRGLKVTIQKFDPYINIDPGTMSPYQHGEVFVTDDGAETDLDLGHYERFIDINLNKYSNVTTGKIYSEVLRKERRGEYLGATVQVIPHITDALKEKIKRAALTTDSDVIITEVGGTVGDIESLPFLEALRQMKADVGADNVMYIHTTLLPYLKAAGEMKTKPTQHSVKELRGLGIQPNMLVIRTEEPAGQGIKNKLAQFCDVAPEAVIESLDVEHLYQIPLNLQAQGMDQIVCDHLKLDAPAADMTEWSAMVDKVMNLKKQVKISLVGKYVELQDAYISVVEALKHSGYVNDVEVKINWVNANDVTAENVAELLSDADGIIVPGGFGQRGTEGKIQAIRYARENDVPMLGVCLGMQLTCIEFARHVLGLEGANSAELAPETKYPIIDIMRDQIDIEDMGGTLRLGLYPSKLKRGSKAAAAYHNQEVVQRRHRHRYEFNNAFREQFEAAGFVFSGVSPDNRLVEIVEIPENKFFVACQYHPELSSRPNRPEELYTAFVTAAVENSN

SEQ ID NO: 73829 - protein, 543 aa, Streptococcus pneumoniae
MSINWQEILFHFLGGLGLFLYSIKTMGDGLQQAAGDRLRFYIDKYTSNPFFGVLVGIGMTALIQSSSGVTVITVGLVSAGLLTLRQAIGIVMGANIGTTVTSFLIGFKLGNYALPMLFIGAVCLFFTKNRTVNNIGRILFGVGGIFFALNLMSGAMAPLKDLQVFKDYMIELSKNPVLGVFVGTGLTLLIQASSATIGILQNLYAGNLIDLQGALPVLFGDNIGTTITAIIASLGANIAAKRVAGAHVAFNIIGTVFCVIFLVPFTVLIHWFEATLNLAPEMTIAFAHGTFNITNTIVQFPFIGALAYFVTKIIPGEDEVVKYEPLYLDEHFIKQAPSIALGNAKKELLHLGNYAAKAFDLSYKYIIDLDEKVAEKGHKTEEAINTIDEQLTRYLIALSSEALSQKESEVLTNILDSSRDLERIGDHTEALLNLTDYLQRKNVEFSDAALKELEEVYRQTSDFIKDALDSVENNDIEKARSLVERHEAINKIERVLRKTHIKRLNKGECSTQAGVNFIDIISHYTRVSDHAMNLAEKVFAEQI

SEQ ID NO: 73830 - protein, 398 aa, Streptococcus pneumoniae
MAKLTVKDVDLKGKKVLVRVDFNVPLKDGVITNDNRITAALPTIKYIIEQGGRAILFSHLGRVKEESDKAGKSLAPVAADLAAKLGQDVVFPGVTRGAELEAAINALEDGQVLLVENTRYEDVDGKKESKNDPELGKYWASLGDGIFVNDAFGTAHRAHASNVGISANVEKAVAGFLLENEIAYIQEAVETPERPFVAILGGSKVSDKIGVIENLLEKADKVLIGGGMTYTFYKAQGIEIGNSLVEEDKLDVAKALLEKANGKLILPVDSKEANAFAGYTEVRDTEGEAVSEGFLGLDIGPKSIAKFDEALTGAKTVVWNGPMGVFENPDFQAGTIGVMDAIVKQPGVKSIIGGGDSAAAAINLGRADKFSWISTGGGASMELLEGKVLPGLAALTEK

SEQ ID NO: 73831 - protein, 448 aa, Streptococcus pneumoniae
MPITAADIRREVKEKNVTFIRLMFSDILGTMKNVEIPATDEQLDKVLSNKVMFDGSSIEGFVRINESDMYLYPDLDTWTVFPWGDENGSVAGLICDVYTTEGEPFAGDPRGNLKRALRHMEEVGFKSFNLGPEPEFFLFKLDENGDPTLEVNDKGGYFDLAPTDLADNTRREIVNVLTKMGFEVEASHHEVAVGQHEIDFKYDEVLRACDKIQIFKLVVKTIARKHGLYATFMAKPKFGIAGSGMHCNMSLFDAEGNNAFFDPNDPKGMQLSETAYHFLGGLIKHAYNYTAIMNPTVNSYKRLVPGYEAPVYIAWAGRNRSPLVRVPASRGMGTRLELRSVDPMANPYVAMAVLLEVGLYGIENKIEAPAPIEENIYIMTAEERKEAGITDLPSTLHNALKALTEDEVVKAALGDHIYTSFLEAKRIEWASYATFVSQWEIDNYLDLY

SEQ ID NO: 73832 - protein, 426 aa, Streptococcus pneumoniae
MRIKSIYWNFGQNKPEKSFRYIDTSSIDRKKNIINYKNLQYLSPEQAPSRARKLVSQNSVLFSTVRPYLKNIAVVRELKEYLIASTAFIVLDTLLNETYLKYYLLSDNFINRVNNKSTGTSYPAINDYNFNLLLIALPPLSEQQRIVEAIESALEKVDEYAESYNRLEQLDKEFPDKLKKSILQYAMQGKLVEQDPNDESVEVLLEKIRAEKQKLFEEGKIKKKDLDISIVSQGDDNSYYGNKDETTSYPIYEIPEAWRYIKFASLVNFRIGKTPPRSEATFWGTEIPWVSISDMPISGYVTNTRESISKLALKSKKIDISPKGTLLMSFKLSIGKVAILDIPATHNEAIISIFPYANKENIIRDYLMIFLPLISTLGDSKDAIKGKTLNSTSISELLIPISNHEEMKRIIFKVDLLFQKVSQLFE

SEQ ID NO: 73833 - protein, 199 aa, Streptococcus pneumoniae
MVKLTTCYFCDYGSYYGNIPMNWVVIKIKDIFSMNTGLSYKKGDLSINNKGVRIIRGGNIKPLEFSLLDNDYYIDTQFISSEQVYLKHNQLITPVATSLEHIGKFARIDKDYDGVVAGGFIFQLTPFESSEIISKFLLFNLSSPLFYKQLKAITKLSGQALYNIPKTTLSELLIPLAPFEEQELITQKVEKLFEKVNQL

SEQ ID NO: 73834 - protein, 522 aa, Streptococcus pneumoniae
MTPEQLKASILQRAMEGKLVPQNPNDEPASELLKRIKAEKEKLISEGKIKRDKKETEIFRGDDGKHYGKFADGSTQEIDVPYDIPDTWEWVRFSTLVEIVRGGSPRPIKDYLTSEVDGINWIKIGDTEKGEKYINNVKEKIKKSGLNKTRFVKKGTFLLTNSMSFGRPYILNVDGAIHDGWLAISNYENSLNKDYLFYILSSNVVYSQFLSLISGAVVKNLNSDKVASILIPLPPLSEQQRIIEAIESALEKVDEYAESYNRLEQLDKEFPDKLKKSILQYAMQGKLVEQDPNDESVEVLLEKIRAEKQKLFEEGKIKKKDLDISIVSQGDDNSYYEEVPCEIPESWEWVRLNDITSYIQRGKSPKYSNIPIYPVIAQKCNQWSGFSIDLARFIDPETVHSYQKERLLRDGDLMWNSTGLGTLGRLAIYHENKNPYAWAVADSHVTVIRVLSGVINCHFIYNFLSSPIVQSVIEEKASGSTKQKELLTKTIKEYLIPLPPLPEQSRIVDKIEQFFAHIDALI

SEQ ID NO: 73835 - protein, 607 aa, Streptococcus pneumoniae
MSKIIGIDLGTTNSAVAVLEGTESKIIANPEGNRTTPSVVSFKNGEIIVGDAAKRQAVTNPDTVISIKSKMGTSEKVSANGKEYTPQEISAMILQYLKGYAEDYLGEKVTKAVITVPAYFNDAQRQATKDAGKIAGLEVERIVNEPTAAALAYGLDKTDKEEKILVFDLGGGTFDVSILELGDGVFDVLSTAGDNKLGGDDFDQKIIDHLVAEFKKENGIDLSTDKMAMQRLKDAAEKAKKDLSGVTSTQISLPFITAGEAGPLHLEMTLTRAKFDDLTRDLVERTKVPVRQALSDAGLSLSEIDEVILVGGSTRIPAVVEAVKAETGKEPNKSVNPDEVVAMGAAIQGGVITGDVKDVVLLDVTPLSLGIETMGGVFTKLIDRNTTIPTSKSQVFSTAADNQPAVDIHVLQGERPMAADNKTLGRFQLTDIPAAPRGIPQIEVTFDIDKNGIVSVKAKDLGTQKEQTIVIQSNSGLTDEEIDRMMKDAEANAEADKKRKEEVDLRNEVDQAIFATEKTIKETEGKGFDAERDAAQAALDDLKKAQEDNNLDDMKAKLEALNEKAQGLAVKLYEQAAAAQQAQEGAEGAQATGNAGDDVVDGEFTEK

SEQ ID NO: 73836 - protein, 264 aa, Streptococcus pneumoniae
MDLGDNELTLTPIPGKSGKAYMGSYPDGKRIFVKMNTSPILPGLAREQIAPQLLWSRRLADGRDMCAQEWLTGKILTPYDMNRKQIVNILTRLHRSRPLMTQLSRLGYAMETPVDLLQSWQETAPDALRKNHFISEVMADLRQTIPGFREDHATIVHGDVRHSNWIETDSGLIYLVDWDSVRLTDRMFDVAHMLCHYISEHQWKEWLTYYGYKYNQTVLSKLYWYGQLSYLSQISKYYMNQDLENVNREIHGLRHFRDKYGKRR

SEQ ID NO: 73837 - protein, 378 aa, Streptococcus pneumoniae
MSKEMLEAFRILEEDKRIKKEDIIDAVVESLRSAYRRRYGQSDSVAIDFNEKTGDFTVYTVREVVDEAFDSRLEISLKDALAINSAYELGDKIKFEEAPAEFGRVAAQSAKQTIMEKMRKQTRAITYNTYKEHEQEIMSGTVERFDNRFIYVNLGSIEAQLSKQDQIPGEVFASHDRIEVYVYKVEDNPRGVNVFVSRSHPEMIKRLMEQEIPEVYDGTVEIMSVAREAGDRTKVAVRSHNPNVDAIGTIVGRGGANIKKITSKFHPARYDAKNDRMVPIEENIDVIEWVADPAEFIYNAIAPAEVDQVIFDESDSKRALVVVPDNKLSLAIGRRGQNVRLAAHLTGYRIDIKSASEFEAMEDAASVELEVENDTVEE

SEQ ID NO: 73838 - protein, 930 aa, Streptococcus pneumoniae
MSKKRLYEIAKELGKESKEVVARAKELGLDVKSHSSSVEEAVAAKIAASFKPAAAPKVEAKPAAPKVSAEKKTEKSEPAKPAVAKEEAKPAEPVAPKTEKVAAKPQSRNFKAEREARAKEQAERRKQNKGNNRDQQQNGNRQKNDGRNGGKQGQSNRDNRRFNDQAKKQQGQQKRRNERRQQEDKRSNQAAPRIDFKARAAALKAEQNAEYARSSEERFKQYQAAKEALAQANKRKEPEEIFEEAAKLAEQAQQVQAVVEVVPEKKEPAVDTRRKKQARPDKNRDDYDHEEDGPRKQQKNRSSQNQVRNQKNSNWNNNKKNKKGNNKNNRNQTPKPVTERKFHELPTEFEYTDGMTVAEIAKRIKREPAEIVKKLFMMGVMATQNQSLDGETIELLMVDYGIEAKQKVEVDNADIERFFVEDGYLNEDELVERPPVVTIMGHVDHGKTTLLDTLRNSRVATGEAGGITQHIGAYQIVENGKKITFLDTPGHAAFTSMRARGASVTDITILVVAADDGVMPQTIEAINHSKAANVPIIVAINKIDKPGANPERVIGELAEHGVMSTAWGGDSEFVEISAKFNQNIEELLETVLLVAEIQELKADPTVRAIGTVIEARLDKGKGAVATLLVQQGTLNVQDPIVVGNTFGRVRAMTNDLGRRVKVAGPSTPVSITGLNEAPMAGDHFAVYEDEKSARAAGEERAKRALMKQRQATQRVSLENLFDTLKAGELKSVNVIIKADVQGSVEALSASLQKIDVEGVKVTIVHSAVGAINESDVTLAEASNAFIVGFNVRPTPQARQQAEADDVEIRLHSIIYKVIEEMEEAMKGMLDPEFEEKVIGEAVIRETFKVSKVGTIGGFMVINGKVARDSKVRVIRDGVVIYDGELASLKHYKDDVKEVTNGREGGLMIDGYNDIKMDDVIEAYVMEEIKR

SEQ ID NO: 73839 - protein, 883 aa, Streptococcus pneumoniae
MSKELSSKYNPAEVEAGRYQKWLDADVFKPSGDQKAKPYSIVIPPPNVTGKLHLGHAWDTTLQDIIIRQKRMQGFDTLWLPGMDHAGIATQAKVEERLRGEGISRYDLGRESFLTKVWEWKDEYATTIKEQWGKMGLSVDYSRERFTLDEGLSKAVRKVFVDLYKKGWIYRGEFIINWDPAARTALSDIEVIHKDVEGAFYHMNYMLEDGSRALEVATTRPETMFGDVAIAVNPEDPRYKDLIGKNVILPIANKLIPIVGDEHADPEFGTGVVKITPAHDPNDFLVGQRHNLPQVNIMNDDGTMNELVFEFSGMDRFEARKAVVAKLEEIGALVKIEKRVHSVGHSERTGVVVEPRLSTQWFVKMDQLAKNAIANQDTEDKVEFYPPRFNDTFLQWMENVHDWVISRQLWWGHQIPAWYNADGEMYVGEEAPEGDGWTQDEDVLDTWFSSALWPFSTMGWPEVDSEDFKRYFPTSTLVTGYDIIFFWVSRMIFQSLEFTGRQPFQNVLIHGLIRDEQGRKMSKSLGNGIDPMDVIEKYGADALRWFLSNGSAPGQDVRFSYEKMDASWNFINKIWNISRYILMNNGGLTLDVAHDNVTKVATGEAGNVTDRWILHNLNETIAKVTENFDKFEFGVAGHILYNFIWEEFANWYVELTKEVLYSDNEDDKVITRSVLLYTLDKILRLLHSIMPFVTEEIFGQYAEGSIVTAAYPTVNPAFEDLAAHTGVESLKDLIRAVRNARAEVNVAPSKPITILVKTSDSDLEAFFNSNVNYIKRFTNPEHLEIASTIPAPELAMSSVITGAEIFLPLVDLLNVEEELARLEKELAKWQKELDMVGKKLSNERFVANAKPEVVQKEKDKQADYQAKYDVTVARIDEMKKLVK

SEQ ID NO: 73840 - protein, 267 aa, Streptococcus pneumoniae
MQPTYNIDNPNLSYEAKRDLWRIGFGLQKVDNLVPSAYMESLAEKQSRGELTYEQVYEDATAYHHTIDASTEEADLVSLRIVELLSRRGFSFSPATLLAIHKELFQDIFEPSIPVGQFRQTNITKNEPVLNGESVVYSDYSMIQMTLDYDFNQEKQVAYATLTQADVVKQIQHFISGIWQIHPFREGNTRTVTVFLIQYLREFGFDIDNTPFQQHSKYFRDALVLDNAKILQRRSEFLTAFFENLLLGGQNDLSSEKMYLDLDLDFS

SEQ ID NO: 73841 - protein, 35 aa, Streptococcus pneumoniae
MEQAIVDYIDYYNNKRIKVKLKGLSLVQYRTKSFG

SEQ ID NO: 73842 - protein, 129 aa, Streptococcus pneumoniae
MEKCYTDVTEFAIPASTQKLYLSPVLDGFNSEIIAYNLSTSPNLEQVKSMLEQAFTEKYYENTILHSDQGWQYQHDSYHRFLESKGIQASMSRKGNSQDNGMMESFFGILKFMAMRKHLNHLINWNKLL

SEQ ID NO: 73843 - protein, 612 aa, Streptococcus pneumoniae
MSYKDKVQKILDVIGGEKNVNRVTHCVTRLRLELKDENLVNDDDVKKIPGVIGIMKKNGQYQIILGNDVANYYKEFVKLGNFESDSVVQGHKGNILERIIEYIAGSMTPIIPAMLGGGMLKVLVIILPMLGILQSDSQTIAFLTFFGDAPYYFLPLLLAYSASQKLKVTSTLAMSVAGVLLHPNFVQMVQSGNPLSLFGVPVIPASYGSSVVPIIIMVWLMKYIEKMIAKLTPAVTKSFLQPTLVLLVSSCIALVVVGPIGVIVGEGLSNLVGQMYDVAGWLTLAILGAIMPFIVMTGMHWAFAPIFLAASIATPDVLILPAMLGSNLAQGAASMAVALKSKNNNTKQIAFAAGFSALLAGITEPALYGVTLKYKKPLYAAMIGGGLAGLFAGLTSVKAYLFAVPSLIALPQFIYSDVPSNIVNALIVAVISVVITFVLAYIFGIDEEESSSNLEVKAGVSNKKMIFSPISGEIIPLSDVQDKTFSDKLIGDGVAIIPSEGKVYAPFDGKITNIFPTKHAIGLKSDEGVELLIHIGLDTVELKGQGFISHVEEGDRVFKNQLIFEMDLNLIKTKGYETVTPVIVTNTNDFLDVLVLPNNQTIEHSKELLVIL

SEQ ID NO: 73844 - protein, 375 aa, Streptococcus pneumoniae
MVPRVNAPSGVFGMWFSFYLRETDGGNMSTIEEQLKALREETLTSLKQITAGNEKEMQDLRVSVLGKKGSLTEILKGMKDVSAEMRPIIGKHVNEARDVLTAAFEETAKLLEEKKVAAQLASESIDVTLPGRPVATGHRHVLTQTSEEIEDIFIGMGYQVVDGFEVEQDYYNFERMNLPKDHPARDMQDTFYITEEILLRTHTSPVQARAMDAHDFSKGPLKMISPGRVFRRDTDDATHSHQFHQIEGLVVGKNISMADLQGTLQLIVQKMFGEERQIRLRPSYFPFTEPSVEVDVSCFKCGGEGCNVCKKTGWIEIMGAGMVHPRVLEMSGIDATVYSGFAFGLGQERVAMLRYGINDIRGFYQGDVRFSEQFK

SEQ ID NO: 73845 - protein, 169 aa, Streptococcus pneumoniae
MIRKVEMADVEVLAKIAKQAFRETFAYDNTEEQLQEYFEEAYSLKTLSTELGNPDSETYFIMHEEEIAGFLKVNWGSAQTERELEDAFEIQRLYVLQKFQGFGLGKQLFEFALELATKNSFSWAWLGVWEHNTKAQAFYNRYGFEKFSQHHFMVGQKVDTDWLLRKKLR

SEQ ID NO: 73846 - protein, 800 aa, Streptococcus pneumoniae
MLISYKWLKELVDIDVPSQELAEKMSTTGIEVEGVESPAAGLSKIVVGEVLSCEDVPETHLHVCQVNVGEEERQIVCGAPNVRAGIKVMVALPGARIADNYKIKKGKIRGLESLGMICSLGELGISDSVVPKEFADGIQILPEDAVPGEEVFSYLDLDDEIIELSITPNRADALSMCGVAHEVAAIYDKAVNFKEFTLTETNEAAADALSVSIETDKAPYYAARILDNVTIAPSPQWLQNLLMNEGIRPINNVVDVTNYILLYFGQPMHAFDLDNFEGTDIRVREARAGEKLVTLDGEERDLDVNDLVITVADKPVALAGVMGGQATEISEKSSRVVLEAAVFNGKSIRKTSGRLNLRSESSSRFEKGINVATVNEALDAAASLIAELAGATVRKGIVSAGELDTSDVEVSSTLADVNRVLGTELSYADVEDVFRRLGFGLSGNADSFTVRVPRRRWDITIEADLFEEIARIYGYDRLPTSLPKDDGTAGELTATQKLRRQVRTIAEGAGLTEIITYTLTTPEKAVEFTAQPSNLTELMWPMTVDRSVLRQNMISGILDTVAYNVARKNKNLALYEIGKVFEQTGNPKEELPNEINSFAFALTGLVAEKDFQTAAVPVDFFYAKGILEALFTRLGLQVTYTATSEIASLHPGRTAVISLGDQVLGFLGQVHPVTAKAYDIPETYVAELNLSAIEAALQPATPFVEITKFPAVSRDVALLLKAEVTHQEVVDAIQAAGVKRLTDIKLFDVFSGEKLGLGMKSMAYSLTFQNPEDSLTDEEVARYMEKIQASLEEKVNAEVR

SEQ ID NO: 73847 - protein, 288 aa, Streptococcus pneumoniae
MSRQTPSLSFEVFPPTPAVGNDNIISALQDMQELAPHFISVTASNNKFNIKETTVRLADFIQNDLAIPTIAHLPAIYLTKDKVAETIADLDKVGVQKILALRGDIIPDVEPQKDFRYATDLIELIKERAPHFDIIGACYPEGHPDSPNQISDIQNLKKKVDAGCSSLVTQLFFDNERFYDFQDKCILAGIDVPIHAGIMPILNRNQALRLLKTCENIHLPRKFKAILDKYEHDPESLRAAGLAYAVDQIVDLVTQDIAGVHLYTMNNADTAKYIHQATHALFNHQSLG

SEQ ID NO: 73848 - protein, 775 aa, Streptococcus pneumoniae
MSSSKTSSVSYFYFAFDVLGILIFVGKAYNFINPKGIKMAKQVFQTTFAGRELIVETGQVAKQANGSVVVRYGESTVLTAAVMSKKMATGDFFPLQVNYEEKMYAAGKFPGGFMKREGRPSTDATLTARLIDRPIRPMFAEGFRNEVQVINTVLSYDENASAPMAAMFGSSLALSISDIPFDGPIAGVQVGYVDGQIIINPSQEQAEQSLLELTVAGTKHAINMVESGAKELSEEIMLEALLKGHEAVKELIAFQEEIVAAVGKEKAEVELLHVDAELQAEIIAAYNSDLQKAVQVEEKLAREAATQAVKDQVTAVYEEKYANHEEFDRIMRDVAEILEQMEHAEVRRLITEDKVRPDGRKVDEIRPLDAVVDFLPRVHGSGLFTRGQTQALSVLTLAPMGETQIIDGLDPEYKKRFMHHYNFPQYSVGETGRYGAPGRREIGHGALGERALAQVLPSLEEFPYAIRLVAEVLESNGSSSQASICAGTLALMAGGVPIKAPVAGIAMGLISDGNNYTVLTDIQGLEDHFGDMDFKVAGTRDGITALQMDIKIQGITAEILTEALAQAKKARFEILDVIEATIPEVRPELAPTAPKIDTIKIDVDKIKIVIGKGGETIDKIIAETGVKIDIDEEGNVSIYSSDQDAINRAKEIIAGLVREAKVDEVYRAKVVRIEKFGAFVNLFDKTDALVHISEMAWTRTNRVEDLVEIGDEVDVKVIKIDEKGRIDASMKALLPRPPKPEHDEKGEKSERPHRPRHQKDYKPKKEFTETPKDSE

SEQ ID NO: 73849 - protein, 205 aa, Streptococcus pneumoniae
MGWWRETIDIVKENDPAARTTLEVLLTYPGVKALAAHRLSHFLWKHGFKLLARMYSQFWRFWTQIEIHPGAQIDSGVFIDHGSGLVIGETAIVEKGVLLYHGVTLGGTGKDCGKRHPTVRKGALISAHAQVIGPVEIGENAKVGAAAVVVADVPSDVTVVGIPAKIVRLHGKKDEPVIHEVEEKREYYVNKLEQAKDASHRSSGL

SEQ ID NO: 73850 - protein, 447 aa, Streptococcus pneumoniae
MIKIYDTMSRDLREFVPIEDGKIKMYVCGPTVYNYIHVGNARSTVAFDTIRRYFEYRGYKVAYISNFTDVDDKIINRAREEGITPQEVADKYIAAFREDVTALGVKPATRHPRVVEFMADIIRFVEDLIERGFAYESQGDVYFRVEKSHNYAKLANKTLEDLELGASGRTDEETARKENPVDFALWKSSKPGEISWDSPWGPGRPGWHIECSVMSTEILGDTIDIHGGGADLEFPHHTNEIAQSEAKTGKAFANYWMHNGFVNIDNVKMSKSLGNFITVHDALKTLDGQVLRFFFATQHYRKPINFTEKAVRDAETNLKYLKNTYEQPFTGNVDAQELQNFKDKFVAAMDEDFNAANGITVVFEMAKWINSGNYDASVKQALADMLEIFGIVFVEEVLDAEIEDLIQKRQEARANRDFETADQIRDQLVTQGIKLLDTKDGVRWTRD

SEQ ID NO: 73851 - protein, 294 aa, Streptococcus pneumoniae
MREKELQDWFPEARISDQPVEKEGYLTLPLASQQWILLEEAGLSEREKQLVALLTQQEQARSLNPWYSYLVEGKGQAPQVFKKIQLVYCHLSYFQQENLASWLDMMRTLFPNCQTVLQVGSQDYVFVLQQDKYTSVRDILSDTIEAVEYDFGLRLSIMLGQVWSQTGHQALSDLIKAERDLFKTWWRQGHQGVHTFSQLYLWSMGERLVDLKPIKECLHQMILDQDQIQEIILSLWENSAVLTKTAQQLYLHRNSLQYKIDKWEELTGLQLKELTDLTLCYQLILGSLSTIVGL

SEQ ID NO: 73852 - protein, 293 aa, Streptococcus pneumoniae
MAIVSAEKFVQAARDNGYAVGGFNTNNLEWTQAILRAAEAKKAPVLIQTSMGAAKYMGGYKVARNLIANLVESMGITVPVAIHLDHGHYEDALECIEVGYTSIMFDGSHLPVEENLKLAKEVVEKAHAKGISVEAEVGTIGGEEDGIIGKGELAPIEDAKAMVETGIDFLAAGIGNIHGPYPVNWEGLDLDHLQKLTEALPGFPIVLHGGSGIPDEQIQAAIKLGVAKVNVNTECQIAFANATRKFARDYEANEAEYDKKKLFDPRKFLADGVKAIQASVEERIDVFGSEGKA

SEQ ID NO: 73853 - protein, 744 aa, Streptococcus pneumoniae
MDVFLITPTYEWQFALQVEDADFTKIAKKAGLGPEVARLLFERGIQDQESLKKFLEPSLEDLHDAYLLHDMDKAVERIRQAIEEGENILVYGDYDADGMTSASIVKESLEQLGAECRVYLPNRFTDGYGPNASVYKYFIEQEGISLIVTVDNGVAGHEAIALAQSMGVDVIVTDHHSMPETLPDAYAIVHPEHPDADYPFKYLAGCGVAFKLACALLEEVQVELLDLVAIGTIADMVSLTDENRILVQYGLEMLGHTQRIGLQEMLDMAGIAANEVTEETVGFQIAPRLNALGRLDDPNPAIDLLTGFDDEEAHEIALMIHQKNEERKEIVQSIYEEAKTMVDPEKKVQVLAKEGWNPGVLGIVAGRLLEELGQTVIVLNIEDGRAKGSARSVEAVDIFEALDPHRDLFIAFGGHAGAAGMTLEVEQLSDLSQVLEDYVREKGADAGGKNKLNLDEELDLEALSLETVKSFERLAPFGMDNQKPIFYIKNFQVESARTMGAGNAHLKLKISKGEASFEVVAFGQGRWATEFSQTKNLELAVKLSVNQWNGQTALQLMMVDARVEGVQLFNIRGKNAVLPEGVPVLDFPGELPNLAASEAVVVKNIPEDITQLKTIFQEQHFSAVYFKNDIDKAYYLTGYGTRDQFAKLYKTIYQFPEFDIRYKLKDLAAYLNIQQILLVKMIQVFEELGFVTIKDGVMTVNKEAPKREIGESQIYQNLKQTVKDQEMMALGTVQEIYDFLMEKE

SEQ ID NO: 73854 - protein, 553 aa, Streptococcus pneumoniae
MSNISLTTLGGVRENGKNMYIAEIGESIFVLNVGLKYPENEQLGVDVVIPNMDYLFENSDRIAGVFLTHGHADAIGALPYLLAEAKVPVFGSELTIELAKLFVKGNDAVKKFNDFHVIDENTEIDFGGTVVSFFPTTYSVPESLGIVLKTSEGSIVYTGDFKFDQTASESYATDFARLAEIGRDGVLALLSDSANADSNIQVASESEVRDEITQTIADWEGRIIVAAVSSNLSRIQQIFDAADKTGRRIVLTGFDIENIVRTAIRLKKLSLANEILLIKPKDMSRFEDHELIILETGRMGEPINGLRKMSIGRHRYVEIKDGDLVYIATAPSIAKEAFVARVENMIYQAGGVVKLITQSLHVSGHGNVRDLQLMINLLQPKYLFPVQGEYRELDAHAKAAMAVGMLPERIFIPKKGTTMAYENGDFVPAGSVSAGDILIDGNAIGDVGNVVLRDRKVLSEDGIFIVAITVNRREKKIVARARVHTRGFVYLKKSRDILRESSELINQTVEEYLQGDDFDWADLKGKVRDNLTKYLFDQTKRRPAILPVVMEAK

SEQ ID NO: 73855 - protein, 406 aa, Streptococcus pneumoniae
MYRYQIGIPTLEYDQFVKEHELANVLQSSAWEEVKSNWQHEKFGVYREEKLLATASILIRTLPLGYKMFYIPRGPILDYGDKELLNFAIQSIKSYARSKRVVFVTFDPSICLSQSLINQEKTEFPENLAIIDSLQQMGVRWSGKTEEMGDTIQPRIQAKIYKENFEEDKLSKSTKQAIRTARNKGLEIQYGGLELLDSFSELMKKTEKRKEIHLRNEAYYKKLLDNFKDKAYITLATLDVSKRSQELEEQLAKNRALEETFTESTRTSKVEAQKKEKERLLEELTFLQEYIDVGQARVPLAATLSLEFGTTSVNIYAGMDDDFKRYNAPILTWYETARYAFERGMVWQNLGGVENSLNGGLYHFKEKFNPTIEEYLGEFTMPTHPLYPLLRLALDFRKTLRKKHRK

SEQ ID NO: 73856 - protein, 466 aa, Streptococcus pneumoniae
MIAIDFTAEVEKRKEDLLADLFSLLEINSERDDSKADAQHPFGPGPVKALEKFLEIADRDGYPTKNVDNYAGHFEFGDGEEVLGIFAHMDVVPAGSGWDTDPYTPTIKDGRLYARGASDDKGPTTACYYGLKIIKELGLPTSKKVRFIVGTDEESGWADMDYYFEHVGLAKPDFGFSPDAEFPIINGEKGNITEYLHFAGENTGAARLHSFTGGLRENMVPESATAVVSGDLADLQAKLDAFVAEHKLRGELQEEAGKYKVTIIGKSAHGAMPASGVNGATYLALFLSQFGFAGPAKDYLDIAGKILLNDHEGENLKIAHVDEKMGALSMNAGVFRFDETSADNTIALNIRYPKGTSPEQIKSILENLPVASVSLSEHGHTPHYVPMEDPLVQTLLNVYEKQTGLQGHEQVIGGGTFGRLLERGVAYGAMFPDSIDTMHQANEFIALDDLFRAAAIYAEAIYELIK

SEQ ID NO: 73857 - protein, 345 aa, Streptococcus pneumoniae
MNQTVEYIKELTAIASPTGFTREIADYLVKTLEGFGYQPVRTSKGGVNVTIKGQNDEQHRYVTAHVDTLGAIVRAVKPDGRLKMDRIGGFPWNMIEGENCTIHVASTGEKVSGTILIHQTSCHVYKDAGTAERTQDNMEVRLDAKVTSEKETRALGIEVGDFISFDPRTVVTETGFIKSRHLDDKVSAAILLNLLRIYKEEKIELPVTTHFAFSVFEEVGHGANSNIPAQVVEYLAVDMGAMGDDQQTDEYTVSICVKDASGPYHYDFRQHLVALAKEQDIPFKLDIYPFYGSDASAAMSAGAEVKHALLGAGIESSHSYERTHIDSVIATERMVDAYLKSTLVD

SEQ ID NO: 73858 - protein, 141 aa, Streptococcus pneumoniae
MAKKVEKLVKLQIPAGKATPAPPVGPALGQAGINIMGFTKEFNARTADQAGMIIPVVISVYEDKSFTFVTKTPPAAVLLKKAAGVEKGSGTPNKTKVATVTRAQVQEIAETKMPDLNAANVESAMRMIEGTARSMGFTVVD

SEQ ID NO: 73859 - protein, 229 aa, Streptococcus pneumoniae
MAKKSKQLRAALEKIDSTKAYSVEEAVALAKETNFAKFDATVEVAYNLNIDVKKADQQIRGAMVLPNGTGKTSRVLVFARGAKAEEAKAAGADFVGEDDLVAKINDGWLDFDVVIATPDMMALVGRLGRVLGPRNLMPNPKTGTVTMDVAKAVEESKGGKITYRADRAGNVQAIIGKVSFEAEKLVENFKAFNETIQKAKPATAKGTYVTNLTITTTQGVGIKVDVNSL

SEQ ID NO: 73860 - protein, 684 aa, Streptococcus pneumoniae
MELLIYLILFLLVLIVSSTTNKLLPFLPLPLVQILLGIVIGLFLPNTDFHLNTELFLALVIGPLLFREAEEADVTAILKHWRIIVYLIFPVIFISTLSLGGLAHLLWFSLPLAACLAVGAALGPTDLVAFASLSERFSFPKRVSNILKGEGLLNDASGLVAFQVALTAWTTGAFSLGQASSSLIFSILGGFLIGFLTAMTNRFLHTFLLSVRATDIASELLLELSLPLVTFFLAEEVHVSGIIAVVVAGILKASRFKKITLLEAQVDTVTETVWHTVTFMLNGSVFVILGMELEMIAEPILTNPIYNPLLLLLSLIALTFVLFVIRFIMIYGYYAYRTRRLKKKLNKYMKDMFLLTFSGVKGTVSIATILLIPSNLEQEYPLLLFLVAGVTLVSFLTGLLILPHLSDEEEESKDYLMHIAILNEVTLELEKELEDTRNKLPLYAAIDNYHGRIENLILSQENQDDQEDWAALKLLILSIESDGLEQAYEEGNISNRAYRVYQRYLKNIEQGINRKLASRLTYYFLVSLRILRFLLHEVFTLGKTFRSWKDKEQSRLRALDYDQIAELYLANTEMIIESLENLKGVYRRSLISFMQESRLRETTIISSGAFVERVINRVKPNNINEMLRGYYLERKLIFEYEEKRLITTKYAKKLRQNVNNLENYSLKEAANTLPYDMVELVRRN

SEQ ID NO: 73861 - protein, 1876 aa, Streptococcus pneumoniae
MFKKDRFSIRKIKGVVGSVFLGSLLMAPSVVDAATYHYVNKEIISQEAKDLIQTGKPDRNEVVYGLVYQKDQLPQTGTEASVLTAFGLLTVGSLLLIYKRKKIASVFLVGTMGLVVLPSAGAVDPVATLALASREGVVEMEGYRYVGYLSGDILKTLGLDTVLEETSAKPGEVTVVEVETPQSTTNQEQARTENQVVETEEAPKEEAPKTEESPKEEPKSEVKPTDDTLPKVEEGKEDSAEPAPVEEVGGEVESKPEEKVAVKPESQPSDKPAEESKVEQAGEPVAPRKDEQAPVEPENQPEAPEEEKAVEETPKQEESTPDTKAEETVEPKEETKTAKGTQEEGKEGQAPVQEVNPEYKVTTGTVEKSTESELDFTTEVVPDDTKYVDEEVVERQGSKGVQVTKTTYETVEVVETDKVLSTTTEVKTPVVPKVVKKGTKPVETREEVIPFATKEQEDDTLKRGTRQVAQEGVNGKKQITETYKTIRGEKTNEAPTVEETVLQAPQDEIIKKGTKGLEKPTLQWANTEKDVLKKSATASYTLTKPAGVEIKSIKLALKDKDGQLVKEVTVAENNLNATLDKLKYYQGYTLSTTMVYDRGEGEETEKLEDKQIQLDLKKVEIKNIKETSLMNVDAEGNETDKSLLSEKPTDVSQLYLRVTTHDNKVTRLAVSSVEEVVVDGKTLYKVVAKAPDLVQRRADDTLSEEYVHYFEKQLPKVNNVYYNFNELVKDMQANPMGEFKLGADLNAVNVKPAGKAYVMAKFRGTLSSVENHQYTIHNLERPLFNEAEGATLKNFNLGNVNINMPWADKVAPIGNMFKKSTLENIKVVGSVTGNNDVTGAVNKLDEANMRNVAFIGKINSLGDKGWWSGGLVSESWRSNTDSVYFDGDIVGNNSKFGGLVAKVNHGSNQWDVKQKGRLTNSVVKGTMTLKNHGQSGGLVHENYDWGWVENNISMMKVNNGEIMYGSGSIDGDPYFGFDYFKNNYYVKDVATGESTYKRSKQIQSISQAEADAKIANMGITANTFAIQDPVVNKLNRIIDRDSEYKAIQDYQETRNLAYRNLEKLQPFYNKEWIVNQGNKLTDESNLVKKTVLSVTGMKSGQFVTDLSSVDKIMIHYADGTKEEFGVSAISDSRVKQVKEYNVDDLGVVYTPNMVDKNRDSLITKVKEKLSSVALDSAEVKSITNNPASLYLEESFAEVRETLDKLVKSLLENEDHQLNSDEVAEKALLKKVEDNKAKIILALTYLNRYYGIDYDGLNFKHLMMFKPDFYGKTPSILDFLIRIGSAEKNLKGDRSLEAYREVIGGTIGKGELNGLLGYNMRLFTKYTDLNDWFIHAAKNVYVSEPETTTEDFKDKRHRIYDGLNNDVHGRMILPLLNLKKAHIFVISTYNTIAFSSFEKYGKNTEEERNAYKAEIDRVAKAQQRYLDFWSRLALPKVRNQLLKSQNSVPTPVWDNQVYVGLGGANRMGYGDGGRVVTPVRELFGPTDRWHQINWNMGAMAKIYERPWKDDQVYFMVTNMMEPFGISAFTHETTHVNDRMAYYGGDWHREGTDLEAFAQGMLQTPDKSTTNGEYGALGINMAYERKNDGEQLYNYDPEKLDSREKIDSYMKNYNESMMMLDYLEASAVIRQNLSDNSKWFKKMDKEWRTNADRNRLIGEPHQWDKLRDLTEEEKKLPIDSIDKLVENNFVTLHGMPKNGRYRTEGFDSSYQPVNMMAGVFGGNTSKSTVGSISFKHNAFRMWGYYGYENGFIPYVSNKLKGAANKENKGLLGDDFIIKKVSKNQFQNLEEWKKHWYHEVYDKAQKGFVEIEVDGVKISTYAQLQSLFEEAVSKDLAGMDDKNIKNHYQYTENLKWKIYKQLLKNTDGFSSDLFTAPQA

SEQ ID NO: 73862 - protein, 279 aa, Streptococcus pneumoniae
MTKADTIFKENIERILKEGVFSEQARPKYKDGTVANSKYVTGAFSEYDLSKGEFPITTLRPIAIKSAIKEVLWIYQDQSNSLEVLNDKYNVHYWNDWEVGDTGTIGERYGAVVKKHDIINKLLKQLETNPWNRRNIISLWDYQAFEETDGLLPCAFQTMFDVRRVDGEIYLDATLTQRSNDMLVAHHINAMQYVALQMMIAKHFGWKVGKFFYFINNLHIYDNQFEQAQELLRREPSNCQPRLVLNVPDGTNFFDIKAEDFELVDYDPVKPQLKFDLAI

SEQ ID NO: 73863 - protein, 126 aa, Streptococcus pneumoniae
MVTWILWALILAMLAWMGFNYLRIRRAAKIVDNEEFEALIRTGQLIDLRDPAEFHRKHILGARNIPSSQLKTSLAALRKDKPVLLYENQRAQRVTNAALYLKKQGFSEIYILSYGLDSWKGKVKTS

SEQ ID NO: 73864 - protein, 620 aa, Streptococcus pneumoniae
MNIIEEIMTKLREDIRNIAIIAHVDHGKTTLVDELLKQSETLDARTELAERAMDSNDIEKERGITILAKNTAVAYNGTRINIMDTPGHADFGGEVERIMKMVDGVVLVVDAYEGTMPQTRFVLKKALEQDLVPIVVVNKIDKPSARPAEVVDEVLELFIELGADDDQLDFPVVYASAINGTSSLSDDPADQEATMAPIFDTIIDHIPAPVDNSDEPLQFQVSLLDYNDFVGRIGIGRVFRGTVKVGDQVTLSKLDGTTKNFRVTKLFGFFGLERREIQEAKAGDLIAVSGMEDIFVGETITPTDAVEALPILHIDEPTLQMTFLVNNSPFAGKEGKWVTSRKVEERLQAELQTDVSLRVDPTDSPDKWTVSGRGELHLSILIETMRREGYELQVSRPEVIVKEIDGVKCEPFERVQIDTPEEYQGSVIQSLSERKGEMLDMISTGNGQTRLVFLVPARGLIGYSTEFLSMTRGYGIMNHTFDQYLPLIPGEIGGRHRGALVSIDAGKATTYSIMSIEERGTIFVNPGTEVYEGMIIGENSRENDLTVNITKAKQMTNVRSATKDQTAVIKTPRILTLEESLEFLNDDEYMEVTPESIRLRKQILNKAEREKANKKKKSAE

SEQ ID NO: 73865 - protein, 450 aa, Streptococcus pneumoniae
MKVIDQFKNKKVLVLGLAKSGESAARLLDKLGAIVTVNDGKPFEDNPAAQSLLEEGIKVITGGHPLELLDEEFALMVKNPGIPYNNPMIEKALAKRIPVLTEVELAYLISEAPIIGITGSNGKTTTTTMIGEVLTAAGQHGLLSGNIGYPASQVAQIASDKDTLVMELSSFQLMGVQEFHPEIAVITNLMPTHIDYHGSFSEYVAAKWNIQNKMTAADFLVLNFNQDLAKDLTSKTEATVVPFSTLEKVDGAYLEDGQLYFRGEVVMAANEIGVPGSHNVENALATIAVAKLRDVDNQTIKETLSAFGGVKHRLQFVDDIKGVKFYNDSKSTNILATQKALSGFDNSKVVLIAGGLDRGNEFDELVPDITGLKKMVILGQSAERVKRAADKAGVAYVEATDIADATRKAYELATQGDVVLLSPANASWDMYANFEVRGDLFIDTVAELKE

SEQ ID NO: 73866 - protein, 352 aa, Streptococcus pneumoniae
MKKIVFTGGGTVGHVTLNLLLMPKFIEDGWEVHYIGDKRGIEHQEILKSGLDVTFHSIATGKLRRYFSWQNMLDVFKVGWGIVQSLFIMLRLRPQTLFSKGGFVSVPPVIAARVSGVPVFIHESDLSMGLANKIAYKFATKMYSTFEQASSLSKVEHVGAVTKVSDQKNPEPDELVDIQTHFNHKLPTVLFVGGSAGARVFNQLVTDHKKELTERYNIINLTGDSSLNELSQNLFRVDYVTDLYQPLMELADIVVTRGGANTIFELLAIAKLHVIVPLGREASRGDQIENAAYFVKKGYAEDLQESDLTLDSLEEKLSHLLSHKEDYQAKMKASKELKSLADFYQLLKKDLS

SEQ ID NO: 73867 - protein, 396 aa, Streptococcus pneumoniae
MSKDKKNEDKETLEELKELSEWQKRNQEYLKKKAEEEVALAEEKEKERQARMGEESEKSEDKQDQESETDQEDSESAKEESEEKVASSEADKEKEEPESKEKEEQDKKLAKKATKEKPAKAKIPGIHILRAFTILFPSLLLLIVSAYLLSPYATMKDIRVEGTVQTTADDIRQASGIQDSDYTINLLLDKAKYEKQIKSNYWVESAQLVYQFPTKFTIKVKEYDIVAYYISGENHYPILSSGQLETSSVSLNSLPETYLSVLFNDSEQIKVFVSELAQISPELKAAIQKVELAPSKVTSDLIRLTMNDSDEVLVPLSEMSKKLPYYSKIKPQLSEPSVVDMEAGIYSYTVADKLIMEAEEKAKQEAKEAEKKQEEEQKKQEEESNRNQTNQRSSRR

SEQ ID NO: 73868 - protein, 337 aa, Streptococcus pneumoniae
MYGVRKLIVADYDIIEPSNLNRQILYTESNVGKEKINVLSEKIHKYNSDVQVVPISIKVSSVEELEKIVAEYGSIDFIVKAIDTPIDIIKIVNQFAVSHKISYISGGFNGCYLIIDNIYIPTIGSCFGCRNINKDINKYTLSDKTKWPTTPEMPAILGGIMTNLIIKIFLGCYNEILIDNAYVYNMRNHALSQEKYVLENGECPICKKNNKVKDNNIRAKTFIRSVCFCLLSGGVAFLSAIGQFTVIGTQLIVLFLGIIFAIYYAYYNKNIQTSLENIVWLFSSFEILFLLVNFRTFIQLPVDIFICMIIFLMLWIFIMLGIVCLSYYITLLFGKEA

SEQ ID NO: 73869 - protein, 210 aa, Streptococcus pneumoniae
MTLAKDIASHLLKIQAVYLKPEEPFTWASGIKSPIYTDNRVTLAYPETRTLIENGFVEAIKEAFPEVEVIAGTATAGIPHGAIIADKMDLPFAYIRSKPKDHGAGNQIEGRVAQGQKMVVVEDLISTGGSVLEAVAAAKREGADVLGVVAIFSYQLPKADKNFADAGVKLVTLSNYSDLIHLAQEEGYITPEGLYLLKRFKEDQENWQEG

SEQ ID NO: 73870 - protein, 496 aa, Streptococcus pneumoniae
MSTEHMEELNDQQIVRREKMAALREQGIDPFGKRFERTANSQELKDKYANLDKEQLHDKNETATIAGRLVTKRGKGKVGFAHLQDREGQIQIYVRKDAVGEENYEIFKKADLGDFLGVEGEVMRTDMGELSIKATHITHLSKALRPLPEKFHGLTDVETIYRKRYLDLISNRESFERFVTRSKIISEIRRYLDQKGFLEVETPVLHNEAGGAAARPFITHHNAQNIDMVLRIATELHLKRLIVGGMERVYEIGRIFRNEGMDATHNPEFTSIEVYQAYADFQDIMDLTEGIIQHAAKSVKGDGPVNYQGTEIKINEPFKRVHMVDAIREITGVDFWQDMTLEEAKAIAAEKKVPVEKHYTEVGHIINAFFEEFVEETLIQPTFVYGHPVAVSPLAKKNPEDQRFTDRFELFIMTKEYGNAFTELNDPIDQLSRFEAQAKAKELGDDEATGIDYDYIEALEYGMPPTGGLGIGIDRLCMLLTDTTTIRDVLLFPTMK

SEQ ID NO: 73871 - protein, 378 aa, Streptococcus pneumoniae
MSYKTSNAEGHVDFINTYDLEPMAQQVIPKAAFGYIASGAEDTFTLRENIRAFNHKLIVPHTLCDVENPSTEIEFAGEKLSSPIIMAPVAAHKLANEQGEVATARGVHEFGSLYTTSSYSTVDLPEISEALQGTPHWFQFYFSKDDGINRHIMDRVKAEGYKAIVLTADATVGGNREVDKRNGFVFPVGMPIVEEYLPEGAGKSMDFVYKSAKQRLSPRDVEFIAEYSGLPVYVKGPQCREDVERSLAAGASGIWVTNHGGRQIDGGPAAFDSLQEVAEAVDRRVPIVFDSGVRRGQHVFKALASGADLVAIGRPVIYGLALGGSVGVRQVFEHLNAELKTVMQLSGAQTIEDVKHFKLRHNPYNPTFPVDPRDLKLY

SEQ ID NO: 73872 - protein, 267 aa, Streptococcus pneumoniae
MKRKDFNMTSLKLLKEKAPLVICITNDVVKNFTANGLVALGASPAMSEFPADLEDLLKYAGGLLINIGTLTDENWKLYQAALKIAEKYNVPAVLDPVACGAGEYRKKVADDLINNYKLAAIRGNAGEIASLVGIDVASKGVDSAGVDNIDEIALAANEKFNIPIVVTGEVDAIAVNGEVVTIHNGSAMMPKVIGTGCLLGAVVASFIGLEKGQELKSLETAMLVYNIAGEMAEKRPNGHLPGTFKVEFINALYEITDEDVKEFKRVK

SEQ ID NO: 73873 - protein, 209 aa, Streptococcus pneumoniae
MFHKELLKLYFICGTTTCQGKNLYTVVEEALKGGITLFQFREKGESALEGLEKLELAIQIKELCKKYNVPFIVNDDIDLAMEIDADGVHVGQDDIGVDEIRKLMPDKIIGLSIRNEEEFQQSKVEYVDYVGVGPVFDTQSKDDAGGAIGYEGLELMRKLLPQMPLVAIGGIQTKHIKDIIKTNMDGVSIISAISYAKNIEKTVREMSEQ

SEQ ID NO: 73874 - protein, 230 aa, Streptococcus pneumoniae
MEFTDIAMELSKKAWQASFHHPFILQLQEGNLEPAIFRYYLIQDAYYLKAFSEIYHLLADKTSNQEMKRLLKQNAQGLVEGELFIRQQFFKELEISDQEMEQHPIAPTCYHYISHIYRQFAEPNLAIAFASLLPCPWLYHDIGKSLNLKPSPNPLYQQWIETYITDELEQQIREEGALVNQLYRESDETDKQKMLDTFHISVHMEAKFWEMAYQHQTWKSDLQSLEKGEE

SEQ ID NO: 73875 - protein, 750 aa, Streptococcus pneumoniae
METMTEIVKASLENGIQKIRIQAEKGYHPAHIQLQKGIPAEITFHRATPSNCYKEILFEEEGILEPIGVDEEKVIRFTPQELGRHEFSCGMKMQKGSYTVVEKTRKSLSLLQRFWITSIFTVPLVILMIGMLTGSISHQVMHWGTFLATTPIMLVAGKPYIQSAWASFKKHNANMDTLVALGTLVAYFYSLVALFAGLPVYFESAGFILFFVLLGAVFEEKMRKNTSQAVEKLLDLQAKTAEVLSDDSYVQVPLEQVKVGDLIRVRPGEKIAVDGVVVEGVSSIDESMVTGESLPVDKTVGDTVIGSTINHSGTLVFRAEKVGSETVLAQIVDFVKKAQTSRAPIQDLTDKISGIFVPVVVILGIMTFWVWFVLLRDSVVVLGASFVSSLLYGVAVLIIACPCALGLATPTALMVGTGRSAKMGVLLKNGTVLQEIQKVQTLVFDKTGTLTEGKPVVTDIIGDEVEVFGLAASLEDASQHPLAEAIVKRASEAGLEFQTVENFQALHGKGVSGRINGKQVLLGNAKMLDGMDISNTYQDKLEELEKEAKTVVFLAVDNEIKGLLALQDIPKENAKLAISQLKKRGLRTVMLTGDNAGVARAIADQIGIEEVIAGVLPEEKAHEIHKLQAAGKVAFVGDGINDAPALSVADVGIAMGAGTDIAIESADLVLTTNNLLGVVRAFDMSKKTFHRILLNLFWAFIYNVVGIPIAAGVFSGVGLALNPELAGLAMAFSSVSVLTSSLLLNFSKID

SEQ ID NO: 73876 - protein, 591 aa, Streptococcus pneumoniae
MTQGKITASAAMLNVLKTWGVDTIYGIPSGTLSSLMDALAEDKDIRFLQVRHEETGALAAVMQAKFGGSIGVAVGSGGPGATHLINGVYDAAMDDTPFLAILGSRPVNELNMDAFQELNQNPMYNGIAVYNKRVAYAEQLPKVIDEACRAAISKKGPAVVEIPVNFGFQEIDENSYYGSGSYERSFIAPALNEVEIDKAVEILNNAERPVIYAGFGGVKAGEVITELSRKIKAPIITTGKNFEAFEWNYEGLTGSAYRVGWKPANEVVFEADTVLFLGSNFAFAEVYEAFKNTEKFIQVDIDPYKLGKRHALDASILGDAGQAAKAILDKVNPVESTPWWRANVKNNQNWRDYMNKLEGKTEGELQLYQVYNAINKHADQDAIYSIDVGNTTQTSTRHLHMTPKNMWRTSPLFATMGIALPGGIAAKKDNPDRQVWNIMGDGAFNMCYPDVITNVQYDLPVINLVFSNAEYGFIKNKYEDTNKHLFGVDFTNADYAKIAEAQGAVGFTVDRIEDIDAVVAEAVKLNKEGKTVVIDARITQHRPLPVEVLELDPKLHSEEAIKAFKEKYEAEELVPFRLFLEEEGLQSRAIK

SEQ ID NO: 73877 - protein, 314 aa, Streptococcus pneumoniae
MSEPLFLQSVMQEKIWGGTKLRDEFGYDIPSEKVGEYWAISAHLNGVSKVANGRYEGTDLATLYAEHRELFGNRPEPVFPLLTKILDANDWLSVQVHPDDAYGLEHEGELGKTECWYIIAADEGSEIIYGHNAKSKEELRQQIEDKNWDALLTKVPVKAGDFFYVPSGTMHAIGAGILILETQQSSDTTYRVYDFDRKDDKGNLRELHLEKSIDVLNIGEPANSRPVTIKADDLRSTLLVSNDFFAVYKWEITGKVNFEKTADYSLLSVLAGQGQLTVDGKNYPIQKGRHFILPSDVESWTLEGQDLELIVSHP

SEQ ID NO: 73878 - protein, 220 aa, Streptococcus pneumoniae
MVPLKSENGYRTYSQEDLERLQVILYYKYLGFSLEKIAELLKEERTDLLPHLTRQLDYLTRERQHLDTLISTLQKTIQEQKGERKMTIEEKFTGFSYQDNQKYHQEAVEKYGQEVMGQALERQKGHEDEATAAFNQVFQTLAQNLQVGLPATATENQEQAAKLLQAIRTYGFDCSIEVFGHIGKGYVYNPEFKENIDKFGSETAQYTSDAIAAYVQTNAE

SEQ ID NO: 73879 - protein, 397 aa, Streptococcus pneumoniae
MWYNRAMKHFDTIVIGGGPAGMMATISSSFYGQKTLLIEKNRKLGKKLAGTGGGRCNVTNNGSLDNLLAGIPGNGRFLYSVFSQFDNHDIINFFTENGVKLKVEDHGRVFPASDKSRTIIEALEKKITELGGQVATQIEIVSVKKVDDQFVLKSADQTFTCEKLIVTTGGKSYPSTGSTGFGHEIARHFKHTITDLEAAESPLLTDFPHKALQGISLDDVTLSYGKHVITHDLLFTHFGLSGPAALRMSSFVKGGEVLSLDVLPQLSEKDLVTFLEENREKSLKNALKTLLPERLAEFFVQGYPEKVKQLTEKEREQLVQSIKELKIPVTGKMSLAKSFVTKGGVSLKEINPKTLESKLVPGLHFAGEVMDINAHTGGFNITSALCTGWVAGSLHYD

SEQ ID NO: 73880 - protein, 216 aa, Streptococcus pneumoniae
MKEGIPKMGKIEVINHPLIQHKLSILRRTDTSTKAFRELVDEIAMLMGYEVLRDLPLEDVEIETPITKTVQKQLAGKKLAIVPILRAGIGMVDGLLSLVPAAKVGHIGMYRDEETLQPVEYLVKLPEDIDQRQIFVVDPMLATGGSAILAVDSLKKRGASNIKFVCLVSAPEGVKALQEAHPDVEIFTAALDERLNEHGYIVPGLGDAGDRLFGTK

SEQ ID NO: 73881 - protein, 318 aa, Streptococcus pneumoniae
MKENLKVNILWLLLLLAGYSLISVLVSVGVLNLFYVQILQQIGINIILAVGLNLIVGFSGQFSLGHAGFMAIGAYAAAIIGSKSPTYGAFFGAMLVGALLSGAVALLVGIPTLRLKGDYLAVATLGVSEIIRIFIINGGSLTNGAAGILGIPNFTTWQMVYFFVVITTIATLNFLRSPIGRSTLSVREDEIAAESVGVNTTKIKIIAFVFGAITASIAGSLQAGFIGSVVPKDYTFINSINVLIIVVFGGLGSITGAIVSAIVLGILNMLLQDVASVRMIIYALALVLVMIFRPGGLLGTWELSLSRFFKKSKKEEQN

SEQ ID NO: 73882 - protein, 329 aa, Streptococcus pneumoniae
MENKMTEPDFWNDNIAAQKMSQELNELKNTYNTFHKMEELQDEVEILLDFLAEDESVHDELVAQLAELDKIMTSYEMTLLLSEPYDHNNAILEIHPGSGGTEAQDWGDMLLRMYTRYGNAKGFKVEVLDYQAGDEAGIKSVTLSFEGPNAYGLLKSEMGVHRLVRISPFDSAKRRHTSFTSVEVMPELDDTIEVEIREDDIKMDTFRSGGAGGQNVNKVSTGVRLTYIPTGIVVQSTVDRTQYGNRDRAMKMLQAKLYQMEQEKKAAEVDSLKGEKKEITWGSQIRSYVFTPYTMVKDHRTSFEVAQVDKVMDGDLDGFIDAYLKWRIS

SEQ ID NO: 73883 - protein, 447 aa, Streptococcus pneumoniae
MSFTKFQFKNYIREALKELKFTTPTEVQDKLIPIVLAGRDLVGESKTGSGKTHTFLLPIFQQLDEASDSVQAVITAPSRELATQIYQVARQISAHSDVEVRVVNYVGGTDKARQIEKLESNQPHIVIGTPGRIYDLVKSGDLAIHKAKTFVVDEADMTLDMGFLETVDKIAGSLPKDLQFMVFSATIPQKLQPFLKKYLSNPVMEKIKTKTVISDTIDNWLISTKGHDKNAQIYQLTQLMQPYLAMIFVNTKTRADELHSYLTAQGLKVAKIHGDIAPRERKRIMNQVQNLDFEYIVATDLAARGIDIEGVSHVINDAIPQDLSFFVHRVGRTGRNGLPGTAITLYQPSDDSDIRELEKLGIKFSPKMVKDGEFQDTYDRDRRANREKKQDKLDIEMIGLVKKKKKKVKPGYKKKIQWAVDEKRRKTKRAENRARGRAERKAKRQTF

SEQ ID NO: 73884 - protein, 396 aa, Streptococcus pneumoniae
MSERKLFTSESVSEGHPDKIADQISDAILDAILAKDPEAHVAAETAVYTGSVHVFGEISTNAYVDINRVVRDTIAEIGYTNTEYGFSAETVGVHPSLVEQSPDIAQGVNEALEVRGNADQDPLDLIGAGDQGLMFGFAVDETEELMPLPIALSHKLVRRLAELRKSGEISYLRPDAKSQVTVEYDENDRPVRVDTVVISTQHDPEATNEQIHQDVIDKVIKEVIPSSYLDDKTKFFINPTGRFVIGGPQGDSGLTGRKIIVDTYGGYSRHGGGAFSGKDATKVDRSASYAARYIAKNIVAAGLAKKAEVQLAYAIGVAQPVSVRIDTFGTGTVAESQLEKAARQIFDLRPAGIIQMLDLKRPIYRQTSAYGHMGRTDIDLPWERLDKVDALKEAVK

SEQ ID NO: 73885 - protein, 176 aa, Streptococcus pneumoniae
MRKEIAPELYNYNKFPGPEFHLHGDKVETEGIAFSLVENIKDAFDVTTFNQRFSEVLTKFDYIVGDWSNEQLRLRGFYKDDRTEEKLEKISRLQDYLLEYCSYGCAYFVLENEAPKRASFDKKMRKTEEETPSRKGKKPTQTKRKSNADKKNRRRQKDQHSQKEDKEQRHFVIRQK

SEQ ID NO: 73886 - protein, 361 aa, Streptococcus pneumoniae
MKPSIHSLAHQTMQEWVLEQGEKKFRADQIWEWLYRKRVQSFEEMTNLSKDLIAKLNDQFVVNPLKQRIVQESADGTVKYLFELPDGMLIETVLMRQHYGLSVCVTTQVDCNIGCTFCASDLIKKQRDLNNGEIVAQIMLVQKYFAERGQDERVSHIVVMGIGEPFDNYNNVLNFVCTINDDKGMAIGARHITVSTSGLAHKIRNFADEGVQVNLAVSLHAPNNELRSSIMKINRAFPIEKLFAAIEYYIETTNRRVTFEYIMLNEVNDSVEQALELAELLKNIKKLSYVNLIPYNPVSEHDQYSRSPKERVLAFYDTLKKKGGNCVVRQEYGTDIDAACGQLRSNTMKRDRQKAVAEVNP

SEQ ID NO: 73887 - protein, 90 aa, Streptococcus pneumoniae
MAVKIRLTRMGSKKKPFYRINVADSRSPRDGRFIETVGTYNPLVAENQVTLKEDRVLAWLANGAQPSDTVRNILSKEGVLKKFHDSKFSK

SEQ ID NO: 73888 - protein, 79 aa, Streptococcus pneumoniae
MDTIENLIIAIVKPLISQPDALTIKIEDTPEFLEYHLNLDQSDVGRVIGRKGRTISAIRTIVYSVPTEYKKVRIVIDEK

SEQ ID NO: 73889 - protein, 172 aa, Streptococcus pneumoniae
MNYFNVGKIVNTQGLQGEMRVLSVTDFAEERFKKGAELALFDEKDQFVQTVTIASHRKQKNFDIIKFKDMYHINTIEKYKGYSLKVAEEDLNDLDDGEFYYHEIIGLEVYEGDSLVGTIKEILQPGANDVWVVKRKGKRDLLLPYIPPVVLNVDIPNKRVDVEILEGLDDED

SEQ ID NO: 73890 - protein, 239 aa, Streptococcus pneumoniae
MKIDILTLFPEMFSPLEHSIVGKAREKGLLDIQYHNFRENAEKARHVDDEPYGGGQGMLLRVQPIFDSFDAIEKKNPRVILLDPAGKQFDQAYAEDLAQEEELIFICGHYEGYDERIKTLVTDEISLGDYVLTGGELAAMTMIDATVRLIPEVIGKESSHQDDSFSSGLLEYPQYTRPYDYRGMVVPDVLMSGHHEKIRQWRLYESLKKTYERRPDLLEHYQLTVEEEKMLAEIKENKE

SEQ ID NO: 73891 - protein, 448 aa, Streptococcus pneumoniae
MREYDIIAIGGGSGGIATMNRAGEHGAQAAVIEEKKLGGTCVNVGCVPKKIMWYGAQIAETFHQFGEDYGFKTTDLNFDFATLRRNRESYIDRARSSYDGSFKRNGVDLIEGHAEFVDSHTVSVNGELIRAKHIVIATGAHPSIPNIPGAELGGSSDDVFAWEELPESVAILGAGYIAVELAGVLHTFGVKTDLFVRRDRPLRGFDSYIVEGLVKEMERTNLPLHTHKVPVKLEKTTDGITIHFEDGTSHTASQVIWATGRRPNVKGLQLEKAGVTLNERGFIQVDEYQNTVVEGIYALGDVTGEKELTPVAIKAGRTLSERLFNGKTTAKMDYSTIPTVVFSHPAIGTVGLTEEQAIKEYGQDQIKVYKSSFASMYSACTRNRQESRFKLITAGSEEKVVGLHGIGYGVDEMIQGFAVAIKMGATKADFDATVAIHPTSSEEFVTMR

SEQ ID NO: 73892 - protein, 399 aa, Streptococcus pneumoniae
MKKKNGKAKKWQLYAAIGAASVVVLGAGGILLFRQPSQTALKDEPTHLVVAKEGSVASSVLLSGTVTAKNEQYVYFDASKGDLDEILVSVGDKVSEGQALVKYSSSEAQAAYDSASRAVARADRHINELNQARNEAASAPAPQLPAPVGGEDATVQSPTPVAGNSVASIDAQLGDARDARADAAAQLSKAQSQLDATTVLSTLEGTVVEVNSNVSKSPTGASQVMVHIVSNENLQVKGELSEYNLANLSVGQEVSFTSKVYPDKKWTGKLSYISDYPKNNGEAASPAAGNNTGSKYPYTIDVTGEVGDLKQGFSVNIEVKSKTKAILVPVSSLVMDDSKNYVWIVDEQQKAKKVEVSLGNADAENQEITSGLTNGAKVISNPTSSLEEGKEVKTDEATN

SEQ ID NO: 73893 - protein, 679 aa, Streptococcus pneumoniae
MLEKQVSFAWKGKIMSEKNFYITTPIYYPSGKLHIGSAYTTIACDVLARYKRLMGYDVFYLTGLDEHGQKIQQKAEEAGITPQAYVDGMAVGVKELWQLLDISYDKFIRTTDDYHEKVVAQVFERLLAQDDIYLGEYSGWYSVSDEEFFTESQLAEVFRDEAGNVTGGIAPSGHEVEWVSEESYFLRLSKYQDRLVEFFKAHPEFITPDGRLNEMLRNFIEPGLEDLAVSRTTFTWGVPVPSNPKHVVYVWIDALLNYATALGYAQDEHGNFDKFWNGTVFHMVGKDILRFHSIYWPILLMMLDVKLPDRLIAHGWFVMKDGKMSKSKGNVVYPEMLVERYGLDPLRYYLMRNLPVGSDGTFTPEDYVGRINYELANDLGNLLNRTVSMINKYFDGQIPAYVEGVTEFDHVLAEVAEQSIADFHTHMEAVDYPRALEAVWTLISRTNKYIDETAPWVLAKDEALRDQLASVMSHLAASIRVVAHLIEPFMMETSRAVLTQLGLEEVSSLENLSLADFPADVTVVAKGTPIFPRLNMEEEIAYIKEQMEGNKPAVEKEWNPDEVELKLNKDEIKFEDFDKVEIRVAEVKEVSKVEGSDKLLQFRLDAGDGEDRQILSGIAKYYPNEQELVGKKVQIVANLKPRKMMKKYVSQGMILSAEHDGKLTLLTVDPAVPNGSVIG

SEQ ID NO: 73894 - protein, 848 aa, Streptococcus pneumoniae
MQAVEHFIKQFVPEHYDLFLDLSRETKTFSGKVTITGQAQSDRISLHQKDLEITSVEVAGQARPFTVDHDNEALHIELAEAGQVELVLAFSGKITDNMTGIYPSYYTVDGVKKEVLSTQFESHFAREAFPCVDEPEAKATFDLSLRFDQAEGELALSNMPEIDVENRKETGIWKFETTPRMSSYLLAFVAGDLQGVTAKTKNGTLVGVYSTKAHPLSNLDFSLDIAVRSIEFYEDYYGVKYPIPQSLHIALPDFSAGAMENWGLVTYREVYLVVDENSTFASRQQVALVVAHELAHQWFGNLVTMKWWDDLWLNESFANMMEYVCVDTIEPSWNIFEDFQTGGVPLALERDATDGVQSVHVEVKHPDEINTLFDGAIVYAKGSRLMHMLRRWLGDADFAKGLHAYFEKHQYSNTIGSDLWDALGQASGRDVAAFMDSWLEQPGYPVLTVKVENDVLKISQKQFFIGENEDKNRLWVVPLNSNWKGLPDTLETESIEIPGYAALLAENEGALRLNTENTAHYITDYQGDLLEAVLAELETLDNTSKLQIVQERRLLAEAGHISYADLLPVLDKLAKEESYLVVSAVSQVISALERFIDEGTDAETAFKGLVAKLARHNYDRLGFEAKDGESDEDELVRQLAVSMMIRSNDAEASQVASQIFATHKENLAGLPAAIRSQVLINEMKHHETKDLLALYLDTYTHATDAVFKRQLAAALAYSTDADNIQNLITSWKDKFVVKPQDLSAWYYQFLAHQATQKTAWSWARENWAWIKAALGGDMSFDSFVILPAHVFKTQQRLAEYKEFFEPQLSDLALSRNIGMGIKEIAARVDLISREKAAVEAVVLQYGNA

SEQ ID NO: 73895 - protein, 648 aa, Streptococcus pneumoniae
MTEEIKNLQAQDYDASQIQVLEGLEAVRMRPGMYIGSTSKEGLHHLVWEIVDNSIDEALAGFASHIQVFIEPDDSITVVDDGRGIPVDIQEKTGRPAVETVFTVLHAGGKFGGGGYKVSGGLHGVGSSVVNALSTQLDVHVHKNGKIHYQEYRRGHVVADLEIVGDTDKTGTTVHFTPDPKIFTETTIFDFDKLNKRIQELAFLNRGLQISITDKRQGLEQTKHYHYEGGIASYVEYINENKDVIFDTPIYTDGEMDDITVEVAMQYTTGYHENVMSFANNIHTHEGGTHEQGFRTALTRVINDYARKNKLLKDNEDNLTGEDVREGLTAVISVKHPNPQFEGQTKTKLGNSEVVKITNRLFSEAFSDFLMENPQIAKRIVEKGILAAKARVAAKRAREVTRKKSGLEISNLPGKLADCSSNNPAETELFIVEGDSAGGSAKSGRNREFQAILPIRGKILNVEKASMDKILANEEIRSLFTAMGTGFGAEFDVSKARYQKLVLMTDADVDGAHIRTLLLTLIYRYMKPILEAGYVYIAQPPIYGVKVGSEIKEYIQPGADQEIKLQEALARYSEGRTKPTIQRYKGLGEMDDHQLWETTMDPEHRLMARVSVDDAAEADKIFDMLMGDRVEPRREFIEENAVYSTLDV

SEQ ID NO: 73896 - protein, 244 aa, Streptococcus pneumoniae
MTETLIKIENLHKSFGKNEVLKGINLEIKRGEVVVIIGPSGSGKSTLLRSMNLLEEATKGKVIFEGVDITDKKNDLFAMREKMGMVFQQFNLFPNMTVMENITLSPIKTKGESREVAEKRAQELLEKVGLPDKADAYPQSLSGGQQQRIAIARGLAMEPDVLLFDEPTSALDPEMVGEVLAVMQDLAKSGMTMVIVTHEMGFAREVADRVIFMADGVVVEDGTPEQIFEQTQEQRTKDFLRKVL

SEQ ID NO: 73897 - protein, 83 aa, Streptococcus pneumoniae
MEVRTLANIKSAIKRAELNVKQNEKNSAQKSAMRTAIKAFEANPSEELFRAASSAIDKAETKGLIHKNKASRDKARLSAKLAK

SEQ ID NO: 73898 - protein, 196 aa, Streptococcus pneumoniae
MSKMYYAENPDAAHDIHELRVELLGQKMTFLTDAGVFSKKIVDFGSQLLLKCLEVNQGETVLDVGCGYGPLGLSLAKAYGVQATMVDINTRALDLARRNAEKNNAKATIFQSNIYEQVEGHFDHVISNPPIRAGKQVVHEIIEKSKDFLETSGDLTIVIQKKQGAPSAKSKMEDVFGNCEILKKDKGYYILRSVKE

SEQ ID NO: 73899 - protein, 220 aa, Streptococcus pneumoniae
MKLNKYIDHTLLKQDAKKKQIDSLLSEAREYGFASVCVNPTWVEHAKKGLEGTDVKVCTVVGFPLGATTSAVKAFETKEAIQNGADEIDMVINVGALKSGNLALVESDIRAVVEASGDKLVKVIIEACLLTDQEKIVVCQLAQKAGADFVKTSTGFSTGGATIADVTLMRETVGSDMGVKAAGGARSYADALAFVEAGATRIGTSAGVAILKGELADGDY

SEQ ID NO: 73900 - protein, 162 aa, Streptococcus pneumoniae
MEQCYTDVTEFAIPVSTQKLYLSPVLDGFNSEIIAYNLSTSPNLEQVQTMLEQAFTEKHYENTILHSDQGWQYQHDSYHRFLESKGIQASMSRKGNSQDNGMMESFFGILKSEMFYGYEKTFKSLNQLEQAIIDYIDYYNNKRIKVKLKGLSPVQYRTKSFG

SEQ ID NO: 73901 - protein, 213 aa, Streptococcus pneumoniae
MITIVLLILAYLLGSIPSGLWIGQVFFQINLREHGSGNTGTTNTFRILGKKAGMATFVIDFFKGTLATLLPIIFHLQGVSPLIFGLLAVIGHTFPIFAGFKGGKAVATSAGVIFGFAPIFCLYLAIIFFGALYLGSMISLSSVTASIAAVIGVLLFPLFGFILSNYDSLFIAIILALASLIIIRHKDNIARIKNKTENLVPWGLNLTHQDPKK

SEQ ID NO: 73902 - protein, 647 aa, Streptococcus pneumoniae
MSKKEININNYNDDAIQVLEGLDAVRKRPGMYIGSTDGAGLHHLVWEIVDNAVDEALSGFGDRIDVTINKDGSLTVQDHGRGMPTGMHAMGIPTVEVIFTILHAGGKFGQGGYKTSGGLHGVGSSVVNALSSWLEVEITRDGAVYKQRFENGGKPVTTLKKIGTALKSKTGTKVTFMPDATIFSTTDFKYNTISERLNESAFLLKNVTLSLTDKRTDEAIEFHYENGVQDFVSYLNEDKEILTPVLYFEGEDNGFQVEVALQYNDGFSDNILSFVNNVRTKDGGTHETGLKSAITKVMNDYARKTGLLKEKDKNLEGSDYREGLAAVLSILVPEEHLQFEGQTKDKLGSPLARPVVDGIVADKLTFFLMENGELASNLIRKAIKARDAREAARKARDESRNGKKNKKDKGLLSGKLTPAQSKNPAKNELYLVEGDSAGGSAKQGRDRKFQAILPLRGKVINTAKAKMADILKNEEINTMIYTIGAGVGADFSIEDANYDKIIIMTDADTDGAHIQTLLLTFFYRYMRPLVEAGHVYIALPPLYKMSKGKGKKEEVAYAWTDGELEELRKQFGKGATLQRYKGLGEMNADQLWETTMNPETRTLIRVTIEDLARAERRVNVLMGDKVEPRRKWIEDNVKFTLEEATVF

SEQ ID NO: 73903 - protein, 826 aa, Streptococcus pneumoniae
MYLMSNIQNMSLEDIMGERFGRYSKYIIQDRALPDIRDGLKPVQRRILYSMNKDSNTFDKSYRKSAKSVGNIMGNFHPHGDSSIYDAMVRMSQNWKNREILVEMHGNNGSMDGDPPAAMRYTEARLSEIAGYLLQDIEKKTVPFAWNFDDTEKEPTVLPAAFPNLLVNGSTGISAGYATDIPPHNLAEVIDAAVYMIDHPTAKIDKLMEFLPGPDFPTGAIIQGRDEIKKAYETGKGRVVVRSKTEIEKLKGGKEQIVITEIPYEINKANLVKKIDDVRVNNKVAGIAEVRDESDRDGLRIAIELKKDANTELVLNYLFKYTDLQINYNFNMVAIDNFTPRQVGIVPILSSYIAHRREVILARSRFDKEKAEKRLRIVEGLIRVISILDEVIALIRASENKADAKENLKVSYDFTEEQAEAIVTLQLYRLTNTDVVVLQEEEAELREKIAMLAAIIGDERTMYNLMKKELREVKKNFATPRLSSLEDTAKAIEIDTASLIAEEDTYVSVTKAGYIKRTSPRSFAASTLEEIGKRDDDRLIFVQSAKTTQHLLMFTSLGNVIYRPIHELADIRWKDIGEHLSQTITNFETNEAILYVEVLDQFDDATTYFAATRLGQIKRVERKEFTPWRTYRSKSVKYAKLKDDTDQIVAVAPIKLDDVVLVSQNGYALRFNIEEVPVVGAKAAGVKAMNLKEDDVLQSGFICNTSSFYLLTQRGSLKRVSIEEILATSRAKRGLQVLRELKNKPHRVFLAGAVAEQGFVGDFFSTEVDVNDQTLLVQSNKGTIYESRLQDLNLSERTSNGSFISDTISDEEVFDAYLQEVVTEDK

SEQ ID NO: 73904 - protein, 340 aa, Streptococcus pneumoniae
MTVTIDWENLGFSYMKLPYRYLAHFKNGQWDQGELTEDATLHISESSPSLHYGQQAFEGLKAYRTKDGSVQLFRPDENAKRLQRTCDRLLMPQVPTDMFVEACKAVVRANEEYVPLYGIGGTLYLRPLLIGVGDIIGVKPAEEYIFTIFAMPVGNYFKGGLVPTNFLIQDEYDRAAPNGTGAAKVGGNYAASLLPGKMAKSRHFSDVIYLDPSTHTKIEEVGSANFFGITADNEFVTPLSPSILPSITKYSLLYLAEHRLGLTPIEGDVPIDNLDRFVEAGACGTAAVISPIGGIQHGDDFHVFYSETEVGPVTRKLYNELTGIQFGDIEAPEGWIVKVD

SEQ ID NO: 73905 - protein, 400 aa, Streptococcus pneumoniae
MNEFEDLLNSVSQVETGDVVSAEVLTVDATQANVAISGTGVEGVLTLRELTNDRDADINDFVKVGEVLDVLVLRQVVGKDTDTVTYLVSKKRLEARKAWDKLVGREEEVVTVKGTRAVKGGLSVEFEGVRGFIPASMLDTRFVRNAERFVGQEFDTKIKEVNAKENRFILSRREVVEAATAAARAEVFGKLAVGDVVTGKVARITSFGAFIDLGGVDGLVHLTELSHERNVSPKSVVTVGEEIEVKILDLNEEEGRVSLSLKATVPGPWDGVEQKLAKGDVVEGTVKRLTDFGAFVEVLPGIDGLVHVSQISHKRIENPKEALKVGQEVQVKVLEVNADAERVSLSIKALEERPAQEEGQKEEKRAARPRRPRRQEKRDFELPETQTGFSMADLFGDIEL

SEQ ID NO: 73906 - protein, 551 aa, Streptococcus pneumoniae
MYQALYRKYRSQNFSQLVGQEVVAKTLKQAVEQEKISHAYLFSGPRGTGKTSVAKIFAKAMNCPNQVGGEPCNNCYICQAVTDGSLEDVIEMDAASNNGVDEIREIRDKSTYAPSLARYKVYIIDEVHMLSTGAFNALLKTLEEPTQNVVFILATTELHKIPATILSRVQRFEFKSIKTQDIKEHIHYILEKENISSEPEAVEIIARRAEGGMRDALSILDQALSLTQGNELTTAISEEITGTISLPALDDYVAALSQQDVPKALSCLNLLFDNGKSMTRFVTDLLHYLRDLLIVQTGGENTHHSSVFVENLALPQKNLFEMIRLATVSLADIKSSLQPKIYAEMMTVRLAEIKSEPALSGAVENEIATLRQEVARLKQELSNVGAVPKQVAPAPSRPATGKTVYRVDRNKVQSILQEAVENPDLARQNLIRLQNAWGEVIESLGGPDKALLAGSQPVAANEHHAILAFESNFNAGQTMKRDNLNTMFGNILSQAAGFSPEILAISMEEWKEVRAAFSAKAKSSQTEKEVEESLIPEGFEFLADKVKVEED

SEQ ID NO: 73907 - protein, 263 aa, Streptococcus pneumoniae
MKKKGTIMSVLEIKDLHVEIEGKEILKGVNLTLKTGEIAAIMGPNGTGKSTLSAAIMGNPNYEVTKGEVLFDGVNILELEVDERARMGLFLAMQYPSEIPGITNAEFLRAAMNAGKEDDEKISVREFITKLDEKMELLNMKEEMAERYLNEGFSGGEKKRNEILQLLMLEPTFALLDEIDSGLDIDALKVVSKGVNAMRGEGFGAMIITHYQRLLNYITPDVVHVMMEGRVVLSGGPELAARLEREGYAKLAEELGYDYKEEL

SEQ ID NO: 73908 - protein, 146 aa, Streptococcus pneumoniae
MALSKLDSLYMAVVADHSKNPHHQGKLEDAEQISLNNPTCGDVINLSVKFDAEDRLEDIAFLNSGCTISTASASMMTDAVLGKTKQEILELATIFSEMVQGQKDERQDQLGDAAFLSGVAKFPQRIKCATLTWNALKKTIENQEKQ

SEQ ID NO: 73909 - protein, 303 aa, Streptococcus pneumoniae
MIYTVTLNPSIDYIVRLDQVKVGSVNRMDSDDKFAGGKGINVSRVLKRLNIPNTATGFIGGFTGKFITDTLAEEEIETRFVQVAEDTRINVKIKADQETEINGTGPTVEPVQLEELKAILSSLTAEDTVVFAGSSAKNLGNVIYKDLISLTRQTGAQVVCDFEGQTLIDSLDYQPLLVKPNNHELGAIFGVKLESLDEIEKYARELLAKGAQNVIISMAGDGALLVTSEGAYFAKPIKGTVKNSVGAGDSMVAGFTGEFVKSKDAVEAFKWGVACGTATTFSDDLATAEFIKETYGKVEVEKR

SEQ ID NO: 73910 - protein, 650 aa, Streptococcus pneumoniae
MKIQDLLRKDVMLLDLQATEKTAVIDEMIKNLTEHGYVTDFETFKEGILAREALTSTGLGDGIAMPHSKNAAVKEATVLFAKSNKGVDYESLDGQATDLFFMIAAPEGANDTHLAALAELSQYLMKDGFADKLRQATSADQVIELFDQASEKTEELVQAPANDSGDFIVAVTACTTGIAHTYMAQEALQKVAAEMGVGIKVETNGASGVGNQLTAEDIRKAKAIIIAADKAVEMDRFDGKPLINRPVADGIRKTEELINLALSGDTEVYRAANGAKAATASNEKQSLGGALYKHLMSGVSQMLPFVIGGGIMIALAFLIDGALGVPNENLGNLGSYHELASMFMKIGGAAFGLMLPVFAGYVAYSIAEKPGLVAGFVAGAIAKEGFAFGKIPYAAGGEATSTLAGVSSGFLGALVGGFIAGALVLAIKKYVKVPRSLEGAKSILLLPLLGTILTGFVMLAVNIPMAAINTAMNDFLGGLGGGSAVLLGIVLGGMMAVDMGGPVNKAAYVFGTGTLAATVSSGGSVAMAAVMAGGMVPPLAIFVATLLFKDKFTKEERNSGLTNIIMGLSFITEGAIPFGAADPARAIPSFILGSAVAGGLVGLTGIKLMAPHGGIFVIALTSNALLYLVSVLVGAIVSGVVYGYLRKPQA

SEQ ID NO: 73911 - protein, 767 aa, Streptococcus pneumoniae
MANKNTSTTRRRPSKAELERKEAIQRMLISLGIAILLIFAAFKLGAAGITLYNLIRLLVGSLAYLAIFGLLIYLFFFKWIRKQEGLLSGFFTIFAGLLLIFEAYLVWKYGLDKSVLKGTMAQVVTDLTGFRTTSFAGGGLIGVALYIPTAFLFSNIGTYFIGSILILVGSLLVSPWSVYDIAEFFSRGFAKWWEGHERRKEERFVKQEEKARQKAEKEARLEQEETEKALLDLPPVDMETGEILTEEAVQNLPPIPEEKWVEPEIILPQAELKFPEQEDDSDDEDVQVDFSAKEALEYKLPSLQLFAPDKPKDQSKEKKIVRENIKILEATFASFGIKVTVERAEIGPSVTKYEVKPAVGVRVNRISNLSDDLALALAAKDVRIEAPIPGKSLIGIEVPNSDIATVSFRELWEQSQTKAENFLEIPLGKAVNGTARAFDLSKMPHLLVAGSTGSGKSVAVNGIIASILMKARPDQVKFMMVDPKMVELSVYNDIPHLLIPVVTNPRKASKALQKVVDEMENRYELFAKVGVRNIAGFNAKVEEFNSQSEYKQIPLPFIVVIVDELADLMMVASKEVEDAIIRLGQKARAAGIHMILATQRPSVDVISGLIKANVPSRVAFAVSSGTDSRTILDENGAEKLLGRGDMLFKPIDENHPVRLQGSFISDDDVERIVNFIKTQADADYDESFDPGEVSENEGEFSDGDAGGDPLFEEAKSLVIETQKASASMIQRRLSVGFNRATRLMEELEIAGVIGPAEGTKPRKVLQQ

SEQ ID NO: 73912 - protein, 497 aa, Streptococcus pneumoniae
MITGELKNKIDQLWEILWTEGNANPLTNIEQLTYLLFMKDLDSVELGRESDAEFLGIPYEGVFPKDKPEYRWSTFKNIGDAQEVYRLMTQEIFPFIKNLKGDTDDTAFSRYMREAIFQINKPATLQKAISILDVFPTRGLDVDFDNDKQSITDIGDIYEYLLSKLSTAGKNGQFRTPRHIIDMMVELMQPTIKDIISDPAMGSAGFLVSASRYLKRKKDEWETNTDNINHFHNQMFHGNDTDTTMLRLGAMNMMLHGVENPQISYLDSLSQDNEEADKYTLVLANPPFKGSLDYNSTSNDLLATVKTKKTELLFLSLFLRTLKPGGRAAVIVPDGVLFGSSKAHKGIRQEIVENHKLDAVISMPSGVFKPYAGVSTAILIFTKTGNGGTDKVWFYDMKADGLSLDDKRQPISDNDIPDIIERFHHLEKEAERQRTDQSFFVPVAEIKENDYDLSINKYKEIEYEKVEYEPTEVILKKINDLEKEIQAGLAELEKLLK

SEQ ID NO: 73913 - protein, 1042 aa, Streptococcus pneumoniae
MRRIEEKCKLIAQLDTKTVYSFMESVISIEKYVRAAKEYGYTHLAMMDIDNLYGAFDFLEITKKYGIHPLLGLEMTVFVDDQEVNLRFLALSSVGYQQLMKLSTAKMQGEKTWSVLSQYLEDIAVIVPYFDRVESLELGCDYYIGVYPETLASEFHHPILPLYRVNAFESRDREVLQVLTAIKENLPLREVPLRSRQDVFISASSLEKLFQECFPQALDNLEKLISGISYDLDTSLKLPRFNPARPAVEELRERAELGLVQKGLTSKEYQDRLDQELSVIHDMGFDDYFLVVWDLLRFGRSNGYYMGMGRGSAVGSLVSYALDITGIDPVEKNLIFERFLNRERYTMPDIDIDIPDIYRPDFIRYVGNKYGSKHAAQIVTFSTFGAKQALRDVLKRFGVPEYELSAITKKISFRDNLKSAYEGNLQFRQQINSKLEYQKAFEIACKIEGYPRQTSVHAAGVVISDQDLTNYIPLKYGDEIPLTQYDAHGVEASGLLKMDFLGLRNLTFVQKMQELLAEIEGIHLKIEEIDLEDKETLALFASGNTKGIFQFEQPGAIRLLKRVQPVCFEDVVATTSLNRPGASDYINNFVARKHGQEEVTVLDPVLEDILAPTYGIMLYQEQVMQVAQRFAGFSLGKADILRRAMGKKDASAMHEMRASFIQGSLEAGHTVEKAEQVFDVMEKFAGYGFNRSHAYAYSALAFQLAYFKTHYPAIFYQVMLNSSNSDYLIDALEAGFEVASLSINTIPYHDKIANKAIYLGLKSIKGVSNDLALWIIENRPYSNIEDFIAKLPENYLKLPLLEPLVKVGLFDSFEKNRQKVFNNLANLFEFVKELGSLFGDAIYSWQESEDWTEQEKFYMEQELLGIGVSKHPLQAIASKAIYPITPIGNLSENSYAIILVEVQKIKVIRTKKGENMAFLQADDSKKKLDVTLFSDLYRQVGQEIKEGAFYYVKGKIQSRDGRLQMIAQEIREAVAERFWIQVKNHESDQEISRILEQFKGPIPVIIRYEEEQKTIVSPHHFVAKSNELEEKLNEIVMKTIYR

SEQ ID NO: 73914 - protein, 335 aa, Streptococcus pneumoniae
MKRIAVLTSGGDAPGMNAAIRAVVRQAISEGMEVFGIYDGYAGMVAGEIHPLDAASVGDIISRGGTFLHSARYPEFAQLEGQLKGIEQLKKHGIEGVVVIGGDGSYHGAMRLTEHGFPAIGLPGTIDNDIVGTDFTIGFDTAVTTAMDAIDKIRDTSSSHRRTFVIEVMGRNAGDIALWAGIATGADEIIIPEAGFKMEDIVASIKAGYECGKKHNIIVLAEGVMSAAEFGQKLKEAGDISDLRVTELGHIQRGGSPTPRDRVLASRMGAHAVKLLKEGIGGVAVGIRNEKMVENPILGTAEEGALFSLTAEGKIVVNNPHEADIELSSLNKSLS

SEQ ID NO: 73915 - protein, 501 aa, Streptococcus pneumoniae
MNKRVKIVATLGPAVEIRGGKKFGEDGYWGEKLDVEASAKNIAKLIEAGANTFRFNFSHGDHQEQGERMATVKLAEKIAGKKVGFLLDTKGPEIRTELFEGEAKEYSYKTGEKIRVATKQGIKSTREVIALNVAGALDIYDDVEVGRQVLVDDGKLGLRVVAKDDATREFEVEVENDGIIAKQKGVNIPNTKIPFPALAERDNDDIRFGLEQGINFIAISFVRTAKDVNEVRAICEETGNGHVQLFAKIENQQGIDNLDEIIEAADGIMIARGDMGIEVPFEMVPVYQKMIIKKVNAAGKVVITATNMLETMTEKPRATRSEVSDVFNAVIDGTDATMLSGESANGKYPLESVTTMATIDKNAQALLNEYGRLDSDSFERNSKTEVMASAVKDATSSMDIKLVVTLTKTGHTARLISKYRPNADILALTFDELTERGLMLNWGVIPMLTDAPSSTDDMFEIAERKAVEAGLVESGDDIVIVAGVPVGEAVRTNTMRIRTVR

SEQ ID NO: 73916 - protein, 715 aa, Streptococcus pneumoniae
MWYNRFMDKKYEKISQDLGVTLKQIDTVLSLTAEGATIPFIARYRKDMTGSLDEVAIKAIIDLDKSLTNLNDRKEAVLAKIQEQGKLTKELEEAILVAEKLADVEELYLPYKEKRRTKATIAREAGLFPLARLILQNIVDLEKEAEKFVCEGFATGKEALTGAVDILVEALSEDVTLRSMTYQEVLRHSKLTSQAKDESLDEKQVFQIYYDFSETVGTMQGYRTLALNRGEKLGVLKIGFEHATDRILAFFATRFKVKNAYIDEVVQQSVKKKVLPAIERRIRTELTEKAEEGAIQLFSDNLRNLLLVAPLKGRVVLGFDPAFRTGAKLAVVDATGKMLTTQVIYPVKPASARQIEEAKKDLADLIGQYGVEIIAIGNGTASRESEAFVAEVLKDFPEVSYVIVNESGASVYSASELARQEFPDLTVEKRSAISIARRLQDPLAELVKIDPKSIGVGQYQHDVSQKKLSESLDFVVDTVVNQVGVNVNTASPALLSHVAGLNKTISENIVKYREEEGKITSRAQIKKVPRLGAKAFEQAAGFLRIPESSNILDNTGVHPENYTAVKELFKRLDIKDLNEEAQSKLKSLSVKEMAQELDLGPETLKDIIADLLKPGRDFRDSFDAPVLRQDVLDIKDLVVGQKLEGVVRNVVDFGAFVDIGIHEDGLIHISHMSRKFIKHPSQVVSVGDLVTVWVKKIDTEREKVNLSLLAPNETD

SEQ ID NO: 73917 - protein, 302 aa, Streptococcus pneumoniae
MNIQQLRYVVAIANSGTFREAAEKMYVSQPSLSISVRDLEKELGFKIFRRTSSGTFLTRRGMEFYEKAQELVKGFDIFQNQYANPEEEKDEFSVASQHYDFLPPTITAFSERYPDYKNFRIFESTTVQILDEVAQGHSEIGIIYLNNQNKKGIMQRVEKLGLEVIELIPFHTHIYLCEGHPLAQKEELVMEDLADLPTVRFTQEKDEYLYYSENFVDTSASSQMFNVTDRATLNGILERTDAYATGSGFLDSDSVNGITVIRLKDNLDNRMVYVKREEVELSQAGTLFVEVMQEYFDQKRKS

SEQ ID NO: 73918 - protein, 420 aa, Streptococcus pneumoniae
MVSRQEQFEQVQAVKKSINTASEEVKNQALLAMADHLVAATEEILAANALDMAAAKGKISDVMLDRLYLDADRIEAMARGIREVVALPDPIGEVLETSQLENGLVITKKRVAMGVIGIIYESRPNVTSDAAALTLKSGNAVVLRSGKDAYQTTHAIVTALKKGLETTTIHPNVIQLVEDTSRESSYAMMKAKGYLDLLIPRGGAGLINAVVENAIVPVIETGTGIVHVYVDKDADEDKALSIINNAKTSRPSVCNAMEVLLVHENKAASILPRLDQMLVAERKEAGLEPIQFRLDSKASQFVSGQAAETQDFDTEFLDYVLAVKVVSSLEEAVAHIESHSTHHSDAIVTENAEAAAYFTDQVDSAAVYVNASTRFTDGGQFGLGCEMGISTQKLHARGPMGLKELTSYKYVVAGDGQIRE

SEQ ID NO: 73919 - protein, 212 aa, Streptococcus pneumoniae
MSKGFLVSLEGPEGAGKTSVLEALLPILEEKGVEVLTTREPGGVLIGEKIREVILDPSHTQMDAKTELLLYIASRRQHLVEKVLPALEAGKLVIMDRFIDSSVAYQGFGRGLDIEAIDWLNQFATDGLKPDLTLYFDIEVEEGLARIAANSDREVNRLDLEGLDLHKKVRQGYLSLLDKEGNRIVKIDASLPLEQVVETTNAVLFDGMGLAK

SEQ ID NO: 73920 - protein, 296 aa, Streptococcus pneumoniae
MKQDQLKAWQPAQFDRFVRILEQDQLNHAYLFSGFFGSLEMAQFLAKSLFCTDKVGVLPCEKCRSCKLIEQEEFPDVTLIKPVNQVIKTERIRELVGQFSQAGIESQQQVFIIEQADKMHPNAANSLLKVIEEPQSEVYIFFLTSDEEKMLPTIRSRTQIFHFKKQEEKLILLLEQMGLVKKKATLLAKFSQSRAEAEKLAHQASFWTLVDESERLLTWLVAKKKESYLQVAKLANLADDKEKQDQVLRILEVLCGQDLLQVRVRVILQDLLEARKMWQANVSFQNAMEYLVLKEI

SEQ ID NO: 73921 - protein, 289 aa, Streptococcus pneumoniae
MQIQKSFKGQSPYGKLYLVATPIGNLDDMTFRAIQTLKEVDWIAAEDTRNTGLLLKHFDISTKQISFHEHNAKEKIPDLIGFLKAGQSIAQVSDAGLPSISDPGHDLVKAAIEEEIAVVTVPGASAGISALIASGLAPQPHIFYGFLPRKSGQQKQFFGLKKDYPETQIFYESPHRVADTLENMLEVYGDRSVVLVRELTKIYEEYQRGTISELLESIAETPLKGECLLIVEGASQGVEEKDEEDLFVEIQTRIQQGVKKNQAIKEVAKIYQWNKSQLYAAYHDWEEKQ

SEQ ID NO: 73922 - protein, 444 aa, Streptococcus pneumoniae
MSQSYINVIGAGLAGSEAAYQIAERGIPVKLYEMRGVKSTPQHKTDNFAELVCSNSLRGDALTNAVGLLKEEMRRLGSVILESAEATRVPAGGALAVDRDGFSQMVTEKVANHPLIEVVRDEITELPTDVITVIATGPLTSDALAEKIHALNDGDGFYFYDAAAPIIDVNTIDMSKVYLKSRYDKGEAAYLNAPMTKQEFMDFHEALVNAEEAPLNSFEKEKYFEGCMPIEVMAKRGIKTMLYGPMKPVGLEYPDDYTGPRDGEFKTPYAVVQLRQDNAAGSLYNIVGFQTHLKWGEQKRVFQMIPGLENAEFVRYGVMHRNSYMDSPNLLEQTYRSKKQPNLFFAGQMTGVEGYVESAASGLVAGINAARLFKEESEVIFPETTAIGSLAHYITHADSKHFQPMNVNFGIIKELEGERIRDKKARYEKIAERALADLEEFLTV

SEQ ID NO: 73923 - protein, 247 aa, Streptococcus pneumoniae
MKMANPKYKRILIKLSGEALAGERGVGIDIQTVQTIAKEIQEVHSLGIEIALVIGGGNLWRGEPAAEAGMDRVQADYTGMLGTVMNALVMADSLQQVGVDTRVQTAIAMQQVAEPYVRGRALRHLEKGRIVIFGAGIGSPYFSTDTTAALRAAEIEADAILMAKNGVDGVYNADPKKDKTAVKFEELTHRDVINKGLRIMDSTASTLSMDNDIDLVVFNMNQSGNIKRVVFGENIGTTVSNNIEEKE

SEQ ID NO: 73924 - protein, 185 aa, Streptococcus pneumoniae
MANVIIEKAKERMTQSHQSLAREFGGIRAGRANASLLDRVHVEYYGVETPLNQIASITIPEARVLLVTPFDKSSLKDIDRALNASDLGITPANDGSVIRLVIPALTEETRRDLAKEVKKVGENAKVAVRNIRRDAMDEAKKQEKAKEITEDELKTLEKDIQKVTDDAVKHIDDMTANKEKELLEV

SEQ ID NO: 73925 - protein, 141 aa, Streptococcus pneumoniae
MLIGIPKEIKNNENCVALTPAGVHSLVSRGHRVLIETNAGLGSGFTDADYQKQGAEIVATAGEAWAAELVVKVKEPLSSEYGYLRDDLLLFTYLHMAAAPELADAMLAAKTTGIAYETVRDNQGQLPLLVPMSEVAGRMAV

SEQ ID NO: 73926 - protein, 195 aa, Streptococcus pneumoniae
MRACIFTSPLLFFSNKTKEVKTIAKQDLFINDEIRVREVRLIGLEGEQLGIKPLSEAQALADNANVDLVLIQPQAKPPVAKIMDYGKFKFEYQKKQKEQRKKQSVVTVKEVRLSPTIDKGDFDTKLRNARKFLEKGNKVKVSIRFKGRMITHKEIGAKVLAEFAEATQDIAIIEQRAKMDGRQMFMQLAPATDKK

SEQ ID NO: 73927 - protein, 66 aa, Streptococcus pneumoniae
MPKQKTHRASAKRFKRTGSGGLKRFRAYTSHRFHGKTKKQRRHLRKASMVHSGDYKRIKAMLTRLK

SEQ ID NO: 73928 - protein, 119 aa, Streptococcus pneumoniae
MARVKGGVVSRKRRKRILKLAKGYYGAKHILFRTAKEQVMNSYYYAYRDRRQKKRDFRKLWITRINAAARMNGLSYSQLMHGLKLAEIEVNRKMLADLAVNDAVAFTALADAAKAKLGK

SEQ ID NO: 73929 - protein, 143 aa, Streptococcus pneumoniae
MRLEQDCPVFLKIKEKDMASKMLHTCLRVENLEKSIAFYQDAFGFKELRRRDFPDHAFTIVYLGLEGDDYELELTYNYDHGPYVVGDGFAHIALSTPDLEALHQEHSAKGYEVTEPNGLPGTTPNYYFVKDPDGYKVEVIREK

SEQ ID NO: 73930 - protein, 560 aa, Streptococcus pneumoniae
MEYNHKERTMSFDGFFLHHIVEELRSELVNGRIQKINQPFEQELVLQIRSNRQSHRLLLSAHPVFGRIQLTQTTFENPAQPSTFIMVLRKYLQGALIESIEQVENDRIVEMTVSNKNEIGDHIQATLIIEIMGKHSNILLVDKSSHKILEVIKHVGFSQNSYRTLLPGSTYIAPPSTESLNPFTIKDEKLFEILQTQELTAKNLQSLFQGLGRDTANELERILVSEKLSAFRNFFNQETKPCLTETSFSPVPFANQAGEPFANLSDLLDTYYKNKAERDRVKQQASELIRRVENELQKNRHKLKKQERELLATDNAEEFRQKGELLTTFLHQVPNDQDQVILDNYYTNQPIMIALDKALTPNQNAQRYFKRYQKLKEAVKYLTDLIEETKATILYLESVETVLNQAGLEEIAEIREELIQTGFIRRRQREKIQKRKKLEQYLASDGKTIIYVGRNNLQNEELTFKMARKEELWFHAKDIPGSHVVISGNLDPSDAVKTDAAELAAYFSQGRLSNLVQVDMIEVKKLNKPTGGKPGFVTYTGQKTLRVTPDSKKIASMKKS

SEQ ID NO: 73931 - protein, 131 aa, Streptococcus pneumoniae
MDSQDNKRKWKNRDLISSLEFAITGIFTAIKEERNMRKHAVTALVVILAGFGFQVSRIEWLFLLLSIFLVVAFEIINSAIENVVDLASHYHFSMLAKNAKDMAAGAVLVVSLFAALTGALIFLPRIWDLLF

SEQ ID NO: 73932 - protein, 299 aa, Streptococcus pneumoniae
MTFKSGFVAILGRPNVGKSTFLNHVMGQKIAIMSDKAQTTRNKIMGIYTTDKEQIVFIDTPGIHKPKTALGDFMVESAYSTLREVDTVLFMVPADEARGKGDDMIIERLKAAKVPVILVVNKIDKVHPDQLLSQIDDFRNQMDFKEIVPISALQGNNVSRLVDILSENLDEGFQYFPSDQITDHPERFLVSEMVREKVLHLTREEIPHSVAVVVDSMKRDEETDKVHIRATIMVERDSQKGIIIGKGGAMLKKIGSMARRDIELMLGDKVFLETWVKVKKNWRDKKLDLADFGYNEREY

SEQ ID NO: 73933 - protein, 274 aa, Streptococcus pneumoniae
MPELPEVETVCRGLEKLIIGKKISSIEIRYPKMIKTDLEEFQRELPSQIIESMGRRGKYLLFYLTDKVLISHLRMEGKYFYYPDQGPERKHAHVFFHFEDGGTLVYEDVRKFGTMELLVPDLLDAYFISKKLGPEPSEQDFDLQVFQAALAKSKKPIKSHLLDQTLVAGLGNIYVDEVLWRAQVHPARPSQTLTAEEATAIHDQTIAVLGQAVEKGGSTIRTYTNAFGEDGSMQDFHQVYDKTGQECVRCGTIIEKIQLGGRGTHFCPNCQRRD

SEQ ID NO: 73934 - protein, 399 aa, Streptococcus pneumoniae
MTEINWKDNLRIAWFGNFLTGASISLVVPFMPIFVENLGVGSQQVAFYAGLAISVSAISAALFSPIWGILADKYGRKPMMIRAGLAMTITMGGLAFVPNIYWLIFLRLLNGVFAGFVPNATALIASQVPKEKSGSALGTLSTGVVAGTLTGPFIGGFIAELFGIRTVFLLVGSFLFLAAILTICFIKEDFQPVAKEKAIPTKELFTSVKYPYLLLNLFLTSFVIQFSAQSIGPILALYVRDLGQTENLLFVSGLIVSSMGFSSMMSAGVMGKLGDKVGNHRLLVVAQFYSVIIYLLCANASSPLQLGLYRFLFGLGTGALIPGVNALLSKMTPKAGISRVFAFNQVFFYLGGVVGPMAGSAVAGQFGYHAVFYATSLCVAFSCLFNLIQFRTLLKVKEI

SEQ ID NO: 73935 - protein, 155 aa, Streptococcus pneumoniae
MAKGEGKVVAQNKKARHDYTIVDTLEAGMVLTGTEIKSVRAARINLKDGFAQVKNGEVWLSNVHIAPYEEGNIWNQEPERRRKLLLHKKQIQKLEQETKGTGMTLVPLKVYIKDGYAKLLLGLAKGKHDYDKRESIKRREQNRDIARVMKAVNQR

SEQ ID NO: 73936 - protein, 80 aa, Streptococcus pneumoniae
MLEQAFKEKHYENTILHSDQGWQYQHDSYHRFLESKGIQASMSRKGNSQDNGRMESFFGILKSEMFYGYEQTFKSLNQLE

SEQ ID NO: 73937 - protein, 479 aa, Streptococcus pneumoniae
MRNDLKYGIIKGNFYRKEKIMSNFAIILAAGKGTRMKSDLPKVLHKVAGISMLEHVFRSVGAIQPEKTVTVVGHKAELVEEVLAEQTEFVTQSEQLGTGHAVMMTEPILEGLSGHTLVIAGDTPLITGESLKNLIDFHINHKNVATILTAETDNPFGYGRIVRNDNAEVLRIVEQKDATDFEKQIKEINTGTYVFDNERLFEALKNINTNNAQGEYYITDVIGIFRETGEKVGAYTLKDFDESLGVNDRVALATAESVMRRRINHKHMVNGVSFVNPEATYIDIDVEIAPEVQIEANVILKGQTKIGAETVLTNGTYVVDSTIGAGAVITNSMIEESSVADGVTVGPYAHIRPNSSLGAQVHIGNFVEVKGSSIGENTKAGHLTYIGNCEVGSNVNFGAGTITVNYDGKNKYKTVIGDNVFVGSNSTIIAPVELGDNSLVGAGSTITKDVPADAIAIGRGRQINKDEYATRLPHHPKNQ

SEQ ID NO: 73938 - protein, 230 aa, Streptococcus pneumoniae
MKIGIIAAMPEELAYLVQHLDNTQEQVVLGNTYHTGTIASHEVVLVESGIGKVMSAMSVAILADHFQVDALINTGSAGAVAEGIAVGDVVIADKLAYHDVDVTAFGYAYGQMAQQPLYFESDKTFVAQIQESLSQLDQNWHLGLIATGDSFVAGNDKIEAIKSHFPEVLAVEMEGAAIAQAAHTLNLPVLVIRAMSDNANHEANIFFDEFIIEAGRRSAQVLLAFLKALD

SEQ ID NO: 73939 - protein, 589 aa, Streptococcus pneumoniae
MPMKPEKPKKLGLKQIYLNLDKILFLFFLIFMIVEYLWVPFNSWLASFLLDQTGYLFISYNNVLAILTHSPLISLAFLALIVINLLVAYFQIGLLFIGARHLLYNEKRRLIEYIRKVFHESFGFMKKLTCAKALFIFFYIAMLFPFIRKMLKIYYLNKIVIPEFIQAYLEDRYWMWWLSILLLSLIFLYVSVRLMFALPKIVYDQLTVREAVMFSLEKTKKRVTFYAWNLFYILLKAHLLFYLPLIPLLLAQTLVDDITQRESLILGILNFVVIKNLYYMALTYFLVKFVSFLTGKELDMLPRREKDHIVRWGVMTCASLFFALEGYIYLEAPMVHLPQLISHRGVSNANGIQNTVESLETTAQLKPDLVETDVQETKDGQFVMMHDANLKNLAGINKSPQDLNLEELKGIDIFENGYQTKISSFEDYLSRANELGQKLLIEIKTSKKDSPDMMNRFLARYAAKLKIYGHQIQSLDYHVVEKVRQYDAELPVYFIMPYNSVFPKTRATGYTMEYSTLDEYFVSKLWTTDQKLYVWTVNDSEAISKSLHLGVDGVITDDLEKVQREIEVAQEDPEYTDLLLKKALEFFEF

SEQ ID NO: 73940 - protein, 467 aa, Streptococcus pneumoniae
MESKMNIFRTKNVSLDKTEMHRHLKLWDLILLGIGAMVGTGVFTITGTAAATLAGPALVISIVISALCVGLSALFFAEFASRVPATGGAYSYLYAILGEFPAWLAGWLTMMEFMTAISGVASGWAAYFKGLLSQYGIALPQALNGTFNPQAGTFVDLLPILVLVLVTSLVLLNAKAALRFNSILVILKFSALALFVLVGIWNIKFDNWSNFAPYGFGQIYGASTGIMAGASLMFFGFLGFESISMAVDEVKTPQKNIPRGIVLSLSIVTILYALVTLVLTGVVHYSHLNVDDAVAFALRSVGISWAANYVSLVAILTLITVCISMTYALSRMIYSLARDGLVPAAFKELTKTSKVPKNATILTGLASAVAAGMFPLASIAAFLNICTLAYLILLAYGLIRLRKEKGMPKAGEFKTPLVPLLPILSIIICLSFMLQYNVNTWIAFLVALLVGSIIYFTYGYKHSTIEE

SEQ ID NO: 73941 - protein, 406 aa, Streptococcus pneumoniae
MTYPNLLDRFLTYVKVNTRSDEHSTTTPSTQSQVDFATNVLIPEMKRVGLQNVYYLPNGFAIGTLPANDPSLTRKIGFISHMDTADFNAEGVNPQVIENYDGCVIELGNSGFKLDPADFKSLEKYPGQTLITTDGTTLLGADDKSGIAEIMTAIEYLTAHPEIKHCEIRVGFGPDEEIGVGANKFDAEDFDVDFAYTVDGGPLGELQYETFSAAGAELHFQGRNVHPGTAKGQMVNALQLAIDFHNQLPENDRPELTEGYQGFYHLMDVTGSVEEARASYIIRDFEKDAFEARKASMQSIADKMNEELGSNRVTLNLTDQYYNMKEVIEKDMTPITIAKAVMEDLGITPIIEPIRGGTDGSKISFMGIPTPNIFAGGENMHGRFEYVSLQTMERAVDTIIGIVRSL

SEQ ID NO: 73942 - protein, 358 aa, Streptococcus pneumoniae
MGYTVAVVGATGAVGAQMIKMLEESTLPIDKIRYLASARSAGKSLKFKDQDITIEETTETAFEGVDIALFSAGSSTSAKYAPYAVKAGVVVVDNTSYFRQNPDVPLVVPEVNAHALDAHNGIIACPNCSTIQMMVALEPVRQKWGLDRIIVSTYQAVSGAGMGAILETQRELREVLNDGVKPCDLHAEILPSGGDKKHYPIAFNALPQIDVFTDNDYTYEEMKMTKETKKIMEDDSIAVSATCVRIPVLSAHSESVYIETKEVAPIEEVKAAIAAFPGAVLEDDVAHQIYPQAINAVGSRDTFVGRIRKDLDAEKGIHMWVVSDNLLKGAAWNSVQIAETLHERGLVRPTAELKFELK

SEQ ID NO: 73943 - protein, 479 aa, Streptococcus pneumoniae
MLQFEKKLGEFPRKELLIKGNIMITREFDTIAAISTPLGEGAIGIVRLSGTDSFAIAQKIFKGKDLNKVASHTLNYGHIIDPLTGKVMDEVMVGAMKSPKTFTREDIIEINTHGGIAVTNEILQLAIREGARLAEPGEFTKRAFLNGRVDLTQAEAVMDIIRAKTDKAMNIAVKQLDGSLSDLINNTRQEILNTLAQVEVNIDYPEYDDVEEATTAVVREKTMEFEQLLTKLLRTARRGKILREGISTAIIGRPNVGKSSLLNNLLREDKAIVTDIAGTTRDVIEEYVNINGVPLKLIDTAGIRETDDIVEQIGVERSKKALKEADLVLLVLNASEPLTAQDRQLLEISQDTNRIILLNKTDLPETIETSKLPEDVIRISVLKNQNIDKIEERINNLFFENAGLVEQDATYLSNARHISLIEKAVESLQAVNQGLELGMPVDLLQVDLTRTWEILGEITGDATPDELITQLFSQFCLGK

SEQ ID NO: 73944 - protein, 199 aa, Streptococcus pneumoniae
MAQLYYRYGTMNSGKTIEILKVAYNYEEQGKGVVIMTSALDTRDGVGYVSSRIGMKRPALAIEETTDIFGYIRDLPEKPYCVLVDEAQFLKRHHVYDLARVVDELDIPVMAFGLKNDFRNELFEGSKYLLLLADKIDEIKTICQYCKKKATMVLRTQDGLPVYDGEQIQIGGNETYISVCRKHYFAPMITSNKEQNYDN

SEQ ID NO: 73945 - protein, 359 aa, Streptococcus pneumoniae
MNIYDQLQAVEDRYEELGELLSDPDVVSDTKRFMELSKEEASNRDTVIAYREYKQVLQNIVDAEEMIKESGGDADLEEMAKQELKDAKAEKEEYEEKLKILLLPKDPNDDKNIILEIRGAAGGDEAALFAGDLLTMYQKYAEAQGWRFEVMEASMNGVGGFKEVVAMVSGQSVYSKLKYESGAHRVQRVPVTESQGRVHTSTATVLVMPEVEEVEYDIDPKDLRVDIYHASGAGGQNVNKVATAVRIVHLPTNIKVEMQEERTQQKNREKAMKIIRARVADHFAQIAQDEQDAERKSTIGTGDRSERIRTYNFPQNRVTDHRIGLTLQKLDTILSGKLDEVVDALVLYDQTQKLEELNK

SEQ ID NO: 73946 - protein, 279 aa, Streptococcus pneumoniae
MKLAQLFSNFEEELIRQGEEAESLSFVYRSLKNLSFTDFIFALQQEVTTEEEKQFVEDIYQQLAAHKPAQYIIGQADFYGMHLKVDERVLIPRPETEELVELILTENLETNLSVLDIGTGSGAIALALAKNRPDWSVTAADISQEALDLARENAKNQNLQIFLKKSDCFTEISEKYDIIVSNPPYISREDESEVGLNVLYSEPHLALFADEDGLAIYRRIAEDATDYLKDSGKIYLEIGYKQGQCVPELFRKHLPEKRVRTLKDQFGQNRMVVVDDGQD

SEQ ID NO: 73947 - protein, 418 aa, Streptococcus pneumoniae
MIFDKDDFKAYDADLWNAIAKEEERQQNNIELIASENVVSKAVMAAQGSILTNKYAEGYPGRRYYGGTDVVDVVETLAIERAKEIFGAKFANVQPHSGSQANCAAYMSLIEPGDTVMGMDLAAGGHLTHGAPVSFSGQTYNFLSYSVDPETELLDFDAILKQAQEVKPKLIVAGASAYSQIIDFSKFREIADAVGAKLMVDMAHIAGLVAAGLHPSPVPYAHITTTTTHKTLRGPRGGLILTNDEELAKKINSAIFPGIQGGPLEHVVAAKAVSFKEVLDPAFKEYAANVIKNSKAMADVFLQDPDFRIISGGTENHLFLVDVTKVVENGKVAQNLLDEVNITLNKNSIPYETLSPFKTSGIRIGAAAITARGFGEEESRKVAELIIKTLKNSENEAVLEEVRSAVKELTDAFPLYED

SEQ ID NO: 73948 - protein, 339 aa, Streptococcus pneumoniae
MHAKMRNKKQINLGIIFVICLGLLITIFLSLKLGTKEINIRDFLAAFGMGNTNDDFIKSIIYKRIPRTIFAILAGSSLAISGVLMQSVTRNPIADPGILGINTGASLSVVIGLSFLGISSSISHISFAIIGGLVSAIFVYAIAVSGKAGLTPIKLALSGTCVSMALSSFVSFLILPNNNVLDKFRFWQIGSLGAATLSSISTLLPFIILGHLIAIFISSDLNALAMGDEMAVGLGVNVNRIRSLAIIASVLLCSSITAIGGPIGFVGLIVPHFCGLFISKDIRTMTISSAFIGAELLLICDIIGRMLGKPGEIEVGIITAIIGGPVLIYVTMKNRGVNN

SEQ ID NO: 73949 - protein, 264 aa, Streptococcus pneumoniae
MKGLWSNNLTCGYDEKIILENINIKIPEEKISVIIGSNGCGKSTLIKTLSRLIKPLEGEVLLDNKSINSYKEKDLAKHIAILPQSPIIPESITVADLVSRGRFPYRKPFKSLGKDDLEIINRSMVKANVEDLANNLVEELSGGQRQRVWIALALAQDTSILLLDEPTTYLDISYQIELLDLLTDLNQKYKTTICMILHDINLTARYADYLFAIKEGKLVAEGKPEDILNDKLVKDIFNLEAKIIRDPISNSPLMIPIGKHHVNS

SEQ ID NO: 73950 - protein, 203 aa, Streptococcus pneumoniae
MLIYISLIMKMERLSMVILELYQNDYSKDLVAFDSIEDGKAFVAQIPGYTLETEDGFEVEYFNPKNIPDYMEIIFNGNIVPLSKFMFDPGENVNIIWKEISNLSLKNDRVIEGYSKIDAYVVNNHEVKAYVETRETNYRKAKDFLESRGYEIDRSFFGSEDGEAILYRKKGIEVWHFLCHLDPMFVEIEDVEGYVKEEVGEIQ

SEQ ID NO: 73951 - protein, 311 aa, Streptococcus pneumoniae
MHATKCKHFCLKLRIKSMKKAMVIINPTSGGEKALDYKEKLENKAKEYFEYVETKITEKVLDATHFAEEASREQYDAVVVFGGDGTVNEVISGIDERDYIPKLGIIPGGTGNLITKLLEINQDIDGAIDELDFDLTNKIDIGKANDNYFGYIFSIGSLPEAIHNVEIEDKTKFGILTYAVNTMKSVMTDQVFNIKVETENGNYVGEASHVLVLLTNYFADKKIFEENKDGYANILILKDASIFSKLSVIPDLLKGDVVANDNIEYIKARNIKISSDSELESDVDGDKSDNLPVEIKVLAQRVEVFSKPKED

SEQ ID NO: 73952 - protein, 587 aa, Streptococcus pneumoniae
MNTLGDKLMELSAIYHGPESEYAYLYKDKKLHIRIRTKKGDIESINLHYGDPFIFMEEFYQDTKEMVKITSGTLFDHWQVEVSVDFARIQYLFELRDTEGQNILYGDKGCVENSLENLHAIGNGFKLPYLHEIDACKVPDWVSNTVWYQIFPERFANGNALLNPEGTLDWDSSVTPKSDDFFGGDLQGIIDHMDYLQDLGITGLYLCPIFESTSNHKYNTTDYFEIDRHFGDKETFRELVDQAHHRGMKVMLDAVFNHIASQSLQWKNVVKNGEQSAYKDWFHIQQFPVTTEKLVNKRDLPYHVFGFEDYMPKLNTANPEVKNYLLKVATYWIEEFNIDAWRLDVANEIDHQFWKDFRKAVLAKNPDLYILGEVWHTSQPWLNGDEFHAVMNYPLSDSIKDYFLRGIKKTDQFIDEINGESMYYKQQISEVMFNLLDSHDTERILWTANEDVQLVKSALAFLFLQKGTPCIYYVTELALTGGPDPDCRRCMPWERVSSDNDMLNFMKRLIKIRKYASVIISHGKYSLQEINSDLVALEWKYEGRILKAIFNQSTEDYLLEKEAVALASNCQELDNQLVISPDGFMIF

SEQ ID NO: 73953 - protein, 436 aa, Streptococcus pneumoniae
MELSEMINNVFESCIHPEYHFIDLSKIKENRIAIIGGNKSEYLNLILNLMLQGKVVIPINPIQTNSQIETLLNLSDVEAVLTDNSFQCKSEKKTYLFCEFKHIYNNHEREISDTPLVFFSSGTTGVPKPVMINKLAFTELINLMIAQLEISSDDVLYLPSHIAFIQSLWAAMIVIFSGGRVIFKDRITYKTFFKELQLNDATITVMVPTTMNKLVNLYTNTLQECKKLRCIIVGGEIINKDSANFLLNKLKNTNIANAYGMVETTAVCCLQYGRDLKNINSVGTTLPGVEVEVKNIDNDGNGDIWIKTNRFMSGYYPSKYTGEWLYTGDRGYKNKEGLLFVTGRESLSINKGGIKINPIEIEQIILQLPDIQLCKVEKISDNIYGENYILEVISEIKDKNRITGQILKSLGKYYLPDSIKFVESIETTSSGKLKRN

SEQ ID NO: 73954 - protein, 409 aa, Streptococcus pneumoniae
MKISKRHLLNYSILIPYLLLSILGLIVVYSTTSAILIEEGKSALQLVRNQGIFWIVSLILIALIYKLRLDFLRNERLIILVILIEMLLLFLARFIGISVNGAYGWISVAGVTIQPAEYLKIIIIWYLAHRFSKQQEEIATYDFQVLTQNQWLPRAFNDWRFVLLVLIGSLGIFPDLGNATILVLVSLIMYTVSGIAYRWFSTILALVSAASVFVLTTISLIGVETFSKIPVFGYVAKRFSAFFNPFADRADAGHQLANSYFAMVNGGWFGLGLGNSIEKRGYLPEAHTDFVFSIVIEEFGFVGASLILALLFFMILRIILVGIRAENPFNAMVALGVGGMMLVQVFVNIGGISGLIPSTGVTFPFLSQGGNSLLVLSVAVAFVLNIDASEKRAKLYRELENQPMNLLLK

SEQ ID NO: 73955 - protein, 591 aa, Streptococcus pneumoniae
MEVLCMVDKQVIEEIKNNANIVEVIGDVISLQKAGRNYLGLCPFHGEKTPSFSVVEDKQFYHCFGCGRSGDVFKFIEEYQGVTFMEAVQILGQRVGIEVEKPLYSEQKPASPHQALYDMHEDAAKFYHAILMTTTMGEEARNYLYQRGLTDEVLKHFWIGLAPPERNYLYQRLSDQYREEDLLDSGLFYLSDANQFVDTFHNRIMFPLTNDQGKVIAFSGRIWQKTDSQTSKYKNSRSTVIFNKSYELYHMDRAKRSSGKASEIYLMEGFMDVIAAYRAGIENAVASMGTALSREHVEHLKRLTKKLVLVYDGDKAGQAATLKALDEIGDMPVQIVSMPDNLDPDEYLQKNGPEDLAYLLTKTRISPIEFYIHQYKPENGENLQAQIEFLEKIAPLIVQEKSIAAQNSYIHILADSLASFDYTQIEQIVNESRQVQRQNRMERISRPTPITMPVTKQLSAIMRAEAHLLYRMMESPLVLNDYRLREDFAFATPEFQVLHDLLGQYGNLPPEVLAEQTEEVERAWYQVLAQDLPAEISPQELSEVEMTRNKALLNQDNMRIKKKVQEASHVGDTDTALEELERLISQKRRME

SEQ ID NO: 73956 - protein, 369 aa, Streptococcus pneumoniae
MATKQKEVTTFDVQVAEFIRNHKQKGTATDDEINASLVIPFTLDADGIEDLLQRIQDAGISITDNEGNPSARVLSNEEEPELSDEDLIGSTSAKVNDPVRMYLKEIGVVPLLTNEEEKELALAVEAGDIEAKQRLAEANLRLVVSIAKRYVGRGMQFLDLIQEGNMGLMKAVDKFDYSKGFKFSTYATWWIRQAITRAIADQARTIRIPVHMVETINKLVREQRNLLQELGQDPTPEQIAERMDMTPDKVREILKIAQEPVSLETPIGEEDDSHLGDFIEDEVIENPVDYTTRIVLREQLDEILDTLTDREENVLRLRFGLDDGKMRTLEDVGKVFNVTRERIRQIEAKALRKLRQPSRSKPLRDFIED

SEQ ID NO: 73957 - protein, 441 aa, Streptococcus pneumoniae
MRIGLFTDTYFPQVSGVATSIRTLKTELEKQGHAVFIFTTTDKDVNRYEDWQIIRIPSVPFFAFKDRRFAYRGFSKALEIAKQYQLDIIHTQTEFSLGLLGIWIARELKIPVIHTYHTQYEDYVHYIAKGMLIRPSMVKYLVRGFLHDVDGVICPSEIVRDLLSDYKVKVEKRVIPTGIELAKFERPEIKQENLKELRSKLGIQDGEKTLLSLSRISYEKNIQAVLVAFADVLKEEDKVKLVVAGDGPYLNDLKEQAQNLEIQDSVIFTGMIAPSETALYYKAADFFISASTSETQGLTYLESLASGTPVIAHGNPYLNNLISDKMFGALYYGEHDLAGAILEALIATPDMNEHTLSEKLYEISAENFGKRVHEFYLDAIISNNFQKDLAKDDTVSQRIFKTVLYLPQQVVAVPVKGSRRMLKASKTQLISMRDYWKDHEE

SEQ ID NO: 73958 - protein, 436 aa, Streptococcus pneumoniae
MSMFLDTAKIKVKAGNGGDGMVAFRREKYVPNGGPWGGDGGRGGNVVFVVDEGLRTLMDFRYNRHFKADSGEKGMTKGMHGRGAEDLRVRVPQGTTVRDAETGKVLTDLIEHGQEFIVAHGGRGGRGNIRFATPKNPAPEISENGEPGQERELQLELKILADVGLVGFPSVGKSTLLSVITSAKPKIGAYHFTTIVPNLGMVRTQSGESFAVADLPGLIEGASQGVGLGTQFLRHIERTRVILHIIDMSASEGRDPYEDYLAINKELESYNLRLMERPQIIVTNKMDMPESQENLEEFKKKLAENYDEFEELPAIFPISGLTKQGLATLLDATAELLDKTPEFLLYDESDMEEEVYYGFDEEEKAFEISRDDDATWVLSGEKLMKLFNMTNFDRDESVMKFARQLRGMGVDEALRARGAKDGDLVRIGKFEFEFVD

SEQ ID NO: 73959 - protein, 419 aa, Streptococcus pneumoniae
MRKIVINGGLPLQGEITISGAKNSVVALIPAIILADDVVTLDCVPDISDVASLVEIMELMGATVKRYDDVLEIDPRGVQNIPMPYGKINSLRASYYFYGSLLGRFGEATVGLPGGCDLGPRPIDLHLKAFEAMGATASYEGDNMKLSAKDTGLHGASIYMDTVSVGATINTMIAAVKANGRTIIENAAREPEIIDVATLLNNMGAHIRGAGTNIIIIDGVERLHGTRHQVIPDRIEAGTYISLAAAVGKGIRINNVLYEHLEGFVAKLEEMGVRMTVSEDSIFVEEQSNLKAINIKTAPYPGFATDLQQPLTPLLLRANGRGTIVDTIYEKRVNHVFELAKMDADISTTNGHILYTGGRDLRGASVKATDLRAGAALVIAGLMAEGKTEITNIEFILRGYSDIIEKLRNLGADIRLVED

SEQ ID NO: 73960 - protein, 763 aa, Streptococcus pneumoniae
MNALLNGMNDRQAEAVQTTEGPLLIMAGAGSGKTRVLTHRIAYLIDEKLVNPWNILAITFTNKAAREMKERAYSLNPATQDCLIATFHSMCVRILRRDADHIGYNRNFTIVDPGEQRTLMKRILKQLNLDPKKWNERTILGTISNAKNDLIDDVAYAAQAGDMYTQIVAQCYTAYQKELRQSESVDFDDLIMLTLRLFDQNPDVLTYYQQKFQYIHVDEYQDTNHAQYQLVKLLASRFKNICVVGDADQSIYGWRGADMQNILDFEKDYPKAKVVLLEENYRSTKTILQAANEVIKNNKNRRPKNLWTQNADGEQIVYYRADDELDEAVFVARTIDELSRSQNFLHKDFAVLYRTNAQSRTIEEALLKSNIPYTMVGGTKFYSRKEIRDIIAYLNLIANLSDNISFERIINEPKRGIGLGTVEKIRDFANLQNMSMLDASANIMLSGIKGKAAQSIWDFANMMLDLREQLDHLSITELVESVLEKTGYVDILNAQATLESKARVENIEEFLSVTKNFDDTTDVTEEETGLDKLSRFLNDLALIADTDSGSQETSEVTLMTLHAAKGLEFPVVFLIGMEENVFPLSRATEDPDELEEERRLAYVGITRAEKILYLTNANSRLLFGRTNYNRPTRFINEISSDLLEYQGLARPANTSFKASYSSGSISFGQGMSLAQALQDRKRGAAPKSIQSSGLPFGQFTAGAKPASSEANWSIGDIALHKKWGEGTVLEVSGSGARQELKINFPEVGLKKLLASVAPIEKKI

SEQ ID NO: 73961 - protein, 231 aa, Streptococcus pneumoniae
MRRIFMYSISFQEDSLLPRERLAKEGVEALSNQELLAILLRTGTRQASVFEIAQKVLNNLSSLTDLKKMTLQELQSLSGIGRVKAIELQAMIELGHRIHKHETLEMESILSSQKLAKKMQQELGDKKQEHLVALYLNTQNQIIHQQTIFIGSVTRSIAEPREILHYAIKHMATSLVLVHNHPSGAVAPSQNDDHVTKLVKEACELMGIVLLDHLIVSHSNYFSYREKTDLI

SEQ ID NO: 73962 - protein, 223 aa, Streptococcus pneumoniae
MTLEWEEFLDPYIQAVGELKIKLRGIRKQYRKQNKHSPIEFVTGRVKPIESIKEKMARRGITYATLEHDLQDIAGLRVMVQFVDDVKEVVDILHKRQDMRIIQERDYITHRKASGYRSYHVVVEYTVDTINGAKTILAEIQIRTLAMNFWATIEHSLNYKYQGDFPDEIKKRLEITARIAHQLDEEMGEIRDDIQEAQALFDPLSRKLNDGVGNSDDTDEEYR

SEQ ID NO: 73963 - protein, 276 aa, Streptococcus pneumoniae
MTIQMKNTGKRIDLIANRKPQSQRVLYELRDRLKRNQFILNDTNPDIVISIGGDGMLLSAFHKYENQLDKVRFIGLHTGHLGFYTDYRDFELDKLVTNLQLDTGARVSYPVLNVKVFLENGEVKIFRALNEASIRRSDRTMVADIVINGVPFERFRGDGLTVSTPTGSTAYNKSLGGAVLHPTIEALQLTEIASLNNRVYRTLGSSIIVPKKDKIELIPTRNDYHTISVDNSVYSFRNIERIEYQIDHHKIHFVATPSHTSFWNRVKDAFIGEVDE

SEQ ID NO: 73964 - protein, 298 aa, Streptococcus pneumoniae
MRFEFIADEHVKVKTFLKKHEVSKGLLAKIKFRGGAILVNNQPQNATYLLDVGDYVTIDIPAEKGFETLEAIELPLDILYEDDHFLVLNKPYGVASIPSVNHSNTIANFIKGYYVKQNYENQQVHIVTRLDRDTSGLMLFAKHGYAHARLDKQLQKKSIEKRYFALVKGDGHLEPEGEIIAPIARDEDSIITRRVAKGGKYAHTSYKIVASYGNIHLVYIHLHTGRTHQIRVHFSHIGFPLLGDDLYGGSLEDGIQRQALHCHYLSFYHPFLEQDLQLESPLPDDFSNLITQLSTNTL

SEQ ID NO: 73965 - protein, 324 aa, Streptococcus pneumoniae
MEVFESLKANLVGKNARIVLPEGEEPRILQATKRLVKETEVIPVLLGNPEKIKIYLEIEGIMDGYEVIDPQHYPQFEEMVSALVERRKGKMTEEDVRKVLVEDVNYFGVMLVYLGLVDGMVSGAIHSTASTVRPALQIIKTRPNVTRTSGAFLMVRGTERYLFGDCAININPDAEALAEIAINSAITAKMFGIEPKIAMLSYSTKGSGFGESVDKVVEATKIAHDLRPDLEIDGELQFDAAFVPETAALKAPGSTVAGQANVFIFPGIEAGNIGYKMAERLGGFAAVGPVLQGLNKPVNDLSRGCNADDVYKLTLITAAQAVHQ

SEQ ID NO: 73966 - protein, 99 aa, Streptococcus pneumoniae
MMNMQNMMRQAQKLQKQMEQSQAELAAMQFVGKSAQDLVQATLTGDKKVVSIDFNPAVVDPEDLETLSDMTVQAINSALEQIDETTKKKLGAFAGKLPF

SEQ ID NO: 73967 - protein, 104 aa, Streptococcus pneumoniae
MSTYAIIKTGGKQVKVEVGQAVYVEKLNVEAGQEVTFNEVVLVGGENTVVGTPLVAGATVVGTVEKQGKQKKVVTYKYKPKKGSHRKQGHRQPYTKVVINAINA

SEQ ID NO: 73968 - protein, 114 aa, Streptococcus pneumoniae
MIQAVFERAEDGELRSAEITGHAESGEYGLDVVCASVSTLAINFINSIEKFAGYEPILELNEDEGGYLMVEIPKDLPSHQREMTQLFFESFFLGMANLSENSSEFVQTRVITEN

SEQ ID NO: 73969 - protein, 89 aa, Streptococcus pneumoniae
MQLFAHKKGGGSTSNGRDSQAKRLGAKAADGQTVTGGSILYRQRGTHIYPGVNVGRGGDDTLFAKVEGVVRFERKGRDKKQVSVYPIAK

SEQ ID NO: 73970 - protein, 305 aa, Streptococcus pneumoniae
MIITIPIKNQKDIGTPSDSVVVLGYFDGIHKGHQELFRVANKAARKDLLPIVVMTFNESPKIALEPYHPDLFLHILNPAERERKLKREGVEELYLLDFSSQFASLTAQEFFATYIKAMNAKIIVAGFDYTFGSDKKTAEDLKDYFDGEVIIVPPVEDEKGKISSTRIRQAILDGNVKEAGKLLGAPLPSRGMVVHGNARGRTIGYPTANLVLLDRTYMPADGVYVVDVEIQRQKYRAMASVGKNVTFDGEEARFEVNIFDFNQDIYGETVMVYWLDRIRDMTKFDSVDQLVDQLKADEEVTRNWS

SEQ ID NO: 73971 - protein, 91 aa, Streptococcus pneumoniae
MANKQDLIAKVAEATELTKKDSAAAVEAVFAAVADYLAAGEKVQLIGFGNFEVRERAERKGRNPQTGKEMTIAASKVPAFKAGKALKDAVK

SEQ ID NO: 73972 - protein, 633 aa, Streptococcus pneumoniae
MIILQANKIERSFAGEVLFDNINLQVDERDRIALVGKNGAGKSTLLKILVGEEEPTSGEINKKKDISLSYLAQDSRFESENTIYDEMLHVFNDLRRTERQLRQMELEMGEKSGEDLDKLMSDYDRLSENFRQAGGFTYEADIRAILNGFKFDESMWQMKIAELSGGQNTRLALAKMLLEKPNLLVLDEPTNHLDIETIAWLENYLVNYSGALIIVSHDRYFLDKVATITLDLTKHSLDRYVGNYSRFVELKEQKLVTEAKNYEKQQKEIAALEDFVNRNLVRASTTKRAQSRRKQLEKMERLDKPEAGKKSANMTFQSEKTSGNVVLTVENAAVGYDGEVLSQPINLDLRKMNAVAIVGPNGIGKSTFIKSIVDQIPFIKGEKRFGANVEVGYYDQTQSKLTPSNTVLDELWNDFKLTPEVEIRNRLGAFLFSGDDVKKSVGMLSGGEKARLLLAKLSMENNNFLILDEPTNHLDIDSKEVLENALIDFDGTLLFVSHDRYFINRVATHVLELSENGSTLYLGDYDYYVEKKATAEMSQTEEASTSNQAKEASPVNDYQAQKESQKEVRKLMRQIESLEAEIEELESQSQAISEQMLETNDADKLMELQAELDKISHRQEEAMLEWEELSEQV

SEQ ID NO: 73973 - protein, 652 aa, Streptococcus pneumoniae
MNKRMNELVALLNRYATEYYTSDNPSVSDSEYDRLYRELVELETAYPEQVLADSPTHRVGGKVLDGFEKYSHQYPLYSLQDAFSREELDAFDARVRKEVAHPTYICELKIDGLSISLTYEKGILVAGVTRGDGSIGENITENLKRVKDIPLTLPEELDITVRGECYMPRASFDQVNQARQENGEPEFANPRNAAAGTLRQLDTAVVAKRNLATFLYQEASPSTRDSQEKGLKYLEQLGFVVNPKRILAENIDEIWNFIQEVGQERENLPYDIDGVVIKVNDLASQEELGFTVKAPKWAVAYKFPAEEKEAQLLSVDWTVGRTGVVTPTANLTPVQLAGTTVSRATLHNVDYIAEKDIRKDDTVIVYKAGDIIPAVLRVVESKRVSEEKLDIPTNCPSCNSDLLHFEDEVALRCINPRCPAQIMEGLIHFASRDAMNITGLGPSIVEKLFAANLVKDVADIYRLQEEDFLLLEGVKEKSAAKLYQAIQASKENSAEKLLFGLGIRHVGSKASQLLLQYFHSIENLYQADSEEVASIESLGGVIAKSLQTYFAAEGSEILLRELKETGVNLDYKGQTVVADAALSGLTVVLTGKLERLKRSEAKSKLESLGAKVTGSVSKKTDLVVVGADAGSKLQKAQELGIQVRDEAWLESL

SEQ ID NO: 73974 - protein, 474 aa, Streptococcus pneumoniae
MTRYQNLVNGKWKSSEQEITIYSPINQEELGTVPAMTQTEADEAMQAARAALPAWRALSAIERAAYLHKTAAILERDKEKIGTILAKEVAKGIKAAIGEVVRTADLIRYAAEEGLRITGQAMEGGGFEAASKNKLAVVRREPVGIVLAIAPFNYPVNLSASKIAPALIAGNVVMLKPPTQGSISGLLLAKAFEEAGIPAGVFNTITGRGSEIGDYIIEHKEVNFINFTGSTPIGERIGRLAGMRPIMLELGGKDAALVLEDADLEHAAKQIVAGAFSYSGQRCTAIKRVIVLESVADKLATLLQEEVSKLTVGDPFDNADITPVIDNASADFIWGLIEDAQEKEAQALTPIKREGNLLWPVLFDQVTKDMKVAWEEPFGPVLPIIRVASVEEAIAFANESEFGLQSSVFTNDFKKAFEIAEKLEVGTVHINNKTQRGPDNFPFLGVKGSGAGVQGIKYSIEAMTNVKSIVFDVK

SEQ ID NO: 73975 - protein, 434 aa, Streptococcus pneumoniae
MSIITDVYAREVLDSRGNPTLEVEVYTESGAFGRGMVPSGASTGEHEAVELRDGDKSRYGGLGTQKAVDNVNNIIAEAIIGYDVRDQQAIDRAMIALDGTPNKGKLGANAILGVSIAVARAAADYLEIPLYSYLGGFNTKVLPTPMMNIINGGSHSDAPIAFQEFMILPVGAPTFKEALRYGAEIFHALKKILKSRGLETAVGDEGGFAPRFEGTEDGVETILAAIEAAGYVPGKDVFLGFDCASSEFYDKERKVYDYTKFEGEGAAVRTSAEQIDYLEELVNKYPIITIEDGMDENDWDGWKALTERLGKKVQLVGDDFFVTNTDYLARGIQEGAANSILIKVNQIGTLTETFEAIEMAKEAGYTAVVSHRSGETEDSTIADIAVATNAGQIKTGSLSRTDRIAKYNQLLRIEDQLGEVAEYRGLKSFYNLKK

SEQ ID NO: 73976 - protein, 1091 aa, Streptococcus pneumoniae
MKLLYTDIRTSLTEILTREAEELVAAGKRVFYIAPNSLSFEKERAVLEYLSQQASFSITVTRFAQMARYLVLNDLPAKTTLDDIGLGLAFYKCLAELDPKDLRVYGAIKQDPQLIQQLIELYHEMTKSQMSFLDLENLTDEDKRADLLLIFEKVTAYLNQGQLAQESQLSHLIEAIENDKVSSDFNQIALVIDGFTRFSAEEERVVDLLHGKGVEIVIGAYASKKAYTSPFSEGNLYQASVKFLHHLASKYQTPAQDCSQTHEKMDSFDKASRLLESSYDFSELALDVDEKDRENLQIWSCLTQKEELELVARSIRQKLHENSDLSYKHFRILLGDVASYQLSLKTIFDQYQIPFYLGRSEAMAHHPLTQFVESILALKRYRFRQEDLINLLRTDLYTDLSQSDIDAFEQYIRYLGINGLPAFQQTFTKSHHGKFNLERLNVLRLRILAPLETLFASRKQKAEKLLQKWSVFLKEGAVTKQLQDLTTTLEAVEQERQAEVWKAFCHVLEQFATVFAGSQVSLEDFLALLHSGMSLSQYRTIPATVDTVLVQSYDLIAPLTADFVYAIGLTQDNLPKISQNTSLLTDEERQNLNQATEEGVQLLIASSENLKKNRYTMLSLVNSARKQLFLSAPSLFNESESKESAYLQELIHFGFRRREKRMNHKGLSKEDMGSYHSLLSSLVAYHQQGEMSDTEQDLTFVKVLSRVIGKKLDQQGLENPAIPTSPSSKTLAKDTLQALYPAKQEFYLSTSGLTEFYRNEYSYFLRYVLGLQEELRLHPDARSHGNFLHRIFERALQLPNEDSFDQRLEQAIQETSQEREFEAIYQESLEAQFTKEVLLDVARTTGHILRHNPAIETIKEEANFGGKDQAFIQLDNGRSVFVRGKVDRIDRLKANGAIGVVDYKSSLTQFQFPHFFNGLNSQLPTYLAALKREGEQNFFGAMYLEMAEPVQSLMAVKSLAGAVVEASKSMKYQGLFLEKESSYLGEFYNKNKANQLTDEEFQLLLDYNAYLYKKAAEKILAGRFAINPYTENGRSIAPYVQQHQAITGFEANYHLGQARFLEKLDLADGKRLVGEKLKQAWLEKIREELNR

SEQ ID NO: 73977 - protein, 1216 aa, Streptococcus pneumoniae
MKLIPFLSEEEIQKLQEAEANSSKEQKKTAEQIEAIYTSAQNILVSASAGSGKTFVMAERILDQLARGVEISQLFISTFTVKAATELKERLEKKISKKIQETDDVDLKQHLGRQLADLPNAAIGTMDSFTQKFLGKHGYLLDIAPNFRILQNQSEQLILENEVFHEVFEAHYQGKQKETFSHLLKNFAGRGKDERGLRQQVYKIYDFLQSTSNPQKWLSESFLKGFEKADFTSEKEKLTEQIKQALWDLESFFRYHLDNDAKEFAKAAYLENVQLILDEIGSLNQESDSQAYQAVLARVVAISKEKNGRALTNASRKADLKPLADAYNEERKTQFAKLGQLSDQIAILDYQERYHGDTWKLAKTFQSFMSDFVEAYRQRKRQENAFEFADISHYTIEILENFPQVRESYQERFHEVMVDEYQDTNHIQERMLELLSNGHNRFMVGDIKQSIYRFRQADPQIFNEKFQRYAQNPQEGRLIILKENFRSSSEVLSATNDVFERLMDQEVGEINYDNKHQLVFANTKLTPNPDNKAAFLLYDKDDTGEEEESQTETKLTGEMRLVIKEILKLHQEKGVAFKEIALLTSSRSRNDQILLALSEYGIPVKTDGEQNNYLQSLEVQVMLDTLRVIHNPLQDYALVALMKSPMFGFDEDELARLSLQKAEDKVHENLYEKLVNAQKMASSQKGLIHTALAEKLKQFMDILASWRLYAKTHSLYDLIWKIYNDRFYYDYVGALPNGPARQANLYALALRADQFEKSNFKGLSRFIRMIDQVLEAQHDLASVAVAPPKDAVELMTIHKSKGLEFPYVFILNMDQDFNKQDSMSEVILSRQNGLGVKYIAKMETGAVEDHYPKTIKLSIPSLTYRQNEEELQLASYSEQMRLLYVAMTRAEKKLYLVGKGSREKLESKEYPAAKNGKLNSNTRLQARNFQDWLWAISKVFTKDKLNFSYRFIGEDQLTREAIGELETKSPLQDSSQADNRQSDTIKEALEMLKEVEVYNTLHRAAIELPSVQTPSQIKKFYEPVMDMEGVEIAGQGQSVGKKISFDLPDFSTKEKVTGAEIGSATHELMQRIDLSQQLTLASLTETLKQVQTSQAVRDKINLDKILAFFDTVLGQEILANTDHLYREQPFSMLKRDQKSQEDFVVRGILDGYLLYENKIVLFDYKTDRYDEPSQLVDRYRGQLALYEEALSRAYSIENIEKYLILLGKDEVQVVKV

SEQ ID NO: 73978 - protein, 1963 aa, Streptococcus pneumoniae
MEKYFGEKQERFSFRKLSVGLVSATISSLFFMSVLASSSVDAQETAGVHYKYVADSELSSEEKKQLVYDIPTYVENDDETYYLVYKLNSQNQLAELPNTGSKNERQALVAGASLAALGILIFAVSKKKVKNKTVLHLVLVAGMGNGVLVSVHALENHLLLNYNTDYELTSGEKLPLPKEISGYTYIGYIKEGKTTSDFEVSNQEKSAATPTKQQKVDYNVTPNFVDHPSTVQAIQEQTPVSSTKPTEVQVVEKPFSTELINPRKEEKQSSDSQEQLAEHKNLETKKEEKISPKEKTGVNTLNPQDEVLSGQLNKPELLYREETIETKIDFQEEIQENPDLAEGTVRVKQEGKLGKKVEIVRIFSVNKEEVSREIVSTSTTAPSPRIVEKGTKKTQVIKEQPETGVEHKDVQSGAIVEPAIQPELPEAVVSDKGEPEVQPTLPEAVVTDKGETEVQPESPDTVVSDKGEPEQVAPLPEYKGNIEQVKPETPVEKTKEQGPEKTEEVPVKPTEETPVNPNEGTTEGTSIQEAENPVQPAEESTTNSEKVSPDTSSENTGEVSSNPSDSTTSVGESNKPEHNDSKNENSEKTVEEVPVNPNEGTVEGTSNQETEKPVQPAEETQTNSGKIANENTGEVSNKPSDSKPPVEESNQPEKNGTATKPENSGNTTSENGQTEPEKKLELRNVSDIELYSQTNGTYRQHVSLDGIPENTDTYFVKVKSSAFKDVYIPVASITEEKRNGQSVYKITAKAEKLQQELENKYVDNFTFYLDKKAKEENTNFTSFSNLVKAINQNPSGTYHLAASLNANEVELGPDERSYIKDTFTGRLIGEKDGKNYAIYNLKKPLFENLSGATVEKLSLKNVAISGKNDIGSLANEATNGTKIKQVHVDGVLAGERGVGGLLAKADQSSIAESSFKGRIVNTYETTDAYNIGGLVGHLTGKNASIAKSKATVTISSNTNRSDQTVGGLAGLVDQDAHIQNSYAEGDINNVKHFGKVAGVAGYLWDRTSGEEKHAGELTNVLSDVNVTNGNAITGYHYTGMKVANTFSSKANRVFNVTLEKDEVVSKESFEERGTMLDASQIVSKKAEINPLTLPTVEPLSTSGKKDSDFSKIAHYQANRALVYKNIEKLLPFYNKSTIVKYGNLVKENSLLYQKELLSAVMMKDDQVITDIVSNKQTANKLLLHYNDHSSEKFDLKYQTDFANLAEYNLGNTGLLYTPNQFLYDRDSIVKEVLPELQKLDYQSDAIRKTLGISPEVKLTELYLEDQFSKTKQNLGDSLKKLLSADAGLASDNSVTRGYLVDKIKNNKEALLLGLTYLERWYNFNYGQVNVKDLVMYHPDFFGKGNTSPLDTLIELGKSGFNNLLAKNNVDTYGISLASQHGATDLFSTLEHYRKVFLPNTSNNDWFKSETKAYIVEEKSTIEEVKTKQGLAGTKYSIGVYDRITSATWKYRNMVLPLLTLPERSVFVISTMSSLGFGAYDRYRSSDHKAGKALNDFVEENARETAKRQRDHYDYWYRILDEQSREKLYRTILLYDAYKFGDDTTSGKATAEAKFDSSNPAMKNFFGPVGNKVVHNQHGAYATGDGVYYMSYRMLDKDGAITYTHEMTHDSDQDIYLGGYGRRNGLGPEFFAKGLLQAPDQPSDATITINSILKHSKSDSTEGSRLQVLDPTERFQNAADLQNYVHNMFDLIYMMEYLEGQSIVNKLSVYQKMAALRKIENKYVKDPADGNEVYATNVVKELTEAEARNLNSFESLIDHNILSAREYQSGDYERNGYYTIKLFAPIYSALSSEKGTPGDLMGRRIAYELLAAKGFKDGMVPYISNQYEEDAKQQGQTINLYGKERGLVTDELVLKKVFDGKYKTWAEFKTAMYQERVDQFGNLKQVTFKDPTKPWPSYGTKTINNVDELQALMDQAVLKDAEGPRWSNYDPEIDSAVHKLKRAIFKAYLDQTNDFRSSIFENKK

SEQ ID NO: 73979 - protein, 283 aa, Streptococcus pneumoniae
MATIQWFPGHMSKARRQVQENLKFVDFVTILVDARLPLSSQNPMLTKIVGDKPKLLILNKADLADPAMTKEWRQYFESQGIQTLAINSKEQVTVKVVTDAAKKLMADKIARQKERGIQIETLRTMIIGIPNAGKSTLMNRLAGKKIAVVGNKPGVTKGQQWLKTNKDLEILDTPGILWPKFEDETVALKLALTGAIKDQLLPMDEVTIFGINYFKEHYPEKLAERFKQMKIEEEAPVIIIDMTRALGFRDDYDRFYSLFVKEVRDGKLGNYTLDTLEDLDGND

SEQ ID NO: 73980 - protein, 259 aa, Streptococcus pneumoniae
MATIKEIKELLVTVKELESPIFLELEKDNRSGVQKEISKRKRAIQAELDENLRLESMLSYEKELYKQGLTLIVGIDEVGRGPLAGPVVAAAVILPKNCKIKGLNDSKKIPKKKHLEIFQAVQDQALSIGIGIIDNQVIDQVNIYEATKLAMQEAISQLSPQPEHLLIDAMKLDLPISQTSIIKGDANSLSIAAASIVAKVTRDELMKEYDQQFPGYDFATNAGYGTAKHLEGLTKLGVTPIHRTSFEPVKSLVLGKKES

SEQ ID NO: 73981 - protein, 521 aa, Streptococcus pneumoniae
MKGNTMEEQSEIVRSKKEFAFASSTILSQVGRGIIVGLIVGIIVGSFRFLIEKGFHLIQGVYQDQGYLVRNLFVLVLFYILICWLSAKLTRSEKDIKGSGIPQVEAELKGLMSLNWWGILWKKYVLGILAIASGLMLGREGPSIQLGAVGGKGIAKWLKSSPVEERSLIASGAAAGLAAAFNAPIAALLFVVEEVYHHFSRFFWVSTLAASIVANFVSLLMFGLTPVLDMPDNIPPMTLDQYWIYLVMGIFLGFSGFLYEKAVLNVGRVYDLIGQKIHLDRAYYPILAFILIIPVGIFLPQIIGGGNQLVLSLTEQNFSFQVLLAYFLIRFIWSMISYGSGLPGGIFLPILALGSLLGALVGVICVNLGLVSQEQFPIFVILGMSGYFGAISKAPLTAMILVTEMVGDIRNLMPLGLVTLVSYIIMDLLKGTPVYEAMLEKMLPEEVSSEGEVTLIEIPVSDKIAGKQVHELNLPHNVLITTQVHNGKSQTVNGSTRMYLGDMIHLVIPKSEIGKVKDLLL

SEQ ID NO: 73982 - protein, 356 aa, Streptococcus pneumoniae
MKREILLERIDKLKQLMPWYVLEYYQSKLAVPYSFTTLYEYLKEYDRFFSWVLESGISNADKISDIPLSVLENMSKKDMESFILYLRERPLLNANTTKQGVSQTTINRTLSALSSLYKYLTEEVENDQGEPYFYRNVMKKVSTKKKKETLAARAENIKQKLFLGDETEGFLTYIDQEHPQQLSNRALSSFNKNKERDLAIIALLLASGVRLSEAVNLDLRDLNLKMMVIDVTRKGGKRDSVNVAAFAKPYLENYLAIRNQRYKTEKTDTALFLTLYRGVPNRIDASSVEKMVAKYSEDFKVRVTPHKLRHTLATRLYDATKSQVLVSHQLGHASTQVTDLYTHIVNDEQKNALDSL

SEQ ID NO: 73983 - protein, 567 aa, Streptococcus pneumoniae
MALEVIMPKAGVDMTEGQIVQWNKKVGEFVKEGEILLEIMTDKVSMELEAEEDGYLIAILKGDGETVPVTEVIGYLGEERENIPTAGAASPEASPVPVASTSNDDGKSDDAFDIVVIGGGPAGYVAAIKAAQFGGKVALVEKSELGGTCLNRGCIPTKTYLHNAEIIENIGHAANRGIVIENPNFTVDMEKLLETKSKVVNTLVGGVAGLLRSYGVTVHKGIGTITKDKNVLVNGSELLETKKIILAGGSKVSKINVPGMESPLVMTSDDILEMNEVPESLVIIGGGVVGIELGQAFMTFGSKVTVIEMMDRIVPAMDVEVSKNLRLILERKGMTILTGTKLQEIIEENGQLRIKVEGKDDIIASKALLSIGRMPDLEGIGEVEFELDRGCIKVNEYMETSVPGIYAPGDINGTKMLAHAAFRMGEVSAENALKGNHAVAKLNLTPAAIYTLPEVAAVGLTEEQAREKYDVAIGKFNFAANGRAIASDAAQGFVKVIADKKYGEILGVHIIGPAAAELINEASSIIEMEITVEEMLKTIHGHPTYSEVMYEAFADVLGMAIHSPKKK

SEQ ID NO: 73984 - protein, 375 aa, Streptococcus pneumoniae
MASSKPSSISYFSVAFDALCIINRIGEVMADDKLRATPAARKLADDLGINLYDVSGSGANGRVHKEDVETYKDTNVVRISPLAKRIALEHNIAWQEIQGTGHRGKIMKKDVLALLPENIENDSIKSPAQIEKVEEVPDNVTPYGKIERIPMTPMRKVIAQRMVESYLTAPTFTLNYEVDMTEMLALRKKVLEPIMEATGKKTTVTDLLSLAVVKTLMKHPYINASLTEDGKTIITHNYVNLAMAVGMDNGLMTPVVYNAEKMSLSELVVAFKDVIGRTLDGKLAPSELQNSTFTISNLGMFGVQSFGPIINQPNSAILGVSSTIEKPVVVNGEIVIRPIMSLGLTIDHRVVDGMAGAKFMKDLKELIETPISMLI

SEQ ID NO: 73985 - protein, 330 aa, Streptococcus pneumoniae
METKTMSFRDTIILAMSEEMRRDENVFLMGEDVGVFGGDFGTSVGMLEEFGPERVRDCPISEAAISGAAAGAAMTGLRPIVDMTFMDFSVIAMDNIVNQAAKTRYMFGGKGQVPMTVRCAAGNGVGSAAQHSQSLESWFTHIPGLKVVAPGTPADMKGLLKSSIRDNNPVIILEYKSEFNQKGEVPVDPDYTIPLGVGEIKRQGTDVTVVTYGKMLRRVVQAAEELAEEGISVEIVDPRTLVPLDKDIIINSVKKTGKVILVNDAHKTSGYIGEISAIISESEAFDYLDAPIRRCAGEDVPMPYAQNLENAMIPTVESIKDAIRKTYNKD

SEQ ID NO: 73986 - protein, 322 aa, Streptococcus pneumoniae
MSTLDKNLLLEMFRKMEEIRRMDLKIAQLVKKGKVPGMTHFSVGEEAANVGAMLALNPDDLITSNHRGHGQAIAKGIDLNGMMAEILGKYTGTCKGKGGSMHIADLDAGNLGANGIVGGGMGIAVGAALSQQMQNTGKIVVCFFGDGATNEGVFHEAVNMASIWNLPVIFYCINNGYGISADIKKMTNIEHIHQRSAAYGIPGMFIEDGNNVIDVYEGFQKAVDHVRSGNGPVLIESVTYRWLGHSSSDPGKYRTREEVELWKQKDPIENLRNYLIENNIASAEELEKIQAQVKEAVEASVKFAEESPFPPLESAFEDIYTD

SEQ ID NO: 73987 - protein, 422 aa, Streptococcus pneumoniae
MLLIKNGRVMDPKSGLDQVCDVLVQDGKIIKIAPEITEEGAETIDATGHVVAPGLVDIHVHFREPGQTHKEDIHTGALAAAAGGFTTVVMMANTSPTISDVETLQAVLQSAAKEKINVKTVATITKNFNGKNLTDFKALLEAGAVGFSDDGIPLESSKIVKEAMEEAKKLNTFISLHEEDPGLNGVLGFNENIAREHFHICGATGVAEYAMMARDVMIAYATKAHVHIQHLSKEESVKVVEFAQGLGAEVTAEVAPQHFSKTEALLLTQGSNAKMNPPLRLESDRRAVIEGLKSGVITVIATDHAPHHVDEKNVEDITKAPSGMTGLETSLSLGLTYLVEAGELSLMELLEKMTYNPAKLYNFEAGYLAENGPADITIFDAKADRLVDSHFASKAANSPFIGETLKGQVKYTICKGQIVYQA

SEQ ID NO: 73988 - protein, 577 aa, Streptococcus pneumoniae
MTEMLKGIAASDGVAVAKAYLLVQPDLSFETITVEDTNAEEARLDAALQASQDELSVIREKAVGTLGEEAAQVFDAHLMVLADPEMISQIKETIRAKKVNAEAGLKEVTDMFITIFEGMEDNPYMQERAADIRDVTKRVLANLLGKKLPNPASINEEVIVIAHDLTPSDTAQLDKNFVKAFVTNIGGRTSHSAIMARTLEIAAVLGTNNITEIVKDGDILAVNGITGEVIINPTDEQAAEFKAAGEAYAKQKAEWALLKDAQTVTADGKHFELAANIGTPKDVEGVNNNGAEAVGLYRTEFLYMDSQDFPTEDEQYEAYKAVLEGMNGKPVVVRTMDIGGDKELPYFDMPHEMNPFLGFRALRISISETGDAMFRTQIRALLRASVHGQLRIMFPMVALLKEFRAAKAVFDEEKANLLAEGVAVADNIQVGIMIEIPAAAMLADQFAKEVDFFSIGTNDLIQYTMAADRMNEQVSYLYQPYNPSILRLINNVIKAAHAEGKWAGMCGEMAGDQQAVPLLVGMGLDEFSMSATSVLRTRSLMKKLDTAKMEEYANRALTECSTMEEVLELQKEYVNFD

SEQ ID NO: 73989 - protein, 87 aa, Streptococcus pneumoniae
MASKDFHVVAETGIHARPATLLVQTASKFASDITLEYKGKSVNLKSIMGVMSLGVGQGADVTISAEGADADDAIAAISETMEKEGLA

SEQ ID NO: 73990 - protein, 719 aa, Streptococcus pneumoniae
MGLKHLEDVTYFRLNNEINRPVNGQIMLHKDKEALDAFFKENVVPNTMVFDSIKDKINYLIEHNYIETAFIKKYRPEFLEELAQFIKDQNFQFKSFMAAYKFYNQYALKTNDGEYYLENMEDRVFFNALYFADGNEAVAIDIANEIIHQRYQPATPSFLNAGRARRGELVSCFLIQVTDDMNSIGRSINSALQLSRIGGGVGITLSNLREAGAPIKGYEGAASGVVPVMKLFEDSFSYSNQLGQRQGAGVVYLNVFHPDIIAFLSTKKENADEKVRVKTLSLGVVVPDKFYELARKNEEMYLFSPYSVEKEYGVPFNYIDITEKYDELVANPNIRKTKIKARDLETEISKLQQESGYPYVVNIDTANRANPVDGKIIMSNLCSEILQVQEPSLINDAQEFLQMGTDVSCNLGSTNVVNMMTSPDFGRSIRAMVRALTFVTDSSHIVAVPTIDHGNSQAHTFGLGAMGLHSYLAQQLIEYGSPESVEFTSIYFMLMNYWTLVESNNIARERGITFHNFEKSDYANGSYFDKYVTGEFVPTSDRVKELFKNVFIPGVADWAELRDKVQEDGLYHQNRLAVAPNGSISYINDVSASIHPITQRIEERQEKKIGKIYYPAAGLSTETIPYYTSAYDMDMRKVIDVYAAATEHVDQGLSLTLFMRSDIPKGLYEWKRENKQTTRDLSILRNYAFNKGIKSIYYVRTFTDDGGEVGANQCESCVI

SEQ ID NO: 73991 - protein, 320 aa, Streptococcus pneumoniae
METYYKAINWNAIEDVIDKSTWEKLTEQFWLDTRIPLSNDLDDWRKLSNKEKDLVGKVFGGLTLLDTMQSETGVQALRADIRTPHEEAVFNNIQFMESVHAKSYSSIFSTLNTKAEIEEIFEWTNTNPYLQKKAEIVNEIYLNGSPLEKKVASVFLETFLFYSGFFTPLYYLGNNKLANVAEIIKLIIRDESVHGTYIGYKFQLGFNELPEEEQEKLKEWMYDLLYTLYENEEGYTESLYDGVGWTEEVKTFLRYNANKALMNMGQDPLFPDSAEDVNPIVMNGISTGTSNHDFFSQVGNGYLLGEVEAMQDDDYNYGLD

SEQ ID NO: 73992 - protein, 468 aa, Streptococcus pneumoniae
MTKTLPKDFIFGGATAAYQAEGATHTDGKGPVAWDKYLEDNYWYTAEPASDFYNRYPVDLKLAEEYGVNGIRISIAWSRIFPTGYGQVNAKGVEFYHNLFAECHKRHVEPFVTLHHFDTPEALHSNGDFLNRENIEHFVDYAAFCFEEFPEVNYWTTFNEIGPIGDGQYLVGKFPPGIQYDLAKVFQSHHNMMVSHARAVKLYKDKGYKGEIGVVHALPTKYPLDHENPADVRAAELEDIIHNKFILDATYLGRYSAETMEGVNHILSVNGGSLDLREEDFTALEAAKDLNDFLGINYYMSDWMEAFDGETEIIHNGKGKKGSSKYQIKGVGRRVAPDYVPRTDWDWIIYPQGLYDQIMRVKKDYPNYKKIYITENGLGYKDEFVDNTVYDDGRIDYVKQHLEILSDAIADGANVKGYFIWSLMDVFSWSNGYEKRYGLFYVDFETQERYPKKSAHWYKKVAETQIID

SEQ ID NO: 73993 - protein, 563 aa, Streptococcus pneumoniae
MNKLIAFIEKGKPFFDKLSRNIYLRAIRDGFIAGMPVILFSSIFILIAFVPNSWGFKWSDEVVAFLMKPYSYSMGILALLVAGTTAKSLTDSVNRSMEKTNQINYMSTLLAAIVGLLMLAADPIENGLATGFLGTKGLLSAFLAAFVTVAIYKVCVKNNVTIRMPDEVPPNISQVFKDVIPFTLSVVSLYALDLLARHFVGSSVAESIGKFFAPLFSAADGYLGITIIFGAFAFFWFVGIHGPSIVEPAIAAITYANAEVNLNLLQQGMHADKILTSGTQMFIVTMGGTGATLVVPFMFMWLTKSKRNRAIGRASVVPTFFGVNEPILFGAPLVLNPIFFIPFIFAPIANVWIFKFFIETLGMNSFTANLPWTTPAPLGLVLGTNFQVLSFILAALLIVVDVVIYYPFLKVYDEQILEEERSGKSNDELKEKVAANFNTAKADAILEKAGVDAAQNTITEETNVLVLCAGGGTSGLLANALNKAAAEYNVPVKAAAGGYGAHREMLPEFDLVILAPQVASNFEDMKAETDKLGIKLAKTEGAQYIKLTRDGKGALAFVQAQFD

SEQ ID NO: 73994 - protein, 105 aa, Streptococcus pneumoniae
MNREEVTLLGFEIVAYAGDARSKLLEALKAAEAGDFEKADALVEEAGSCIAEAHHAQTSLLTKEASGEDLAYSVTMMHGQDHLMTTILLKDLMHHLIELYKRGVK

SEQ ID NO: 73995 - protein, 326 aa, Streptococcus pneumoniae
MALTEQKRVRLEKLSDENGIISALAFDQRGALKRLMAQHQTEEPTVAQMEELKVLVADELTKYASSMLLDPEYGLPATKALDEKAGLLLAYEKTGYDTTSTKRLPDCLDVWSAKRIKEEGADAVKFLLYYDVDSSDELNQEKQAYIERIGSECVAEDIPFFLEILAYDEKIADAGSVEYAKVKPHKVIGAMKVFSDPRFNIDVLKVEVPVNIKYVEGFAEGEVVYTREEAAAFFKAQDEATNFPYIYLSAGVSAKLFQDTLVFAHESGANFNGVLCGRATWAGSVEAYIKDGEAAAREWLRTTGFENIDELNKVLQTTATSWKERV

SEQ ID NO: 73996 - protein, 171 aa, Streptococcus pneumoniae
MRIAIGCDHIVTDEKMAVSEFLKSKGYEVIDFGTYDHTRTHYPIFGKKVGEAVTSGQADLGVCICGTGVGINNAVNKVPGVRSALVRDMTTALYAKEQLNANVIGFGGKITGELLMCDIIEAFIHAEYKPSEENKKLIAKIEHLESHNAQQTDANFFTEFLEKWDRGEYHD

SEQ ID NO: 73997 - protein, 141 aa, Streptococcus pneumoniae
MSIVIGADAAGLRLKEVVKDFLEKENFHLVDVTAEGQDFVDVTLAVAAEVNKEEQNLGIVIDAYGAGPFMVATKIKGMVAAEVSDERSAYMTRGHNNSRMITMGAQLVGDELAKNIAKGFVNGKYDGGRHQIRVDMLNKMG

SEQ ID NO: 73998 - protein, 291 aa, Streptococcus pneumoniae
MKKQEKLALVESALEDFYGDQQFASSLRESVLYSIHAGGKRIRPFLLLEVLEALQVAIKPAHAQVATALEMIHTGSLIHDDLPAMDDDDYRRGRLTNHKKFGEAMAILAGDALFLDPYALIAQADLPSQIKVDLIANLSLASGSLGMVAGQVLDMEGEHQHLSLEELQTIHANKTGKLLAYPFQAAAIIAELSPEMQVKLKTVGELIGLAFQVRDDVLDVTASFEEIGKTPQKDLQAEKSTYPALLGLEESIAFCNQTLDQANEKLEEIAQQVPFETESIVSVVESLRING

SEQ ID NO: 73999 - protein, 448 aa, Streptococcus pneumoniae
MEMEKYLSVTTLTKYLKMKFDKDPYLERVYLTGQVSNFRKRPTHQYFSLKDDHAVIQATIWSGIYQKLGFDLEEGMKINVIGRVQVYEPSGSYSIIIEKVEPDGVGALAIQFEQLKKKLTEEGLFQERFKQALPQFSKRIGVVTSRSGAVIRDIITTVSRRFPGVDILLYPTKVQGEGAAEEIARNIARANQRDDLDLLIIGRGGGSIEDLWAFNEEIVVRAIFESRLPVISSVGHETDVTLADFVADRRAATPTAAAELATPVTKLDVLAHLQNQEKRMVTAVRNVLSKKQEALKKCSQSVIFRQPERLYDGYLQRLDQLQLRLKQSLRTRISDNKQLVQARTHQLVQLSPVTKIQRYQDRLGQLDKLLGSQMALVYDAKVAEAKRLSEALLMLDTSRIVARGYAIVKKEESVVDSVESLKKKDQVTLLMRDGQVELEVKDVKTKEI

SEQ ID NO: 74000 - protein, 292 aa, Streptococcus pneumoniae
MNGIINLKKEAGMTSHDAVFKLRKILGTKKIGHGGTLDPDVVGVLPIAVGKATRMVEFMQDEGKIYEGEIILGYSTTTEDASGEVVAETPVLSSLDEKLVDEAIASLTGPITQIPPMYSAVKVNGRKLYEYARAGQEVERPERQVIIYQFERTSPISYDGQLARFTFRVKCSKGTYIRTLSVDLGEKLGYAAHMSHLTRTSAAGLQLEDALALEEIAEKVEAGQLDFLHPLEIGTGDLVKVFLTPEEATEVRFGRFIELDQTDKELAAFEDDKLLAILEKRGNLYKPRKVFS

SEQ ID NO: 74001 - protein, 822 aa, Streptococcus pneumoniae
MQDKNLVNVNLTKEMKASFIDYAMSVIVARALPDVRDGLKPVHRRILYGMNELGVTPDKPHKKSARITGDVMGKYHPHGDSSIYEAMVRMAQWWSYRYMLVDGHGNFGSMDGDSAAAQRYTEARMSKIALEMLRDINKNTVDFVDNYDANEREPLVLPARFPNLLVNGATGIAVGMATNIPPHNLGETIDAVKLVMDNPEVTTKDLMEVLPGPDFPTGALVMGKSGIHKAYETGKGSIVLRSRTEIETTKTGRERIVVTEFPYMVNKTKVHEHIVRLVQEKRIEGITAVRDESNREGVRFVIEVKRDASANVILNNLFKMTQMQTNFGFNMLAIQNGIPKILSLRQILDAYIEHQKEVVVRRTRFDKEKAEARAHILEGLLIALDHIDEVIRIIRASETDAEAQAELMSKFKLSERQSQAILDMRLRRLTGLERDKIQSEYDDLLALIADLADILAKPERVSQIIKDELDEVKRKFSDKRRTELMVGQVLSLEDEDLIEESDVLITLSNRGYIKRLDQDEFTAQKRGGRGVQGTGVKDDDFVRELVSTSTHDHLLFFTNKGRVYRLKGYEIPEYGRTAKGLPVVNLLKLDEDESIQTVINVESDRSDDAYLFFTTRHGIVKRTSVKEFANIRQNGLKALNLKDEDELINVLLAEGDMDIIIGTKFGYAVRFNQSAVRGMSRIATGVKGVNLREGDTVVGASLITDQDEVLIITEKGYGKRTVATEYPTKGRGGKGMQTAKITEKNGLLAGLMTVQGDEDLMIITDTGVMIRTNLANISQTGRATMGVKVMRLDQDAQIVTFTTVAVAEKEEVGTENETEGEA

SEQ ID NO: 74002 - protein, 449 aa, Streptococcus pneumoniae
MLDLLKQTIFTRDFIFILILLGFILVVTLLLLENRRDNIQLKQINQKVKDLIAGDYSKVLDMQGGSEITNITNNLNDLSEVIRLTQENLEQESKRLNSILFYMTDGVLATNRRGQIIMINDTAKKQLGLVKEDVLNRSILELLKIEENYELRDLITQSPELLLDSQDINGEYLNLRVRFALIRRESGFISGLVAVLHDTTEQEKEERERRLFVSNVSHELRTPLTSVKSYLEALDEGALCETVAPDFIKVSLDETNRMMRMVTDLLHLSRIDNATSHLDVELINFTAFITFILNRFDKMKGQEKEKKYELVRDYPINSIWMEIDTDKMTQVVDNILNNAIKYSPDGGKITVRMKTTEDQMILSISDHGLGIPKQDLPRIFDRFYRVDRARSRAQGGTGLGLSIAKEIIKQHKGFIWAKSEYGKGSTFTIVLPYDKDAVKEEVWEDEVED

SEQ ID NO: 74003 - protein, 251 aa, Streptococcus pneumoniae
MCLLTIFWYNSREKGEHMKKILIVDDEKPISDIIKFNMTKEGYEVVTAFNGREALEQFEAEQPDIIILDLMLPEIDGLEVAKTIRKTSSVPILMLSAKDSEFDKVIGLELGADDYVTKPFSNRELQARVKALLRRSQPMPVDGQEADSKPQPIQIGDLEIVPDAYVAKKYGEELDLTHREFELLYHLASHTGQVITREHLLETVWGYDYFGDVRTVDVTVRRLREKIEDTPSRPEYILTRRGVGYYMRNNA

SEQ ID NO: 74004 - protein, 495 aa, Streptococcus pneumoniae
MSSKVIVTIFGASGDLAKRKLYPSLFRLYKSGNLSKHFAVIGTARRPWSKEYFESVVVESILDLADSTEQAQEFASHFYYQSHDVNDSEHYIALRQLQAELNEKYQAEHNKLFFLSMAPQFFGTIAKHLKSENIVDGKGFERLIVEKPFGTDYATANKLNDELLATFDEEQIFRIDHYLGKEMIQSIFAVRFANLIFENVWNKDFIDNVQITFAERLGVEERGGYYDQSGALRDMVQNHTLQLLSLLAMDKPASFTKDEIRAEKIKVFKNLYHPTDEELKEHFIRGQYRSGKIDGMKYISYRSEPNVNPESTTETFTSGAFFVDSDRFRGVPFFFRTGKRLTEKGTHVNIVFKQMDSIFGEPLAPNILTIYIQPTEGFSLSLNGKQVGEEFNLAPNSLDYRTDATATGASPEPYEKLIYDVLNNNSTNFSHWDEVCASWKLIDRIEKLWAENGAPLHDYKAGSMGPQASFDLLEKFGAKWTWQPDITYRQDGRLE

SEQ ID NO: 74005 - protein, 425 aa, Streptococcus pneumoniae
MGLFDRLFGKKEEPKIEEVVKEALENLDLSEDVDPTFTEVEEVSQEEAEVEIVEQAVFQEEEIQDTVEESLDLEPVVEVSQKEVEEFPHSEEGNTEFLETIEENNSEVLEPERPQAEETVQEKYDRSLKKTRTGFGARLNAFFANFRSVDEEFFEELEELLIMSDVGVQVASNLTEELRYEAKLENAKKPDALRRVIIEKLVELYEKDGSYDESIHFQDNLTVMLFVGVNGVGKTTSIGKLAHRYKQAGKKVMLVAADTFRAGAVAQLAEWGRRVDVPVVTGPEKADPASVVFDGMERAVAEGIDILMIDTAGRLQNKDNLMAELEKIGRIIKRVVPEAPHETFLALDASTGQNALVQAKEFSKITPLTGIVLTKIDGTARGGVVLAIREELNIPVKLIGFGEKIDDIGEFNSENFMKGLLEGLI

SEQ ID NO: 74006 - protein, 272 aa, Streptococcus pneumoniae
MADIKLIALDLDGTLLTTDKRLTDRTKETLKAARDRGIKVVLTTGRPLKAMDFFLHELGTDGQEDEYTITFNGGLVQKNTGEILDKTVFSYDDVARLYEETEKLSLPLDAISEGTVYQIQSDQESLYAKFNPALTFVPVDFEDLSSQMTYNKCVTAFAQEPLDAAIQKISPELFDQYEIFKSREMLLEWSPKNVHKATGLAKLISHLGIDQSQVMACGDEANDLSMIEWAGLGVAMQNAVPEVKAAANVVTPMTNDEEAVAWAIEEYVLKEN

SEQ ID NO: 74007 - protein, 1179 aa, Streptococcus pneumoniae
MYLKEIEIQGFKSFADKTKVVFDQGVTAVVGPNGSGKSNITESLRWALGESSVKSLRGGKMPDVIFAGTESRKPLNYASVVVTLDNHDGFIKDAGQEIRVERHIYRSGDSEYKIDGKKVRLRDIHDLFLDTGLGRDSFSIISQGKVEEIFNSKPEERRAIFEEAAGVLKYKTRRKETESKLQQTQDNLDRLEDIIYELDNQIKPLEKQAENARKFLDLEGQRKVIYLDVLVAQIKENKAELESTEEELAQVQELLMSYYQKREKLEEENQTLKKQRQDLQAEMAKDQGSLMDLTSLISDLERKLALSKLESEQVALNQQEAQARLAALEDKRNSLSKEKYDKESSLALLEGNLVQNNQKLNRLEAELLAFSDDPDQMIELLRERFVALLQEEADVSNQLTRIENELENSRQLSQKQADQLEKLKEQLATAKEKASQQKDELETAKVQVQKLLADYQAIAKEQEEQKTSYQAQQSQLFDRLDSLKNKQARAQSLENILRNHSNFYAGVKSVLQEKDRLGGIIGAVSEHLTFDVYYQTALEIALGASSQHIIVEDEESATKAIDFLKRNRVGRATFLPLTTIKARTISSQNQDAIAVSPGFLGMADELVTFDTRLEAIFKNLLATTAIFDTVEHAREAARQVRYQVRMVTLDGTELRTGGSYAGGANRQNNSIFIKPELEQLQKEIAADEASLGSEEAALKTLQDQMAALTERLEAIKSQGEQARIQEQGLSLAYQQTSQQVEELETLWKLQEEEIDRLSEGDWQADKEKCQESLATIASEKQNLEAEIEEIKSNKNAIQERYQNLQEEVAQARLLKTELQGQKRYEVADIERLGKELDNLNIEQEEIQRMLQEKVDNLEKVDTELLSQQAEESKTQKTNLQQGLIRKQFELDDIEGQLDDIASHLDQARQQNEEWIRKQTRAEAKKEKVSERLRHLQNQLTDQYQISYTEALEKAHELENLNLAEQEVQDLEKAIRSLGPVNLEAIDQYEEVHNRLDFLNSQRDDILSAKNLLLETITEMNDEVKERFKSTFEAIRESFKVTFKQMFGGGQADLILTEGDLLTAGVEISVQPPGKKIQSLNLMSGGEKALSALALLFSIIRVKTIPFVILDEVEAALDEANVKRFGDYLNRFDKDSQFIVVTHRKGTMAAADSIYGVTMQESGVSKIVSVKLKDLESIEG

SEQ ID NO: 74008 - protein, 328 aa, Streptococcus pneumoniae
MLNEFPIFDYEDIQLIPNKCVIKSRAEADTSVTLGNHTFKLPVVPANMQTILDENVAEQLAKGGYFYIMHRFDEAGRIPFIKRMHDQGLIASISVGVKDYEYDFVSQLKADAPEYITIDIAHGHADSVISMIQHIKKELPDTFVIAGNVGTPEAVRELENAGADATKVGIGPGKVCITKVKTGFGTGGWQLAALRWCAKAARKPIIADGGIRTHGDIAKSIRFGASMIMIGSLFAGHIESPGKTIEVDGEQFKEYYGSASQYQKGAYKNVEGKRILLPAKGHLQDTLTEMEQDLQSAISYAGGRQVADLKHVDYVIVKNSIWNGDASH

SEQ ID NO: 74009 - protein, 701 aa, Streptococcus pneumoniae
MKRCDTVATATKKKKSTVKKNLVIVESPAKAKTIEKYLGRNYKVLASVGHIRDLKKSSMSVDIENNYEPQYINIRGKGPLINDLKKEAKKANKVFLASDPDREGEAISWHLAHILNLDENDANRVVFNEITKDAVKNAFKEPRKIDMDLVDAQQARRILDRLVGYSISPILWKKVKKGLSAGRVQSIALKLIIDRENEINAFQPEEYWTVDAVFKKGTKQFHASFYGVDGKKMKLTSNNEVKEVLSRLTSKDFSVDQVDKKERKRNAPLPYTTSSMQMDAANKINFRTRKTMMVAQQLYEGINIGSGVQGLITYMRTDSTRISPVAQNEAASFITDRFGSKYSKHGSKVKNASGAQDAHEAIRPSSVFNTPESIAKYLDKDQLKLYTLIWNRFVASQMTAAVFDTMAVKLSQKGVQFAANGSQVKFDGYLAIYNDSDKNKMLPDMVVGDVVKQVNSKPEQHFTQPPARYSEATLIKTLEENGVGRPSTYAPTIETIQKRYYVRLAAKRFEPTELGEIVNKLIVEYFPDIVNVTFTAEMEGKLDDVEVGKEQWRRVIDAFYKPFSKEVAKAEEEMEKIQIKDEPAGFDCEVCGSPMVIKLGRFGKFYACSNFPDCHHTQAIVKEIGVECPSCHQGQIIERKTKRNRLFYGCNRYPECEFTSWDKPVGRDCPKCGNFLMEKKVRGGGKQVVCSKGDYEEEKIK

SEQ ID NO: 74010 - protein, 296 aa, Streptococcus pneumoniae
MEVQMKSKNGVPFGLLSGIFWGLGLTVSAYIFSIFTDLSPFVVAATHDFLSIFILLAFLLVKEGKVRLSIFLNIRNVSVIIGALLAGPIGMQANLYAVKYIGSSLASSVSAIYPAISVLLAFFFLKHKISKNTVFGIVLIIGGIIAQTYKVEQVNSFYIGILCALVCAIAWGSESVLSSFAMESELSEIEALLIRQVTSFLSYLVIVLFSHQSFTAVANGQLLGLMIVFAAFDMISYLAYYIAINRLQPAKATGLNVSYVVWTVLFAVVFLGAPLDMLTIMTSLVVIAGVYIIIKE

SEQ ID NO: 74011 - protein, 346 aa, Streptococcus pneumoniae
MRKTSKMINQIYQLTKPKFINVKYQEEAIDQENHILIRPNYMAVCHADQRYYQGKRDPKILNKKLPMAMIHESCGTVISDPTGTYEVGQKVVMIPNQSPMQSDEEFYENYMTGTHFLSSGFDGFMREFVSLPKDRVVAYDAIEDTVAAITEFVSVGMHAMNRLLTLAHSKRERIAVIGDGSLAFVVANIINYTLPEAEIVVIGRHWEKLELFSFAKECYITDNIPEDLAFDHAFECCGGDGTGPAINDLIRYIRPQGTILMMGVSEYKVNLNTRDALEKGLILVGSSRSGRIDFENAIQMMEVKKFANRLKNILYLEEPVREIKDIHRVFATDLNTAFKTVFKWEV

SEQ ID NO: 74012 - protein, 235 aa, Streptococcus pneumoniae
MIYAGILAGGTGTRMGISNLPKQFLELGDRPILIHTIEKFVLEPSIEKIVVGVHGDWVSHAEDLVDKYLPLYKERIIITKGGADRNTSIKNIIEAIDAYRPLTPEDIVVTHDSVRPFITLRMIQDNIQLAQNHDAVDTVVEAVDTIVESTNGQFITDIPNRAHLYQGQTPQTFRCKDFMDLYGSLSDEEKEILTDACKIFVIKGKDVALAKGEYSNLKITTVTDLKIAKSMIEKD

SEQ ID NO: 74013 - protein, 495 aa, Streptococcus pneumoniae
MKSIKLNALSYMGIRVLNIIFPILTGTYVARVLDRTDYGYFNSVDTILSFFLPFATYGVYNYGLRAISNVKDNKKDLNRTFSSLFYLCIACTILTTAVYILAYPLFFTDNPIVKKVYLVMGIQLIAQIFSIEWVNEALENYSFLFYKTAFIRILMLVSIFLFVKNEHDIVVYTLVMSLSTLINYLISYFWIKRDIKLVKIHLSDFKPLFLPLTAMLVFANANMLFTFLDRLFLVKTGIDVNVSYYTIAQRIVTVIAGVVTGAIGVSVPRLSYYLGKGDKEAYVSLVNRGSRIFNFFIIPLSFGLMVLGPNAILLYGSEKYIGGGILTSLFAFRTIILALDTILGSQILFTNGYEKRITVYTVFAGLLNLGLNSLLFFNHIVAPEYYLLTTMLSETSLLVFYIIFIHRKQLIHLGHIFSYTVRYSLFSLSFVAIYFLINFVYPVDMVINLPFLINTGLIVLLSAISYISLLVFTKDSIFYEFLNHVLALKNKFKKS

SEQ ID NO: 74014 - protein, 1058 aa, Streptococcus pneumoniae
MPKRTDIQKIMVIGSGPIIIGQAAEFDYAGTQACFSLKEEGYEVVLVNSNPATIMTDKEIADKVYIEPITLEFVTRILRKEGPDALLPTLGGQTGLNMAMELSKNGILDELGVELLGTKLSAIDQAEDRDLFKQLMEELEQPIPESEIVNTVEEAVAFAATIGYPVIVRPAFTLGGTGGGMCANEKELREITENGLKLSPVTQCLIERSIAGFKEIEYEVMRDSADNALVVCNMENFDPVGIHTGDSIVFAPAQTMSDYENQMLRDASLSIIRALKIEGGCNVQLALDPNSFKYYVIEVNPRVSRSSALASKATGYPIAKLAAKIAVGLTLDEVINPVTGSTYAMFEPALDYVVAKIPRFPFDKFEKGERRLGTQMKATGEVMAIGRNIEESLLKACRSLEIGVHHNEIPELAAVSDDALIEKVVKAQDDRLFYVSEAIRRGYTPEEIAELTKIDIFYLDKLLHIFEIEQELGAHPQDLEVLKTAKLNGFSDRKIAELWGTTDDKVRQLRLENKIVPVYKMVDTCAAEFDSETPYFYSTYGWENESIRSDKESVLVLGSGPIRIGQGVEFDYATVHSVKAIQAAGYEAIIMNSNPETVSTDFSVSDKLYFEPLTFEDVMNVIDLEQPKGVIVQFGGQTAINLAEPLAKAGVTILGTQVADLDRAEDRDLFEQALKELDIPQPPGQTATNEEEAALAARKIGFPVLVRPSYVLGGRAMEIVENEEDLRSYMRTAVKASPDHPVLVDSYIVGQECEVDAISDGKNVLIPGIMEHIERAGVHSGDSMAVYPPQTLSQKVQETIADYTKRLAIGLHCLGMMNIQFVIKDEKVYVIEVNPRASRTVPFLSKVTNIPMAQVATKLILGQSLSELGYQNGLYPESTRVHIKAPVFSFTKLAKVDSLLGPEMKSTGEVMGSDATLEKALYKAFEASYLHLPTFGNVVFTIADDAKEEALNLARRFQNIGYGILATEGTAAFFASHGLQAQPVGKIGDDDKDIPSFVRKGRIQAIINTVGTKRTADEDGEQIRRSAIEHGVPLFTALDTANAMLKVLESRSFVTEAI

SEQ ID NO: 74015 - protein, 359 aa, Streptococcus pneumoniae
MTKRILVLEDGTVFEGKAFGADIDVTGEIVFNTGMTGYQESITDQSYNGQILTFTYPLVGNYGINRDDYESIIPTCKGVVVFEEARRASNWRNQMTLDEFLKAKKIPGISGIDTRALTKIIRKHGTMRATLTHVGDSMDHVTDQLQATVLPTDNIKQVSTKTSYPAPGVGLSVVLVDFGLKHSILRELSKRNCNVTVVPYSTTAEEILHLNPDGVMLSNGPGNPEDVPQALDMIRGVQGKIPIFGICMGHQLFAMANGAKTYKMKFGHRGFNHAVREIATGRVDFTSQNHGYAVSREDLPEHLIITHEEINDKSVEGVRHRYQPAFSVQYHPDAAPGPHDASYLFDEFIEMMEVFKQSN

SEQ ID NO: 74016 - protein, 245 aa, Streptococcus pneumoniae
MILKKEITMKPETFYNLLAEQNLPLSNQQKEQFERYFELLVEWNEKINLTAITDKEEVYLKHFYDSIAPILQGLIPNETIKLLDIGAGAGFPSLPMKILYPELDVTIIDSLNKRINFLQLLAQELDLNGVHFYHGRAEDFAQDKNFRAQYDFVTARAVARMQVLSELTIPYLKVGGKLLALKASNAPEELLEAKNALNLLFSKVEDNLSYALPNRDPRYITVVEKKKETPNKYPRKAGMPNKRPL

SEQ ID NO: 74017 - protein, 523 aa, Streptococcus pneumoniae
MAFESLTERLQNVFKNLRKKGKISESDVQEATKEIRLALLEADVALPVVKDFIKKVRERAVGHEVIDTLNPAQQIIKIVDEELTAVLGSDTAEIIKSPKIPTIIMMVGLQGAGKTTFAGKLANKLKKEENARPLMVAADIYRPAAIDQLKTLGQQIDVPVFALGTEVPAVEIVRQGLEQAQTNHNDYVLIDTAGRLQIDELLMNELRDVKALAQPNEILLVVDAMIGQEAANVAREFNAQLEVTGVILTKIDGDTRGGAALSVRHITGKPIKFTGTGEKITDIETFHPDRMSSRILGMGDMLTLIEKASQEYDEQKALEMAEKMRENTFDFNDFIDQLDQVQNMGPMEDLLKMIPGMANNPALQNMKVDERQIARKRAIVSSMTPEERENPDLLNPSRRRRIAAGSGNTFVEVNKFIKDFNQAKQLMQGVMSGDMNKMMKQMGINPNNLPKNMPNMGGMDMSALEGMMGQGGMPDLSALGGAGMPDMSQMFGGGLKGKIGEFAMKQSMKRMANKMKKAKKKRK

SEQ ID NO: 74018 - protein, 110 aa, Streptococcus pneumoniae
MEIEKTNRMNALFEFYAALLTDKQMNYIELYYADDYSLAEIAEEFGVSRQAVYDNIKRTEKILEDYEMKLHMYSDYIVRSQIFDQILERYPKDNFLQEQIEILTSIDNRE

SEQ ID NO: 74019 - protein, 268 aa, Streptococcus pneumoniae
MSIKLIAVDIDGTLVNSQKEITPEVFSAIQDAKEAGVKVVIATGRPIAGVAKLLDDLQLRDQGDYVVTFNGALVQETATGHEIISESLTYEDYLDMEFLSRKLGVHMHAITKDGIYTANRNIGKYTVHESTLVSMPIFYRTPEEMAGKEIVKCMFIDEPEILDAAIEKIPAEFYEHYSINKSAPFYLELLKKNVDKGSAITHLAEKLGLTKDETMAIGDEENDRAMLEVVGNPVVMENGNPEIKKIAKYITKTNDESGVAHAIRTWVL

SEQ ID NO: 74020 - protein, 115 aa, Streptococcus pneumoniae
MNPLIQSLTEGQLRTDIPSFRPGDTVRVHAKVVEGNRERIQIFEGVVIARKGAGISENYTVRKISNGIGVERIFPIHTPRVEKIEVVRYGKVRRAKLYYLRALQGKAARIKEIRR

SEQ ID NO: 74021 - protein, 80 aa, Streptococcus pneumoniae
MKKDIHPEYRPVVFMDTTTGYQFLSGSTKRSNETVEFEGETYPLIRVEISSDSHPFYTGRQKFTQADGRVDRFNKKYGLK

SEQ ID NO: 74022 - protein, 192 aa, Streptococcus pneumoniae
MVRNYWKAKSWLLVLALSFLILSPAGAQESLSFFFVKITDASKTVKNGGQTETQKLVTKMASDFERVENKDSEVGKIVKEKLALSGDITEAKLTEISSALLAFEKEQNPVDLDAEKEKLVNRLSPRFETLEQAIASKDLEKVREAFKKMNSTWTINESVVRDNSTAHYGRVETAISFLPSSMETEPTDESGT

SEQ ID NO: 74023 - protein, 334 aa, Streptococcus pneumoniae
MQKNIYFVVLDLHTTDRDKIIQLFKDWTDYSAKLVEGELVKKDGQNALFPPSDTGETVGLNPHRLTLTFGVSASFLKRMNLENKRPRLFRDLPLFPKEQLREKYTGGDIVIHACADDEQIAFHAIRNLIRKGRNAVPLRWSQSGFAAIGDRMETPWNLFGFKDGTANPTKEQDFDRVIWADSKDWMENGSYMAVRRIQMFLETWDRTSLEEQENTFGRYKESGAPFGKKNEFDEVDLSLLPDDSHVCLAKEVDKPLLRRSYSYSDGIDEKTGQFDTGLLFISFQKDPDNFVKVQTNLGATDKMNEYITHIGSGLFTCFGGVEKGGYIGQKLLEG

SEQ ID NO: 74024 - protein, 448 aa, Streptococcus pneumoniae
MTSAKEYIQSVFETVKARNGHEAEFLQAVEEFFNTLEPVFEKHPEYIEENILARITEPERVISFRVPWVDRDGKVQVNRGYRVQFNSAVGPYKGGLRFHPTVNQGILKFLGFEQIFKNVLTGLPIGGGKGGSDFDPKGKTDAEVMRFCQSFMTELQKHIGPSLDVPAGDIGVGGREIGYLYGQYKRLNQFDAGVLTGKPLGFGGSLIRPEATGYGLVYYTEEMLKANGNSFAGKKVVISGSGNVAQYALQKATELGATVISVSDSNGYVIDENGIDFDLLVDVKEKRRARLTEYAAEKATATYHEGSVWTYAGNYDIALPCATQNEINGEAAKRLVAQGVICVSEGANMPSNLDAIKVYKENGIFYGPAKAANAGGVAVSALEMSQNSLRLSWTREEVDGRLKDIMTNIFNTAKTTSETYGLDKDYLAGANIAAFENVANAMIAQGIV

SEQ ID NO: 74025 - protein, 439 aa, Streptococcus pneumoniae
MLRLVYYQFLHNKKQWLGVSPVIFVSSLVMGLAVNGVINVENNSQVFVGLPDPKPIFMFPIVFGGVTLFFVLSNIINMLVEIFRDDYELLEVLGASRLQLSFLVGGQIFIISSIISFIAYLCSIFVTSNYYYFLQYFFGENILPDIQFQTSAVGCIITVVLISFLAFLSGCFYTFKKIRNRKSSKIRHVLSIVKRILLLAGFSVIWLLSLQQIFQDSTILAKAQIIFNIVILDIVIIYQLSPFIQSCFIKLLSIIIFRNNFMFIVSKWNLLYCKSYIKSISAAITGAILLISSFQMISQNILSQFQDDSDLELKVAFIVYVGAPILIVLANIISIAFLSSHQERIEIQQFEILGTSNYQMVKIKVGEAIFLTFVTSLIAFLLNIKIMALIYYSLEDILIDDMNLLGLILPNFIVSIILFILIFITKSSYFIFKNAKIIS

SEQ ID NO: 74026 - protein, 127 aa, Streptococcus pneumoniae
MEEITMALNIENIIAEIKEASILELNDLVKAIEEEFGVTAAAPVAVAAADAADAGAAKDSFDVELTSAGDKKVGVIKVVREITGLGLKEAKELVDGAPALVKEGVATAEAEEIKAKLEEAGASVTLK

SEQ ID NO: 74027 - protein, 166 aa, Streptococcus pneumoniae
MSEAIIAKKAELVDVVAEKMKAAASIVVVDARGLTVEQDTVLRRELRGSEVEYKVIKNSILRRAAEKAGLEDLASVFVGPSAVAFSNEDVIAPAKILNDFSKNAEALEIKGGAIEGAVASKEEILALATLPNREGLLSMLLSVLQAPVRNVALAVKAVAESKEDAA

SEQ ID NO: 74028 - protein, 488 aa, Streptococcus pneumoniae
MKIKEQTRKLAVGCSKHSFEVVDKTDEVSSKHCFEVADRTDEVSNHTYGKVNLKWFEESTTCLLEKEPIMKVFQHVNIVTCDQDFHVYLDGILAVKDSQIVYVGQDKPAFLEQAEQIIDYQGAWIMPGLVNCHTHSAMTGLRGIRDDSNLHEWLNDYIWPAESEFTPDMTTNAVKEALTEMLQSGTTTFNDMYNPNGVDIQQIYQVVKTSKMRCYFSPTLFSSETETTAETISRTRSIIDEILKYKNPNFKVMVAPHSPYSCSRDLLEASLEMAKELNIPLHVHVAETKEESGIILKRYGKRPLAFLEELGYLDHPSVFAHGVELNEREIERLASSQVAIAHNPISNLKLASGIAPIIQLQKAGVAVGIATDSVASNNNLDMFEEGRTAALLQKMKSGDASQFPIETALKVLTIEGAKALGMENQIGSLEVGKQADFLVIQPQGKIHLQPQENMLSHLVYAVKSSDVDDVYIAGEQVVKQGQVLTVEL

SEQ ID NO: 74029 - protein, 289 aa, Streptococcus pneumoniae
MKIIVPATSANIGPGFDSVGVAVTKYLQIEVCEERDEWLIEHQIGKWIPHDERNLLLKIALQIVPDLQPRRLKMTSDVPLARGLGSSSSVIVAGIELANQLGQLNLSDHEKLQLATKIEGHPDNVAPAIYGNLVIASSVEGQVSAIVADFPECDFLAYIPNYELRTRDSRSVLPKKLSYKEAVAASSIANVAVAALLAGDMVTAGQAIEGDLFHERYRQDLVREFAMIKQVTKENGAYATYLSGAGPTVMVLASHDKMPTIKAELEKQPFKGKLHDLRVDTQGVRVEAK

SEQ ID NO: 74030 - protein, 328 aa, Streptococcus pneumoniae
METALISVIVPVYNVAQYLEKSIASIQKQTYQNLEIILVDDGATDESGRLCDSIAEQDDRVSVLHKKNEGLSQARNDGMKQAHGDYLIFIDSDDYIHPEMIQSLYEQLVQEDADVSSCGVMNVYANDESPQSANQDDYFVCDSQTFLKEYLIGEKIPGTICNKLIKRQIATDLSFPKGLIYEDAYYHFDLIKLAKKYVVNTKPYYYYFHRGDSITTKPYAEKDLAYIDIYQKFYNEVVKNYPDLKEVAFFRLAYAHFFILDKMLLDDQYKQFEAYSQIHRFLKGHAFAISRNSIFRKGRRISALALFINISLYRFLLLKNIEKSKKLH

SEQ ID NO: 74031 - protein, 424 aa, Streptococcus pneumoniae
MSKENPLSHHEQLRYDYLLKNIHYLNEREKNEFAYLQEKLTLARGNSSSSLEQEREEQVDLPSYANRSRSQSKSQALSFPPKKKRRKLRLKRIFMVIFSLLVCVALAMVFMFLRGYQDASAKKTADARAAQVEVFNGQDTRDGVNILIMGTDGRIGQNSVETRTDSIMVLNVGGSDKKMKLVSFMRDNLVYIDGYSQVINGRKQTDNKLNVAYELGEQEGQKGAEMVRQVLKDNFDLDIKYYALVDFQAFATAIDTLFPDGVTIDAQFSTLNGRPLTEATVGDDLYATETESPTQTIKVGKQQMNGSTLLNYARFRDDDEADYGRTKRQQQVLTAILEQIKDPTKLFTGSEALGKVFAMTSTNVPYTFLLTNGLSVLDGAKNGIEKLTIPELGDWVDAYDVYGGLGLLVDQNKYQTKLAQMGLR

SEQ ID NO: 74032 - protein, 388 aa, Streptococcus pneumoniae
MRYLTAGESHGPRLTAIIEGIPAGLPLTAEDINEDLRRRQGGYGRGGRMKIENDQVVFTSGVRHGKTTGAPITMDVINKDHQKWLDIMSAEDIEDRLKSKRKITHPRPGHADLVGGIKYRFDDLRNSLERSSARETTMRVAVGAVAKRLLAELDMEIANHVVVFGGKEIDVPENLTVAEIKQRAAQSEVSIVNQEREQEIKDYIDQIKRDGDTIGGVVETVVGGVPVGLGSYVQWDRKLDARLAQAVVSINAFKGVEFGLGFEAGYRKGSQVMDEILWSKEDGYTRRTNNLGGFEGGMTNGQPIVVRGVMKPIPTLYKPLMSVDIETHEPYKATVERSDPTALPAAGMVMEAVVATVLAQEILEKFSSDNLEELKEAVAKHRDYTKNY

SEQ ID NO: 74033 - protein, 284 aa, Streptococcus pneumoniae
MKLDGYTRLAAVVANPIKHSISPFIHNRAFEATATNGAYVAWEIEASDLVETVANIRRYQMFGINLSMPYKEQVIPYLDKLSDEARLIGAVNTVVNENGNLIGYNTDGKGFFKCLPSFTISGKKMTLLGAGGAAKSILAQAILDGVSQISVFVRSVSMEKTRPYLDKLQEQTGFKVDLCALEYVSELQARIAESDLLVNATSVGMDGQSSPVPENIVLPETLLVADIIYQPFETPFLKWARSQGNPAVNGLGMLLYQAAEAFQLWTGKEMPTEEIWQSLTEKYQ

SEQ ID NO: 74034 - protein, 225 aa, Streptococcus pneumoniae
MKLIVSVMPRSLEEAQALDATRYLDADIIEWRADYLPKEAILQVAPAIFEKFAGRELVFTLRTRSEGGEIDLSPEEYIHLIKEVAQLYQPDYIDFEYYSYKDVFEEMLDFPNLVLSYHNFQETPENMMEILSELTILNPKLVKVAVMAHTEQDVLDLMNYTRGFKTLNPEQEYVTISMGKVGKVSRITADVTGSSWSFASLDEVSAPGQISLASMKKIREILDEA

SEQ ID NO: 74035 - protein, 390 aa, Streptococcus pneumoniae
MVVMNRIRVSKRVEKKLAKGLVLLEASDLENVNLKDQEVEVQGQEGNFLGTAYLSQQNKGLGWFVSKDKVAFNQAFFETLFRKAKEKRSAYYQDDLTTAYRLFNQEGDGFGGLTVDLYGDYAVFSWYNSYVYQIRQTISEAFRQVFPEVLGDYEKIRFKGLDYESAHVYGQEAPDFFTVLENGVLYQVFMNDGLMTGIFLDQHEVRGSLVDGLAMGKSLLNMFSYTAAFSVAAAMGGASQTTSVDLAKRSRELSQAHFQANGLSTDEHRFIVMDVFEYFKYAKRKNLTYDVIVLDPPSFARNKKQTFSVAKDYHKLISQSLEILNPGGIIIASTNAANVSRQKFTEQIDKGFAGRSYQILNKYGLPADFAYNKKDESSNYLKVISMKVSK

SEQ ID NO: 74036 - protein, 268 aa, Streptococcus pneumoniae
MYQSASIIVCNIDKDRSHPMIEFQNVSKLYGDKEALSNLNLQIENGEIMGLIGHNGAGKSTTIKSLVSIISPSSGRILVNGQELSENRLAIKRKIGYVADSPDLFLRLTANEFWELIASSYDLTSSDLETSLARLLNVFDFAENRYQVIETLSHGMRQKVFVIGALLSDPDIWVLDEPLTGLDPQAAFDLKQMMKEHAQKGKTVLFSTHVLEVAEQVCDRIAILKKGHLIYCGSVEDLRKDYPDQSLESIYLSLAGRKEEVADASQGH

SEQ ID NO: 74037 - protein, 872 aa, Streptococcus pneumoniae
MKQLSSAQVRQMWLDFWATKGHSVEPSVSLVPVNDPTLLWINSGVATLKKYFDGTIIPENPRITNAQKAIRTNDIENVGKTARHHTMFEMLGNFSIGDYFRDEAITWAYELLTSPEWFDFPAEKLYMTYYPDDKDSYNRWIEVGVDPSHLIPIEDNFWEIGAGPSGPDTEIFFDRGEAFDPENIGLRLLAEDIENDRYIEIWNIVLSQFNADPAVPRSEYKELPHKNIDTGAGLERLVAVIQGAKTNFETDLFMPIIREVEKLSGKVYDQDGDNMSFKVIADHIRSLSFAIGDGALPGNEGRGYVLRRLLRRASMHGQKLGINEPFLYKLVPTVGKIMESYYPEVLEKRDFIEKIVKSEEESFARTLHSGQHFAQGIVADLKEKGQSVIAGQDVFKLYDTYGFPVELTEEIAEEAGMTVDREGFEAAMKEQQERARASAVKGGSMGMQNETLQNITVESVFNYNTSQLSSKLVAIVADNAEVGAVSEGTASLIFAETSFYAEMGGQVADYGQILDESGKIVATVTNVQKAPNGQALHTVEVLAPLALNQEYTLAIDSNRRHRVMKNHTATHLLHAALHNILGNHATQAGSLNEVEFLRFDFTHFQAVTAEELRAIEQQVNEKIWEALEVKTVETDIDTAKEMGAMALFGEKYGKEVRVVTIGDYSIELCGGTHVDNTSEIGLFKIVKEEGIGSGTRRILAVTGKEAFEAYREQEDALKAIAATLKAPQVKEVPHKVEGLQEQLRQLQKENAELKEKAAAAAAGDIFKDVKEVNGHRYIASQVSVSDAGALRTFADNWKQKDYSDLLVLVAAIGDKVNVLVASKTKDLHAGNLVKELAPIIDGRGGGKPDMAMAGGSNQPKIQELLDAVAGKL

SEQ ID NO: 74038 - protein, 356 aa, Streptococcus pneumoniae
MKKIYSFLAGIAAIILVLWGIATHLDSKINSRDSQKLVIYNWGDYIDPELLTQFTEETGIQVQYEAFDSNEAMYTKIKQGGTTYDIAIPSEYMINKMKDEDLLVPLDYSKIEGIENIGPEFLNQSFDPGNKFSIPYFWGTLGIVYNETMVDEAPEHWDDLWKLEYKNSIMLFDGAREVLGLGLNSLGYSLNSKDPQQLEETVDKLYKLTPNIKAIVADEMKGYMIQNNVAIGVTFSGEASQMLEKNENLRYVVPTEASNLWFDNMVIPKTVKNQDSAYAFINFMLKPENALQNAEYVGYSTPNLPAKELLPEETKEDKAFYPDVETMKHLEVYEKFDHKWTGKYSDLFLQFKMYRK

SEQ ID NO: 74039 - protein, 316 aa, Streptococcus pneumoniae
MSVREKMLEILEGIDIRFKEPLHSYSYTKVGGEADYLVFPRNRFELARVVKFANQENIPWMVLGNASNIIVRDGGIRGFVILCDKLNNVSVDGYTIEAEAGANLIETTRIALRHSLTGFEFACGIPGSVGGAVFMNAGAYGGEIAHILQSCKVLTKDGEIETLSAKDLAFGYRHSAIQESGAVVLSVKFALAPGTHQVIKQEMDRLTHLRELKQPLEYPSCGSVFKRPVGHFAGQLISEAGLKGYRIGGVEVSEKHAGFMINVADGTAKDYEDLIQSVIEKVKEHSGITLEREVRILGESLSVAKMYAGGFTPCKR

SEQ ID NO: 74040 - protein, 243 aa, Streptococcus pneumoniae
MDKNVQEPVKLFQYNTLGALMAGLYGGTMTVGELLEHGDLGLGTLDSIDGELIVLDGKAYQAKGSGDQPEIVEVSPDALIPYAAVVPHQAEVIFRQRFEMTDKELKERIESYYDGENLFRSIKIRGEFSHMHVRMIPKSTPDTKFADVATHQPEYSRDNVAGTIVGFWTPEIFHGVSVAGYHLHFISDDLTFGGHVMDFVIKEGIIEVGAVDQLDQRFPVQDRQYLFAKFNVDEMKKDIEKAE

SEQ ID NO: 74041 - protein, 271 aa, Streptococcus pneumoniae
MKSKKWIFVLCNFLASFFLVACQSGSNGSQSAVEAIKQKGKLVVATSPDYAPFEFQSLVDGKNQVVGADIDMAQAIADELGVKLEISSMSFDNVLTSLQTGKADLAVAGISATDERKEVFDFSIPYYENKISFLVRKADVEKYKDLTSLESANIAAQKGTVPESMVKEQLPKAQLTSLTNMGEAVNELQAGKVDAVHMDEPVALSYAAKNAGLAVATVSLKMKDGDANAVALRKNSDDLKEVVDKVIQKLKNEGTYQSYLEKAASLTEVEE

SEQ ID NO: 74042 - protein, 305 aa, Streptococcus pneumoniae
MNQEELAKKMLLPSKNSRLEKLGKGLTFACLSLIVILVAMILVFVAQKGLSTFFVNGVNIFDFLLGGTWNPSSKEFGALPMILGSFIVTILSALIATPFAIGAAVFMTEVSPKGAKILQPAIELLVGIPSVVYGFIGLQVVVPFVRSVFGGTGFGILSGISVLFVMILPTVTFMTTDSLRAVPRYYREASFAMGATRWQTIWRVILKAARSGIFTAVVFGMARAFGEALAIQMVVGNSAVIPTSLTTPAATLTSILTMGIGNTVMGTVNNNVLWSLALVLLLMSLVFNSVIKLITKERGKKNYAR

SEQ ID NO: 74043 - protein, 245 aa, Streptococcus pneumoniae
MGLTYQMKMKIPFDMADMNGHIKLPDVILLSLQVSGMQSIELGVSDKAILEDYNLVWIIAEYDIEVVRLPRFAEEITIETEALSYNRLFCYRRFTIYNEAGQELIHMMATFVLMDRDSRKVHAVEPEIVAPYQSDFDKKLIRGPKYESLEEPISKDYHVRFYDLDMNGHVNNSKYLDWIFEVMGADFLTHYIPKKINLKYVKEVRPGGVITSAVERTGLESKHEITSDGVINAQAIITWQEIKKV

SEQ ID NO: 74044 - protein, 316 aa, Streptococcus pneumoniae
MKEEMMSVLVKEVIEKLRLDIVYGEPELLEKEINIADITRPGLEMTGYFDYYTPERIQLLGMKEWSYLISMPSNSRYEVLKKMFLPETPAVIVARGLVVPEEMLKAARECKIAILTSRAATSRLSGELSSYLDSRLAERTSVHGVLMDIYGMGVLIQGDSGIGKSETGLELVKRGHRLVADDRVDIFAKDEITLWGEPAEILKHLIEIRGVGIIDVMSLYGASAVKDSSQVQLAVYLENYDTHKTFDRLGNNAEELEVSGVAIPRIRIPVKTGRNISVVIEAAAMNYRAKEMGFDATRLFDERLTSLIARNEVQNA

SEQ ID NO: 74045 - protein, 66 aa, Streptococcus pneumoniae
MNLKGVKKMSKTVVRKNESLDDALRRFKRAVTKAGTLQETRKREFYEKPSVKRKRKSEVARKRKKF

SEQ ID NO: 74046 - protein, 240 aa, Streptococcus pneumoniae
MEDEKMKVIKVENQVQGGKVAFEILKEKLANGAQTLGLATGSSPLEFYKEIVESNLDFSNLTSVNLDEYVGLDGDNPQSYRYFMQENLFNQKPFKESFLPRGVKDNAEAEVERYNQILADHPVDLQILGIGRNGHIGFNEPGTPFDSQTHLVELDQSTIEANARFFAKIEDVPTQAISMGIKNILDAKSIILFAYGESKAEAIAGTVSGPVTENLPASSLQNHPDVTIIADAEALSLLEK

SEQ ID NO: 74047 - protein, 346 aa, Streptococcus pneumoniae
MNRYMNTADFDFHLPEELIAQTPLEKRDASKLLIVNRETGEMQDKHFHSIIDMLEPGDALVMNDTRVLPARLYGQKVETGSHVELLLLKNTSGDEWEVLAKPAKRLKVGTRISFGDGRLSAVVTEELTHGGRIVRFEYQRIFLEVLESLGEMPLPPYIHEKLDDRERYQTVYAKESGSAAAPTAGLHFTKELLAEIQAKGVHLVYLTLHVGLGTFRPVSVDNLDEHEMHSEFYQLSEEAAATLRSVKENGGRVIAVGTTSIRTLETIGSKFDGQIQADSGWTNIFIKPGYEWKVVDAFSTNFHLPKSTLVMLVSAFAGRELVLDAYHHSIQEHYRFFSFGDAMFIY

SEQ ID NO: 74048 - protein, 274 aa, Streptococcus pneumoniae
MSLQETIIQELGVKPVIDAQEEIRRSIDFLKRYLKKHPFLKTFVLGISGGQDSTLAGRLAQLAMEELRAETGDDSYKFIAVRLPYGVQADEADAQKALAFIQPDVSLVVNIKESADAMTAAVEATGSPVSDFNKGNIKARCRMIAQYALAGSHSGAVIGTDHAAENITGFFTKFGDGGADILPLYRLNKRQGKQLLQKLGAEPALYEKIPTADLEEDKPGLADEVALGVTYAEIDDYLEGKTISPEAQATIENWWHKGQHKRHLPITVFDDFWE

SEQ ID NO: 74049 - protein, 486 aa, Streptococcus pneumoniae
MYPDDSLTLHTDLYQINMMQVYFDQGIHNKKAVFEVYFRQQPFKNGYAVFAGLERIVNYLEDLRFSDSDIAYLESLGYHGAFLDYLRNFKLELTVRSAQEGDLVFANEPIVQVEGPLAQCQLVETALLNIVNYQTLVATKAARIRSVIEDEPLMEFGTRRAQEMDAAIWGTRAAVIGGANGTSNVRAGKLFDIPVLGTHAHALVQVYGNDYEAFKAYAATHKNCVFLVDTYDTLRIGVPAAIQVARELGDQINFMGVRIDSGDIAYISKKVRQQLDEAGFTEAKIYASNDLDENTILNLKMQKAKIDVWGVGTKLITAYDQPALGAVYKIVAIEDETGQMRNTIKLSNNAEKVSTPGKKQVWRITSREKGKSEGDYITYDGVDISDMTEIKMFHPTYTYIKKTVRNFDAVPLLVDIFKEGILVYNLPSLTDIQDYARKEFDKLWDEYKRVLNPQHYPVDLARDVWQDKMDLIDKMRKEALGEGEEE

SEQ ID NO: 74050 - protein, 241 aa, Streptococcus pneumoniae
MRDANRGGCSQSCRWKYDLYDMPFGKERKSLQGEIPEEFSMSAVDMSMIDHISDMIENGVDSLKIEGRMESIHYVLTVTNCYKAAVDAYLESPEKFEAIKQDLVDEMWKVAQRELATGFYYGTPSENEQLFGARRKIPEYKFVAEVVSYDDAAQTATIRQRNVINEGDQVEFYGPGFRHFETYIEDLHDAKGNKIDRAPNPMELLTIKVPQPVQAGDMVRALKEGLINLYKEDGTSVTVRA

SEQ ID NO: 74051 - protein, 434 aa, Streptococcus pneumoniae
MQIGEIMTKTLKRPEVLSPAGTLEKLKVAVQYGADAVFIGGQAYGLRSRAGNFTFEQMEEGVQFAAKYGAKVYVAANMVMHEGNEAGAGEWFRKLRDIGIAAVIVSDPALIMIAATEAPGLEIHLSTQASATNYETLEFWKELGLTRVVLAREVSMEELAEIRKRTDVEIEAFVHGAMCISYSGRCTLSNHMSMRDANRGGCSQSCRWKYDLYDMPFGKERKSLQGEIPEEFSMSAVDMSMIDHIPDMIENGVDSLKIEGRMKSIHYVSTVTNCYKAAVDAYLESPEKFEAIKQDLVDEMWKVAQRELATGFYYGIPSENEQLFGARRKIPEYKFVAEVVSYDDAVQTATIRQRNVINEGDQVEFYGPGFRHFETYIEDLHDAKGNKIDRAPNPMELLTIKVPQPVQSGDMVRALKEGLINFYKEDGTSVTVRA

SEQ ID NO: 74052 - protein, 520 aa, Streptococcus pneumoniae
MSNISTDLQDVEKIIVLDYGSQYNQLISRRIREIGVFSELKSHKISAAEVREVNPVGIILSGGPNSVYEDGSFDIDPEIFELGIPILGICYGMQLLTHKLGGKVVPAGDAGNREYGQSTLTHTPSALFESTPDEQTVLMSHGDAVTEIPADFVRTGTSADCPYAAIENPDKHIYGIQFHPEVRHSVYGNDILRNFALNICKAKGDWSMDNFIDMQIKKIRETVGDKRVLLGLSGGVDSSVVGVLLQKAIGDQLICIFVDHGLLRKGEADQVMDMLGGKFGLNIVKADAAKRFLDKLAGVSDPEQKRKIIGNEFVYVFDDEASKLKDVKFLAQGTLYTDVIESGTDTAQTIKSHHNVGGLPEDMQFELIEPLNTLYKDEVRALGTELGMPDHIVWRQPFPGPGLAIRVMGEITEEKLETVRESDAILREEIAKAGLDRDIWQYFTVNTGVRSVGVMGDGRTYDYTIAIRAITSIDGMTADFAKIPWEVLQKISVRIVNEVDHVNRIVYDITSKPPATVEWE

SEQ ID NO: 74053 - protein, 318 aa, Streptococcus pneumoniae
MDIRPQSSDELDSQRRVRRDMSNSLKGTLLTVVAGIAWGLSGTSGQYLMAHGISALVLTNLRLLIAGGILMLLAYATAKDKILVFLKDRKSLLSLLIFALIGLFLNQFAYLSAIQETNAGTATVLQYVCPVGILIYSCIKDRVAPTLGEIVSIIFAIGGTFLIATHGQLDQLSMTPAGLFWGLFSALTYALYIILPIALIKKWGSSLVIGVGMVIAGLVALPFTGVLQADIPTSLDFLLAFAGIILIGTVFAYTAFLKGASLIGPVKSSLLASIEPISAIFFAFLIMNEQFYPIDFLGMAMILFAVTLISLKDLFLEK

SEQ ID NO: 74054 - protein, 275 aa, Streptococcus pneumoniae
MMIKVIATDMDGTLLDARGQLDLPRLEKILDQLDQRGIRFVIATGNEIHRMRQLLSPLVDRVVLVVANGARIFENNELIQAQTWDDAIVNKALTHFKGRACQDQFVVTGMKGDFVKEGTIFTDLESFMTPEMIEKFYQRMQFVDELTSDLFGGVLKMSMVVGEERLSSVLEEINALFDGRVRAVSSGYGCIDILQAGIHKAWGLEELLKRWDLKSQEIMAFGDSENDVEMLEMAGIAYAMENADEKAKAVATALAPANSQGGVYQVLENWLEKGE

SEQ ID NO: 74055 - protein, 176 aa, Streptococcus pneumoniae
MQKKYVKILYSSPIGILSLVADDHYLYGIWVQEQKHFERGLGDETIEEVVSHPILDPVIACLDDYFKGKPQDLSNLLLAPIGTNFEKRVWDYLQGIPYGQTVTYGQIAQDLQVASAQAIGGAVGRNPWSILVPCHRVLGAGKRLTGYAAGVEKKAWLLEHEGVDFKDRNNRRRSTC

SEQ ID NO: 74056 - protein, 164 aa, Streptococcus pneumoniae
MEIRLAFPNEVDAIMQVMEEAKKCLADAGSDQWQNGYPNADVIIDDIISGQAYVALEEGELLAYAAVTKSPEEAYEAIYEGNWQAGESEYLVFHRIAVAADVQGKGVAQTFLEGLIEGFDYLDFRSDTHAENKVMQHIFEKLGFKQVGKVPVDGERLAYQKLKK

SEQ ID NO: 74057 - protein, 215 aa, Streptococcus pneumoniae
MNTSLKLSKQLSFGEEIANSVTHAVGAVIMLILLPISSIYSYEAHGFLSSIGVSIFVISLFLMFLSSTIYHSMAYGSTHKYVLRIIDHSMIYVAIAGSYTPVVLTLMNNWFGYLIIVIQWGTTIFGILYKIFAKKVNEKFSLALYLIMGWLVLAIIPAIISQTTPVFWSLMVTGGLCYTVGAGFYAKKKPYFHMIWHLFILAASALQYIAIVYYM

SEQ ID NO: 74058 - protein, 193 aa, Streptococcus pneumoniae
MKIGILALQGAFAEHAKVLDQLGVESVELRNLDDFQQDQSDLSGLILPGGESTTMGKLLRDQNMLLPIREAILSGLPVFGTCAGLILLAKEITSQKESHLGTMDMVVERNAYGRQLGSFYTEAECKGVGKIPMTFIRGPIISSVGEGVEILAIVNNQIVAAQEKNMLVSSFHPELTDDVRLHQYFINMCKEKS

SEQ ID NO: 74059 - protein, 297 aa, Streptococcus pneumoniae
MMRIKQMTENRYELNKNLAQMLKGGVIMDVQNPEQARIAEAAGAAAVMALERIPADIRAAGGVSRMSDPKMIKEIQEAVSIPVMAKVRIGHFVEAQILEAIEIDYIDESEVLSPADDRFHVDKKEFQVPFVCGAKDLGEALRRIAEGASMIRTKGEPGTGDIVQAVRHMRMMNQEIRRIQNLREDELYVAAKDLQVPVELVQYVHEHGKLPVVNFAAGGVATPADAALMMQLGAEGVFVGSGIFKSGDPVKRASAIVKAVTNFRNPQILAQISEDLGEAMVGINENEIQILMAERGK

SEQ ID NO: 74060 - protein, 678 aa, Streptococcus pneumoniae
MTKNLLVELGLEELPAYVVTPSEKQLGEKMAAFLKENRLSFEAIQTFSTPRRLAVRVTGLSDKQSDLTEDFKGPAKKIALDSDGNFTKAAQGFVRGKGLTVEDIEFREIKGEEYVYVTKEEVGQAVEAIVPGVVDVLKSLTFPVSMHWAGNSFEYIRPVHTLTVLLDEQEFDLDFLDIKGGRVSRGHRFLGKETKIQSALSYEEDLRKQFVIADPCEREQMIVDQIKKIEAKHGVRIEIDADLLNEVLNLVEYPTAFMGSFDAKYLEVPEEVLVTSMKEHQRYFVVRDQDGKLLPNFISVRNGNAERLKNVIKGNEKVLVARLEDGEFFWREDQKLVISDLVEKLNNVTFHEKIGSLREHMIRTGQITVLLAEKAGLSVDETVDLARAAAIYKFDLLTGMVGEFDELQGIMGEKYTLLAGETPAVAAAIREHYMPTSAEGELPESKVGAVLAIADKLDTILSFFSVGLIPSGSNDPYALRRATQGVVRILDAFGWHIAMDELIDSLYALKFDSLTYENKAEVMDFIKARVDKMMGSTPKDIKEAVLAGSNFVVADMLEAASALVEVSKEEDFKPSVESLSRAFNLAEKAEGVATVDSALFENDQEKALAEAVETLVLSGPASQQLKQLFALSPVIDAFFENTMVMAEDQAVRQNRLAILSQLTKKAAKFACFNQINTK

SEQ ID NO: 74061 - protein, 305 aa, Streptococcus pneumoniae
MSKKLTFQEIILTLQQFWNDQGCMLMQAYDNEKGAGTMSPYTFLRAIGPEPWNAAYVEPSRRPADGRYGENPNRLYQHHQFQVVMKPSPSNIQELYLESLEKLGINPLEHDIRFVEDNWENPSTGSAGLGWEVWLDGMEITQFTYFQQVGGLATGPVTAEVTYGLERLASYIQEVDSIYDIEWADGVKYGEIFIQPEYEHSKYSFEISDQEMLLENFDKFEKEAGRALEEGLVHPAYDYVLKCSHTFNLLDARGAVSVTERAGYIARIRNLARVVAKTFVAERKRLGYPLLDEETRVKLLAEDAE

SEQ ID NO: 74062 - protein, 280 aa, Streptococcus pneumoniae
MNTYQLNNGVEIPVLGFGTFKAKDGEEAYRAVLEALKAGYRHIDTAAIYQNEESVGQAIKDSGVPREEMFVTTKLWNSQQTYEQTRQALEKSIEKLGLDYLDLYLIHWPNPKPLRENDAWKTRNAEVWRAMEDLYQEGKIRAIGVSNFLPHHLDALLETATIVPAVNQVRLAPGVYQDQVVAYCREKGILLEAWGPFGQGELFDSKQVQEIAANHGKSVAQIALAWSLAEGFLPLPKSVTTSRIQANLDCFGIELSHEERETLKTIAVQSGAPRVDDVDF

SEQ ID NO: 74063 - protein, 353 aa, Streptococcus pneumoniae
MKFSPLCWIVPSIYVIMKEGFKIGKGVFMLKLGVIGTGAISHHFIEAAHTSGEYQLVAIYSRKLETAATFASRYQNIQLFDQLEVFFKSSFDLVYIASPNSLHFAQAKAALSAGKHVILEKPAVSQPQEWFDLIQTAEKNNCFIFEAARNYHEKAFTTIKNFLADKQVLGADFNYAKYSSKMPDLLAGQTPNVFSDRFAGGALMDLGIYPLYAAVRLFGKANDATYHAQQLDNSIDLNGDGILFYPDYQVHIKAGKNITSNLPCEIYTTDGTLTLNTIEHIRSAIFTDHQGNQVQLPIQQAPHTMTEEVAAFAHMIQQPDLNLYQTWLYDAGSVHELLYTMRQTAGIRFEAEK

SEQ ID NO: 74064 - protein, 162 aa, Streptococcus pneumoniae
MEQCYTDVTEFAIPVSTQKLYLSPVLDGFNSEIIAYNLSTSPNLEQVQTMLEQAFTEKHYENTILHSDQGWQYQHDSYHRFLESKGIQASMSRKGNSQDNGMMESFFGILKSEMFYGYEKTFKSLNQLEQAIIDYIDYYNNKKIKIKLKGLSPVQYRTKSFG

SEQ ID NO: 74065 - protein, 398 aa, Streptococcus pneumoniae
MAKEKYDRSKPHVNIGTIGHVDHGKTTLTAAITTVLARRLPSSVNQPKDYASIDAAPEERERGITINTAHVEYETEKRHYAHIDAPGHADYVKNMITGAAQMDGAILVVASTDGPMPQTREHILLSRQVGVKHLIVFMNKVDLVDDEELLELVEMEIRDLLSEYDFPGDDLPVIQGSALKALEGDSKYEDIVMELMNTVDEYIPEPERDTDKPLLLPVEDVFSITGRGTVASGRIDRGIVKVNDEIEIVGIKEETQKAVVTGVEMFRKQLDEGLAGDNVGVLLRGVQRDEIERGQVIAKPGSINPHTKFKGEVYILTKEEGGRHTPFFNNYRPQFYFRTTDVTGSIELPAGTEMVMPGDNVTIDVELIHPIAVEQGTTFSIREGGRTVGSGMVTEIEA

SEQ ID NO: 74066 - protein, 572 aa, Streptococcus pneumoniae
MSYQENYQKWVDFVELPDYLRQDLENMDEKTKEDAFYTNLEFGTAGMRGLVGAGTNRINIYVVRQATEGLARLIESKGGNEKERGVAIAYDSRHFSPEFAFESAAVLAKHGIKSYVFESLRPTPELSFAVRHLNCFAGIMVTASHNPAPFNGYKVYGEDGGQMPPHDADALTTYIRAIENPFAVEVADVETEKASGLIEVIGEAVDIEYLKEVKDININPALIEEFGKDMKIVYTPLHGTGEMLARRALAQAGFDSVQVVEAQATADPDFSTVTSPNPESQAAFALAEELGRQVGADVLVATDPDADRVGVEVLQKDGSYLNLSGNQIGAIMAKYILEAHKNAGTLPENAALCKSIVSTDLVTKIAESYGATMFNVLTGFKFIAEKIQEFEEKHNHTYMMGFEESFGYLIKPFVRDKDAIQAVLVVAELAAYYRSRGLTLADGIEEIYKEYGYYAEKTISVTLSGVDGAEQIKAIMAKFRNNAPTEWNATAITVVEDFKAQTATVADGTVTNLTTPPSDVLKYTLADGSWIAVRPSGTEPKIKFYIAVVGETNEESQAKIANIEAEINAFVK

SEQ ID NO: 74067 - protein, 278 aa, Streptococcus pneumoniae
MKKWMLVLVSLMTALFLVACGKNSSETSGDNWSKYQSNKSITIGFDSTFVPMGFAQKDGSYAGFDIDLATAVFEKYGITVNWQPIDWDLKEAELTKGTIDLIWNGYSATDERREKVAFSNSYMKNEQVLVTKKSSGITTAKDMTGKTLGAQAGSSGYADFEANPEILKNIVANKEANQYQTFNEALIDLKNDRIDGLLIDRVYANYYLEAEGVLNDYNVFTVGLETEAFAVGARKEDTNLVKKINEAFSSLYKDGKFQEISQKWFGEDVATKEVKEGQ

SEQ ID NO: 74068 - protein, 501 aa, Streptococcus pneumoniae
MAINAQEISALIKQQIENFKPNFDVTETGVVTYIGDGIARAHGLENVMSGELLNFENGSYGMAQNLESTDVGIIILGDFTDIREGDTIRRTGKIMEVPVGESLIGRVVDPLGRPVDGLGEIHTDKTRPVEAPAPGVMQRKSVSEPLQTGLKAIDALVPIGRGQRELIIGDRQTGKTTIAIDTILNQKDQDMICIYVAIGQKESTVRTQVETLRQYGALDYTIVVTASASQPSPLLFLAPYAGVAMAEEFMYQGKHVLIVYDDLSKQAVAYRELSLLLRRPPGREAFPGDVFYLHSRLLERSAKVSDELGGGSITALPFIETQAGDISAYIATNVISITDGQIFLGDGLFNAGIRPAIDAGSSVSRVGGSAQIKAMKKVAGTLRIDLASYRELEAFTKFGSDLDAATQAKLNRGRRTVEVLKQPVHKPLPVEKQVTILYALTHGFLDTVPVDDIVRFEEEFHAFFDAQHPEILETIRDTKDLPEEAVLDAAITEFLNQSSFQ

SEQ ID NO: 74069 - protein, 178 aa, Streptococcus pneumoniae
MDKKTVKVIEKYSMPFVQLVLEKGEEDRIFSDLTQIKQVVEKTGLPSFLKQVAVDESDKEKTIAFFQDSVSPLLQNFIQVLAYNHRANLFYDVLVDCLNRLEKETNRFEVTITSAHPLTDEQKTRLLPLIEKKMSLKVRSVKEQIDESLIGGFVIFANHKTIDVSIKQQLKVVKENLK

SEQ ID NO: 74070 - protein, 164 aa, Streptococcus pneumoniae
MHVTVGELIGNFILITGSFILLLVLIKKFAWSNITGIFEERAEKIASDIDRAEEARQKAEVLAQKREDELAGSRKEAKTIIENAKETAEQSKANILADAKLEAGHLKEKANQEIAQNKVEALQSVKGEVADLTISLAGKIISQNLDSHAHKALIDQYIDQLGEA

SEQ ID NO: 74071 - protein, 238 aa, Streptococcus pneumoniae
MEESINPIISIGPVIFNLTMLAMTLLIVGVIFVFIYWASRNMTLKPKGKQNVLEYVYDFVIGFTEPNIGSRYMKDYSLFFLCLFLFMVIANNLGLMTKLQTIDGTNWWSSPTANLQYDLTLSFLVILLTHIESVRRRGFKKSIKSFMSPVFVIPMNILEEFTNFLSLALRIFGNIFAGEVMTSLLLLLSHQAIYWYPVAFGANLAWTAFSVFISCIQAYVFTLLTSVYLGNKINIEEE

SEQ ID NO: 74072 - protein, 66 aa, Streptococcus pneumoniae
MNLTFLGLCIACMGVSVGEGLLMNGLFKSVARQPDMLSEFRSLMFLGVAFIEGTFFVTLVFSFIIK

SEQ ID NO: 74073 - protein, 444 aa, Streptococcus pneumoniae
MSKTYHFIGIKGSGMSALALMLHQMGHKVQGSDVEKYYFTQRGLEQAGITILPFDEKNLDGDMEIIAGNAFRPDNNVEIAYADQNGISYKRYHEFLGSFMRDFVSMGVAGAHGKTSTTGMLSHVLSHITDTSFLIGDGTGRGSANAKYFVFESDEYERHFMPYHPEYSIITNIDFDHPDYFTSLEDVFNAFNDYAKQITKGLFVYGEDAELRKITSDAPIYYYGFEAEGNDFVASDLLRSTTGSTFTVHFRGQNLGQFHIPTFGRHNIMNATAVIGLLYTAGFDLNLVREHLKTFAGVKRRFTEKIVNDTVIIDDFAHHPTEIIATLDAARQKYPSKEIVAVFQPHTFTRTIALLDDFAHALNQADAVYLAQIYGSAREVDHGDVKVEDLANKINKKHQVITVENVSPLLDHDNAVYVFMGAGDIQTYEYSFERLLSNLTSNVQ

SEQ ID NO: 74074 - protein, 364 aa, Streptococcus pneumoniae
MSKELHINTILAQAGIKSDEATGALVTPLHFSTTYQHPEFGRSTGFDYTRTKNPTRSKAEEVLAAIESADYALATSSGMSAIVLAFSVFPVGSKVLAVRDLYGGSFRWFNQVEQEGRFHFTYANTEEELIAELEKDVDVLYIETPTNPLMLEFDIEKLAKLAHAKGAKVVVDNTFYSPIYQRPIEDGADIVLHSATKYLAGHNDVLAGVVVTNSLELYEKLFYNLNTTGAVLSPFDSYQLLRGLKTLSLRMERSTANAQEVVAFLKDSPAVKEVLYTGRGGMISFKVADETRIPHILNSLKVFSFAESLGGVESLITYPTTQTHADIPAEVRHSYGLTDDLLRLSIGIEDARDLIADLRQALEG

SEQ ID NO: 74075 - protein, 540 aa, Streptococcus pneumoniae
MSHENNHQQAQMLRGTAWLTASNFISRLLGAVYIIPWYIWMGAYAAKANGLFTMGYNIYAWFLLVSTAGIPVAVAKQVAKYNTMREEEHSFALIRSFLGFMTGLGLVFALVLYVFAPWLADLSGVGKDLIPIMQSLAWGVLIFPSMSVIRGFFQGMNNLKPYAMSQIAEQVIRVIWMLLATFIIMKLGSGDYLAAVTQSTFAAFVGMVASFAVLIYFLAQEGSLKRVFETGDKINSKRLLVDTIKEAIPFILTGSAIQLFQILDQLTFINSMSWFTNYSNEDLVVMFSYFSANPNKITMILISVGVSIGSVGLPLLTENYVKGDLKAASRLVQDSLTLLFMFLLPATVGVVMVGEPLYTVFYGKPDSLALGLFVFAVLQSIILGLYMVLSPMLQAMFRNRKAVLYFIYGSIAKLVLQLPTIALFHSYGPLISTTIALIIPNVLMYRDICKVTGVKRKVILKRTILISLLTLVMFLLIGTIQWLLGFFFQPSGRLWSFFYVALVGAMGGGLYMVMSLRTYLLDKVIGKAQADRLRAKFKLS

SEQ ID NO: 74076 - protein, 481 aa, Streptococcus pneumoniae
MIKIETVLDILKKDGLFREIIDQGHYHYNYSKVIFDSISYDSRKVTEDTLFFAKGAAFKKEYLLSAITQGLAWYVAEKDYEVDIPVIIVNDIKKAMSLIAMEFYGNPQEKLKLLAFTGTKGKTTATYFAYNILSQGHRPAMLSTMNTTLDGETFFKSALTTPESIDLFDMMNQAVQNDRTHLIMEVSSQAYLVHRVYGLTFDVGVFLNITPDHIGPIEHPSFEDYFYHKRLLMENSRAVIINSDMDHFSVLKEQVEDQDHDFYGSQFDNQIENSKAFSFSATGKLAGDYDIQLIGNFNQENAVAAGLACLRLGASLEDIKKGIAATRVPGRMEVLTQKNGAKVFIDYAHNGDSLKKLINVVETHQTGKIALVLGSTGNKGESRRKDFGLLLNQHPEIQVFLTADDPNYEDPMAIADEISSYINHPVEKIADRQEAIKAAMAITNHELDAVIIAGKGADCYQIIQGKKESYPGDTAVAENYL

SEQ ID NO: 74077 - protein, 64 aa, Streptococcus pneumoniae
MSLENKLEQATGAVKEGFGKVTGDSKTELEGAVEKTVAKAKDVVEDAKGAVEGAVEGLKNVFTK

SEQ ID NO: 74078 - protein, 311 aa, Streptococcus pneumoniae
MSKILVFGHQNPDSDAIGSSVAFAYLAKEAYGLDTEAVALGTPNEETAFVLNYFGVEAPRVITSAKAEGAEQVILTDHNEFQQSVSDIAEVEVYGVVDHHRVANFETASPLYMRLEPVGSASSIVYRMFKEHGVAVPKEIAGLMLSGLISDTLLLKSPTTHPTDKIIAPELAELAGVNLEEYGLAMLKAGTNLASKSAEELIDIDAKTFELNGNNVRVAQVNTVDIAEVLERQAEIEAAMQAANESNGYSDFVLMITDIVNSNSEILALGANMDKVEAAFNFKLENNHAFLAGAVSRKKQVVPQLTESFNA

SEQ ID NO: 74079 - protein, 79 aa, Streptococcus pneumoniae; identical to SEQ ID NO: 72452

SEQ ID NO: 74080 - protein, 156 aa, Streptococcus pneumoniae
MINNVVLVGRMTRDAELRYTPSNVAVATFTLAVNRTFKSQNGEREADFINVVMWRQQAENLANWAKKGSLIGVTGRIQTRSYDNQQGQRVYVTEVVAENFQMLESRSVREGHTGGAYSAPTANYSAPTNSVPDFSRNENPFGATNPLDISDDDLPF

SEQ ID NO: 74081 - protein, 96 aa, Streptococcus pneumoniae
MAKYEILYIIRPNIEEEAKNALVARFDSILTDNGATVVESKTWEKRRLAYEIQDFREGLYHIVNVEANDDAALKEFDRLSKINADILRHMIVKIDA

SEQ ID NO: 74082 - protein, 447 aa, Streptococcus pneumoniae
MTKRVTIIDVKDYVGQEVTIGAWVANKSGKGKIAFLQLRDGTAFFQGVAFKPNFVEKFGEEVGLEKFDVIKRLSQETSVYVTGIVKEDERSKFGYELDITDIEVIGESQDYPITPKEHGTDFLMDNRHLWLRSRKQVAVLQIRNAIIYVTYEFFDKNGFMKFDSPILSGNAAEDSTELFETDYFGTPAYLSQSGQLYLEAGAMALGRVFDFGPVFRAEKSKTRRHLTEFWMMDAEYSYLTHDESLDLQEAYVKALLQGVLDRAPQALETLERDTELLKRYIAEPFKRITYDQAIDLLQEHENDEDADYEHLEHGDDFGSPHETWISNHFGVPTFVMNYPAAIKAFYMKPVPGNPERVLCADLLAPEGYGEIIGGSMREEDYDALVAKMDELGMDRTEYEFYLDLRKYGTVPHGGFGIGIERMVTFAAGTKHIREAIPFPRMLHRIKP

SEQ ID NO: 74083 - protein, 2551 aa, Streptococcus pneumoniae
MKHSHKKSFDWYSMQQRYSIRKYYFGAASVLLGTALVLGAAASVQTVQAEENKQETTNSISVGRGEAATKPAEVSASNKEKTYAAPTVANPVETTPVKTEEVTKPAEKVEEAKDKKEEVTHQDAVDKSKLLTALSRAKKLESKLYTEASAANLQTSIQAGQSLLGKADATEAELSAAESSIQSFIIGLELRSNSNKETVSETPVAKKADAVESKEGAKPAATTERSAVDSAILPTSTADKVETTSAPASINEILKLGLSLSDARQNPAIRKEDVNRGYSGFRAASNPANPIVSGSGNTVAFADISQGGRSYSFRGYGNSRGGNSIHYDVTTVRSGNSVNFTISYSAPGDSREFVNNNFILDKGDGFGNPSNATITSSNPRVREQSKSISQGANYVSHSGYSMTSAISTNTEQTIRFSLPIINLNGDLSVRLKPVTFNVDQGGGGAATSNDPYSNSNYYYRANPLYLDANPYGGTNNKTVSEDIDFQTVYLPTSKLPEGQTRLVREGEKGQRQITYKVHRFGNETLLGLPISNSVTKEAKPRIMQIGVAKDLIDTVKPRVDQNKVGDTNNLTFYLDNDGNGVYTEGVDELVQKIAIKDGAKGEKGDQGERGLTGAKGEKGDRGERGLTGAQGAKGEKGDRGERGLTGAQGAKGEKGDRGERGLTGAQGAKGEKGDRGERGLTGAQGAKGEKGAQGERGLTGAQGAKGEKGDQGERGLTGAQGAKGEKGDQGERGLTGAQGAKGEKGAQGERGLTGTQGAKGEKGDRGERGLTGAQGAKGEKGDRGERGLTGAQGAKGEKGAQGERGLTGAQGAKGEKGDQGERGLTGAQGEKGDRGERGLTGAKGEKGDQGERGITGAKGEKGAQGERGLTGAQGAKGEKGDQGERGLTGAQGEKGAQGQAGRDGVTPTVTVKDNKNDGTHTITINDGRGNVTSTVVRDGFDGASPLVATQRNDADKTTTVIFYYDKNGNNELDASDKKLKEVVIADGAKGEKGDKGEQGLQGRDGEQGPKGEDGKTPTVKVTDGQDGTHTITINDGKGGITTTVVRDGFDGASPLVSTHRNEADKTTTVIFYYDLNDNNQFDEGDTKLKEVVIADGKQGPKGDKGDNGKDGFTPEVTVTDNNNGTHTITITQPDNRPSLTTIVKNGEDGKTPKVKAERDDAKKQTTLTFYIDKDGDGSYTAGKDELVQTTVVKDGQDGAAGASGRDGKEVLNGKVDPTTEGKDGDTFVNTQTGDVFVKKGNTWEPAGNIKGPKGDKGADGAKGEKGAQGERGLTGAQGVKGEKGDQGERGLTGSKGEKGDQGERGLTGAQGAKGDKGEQGLQGRDGAQGPKGADGQRGPAGPQGPKGEQGNPGTPGKDGKSLIAVKNGVLVTITPVEGRPQTTFVEDGQKGADGKTPTVTITEGQNGTHTLTVHNPGSPDVTTTIRDGATGQAGRDGKDVLNGKVNPQPNQGKNGDKYINIETGDVYVKNNGNWDKEGNIKGPKGDKGADGAKGEKGDQGERGLTGAQGAKGADGAVGRDGRDGKDVLNGKANPEAHQGKDGDKYVNTETGDVFVKNNGNWDKEGNIKGPKGDKGADGAKGEKGDRGERGLTGAQGAKGADGAAGRDGRDGRDGKDVLNGKVNPEANQGKDGDKYVNTETGDVFVKNNGNWDKEGNIKGSKGDKGERGEDGKTPEVTVTPGKDGHSTDITFTVPGKDPVTVNVKDGENGLNGKTPKVDLLRVQGKNGNPSHTIVTFYTDENNDGKYTPGTDELLGSEMIKDGAKGADGRDGKSLLTVKDGKETKVYQEDPANPGQPLNPEKPLAVIRDGVDGKSPTVTAVRKDEAGHKGVEITVDNHDGSQPTTVFVQDGAKGKTGATGQDGQTPTITTQRGQDGQSTVVTITTSGKDPVTFTVKDGKNGKDGRAPKIKVEDITSPSRIRRDTDAAATPTRNGIRVTVYDDVNDNGVYDEGVDKVLNSKDIYNGIDGRDGSAPTITTKDNGDGTHTITVQNPDGSESTTVVKDGKDGKTANITTTENPDGSHTITVTNPDGSTKETVVKNGKDGKTPKVEVTDNNDGTHTVKVTDGDGNVTNAIIKDGKDGKAATATTTENPDGSHTVTITNPDGTKNEFVVKNGRDGVDGRTPTASVRDNGDGSHTIVITNPEGVTTETTVRDGKSPKVTITDEQNGTHKISVLNGDGTTTETIIKDGKSPVATVRDNQDGTYTIRVENGNGTVSETTVRDGKSPTAKVVDNGDGTHTITVVNSDGITTTTTVRDGREPKLEVIDNNDGSHTIKVTGADGKGTTTTIFDGKSPKANIVDNGDGTHTLTIVDSDGREYKSIIKDGKDGKDSVSPTVTVKNNNDGTHVVTITNPDGSKTEMVIKDGKDGKSPKVSVEDNGDGSHTITIINSDGTVTKTVIKDGKDGRDGRDGRDGKDGKDGKCGCQDKPVTPSNDKPVPPTPNVPTPEVPVKPVPAQPTPNVPTPEVPVQPTPAVSTPEVPVKPVPAVPEQPVVPTPAQPATPVNANPVAPTTGKENRGDKLPETGSQSDYISVLLGSGILLSLYVGRRKED

SEQ ID NO: 74084 - protein, 898 aa, Streptococcus pneumoniae
MSKEQKRQAFYTQSPEEVLQAVDATEQGLSSSEAEKRLAEFGHNELEEGEKRSILVKFIEQFKDLMIIILVAAAILSVVTSGGEDIADAIIILAVVIINAAFGVYQEGKAEEAIEALKSMSSPVARVLRDGHMAEIDSKELVPGDIVALEAGDVVPADLRLIEANSLKIEEAALTGESVPVEKDLSVDLATDAGIGDRVNMAFQNSNVTYGRGMGVVVNTGMYTEVGHIAGMLQDADETDTPLKQNLNNLSKVLTYAILVIALVTFVVGVFIQGKNPLGELLTSVALAVAAIPEGLPAIVTIVLSLGTQVLAKRHSIVRKLPAVETLGSTEIIASDKTGTLTMNKMTVEKVFYDAVLHDSADDIELGLEMPLLRSVVLANDTKIDVEGNLIGDPTETAFIQYALDKGYDVKGFLEKYPRVAELPFDSDRKLMSTVHPLPDSRFLVAVKGAPDQLLKRCLLRDKAGDIAPIDEKVTNLIHTNNSEMAHQALRVLAGAYKIIDSIPENLTSEELENDLIFTGLIGMIDPERPEAAEAVRVAKEAGIRPIMITGDHQDTAEAIAKRLGIIDANDTEGHVLTGAELNELSDEEFEKVVGQYSVYARVSPEHKVRIVKAWQKQGKVVAMTGDGVNDAPALKTADIGIGMGITGTEVSKGASDMILADDNFATIIVAVEEGRKVFSNIQKTIQYLLSANTAEVLTIFLSTLFGWDVLQPVHLLWINLVTDTFPAIALGVEPAEPGVMNHKPRGRKASFFSGGVLSSIIYQGVLQAALVMSVYGLAIAYPVHVGDNHAIHADALTMAFATLGLIQLFHAYNVKSVYQSILTVGPFKSKTFNWSILVSFILLMATIVVEPLEGIFHVTKLDLSQWGIVMAGSFSMIIIVEIVKFIQRKLGFDKNAI

SEQ ID NO: 74085 - protein, 623 aa, Streptococcus pneumoniae
MSDFIVEKLSKSVGDKTVFRDISFIIHDLDRIGLIGVNGTGKTTLLDVLSGVSGFDGDVSPFSAKNDYQIGYLTQDPDFDDRKTVLDTVLSSELKEIQLIREYELIMLDYSEDKQARLERVMAEMDSLQAWEIESQVKTVLSKLGIQDLSTPIGELSGGLRRRVQLAQVLLGNHDLLLLDEPTNHLDIAIIEWLTLFLKNSKKTVLFITHDRYFLDALSTRIFELDRAGLTEYQGNYQDYVRLKAEQDERDAALLHKKEQLYKQELAWMRRQPQARATKQQARINRFHDLKKKVSGSSAETDLTMNFETSRIGKKVIEFQAVSFAYENKPILQDFNLLVQAKDRIGIVGDNGVGKSTLLNLIAGSLEPTKGQVVIGETVRIAYFSQQIEGLDESKRVINYLQEVAEEVKTSGGSTTSIAELLEQFLFPRSTHGTLIEKLSGGEKKRLYLLKLLLEKPNVLLLDEPTNDLDIATLTVLENFLQGFAGPVLTVSHDRYFLDKVATKILAFEDGKIRPFFGHYTDYLDEKAFETDMANQVQKVEKEKVVKVREDKKRMTYQEKQEWASIEGDIETLEKRIAAIEEEMQANGSDFGKLATLQKELDEKNEALLEKYERYEYLSEFDS

SEQ ID NO: 74086 - protein, 399 aa, Streptococcus pneumoniae
MRLTQMPSEFQKALPVLEKIKEAGFEAYFVGGSVRDALLHSPIHDVDIATSSYPEETKQIFPRTADIGIEHGTVLVLDGDEEYEVTTFRTEDVYVDYRRPSAVSFVRSLEEDLKRRDFTVNAFALDETGEIVDLFHGLEDLEKQVLRAVGVASERFNEDALRIMRGFRFQASLGFALEPETFKAMKTLTPLLEKISVERTFVEFDKLLLAPFWRRGLASMIESQAYDYLPDMASSQDKLNRLFDLETDFTFESSEQAWAALLWALEIENAQSFLKSWKTSRQFAKQVQDLLIILALRENGELSKRDCYRFDIDLLLQAENLRQAQGKEVNPQAITEKYQSLTIHDKKEIQINGGILIKEYGYQPGPDLGEILTEIEFAIVDGELENNREAIHAYLREKK

SEQ ID NO: 74087 - protein, 255 aa, Streptococcus pneumoniae
MSIRVIIAGFKGKMGQAACQMVLTDPDLDLVAVLDPFESESEWQGIPVFKDKADLAGFEADVWVDFTTPAVAYENTRFALENGFAPVVGTTGFTSEEIAELKEFSRAQDLGGLIAPNFALGAVLLMQFATQAAKYFPNVEIIELHHDKKKDAPSGTAIKTAELMAEVRESIQQGAADEEELIAGARGADFDGMRIHSVRLPGLVAHQEVIFGNQGEGLTLRHDSYDRISFMTGVNLGIKEVVKRHELVYGLEHLL

SEQ ID NO: 74088 - protein, 450 aa, Streptococcus pneumoniae
MGKYFGTDGVRGEANLELTPELAFKLGRFGGYVLSQHETEAPKVFVGRDTRISGEMLESALVAGLLSVGIHVYKLGVLATPAVAYLVETEGASAGVMISASHNPALDNGIKFFGGDGFKLDDEKEAEIEALLDAEEDTLPRPSAEGLGILVDYPEGLRKYEGYLVSTGTPLDGMKVALDTANGAASTSARQIFADLGAQLTVIGETPDGLNINLNVGSTHPEALQEVVKESGSAIGLAFDGDSDRLIAVDENGDIVDGDKIMYIIGKYLSKKGQLAQNTIVTTVMSNLGFHKALNREGINKAVTAVGDRYVVEEMRKSGYNLGGEQSGHVILMDYNTTGDGQLSAVQLTKIMKETGKSLSELAAEVTIYPQKLVNIRVENVMKEKAMEVPAIKAIIEKMEEEMAGNGRILVRPSGTEPLLRVMAEAPTTEEVDYYVDTITDVVRAEIGID

SEQ ID NO: 74089 - protein, 259 aa, Streptococcus pneumoniae
MKKNSLYIISSLFFACVLFVYATATNFQNSTSARQVKTETYTNTVTNVPIDIRYNSDKYFISGFASEVSVVLTGANRLSLASEMQESTRKFKVTADLTDAGVGTIEVPLSIEDLPNGLTAVATPQKITVKIGKKAQKDKVKIVPEIDPSQIDSRVQIENVMVSDKEVSITSDQETLDRIDKIIAVLPTSERITGNYSGSVPLQAIDRNGVVLPAVITPFDTIMKVTTKPVAPSSSTSNSSTSSSSETSSSTKATSSKTN

SEQ ID NO: 74090 - protein, 322 aa, Streptococcus pneumoniae
MSQLYDITIVGGGPVGLFAAFYAHLRQAKVQIIDSLPQLGGQPAILYPEKEILDVPGFPNLTGEELTNRLIEQLNGFDTPIHLNETVLEIDKQEEEFAITTSKGSHLTKTVIIAMGGGAFKPRPLELEGVEDYENIHYHVSNIQQYAGKKVTILGGGDSAVDWALAFEKIAPTTLVHRRDNFRALEHSVQALQESSVTIKTPFAPSQLLGDGKTLDKLEITKVKSDETETIDLDHLFVNYGFKSSVGNLKNWGLDLNRHKIIVNSKQESSQAGIYAIGDCCYYDGKIDLIATGLGEAPTAVNNAINYIDPEQKVQPKHSTSL

SEQ ID NO: 74091 - protein, 303 aa, Streptococcus pneumoniae
MSFTVAVKEEILGQHHLSWHELSAIIKMSGSIGLSTSGLTLSVVTENAKLARHLYESFLHFYEIKSEIRHHQRSNLRKNRVYTVFTDEKVQDLLSDLHLADSFFGLETGIDEAILSDEEAGRAYLCGAFLANGSIRDPESGKYQLEISSVYLDHAQGIASLLQQFLLDAKVLERKKGAVTYLQRAEDIMDFLIVIGAMQARDDFERVKILRETRNDLNRANNAETANIARTVSASMKTINNISKIKDIMGLENLPVDLQEVAQLRIQHPDYSIQQLADSLSTPLTKSGVNHRLRKINKIADEL

SEQ ID NO: 74092 - protein, 325 aa, Streptococcus pneumoniae
MRKPKITVIGGGTGIPVILKSLREKDVEIAAIVTVADDGGSSGELRKNMQQLTPPGDLRNVLVAMSDMPKFYEKVFQYRFSEDAGAFAGHPLGNLIIAGLSEMQGSTYNAMQLLSKFFHTTGKIYPSSDHPLTLHAVFQDGTEVAGESHIVDHRGIIDNVYVTNALNDDTPLASRRVVQTILESDMIVLGPGSLFTSILPNIVIKEIGRALLETKAEIAYVCNIMTQRGETEHFTDSNHVEVLHRHLGRPFIDTVLVNIEKVPQEYMNSNRFDEYLVQVEHDFVGLCKQVSRVISSNFLRLENGGAFHDGDLIVDELMRIIQVKK

SEQ ID NO: 74093 - protein, 296 aa, Streptococcus pneumoniae
MTKKQLHLVIVTGMGGAGKTVAIQSFEDLGYFTIDNMPPALLPKFLQLVEIKEDNPKLALVVDMRSRSFFSEIQAVLDELENQDGLDFKILFLDAADKELVARYKETRRSHPLAADGRILDGIKLERELLAPLKNMSQNVVDTTELTPRELRKTLAEQFSDQEQAQSFRIEVMSFGFKYGIPIDADLVFDVRFLPNPYYLPELRNQTGVDEPVYDYVMNHPESEDFYQHLLALIEPILPSYQKEGKSVLTIAMGCTGGQHRSVAFAKRLVQDLSKNWSVNEGHRDKDRRKETVNRS

SEQ ID NO: 74094 - protein, 410 aa, Streptococcus pneumoniae
MSTNRKNDMMVYCSFCGKNQEEVQKIIAGNNAFICNECVELAQEIIREELVEEVLADLSEVPKPIELLHILNHYVIGQDRAKRALAVAVYNHYKRINFHDTREESEDVDLQKSNILMIGPTGSGKTFLAQTLAKSLNVPFAIADATALTEAGYVGEDVENILLKLLQVADFNIERAERGIIYVDEIDKIAKKSENVSITRDVSGEGVQQALLKIIEGTVASVPPQGGRKHPQQEMIQVDTKNILFIVGGAFDGIEEIVKQRLGEKVIGFGQNNKAIDENSSYMQEIIAEDIQKFGIIPELIGRLPVFAALEQLTVDDLVRILKEPRNALVKQYQTLLSYDDVELEFDDEALQEIANKAIERKTGARGLRSIIEETMLDVMFEVPSQENVKLVRITKETVDGTDKPILETA

SEQ ID NO: 74095 - protein, 168 aa, Streptococcus pneumoniae
MTKKIVAIWAQDEEGLIGKENRLPWHLPAELQHFKETTLNHAILMGRVTFDGMGRRLLPKRETLILTRNPEEKIDGVATFQDVQSVLDWYQDQEKNLYIIGGKQIFQAFEPYLDEVIVTHIHARVEGDTYFPEELDLSLFETVSSKFYAKDEKNPYDFTIQYRKRKEV

SEQ ID NO: 74096 - protein, 178 aa, Streptococcus pneumoniae
MNEVKKMVELKKEAVKDVTSLTKAAPVALAKTKEVLNQAVADLYVAHVALHQVHWYMHGRGFLVWHPKMDEYMEALDGQLDEISERLITLGGSPFSTLTEFLQNSEIEEEAGEYRNVEESLERVLVIYRYLSELFQKGLDVTDEEGDDVTNGIFVGAKTETDKTIWMLAAELGQAPGL

SEQ ID NO: 74097 - protein, 524 aa, Streptococcus pneumoniae
MKFNELNLSADLLAEIEKAGFVEASPIQEQTIPLALEGKDVIGQAQTGTGKTAAFGLPTLEKIRTEEATIQALVIAPTRELAVQSQEELFRFGRSKGVKVRSVYGGSSIEKQIKALKSGAHIVVGTPGRLLDLIKRKALKLQDIETLILDEADEMLNMGFLEDIEAIISRVPENRQTLLFSATMPDAIKRIGVQFMKAPEHVKIAAKELTTELVDQYYIRVKEQEKFDTMTRLMDVAQPELAIVFGRTKRRVDELTRGLKIRGFRAEGIHGDLDQNKRLRVLRDFKNGNLDVLVATDVAARGLDISGVTHVYNYDIPQDPESYVHRIGRTGRAGKSGQSITFVAPNEMGYLQIIENLTKKRMKGLKPASVEESFQSKKQVALKKIERDFADETIRANFEKFGKDARKLAAEFTPEELAMYILSLTVQDPDSLPEVEIAREKPLPFKPSGNGFGGKAKGGRGGRRGDDRRERDRRGNGRRDEFKKGSRGNDRFDKEKRYRKDNKKPRNTLSEKQTGFVIRNKGDK

SEQ ID NO: 74098 - protein, 447 aa, Streptococcus pneumoniae
MNLKTTLGLLAGRSSHFVLSRLGRGSTLPGKVALQFDKDILQSLAKNYEIVVVTGTNGKTLTTALTVGILKEVYGQVLTNPSGANMITGIATTFLTAKSSKTGKNIAVLEIDEASLSRICDYIQPSLFVITNIFRDQMDRFGEIYTTYNMILDAIRKVPTATVLLNGDSPLFYKPTIPNPIEYFGFDLEKGPAQLAHYNTEGILCPDCQGILKYEHNTYANLGAYICEGCGCKRPDLDYRLTKLVELTNNRSRFVIDGQEYGIQIGGLYNIYNALAAVAIARFLGADSQLIKQGFDKSRAVFGRQETFHIGDKECTLVLIKNPVGATQAIEMIKLAPYPFSLSVLLNANYADGIDTSWIWDADFEQITDMDIPEINAGGVRHSEIARRLRVTGYPAEKITETSNLEQVLKTIENQDCKHAYILATYTAMLEFRELLASRQIVRKEMN

SEQ ID NO: 74099 - protein, 260 aa, Streptococcus pneumoniae
MVYTSLSSKDGNYPYQLNIAHLYGNLMNTYGDNGNILMLKYVAEKLGAHVTVDIVSLHDDFDENHYDIAFFGGGQDFEQSIIADDLPAKKESIDNYIQNDGVVLAICGGFQLLGQYYVEASGKRIEGLGVMGHYTLNQTNNRFIGDIKIHNEDFDETYYGFENHQGRTFLSDDQKPLGQVVYGNGNNEEKVGEGVHYKNVFGSYFHGPILSRNANLAYRLVTTALKKKYGQDIQLPAYEDILSQEIAEEYSDVKSKADFS

SEQ ID NO: 74100 - protein, 162 aa, Streptococcus pneumoniae
MEQCYTDVTEFAIPASTQKLYLSPVLDGFNSEIIAYNLSTSPNLEQVQTMLEQAFTEKHYENTILHSDQGWQYQHDSYHQFLEGKGIQASMSRKGNSQDNGMMESFFGILKSEMFYGYEKTFKSLNQLEQAIVDYIDYYNNKRIKVKLKGLSPVQYRTKSFG

SEQ ID NO: 74101 - protein, 249 aa, Streptococcus pneumoniae
MTRYKATISYDGYAFAGFQRQSHARSVQEEIEKTLTRLNKGQTITVHGAGRTDSGVHALGQVIHFDLPYQMDEEKLRFALDTQSPEDIDVISIELVADDFHCRYAKHSKTYEFIVDRGRPKNPMRRHYATHFPYPLDVERMQIAIKKLEGTHDFTGFTASGTSVEDKVRTITEASLIVDETGQFLTFTFSGNGFLYKQIRNMVGTLLKIGNNRMPVEQIDLILEKKDRQLAGPTAAPNGLYLKEIRYEE

SEQ ID NO: 74102 - protein, 383 aa, Streptococcus pneumoniae
MKQFLERASILALSLVLITSFSISSALPAMFDYYQGYSKEQIELLVSLPSFGIMMMLLLNGFLEKIFPERLQISLGLLILSLSGTAPFWYQAYPFVFGTRLLFGLGLGMINAKAISIISERYQGKRRIQMLGLRASAEVVGASLITLAVGQLLAFGWTAIFLAYSAGFLVLPLYLLFVPYGKSKKEVKKRAKEASRLTREMKGLIFTLAIEAAVVVCTNTAITIRIPSLMVERGLGDAQLSSFVLSIMQLIGIVAGVSFSFLISIFKEKLLLWSGITFGLGQIVIALSSSLWVVVAGSVLAGFAYSVVLTTVFQLVSERIPAKLLNQATSFAVLGCSFGAFTTPFVLGAIGLLTHNGMLVFSILGGWLIVISIFVMYLLQKRA

SEQ ID NO: 74103 - protein, 223 aa, Streptococcus pneumoniae
MKTIQIAIDGPASSGKSTVAKIIAKDFGFTYLDTGAMYRAATYMALKNQLGVEEVEALLALLDQHPISFGRSETGDQLVFVGDVDITHPIRENEVTNHVSAIAAIPEVREKLVSLQQEIAQQGGIVMDGRDIGTVVLPQAELKIFLVASVDERAERRYKENIAKGIETDLETLKKEIAARDYKDSHRETSPLKQAEDAVYLDTTGLNIQEVVEKIKAEAEKRM

SEQ ID NO: 74104 - protein, 92 aa, Streptococcus pneumoniae
MPRFFCHTLLLVFFYFSYYNINMNMKITLIPERCIACGLCQTYSDLFDYHDNGIVRFYDDPDQLEKEISPSQDVLEAVKNCPTRALIGNQEA

SEQ ID NO: 74105 - protein, 264 aa, Streptococcus pneumoniae
MIRYNNNKKTIEGDRMFYTYLRGLVVLLLWSINGNAHYHNTDKIPNQDENYILVAPHRTWWDPVYMAFATKPKQFIFMAKKELFTNRIFGWWIRMCGAFPIDRENPSASAIKYPINVLKKSDRSLIMFPSGSRHSNDVKGGAALIAKMAKVRIMPVTYTGPMTLKGLISRERVDMNFGNPIDISDIKKMNDEGIETVANRIQTEFQRLDEETKQWHNDKKPNPLWWFIRIPALILAIILAILTIIFSFIASFIWNPDKKREELA

SEQ ID NO: 74106 - protein, 89 aa, Streptococcus pneumoniae
MAISKEKKNEIIAQYARHEGDTGSVEVQVAVLTWEINHLNEHIKQHKKDHATYRGLMKKIGRRRNLLAYLRKNDVNRYRELINSLGLRR

SEQ ID NO: 74107 - protein, 660 aa, Streptococcus pneumoniae
MLRNYEIIKKENIMINITFPDGAVREFESGVTTFEIAQSISNSLAKKALAGKFNGKLIDTTRAITEDGSIEIVTPDHEDALPILRHSATHLFAQAARRLFPDIHLGVGPAIEDGFYYDTDHTAGQISNEDLPRIEEEMQKIVKENFPSIREEVTKDEAREIFKNDPYKLELIEEHSEDEGGLTIYRQGEYVDLCRGPHVPSTGRIQIFHLLHVAGAYWRGNSDNAMMQRIYGTAWFDKKDLKNYLQMREEAKERDHRKLGKELDLFMISQEVGQGLPFWLPNGATIRRELERYIVNKELVSGYQHVYTPPLASVELYKTSGHWDHYQEDMFPTMDMGDGEEFVLRPMNCPHHIQVFKHHVHSYRELPIRIAEIGMMHRYEKSGALTGLQRVREMSLNDGHLFVTPEQIQEEFQRALQLIIDVYEDFNLTDYRFRLSLRDPQDTHKYFDNDEMWENAQTMLRAALDEMGVDYFEAEGEAAFYGPKLDIQIKTALGKEETLSTIQLDFLLPERFDLKYIGADGEDHRPVMIHRGVISTMERFTAILIENYKGAFPTWLAPHQVTLIPVSNEKHVDYAWEVAKKLRDRGVRADVDERNEKMQFKIRASQTSKIPYQLIVGDKEMEDETVNVRRYGQKETQTVSVDNFVQAILADIANKSRVEK

SEQ ID NO: 74108 - protein, 740 aa, Streptococcus pneumoniae
MPKEVNLTGEEVVALTKEYLTEEDVHFVHKALVYAVECHSGQYRKSGEPYIIHPIQVAGILAKLKLDAVTVACGFLHDVVEDTDATLDDLEREFGPDVRMIVDGVTKLGKVEYKSIEEQLAENHRKMLMAMSEDIRVILVKLSDRLHNMRTLKHLRKDKQERISKETMEIYAPLAHRLGISSVKWELEDLSFRYLNPTEFYKITHMMKEKRREREALVDEVVTKLEEYTTERHLKGKIYGRPKHIYSIFRKMQDKRKRFEEIYDLIAIRCILDTQSDVYAMLGYVHEFWKPMPGRFKDYIANRKANGYQSIHTTVYGPKGPIEFQIRTKEMHEVAEYGVAAHWAYKKGIKGQVNSKESAIGMNWIKEMMELQDQADDAKEFVDSVKENYLAEEIYVFTPDGAVRSLPKDSGPIDFAYEIHTKVGEKATGAKVNGRMVPLTTKLKTGDQVEIIANPNSFGPSRDWLNMVKTSKARNKIRQFFKNQDKELSVNKGREMLMAQFQENGYVANKFMDKRHMDQVLQKTSYKTEDSLFAAIGFGEIGAITVFNRLTEKERREEERAKAKAEAEELVKGGEVKVENKETLKVKHEGGVVIEGASGLLVRIAKCCNPVPGDDIVGYITKGRGVAIHRVDCMNLRAQENYEQRLLDVEWEDQYSSSNKEYMAHIDIYGLNRTGLLNDVLQVLSNTTKNISTVNAQPTKDMKFANIHVSFGIANLSTLTTVVDKIKSVPEVYSVKRTNG

SEQ ID NO: 74109 - protein, 930 aa, Streptococcus pneumoniae
MKLKDTLNLGKTEFPMRAGLPTKEPVWQKEWEYAKLYQRRQELNQGKPHFTLHDGPPYANGNIHVGHAMNKISKDIIVRSKSMSGFYAPFIPGWDTHGLPIEQVLSKQGVKRKEMDLVEYLKLCREYALSQVDKQREDFKRLGVSGDWENPYVTLTPDYEAAQIRVFGEMANKGYIYRGAKPVYWSWSSESALAEAEIEYHDLVSTSLYYANKVKDGKGVLDTDTYIVVWTTTPFTITASRGLTVGADIDYVLVQPAGEARKFVVAAELLTSLSEKFGWADVQVLETYRGQELNHIVTEHPWDTAVEELVILGDHVTTDSGTGIVHTAPGFGEDDYNVGIANNLEVAVTVDERGIMMKNAGPEFEGQFYEKVVPTVIEKLGNLLLAQEEISHSYPFDWRTKKPIIWRAVPQWFASVSKFRQEILDEIEKVKFHSEWGKVRLYNMIRDRGDWVISRQRAWGVPLPIFYAEDGTAIMVAETIEHVAQLFEEHGSSIWWERDAKDLLPEGFTHPGSPNGEFKKETDIMDVWFDSGSSWNGVVVNRPELTYPADLYLEGSDQYRGWFNSSLITSVANHGVAPYKQILSQGFALDGKGEKMSKSLGNTIAPSDVEKQFGAEILRLWVTSVDSSNDVRISMDILSQVSETYRKIRNTLRFLIANTSDFNPAQDTVAYDELRSVDKYMTIRFNQLVKTIRDAYADFEFLTIYKALVNFINVDLSAFYLDFAKDVVYIEGAKSLERRQMQTVFYDILVKITKLLTPILPHTAEEIWSYLEFETEDFVQLSELPEVQTFANQEEILDTWAAFMDFRGQAQKALEEARNAKVIGKSLEAHLTVYPNEVVKTLLEAVNSNVAQLLIVSELTIAEGPAPEAALSFEDVAFTVERATGEVCDRCRRIDPTTAERSYQAVICDHCASIVEENFAEAVAEGFEEK

SEQ ID NO: 74110 - protein, 266 aa, Streptococcus pneumoniae
MRNRMPITSLEIKDKTFGTRFRGFDPEEVDEFLDIVVRDYEDLVRANHDKNLRIKSLEERLSYFDEIKDSLSQSVLIAQDTAERVKQAAHERSNNIIHQAEQDAQRLLEEAKYKANEILRQATDNAKKVAVETEELKNKSRVFHQRLKSTIESQLAIVESSDWEDILRPTATYLQTSDEAFKEVVSEVLGEPIPAPIEEEPIDMTRQFSQAEMEELQARIEVADKELSEFEAQIKQEVETPTPVVSPQVEEEPLLIQLAQCMKNQK

SEQ ID NO: 74111 - protein, 179 aa, Streptococcus pneumoniae
MSLKDRFDRFIDYFTEDEDSSLPYEKRDEPVFTPVNSSQEPALPMNQPSQSAGTKENNITRLHARQQELANQSQRATDKVIIDVRYPRKYEDATEIVDLLAGNESILIDFQYMTEVQARRCLDYLDGACHVLAGNLKKVASTMYLLTPVNVIVNVEDIRLPDEDQQGEFGFDMKRNRVR

SEQ ID NO: 74112 - protein, 223 aa, Streptococcus pneumoniae
MNVKENTELVFREVAEASLSAHRESGSVSVIAVIKYVDVPTAEALLPLGVHHIGENRVDKFLEKYEALKDRDVTWHLIGTLQRRKVKDVIQYVDYFHALDSVKLAGEIQKRSDRVIKCFLQVNISKEESKHGFSREELLEILPELARLDKIEYVGLMTMAPFEASSEQLKEIFKAAQDLQREIQEKQIPNMPMTELSMGMSRDYKEAIQFGSTFVRIGTSFFK

SEQ ID NO: 74113 - protein, 419 aa, Streptococcus pneumoniae
MTFSFDTAAAQGAVIKVIGVGGGGGNAINRMVDEGVTGVEFIAANTDVQALSSTKAETVIQLGPKLTRGLGAGGQPEVGRKAAEESEETLTEAISGADMVFITAGMGGGSGTGAAPVIARIAKDLGALTVGVVTRPFGFEGSKRGQFAVEGINQLREHVDTLLIISNNNLLEIVDKKTPLLEALSEADNVLRQGVQGITDLITNPGLINLDFADVKTVMANKGNALMGIGIGSGEERVVEAARKAIYSPLLETTIDGAEDVIVNVTGGLDLTLIEAEEASQIVNQAAGQGVNIWLGTSIDESMRDEIRVTVVATGVRQDRVEKVVAPQARSATNYRETVKPAHSHGFDRHFDMAETVELPKQNPRRLEPTQASAFGDWDLRRESIVRTTDSVVSPVERFEAPISQDEDELDTPPFFKNR

SEQ ID NO: 74114 - protein, 457 aa, Streptococcus pneumoniae
MAREGFFTGLDIGTSSVKVLVAEQRNGELNVIGVSNAKSKGVKDGIIVDIDAAATAIKSAISQAEEKAGISIKSVNVGLPGNLLQVEPTQGMIPVTSDTKEITDQDVENVVKSALTKSMTPDREVITFIPEEFIVDGFQGIRDPRGMMGVRLEMRGLLYTGPRTILHNLRKTVERAGVQVENVIISPLAMVQSVLNEGEREFGATVIDMGAGQTTVATIRNQELQFTHILQEGGDYVTKDISKVLKTSRKLAEGLKLNYGEAYPPLASKETFQVEVIGEVEAVEVTEAYLSEIISARIKHILEQIKQELDRRRLLDLPGGIVLIGGNAILPGMVELAQEVFGVRVKLYVPNQVGIRNPAFAHVISLSEFAGQLTEVNLLAQGAIKGENDLSHQPISFGGMLQKTAQFVQSTPVQPAPAPEVEPVAPTEPMADFQQASQNKPKLADRFRGLIGSMFDE

SEQ ID NO: 74115 - protein, 457 aa, Streptococcus pneumoniae
MKLTIHEIAQVVGAKNDISIFEDTQLEKAEFDSRLIGTGDLFVPLKGARDGHDFIETAFENGAAVTLSEKEVSNHPYILVDDVLTAFQSLASYYLEKTTVDVFAVTGSNGKTTTKDMLAHLLSTRYKTYKTQGNYNNEIGLPYTVLHMPEGTEKLVLEMGQDHLGDIHLLSELARPKTAIVTLVGEAHLAFFKDRSEIAKGKMQIADGMASGSLLLAPADPIVEDYLPIDKKVVRFGQGAELEITDLVERKDSLTFKANFLEQALDLPVTGKYNATNAMIASYVALQEGVSEEQIRLAFQHLELTRNRTEWKKAANGADILSDVYNANPTAMKLILETFSAIPANEGGKKIAVLADMKELGDQSVQLHNQMILSLSPDVLDIVIFYGEDIAQLAQLASQMFPIGHVYYFKKTEDQDQFEDLVKQVKESLGAHDQILLKGSNSMNLAKLVESLENEDK

SEQ ID NO: 74116 - protein, 347 aa, Streptococcus pneumoniae
MKQTIILLYGGRSAEREVSVLSAESVMRAVDYDRFTVKTFFISQSGDFIKTQEFSHAPGQEDRLMTNETIDWDKKVAPSAIYEEGAVVFPVLHGPMGEDGSVQGFLEVLKMPYVGCNILSSSLAMDKITTKRVLESAGIAQVPYVAIVEGDDVTAKIAEVEEKLAYPVFTKPSNMGSSVGISKSENQEELRQALKLAFRYDSRVLVEQGVNAREIEVGLLGNYDVKSTLPGEVVKDVAFYDYDAKYIDNKVTMDIPAKISDDVVAVMRQNAETAFRAIGGLGLSRCDFFYTDKGEIFLNELNTMPGFTQWSMYPLLWENMGISYPELIERLVDLAKESFDKREAHLI

SEQ ID NO: 74117 - protein, 198 aa, Streptococcus pneumoniae
MLYPTPIAKLIDSYSKLPGIGIKTATRLAFYTIGMSADDVNEFAKNLLSAKRELTYCSICGRLTDDDPCSICTDPTRDQTTILVLEDSRDVAAMENIQEYHGLYHVLHGLISPMNGISPDDINLKSLMTRLMDSEVSEVIVATNATADGEATSMYLSRLLKPAGIKVTRLARGLAVGADIEYADEVTLLRAIENRTEL

SEQ ID NO: 74118 - protein, 685 aa, Streptococcus pneumoniae
MRLICMRKFNSHSIPIRLNLLFSIVILLFMTIIGRLLYMQVLNKDFYEKKLASASQTKITSSSARGEIYDASGKPLVENTLKQVVSFTRSNKMTATDLKETAKKLLTYVSISSPNLTERQLADYYLADPEIYKKIVEALPSEKRLDSDGNRLSESELYNNAVDSVQTSQLNYTEDEKKEIYLFSQLNAVGNFATGTIATDPLNDSQVAVIASISKEMPGISISTSWDRKVLETSLSSIVGSVSSEKAGLPAEEAEAYLKKGYSLNDRVGTSYLEKQYEETLQGKRSVKEIHLDKYGNMESVDTIEEGSKGNNIKLTIDLAFQDSVDALLKSYFNSELENGGAKYSEGVYAVALNPKTGAVLSMSGIKHDLKTGELTPDSLGTVTNVFVPGSVVKAATISSGWENGVLSGNQTLTDQSIVFQGSAPINSWYTQAYGSFPITAVQALEYSSNTYMVQTALGLMGQTYQPNMFVGTSNLESAMEKLRSTFGEYGLGTATGIDLPDESTGFVPKEYSFANYITNAFGQFDNYTPMQLAQYVATIANNGVRVAPRIVEGIYGNNDKGGLGDLIQQLQPTEMNKVNISDSDMSILHQGFYQVAHGTSGLTTGRAFSNGALVSISGKTGTAESYVADGQQATNTNAVAYAPSDNPQIAVAVVFPHNTNLTNGVGPSIARDIINLYQKYHPMN

SEQ ID NO: 74119 - protein, 283 aa, Streptococcus pneumoniae
MDKPDIATIIDSHFEEMTDPEQEIARYFLQAETITDDLSSQQVTQKLHISQAALTRFAKKCGFTGYREFIFQYQHQAENQANQVSKHSPLTKRVLRSYSNMREQTQDLIDEIQLERIAQLIEDAERIYFFGTGSSGLVAREMKLRFMRLGVVCEALTDQDGFAWTTSIMDENCLVLGFSLSGSTPSILDSLLDAKEMGAKTVLFTSVPNKNSQTYTETVLVATHSQPSYIQRISAQLPMLFFIDLIYAYFLEINRESKEKIFNSYWENKKLNGYRRQKRVRKS

SEQ ID NO: 74120 - protein, 294 aa, Streptococcus pneumoniae
MTYYVAIDIGGTNIKYGLVDQEGQLLESHEMPTEAHKGGPHILQKTKDIVASYLEKGPVAGVAISSAGMVDPDKGEIFYAGPQIPNYAGTQFKKEIEESFTIPCEIENDVNCAGLAEAVSGSGKGASVTLCLTIGTGIGGCLIMDRKVFHGFSNSACEVGYMHMQDGAFQDLASTTALVKYVAEAHGEDVDQWNGRRIFKEATEGNKICMEGIDRMVDYLGKGLANICYVANPEVVILGGGIMGQEAILKPKIRTALKEALVPSLAEKTRLEFAHHQNTAGMLGAYYHFKTKQS

SEQ ID NO: 74121 - protein, 510 aa, Streptococcus pneumoniae
MRGSFMFKVLQKVGKAFMLPIAILPAAGLLLGIGGALSNPTTIATYPILDNSIFQSIFQVMSSAGEVVFSNLSLLLCVGLCIGLAKRDKGTAALAGVTGYLVMTATIKALVKLFMAEGSAIDTGVIGALVVGIVAVYLHNRYNNIQLPSALGFFGGSRFVPIVTSFSSILIGFVFFVIWPPFQQLLVSTGGYISQAGPIGTFLYGFLMRLSGAVGLHHIIYPMFWYTELGGVETVAGQTVVGAQKIFFAQLADPAHSGLFTEGTRFFAGRFSTMMFGLPAACLAMYHSVPKNRRKKYAGLFFGVALTSFITGITEPIEFMFLFVSPVLYVVHAFLDGVSFFIADVLNISIGNTFSGGVIDFTLFGILQGNAKTNWVLQIPFGLIWSVLYYIIFRWFITQFNVLTPGRGEEVDSKEISESADSTSNTADYLKQDSLQIIRALGGSNNIEDVDACVTRLRVAVKEVNQVDKALLKQIGAVDVLEVKGGIQAIYGAKAILYKNSINEILGVDD

SEQ ID NO: 74122 - protein, 367 aa, Streptococcus pneumoniae
MVKYGVVGAGYFGAELARYMQKNDGAEITLLYDPDNAEAIAEELGAKVASSLDELVSSDEVDCVIVATPNNLHKEPVIKAAQHGKNVFCEKPIALSYQDCREMVDACKENNVTFMAGHIMNFFNGVHHAKELINQGVIGDVLYCHTARNGWEEQQPSVSWKKIREKSGGHLYHHIHELDCVQFLMGGMPETVTMTGGNVAHEGEHFGDEDDMIFVNMEFSNKRFALLEWGSAYRWGEHYVLIQGSKGAIRLDLFNCKGTLKLDGQESYFLIHESQEEDDDRTRIYHSTEMDGAIAYGKPGKRTPLWLSSVIDKEMRYLHEIMQGAPVSEEFAKLLTGEAALEAIATADACTQSMFEDRKVKLSEIVK

SEQ ID NO: 74123 - protein, 374 aa, Streptococcus pneumoniae
MSFWRKIMKASPHRPTKALIHLGAIRQNIQQMGAHIPQGTLKLAVVKANAYGHGAVAVAKAIQDDVDGFCVSNIDEAIELRQAGLSKPILILGVSEIEAVALAKEYDFTLTVAGLEWIQALLDKEVDLTGLTVHLKIDSGMGRIGFREASEVEQAQDLLQQHGVCVEGIFTHFATADEESDDYFNAQLERFKTILASMKEVPELVHASNSATTLWHVETIFNAVRMGDAMYGLNPSGAVLDLPYDLIPALTLESALVHVKTVPAGACMGYGATYQADSEQVIATVPIGYADGWTRDMQNFSVLVDGQACPIVGRVSMDQITIRLPKLYPLGTKVTLIGSNGDKEITATQVATYRVTINYEVVCLLSDRIPREYY

SEQ ID NO: 74124 - protein, 120 aa, Streptococcus pneumoniae
MIVGHGIDIEELASIESAVTRHEGFAKRVLTAQEMERFTSLKGRRQIEYLAGRWSAKEAFSKAMGTGISKLGFQDLEVLNNERGAPYFSQAPFSGKIWLSISHTDQFVTASVILEENHES

SEQ ID NO: 74125 - protein, 837 aa, Streptococcus pneumoniae
MANILKTIIENDKGEIRRLEKMADKVFKYEDQMAALTDDQLKAKTVEFKERYQNGESLDSLLYEAFAVVREGAKRVLGLFPYKVQVMGGIVLHHGDVPEMRTGEGKTLTATMPVYLNALSGKGVHVVTVNEYLSERDATEMGELYSWLGLSVGINLATKSPMEKKEAYECDITYSTNSEIGFDYLRDNMVVRAENMVQRPLNYALVDEVDSILIDEARTPLIVSGANAVETSQLYHMADHYVKSLNKDDYIIDVQSKTIGLSDSGIDRAESYFKLENLYDIENVALTHFIDNALRANYIMLLDIDYVVSEEQEILIVDQFTGRTMEGRRYSDGLHQAIEAKEGVPIQDETKTSASITYQNLFRMYKKLSGMTGTGKTEEEEFREIYNIRVIPIPTNRPVQRIDHSDLLYASIESKFKAVVEDVKARYQKGQPVLVGTVAVETSDYISKKLVAAGVPHEVLNAKNHYREAQIIMNAGQRGAVTIATNMAGRGTDIKLGEGVRELGGLCVIGTERHESRRIDNQLRGRSGRQGDPGESQFYLSLEDDLMKRFGSERLKGIFERLNMSEEAIESRMLTRQVEAAQKRVEGNNHDTRKQVLQYDDVMREQREIIYAQRYDVITADRDLAPEIQAMIKRTIERVVDGHARAKQDEKLEAILNFAKYNLLPEDSITMEDLSGLSDKAIKEELFQRALKVYDSQVSKLRDEEAVKEFQKVLILRVVDNKWTDHIDALDQLRNAVGLRGYAQNNPVVEYQAEGFRMFNDMIGSIEFDVTRLMMKAQIHEQERPQAERHISTTATRNIAAHQASMPEDLDLNQIGRNELCPCGSGKKFKNCHGKRQ

SEQ ID NO: 74126 - protein, 436 aa, Streptococcus pneumoniae
MALPTIAIVGRPNVGKSTLFNRIAGERISIVEDVEGVTRDRIYATGEWLNRSFSMIDTGGIDDVDAPFMEQIKHQAEIAMEEADVIVFVVSGKEGITDADEYVARKLYKTHKPVILAVNKVDNPEMRNDIYDFYALGLGEPLPISSVHGIGTGDVLDAIVENLPNEYEEENPDVIKFSLIGRPNVGKSSLINAILGEDRVIASPVAGTTRDAIDTHFTDTDGQEFTMIDTAGMRKSGKVYENTEKYSVMRAMRAIDRSDVVLMVINAEEGIREYDKRIAGFAHEAGKGMIIVVNKWDTLEKDNHTMKNWEEDIREQFQYLPYAPIIFVSALTKQRLHKLPEMIKQISESQNTRIPSAVLNDVIMDAIAINPTPTDKGKRLKIFYATQVATKPPTFVIFVNEEELMHFSYLRFLENQIRKAFVFEGTPIHLIARKRK

SEQ ID NO: 74127 - protein, 121 aa, Streptococcus pneumoniae
MSWTFDNKKPIYLQIMEKIKLQIVSHTLEPNQQLPTVRELASEAGVNPNTIQRALSDLEREGFVYSKRTTGRFVTKDKELIAQSRKQLSEEELEHFVSSMTHFGYEKEELPGVVSDYIKGV

SEQ ID NO: 74128 - protein, 240 aa, Streptococcus pneumoniae
MIILKEFKPMSLLAFENVSKSYGATPALENVSLDIPAGKIVGLLGPNGSGKTTLIKLINGLLQPDQGRVLINDMDPSPATKAVVAYLPDTTYLNEQMKVKEALTYFKTFYKDFNLERAHHLLADLGIDENSRLKKLSKGNKEKVQLILVMSRDARLYVLDEPIGGVDPAARAYILNTIINNYSPTSTVLISTHLISDIEPILDEIVFLKDGKVVRQGNVDDIRYESGESIDQLFRQEFKA

SEQ ID NO: 74129 - protein, 297 aa, Streptococcus pneumoniae
MLEVRSLEKSFGSKQVLFGIDFQARPGRILGLVGKNGAGKTTIFHSILKFLEYQGEIGLDGQDIRQETYARIGYLPEERSLMPKLTVLEQVRYLATLKGMDAKEVKEKLPQWMKRLKVKGKLTDKIKSLSKGNQQKIQLIITLIHEPDLIILDEPFSGLDPVNTELLKQVIFQEKERGATIIFSDHVMTNVEELCDDILMIRDGRVVLHGPVQDVRNQYGKTRLFVSSERSKEELENLPHVKQVSLTKQGSWKLILEDESAGRELFPILTQGQYIATFDQQAPTIDEIFKLESGVEV

SEQ ID NO: 74130 - protein, 424 aa, Streptococcus pneumoniae
MKISWNGFSKKSYQERLELLKAQALLSPERQASLEKDEQMSVTVADQLSENVVGTFSLPYSLVPEVLVNGQEYTVPYVTEEPSVVAAASYASKIIKRAGGFTAQVHQRQMIGQVALYQVANPKLAQEKIASKKAELLELANQAYPSIVKRGGGARDLHVEQIKGEPDFLVVYIHVDTQEAMGANMLNTMLEALKPVLEELSQGQSLMGILSNYATDSLVTASCRIAFRYLSRQKDQGREIAEKIALASQFAQADPYRAATHNKGIFNGIDAILIATGNDWRAIEAGAHAFASRDGRYQGLSCWTLDLEREELVGEMTLPMPVATKGGSIGLNPRVALSHDLLGNPSARELAQIIVSIGLAQNFAALKALVSTGIQQGHMKLQAKSLALLAGASESEVAPLVERLISDKTFNLETAQRYLENLRS

SEQ ID NO: 74131 - protein, 659 aa, Streptococcus pneumoniae
MIQIGKIFAGRYRIVKQIGRGGMADVYLAKDLILDGEEVAVKVLRTNYQTDPIAVARFQREARAMADLDHPHIVRITDIGEEDGQQYLAMEYVAGLDLKRYIKEHYPLSNEEAVRIMGQILLAMRLAHTRGIVHRDLKPQNILLTPDGTAKVTDFGIAVAFAETSLTQTNSMLGSVHYLSPEQARGSKATVQSDIYAMGIIFYEMLTGHIPYDGDSAVTIALQHFQNPLPSVIAENSSVPQALENVIIKATAKKLTNRYRSVSEMYVDLSSSLSYNRRNESKLIFDETSKADTKTLPKVSQSTLTSIPKVQAQTEHKSIKNPSQAVTEETYQPQAPKKHRFKMRYLILLASLVLVAASLIWILSRTPATIAIPDVAGQTVAEAKATLKKANFEIGEEKTEASEKVEEGRIIRTDPGAGTGRKEGTKINLVVSSGKQSFQISNYVGRKSSDVIAELKEKKVPDNLIKIEEEESNESEAGTVLKQSLPEGTTYDLSKATQIVLTVAKKATTIQLGNYIGRNSTEVISELKQKKVPENLIKIEEEESSESEPGTIMKQSPGAGTTYDVSKPTQIVLTVAKKVTSVAMPSYIGSSLEFTKNNLIQIVGIKEANIEVVEVTTAPAGSVEGMVVEQSPRAGEKVDLNKTRVKISIYKPKTTSATP

SEQ ID NO: 74132 - protein, 438 aa, Streptococcus pneumoniae
MVTKVETARSLALAVLEDVFVNQAYSNIALNKHLKGSQLSAADKGLVTELVYGTVARKLTLEWYLSHFIEDRDQLDSWLYVLLLMSAYQLRYLDKIPDHAVVNEAVELAKLRKKGSEKLVNAVLRRILREDWPDIASIKRKNKRDSIAYSLPVWLVAKLKEEYGEERAKAIFESLLVRNKASIRVTDLSRKEEIQALLEANNSLLATTGLVKEQGHFAGHNLFADGAITIQDESSQLVAPTLDLQGDERVLDACAAPGGKTAHIASYLTTGQVTALDLYDHKLDLIQENAQRLGVEDRVQTQKLDARKVHEFFDQDSFDKILVDAPCSGIGLLRRKPDIKYNKETADFASLQEIQLEILGSVCQILGKGGIITYSTCTIVSEENFQVVKAFLESHPEFEQVKLEHECKDIMKDGCILITPELYGSDGFFISQFRKISD

SEQ ID NO: 74133 - protein, 104 aa, Streptococcus pneumoniae
MMLKPSIDTLLDKVPSKYSLVILEAKRAHELEAGAPATQGFKSEKSTLRALEEIESGNVTIHPDPEGKREAVRRRIEEEKRRKEEEEKKIKEQIAKEKEDGEKI

SEQ ID NO: 74134 - protein, 537 aa, Streptococcus pneumoniae
MEIMSLAIAVFAVIIGLVIGYVSISAKMKSSQEAAELMLLNAEQEATNLRGQAEREADLLVNEAKRESKSLKKEALLEAKEEARKYREEVDAEFKSERQELKQIESRLTERATSLDRKDDNLTSKEQTLEQKEQSISDRAKNLDAREEQLEEVERQKEAELERIGALSQAEARDIILAQTEENLTREIASRIREAEQEVKERSDKMAKDILVQAMQRIAGEYVAESTNSTVHLPDDTMKGRIIGREGRNIRTFESLTGVDVIIDDTPEVVTLSGFDPIRREIARMTMEMLLKDGRIHPARIEELVEKNRQEIDNKIREYGEAAAYEIGAPNLHPDLMKIMGRLQFRTSYGQNVLRHSIEVAKLAGIMASELGENAALARRAGFLHDIGKAIDHEVEGSHVEIGMELARKYKEPPVVVNTIASHHGDVEAESVIAVIVAAADALSAARPGARSESLESYIKRLHDLEEIANGFEGVQTSFALQAGREIRIMVNPGKIKDDKVTILAHKVRKKIENNLDYPGNIKVTVIRELRAVDYAK

SEQ ID NO: 74135 - protein, 197 aa, Streptococcus pneumoniae
MSYQDYINCSREALLEKMAELLPEKRLTHCLGVERAAMELAQRFGVDVEKASLAGLLHDYAKKLSDQEFLDLIDRYQLDFDLKNWGNNVWHGMVGIYKIQEDLDLHDSEILRAIEIHTVGAGQMTDLDKVIYVADYIEHNRAFPGVDVAREIASLSLNKAVAYETARTVEYLAHQGFPIYPQTLETYNAFVHYLKEN

SEQ ID NO: 74136 - protein, 368 aa, Streptococcus pneumoniae
MEEILCIGCGATIQTTDKAGLGFTPQSALEKGLETGEVYCQRCFRLRHYNEITDVQLTDDDFLKLLHEVGDSDALVVNVIDIFDFNGSVIPGLPRFVSGNDVLLVGNKKDILPKSVKSGKISQWLMKRAHEEGLRPVDVVLTSAQNKYAIKEVIDKIEHYRKGRDVYVVGVTNVGKSTLINAIIQEITGDQNVITTSRFPGTTLDKIEIPLDDGSYIYDTPGIIHRHQMAHYLTAKNLKYVSPKKEIKPKTYQLNPEQTLFLGGLGRFDFIAGEKQGFTAFFDNELKLHRSKLEGASAFYDKHLGTLLTPPNSKEKEDFPRLVQHVFTIKDKTDLVISGLGWIRVTGIAKVAVWAPEGVAVVTRKAII

SEQ ID NO: 74137 - protein, 201 aa, Streptococcus pneumoniae
MRLMKIWYNEIKEFYMQKFIQAYIEKLDVTTIIENILTKVISLLLLLIVFYIAKKMLHTMVQRIVKPSLKMSRHDVGRQKTISRLLENVFNYTLYFFLLYCILSILGLPVSSLLAGAGIAGVAIGMGAQGFLSDVINGFFILFERQLDVGDEVVLTNGPITVSGKVVSVGIRTTQLRSEEQVLHFVPNRNITVVSNFSRTD

SEQ ID NO: 74138 - protein, 317 aa, Streptococcus pneumoniae
MSISQRTTKLILATCLACLFAYFLNLSSAVSAGIIALLSLSDTRRSTLKLARNRLFSMLLALAIGVLAFHLSGFHIWSLGLYLAFYVPLAYKMGWEIGITPSTVLVSHLLVQESTSPDLLVNEFLLFAIGTGFALLVNLYMPSREEEIQHYHTLVEEKLKDILQRFKYYLSRGDGRNRAQLVAELDTLLKEALRLVYLDHSDHLFHQTDYHIHYFEMRQRQSRILRNMAQQINTCHLAASESLILAQLFSKIAGQLSQTNPASDLLDEIERYLEVFRNRSLPKTREEFETRATLLQLLREAKTFIQVKVDFYQKYRQ

SEQ ID NO: 74139 - protein, 141 aa, Streptococcus pneumoniae
MDFLLFYDSKKKGDTMTYLEKWFDFNRRQKEIESLLEETIAQQSEQSLTLKEFYLLYYLDLAEEKSLRQIDLPDKLHLSPSAVSRMVARLEAKNCGLLSRMCCHQDRRSSFICLTNDGQKTLASLQKTVEESLEAGLDFLI

SEQ ID NO: 74140 - protein, 222 aa, Streptococcus pneumoniae
MKKFVAELIGTFMLVFVGTGAVVFGNGLDGLGHLGIAFAFGLAIVVAAYSIGTVSGAHLNPAVSIAMFVNKRLSSSELVNYILGQVVGAFIASGAVFFLLANSGMSTASLGENALANGVTVFGGFLFEVIATFLFVLVIMTVTSESKGNGAIAGLVIGLSLMAMILVGLKITGLSVNPARSLAPAVLVGGAALQQVWIFILAPIAGGVLAALVAKNFLGTEE

SEQ ID NO: 74141 - protein, 251 aa, Streptococcus pneumoniae
MEASMQQYFVKGSAISPVTIEDKETSKHMFQVMRLKEEDEVTLVFDDGIKRLARVLDMENRQFELVQELNDNVELPVQVTIASGFPKGDKLEFIAQKVTELGASQIWAFPADWSVAKWDGKKLGKKVEKLEKIALGAAEQSKRNIVPSIKLFEKKADFLAQLDQFDSIIVAYEESAKEGEAAALLQAVTGLETGAKLLFIFGPEGGLSPAEIESFEAKGAVLAGLGPRILRAETAPLYALSALSVLVELEK

SEQ ID NO: 74142 - protein, 423 aa, Streptococcus pneumoniae
MPDNLALRMRPKTIDQVIGQEHLVGPGKIIRRMVEANRLSSMILYGPPGIGKTSIASAIAGTTKYAFRTFNATVDSKKRLQEISEEAKFSGGLVLLLDEIHRLDKTKQDFLLPLLESGLVIMIGATTENPFFSVTPAIRSRVQIFELEPLSNQDVKEALQIALSNPERGFDFPIELDEDALDFIATSTNGDLRSAFNSLDLAVLSTPENDEGIRHITLDIMENSLQRSYITMDKDGDGHYDVLSALQKSIRGSDVDASLHYAARLIEAGDLPSLARRLTVIAYEDIGLANPEAQIHTVTALDAAQKIGFPEARILIANVVIDLALSPKSNSAYVAMDKALADLKTSGHLPIPRHLRDGHYSGSKELGNAQDYLYPHNYPGNWVKQDYLPEKIRNHHYFQAEDTGKYERALAQRKEAIDRLRKI

SEQ ID NO: 74143 - protein, 56 aa, Streptococcus pneumoniae
MEWLKQYRYPIIAGLIGVFLACLIVSFGFFKTIFVLILGALGVAAGLYIEKNYIDK

SEQ ID NO: 74144 - protein, 67 aa, Streptococcus pneumoniae
MSVEEKLNQAKGSIKEGVGKAIGDEKMEKEGAAEKVVSKVKEVAEDAKDAVEGAVEGVKNMLSGDDK

SEQ ID NO: 74145 - protein, 407 aa, Streptococcus pneumoniae
MAYQEPNKDGFYGKFGGRFVPETLMTAVLELEKAYRESQADPSFQEELNQLLRQYVGRETPLYYAKNLTQHIGGAKIYLKREDLNHTGAHKINNALGQVWLAKRMGKKKIIAETGAGQHGVATATAAALFNMECIIYMGEEDVKRQALNVFRMELLGAKVEAVTDGSRVLKDAVNAALRSWVANIDDTHYILGSTLGPHPFPEIVRDFQSVIGREAKQQYRDLTGQNLPDALVACVGGGSNAIGLFHPFVEDESVAMYGAEAAGLGVDTEHHAATLTKGRPGVLHGSLMDVLQDAHGQILEAFSISAGLDYPGIGPEHSHYHDIKRASYVPVTDEEALEGFQLLSRVEGIIPALESSHAIAFAVKLAKELGPEKSMIVCLSGRGDKDVVQVKDRLEADAAKKGEAHA

SEQ ID NO: 74146 - protein, 255 aa, Streptococcus pneumoniae
MSQEFLARILEQKAREVEQMKLEQIQPLRQTYRLAEFLKNHQDCLQVIAEVKKASPSLGDINLDVDIVQQAQTYEENGAVMISVLTDEVFFKGHLDYLREISSQVEIPTLNKDFIIDEKQIIRARNAGATVILLIVAALSEERLKELYDYATELGLEVLVETHNLAELEVAHRLGAEIIGVNNRNLTTFEVDLQTSVDLAPYFEEGRYYISESAIFTGQDAERLAPYFNGILVGTALMQAENVVQRIKELQIDKG

SEQ ID NO: 74147 - protein, 334 aa, Streptococcus pneumoniae
MKEIIEKLAKFENLSGVEMTDVIERIVTGRVTEAQIASLLLALKMKGETPEERTAIAQVMRGHAQHIPTEIHDAMDNCGTGGDKSFSFNISTTAAFVLAGGGIHMAKHGNRSISSKSGSADVLEALGINLDLKPAELGKVFDKTGIVFLFAKNMHPAMKYIMPARLELGIPTIMNLTGPLIHPMALETQLLGISRPELLESTAQVLKNMGRKRAIVVAGPEGLDEAGLNGTTKIALLENGEISLSSFTPEDLGMEGYAMEDIRGGNAQENAEILLSVLKNEASPFLETTVLNAGLGFYANGKIDSIKEGVALARQVIARGKALEKLRLLQEYQK

SEQ ID NO: 74148 - protein, 164 aa, Streptococcus pneumoniae
MYYSSFNILYYRLPTFAFIFAKLSEKKLEYMMLGDCVMLVNEMEITDHRVDNLFEKGKNEIKDPIGTNSVLNKKIILQKIRKLSNQPSGYWIGSLDERFLDHAIINQIDVTSEQIVLMSDGFYEFYQNNQNKTFEELIKMRFNSSAIDPIYGKKDDASIVVIDV

SEQ ID NO: 74149 - protein, 583 aa, Streptococcus pneumoniae
MQNKQEQWTVLKRLMSYLKPYGLLTFLALSFLLATTVIKSVIPLVASHFIDQYLSNLNQLAVTVLLVYYGLYILQTVVQYVGNLLFARVSYSIVRDIRRDAFANMEKLGMSYFDKTPAGSIVSRLTNDTETISDMFSGILSSFISAVFIFLTTLYTMLVLDFRLTALVLLFLPLIFLLVNLYRKKSVKIIEKTRSLLSDINSKLAENIEGIRIIQAFNQEKRLQAEFDEINQEHLAYANRSVALDALFLRPAMSLLKLLGYAVLMTYFGYRGLSIGITAGTMYAFIQYINRLFDPLIEVTQNFSTLQTSMVSAGRVFALIDERTYEPLQENGQAKVKEGNIRFEHVCFSYDGKHPILDDISFSVNKGETIAFVGHTGSGKSSIINVLMRFYEFQSGRVLLDDVDIRDFSQEELRKNIGLVLQEPFLYHGTIKSNIAMYQEISDEQVQAAAAFVDADSFIQELPQGYDSPVSERGSSFSTGQRQLLAFARTVASQPKILILDEATANIDSETESLVQASLAKMRQGRTTIAIAHRLSTIQDANCIYVLDKGRIIESGTHEELLTLGGTYHKMYSLQAGAMAYTL

SEQ ID NO: 74150 - protein, 506 aa, Streptococcus pneumoniae
MTNLIATFQDRFGDWLTALSQHLQLSLLTLLLAILLAIPLAVYLRYHEKLADWVLQIAGIFQTIPSLALLGLFIPLMGIGTLPALTALVIYAIFPILQNTITGLKGIDPSLQEAGIAFGMTRWERLKKFEIPLAMPVIMSGIRTAAVLIIGTATLATLIGAGGLGSFILLGIDRNNASLILIGALSSAVLAIAFNFLLKVMEKAKLRTIFSGFALMALLLGLSYSPALLAQKEKENLIIAGKIGPEPEILANMYKLLIEENTSMTATVKPNFGTTSFLYEALKKGDIDIYPEFTGTVTESLLQPSPKVSHEPEQVYQVARDGIAKQDHLAYLKPMSYQNTYAVAVPKKIAQEYGLKTISDLKKVEGQLKAGFTLEFNDREDGNKGLQSMYGLNLNVATMQPALRYQAIHSGDIQITDAYSTDAELERYDLQVLEDDKQLFPPYQGAPLMKEALLKKHPELERVLNTLAGKITESQMSQLNYQVGVEGKSAKQVAKEFLQEQGLLKK

SEQ ID NO: 74151 - protein, 324 aa, Streptococcus pneumoniae
MKGRGMKLSHYLIGLLLLLVFLSISIGTSDFSWGKLFDFDQQTWLLFQESRLPRTISILLTASSMSMAGLLMQTITQNQFAAPSTVGTTEAAKLGMVLSLFVFPSASLTQKMLFAFVSSIVFTLFFLAFMTIFTVKERWMLPLIGIIYSGIIGSVTEVIAYRFNLVQSMTAWTQGSFSMIQTHQYEWLFLGLIILITVWKLSQTFTIMNLGKETSESLGISYSLLEKLALFLVALTTSVTMITVGGLPFLGVIVPNLVRKRYGDNLSQTKLMVALVGANLVLACDILSRVLIRPYELSVSLLLGIIGSLVFILLLWRGGRKDAD

SEQ ID NO: 74152 - protein, 240 aa, Streptococcus pneumoniae
MRINKYIAHAGVASRRKAEELIKQGLVTVNGQVVRELATTIKSGDKVEVEGQPIYNEEKVYYLLNKPRGVISSVTDDKGRKTVVDLLPNVKERIYPVGRLDWDTSGVLILTNDGDFTDEMIHPRNEIDKVYVARVKGVANKDNLRPLTRGLEIDGKKTKPAVYEILKVDPVKNRSVVQLTIHEGRNHQVKKMFEAVGLQVDKLSRTRFGHLDLTGLRPGESRRLNKKEISQLHTMAVTKK

SEQ ID NO: 74153 - protein, 336 aa, Streptococcus pneumoniae
MAGKRDSCGACRIMTNKIYEYKDDQNWYVGSYSIFGGVNSLSDYKADFPLFEFSKIFGDEEYGFPLSVTVLRYGSTYRLFSFVVDMLNQEMGRNLEVIQRHGALLLVENGQLLYVELPKEGVNVHDFFETSKVRETLLIATRNEGKTKEFRAIFDKLGYDVENLNDYPDLPEVAETGMTFEENARLKAETISQLTGKMVLADDSGLKVDVLGGLPGVWSARFAGVGATDRENNAKLLHELAMVFELKDRSAQFHTTLVVASPNKESLVVEADWSGYINFEPKGENGFGYDPLFLVGETGESSAELTLEEKNSQSHRALAVKKLLEVFPSWQSKPSL

SEQ ID NO: 74154 - protein, 264 aa, Streptococcus pneumoniae
MDNRPIGFLDSGVGGLTVVRELMRQLPHEEIVYIGDSARAPYGPRPAEQIREYTWQLVNFLLTKDVKMIVIACNTATAVVWEEIKAQLDIPVLGVILPGASAAIKSSQGGKIGVIGTPMTVQSDIYRQKIHDLDPDLQVESLACPKFAPLVESGALSTSVTKKVVYETLRPLVGKVDSLILGCTHYPLLRPIIQNVMGPKVQLIDSGAECVRDISVLLNYFEINRGRDAGPLHHRFYTTASSQSFAQIGEEWLEKEIHVEHVEL

SEQ ID NO: 74155 - protein, 236 aa, Streptococcus pneumoniae
MKKYQQLFKQIQETIQNETYAVGDFLPSEHDLMEQYQVSRDTVRKALSLLQEEGLIKKIRGQGSQVVKEETVNFPVSNLTSYQELVKELGLRSKTNVVSLDKIIIDKKSSLITGFPEFRMVWKVVRQRVVDDLVSVLDTDYLDMELIPNLTRQIAEQSIYSYIENGLKLLIDYAQKEITIDHSSDRDKILMDIGKDPYVVSIKSKVYLQDGRQFQFTESRHKLEKFRFVDFAKRKK

SEQ ID NO: 74156 - protein, 355 aa, Streptococcus pneumoniae
MTKEKNVILTARDIVVEFDVRDKVLTAIRGVSLELVEGEVLALVGESGSGKSVLTKTFTGMLEENGRIAQGSIDYRGQDLTALSSHKDWEQIRGAKIATIFQDPMTSLDPIKTIGSQITEVIVKHQGKTAKEAKELAIDYMNKVGIPDADRRFNEYPFQYSGGMRQRIVIAIALACRPDVLICDEPTTALDVTIQAQIIDLLKSLQNEYHFTTIFITHDLGVVASIADKVAVMYAGEIVEYGTVEEVFYDPRHPYTWSLLSSLPQLADDKGDLYSIPGTPPSLYTDLKGDAFALRSDYAMQIDFEQKAPQFSVSETHWAKTWLLHEDAPKVEKPAVIANLHDKIREKMGFAHLAD

SEQ ID NO: 74157 - protein, 397 aa, Streptococcus pneumoniae
MKSIGFIEKLKGLSSKELILLGIILSIFLPFYLFVVVLCLYIISLIFTGDMKSILQKMGEHPMLLLFLSYSTVISILAQNWMGLVASVGMFLFTIFFLHYQSILSHKFFRLILQFVLFGSVLSAAFASLEHFQIVKKFNYAFLSPNMQVWHQNRAEVTFFNPNYYGIICCFCIMIAFYLFTTTKLNWLKVFCVIAGFVNLFGLNFTQNRTAFPAIIAGAIIYLFTTIKNWKAFWLSIGVFAIGLSFLFSSDLGVRMGTLDSSMEERISIWDAGMALFKQNPFWGEGPLTYMHSYPRIHAPYHEHAHSLYIDTILSYGIVGTILLVLSSVAPVRLMMDMSQESGKRPIIGLYLSFLTVVAVHGIFDLALFWIQSGFIFLLVMCSIPLEHRMLVSDMTD

SEQ ID NO: 74158 - protein, 419 aa, Streptococcus pneumoniae
MEWYKKIGLLATTGLALFGLGACSNYGKSADGTVTIEYFNQKKEMTKTLEEITRDFEKENPKIKVKVVNVPNAGEVLKTRVLAGDVPDVVNIYPQSIELQEWAKAGVFEDLSNKDYLKRVKNGYAEKYAVNEKVYNVPFTANAYGIYYNKDKFEELGLKVPETWDEFEQLVKDIVAKGQTPFGIAGADAWTLNGYNQLAFATATGGGKEANQYLRYSQPNAIKLSDPIMKDDIKVMDILRINGSKQKNWEGAGYTDVIGAFARGDVLMTPNGSWAITAINEQKPNFKIGTFMIPGKEKGQSLTVGAGDLAWSISATTKHPKEANAFVEYMTRPEVMQKYYDVDGSPTAIEGVKQAGEDSPLAGMTEYAFTDRHLVWLQQYWTSEADFHTLTMNYVLTGDKEGMVNDLNAFFNPMKADVD

SEQ ID NO: 74159 - protein, 286 aa, Streptococcus pneumoniae
MLVFSEYQTGTIDLALSFYGYEECTPNYSFGPAIRDTYVLHYISKGQGKFHYKGKIVDLKEGDFFLLKPEELTFYQADSKEPWAYYWLGITGGKSPDYFALSQISDQSYLIQSETCHTQTTAKLISDIVRFAQITKSSELAQLHIMGQLHELMFHLGTIAPNQKKKNISSTHQLYLECKRLIDSHYPQSLTIQDLAKELSVHRSYLSSVFKEFNTLSPKEYLLYVRMHRARQLLENTQESIKVIAYSVGFSDPLHFSKAYKQYFNQSPSHTRKEYSQYQLVRKATL

SEQ ID NO: 74160 - protein, 286 aa, Streptococcus pneumoniae
MRLIFNGIFCFTFRFIPLSYHILSYNRAMKITKLEKKKRLYLMELDNGDKCYITEDTIVRFMLSRDKVISEEELKEIQDFAQFSYGKNLALYHLSFKARTEKEVREYLKKYDIDKNIVSQVIANLKEDKWINDGQYAYAIINTNQLSGDKGPYVLTQKLAQKGISKSTIEENLKEFDFSEVAQRVANKLLKKYEGKLPARALQDKIIQNLTNKGFSYSDAKIAFDDLDSQVDQETTQELIFKELDKQYTKYARKYEGYELKQRLTQVLARKGYDFSDIASALREYL

SEQ ID NO: 74161 - protein, 540 aa, Streptococcus pneumoniae
MSKEIKFSSDARSAMVRGVDILADTVKVTLGPKGRNVVLEKSFGSPLITNDGVTIAKEIELEDHFENMGAKLVSEVASKTNDIAGDGTTTATVLTQAIVREGIKNVTAGANPIGIRRGIETAVAAAVEALKNNAIPVANKEAIAQVAAVSSRSEKVGEYISEAMEKVGKDGVITIEESRGMETELEVVEGMQFDRGYLSQYMVTDSEKMVADLENPYILITDKKISNIQEILPLLESILQSNRPLLIIADDVDGEALPTLVLNKIRGTFNVVAVKAPGFGDRRKAMLEDIAILTGGTVITEDLGLELKDATIEALGQAARVTVDKDSTVIVEGAGNPEAISHRVAVIKSQIETTTSEFDREKLQERLAKLSGGVAVIKVGAATETELKEMKLRIEDALNATRAAVEEGIVAGGGTALANVIPAVATLELTGDEATGRNIVLRALEEPVRQIAHNAGFEGSIVIDRLKNAELGIGFNAATGEWVNMIDQGIIDPVKVSRSALQNAASVASLILTTEAVVANKPEPVAPAPAMDPSMMGGMM

SEQ ID NO: 74162 - protein, 208 aa, Streptococcus pneumoniae
MIFTYNKEHVGDVLMVIVKNSGDAKLNVERKGKVARVFLKENGETVAWNIFEVSSLFEIAERGQVFLSDEQVARLNQELQAEGFTEEIVNDKEPKFVVGEIVEMVAHPDSDHLNICQVAVASDKIVQIVAGAPNARVGLKTIVALPGAMMPKGNFIFPGELRGEKSFGMMCSPRELHLPNAPQKRGVLELSEDQVVGTPFDPAKHWTA

SEQ ID NO: 74163 - protein, 238 aa, Streptococcus pneumoniae
MGRKWANIVAKKTAKDGANSKVYAKFGVEIYVAAKKGDPDPESNSALKFVIDRAKQAQVPKHIIDKAIDKAKGNTDETFTEGRYEGFGPNGSMLIVDTLTSNVNRTAANVRAAFGKNGGNMGASGSVSYLFDNKGVIVFGGEDADAVFEQLLEADVDVDDVEAQEGTITVYTAPTDLHKAIVALRESGIEEFQVTELEMIPQSEVELSGEDLETFEKLYSVLEDDEDVQKIYTNVDGF

SEQ ID NO: 74164 - protein, 388 aa, Streptococcus pneumoniae
MAKKPKKLEEISKKFGAEREKALNDALKLIEKDFGKGSIMRLGERAEQKVQVMSSGSLALDIALGSGGYPKGRIIEIYGPESSGKTTVALHAVAQAQKEGGIAAFIDAEHALDPAYAAALGVNIDELLLSQPDSGEQGLEIAGKLIDSGAVDLVVVDSVAALVPRAEIDGDIGDSHVGLQARMMSQAMRKLGASINKTKTIAIFINQLREKVGVMFGNPETTPGGRALKFYASVRLDVRGNTQIKGTGDQKETNVGKETKIKVVKNKVAPPFKEAVVEIMYGEGISKTGELLKIASDLDIIKKAGAWYSYKDEKIGQGSENAKKYLAEHPEIFDEIDKQVRSKFGLIDGEEVSEQDTENKKDEPKKEEAVNEEVPLDLGDELEIEIEE

SEQ ID NO: 74165 - protein, 418 aa, Streptococcus pneumoniae
MKAEIIAVGTEILTGQIVNTNAQFLSEKLAEIGVDVYFQTAVGDNEVRLLSLLEIASQRSSLVILTGGLGATEDDLTKQTLAKFLGKALVFDPQAQEKLDIFFALRPDYARTPNNERQAQIVEGAIPLPNETGLAVGGKLEVDGVTYVVLPGPPSELKPMVLNQLLPKLMTGSKLYSRVLRFFGIGESQLVTILADLIDNQIDPTLAPYAKTGEVTLRLSTKASSQEEANQALDILENQILDCQTFEGISLRDFCYGYGEETSLASIVVEELKRQGKTIAAAESLTAGLFQATVANFSGVSSIFEGGFVTYSLEEKSRMLDIPAKNLEEHGVVSEFTAQKMAEQARSKTQSDFGISLTGVAGPDSLEGHPVGTVFIGLAQDQGTEVIKVNIGGRSRADVRHIAVMHAFNLVRKALLSD

SEQ ID NO: 74166 - protein, 338 aa, Streptococcus pneumoniae
MVKKIIGMVLALLSVTVVGVGVFAYTIYQQGTETLAKTYKKIGEETKVIEATEPLTILLMGVDTGNVERTETWVGRSDSMILMTVNPKTKKTTMMSLERDILTRIESGNGQAHEAKLNSAYADGGAELAIETIQKMMNIHIDRYVMVNMRGLQKLVDAVGGITVNNILGFPISISDQEEFNTISIGVGEQHIGGEEALVYARMRYQDPEGDYGRQKRQREVIQKVMEKALSLNSIGHYQEILKALSDNMQTNIDLSAKSIPNLLGYKDSFKTIETQQLQGEGEILQGVSYQIVSRAHMLEMQNILRRSLGQEEVTQLETNAVLFEDLFGRAPVGDEDN

SEQ ID NO: 74167 - protein, 234 aa, Streptococcus pneumoniae
MNKIFIYAGVRNHNSKTLEYTKRLSSIISSRNNVDISFRTPFNSELEISNSDSEELFKKGIDRQSNADDGGVIKKELLESDIIIISSPVYLQNVSVDTKNFIERIGGWSHLFRLAGKFVVTLDVAESNGSDNVSEYLRDIFSYMGGQILHQVSITNSLKDIAEAQLMEATYKIEDVLEGKIKYKTTDYQERAYQTLKLILENYDSEHFEKMYWEKKRLFEANSLEEWYYVENIK

SEQ ID NO: 74168 - protein, 1225 aa, Streptococcus pneumoniae
MVDVNRFKSMQITLASPSKVRSWSYGEVKKPETINYRTLKPEREGLFDEVIFGPTKDWECACGKYKRIRYRGIVCDRCGVEVTRTKVRRERMGHIELKAPVSHIWYFKGIPSRMGLTLDMSPRALEEVIYFAAYVVIDPKDTPLEHKSIMTEREYRERLREYGYGSFVAKMGAEAIQDLLKQVDLEKEIAELKEELKTATGQKRVKAIRRLDVLDAFYKSGNKPEWMILNILPVIPPDLRPMLQLDGGRFASSDLNDLYRRVINRNNRLARLLELNAPGIIVQNEKRMLQEAVDALIDNGRRGRPITGPGSRPLKSLSHMLKGKQGRFRQNLLGKRVDFSGRSVIAVGPTLKMYQCGVPREMAIELFKPFVMREIVARDIVQNVKAAKRLVERGDERIWDILEEVIKEHPVLLNRAPTLHRLGIQAFEPVLIDGKALRLHPLVCEAYNADFDGDQMAIHVPLSEEAQAEARILMLAAEHILNPKDGKPVVTPSQDMVLGNYYLTMEEAGREGEGMVFKDRDEAVMAYRNGYVHLHSRVGIATDSLNKPWTEEQRHKVLLTTVGKILFNDIMPEGLPYLQEPNNANLTEGVPAKYFLPLGGAIKEAISNLELNPPFKKKNLGNIIAEIFKRFRTTETSALLDRMKNLGYHHSTLAGLTVGIADIPVVDDKAEIIEESHKRVEQITKQFRRGMITDDERYNAVTAEWRAAREKLEKRLIANQDPKNPIVMMMDSGARGNISNFSQLAGMRGLMAAPNGRIMELPILSNFREGLSVLEMFFSTHGARKGMTDTALKTADSGYLTRRLVDVAQDVIIREDDCGTDRGLLIRSIAEGKEMIESLEERLNGRYTKKTVKHPETGAVIIGPNELITEDKAREIVNAGVEEVTIRSVFTCNTRRGVCRHCYGINLATGDAVEVGEAVGTIAAQSIGEPGTQLTMRTFHTGGVASNTDITQGLPRVQEIFEARNPKGEAVITEVKGQVTAIEEDASTRTKKVFVKGETGEGEYVVPFTARMRVEVGGQVARGAALTEGSIQPKRLLAVRDVLSVETYLLGEVQKVYRSQGVEIGDKHIEVMVRQMIRKVRVMDPGDTDLLMGTLMDINDFTDANKDVLIAGGVPATGRPVLMGITKASLETNSFLSAASFQETTRVLTDAAIRGKKDHLLGLKENVIIGKIIPAGTGMARYRNLEPHAVNEEEYLNPPVEEEGNEETTEVVVDTAVETVEETVE

SEQ ID NO: 74169 - protein, 1216 aa, Streptococcus pneumoniae
MTRLGTYLQRRIILAGHDVQYGKHRTRRSFSRIKEVLDLPNLIEIQTDSFKAFLDHGLKEVFEDVLPISNFTDTMELEFVGYEIKEPKYTLEEARIHDASYSAPIFVTFRLINKETGEIKTQEVFFGDFPIMTEMGTFIINGGERIIVSQLVRSPGVYFNDKVDKNGKVGYGSTVIPNRGAWLELESDSKDITYTRIDRTRKIPFTTLVRALGFSGDDEIFDIFGDSELVRNTVEKDIHKNPMDSRTDEALKEIYERLRPGEPKTAESSRSLLVARFFDPRRYDLAAVGRYKINKKLNVKTRLLNQTIAEPLVDPETGEILVEAGTIMTRSVIESIESHLDGDLNKIVYIPNDAAVVTEPVVLQKFKVVAPTDPDRVVTIIGNANPDDKVRTVTPADILAEMSYFLNLAEGLGRVDDIDHLGNRRIRAVGELLANQVRLGLSRMERNVRERMSVQDNEVLTPQQIINIRPVTAAVKEFFGSSQLSQFMDQHNPLSELSHKRRLSALGPGGLTRDRAGYEVRDVHYTHYGRMCPIETPEGPNIGLINNLSSYGHLNKYGFVQTPYRKVDRETGVVTNEIVWLTADEEDEYTVAQANSRLNEDGTFAEKIVMGRHQGVNQEYPANIVDYMDVSPKQVVAVATACIPFLENDDSNRALMGANMQRQAVPLINPQAPYVGTGMEYQAAHDSGAAVIAQYDGKVTYADADKVEVRREDGSLDVYHIQKFRRSNSGTAYNQRTLVKVGDVVEKGDFIADGPSMENGEMALGQNPIVAYMTWEGYNFEDAVIMSERLVKDDVYTSVHLEEYESETRDTKLGPEEITREIPNVGEDALKDLDEMGIIRIGAEVKEGDILVGKVTPKGEKDLSAEERLLHAIFGDKSREVRDTSLRVPHGADGVVRDVKIFTRVNGDELQSGVNMLVRVYIAQKRKIKVGDKMAGRHGNKGVVSRIVPVEDMPYLPDGTPVDIMLNPLGVPSRMNIGQVMELHLGMAARTLGIHIATPVFDGASSEDLWSTVKEAGMDSDAKTILYDGRTGEPFDNRVSVGVMYMIKLHHMVDDKLHARSVGPYSTVTQQPLGGKAQFGGQRFGEMEVWALEAYGASNVLQEILTYKSDDINGRLKAYEAITKGKPIPKPGVPESFRVLVKELQSLGLDMRVLDEDDQEVELRDLDEGMDEDVIHVDDLEKAREKAAQEAKAAFEAEEAEKATKAEATEEAAEQE

SEQ ID NO: 74170 - protein, 443 aa, Streptococcus pneumoniae
MEDPSSQNLLLQFVLLFILTVLNAFFSATEMAMVSLNRARVEQKAEEGDRRYIRLLKVLENPNHFLSTIQVGITLITILSGASLTNTLGRVIASWLGNGETAQAVATFLSLAFLTYISIVFGELYPKRIALNLKDALAIRTAPIIIGIGKLVSPFVWLLAASTNFLSHLTPMSFDDADEKMTRDEIAYMLTNSEETLDADEIEMLQGVFSLDELMAREVMVPRTDAFMVDIQDDSQAIIQSILKQNYSRIPVYDGDKDNVIGIIHTKSLLKAGFVDGFDNIVWKRILQDPLFVPETIFVDDLLKELRNTQRQMAILLDEYGGMAGLVTLEDLLEEIVGEIDDETDKAAIDVHQIGEDTYIVQGTMTLNDFNNYFDVELESDDVDTIAGYYLTGVGTIPTTEKLSYELVSQNKQFILTNDKVKNGRVTKVKVQITEVEIEEETE

SEQ ID NO: 74171 - protein, 427 aa, Streptococcus pneumoniae
MDKIVVQGGDNRLVGSVTIEGAKNAVLPLLAATILASEGKTVLQNVPILSDVFIMNQVVGGLNAKVDFDEEAHLVKVDATGDITEEAPYKYVSKMRASIVVLGPILARVGHAKVSMPGGCTIGSRPIDLHLKGLEAMGVKISQTAGYIEAKAERLHGAHIYMDFPSVGATQNLMMAATLADGVTVIENAAREPEIVDLAILLNEMGAKVKGAGTETITITGVEKLHGTTHNVVQDRIEAGTFMVAAAMTGGDVLIRDAVWEHNRPLIAKLLEMGVEVIEEDEGIRVRSQLENLKAVHVKTLPHPGFPTDMQAQFTALMTVAKGESTMVETVFENRFQHLEEMRRMGLHSEIIRDTARIVGGQPLQGAEVLSTDLRASAALILTGLVAQGETVVGKLVHLDRGYYGFHEKLAQLGAKIQRIEANDEDE

SEQ ID NO: 74172 - protein, 345 aa, Streptococcus pneumoniae
MKKKIRWPLYVIAALIVTFLAFVVPLPYYIEVPGGSEDIRQVLKVNDTEDKEAGAYQFVTVGVQHATLAHMIYAWLTPFTDIRSAQETTGGSSDVEFMRINQFYMQTSQNMAKYQGLKTAGKDIELKYFGVYVLNVTDNSTFKGILNISDTVTAVNDQTFDSSKDLIDYVSSQKLGDSVKVTYEEDGQTKSAEGKIITLENGKNGIGIGLIDRTEVISNVPISFSTAGIGGPSAGLMFSLAIYTQIAHPDLRNGRIVAGTGTIDRDGNVGDIGGIDKKVVASARAGAAIFFAPDNPVSEEEQKAHPDAKNNYQTALEAAKTIKTDMKIVPVKTLQDAIDYLKNNP

SEQ ID NO: 74173 - protein, 252 aa, Streptococcus pneumoniae
MCYNISMTIITSKANSVVKNAKKLHQKKYRKSAYLIEGWHLFEEAVQAGVTIEKIFALENYRDQLAAFPQTVWISEDILLDLADSQTPQGIVAVVQKEEVGQADLSQGKFLFLEDVQDPGNVGTIIRTADAAGFTGVIVSDKSADIYSLKTLRSMQGSHFHLPIYRMTSPALLDETKKVAIPVLATTLSKDSVDYRELPSIENFVLVMGNEGQGISPLMAESADQLVHISMKGQAESLNVAVAAGILIFHLS

SEQ ID NO: 74174 - protein, 308 aa, Streptococcus pneumoniae
MKSIKRFALSAMGAAMLLVLTGCVNVDKTTGQPTGFIWNTIGAPMAEAIKYFATDKGLGFGVAIIIVTIIVRLIILPLGIYQSWKATLHSEKMNALKHVLEPHQTRLKEATTQEEKLEAQQALFAAQKEHGISMFGGVGCFPILLQMPFFSAIYFAAQHTEGVAQASYLGIPLGSPSMILVACAGVLYYLQSLLSLHGVEDEMQREQIKKMIYMSPLMIVVFSLFSPASVTLYWVVGGFMMILQQFIVNYIVRPKLRKKVHEELAKNPSKASAFSTPSGRKDVTPEQPTAITSKKKHKNRNAGKQRSR

SEQ ID NO: 74175 - protein, 334 aa, Streptococcus pneumoniae
MSCQKASLRLIYSIFKKMRKNMKISHMKKDELFEGFYLIKSADLRQTRAGKNYLAFTFQDDSGEIDGKLWDAQPHNIEAFTAGKVVHMKGRREVYNNTPQVNQITLRLPQAGEPNDPADFKVKSPVDVKEIRDYMSQMIFKIENPVWQRIVRNLYTKYDKEFYSYPAAKTNHHAFETGLAYHTATMVRLADAISEVYPQLNKSLLYAGIMLHDLAKVIELTGPDQTEYTVRGNLLGHIALIDSEITKTVMELGIDDTKEEVVLLRHVILSHHGLLEYGSPVRPRIMEAEIIHMIDNLDASMMMMSTALALVDKGEMSNKIFAMDNRSFYKPDLD

SEQ ID NO: 74176 - protein, 432 aa, Streptococcus pneumoniae
MVMWSYCIARTGGRMESLLILLLIANLAGLFLIWQRQDRQEKHLSKSLEDQADHLSDQLDYRFDQARQASQLDQKDLEVAVSDRLQEVRIELHQGLTQVRQEMTDNLLQTRDKTDQRLQALQESNEQRLEQMRQTVEEKLEKTLQTRLQASFEIVSKQLESVNRGLGEMQTVARDVGALNKVLSGTKTRGILGELQLGQIIEDIMTPAQYEREYATVENSSERVEYAIKLPGQGDQEYVYLPIDSKFPLADYYRLEEAYETGDKDEIERCRKSLLASVKRFAKDIKSKYIAPPRTTNFGILFVPTEGLYSEIVRNPVFFDDLRREEQIIVAGPSTLSALLNSLSVGFKTLNIQKSADHISKTLASVKTEFGKFGGILVKAQKHLQHASGNIDELLNRRTIAIERTLRHIELSEGEPALDLLHFQENEEEYED

SEQ ID NO: 74177 - protein, 290 aa, Streptococcus pneumoniae
MRIADYSVTKAVLERHGFTFKKSFGQNFLTDTNILQKIVDTAEIDDQVNVIEIGPGIGALTEFLAERAAQVMAFEIDHRLVPILADTLRDFDNVTVVNEDILKVDLAQHIQNFKNPNLPIKVVANLPYYITTPILMHLIESGIPFSEFVVMMQKEVADRISAQPNTKAYGSLSIAVQYYMTAKVAFIVPRTVFVPAPNVDSAILKMVRRPEPAVAVEDENFFFKVSKASFTHRRKTLWNNLTGYFGKTEEVKDKLTKALDQAGLSPSVRGEALSLAEFAGLADALKGQGL

SEQ ID NO: 74178 - protein, 186 aa, Streptococcus pneumoniae
MKERISQVIVVEGRDDTVNLKRYFDVETYETRGSAINDQDIERIQRLHQRHGVIVFTDPDFNGERIRRMIMTAIPTVQHAFLKRDEAVPKSKTKGRSLGIEHASYEDLKTALAQVTEQFEHESQFDISRSDLIRLGFLAGADSRKRREYLGETLRIGYSNGKQLLKRLELFGVTLAEVEEAMKSYE

SEQ ID NO: 74179 - protein, 257 aa, Streptococcus pneumoniae
MIFDTHTHLNVEEFAGREAEEIALAAEMGVTQMNIVGFDKPTIEHALELVDEYEQLYATIGWHPTEAGTYTEEVEAYLLDKLKHSKVVALGEIGLDYHWMTAPKEVQEQVFRRQIQLSKDLDLPFVVHTRDALEDTYEIIKSEGVGPRGGIMHSFSGTLEWAEKFVDLGMTISFSGVVTFKKATDLQEAAKELPLDKMLVETDAPYLAPVPKRGRENKTAYTRYVVDFIADLRGMTTEELAVATTANAERIFGLDSK

SEQ ID NO: 74180 - protein, 221 aa, Streptococcus pneumoniae
MTILGKDTVQQSAKGESVTQEATPEYKLENTPGGDKGGNTGSSDANANEGGGSQAGGSAHTGSQNSAQSQASKQLATEKESAKNAIEKAAKNKQDEIKGAPLSDKEKAELLARVEAEKQAALKEIENAKTMEDVKEAETIGVQAIAMVTVPKRPVAPNAAPKTTSAPQATAGTMQDVTYQSPAGKQLPNTGSASSAALASLGLVVATSGFALLGRKTRRRK

SEQ ID NO: 74181 - protein, 44 aa, Streptococcus pneumoniae
MKRTYQPSKLRRARKHGFRNRMSTKNGRRVLAARRRKGRKVLAA

SEQ ID NO: 74182 - protein, 171 aa, Streptococcus pneumoniae
MLYFYSEKVYNYSKKISGGFIMAQRYQNIMVAIDGSKEADLAFVKGVHSALRNDAKLTIVHVIDTRALQSVSTFDAEVYEELQVDAESLMKEYEKRAKDAGVADVHIVIEMGNPKTLLARTIPDAEEVDLILVGATGLNAFERLLVGSSSEYILRHAKVDLLVVREQEKTL

SEQ ID NO: 74183 - protein, 199 aa, Streptococcus pneumoniae
MKVLVAEDQSMLRDAMCQLLTLQPDVESVLQAKNGQEAIQLLEKESVDIAILDVEMPVKTGLEVLEWIRSEKLETKVVVVTTFKRAGYFERAVKAGVDAYVLKERSIADLMQTLHTVLEGRKEYSPELMEMVMTRPNPLTEQEIAVLKGIARGLSNQEIADQLYLSNGTIRNYVTNILSKLDAGNRTEAANIAKESGWL

SEQ ID NO: 74184 - protein, 365 aa, Streptococcus pneumoniae
MLERLKSIHYMFWISLIFMVFPILTVVTGWLSAWHLLIDILFVVAYLGVLTTKSQRLSWLYWGILLTYVVGNTAFVAVNYIWFFFFLSNLLSYHFSVGGLKSLHVWTFLLAQVLVVGQLLIFQRIEVEFLFYLLVILAFVDLMTFGLVRIRIVEDLKEAQAKQNAQINLLLAENERNRIGQDLHDSLGHTFAMLSVKTDLALQLFQMEAYPQVEKELKEIHQISKDSMNEVRTIVENLKSRTLTSELETVKKMLEIAGIEVETDNQLDTASLTQELESMASMILLELVTNIIKHAKASKAYLKLERTEKELILTVSDDGCGFAFLKGDELHTVRDRVFPFSGEVSVISQKHPTEVQVRLPYKERN

SEQ ID NO: 74185 - protein, 183 aa, Streptococcus pneumoniae
MKGNIMDSFDKGWFVLQTYSGYENKVKENLLQRAQTYNMLDNILRVEIPTQTVQVEKNGKRKEVEENRFPGYVLVEMVMTDEAWFVVRNTPNVTGFVGSHGNRSKPTPLLEQEIRDILVSMGQTVQEFDFDVEIGQTVRIIDGAFADYTGKITEIDNNKVKMIISMFGNDTVAEVNLNQIAEL

SEQ ID NO: 74186 - protein, 359 aa, Streptococcus pneumoniae
MICSDSSYSFHNKNFMIFIRRKSLMVVKVGINGFGRIGRLAFRRIQNVEGVEVTRINDLTDPVMLAHLLKYDTTQGRFDGTVEVKEGGFEVNGKFIKVSAERDPEQIDWATDGVEIVLEATGFFAKKEAAEKHLKGGAKKVVITAPGGNDVKTVVFNTNHDVLDGTETVISGASCTTNCLAPMAKALQDNFGVVEGLMTTIHAYTGDQMILDGPHRGGDLRRARAGAANIVPNSTGAAKAIGLVIPELNGKLDGSAQRVPTPTGSVTELVAVLEKNVTVDEVNAAMKAASNESYGYTEDPIVSSDIVGMSYGSLFDATQTKVLDVDGKQLVKVVSWYDNEMSYTAQLVRTLEYFAKIAK

SEQ ID NO: 74187 - protein, 890 aa, Streptococcus pneumoniae
MKAMEENMADKKTVTPEEKKLVAEKHVDELVQKALVALEEMRKLNQEQVDYIVAKASVAALDAHGELALHAFEETGRGVFEDKATKNLFACEHVVNNMRHTKTVGVIEEDDVTGLTLIAEPVGVVCGITPTTNPTSTAIFKSLISLKTRNPIVFAFHPSAQESSAHAARIVRDAAIAAGAPENCVQWITQPSMEATSALMNHEGVATILATGGNAMVKAAYSCGKPALGVGAGNVPAYVEKSANIRQAAHDIVMSKSFDNGMVCASEQAVIIDKEIYDEFVAEFKSYHTYFVNKKEKALLEEFCFGVKANSKNCAGAKLNADIVGKPATWIAEQAGFTVPEGTNILAAECKEVGENEPLTREKLSPVIAVLKSESREDGITKARQMVEFNGLGHSAAIHTADEELTKEFGKAVKAIRVICNSPSTFGGIGDVYNAFLPSLTLGCGSYGRNSVGDNVSAINLLNIKKVGRRRNNMQWMKLPSKTYFERDSIQYLQKCRDVERVMIVTDHAMVELGFLDRIIEQLDLRRNKVVYQIFADVEPDPDITTVNRGTEIMRAFKPDTIIALGGGSPMDAAKVMWLFYEQPEVDFRDLVQKFMDIRKRAFKFPLLGKKTKFIAIPTTSGTGSEVTPFAVISDKANNRKYPIADYSLTPTVAIVDPALVLTVPGFVAADTGMDVLTHATEAYVSQMASDYTDGLALQAIKLVFENLESSVKNADFHSREKMHNASTIAGMAFANAFLGISHSMAHKIGAQFHTIHGRTNAILLPYVIRYNGTRPAKTATWPKYNYYRADEKYQDIARMLGLPASTPEEGVESYAKAVYELGERIGIQMNFRDQGIDEKEWKEHSRELAFLAYEDQCSPANPRLPMVDHMQEIIEDAYYGYKERPGRRK

SEQ ID NO: 74188 - protein, 142 aa, Streptococcus pneumoniae
MKKLVFVCLGNICRSPMAEFVMKSMTDNYEIQSRATSSWEHGNPIHKGTQGIFQQYEIPYDKNKTSLQISKEDFEAFDYIIGMDASNISDLRQMCPVDCQDKIYSFSSESVPDPWYTGDFEETYRRVQEGCQAWLERLEKES

SEQ ID NO: 74189 - protein, 658 aa, Streptococcus pneumoniae
MSNLSVNAIRFLGIDAINKANSGHPGVVMGAAPMAYSLFTKQLHINPAQPNWINRDRFILSAGHGSMLLYALLHLSGFEDVSMDEIKSFRQWGSKTPGHPEFGHTAGIDATTGPLGQGISTATGFAQAERFLAAKYNREGYNIFDHYTYVICGDGDLMEGVSSEAASYAGLQKLDKLVVLYDSNDINLDGETKDSFTESVRDRYNAYGWHTALVENGTDLEAIHAAIETAKASGKPSLIEVKTVIGYGSPNKQGTNAVHGAPLGADETASTRQALGWDYEPFEIPEQVYADFKEHVADRGASAYQAWTKLVADYKEAHPELAAEVEAIIDGRDPVEVTPADFPALENGFSQATRNSSQDALNVVAAKLPTFLGGSADLAHSNMTYIKTDGLQDDANRLNRNIQFGVREFAMGTILNGMALHGGLRVYGGTFFVFSDYVKAAVRLSALQGLPVTYVFTHDSIAVGEDGPTHEPVEHLAGLRAMPNLNVFRPADARETQAAWYLAVTSEKTPTALVLTRQNLTVEDGTDFDKVAKGAYVVYENAADFDTILIATGSEVNLAVSAAKELASQGEKIRVVSMPSTDVFDKQDAAYKEEILPNAVRRRVAVEMGASQNWYKYVGLDGAVLGIDTFGASAPAPKVLAEYGFTVENLVKIVRNLK

SEQ ID NO: 74190 - protein, 234 aa, Streptococcus pneumoniae
MNQVINAMRKRVCDANQSLPKHGLVKFTWGNVSEVNRELGVIVIKPSGVDYDELTPENMVVTDLDGKILEGDLRPSSDLPTHVQLYKAWSEIGSVVHTHSTEAVGWAQAGRDIPFYGTTHADYFYGSIPCARSLTKDEVEVAYEKDTGLVIVEEFEHRGLNPVEVPGIVVRNHGPFTWGKNPENAVYHSVVLEEVSKMNRFTEQINPRVGPAPQYILEKHYQRKHGPNAYYGQK

SEQ ID NO: 74191 - protein, 276 aa, Streptococcus pneumoniae
MGVKKKLKLTSLLGLSLLIMTACATNGVTSDITAESADFWSKLVYFFAEIIRFLSFDISIGVGIILFTVLIRTVLLPVFQVQMVASRKMQEAQPRIKALREQYPGRDMESRTKLEQEMRKVFKEMGVRQSDSLWPILIQMPVILALFQALSRVDFLKTGHFLWINLGSVDTTLVLPILAAVFTFLSTWLSNKALSERNGATTAMMYGIPVLIFIFAVYAPGGVALYWTVSNAYQVLQTYFLNNPFKIIAEREAVVQAQKDLENRKRKAKKKAQKTK

SEQ ID NO: 74192 - protein, 123 aa, Streptococcus pneumoniae
MKKNFRVKREKDFKAIFKEGTSFANRKFVVYQLENQKNHFRVGLSVSKKLGNAVTRNQIKRRIRHIIQNAKGSLVEDVDFVVIARKGVETLGYAEMEKNLLHVLKLSKIYREGNGSEKETKVD

SEQ ID NO: 74193 - protein, 317 aa, Streptococcus pneumoniae
MDFEKIEQAYTYLLENVQVIQSDLATNFYDALVEQNSIYLDGETELNQVKENNQTLKRLALRKEEWLKTYQFLLMKAGQTEPLQANHQFTPDAIALLLVFIVEELFKEEEITILEMGSGMGILGAIFLTSLTKKVDYLGMEVDDLLIDLAASMADVIGLQAGFVQGDAVRPQMLKESDVVISDLPVGYYPDDAVASRHQVASSQEHTYAHHLLMEQGLKYLKSDGYAIFLAPSDLLTSPQSDLLKEWLKEEASLVAMISLPENLFANAKQSKTIFILQKKNEIAVEPFVYPLASLQDASVLMKFKENFQKWTQGTEI

SEQ ID NO: 74194 - protein, 352 aa, Streptococcus pneumoniae
MKAYTYVKPGLASFVDVDKPVIRKPTDAIVRIVKTTICGTDLHIIKGDVPTCQSGTILGHEGIGIVEEVGEGVSNFKKGDKVLISCVCACGKCYYCKKGIYAHCEDEGGWIFGHLIDGMQAEYLRVPHADNTLYHTPEDLSDEALVMLSDILPTGYEIGVLKGKVEPGCSVAIIGSGPVGLAALLTAQFYSPAKLIMVDLDDNRLETALSFGATHKVNSSDPEKAIKEIYDLTDGRGVDVAIEAVGIPATFDFCQKIIGVDGTVANCGVHGKPVEFDLDKLWIRNINVTTGLVSTNTTPQLLKALESHKIEPEKLVTHYFKLSEIEKAYEVFSKAADHHAIKVIIENDISEA

SEQ ID NO: 74195 - protein, 383 aa, Streptococcus pneumoniae
MPNYIKADQFFYPHGVRRGGYLELVDGKFGKHVEQIPEGAEVIDYTGYSIAPGLVDTHIHGYAGVDVMDNNIEGTLHTMSEGLLSTGVTSFLPTTLTATYEQLLAVTENLGNHYKEATGAKIRGIYYEGPYFTETFKGAQNPTYMRDPGVEEFHSWQKAANGLLNKIALAPERDGVEDFVRTVTGEGVTVALGHSNATFDEAKKAVDAGASVWVHAYNGMRGLTHRELGMVGAMYQLPHTYAELICDGHHVDPKACEILIKQKGTENIALITDCMTAGGLEDGDYMLGEFPVVVANGTARLKSTGNLAGSILKLKDGLKNVVEWGIANPHEAVMMASFNPAKSVHIDDVCGQIREGYDADFIVLDKDLELVATYLDGVKRYQA

SEQ ID NO: 74196 - protein, 605 aa, Streptococcus pneumoniae
MRIKWFSLIRIIGLLLVLLYHFFQTIFPGGFFGVDVFFTFSGFLITALLIEEFSKNNEIDLIGFFRRRFYRIVPPVVLMVLVTMPFTFLVRQDYVAGIGGQIAGVLGFMTNFYELLTGGSYESQFIPHLFVHNWSLAVEVHYYILWGLAVWFLSKQAKSNGQLKGMVFLLSAVAFLISFFSMFIGSFLVTSYSSVYFSSLTHVYPFFLGSMLATIVGVRQTTSLVKQLDKIWDLRKTLVVFGGGFGFLVLLTFFVKFTYLFAYLIGFLLASLAALAMILAARVLHEKTHHIQESKIISFLADTSYAVYLFHWPFYIIFSQLTSNLLAVLLTLICSYGFASLSFYVLEPWIAGKNTPIVQTLRPLPYIHAILAAGTGILTIIVCTVTLLAPQVGAFETDLTVNGLKQAATNIGQTKVMAERADANSLGIADGTMLIGDSVALRANTALQTALPGAQINAQVSVTTKTANEIMLNNSQNKFLPKTVVIATGVNNPENYKDDWDSIVKNLPKGHHMILVTPYEGDKTKETYAIVEKAAAYMRELAEKTPYITIADWNQVAKEHPEIWAGTDQVHFGSESSTIEAGAKLYADTIATALQTAQDKPVKSK

SEQ ID NO: 74197 - protein, 380 aa, Streptococcus pneumoniae
MSDSPIKYRLIKKEKHTGARLGEIITPHGTFPTPMFMPVGTQATVKTQSPEELKEMGSGIILSNTYHLWLRPGDELIARAGGLHKFMNWDQPILTDSGGFQVYSLADSRNITEEGVTFKNHLNGSKMFLSPEKAISIQNNLGSDIMMSFDECPQFYQPYDYVKKSIERTSRWAERGLKAHRRPHDQGLFGIVQGAGFEDLRRQSAHDLVSMDFSGYSIGGLAVGETHEEMNAVLDFTTQLLPENKPRYLMGVGAPDSLIDGVIRGVDMFDCVLPTRIARNGTCMTSQGRLVVKNAQFAEDFTPLDPECDCYTCNNYTRAYLRHLLKADETFGIRLTSYHNLYFLLNLMKQVRQAIMDDNLLEFREYFVEKYGYNKSGRNF

SEQ ID NO: 74198 - protein, 494 aa, Streptococcus pneumoniae
MTLVYQSTRDANNTVTASQAILQGLATDGGLFTPVTYPKVDLNFNKLKDASYQEVAKLVLSAFLDDFTAEELDYCINNAYDSKFDTPAIAPLVKLDGQYNLELFHGSTIAFKDMALSILPYFMTTAAKKHGLENKIVILTATSGDTGKAAMAGFADVPGTEIIVFYPKDGVSKIQELQMTTQTGDNTHVIAIDGNFDDAQTNVKHMFNDVALREKLTTNKLQFSSANSMNIGRLVPQIVYYVYAYAQLVKTGEIVAGDKINFTVPTGNFGNILAAFYAKQIGLPVGKLICASNDNNVLTDFFKTRVYDKKREFKVTTSPSMDILVSSNLERLIFHLLGNDAVKTAELMNALNSQGQYELTNFDAEILDLFAAEYATEEETAAEIKRVYESDSYIEDPHTAVASAVYRKYQATTGDATKTVIASTASPYKFPVVAVEALTGKVGLTDFEALAQLHEISGVAVPPAVDGLETAPVRHKTIVAAADMQVAVEAYLGL

SEQ ID NO: 74199 - protein, 486 aa, Streptococcus pneumoniae
MSKDIRVRYAPSPTGLLHIGNARTALFNYLYARHHGGTFLIRIEDTDRKRHVEDGERSQLENLRWLGMDWDESPESHENYRQSERLDLYQKYIDQLLAEGKAYKSYVTEEELAAERERQEVAGETPRYINEYLGMSEEEKAAYIAEREAAGIIPTVRLAVNESGIYKWHDMVKGDIEFEGGNIGGDWIIQKKDGYPTYNFAVAIDDHDMQISHVIRGDDHIANTPKQLMVYEALGWEAPEFGHMTLIINSETGKKLSKRDTNTLQFIEDYRKKGYLPEAVFNFIALLGWNPGGEDEIFSREELIKLFDENRLSKSPAAFDQKKLDWMSNDYIKNADLETIFEMAKPFLEEAGRLTDKAEKLVELYKPQMKSVDEIIPLTDLFFSDFPELTEAEREVMTGETVPTVLEAFKAKLEAMTDDKFVTENIFPQIKAVQKETGIKGKNLFMPIRIAVSGEMHGPELPDTIFLLGREKSIQHIENMLKEISK

SEQ ID NO: 74200 - protein, 449 aa, Streptococcus pneumoniae
MSHIKFDYSKVLDKFVAPHEVEYMQSQVTAADELIRKGTGAGSDFLGWLDLPEKYDREEFDRILKAAEQIKSDSDVLVVIGIGGSYLGAKAAIDFLNHHFANLQTKEERKAPQILYAGNSISSTYLADLVEYVADKDFSVNVISKSGTTTEPAIAFRVFKELLVKKYGQEEANKRIYATTDRQKGAVKVEADANGWGTFVVPDDIGGRFSVLTAVGLLPIAASGADIKALMEGANAARKDYTSDKISENEAYQYAAVRNILYRKGYATEILVNYEPSLQYFSEWWKQLAGESEGKDQKGIYPTSANFSTDLHSLGQFIQEGTRIMFETVVRVDKPRKNVLIPTLEEDLDGLGYLQGKDVDFVNKKATDGVLLAHTDGDVPNMYVTLPEQDAFTLGYTIYFFELAIALSGYLNAINPFDQPGVEAYKRNMFALLGKPGFEELSKELNARL

SEQ ID NO: 74201 - protein, 857 aa, Streptococcus pneumoniae
MLSRLIFEKERQKMAIEKLSPGMQQYVDIKKQYPDAFLLFRMGDFYELFYEDAVNAAQILEISLTSRNKNADNPIPMAGVPYHSAQQYIDVLIEQGYKVAIAEQMEDPKQAVGVVKREVVQVITPGTVVDSSKPDSQNNFLVSIDREGNQFGLAYMDLVTGDFYVTGLLDFTLVCGEIRNLKAREVVLGYDLSEEEEQILSRQMNLVLSYEKESFEDLHLLDLRLATVEQTASSKLLQYVHRTQMRELNHLKPVIRYEIKDFLQMDYATKASLDLVENARSGKKQGSLFWLLDETKTAMGMRLLRSWIHRPLIDKERIVQRQEVVQVFLDHFFERSDLTDSLKGVYDIERLASRVSFGKTNPKDLLQLATTLSSVPRIRAILEGMEQPTLAYLIAQLDAIPELESLISAAIAPEAPHVITDGGIIRTGFDETLDKYRCVLREGTSWIAEIEAKERENSGISTLKIDYNKKDGYYFHVTNSQLGNVPAHFFRKATLKNSERFGTEELARIEGDMLEAREKSANLEYEIFMRIREEVGKYIQRLQALAQGIATVDVLQSLAVVAETQHLIRPEFGDDSQIDIRKGRHAVVEKVMGAQTYIPNTIQMAEDTSIQLVTGPNMSGKSTYMRQLAMTAVMAQLGSYVPAESAHLPIFDAIFTRIGAADDLVSGQSTFMVEMMEANNAISHATKNSLILFDELGRGTATYDGMALAQSIIEYIHEHIGAKTLFATHYHELTSLESSLQHLVNVHVATLEQDGQVTFLHKIEPGPADKSYGIHVAKIAGLPADLLARADKILTQLENQGTESPPPMRQTSAVTEQISLFDRAEEHPILAELAKLDVYNMTPMQVMNVLVELKQKL

SEQ ID NO: 74202 - protein, 563 aa, Streptococcus pneumoniae
MNTKELIASELSSIIDSLDQEAILKLLETPKNSEMGDIAFPAFSLAKVERKAPQMIAAELAEKMNSQAFEKVVATGPYVNFFLDKSAISAQVLQAVTTEKEHYADQNIGKQENVVIDMSSPNIAKPFSIGHLRSTVIGDSLSHIFQKIGYQTVKVNHLGDWGKQFGMLIVAYKKWGDEEAVKAHPIDELLKLYVRINAEAENDPSLDEEAREWFRKLENGDEEALALWQWFRDESLVEFNRLYNELKVEFDSYNGEAFYNDKMDAVVDILSEKGLLLESEGAQVVNLEKYGIEHPALIKKSDGATLYITRDLAAALYRKNEYQFAKSIYVVGQEQSAHFKQLKAVLQEMGYDWSDDITHVPFGLVTKEGKKLSTRKGNVILLEPTVAEAVSRAKVQIEAKNPELENKDQVAHAVGVGAIKFYDLKTDRTNGYDFDLEAMVSFEGETGPYVQYAYARIQSILRKADFKPETAGNYSLNDTESWEIIKLIQDFPRIINRAADNFEPSIIAKFAISLAQSFNKYYAHTRILDESPERDSRLALSYATAVVLKEALRLLGVEAPEKM

SEQ ID NO: 74203 - protein, 250 aa, Streptococcus pneumoniae
MGTFSVRHLDLFYGDFQALKNISIQLPERQITALIGPSGCGKSTFLKTLNRMNDLVPSCHIEGQVLLDEQDIYSSKFNLNQLRKRVGMVFQQPNPFAMSIYDNVAYGPRTHGIRDKKQLDALVEKSLKGAAIWEEVKDDLKKSAMSLSGGQQQRLCIARALAVEPDILLMDEPTSALDPISTLKIEDLIQQLKKDYTIIIVTHNMQQASRISDKTAFFLTGEICEFGDTVDVFTNPKDQRTEDYISGRFG

SEQ ID NO: 74204 - protein, 338 aa, Streptococcus pneumoniae
MEKQTVAVLGPGSWGTALSQVLNDNGHEVRIWGNLPEQINEINTHHTNKHYFKDVVLDENIIAYTDLAETLKNVDAILFVVPTKVTRLVAQQVAQTLDHKVIIMHASKGLEPDSHKRLSTILEEEIPEHLRSDIVVVSGPSHAEETIVRDLTLITAASKDLQTAQYVQELFSNHYFRLYTNTDVIGVETAGALKNIIAVGAGALHGLGFGDNAKAAIIARGLAEITRLGVALGASPLTYSGLSGVGDLIVTGTSIHSRNWRAGDALGRGESLADIEANMGMVIEGISTTRAAYELAQELGVYMPITQAIYQVIYHGTNIKDAIYDIMNNEFKAENEWS

SEQ ID NO: 74205 - protein, 299 aa, Streptococcus pneumoniae
MTSKVRKAVIPAAGLGTRFLPATKALAKEMLPIVDKPTIQFIVEEALKSGIEDILVVTGKSKRSIEDHFDSNFELEYNLKEKGKTDLLKLVDETTGMRLHFIRQTHPRGLGDAVLQAKAFVGNEPFVVMLGDDLMDITDEKAVPLTKQLMDDYKRTHASTIAVMPVPHDEVSAYGVIAPQGEGKDGLYSVETFVEKPAPEDAPSDLAIIGRYLLTPEIFQILENQAPGAGNEIQLTDAIDTLNKTQRVFAREFTGARYDVGDKFGFMKTSIDYALKHPQVKDDLKNYLIQLGKELTEKE

SEQ ID NO: 74206 - protein, 181 aa, Streptococcus pneumoniae
MSMKSELRKQVLHEMKAISQEQKQAIDQALTERLLHHPFYQEAKVIATYLSFSHEFQTRELIEQALKDGKKVLIPKTYPKGRMEFVAYDPQQLVKTSFALLEPQGDVEVVDASQIDLIHVPGLAFTTKGYRIGYGGGYYDRYLEHFSGRTLSTIYPCQIQDFIPENHDIPVQEVLIDEGNL

SEQ ID NO: 74207 - protein, 232 aa, Streptococcus pneumoniae
MTATKMNAQEIIQFIANAEKKTSVKVTFEGQLATAVPSSVVKLGNVLFGDWKDVAPLLEGLVENQDYVVEQDARNSAVPLLDKRAINARIEPGAIIRDQVEIGDNAVIMMGAVINIGAEIGAGTMIDMGAILGGRAIVGKNSHVGAGAVLAGVIEPASAEPVRVGDNVLIGANAVVIEGVQIGSGSVVAAGAIVTQDVPENVVVAGVPARIIKEIDAQTQQKTALEDALRTL

SEQ ID NO: 74208 - protein, 418 aa, Streptococcus pneumoniae
MHIFDELKERGLIFQTTDEEALRKALEEGQVSYYTGYDPTADSLHLGHLVAILTSRRLQLAGHKPYALVGGATGLIGDPSFKDAERSLQTKDTVDGWVKSIQGQLSRFLDFENGENKAVMVNNYDWFGSISFIDFLRDIGKYFTVNYMMSKESVKKRIETGISYTEFAYQIMQGYDFFVLNQDHNVTLQIGGSDQWGNMTAGTELLRRKADKTGHVITVPLITDATGKKFGKSEGNAVWLNPEKTSPYEMYQFWMNVMDADAVRFLKIFTFLSLDEIEDIRKQFEAAPHERLAQKVLAREVVTLVHGEEAYKEALNITEQLFAGNIKNLSVKELKQGLRGVPNYQVQADENNNIVELLVSSGIVNSKRQAREDVQNGAIYVNGDRIQELDYVLSDADKLENELTVIRRGKKKYFVLTY

SEQ ID NO: 74209 - protein, 423 aa, Streptococcus pneumoniae
MSSKFMKSTAVLGTVTLASLLLVACGSKTADKPADSGSSEVKELTVYVDEGYKSYIEEVAKAYEKEAGVKVTLKTGDALGGLDKLSLDNQSGNVPDVMMAPYDRVGSLGSDGQLSEVKLSDGAKTDDTTKSLVTAANGKVYGAPAVIESLVMYYNKDLVKDAPKTFADLENLAKDSKYAFAGEDGKTTAFLADWTNFYYTYGLLAGNGAYVFGQNGKDAKDIGLANDGSIAGINYAKSWYEKWPKGMQDTEGAGNLIQTQFQEGKTAAIIDGPWKAQAFKDAKVNYGVATIPTLPNGKEYAAFGGGKAWVIPQAVKNLEASQKFVDFLVATEQQKVLYDKTNEIPANTEARSYAEGKNDELTTAVIKQFKNTQPLPNISQMSAVWDPAKNMLFDAVSGQKDAKTAANDAVTLIKETIKQKFGE

SEQ ID NO: 74210 - protein, 328 aa, Streptococcus pneumoniae
MPVTIKDVAKAAGVSPSTVTRVIQNKSTISDETKKRVRKAMKELNYHPNLNARSLVSSYTQVIGLVLPDDSDAFYQNPFFPSVLRGISQVASENHYAIQIATGKDEKERLNAISQMVYGKRVDGLIFLYAQEEDPLVKLVAEEQFPFLILGKSLSPFIPLVDNDNVQAGFDATEYFIKKGCKRIAFIGGSKKLFVTKDRLTGYEQALKHYKLTTDNNRIYFADEFLEEKGYKFSKRLFKHDPQIDAIITTDSLLAEGVCNYIAKHQLDVPVLSFDSVNPKLNLAAYVDINSLELGRVSLETILQIINDNKNNKQICYRQLIAHKIIEK

SEQ ID NO: 74211 - protein, 587 aa, Streptococcus pneumoniae
MKRSMYAGRVREEHIGQEITLKGWVGRRRDLGGLIFIDLRDREGIMQLVINPEKVSAEVMATAESLRSEFVIEVTGQVAAREQANDKLPTGAVELNVTALIVLNTAKTTPFEIKDGIEANDDTRLRYRYLDLRRPEMLENLKLRAKVTHSIRNYLDELEFIDVETPFLSKSTPEGARDYLVPSRVNKGHFYALPQSPQITKQLLMNAGFDRYYQIVKCFRDEDLRGDRQPEFTQVDLETSFLTEQEIQDITEGLIARVMKETKDIEVTLPFPRMKYDDAMALYGSDKPDTRFDMLLQDLTEVVKGVDFKVFSEALAVKAIVVKGAADNYSRKDIDKMTEVAKQYGAKGLAWVKVVDGELNGPVAKFLTGIQEELTTALALEDKDLVLFVADTLEVANATLGALRGRIAKELGLIDNDKFNFLWVVDWPMFEWSEEEGRYMSAHHPFTLPQEETAHELEGDLAKVRAIAYDIVLNGYELGGGSLRINQKDLQERMFKALGFSAEEANDQFGFLLEAMDYGFPPHGGLAIGLDRFVMLLAGEENIREVIAFPKNNKATDPMTQAPSTVALKQLEELSLQVEEDETSKTN

SEQ ID NO: 74212 - protein, 429 aa, Streptococcus pneumoniae
MKLQKPKGTQDILPAESAKWQYVEGFAREIFKRYNYAEVRTPIFEHYEVISRSVGDTTDIVTKEMYDFYDKGDRHITLRPEGTAPVVRSYVENKLFAPEVQKPSKFYYMGPMFRYERPQAGRLRQFHQIGVECFGSSNPATDVETIAMAAHFLKEIGIQGVKLHLNTLGNPESRAAYRQALIDYLTPLKETLSKDSQRRLEENPLRVLDSKEKEDKVAVENAPSILDFLDEESQTHFDAVRQMLENLGVDYIIDTNMVRGLDYYNHTIFEFITEIEGNDLTVCAGGRYDGLVAYFGGPETAGFGFGLGVERLLLILEKQGVALPIENALDVYIAVLGDGANVKALELVQALRQQGFKAERDYLNRKLKAQFKSADVFAAKTLITLGESEVESGQVTVKNNQTREEVQVSLETISQNFSEIFEKLGFYTQ

SEQ ID NO: 74213 - protein, 567 aa, Streptococcus pneumoniae
MTELDKRHRSSIYDSMVKSPNRAMLRATGMTDKDFETSIVGVISTWAENTPCNIHLHDFGKLAKEGVKSAGAWPVQFGTITVADGIAMGTPGMRFSLTSRDIIADSIEAAMSGHNVDAFVAIGGCDKNMPGSMIAIANMDIPAIFAYGGTIAPGNLDGKDIDLVSVFEGIGKWNHGDMTAEDVKRLECNACPGPGGCGGMYTANTMATAIEVLGMSLPGSSSHPAESADKKEDIEAAGRAVVKMLELGLKPSDILTREAFEDAITVTMALGGSTNATLHLLAIAHAANVDLSLEDFNTIQERVPHLADLKPSGQYVFQDLYEVGGVPAVMKYLLANGFLHGDRITCTGKTVAENLADFADLTPGQKVIMPLENPKRADGPLIILNGNLAPDGAVAKVSGVKVRRHVGPAKVFDSEEDAIQAVLTDEIVDGDVVVVRFVGPKGGPGMPEMLSLSSMIVGKGQGDKVALLTDGRFSGGTYGLVVGHIAPEAQDGGPIAYLRTGDIVTVDQDTKEISMAVSEEELEKRKAETTLPPLYSRGVLGKYAHIVSSASRGAVTDFWNMDKSGKK

SEQ ID NO: 74214 - protein, 448 aa, Streptococcus pneumoniae
MMKFILDIVSTPAILVALIAILGLVLQKKKLPDIIKGGIKTFVGFLVVSGGAGIVQNSLNPFGTMFEHAFHLSGVVPNNEAIVAVALTTYGSATAMIMFAGMVFNILIARFTRFKYIFLTGHHTLYMACMIAVILSVAGFTSLPLILLGGLALGIIMSISPAFVQKYMVQLTGNDKVALGHFSSLGYWLSGFTGSLIGDKSKSTEDIKFPKSLAFLRDSTVSITLSMAVIYIIVAIFAGSEYIEKEISSGTSGLVYALQLAGQFAAGVFVILAGVRLILGEIVPAFKGISERLVPNSKPALDCPIVYTYAPNAVLIGFISSFIGGLVSMAIMIASGTVVILPGVVPHFFCGATAGVIGNASGGVRGATIGAFLQGILISFLPVFLMPVLGGLGFQGSTFSDADFGLSGIILGMLNQFGSQAGIVIGLVLILAVMFGVSFIKKPSAKEE

SEQ ID NO: 74215 - protein, 676 aa, Streptococcus pneumoniae
MFDYRALVILMTLMDHCELSLYELSVKVSLPIKEVKEGIDYLVPYLANKGIVLDKKQGRYSLSNRTKQSLTDIIKSDELVLPKSTRLALIYLYTFCRLDFISNNHYQDFLKVSKNTTLSDIQSLRKIMLDNDLELGYSRAKGYTLHGSEWNKHRLAFQMVSELLESSIGIWDLDYVLSSWGYSLTYDLINQVVKDYYEKLQLVPIVNQLKVCLFGLVFILCRYQRDVERVCLSETLVSPVIQDITTILLDTVVDLGIIDTVFSEDDYRYITVLLSSCFEGEVDVAPVYFNQLTEAIISRMEDISLLHFKQREGLRENLRRHLIPAYYRLKFGLPSSNEYVLHVKEHYPDLFELVKDSLMPLMDAIDNPIPDSETAYFVIHFGGYLKKADTLPQKCYKAAIICPNGVSSSLMLKENLLALFPQIEFIATSKIDDLQVKASSDYDMVFSTIKVETEKPNYLVSVMMTEEQAIQLVELVLKDFPNLEYGDFEIEQILNIVKRYGIITQELELRLALKNYLYQKNDRKEIVPVLEQLITKETYQVSSQKLGWKEAIRLAAKPLLDQDKITENYPEAMIQKVEEFGPFINLGKGVAIPHARPDEGVNEIGMSMLVLEEPIYLLDNPEQEVRLLICIAAIDNESHLKALSHLTTILRDKNHVQTLISSKNYDDIKMIIKQED

SEQ ID NO: 74216 - protein, 49 aa, Streptococcus pneumoniae
MRVNITLEHKESGERLYLTSKNKRNTPDRLQLKKYSPKLRKHVVFTEVK

SEQ ID NO: 74217 - protein, 338 aa, Streptococcus pneumoniae
MTNSVFQGRSFLAEKDFTRAELEYLIGLSAHLKDLKKRNIQHHYLAGKNIALLFEKTSTRTRAAFTTAAIDLGAHPEYLGANDIQLGKKESTEDTAKVLGRMFDGIEFRGFSQRMVEELAEFSGVPVWNGLTDEWHPTQMLADYLTVQENFGRLEGLTLVYCGDGRNNVANSLLVTGAILGVNVHIFSPKELFPEKEIVELAEGFAKESGAHVLITEDADEAVKDADVLYTDVWVSMGEEDKFAERVALLKPYQVNMDLVKKAGNENLIFLHCLPAFHDTHTVYGKDVAEKFGVEEMEVTDEVFRSKYARHFDQAENRMHTIKAVMAATLGNLYIPKV

SEQ ID NO: 74218 - protein, 315 aa, Streptococcus pneumoniae
MANRKIVVALGGNAILSSDPSAKAQQEALVETAKHLVKLIKNGDDLIITHGNGPQVGNLLLQHLASDSEKNPAFPLDSLVAMTEGSIGFWLKNALQNALLDEGIEKNVASVVTQVVVDKNDPAFVNLSKPIGPFYSEEEAKAEAEKSGATFKEDAGRGWRKVVASPKPVDIKEIETIRTLLNNGQVVVAAGGGGIPVVKENNGHLTGVEAVIDKDFASQRLAELVDADLFIVLTGVDYVFVNYNKPNQEKLEHVNVAQLEEYIKQDQFAPGSMLPKVEAAIAFVNGRPEGKAVITSLENLGALIESESGTIIEKG

SEQ ID NO: 74219 - protein, 503 aa, Streptococcus pneumoniae
MSEKAKKGFKMPSSYTVLLIIIAIMAVLTWFIPAGAFIEGIYETQPQNPQGIWDVLMAPIRAMLGTHPEEGSLIKETSAAIDVAFFILMVGGFLGIVNKTGALDVGIASIVKKYKGREKMLILVLMPLFALGGTTYGMGEETMAFYPLLVPVMMAVGFDSLTGVAIILLGSQIGCLASTLNPFATGIASATAGVGTGDGIVLRLIFWVTLTALSTWFVYRYADKIQKDPTKSLVYSTRKEDLKHFNVEESSSVESTLSSKQKSVLFLFVLTFILMVLSFIPWTDLGVTIFDDFNAWLTGLPVIGNIVGSSTSALGTWYFPEGAMLFAFMGILIGVIYGLKEDKIISSFMNGAADLLSVALIVAIARGIQVIMNDGMITDTILNWGKEGLSGLSSQVFIVVTYIFYLPMSFLIPSSSGLASATMGIMAPLGEFVNVRPSLIITAYQSASGVLNLIAPTSGIVMGALALGRINIGTWWKFMGKLVVAIIVVTIALLLLGTFLPFL

SEQ ID NO: 74220 - protein, 299 aa, Streptococcus pneumoniae
MAIFFMIFLIVCVLLLVIVTLSTVYVVRQQSVAIIERFGKYQKVANSGIHIRLPFGIDSIAARIQLRLLQSDIVVETKTKDNVFVMMNVATQYRVNEQSVTDAYYKLIRPESQIKSYIEDALRSSVPKLTLDELFEKKDEIALEVQHQVAEEMTTYGYIIVKTLITKVEPDAEVKQSMNEINAAQRKRVAAQELAEADKIKIVTAAEAEAEKDRLHGVGIAQQRKAIVDGLAESITELKEANVGMTEEQIMSILLTNQYLDTLNTFASKGNQTIFLPNTPNGVDDIRTQILSALRAEKK

SEQ ID NO: 74221 - protein, 146 aa, Streptococcus pneumoniae
MLKHIPKNISPDLLKTLMEMGHGDEIVLADANYPSASCANKLIRCDGVNIPELLDSILYLMPLDSYVDSSIQFMNVVSGDDIPKIWGTYRQMIEGHGTDLKTITYLRREDFYERSKKAYAIVATGETSLYANIILKKGVVVERENV

SEQ ID NO: 74222 - protein, 488 aa, Streptococcus pneumoniae
MGQEHTYGDLKADSDSLAAVIDQLGLPEKSPVVVFGGQEYEMLATFVALTKSGHAYIPIDSHSALERVSAILEVAEPSLIIAISAFPLEQVSTPMINLAQVQEAFAQGNNYEITHPVKGDDNYYIIFTSGTTGKPKGVQISHDNLLSFTNWMITDKEFATPSRPQMLAQPPYSFDLSVMYWAPTLALGGTLFTLPSVITQDFKQLFAAIFSLPIAIWTSTPSFADMAMLSEYFNSEKMPGITHFYFDGEELTVKTAQKLRERFPNARIINAYGPTEATVALSAVAVTDEMLATLKRLPIGYTKADSPTFIIDEEGNKLPNGEQGEIIVSGPAVSKGYMNNPEKTAEAFFEFEDLPAYHTGDVGTMTDEGLLLYGGRMDFQIKFNGYRIELEDVSQNLNKSRFIESAVAVPRYNKDHKVQNLLAYVILKDGVREQFERDIDITKAIKEDLTDIMMSYMMPSKFLYRDSLPLTPNGKIDIKGLINEVNKR

SEQ ID NO: 74223 - protein, 330 aa, Streptococcus pneumoniae
MSPICEPHFSDTSYGFRPNRSCEKAIMKLLEYLNDGYEWIVDIDLEKFFDTVPQDRLMSLVHNIIEDGDTESLIRKYLHSGVIINGQRYKTLVGTPQGGNLSPLLSNIMLNELDKELEKRGLRFVRYADDCVITVVSEAAAKRMMYSVSRFIEKRLGLKVNMTKTKITRPRELKYLGFGFWKSSDGWKSRPHQDSVRRFKLKLKKLTQRKWSIDLTRRIEQLNLSIRGWINYFSLGNMKSIVASIDERLRTRLRVIIWKQWKKKSRRLWGLLKLGVPKWIADKVSGWGDHYQLVAQKSVLKRAISKPVLEKRGLVSCLDYYLERHALKVS

SEQ ID NO: 74224 - protein, 234 aa, Streptococcus pneumoniae
MMNELFGEFLGTLILILLGNGVVAGVVLPKTKSNSSGWIVITMGWGIAVAVAVFVSGKLSPAHLNPAVTIGVALKGGLPWASVLPYILAQFAGAMLGQILVWLQFKPHYEAEENAGNILATFSTGPAIKDTVSNLISEILGTFVLVLTIFALGLYDFQAGIGTFAVGTLIVGIGLSLGGTTGYALNPARDLGPRIMHSILPIPNKGDGDWSYAWIPVVGPVIGAALAVLVFSLF

SEQ ID NO: 74225 - protein, 502 aa, Streptococcus pneumoniae
MSQEKYIMAIDQGTTSSRAIIFNKKGEKVSSSQKEFTQIFPQAGWVEHNANEIWNSVQSVIAGAFIESGVKPNQIEAIGITNQRETTVVWDKKTGLPIYNAIVWQSRQTAPLAEQLKSQGYVEKFHEKTGLIIDAYFSATKVRWILDHVEGAQERAEKGELLFGTIDTWLVWKLTDGAAHVTDYSNAARTMLYNIKELKWDDEILEILNIPKAILPEVRSNSEIYGKTAPFHFYGGEVPISGMAGDQQAALFGQLAFEPGMVKNTYGTGSFIIMNTGEEMQLSENNLLTTIGYGINGKVYYALEGSIFIAGSAIQWLRDGLRMVENSPESEKYARDSHNNDEVYVVPAFTGLGAPYWNQNARGSVFGLTRGTSKEDFIKATLQSIAYQVRDIIDTMQVDTQTAIQVLKVDGGAAMNNFLMQFQADILGIDIARAKNLETTALGAAFLAGLSVGYWKDLDELKLLNETGELFEPSMNESRKEQLYKGWKKAVKATQVFAEVDD

SEQ ID NO: 74226 - protein, 290 aa, Streptococcus pneumoniae
MDKIIKTISESGAFRAFVLDSTETVRTAQEKHQTQASSTVALGRTLIASQILAANEKGNTKLTVKVLGSSSLGAIITVADTKGNVKGYVQNPGVDIKKTATGEVLVGPFVGNGQFLVITDYGTGNPYNSITPLISGEIGEDLAFYLTESQQTPSAVGLNVLLDEEDKVKVAGGFLVQVLPGAKKEEIARFEKRIQEMPAISTLLESDDHIEALLKAIYGDEAYKRLSEEEIRFQCDCSHERFMNALASLPSSDLQEMKEEDHGAEITCQFCQTTYNFDEKDLEELIRDKS

SEQ ID NO: 74227 - protein, 336 aa, Streptococcus pneumoniae
MMKRTWRNSFVTNLNTPFMIGNIEIPNRTVLAPMAGVTNSAFRTIAKELGAGLVVMEMVSDKGIQYNNEKTLHMLHIDEGENPVSIQLFGSDEDSLARAAEFIQENTKTDIVDINMGCPVNKIVKNEAGAMWLKDPDKIYSIINKVQSVLDIPLTVKMRTGWADPSLAVENALAAEAAGVSALAMHGRTREQMYTGHADLETLYKVAQALTKIPFIANGDIRTVQEAKQRIEEVGADAVMIGRAAMGNPYLFNQINHYFETGEILPDLTFEDKMKIAYEHLKRLINLKGENVAVREFRGLAPHYLRGTSGAAKLRGAISQASTLAEIEALLQLEKA

SEQ ID NO: 74228 - protein, 701 aa, Streptococcus pneumoniae
MFASKSERKVHYSIRKFSIGVASVAVASLVMGSVVHATENEGSTQAATSSNMAKTEHRKAAKQVVDEYIEKMLREIQLDRRKHTQNVALNIKLSAIKTKYLRELNVLEEKSKDELPSEIKAKLDAAFEKFKKDTLKPGEKVAEAKKKVEEAKKKAEDQKEEDRRNYPTNTYKTLELEIAEFDVKVKEAELELVKEEAKESRNEGTIKQAKEKVESKKAEATRLENIKTDRKKAEEEAKRKADAKLKEANVATSDQGKPKGRAKRGVPGELATPDKKENDAKSSDSSVGEETLPSSSLKSGKKVAEAEKKVEEAEKKAKDQKEEDRRNYPTNTYKTLDLEIAESDVKVKEAELELVKEEAKEPRDEEKIKQAKAKVESKKAEATRLENIKTDRKKAEEEAKRKAAEEDKVKEKPAEQPQPAPATQPEKPAPKPEKPAEQPKAEKTDDQQAEEDYARRSEEEYNRLTQQQPPKTEKPAQPSTPKTGWKQENGMWYFYNTDGSMATGWLQNNGSWYYLNANGAMATGWLQNNGSWYYLNANGSMATGWLQNNGSWYYLNANGAMATGWLQYNGSWYYLNSNGAMATGWLQYNGSWYYLNANGDMATGWLQNNGSWYYLNANGDMATGWLQYNGSWYYLNANGDMATGWVKDGDTWYYLEASGAMKASQWFKVSDKWYYVNGSGALAVNTTVDGYGVNANGEWVN

SEQ ID NO: 74229 - protein, 762 aa, Streptococcus pneumoniae
MNYSKALNECIESAYMVAGHFGARYLESWHLLIAMSNHSYSVAGATLNDYPYEMDRLEEVALELTETDYSQDETFTELPFSRRLQILFDEAEYVASVVHAKVLGTEHVLYAILHDGNALATRILERAGFSYEDKKDQVKIAALRRNLEERAGWTREDLKALRQRHRTVADKQNSMANMMGMPQTPSGGLEDYTHDLTEQARSGKLEPVIGRDKEISRMIQILSRKTKNNPVLVGDAGVGKTALALGLAQRIASGDVPAEMAKMRVLELDLMNVVAGTRFRGDFEERMNNIIKDIEEDGQVILFIDELHTIMGSGSGIDSTLDAANILKPALARGTLRTVGATTQEEYQKHIEKDAALSRRFAKVTIEEPSVADSMTILQGLKATYEKHHRVQITDEAVETAVKMAHRYLTSRHLPDSAIDLLDEAAATVQNKAKHVKADDSDLSPADKALMDGKWKQAAQLIAKEEEVPVYKDLVTESDILTTLSRLSGIPVQKLTQTDAKKYLNLEAELHKRVIGQDQAVSSISRAIRRNQSGIRSHKRPIGSFMFLGPTGVGKTELAKALAEVLFDDESALIRFDMSEYMEKFAASRLNGAPPGYVGYEEGGELTEKVRNKPYSVLLFDEVEKAHPDIFNVLLQVLDDGVLTDSKGRKVDFSNTIIIMTSNLGATALRDDKTVGFGAKDIRFDQENMEKRMFEELKKAYRPEFINRIDEKVVFHSLSSDHMQEVVKIMVKPLVASLAEKGIDLKLQASALKLLANQGYDP

SEQ ID NO: 74230 - protein, 450 aa, Streptococcus pneumoniae
MAEVEELRVQPQDILAEQSVLGAIFIDESKLVFVREYIESRDFFKYAHRLIFQAMVDLSDRGDAIDATTVRTILDNQGDLQNIGGLSYLVEIVNSVPTSANAEYYAKIVAEKAMLRRLIAKLTESVNQAYEASQPADEIIAQAEKGLIDVSENANRSGFKNIRDVLNLNFGNLEARSQQTTDITGIATGYRDLDHMTTGLHEEELIILAARPAVGKTAFALNIAQNIGTKLDKTVAIFSLEMGAESLVDRMLAAEGLVESHSIRTGQLTDEEWQKYTIAQGNLANASIYIDDTPGIRITEIRSRSRKLAQETGNLGLILIDYLQLITGTGRENRQQEVSEISRQLKILAKELKVPVIALSQLSRGVEQRQDKRPVLSDIRESGSIEQDADIVAFLYRDDYYERGGEEEEGIPNNKVEVIIEKNRSGARGTVELIFQKEYNKFSSISKREA

SEQ ID NO: 74231 - protein, 150 aa, Streptococcus pneumoniae
MKVIFLADVKGKGKKGEIKEVPTGYAQNFLIKKNLAKEATAQAVGELRGKQKSEEKAHAEMIAEGKAIKAQLEAEETVVEFVEKVGPDGRTFGSITNKKIAEELQKQFGIKIDKRHIQVQAPIRAVGLIDVPVKIYQDITSVINLRVKEG

SEQ ID NO: 74232 - protein, 657 aa, Streptococcus pneumoniae
MKKFYVSPIFPILVGLIAFGVLSTFIIFVNNNLLTVLILFLFVGGYVFLFKKLRVHYTRSDVEQIQYVNHQAEESLTALLEQMPVGVMKLNLSSGEVEWFNPYAELILTKEDGDFDLEAVQTIIKASVGNPSTYAKLGEKRYAVHMDASSGVLYFVDVSREQAITDELVTSRPVIGIVSVDNYDDLEDATSESDISQINSFVANFISEFSEKYMMFSRRVSMDRFYLFTDYTVLEGLMNDKFSVIDAFREESKQRQLPLTLSMGFSYGDGNHDEIGKVALLNLNLAEVRGGDQVVVKENDETKNPVYFGGGSAASIKRTRTRTRAMMTAISDKIRSVDQVFVVGHKNLDMDALGSAVGMQLFASNVIENSYALYDEEQMSPDIERAVSFIEKEGVTKLLSVKDAMGMVTNRSLLILVDHSKTALTLSKEFYDLFTQTIVIDHHRRDQDFPDNAVITYIESGASSASELVTELIQFQNSKKNRLSRMQASVLMAGMMLDTKNFTSRVTSRTFDVASYLRTRGSDSIAIQEIAATDFEEYREVNELILQGCKLGSDVLIAEAKDTKCYDTVVISKAADAMLAMSGIEASFVLAKNTQGFISISARSRSKLNVQRIMEELGGGGHFNLAAAQIKDVTLSEAGEKLTEIVLNEIKEKEKEE

SEQ ID NO: 74233 - protein, 306 aa, Streptococcus pneumoniae
MSIYNNITELIGQTPIVKLNNIVPEGAADVYIKLEAFNPGSSVKDRIALSMIEKAEQDGILKLGSTIVEATSGNTGIGLSWVGAAKGYKVVIVMPETMSVERRKIIQAYGAELVLTPGSEGMKGAIAKAQEIAAERDGFLPLQFDNPANPEVHERTTGAEILAAFGKDGLDAFVAGVGTGGTISGVSHALKSENSNIQVFAVEADESAILSGEKPGPHKIQGISAGFIPDTLDTKAYDGIVRVTSDDALALGREIGGKEGFLVGISSAAAIYGAIEVAKKLGTGKKVLALAPDNGERYLSTALYEL

SEQ ID NO: 74234 - protein, 346 aa, Streptococcus pneumoniae
MAEITAKLVKELREKSGAGVMDAKKALVETDGDIEKAIELLREKGMAKAAKKADRVAAEGLTGVYVNGNVAAVIEVNAETDFVAKNAQFVELVNTTAKVIAEGKPANNEEALALIMPSGETLEAAYVSATATIGEKISFRRFALIEKTDAQHFGAYQHNGGRIGVISVVEGGDEALAKQLSMHIAAMKPTVLSYKELDEQFVKDELAQLNHVIDQDNESRAMVNKPALPHLKYGSKAQLTDDVIAQAEADIKAELAAEGKPEKIWDKIIPGKMDRFMLDNTKVDQAYTLLAQVYIMDDSKTVEAYLESVNASVVEFARFEVGEGIEKAANDFEAEVAATMAAALNN

SEQ ID NO: 74235 - protein, 259 aa, Streptococcus pneumoniae
MAVISMKQLLEAGVHFGHQTRRWNPKMAKYIFTERNGIHVIDLQQTVKYADQAYDFMRDAAANDAVVLFVGTKKQAADAVAEEAVRSGQYFINHRWLGGTLTNWGTIQKRIARLKEIKRMEEDGTFEVLPKKEVALLNKQRARLEKFLGGIEDMPRIPDVMYVVDPHKEQIAVKEAKKLGIPVVAMVDTNTDPDDIDVIIPANDDAIRAVKLITAKLADAIIEGRQGEDAVAVEAEFAASETQADSIEEIVEVVEGDNK

SEQ ID NO: 74236 - protein, 164 aa, Streptococcus pneumoniae
MRQLKRVGVFLLLPFFVLIDAHISQLLGSFFPHVHLASHFLFLFLLFETIEVSEYLYLVYCFVIGLVYDVYFFHLIGITTLLFILLGAFLHKLNSVILLNRWTRMLAMIVLTFLFEMGSYLLAFMVGLTVDSMSIFIVYSLVPTMILNFLWITVFQFIFEKYYL

SEQ ID NO: 74237 - protein, 264 aa, Streptococcus pneumoniae
MDSMILGRYIPGDSIVHRLDPRSKLLAMMLLILIVFWANNPLTNLILFIATGIFIALSGVSLSFFIQGLKSMFFLIAFTTIFQLFFISNGNVLFEFSFVRITDYALQQAGIIFCRFVLIIFFSTLLTLTTMPLSLASAVEALLAPLKRVKVPVHEIGLMLSMSLRFVPTLMDDTTRIMNAQKARGVDFGEGSIVQKVKAMIPILIPLFATSLKRADSLAIAMEARGYQGGKGRSQYRQLKWTLKDTLTILVILVLGCCLFFLKS

SEQ ID NO: 74238 - protein, 279 aa, Streptococcus pneumoniae
MGIALENVNFIYQEGTPLASAALSDVSLTIEDGSYTALIGHTGSGKSTILQLLNGLLVPSQGSVRVFDTLITSTSKNKDIRQIRKQVGLVFQFAENQIFEETVLKDVAFGPQNFGVSEEDAVKTAREKLALVGIDESLFDRSPFELSGGQMRRVAIAGILAMEPSILVLDEPTAGLDPLGRKELMTLFKKLHQSGMTIVLVTHLMDDVAEYANQVYVMEKGRLVKGGKPSDVFQDVVFMEEVQLGVPKITAFCKRLADRGVSFKRLPIKIEEFKESLNG

SEQ ID NO: 74239 - protein, 275 aa, Streptococcus pneumoniae
MKSIIDVKNLSFRYKENQNYYDVKDITFHVKRGEWLSIVGHNGSGKSTTVRLIDGLLEAESGEIVIDGQRLTEENVWNIRRQIGMVFQNPDNQFVGATVEDDVAFGLENQGLSRQEMKKRVEEALALVGMLDFKKREPARLSGGQKQRVAIAGVVALRPAILILDEATSMLDPEGRRELIGTVKGIRKDYDMTVISITHDLEEVAMSDRVLVMKKGEIESTSSPRELFSRNDLDQIGLDDPFANQLKKSLSQNGYDLPENYLTESELEDKLWELL

SEQ ID NO: 74240 - protein, 181 aa, Streptococcus pneumoniae
MKKEQIPNLLTIGRILFIPIFIFILTIGNSIESHIVAAIIFAVASITDYLDGYLARKWNVVSNFGKFADPMADKLLVMSAFIMLIELGMAPAWIVAVIICRELAVTGLRLLLVETGGTILAAAMPGKIKTFSQMFAIIFLLLHWTLLGQVLLYVALFFTIYSGYDYFKGSAYVFKGTFGSK

SEQ ID NO: 74241 - protein, 276 aa, Streptococcus pneumoniae
MTSMRKKTIGEVLRLARINQGLSLDELQKKTEIQLDMLEAMEADDFDQLPSPFYTRSFLKKYAWAVELDDQIVLDAYDSGSMITYEEVDVDEDELTGRRRSSKKKKKKTSFLPLFYFILFALSILIFVTYYVWNYIQTQPEEPSLSNYSVVQSTSSTSSVPHSSSSSSSSIESAISVSGEGNHVEIAYKTSKETVKLQLAVSDVTSWVSVSESELEGGVTLSPKKKSAEATVATKSPVTITLGVVKGVDLTVDNQTVDLSKLTAQTGQITVTFTKN

SEQ ID NO: 74242 - protein, 427 aa, Streptococcus pneumoniae
MTKVVFEEKYYPAVKEKVYRTRLANGLTVALLPKKEFKEVYGSVTVQFGSVDTFVTEVDGYVKQYPGGIAHFLEHKLFEREDSSDLMSAFTSLGADSNAFTSFTKTNYLFSATDYFLENLDLLDELVTSAHFTEASILTEQDIIQQEREMYQDDPDSCLFFSTLANLYPGTPLATDIVGSEESISQINLTNLQENFTKFYKPVNMSLFLVGNFDVERVQDYFESKELKDSDFQEVAREKLFLQPVKPTDSMRMEVSSPKLAIGVRGKREVSEADCYRHHILLKLLFAMMFGWTSDRFQKCYESGKIDASLSLEVEITSRFHFVMLTIDTKEPVALSHQFRKAIRNFTKDLDITEEHLDIIKREMFGEFFSSMNSLEFIATQYDAFENGETIFDLPKILQEITLEDVLDAGHHLIDDGDIVDFTIFPS

SEQ ID NO: 74243 - protein, 341 aa, Streptococcus pneumoniae
MTKPIILTGDRPTGKLHIGHYVGSLKNRVLLQEEDKYDMFVFLADQQALTDHAKDPQTIVESIGNVALDYLAVGLDPNKSTIFIQSQIPELAELSMYYMNLVSLARLERNPTVKTEISQKGFGESIPTGFLVYPIAQAADITAFKANYVPVGTDQKPMIEQTREIVRSFNNAYNCDVLVEPEGIYPENERAGRLPGLDGNAKMSKSLNNGIYLADDADTLRKKVMSMYTDPDHIRVEDPGKIEGNMVFHYLDVFGRPEDAQEIADMKERYQRGGLGDVKTKRYLLEILERELGPIRERRIEFAKDMGEVYNMIQKGSERAREVAGQTLSEVKGAMGLHYFN

SEQ ID NO: 74244 - protein, 540 aa, Streptococcus pneumoniae
MLTVSDVSLRFSDRKLFDDVNIKFTEGNTYGLIGANGAGKSTFLKILAGDIEPTTGHISLGPDERLSVLRQNHFDYEDERAIDVVIMGNEKLYSIMKEKDAIYMKEDFSDEDGVRAAELEGEFAELGGWEAESEASQLLQNLNIPEELHYQNMSELANGEKVKVLLAKALFGKPDVLLLDEPTNGLDIQSITWLEDFLIDFDNTVIVVSHDRHFLNKVCTHMADLDFGKIKLYVGNYDFWKESSELAAKLLADRNAKAEEKIKQLQEFVARFSANASKSRQATSRKKMLDKIELEEIVPSSRKYPFINFKAEREIGNDLLTVENLTVKIDGETILDNISFILRPDDKTALIGQNDIQTTALIRAIMGDIDYEGTVKWGVTTSQSYLPKDNSADFAGGESILDWLRQFASKEEDDNTFLRGFLGRMLFSGDEVNKPVNVLSGGEKVRVMLSKLMLLKSNVLVLDDPTNHLDLESISSLNDGLKNFKESIIFASHDHEFIQTLANHIIVLSKNGVIDRIDETYDEFLENAEVQAKVKELWKD

SEQ ID NO: 74245 - protein, 255 aa, Streptococcus pneumoniae
MIGISLIPDLYNIIFLSSMWDPYGQLSDLPVAVVNNDKEASYNGNTMAIGKDMVSNLKENKTLDFHFVDEEEGKKGLEDGDYYMVVTLPSDLSEKTTTLSNIQSTAAYQSLTSEQQTEISDSVSQNSTDSIQSAQSIVALVQDLQGSLENLQNQSSNLSTLKNQSNQVSPITSTSLIGLSSGLTEIQGDVTSKLVPASQSIASGVNAYTTGVDKVSQGASQLSEKNATLTGSLDKLVSGSNTLTQKSSRLTAGVG

SEQ ID NO: 74246 - protein, 180 aa, Streptococcus pneumoniae
MQESNKRLKTKRTIENAMVQLLMEQPFDKISTVKLVEKAGISRSSFYTHYKDKYDMIEHYQSKLFHTFEYIFQKHAHHKRDAILEVFEYLESEPLLAALLSENGTKEIQNFLRNKLHIMLSTDLQKRFMQLNLNTTELEYSSIYLTHALFGVCQTWIAHGKKESSQEITDFLMKMLGDTN

SEQ ID NO: 74247 - protein, 159 aa, Streptococcus pneumoniae
MKIKVVTVGKLKEKYLKDGIAEYSKRISRFAKFEMIELSDEKTPDKASESENQKILEIEGQRILSKIADRDFVIVLAIEGKTFFSEEFSKQLEETSIKGFSTLTFIIGGSLGLSSSVKNRANLSVSFGRLTLPHQLMRLVLVEQIYRAFTIQQGFPYHK

SEQ ID NO: 74248 - protein, 397 aa, Streptococcus pneumoniae
MEANMKHLKTFYKKWFQLLVVIVISFFSGALGSFSITQLTQKSSVNNSNNNSTITQTAYKNENSTTQAVNKVKDAVVSVITYSANRQNSVFGNDDTDTDSQRISSEGSGVIYKKNDKEAYIVTNNHVINGASKVDIRLSDGTKVPGEIVGADTFSDIAVVKISSEKVTTVAEFGDSSKLTVGETAIAIGSPLGSEYANTVTQGIVSSLNRNVSLKSEDGQAISTKAIQTDTAINPGNSGGPLINIQGQVIGITSSKIATNGGTSVEGLGFAIPANDAINIIEQLEKNGKVTRPALGIQMVNLSNVSTSDIRRLNIPSNVTSGVIVRSVQSNMPANGHLEKYDVITKVDDKEIASSTDLQSALYNHSIGDTIKITYYRNGKEETTSIKLNKSSGDLES

SEQ ID NO: 74249 - protein, 188 aa, Streptococcus pyogenes
LMKKFHRFLVSGVILLGFNGLVPTMPSTLISQQENLVHAAVLVQHPLFEVVFAFYNGSPERVKELEGQLEELIASEQDLHLVQSPAQIEGLGENQIIDEESVQDAPDYRFVVKNFSNENDIIQELEKTRLIVDLSEEPNLYTQIAGISAGIPQVNRVQTEYVDHLKNGYVLSKGDKEFRKAITHFLLE

SEQ ID NO: 74250 - protein, 233 aa, Streptococcus pyogenes
MLAHVTTQIEAMNQGAPTGLVFQSIAGSEKGNAAFGFDAKVLQEAKDTAHKVGTAAGPNVMYFETGQGSELSSDAHHGADQVTMEARCYGFAKRFDPFLVNTVVGFIGPEYLYDSKQVIRAGLEDHFMGKLTGISMGCDICYTNHMKADQNDAENLLVLLGAANVNYIMAIPHGDDIMLNYQTTGYHETATMRDLLNKRPIKEFEEWMEKMGLMKDGHLTEIGGDGSIFMKQN

SEQ ID NO: 74251 - protein, 308 aa, Streptococcus pyogenes
ITSAIAGLAYAGIPMTFRNIATSFHVFTGHLQDASEALNWDAISHLKGTLVFLMGMKNLQTICEELMVRGYDKDTPVAIIEWATHPQQRSIDGKLENIVGLVEQHQMKAPSLIVIGDVVAFREELNYHEKLPLFGRTILVQETPNAKLPKLLKDAGATVYAFQSPSKLLAKELSLPELSSIDGVLITDPSSWKFFVAYLQDKDLDIRSLSHLKIVASGHHTIKAIKESGIRLYDQINDFAEENFVKRMADQEGYWIILTSDIKEKAVAEVLNFPIYSTHSVDFESESFAYHSEDIQLVCLPNSAAAYH

SEQ ID NO: 74252 - protein, 129 aa, Streptococcus pyogenes
MVGKPIVNLGDVAANLKFKRPDEFGTSLDMMQLIIGQVSQEGIGQLNQRFWERFDQADFKDTILALAYMRDDDYDQQAYPDILEALYELPVRIISTSRAGRHNDASGPIIEWFVTQYKEIMERDFGRNQ

SEQ ID NO: 74253 - protein, 176 aa, Streptococcus pyogenes
MAYKQPDKNGFYGRFGGRFVPETLMTAVLELEKAYRESQADPSFQAELDQLLKQYVGRETPLYYAKNLTKYVGGAKIFLKREDLNHTGAHKINNALGQVLLAHRMGKKKIIAETGAGQHGVATATAAALFDMECTIYMGEEDVKRQALNVFRMELLGAKVHSVTDGSRVLKDAVNA

SEQ ID NO: 74254 - protein, 198 aa, Streptococcus pyogenes
PFGKRFGRTANSAELKENYADKTKEELHELNETAIVAGRLMTKRGKGKVGFAHLQDREGQIQLYVRKDSVGEDNYEIFKKADLGDFIGVEGEVMRTDMGELSIKATKLTHLSKSLRPLPEKFHGLTDIETIYRKRHLDLISNRESFDRFVTRSKMISEIRRYLDGLDFLEVETPVLHNEAGGAAARPFVTAHNAQNID

SEQ ID NO: 74255 - protein, 73 aa, Streptococcus pyogenes
MSGFLEQRLGHCLRQMVEKGLEALLVTHLTNSYYLTGFSGTAATVLITAKRRVLITDSRYTLLAKASVEGFDI

SEQ ID NO: 74256 - protein, 354 aa, Streptococcus pyogenes
METILEVKHLSKIFGKKQKAALEMVKTGKNKSEIFKKTGATVGVYDASFEVKKGEIFVIMGLSGSGKSTLVRMLNRLIEPSAGSILLEGKDISTMSADQLREVRRHDINMVFQSFALFPHKTILENTEFGLELRGVPKEERQRLAEKALDNSGLLDFKDQYPNQLSGGMQQRVGLARALANSPKILLMDEAFSALDPLIRREMQDELLDLQDSMKQTIIFISHDLNEALRIGDRIALMKDGQIMQIGTGEEILTNPANDFVREFVEDVDRSKVLTAQNIMIKPLTTTVELDGPQVALNRMHNEEVSMLMATNRRRQLVGSLTADAAIEARKKGLPLSEVIDRDVKTVSKDTIIT

SEQ ID NO: 74257 - protein, 210 aa, Streptococcus pyogenes
YAEKYAVNEKVYNVSFTANAYGIYYNKDKFEELGLKVPETWDEFEQLVKDIVAKGQTPFGIAGADAWTLNGYNQLAFATAAGGGKEANQYLRYSKPNSIKLSDPIMKDDIRVMDILRIKGSKQKNWEGAGYTDVIGAFARGDVLMTPNGSWAITAINEQKPKFKIGTFMIPGKEKGQSLTVGAGDLAWSISATTKHPKEANAFVEYMTNP

SEQ ID NO: 74258 - protein, 770 aa, Streptococcus pyogenes
MEKKQRFSLRKYKSGTFSVLIGSVFLMMMTTTVAADELTTTSEPTITNHTQQQAQHLTNTELSSAESKPQDTSQITLKTNREKEQPQGLVSEPTTTELADTDAAPMANTGPDATQKSASLPPVNTDVHDWVKTKGAWDKGYKGQGKVVAVIDTGIDPAHQSMRISDVSTAKVKSKEDMLARQKAAGINYGSWINDKVVFAHNYVENSDNIKENQFEDFDEDWENFEFDAEAEPKAIKKHKIYRPQSTQAPKETVIKTEETDGSHDIDWTQTDDDTKYESHGMHVTGIVAGNSKEAAATGERFLGIAPEAQVMFMRVFANDVMGSAESLFIKAIEDAVALGADVINLSLGTANGAQLSGSKPLMEAIEKAKKAGVSVVVAAGNERVYGSDHDDPLATNPDYGLVGSPSTGRTPTSVAAINSKWVIQRLMTVKELENRADLNHGKAIYSESVDFKNIKDSLGYDKSHQFAYVKESTDAGYNAQDVKGKIALIERDPNKTYDEMIALAKKHGALGVLIFNNKPGQSNRSMRLTANGMGIPSAFISHEFGKVMSQLNGNGTGSLEFDSVVSKAPSQKGNEMNHFSNWGLTSDGYLKPDITAPGGDIYSTYNDNHYGSQTGTSMASPQIAGASLLVKQYLEKTQPNLPKEKIADIVKNLLMSNAQIHVNPETKTTTSPRQQGAGLLNIDGAVTSGLYVTGKDNYGSISLGNITDTMTFDVTVHNLSNKAKTLRYDTELLTDHVDPQKGRFTLTSRSLKTYQGGEVTVPANGKVTV

SEQ ID NO: 74259 - protein, 530 aa, Streptococcus pyogenes
INPRRYIMLCQNCNLNESTIHLYTSVNGKQRQVDLCQNCYQIMKSDPANSILNGLTPGYRAQNRSTSPFFDDFFGDLNNFRAFGNLPNTPPTQAGQNGNGGGRYGGNYNGQRPAQPQTPNQQAKGLLEEFGINVTDIARNGNIDPVIGRDEEITRVIEILNRRTKNNPVLIGEPGVGKTAVVEGLAQKIIDGTVPQKLQGKQVIRLDVVSLVQGTGIRGQFEERMQKLMEEIRNRKDVILFIDEIHEIVGAGSAGDGNMDAGNILKPALARGELQLVGATTLNEYRIIEKDAALERRMQPVKVDEPSVEETITILKGIQPKYEDYHHVKYSPAAIEAAAHLSNRYIQDRFLPDKAIDLLDEAGSKMNLTLNFVDPKEIDKRLIEAENLKAQATRDEDYERAAYFRDQITKYKEMQAQKVDEQDIPIITEKTIEAIVEQKTNIPVGDLKEKEQSQLVNLANDLKAHVIGQDDAVDKIAKAIRRNRVGLGTPNRPIGSFLFVGPTGVGKTELSKQLAIELFGSTNNMIRFDM

SEQ ID NO: 74260 - protein, 369 aa, Streptococcus pyogenes
MSKEVASARIQHRGMTTQGWESSSDILMEREIGIDMTTGYPKVGDGKNKFKDLKDLRGPMGPQGPTGERGPIGPTGPIGKPGTTDYNQLQNKPNLDAFAQKKETNSKITKLESSKADKSAVYSKAESKIELDKKLSLTGGIVTGQLQFKPNKSGIKPSSSVGGAINIDMSKSEGAAMVMYTNKDTTDGPLMILRSDKETFNQSALFVDYSGKTNAVNIVMRQPSTPNFSSALNITSANEGGSAMQIRGVEKALGTLKITHENPNVKANYDENAAALSIDIVKKTNGEGTAAQGIYINSSTGTTGKMLRIRNKNEDKFYVGPDGGFHSGANSTVTGNLTVKDPTSEKHAATKKYVDEKIAELKKLIQKTD

SEQ ID NO: 74261 - protein, 271 aa, Streptococcus pyogenes
MMKRQFEDVTRIVIKIGTSSLVLPTGKINLEKIDQLAFVISSLMNKGKEVILVSSGAMGFGLDILKMEKRPTNLAKQQAVSSVGQVAMMSLYSQIFAHYQTNVSQILLTRDVVVFPESLANVTNAFESLISFGIVPIVNENDAVSVDEMDHATKFGDNDRLSAVVAGITKADLLIMLSDIDGLFDKNPTIYEDAQVRSHVAVITQEIIASAGGAGSKFGTGGMLSKIQSAQMVFENKGQMVLMNGANPRDILRVLEGQPLGTWFKQIEEVR

SEQ ID NO: 74262 - protein, 183 aa, Streptococcus pyogenes
ISVQGLGCWLLILNSGLLISLPIKESGLALIYLALMVLTMCLGFYISLKLDQYKKLGIETPEGGVRLHQWQSFKNMIRDIDKFEDVAIEGLVVWNRVLVYATLFGYAKKVERYLKVHRIALPEVYQAVRPGELSMVMYATTPTFVSSLSSATTSSNFSVSSGGGISGGGGFSGGGGGGGGGAF

SEQ ID NO: 74263 - protein, 330 aa, Streptococcus pyogenes
MLIEMWSPVFKKHGEIREPICFHHGLNVIMGLDLADNSIGKSSSLLAIDFIFGGNSYLKSIAVKKLGDHPIYFCFQFEKKFYFSRDTANPDIILVCDKSYSPTGETMDLGIFLNKLKKRYHLDSPELSFRLAMSGFFRIAGKSNQNTDFPLQVYSSQKSSESITTLIQLFNLYDNIARYKERLKDKSDQLTTFRNARKYAFISNLVGGKKQFEANVSEIKRLEYDLAHLQDTHQDKIDSDDIEKNQQKLQLRNTKLELESSLRDKQRRLKLLDISIEFGLYPTESDLTELQQYFPDTNLKKLYEVEAYHKKLETILDSEFSTERESLIAE

SEQ ID NO: 74264 - protein, 293 aa, Streptococcus pyogenes
MRKNMIVSSVSQGLIWGVLGLGIYLTFRILNFPDMTTEGSFPLGGAVAVTAISLGWNPFLSTLLGMLSGALAGFLTGLLYTKGKMPTLLAGILVMTSCNSIMLMVMGRANLGLHDHKRIQDCLPFSIDLNSLLTGLITVVIVISVLIYFLYTNLGQAYIATGDNKDMAKSFGINTDWMEVMGLVVSNSLIALSGALVSQQDGYADVSKGIGVIVIGLASIIVGEVLYSTGLTLLERLIAIVIGSILYQFLISVVIMLGFNTSYLKLISALVLALCLMIPVVKERFFKGVRLTR

SEQ ID NO: 74265 - protein, 222 aa, Streptococcus pyogenes
MTTMQKTVSLLSLALLIGLLGTSGKAISVYAQDQHTDNVIAESTISQVSVEASMRGTEPYIDATVTTDQPVRQPTQATITLKDASDNTINSWVYTMAVQQRRFTAWFDLTGQKSGDYHVTVTVHTQEKAVTGQSGTVHFDQNKSRKTLTNMQQKDTSKAMTNSVDVDTKAQTNQSANQEIDSTSNPFKSATNHRSTSLKRSTKNEKLTPSASNSQKNGSTET

SEQ ID NO: 74266 - protein, 217 aa, Streptococcus pyogenes
STEGVKSSSRSNVEAANSTNEIFSQLNKELEKAQGNTEKLSSNAESLMGEFDKELSENGNFVEAFRKVFNNAYENGVPNEVLLDFLSNPVAEKSSSVKATINVYRPFIWIFMLEVLSLFTAYLFATQPIIRKVKDRFKLDRLQESDLLSVGILVGLSLILGLVIGMISSIQLSVGREYVPSWVFLAVLASFVLVQLQYLLLKHFRVIGMGLAFFMLI

SEQ ID NO: 74267 - protein, 125 aa, Streptococcus pyogenes
  MISC_FEATURE (53)..(53): X=any amino acid
YGGSLPIGDLLNHGDLRVGTLDPIGGELIVLDGKAYQAKGSGDHPEIVEVSPXAKVPYAAVVPHQAEVIFRQRFEMTDEELEARIESYYDGENLFRSIKIRGDFVKMHVRMIPKSTPEMKFAEVA

SEQ ID NO: 74268 - protein, 536 aa, Streptococcus pyogenes
MYVSKLFTSQQWRELKLISYVTENADAIGVKDKELSKALNISMLTLQTCLTNMQFMKEVGGITYKNGYITIWYHQHCGLQEVYQKALRHSQSFKLLETLFFRDFNSLEELAEELFVSLSTLKRLIKKTNAYLMHTFGITILTSPVQVSGDEHQIRLFYLKYFSEAYKISEWPFGEILNLKNCERLLSLMIKEVDVRVNFTLFQHLKILSSVNLIRYYKGHSAVYDNKKTSHRFSQLIQSSLEIQDLSRLFYLKFGLYLDETTIAEMFSNHVNDQLEIGYAFDSIKQDSPTGCRKVTNWVHLTNWVHLLDELEIRLNLSVTNKYEVAVILHNTTVLKEEDITANYLFFDYKKSYLNFYKQEHPHLYKAFVAGVEKLMRSEKEPISTELTNQLIYAFFITWENSFLEVNQKDEKIRLLVIERSFNSVGNFLKKYIGEFFSITNFNELDALTIDLEEIEKQYDVIVTDVMVGKSDELEIFFFYKMIPEAIIDKLNAFLNISSADSLPLDKPIKNPLDFHRKEVIFPTPPNKLHAPPSTS

SEQ ID NO: 74269 - protein, 127 aa, Streptococcus pyogenes
MMTPETVCQEKGIDLVYFDGRGTNTPGMFNKKHNVIAIDTYLDGIYKHKVIYHELGHREHTASYYKLNKEKAELQADRCMIHHLLKEELSHWDNMEDFNYIQFMEKYELTSIADEVMVKEELEFLIS

SEQ ID NO: 74270 - protein, 323 aa, Streptococcus pyogenes
MKYFLRRSAFGLVAVSASVLVGSTVSAVDSPIEQPRIIPNGRTLTNLLGNAPEKLALRNEERAIDELKKQAIEDKEATTAIEAASSDALEALADQADALQSEEAAVVQSDTAASDALEALADQTDALQSEEAAVVKADNAASDALEALADQTDAVQSEEASVVKADTAASDALEALADQTDALQSEEAAVVKADTAASDALEALADQTDALQSEEAAVVKADTAASDALEALADQTDAVQSEEASVVKADTAASDAWEKAATPTALDVKKTKDTTPVVKKEERQNVNTLPTTGEESNPFFTAAALAIMVSTGALVVSSKCKEN

SEQ ID NO: 74271 - protein, 275 aa, Streptococcus pyogenes
MKKEEKLVFTVAFLIIGGVLFRTTAVTRIPANTVGVKVSATSGVQKQTLSTGYHLKVPFIDKIYKMPTSVQQKKIKKITTQTEDAQWLDTTLDVKYRVSEKNAMNVFKDYQSMENVNKSLIKAAVQRAVEQVTVNYDIYEALGSKRNELYAEIEKSLSERLAKESIELVSVTLTDQDAGDEIERAIKDESVKQKQVDSAKQDKEKAKIEAETKQIQAQAEADAQVIKAKGEAESNNTKAASITDNLIKMREAEARYRHGWVEVQTSGEVITNKGQ

SEQ ID NO: 74272 - protein, 445 aa, Streptococcus pyogenes
LKLRDYQEELLTAIRRSLATGNKRIIVQSPPRSGKTVVMAHIARSATDKGNRVLFFSHRKEINEQVERTFAANGVNSNLLTIGGVQSLVRKLDSLSQPEVILIDEAHHSKAKSYLKIIDHFKNAYVLMFTGTPVRLNGDGFDDIADDLVAGKSVKWLQEHGNIANFKYYAPSMIDNSALKKRGGEFTKDSVNQSMKSVIYGDVIKHYEKLAKGKQAIVYTHSVEASHLVSDMFNQAGYQSQSVSGKTPKSEREEAMQAFRDGKLRILVNCELFTEGIDLPNVDVCIMLRPTQSLSLYLQFAMRPLNPRDGKIAIIIDHVGNVERFGLPNMDREWRLDGKTKQKQSTKIGEPTTRVCDDCYATYWSDTRICPECGHENELTKREIEEIKEAELQEISEQKQLKLKNRVSTYQSPDLCRTMDELTEYRKQHGYKPGWQYHIAKKLGI

SEQ ID NO: 74273 - protein, 208 aa, Streptococcus pyogenes
MIFAYNKEQVGDVLMVILQDTKDIKRQVERKGKVARVFAEESGKTLAWNIFEASSLITIEGNGQIFLTDEDLARLNAELAKEGFSERLEPIVGPVFVVGQIVEMVAHPDSDHLNICQVAIGEDQTVQIVAGAPNAALGLKTIVALPGAIMPNGSLIFPGKLRGEESYGMMCSPRELALPNAPQKRGIIELDESAVVGEAFDPAKHWKG

SEQ ID NO: 74274 - protein, 128 aa, Streptococcus pyogenes
MAYRKLGRTSSQRKAMLRDLTTDLLINESIVTTEARAKEIRKTVEKMITLGKRGDLHARRQAAAYVRNEIASENYDEATDKYTSTTALQKLFSEIAPRYAERNGGYTRILKTEPRRGDAAPMAIIELV

SEQ ID NO: 74275 - protein, 152 aa, Streptococcus pyogenes
VFVMAAYIFQMFLGWQQLKDFNKTYTMLRKLGRVSIGRKSGRIKSGTIVMFAVDENGRVLKASKMQGVTILARFQNMDDYVGEDIHYFDKYNPLVRKENKLMQSAIEDARKVYLWNEAGIEKETSSSDSFLGFGFYANYLQLSIKQLFKKNK

SEQ ID NO: 74276 - protein, 158 aa, Streptococcus pyogenes
TKALVEGGADLILIETVFDTLNAKAAVFAVKTEFEALGVELPIMISGTITDASGRTLSGQTTEAFYNSLRHAEALTFGQNCALGPDELRQYVQELSRIAECYVTAHPNAGLPNAFGEYDLDADTMAKQIREWAQTGFLNIVGGCCGTTPQHIAAMSLA

SEQ ID NO: 74277 - protein, 124 aa, Streptococcus pyogenes
NTMTGGMFKMENDPRVTPIGRFIRKTSLDELPQFYNVLIGDMSLVGTRPPTVDEYQDYTPAQKRRLSFKPGITGLWQVSGRSEITDFDEVVKLDVAYMDGWTIWRDIQILLKTVKVVLRKEGAK

SEQ ID NO: 74278 - protein, 207 aa, Streptococcus pyogenes
NINTILAQAGIKSDKATGALTTPLHFSTTYQHPEFGQSTGFDYTRTKNPTRATAEKTLAAIESADYALATSSGMSAIVLAFSIFPVGSKVLAVRDLYGGSFRWFNQQEQEGRFSFTYANTEEELIHHLDHDPVDVLYIETPTNPLMLEFDIAYLAKLAHAKGAKVVVDNTFYSPIYQRPIEEGADIVLHSATKYLAGHNDVLAGVVV

SEQ ID NO: 74279 - protein, 166 aa, Streptococcus pyogenes
KIDQAQTLRDLEVETYRDTFGPYIVEEDLEDYFSTVLSLEQIEKDLLDPESETYFVLNEEQEICGFLKINWGQAQTEPVEMDKSFEIQRIYVKKEFHGAGFGKEMFSFALDQAKSRGFEWAWLGVWERNFKAQDFYYRFGFERFSEHEYPTGDTVDTDWLLRKKLI

SEQ ID NO: 74280 - protein, 211 aa, Streptococcus pyogenes
  MISC_FEATURE (197)..(197): X=any amino acid
FLALVIGPLLFREAEEADITSVLKHWRVILYLIFPVIFISTISLGWAAHSLWLSLPLAACMAVGAALGPTDLVAFASLSERFSFPKRVSNILKGEGLLNDASGLVAFRVALAALATGSFSLGEAGVSLGISIIGGFAVGILTAFVNRWLQTLLLSVRASDIASELLLELSLPLLTFFLAEELHVSGIIAVVVSGILXASRFKHIYLLEARV

SEQ ID NO: 74281 - protein, 169 aa, Streptococcus pyogenes
MEKDWWKGKVAYQIYPKSFKDSNGDGVGDLKGITEKLDYLQKLGIDILWLSPIYKSPFIDQGYDISDYYAIDPIFGTMEDMEELIAEGKKRGISIIMDLVVNHCSSHHEWFQKALADPDGPYADYFYFIESDKEPNNWESYFGGSVWETVPVHQQYYLHSFHKDQPDLN

SEQ ID NO: 74282 - protein, 179 aa, Streptococcus pyogenes
  MISC_FEATURE (136)..(136): X=any amino acid
DLAQTTAHHLPKWLRYTLWIVIELALMATDLAEVIGSGIALHLLFGWPLLFSILITIFDVFLLLGLMHLGFRKIEAIVSTLILTILAIFGYLVFLSKPDIGGIFAGFLPQKEVLGIGLPKGNEALTLALGIIGATXMPHNLYLHSSISQTRKVDYKDPADIKRAVRFYTWDSNIELSLA

SEQ ID NO: 74283 - protein, 196 aa, Streptococcus pyogenes
FSLICLLFLVLIARLGYMQITHQAYYTDKLAKATKKTVKQGSVRGQIYDASGKPLVENVGKQVLTFTRDRKMTAQEMRETAGKLLQYVDVENPQVTERQEVDYYLANTKVYQEVVEHLPEKKKFDTDGNRLPEAKIYQAAVDSIDPSKLGYTDDEKKIIYLYSQMNAVENFATGIISTPALGAEQIATIAADSQEL

SEQ ID NO: 74284 - protein, 77 aa, Streptococcus pyogenes
  MISC_FEATURE (17)..(17): X=any amino acid
MDVTAKYQQSVRDIVAXAVQAGVPVPSFSAAITYFDSYRSADLPANLIQAQRDYFGAHTYQRKDKEGTFHYSWYDEK

SEQ ID NO: 74285 - protein, 157 aa, Streptococcus pyogenes
VPELEPRLFSFNAPFGSCPDCDGLGIKLEVDLDLVVPDDRLTLREGALAPWNPISSNYYPQMLEQAMIHFGVDMDRPFSDFSQEEKDLVLYGSNGKEFHFHYESEFGGVRDIEIPFEGVANNIQRRFRQTNSDSSRNQMRSYNDELTCETCHGYRLN

SEQ ID NO: 74286 - protein, 174 aa, Streptococcus pyogenes
  MISC_FEATURE (148)..(148): X=any amino acid
  MISC_FEATURE (171)..(171): X=any amino acid
MTHFSGKDPFVNMDDIFNQLMANMGGYRSENPRYLVNGREITPEEFQHYRQTGQLPVATTKATNSQMLTPKADSVLTQLGTNLTQEARQGHLDPVIGRNKEIQDTAEILARRTKNNPVLVGDAGVGKTAVIEGLAQAIVNGDVPAAIXNKEIVSIDNSSLEAGTQYRGSFXETI

SEQ ID NO: 74287 - protein, 301 aa, Streptococcus pyogenes
MRIQQLHYIIKIVECGSMNEAAKQLFITQPSLSNAVKDLEMEMGITIFNRNPKGITLTKDGVEFLSYARQIIEQTSLLEDRYKNHNTGRELFSVSSQHYAFVVNAFVSLLKRTDMTRYELFLRETRTWEIIDDVKNFRSEIGVLFINDYNRDVLTKLFDDNHLTASPLFKAQPHIFVSKSNPLATKSLLSMDDLRDFPYLSYDQGIHNSFYFSEEMMSQMPHNKSIVVSDRATLFNLMIGLDGYTVASGILNSNLNGDQIVAIPLDVPDEIDIVFIKHEKANLSKMGERFIEYLLEEVTFD

SEQ ID NO: 74288 - protein, 122 aa, Streptococcus pyogenes
  MISC_FEATURE (26)..(26): X=any amino acid
  MISC_FEATURE (106)..(106): X=any amino acid
MLSALIPSLHSYPAMPLARQLVHQRXVHSGPLVLGADPLKFPTPATDRDRTVSRRSEPSSRAALMGEQPNPWDRLQPQDATSRHRGAKPPRRCELLGEISLLSPGXLLSVERWPFHSVPPDH

SEQ ID NO: 74289 - protein, 601 aa, Streptococcus pyogenes
MADYTLGVQITGDASKMQKAFEKAQEQAEKLKEKIKDSNNESGNSFDGLTTKIDAISGKLSAYGDKISSIGKNMTTMFTLPAVAGITAVVKEYANLEQSIGGVETLFKKSAKAVQKNANTAFRRAGVSANEYMEQVTSFSASLISSLGGDTAKAVGVADTAMVDMSDNANKFGTNIGLIQNAYQGFAKGNYTMLDNLRLGFGGTKEEMQRLLDEAGKLSGMEFDINNFSDIIQAIHIIQDNLGVTGTTAREASETISGSFSQAKASVIDFMGSLGGDGSDVDAKMQAMIQSITVFADNVKEALGRIWDNLPLQEYQKNLLLIAVVGGPILVVVGTIFGAIANIMTVVSGILTVLGMMTPIGWIIAAAIAAIVAAVVFWDDIVAEVGQKFELVKIIGMAMWESFKDGVSSFGKSIQNVVGKIGGWFAEAWNAAADTATRIFTKVGDTISGIFSGVVSGIKSLINGAIGGINKVIGITNKLPGVNIPKIPYLARGTSDWQGGFARINEGGRGELVHMPNGATVVPHDVSMKYARESAKANSGVAYMDSNDEIAKSALKLANDAVKRPVVLNINGREVAKTTGGDMRDYLNSRDMTLKRLRGEV

SEQ ID NO: 74290 - protein, 99 aa, Streptococcus pyogenes
NLKTDLYQVWVYLFKEVKKEAKIISLAIDYNFERLLTKAVYDFLEKRNGSSSNGAGSYLNSFWSSAIVSVISKWIKDGMKIPAEKIATLGLPLFPQKKK

SEQ ID NO: 74291 - protein, 305 aa, Streptococcus pyogenes
MQAPKKRPSNQLVALSVCPNGISSSLMLEATLKELFPQLQFIRIHQLDKIKLLDPASFDLIFSTVAFDCAKPVYVTQALMGPVEKMMLKKMVCDDFHLPLSEQFALDDLLSIIHKHTTITNKEGLVSDLSRYLIGNHLTIEKGGLGLLDLLTADFIRQADAVSDWQEAIRLAAQPLLEHQMIETSYIDGMIDSVNELGAYIVLAPKVAVPHAAPEKGARQLGMSLLQLKEPVSFDLKQEGDPDKQVQLIFVLSAVDSSSHLKALQELSLILDDDEHIEQLIEAKNTEEIMSLISHMIEKGDESHD

SEQ ID NO: 74292 - protein, 39 aa, Streptococcus pyogenes
KTLHKFIGQTVLYFAIFLALLYVFSYLGQGQGGFIYNEF

SEQ ID NO: 74293 - protein, 224 aa, Streptococcus pyogenes
MSYFLITNTQLILKNFTGHYTIGSNSIEDLFTIYYFQLTKSVAQSNVQTDIIKRVYKNSKQLSISDATSKYKAYELLVTEGFFPENADYKWLIKVDTYDKLIDYITDYCFRKMLPLDSMYEHNLKEIIWNYIDPTYESHIIDNGNSEDLSIFLRDNISFFESFNRFKNKEYNDDLEFEDDRLRDEFDKQFNIAISNYKRHVSIRRFNFIFKPFFPNESEQELTF

SEQ ID NO: 74294 - protein, 49 aa, Streptococcus pyogenes
MVTYPWKVFYTSATNKNNAVLLQVVSDTWDVGSYFNKVAQTYTSEFTKG

SEQ ID NO: 74295 - protein, 770 aa, Streptococcus pyogenes
MTQKNSYKLSFLLSLTGFILGLLLVFIGLSGVSVGHAETRNGANKQGAFEIKKNKSQEEYNYEVYDNRNILQDGEHKLEIKRVDGTGKTYQGFCFQLTKNFPTAQGVSKKLYKKLSSSDEETLKQYASKYTSNRRGDTSGNLKKQIAKVLTEGYPTNKSDWLNGLTENEKIEVTQDAIWYFTETTVPADRSYTNRNVNSQKMKEVYQKLIDTTDIDKYEDVQFDLFVPQDTNLQAVISVEPVIESLPWTSLKPIAQKDITAKKIWVDAPKEKPIIYFKLYRQLPGEKEVAVDDAELKQINSEGQQEISVTWTNQLVTDEKGMAYIYSVKEVDKNGELLEPKDYIKKEDGLTVTNTYVKPTSGHYDIEVTFGNGHIDITEDTTPDIVSGENQMKQIEGEDSKPIDEVTENNLIEFGKNTMPGEEDGTNSNKYEEVEDSRPVDTLSGLSSEQGQSGDMTIEEDSATHIKFSKRDIDGKELAGATMELRDSSGKTISTWISDGQVKDFYLMPGKYTFVETAAPDGYEVATAITFTVNEQGQVTVNGKATKGDAHIVMVDAYKPTKGSGQVIDIEEKLPDEQGHSGSTTEIEDSKSSDVIIGGQGEVVDTTEDTQSGMTGHSGSTTEIEDSKSSDVIIGGQGEVVDTTEDTQSGMTGHSGSTTKIEDSKSSDVIVGGQGQIVETTEDTQTGMHGDSGRKTEVEDTKLVQSFHFDNKEPESNSEIPKKDKSKSNTSLPATGEKQHNKFFWMVTSCSLISSVFVISLKSKKRLSSC

SEQ ID NO: 74296 - protein, 148 aa, Streptococcus pyogenes
  MISC_FEATURE (68)..(68): X=any amino acid
  MISC_FEATURE (107)..(107): X=any amino acid
  MISC_FEATURE (126)..(126): X=any amino acid
MGSFRPVAGNLHLHRTKISPSLSLRQCPNHYAFRAGRNLPDKEFRYLRTVIVTAAVYWGFNSDLRLRXTLLLTFQHRAGVTPYTSSYDLAESCVFDKQLLGPIHCGXPKSAPLLPKLRGHFAEFLXREFSRSPEGYSPRLPVVGLRYG

SEQ ID NO: 74297 - protein, 176 aa, Streptococcus pyogenes
VTKPSTESSTEPSKEETKPSTESSTEPSKEETKPSTEASTEPSKEETKPSTESSTEPSKEETKPSTEASTEPSKEETTPGSTTTIVPTNSNSVSTVGRPVLPTNSYILVDQATGIVLQNPDFAQGGYSLLVEVLKDVKELAGKDYKAYNIQLSNENNPIHQISPTVMTIPSNSQKK

SEQ ID NO: 74298 - protein, 142 aa, Streptococcus pyogenes
METAYIIFAILLNLALVRLNSLFFENNINLKLNEYGLELVRENFLNLLLIVFAAPLLEEIIFRKILLSYIFEKVKSGYSLKIIIAVFLSSVIFALSHAIDYSLVNLLNRLVFGILASLLFLRTGRLRSSVVFHGLLNLVALL

SEQ ID NO: 74299 - protein, 133 aa, Streptococcus pyogenes
  MISC_FEATURE (20)..(20): X=any amino acid
  MISC_FEATURE (82)..(82): X=any amino acid
  MISC_FEATURE (106)..(106): X=any amino acid
  MISC_FEATURE (112)..(112): X=any amino acid
  MISC_FEATURE (126)..(126): X=any amino acid
GISTCWPSDTPFGLSLGPDXPRADEPSPGNLSLTVDRILTCLFATHTGILTSMRSSAPHGTPSSHIERSPTMTLLCHPQLRXTVLAPVHFRRRVTRLVSYYALFEXIALLSXHPSCLCNPTSFSTXQLFWDLS

SEQ ID NO: 74300 - protein, 451 aa, Streptococcus pyogenes
MTENEQIFWNRVLELAQSQLKQATYEFFVHDARLLKVDKHIATIYLDQMKELFWEKNLKDVILTAGFEVYNAQISVDYVFEEDLMIEQNQTKINQKPKQQALNSLPTVTSDLNSKYSFENFIQGDENRWAVAASIAVANTPGTTYNPLFIWGGPGLGKTHLLNAIGNSVLLENPNARIKYITAENFINEFVIHIRLDTMDELKEKFRNLDLLLIDDIQSLAKKTLSGTQEEFFNTFNALHNNNKQIVLTSDRTPDHLNDLEDRLVTRFKWGLTVNITPPDFETRVAILTNKIQEYNFIFPQDTIEYLAGQFDSNVRDLEGALKDISLVANFKQIDTITVDIAAEAIRARKQDGPKMTVIPIEEIQAQVGKFYGVTVKEIKATKRTQNIVLARQVAMFLAREMTDNSLPKIGKEFGGRDHSTVLHAYNKIKNMISQDESLRIEIETIKNKIK

SEQ ID NO: 74301 - protein, 378 aa, Streptococcus pyogenes
MIQFSINRTLFIHALNTTKRAISTKNAIPILSSIKIEVTSTGVTLTGSNGQISIENTIPVSNENAGLLITSPGAILLEASFFINIISSLPDISINVKEIEQHQVVLTSGKSEITLKGKDVDQYPRLQEVSTENPLILKTKLLKSIIAETAFAASLQESRPILTGVHIVLSNHKDFKAVATDSHRMSQRLITLDNTSADFDVVIPSKSLREFSAVFTDDIETVEVFFSPSQILFRSEHISFYTRLLEGNYPDTDRLLMTEFETEVVFNTQSLRHAMERAFLISNATQNGTVKLEITQNHISAHVNSPEVGKVNEDLDIVSQSGSDLTISFNPTYLIESLKAIKSETVKIHFLSPVRPFTLTPGDEEESFIQLITPVRTN

SEQ ID NO: 74302 - protein, 65 aa, Streptococcus pyogenes
MYQIGSFVEMKKPHACVIKETGKKANQWKVLRVGADIKIQCTNCQHVIMMSRYDFERKLKKVLQP

SEQ ID NO: 74303 - protein, 371 aa, Streptococcus pyogenes
MALTAGIVGLPNVGKSTLFNAITKAGAEAANYPFATIDPNVGMVEVPDERLQKLTELITPKKTVPTTFEFTDIAGIVKGASRGEGLGNKFLANIREIDAIVHVVRAFDDENVMREQGREDAFVDPIADIDTINLELILADLESINKRYARVEKMARTQKDKESVAEFNVLQKIKPVLEDGKSARTIEFTEDEAKVVKGLFLLTTKPVLYVANVDEDKVANPDGIDYVKQIRDFAATENAEVVVISARAEEEISELDDEDKEEFLEAIGLTESGVDKLTRAAYHLLGLGTYFTAGEKEVRAWTFKRGIKAPQAAGIIHSDFERGFIRAVTMSYDDLMTYGSEKAVKEAGRLREEGKEYVVQDGDIMEFRFNV

SEQ ID NO: 74304 - protein, 1167 aa, Streptococcus pyogenes
MDILELFSQNKKVQSWHSGLTTLGRQLVMGLSGSSKTLAIASAYLDDQKKIVVVTSTQNEVEKLASDLSSLLDEELVFQFFADDVAAAEFIFASMDKALSRIETLQFLRNPKSQGVLIVSLSGLRILLPNPDVFTKSQIQLTVGEDYDSDTLTKQLMTIGYQKVSQVISPGEFSRRGDILDIYEITQELPYRLEFFGDDIDSIRQFHPETQKSFEQLEGIFINPASDLIFEVSDFQRGIEQLEKALQTAQDDKKSYLEDVLAVSKNGFKHKDIRKFQSLFYEKEWSLLDYIPKGTPIFFDDFQKLVDKNARFDLEIANLLTEDLQQGKALSNLNYFTDNYRELRHYKPATFFSNFHKGLGNIKFDQMHQLTQYAMQEFFNQFPLLIDEIKRYQKNQTTVIVQVESQYAYERLEKSFQDYQFRLPLVSANQIVSRESQIVIGAISSGFYFADEKLALITEHEIYHKKIKRRARRSNISNAERLKDYNELAVGDYVVHNVHGIGRFLGIETIQIQGIHRDYVTIQYQNSDRISLPIDQISSLSKYVSADGKEPKINKLNDGRFQKTKQKVARQVEDIADDLLKLYAERSQQKGFSFSPDDDLQRAFDDDFAFVETEDQLRSIKEIKADMESMQPMDRLLVGDVGFGKTEVAMRAAFKAVNDHKQVAVLVPTTVLAQQHYENFKARFENYPVEVDVLSRFRSKKEQAETLERVRKGQIDIIIGTHRLLSKDVVFSDLGLIVIDEEQRFGVKHKETLKELKTKVDVLTLTATPIPRTLHMSMLGIRDLSVIETPPTNRYPVQTYVLENNPGLVREAIIREMDRGGQIFYVYNKVDTIEKKVAELQELVPEASIGFVHGQMSEIQLENTLIDFINGDYDVLVATTIIETGVDISNVNTLFIENADHMGLSTLYQLRGRVGRSNRIAYAYLMYRPDKVLTEVSEKRLEAIKGFTELGSGFKIAMRDLSIRGAGNILGASQSGFIDSVGFEMYSQLLEQAIASKQGKTTVRQKGNTEINLQIDAYLPDDYIADERQKIDIYKRIREIQSREDYLNLQDELMDRFGEYPDQVAYLLEIALLKHYMDNAFAELVERKNNQVIVRFEVTSLTYFLTQDYFEALSKTHLKAKISEHQGKIDIVFDVRHQKDYRILEELMLFGERLSEIKIRKNNSVFK

SEQ ID NO: 74305 - protein, 98 aa, Streptococcus pyogenes
MKRIVGEIMRLDKYLKVSRLIKRRSVAKEVADKGRIKVNGILAKSSTNIKLNDHIEISFGNKLLTVRVIEIKDSTKKEDALKMYEIISETRITLNEEA

SEQ ID NO: 74306 - protein, 428 aa, Streptococcus pyogenes
MMTYQEIFNEIKNKAYFKNHRHVLIAVSGGVDSMNLLHFLYLFQDKLKIRIGIAHVNHKQRSESDSEEAYLKCWAKKHDIPIYVSNFEGIFSEKAARDWRYAFFKSIMLKNNYSALVTAHHSDDQAETILMRLIRGSRLRHLSGIKSVQPFANGQLIRPFLTFSKKDLPEIFHFEDSSNRELSFLRNRVRNNYLPLLKQENPRFIQGLNQLALENSLLFQAFKELTNHITTTDLTEFNEQSKSIQYFLLQDYLEGFPDLDLKKSQFTQLLQIIQTAKQGYYYLKKDYYIFIDKFSFKITKIVPKTELVKEEKMLEYDSNLCYRDYYFSFMPKSNEDQGQVSIPLFSLSSIKLRSRQSGDYISFGHFSKKIRRLFIDEKFTIAERQNAIIGEQDEQIIFVLIGNKTYLRKACKHDIMLAKLYIDKLEKG

SEQ ID NO: 74307 - protein, 659 aa, Streptococcus pyogenes
MKNNKNNGFVKNSFIYILMIIVVITGFQFYLKGTSTQSQQISYSKLIKHLKAGDIKSLSYQPSGSIIEVKGKYEKPQKVTVNSGLSFLGGRASTQVTEFSSLVLPSDTILKEMTAAADKNGTELTVKQESSSGTWITFLMSFLPIVIFAAFMMMMMNQGGGGARGAMSFGKNKAKSQSKGNVKVRFTDVAGAEEEKQELVEVVDFLKNPKKYKSLGARIPAGVLLEGPPGTGKTLLAKAVAGEAGVPFFSISGSDFVEMFVGVGASRVRSLFEDAKKAERAIIFIDEIDAVGRRRGAGMGGGNDEREQTLNQLLIEMDGFEGNENIIVIAATNRSDVLDPALLRPGRFDRKVLVGRPDVKGREAILRVHAKNKPLANDVNLKVVAQQTPGFVGADLENVLNEAALVAARRNKIKIDASDIDEAEDRVIAGPSKKDRTISQKEREMVAYHEAGHTIVGLVLSNARVVHKVTIVPRGRAGGYMIALPKEDQMLLSKEDLKEQLAGLMGGRVAEEIVFNAQTSGASNDFEQATQIARAMVTEYGMSEKLGPVQYEGNHAMMPGQISPEKAYSAQTAQMIDDEVRELLNQARNQAADIINENRDTHKLIAEALLKYETLDAAQIKSIYETGKMPVDLETDDNEAHALSYDEIKNKMTESESAE

SEQ ID NO: 74308 - protein, 463 aa, Streptococcus pyogenes
MTIFRKKKKYSNKTEMQRHFKVIDLVFLGLGSMVGTGIFTVTGIGAAKYAGPALTISIIISAIAIGILALFYAEFASRMPSNGGAYSYVYATLGEFPAWLVGWYIIMEFLTAISSVAVGWGSYLKGLLANYNIVLPNALNGTFNLKNGTYIDILPVLVMFFVTGIVLMNSKLALRFNSFLVILKFSALALFIFVGIFFIDHNNWSHFAPYGVGQITGGKTGIFAGASVMFFAFLGFESISMAVDEVKEPQKTIPKGIILSLIIVTALYIVVTTILTGIVHYTKLNVPDAVAFALRNIRLYWAADYVSIVAILTLITVCISMTYALARTIYSISRDGLLPKSLYTLTKKNKVPQNATLVTGLLAMICAGIFPLSSLAEFVNICTLAYLIILSGAIIKLRRIEGEPKANEFKTPLVPFLPMLAIIICLSFMSQYKAFTWIAFAIATIIGTLIYLAYGYTHSIENK

SEQ ID NO: 74309 - protein, 320 aa, Streptococcus pyogenes
MSYSDLKLFALSSNKELAEKVASAMGIQLGKSTVRQFSDGEIQVNIEESIRGHHVFILQSTSSPVNDNLMEILIMVDALKRASAEKISVVMPYYGYARQDRKARSREPITSKLVANMLEVAGVDRLLTVDLHAAQIQGFFDIPVDHLMGAPLIADYFDRHGLVGEDVVVVSPDHGGVTRARKLAQFLQTPIAIIDKRRSVDKMNTSEVMNIIGNVSGKKCILIDDMIDTAGTICHAADALAEAGATAVYASCTHPVLSGPALDNIQRSAIEKLIVLDTIYLPKERLIDKIEQISIADLVAEAIIRIHEKRPLSPLFEMGN

SEQ ID NO: 74310 - protein, 1257 aa, Streptococcus pyogenes
MSSYFPVAPLSDLVSYMNKRIFVEKKADFGIKSASLVKELTHNLQLTSLKALRIVQVYDVFNLAEDLLARAEKHIFSEQVTDCLLTETEITAELDKVAFFAIEALPGQFDQRAASSQEALLLFGSDSQVKVNTAQLYLVNKDITEAELEAVKNYLLNPVDSRFKDITLPLEEQAFSVSDKTIPNLDFFETYQADDFATYKAEQGLAMEVDDLLFIQNYFKSIGCVPTETELKVLDTYWSDHCRHTTFETELKNIDFSASKFQKQLQTTYDKYIAMRDELGRSEKPQTLMDMATIFGRYERANGRLDDMEVSDEINACSVEIEVDVDGVKEPWLLMFKNETHNHPTEIEPFGGAATCIGGAIRDPLSGRSYVYQAMRISGAGDITTPIAETRAGKLPQQVISKTAAHGYSSYGNQIGLATTYVREYFHPGFVAKRMELGAVVGAAPKENVVREKPEAGDVVILLGGKTGRDGVGGATGSSKVQTVESVETAGAEVQKGNAIEERKIQRLFRDGNVTRLIKKSNDFGAGGVCVAIGELADGLEIDLDKVPLKYQGLNGTEIAISESQERMSVVVRPNDVDAFIAACNKENIDAVVVATVTEKPNLVMTWNGEIIVDLERRFLDTNGVRVVVDAKVVDKDLTVPEARTTSAETLEADTLKVLSDLNHASQKGLQTIFDSSVGRSTVNHPIGGRYQITPTESSVQKLPVQHGVTTTASVMAQGYNPYIAEWSPYHGAAYAVIEATARLVATGADWSRARFSYQEYFERMDKQAERFGQPVSALLGSIEAQIQLGLPSIGGKDSMSGTFEDLTVPPTLVAFGVTTADSRKVLSPEFKAAGENIYYIPGQAISEDIDFDLIKDNFSQFEAIQAQHKITAASAAKYGGVLESLALMTFGNRIGASVEIAELDSSLTAQLGGFVFTSAEEIADAVKIGQTQADFTVTVNGNDLAGASLLAAFEGKLEEVYPTEFEQTDVLEEVPAVVSDTVIKAKETIEKPVVYIPVFPGTNSEYDSAKAFEQVGASVNLVPFVTLNEVAIAESVDTMVANIAKANIIFFAGGFSAADEPDGSAKFIVNILLNEKVRAAIDSFIEKGGLIIGICNGFQALVKSGLLPYGNFEEAGETSPTLFYNDANQHVAKMVETRIANTNSPWLAGVEVGDIHAIPVSHGEGKLVVSASEFAELRDNGQIWSQYVDFDGQPSMDSKYNPNGSVNAIEGITSKNGQIIGKMGHSERWEDGLFQNIPGNKDQILFASAVKYFTGK

SEQ ID NO: 74311 - protein, 430 aa, Streptococcus pyogenes
MLERYSRPEMAAIWTEENKYHAWLEVEILADEAWAELGEIPKEDVAKIREKADFDIDRILEIEQDTRHDVVAFTRAVSETLGEERKWVHYGLTSTDVVDTAYGYLYKQANDIIRRDLENFTNIVADKAREHKMTIMMGRTHGVHAEPTTFGLKLATWYSEMKRNIERFEHAAAGVEAGKISGAVGNFANIPPFVEEYVCDKLGIRPQEISTQVLPRDLHAEYFAVLASIATSIERMATEIRGLQKSEQREVEEFFAKGQKGSSAMPHKRNPIGSENMTGLARVIRGHMVTAYENVSLWHERDISHSSAERIITPDTTILIDYMLNRFGNIVKNLTVFPENMMRNMESTFGLIYSQRVMLKLIEKGMTREEAYDLVQPKTAYSWDNQVDFKPLLEEDTKVTSCLTQEEIDELFNPIYYTKRVDDIFKRLGI

SEQ ID NO: 74312 - protein, 591 aa, Streptococcus pyogenes
MRIKWFSFVRVTGLLLVLLYHFFKNVFPGGFIGVDIFFTFSGYLITALLIDEYTKKESIDIIGFLKRRFYRIVPPLVLMILLTIPFTFLIKKDFIANIGSQITAVLGFTTNIYEILTGSSYESQFIPHLFVHTWSLAIEVHFYLFWGVFVWLLARRKETQKQLRGLLFLISLGIFAISFLSMFIRSFMTSNFSLIYFSSLSHSFPFFLGAMFATITGINETTVRFQKNVRLWPRQYVLAAMIGAFTLLLVLTVTLDFNHITTYLFGFALASLFASIMIYAARVLHEQTPDVQEPKAITYIADISYGIYLFHWPFYIIFSQLMSHILAVILTVFFSILFATVSYYIVEPLVQGRKPNLLGLEIDCSPYYKWIVGGSLALALLTLGTCMIAPKVGKFEKQLLVSSLQQAQSNMERTHTLAAGDANALSDVGIIGDSVALRSSAAFSQIMPQAQLDAAVSRNFKEAFDLFNNQIKSKSLSKTVVLAVGVNSLDNYSQAVQSFIEALPKGHRLVLVSPYNAKNASQVAEARDYGLKLSKKYKYVTIADWYKVAVEHPDIWYGSDGVHYSEDSQGAELYVSTIQTAVEKSAKKPAK

SEQ ID NO: 74313 - protein, 338 aa, Streptococcus pyogenes
MKAVVVNQASTGVEVVEHDLPNIGHGEALVKVEYCGVCHTDLHVAHGDFGQVPGRILGHEGIGIVEEIGEGVTSLKVGDRVSIAWFFEGCGHCEYCTTGRETLCRSVKNAGYSVDGGMSEYAVVTADYAVKVPEGLDPAQASSITCAGVTTYKAIKEAGAAPGQWIVIFGAGGLGNLAVQYAKKVFNAHVVAVDINNDKLELAKEVGADILVNGKEIEDVPGYIQEKTGGAHGVVVTAVSKVAFNQAIDSVRAGGTVVAVGLPSEYMELSIVKTVLDGIKVVGSLVGTRKDLEEAFAFGAEGLVAPVVEKVPVDTAPEVFDEMERGLIQGRKVLDFIS

SEQ ID NO: 74314 - protein, 102 aa, Streptococcus pyogenes
MANKKIRIRLKAYEHRTLDTAAEKIVETATRTGATVAGPVPLPTERSLYTIIRATHKYKDSREQFEMRTHKRLVDIINPTQKTVDALMKLDLPSGVNVEIKL

SEQ ID NO: 74315 - protein, 208 aa, Streptococcus pyogenes
MTKGILGKKVGMTQIFTESGEFIPVTVIEATPNVVLQVKTVETDGYEAVQVGFDDKREVLSNKPAKGHVAKANTAPKRFIREFKNIEGLEVGAELSVEQFEAGDVVDVTGISKGKGFQGVIKRHGQSRGPMAHGSRYHRRPGSMGPVAPNRVFKNKRLAGRMGGNRVTVQNLEIVQVIPEKNVILVKGNVPGAKKSLITIKSAVKAAK

SEQ ID NO: 74316 - protein, 207 aa, Streptococcus pyogenes
MANVKLFDQTGKEVSSVELNDAIFGIEPNESVVFDVVISQRASLRQGTHAVKNRSAVSGGGRKPWRQKGTGRARQGSIRSPQWRGGGVVFGPTPRSYGYKLPQKVRRLALKSVYSAKVAEDKFVAVEGLSFAAPKTAEFAKVLSALSIDTKVLVLVEEGNEFAALSARNLPNVTVATAATASVLDIVNADKLLVTKEAISTIEEVLA

SEQ ID NO: 74317 - protein, 98 aa, Streptococcus pyogenes
MNLYDVIKKPVITEKSMIALEAGKYTFEVDTRAHKLLIKQAVEAAFDGVKVASVNTVNVKPKAKRVGRYTGFTSKTKKAIITLTADSKAIELFAAEAE

SEQ ID NO: 74318 - protein, 277 aa, Streptococcus pyogenes
MGIKVYKPTTNGRRNMTSLDFAEITTSTPEKSLLVSLKSKAGRNNNGRITVRHQGGGHKRHYRLIDFKRNKDGVEAVVKTIEYDPNRTANIALVHYTDGVKAYIIAPKGLEVGQRIVSGPDADIKVGNALPLANIPVGTVVHNIELKPGKGGELVRAAGASAQVLGQEGKYVLVRLQSGEVRMILGTCRATIGTVGNEQQSLVNIGKAGRSRWKGIRPTVRGSVMNPNDHPHGGGEGKAPVGRKAPSTPWGKPALGLKTRNKKAKSDKLIVRRRNEK

SEQ ID NO: 74319 - protein, 92 aa, Streptococcus pyogenes
MGRSLKKGPFVDEHLMKKVEAQANDEKKKVIKTWSRRSTIFPSFIGYTIAVYDGRKHVPVYIQEDMVGHKLGEFAPTRTYKGHAADDKKTRR

SEQ ID NO: 74320 - protein, 114 aa, Streptococcus pyogenes
MAEITSAKAMARTVRVSPRKTRLVLDLIRGKKVADAIAILKFTPNKAARVIEKTLNSAIANAENNFGLEKANLVVSETFANEGPTMKRFRPRAKGSASPINKRTTHVTVVVSEK

SEQ ID NO: 74321 - protein, 217 aa, Streptococcus pyogenes
MGQKVHPIGMRVGIIRDWDAKWYAEKEYADYLHEDLAIRKFINKELADASVSTIEIERAVNKVIVSLHTAKPGMVIGKGGANVDALRGQLNKLTGKQVHINIIEIKQPDLDAHLVGENIARQLEQRVAFRRAQKQAIQRTMRAGAKGIKTQVSGRLNGADIARAEGYSEGTVPLHTLRADIDYAWEEADTTYGKLGVKVWIYRGEVLPARKNTKGGK

SEQ ID NO: 74322 - protein, 137 aa, Streptococcus pyogenes
MLVPKRVKHRREFRGKMRGEAKGGKEVSFGEYGLQATTSHWITNRQIEAARIAMTRYMKRGGKVWIKIFPHKSYTAKAIGVRMGSGKGAPEGWVAPVKRGKVMFEIAGVSEEIAREALRLASHKLPVKCKFVKREAE

SEQ ID NO: 74323 - protein, 68 aa, Streptococcus pyogenes
MKLQEIKDFVKELRGLSQEELAKKENELKKELFDLRFQAAAGQLEKTARLDEVKKQIARVKTVQSEMK

SEQ ID NO: 74324 - protein, 86 aa, Streptococcus pyogenes
MERNQRKTLYGRVVSDKMDKTITVVVETKRNHPVYGKRINYSKKYKAHDENNVAKEGDIVRIMETRPLSATKRFRLVEVVEKAVII

SEQ ID NO: 74325 - protein, 122 aa, Streptococcus pyogenes
MIQQETRLKVADNSGAREILTIKVLGGSGRKFANIGDVIVASVKQATPGGAVKKGDVVKAVIVRTKTGARRPDGSYIKFDDNAAVIIRDDKTPRGTRIFGPVARELREGGYMKIVSLAPEVL

SEQ ID NO: 74326 - protein, 101 aa, Streptococcus pyogenes
MFVKKGDKVRVIAGKDKGTEAVVLKALPKVNKVIVEGVGMIKKHQKPNTENPQGAIVEKEAPIHVSNVQVLDKNGVAGRIGYKVVDGKKVRYSKKSGEVLD

SEQ ID NO: 74327 - protein, 180 aa, Streptococcus pyogenes
MANRLKEKYTNEVIPALTEKFNYTSVMAVPKVEKIVLNMGVGDAVSNAKNLEKAAAELALISGQKPLITKAKKSIAGFRLREGVAIGAKVTLRGERMYEFLDKLVSVSLPRVRDFHGVPTKSFDGRGNYTLGVKEQLIFPEISFDDVDKVRGLDIVIVTTANTDEESRELLKGLGMPFAK

SEQ ID NO: 74328 - protein, 61 aa, Streptococcus pyogenes
MAKKSMIAKNKRPAKHSTQAYTRCEKCGRPHSVYRKFKLCRVCFRELAYKGQIPGVVKASW

SEQ ID NO: 74329 - protein, 132 aa, Streptococcus pyogenes
MVMTDPIADFLTRIRNANQVKHEVLEVPASNIKKGIAEILKREGFVKNVEVIEDDKQGIIRVFLKYGKNGERVITNLKRISKPGLRVYAKRDDMPKVLNGLGIAIISTSEGLLTDKEARQKNVGGEVIAYVW

SEQ ID NO: 74330 - protein, 178 aa, Streptococcus pyogenes
MSRIGNKVITMPAGVELTNNNNVITVKGPKGELTREFNKNIEIKVEGTEITVVRPNDSKEMKTIHGTTRANLNNMVVGVSEGFKKDLEMKGVGYRAQLQGTKLVLSVGKSHQDEVEAPEGITFTVANPTSISVEGINKEVVGQTAAYIRSLRSPEPYKGKGIRYVGEYVRLKEGKTGK

SEQ ID NO: 74331 - protein, 118 aa, Streptococcus pyogenes
MISKPDKNKIRQKRHRRVRGKLSGTADRPRLNVFRSNTGIYAQVIDDVAGVTLASASTLDKDVSKGTKTEQAVVVGKLVAERAVAKGISEVVFDRGGYLYHGRVKALADAARENGLKF

SEQ ID NO: 74332 - protein, 164 aa, Streptococcus pyogenes
MAFKDNAVELEERVVAINRVTKVVKGGRRLRFAALVVVGDGNGRVGFGTGKAQEVPEAIRKAVEAAKKNMIEVPMVGTTIPHEVYTNFGGAKVLLKPAVEGSGVAAGGAVRAVIELAGVADITSKSLGSNTPINIVRATVEGLKQLKRAEEVAALRGISVSDLA

SEQ ID NO: 74333 - protein, 60 aa, Streptococcus pyogenes
MAQIKITLTKSPIGRKPEQRKTVVALGLGKLNSSVVKEDNAAIRGMVTAISHLVTVEDVK

SEQ ID NO: 74334 - protein, 146 aa, Streptococcus pyogenes
MKLHELKAAEGSRKVRNRVGRGTSSGNGKTSGRGQKGQKARSGGGVRLGFEGGQTPLFRRIPKRGFTNINTKEYALVNLDQLNVFDDGTEVTPAILKDAGIVRAEKSGVKVLGNGELTKKLTVKAAKFSKSAEAAIIAKGGSIEVI

SEQ ID NO: 74335 - protein, 434 aa, Streptococcus pyogenes
MFLKILKDALKIKTVRNKIFFTIFIILVFRIGTHITVPGVNAKSLEQLSELPFLNMLNLVSGNAMRNFSVFSMGVSPYITASIVVQLLQMDILPKFVEWGKQGEVGRRKLNQATRYISLVLAFAQSIGITAGFNTLSNVALVKTPDIKTYLLIGALLTTGSVIVTWLGEQITDKGFGNGVSMIIFAGIISSIPSAIATIREDYFVNVKASDLHSSYLIVGILIIAVLAIVFFTTYVQQAEYKIPIQYTKLMQGAPTSSYLPLKVNPAGVIPVIFASSITTIPSTIIPFVQNGRDLPWLNRLQEIFNYQTPVGMIVYALLIILFSFFYTFVQVNPEKTAENLQKNSSYIPSVRPGRETEQFMSALLKKLATVGAIFLAFISLAPIAAQQALNLSSSIALGGTSLLILISTGIEGMKQLEGYLLKRKYVGFMNTAE

SEQ ID NO: 74336 - protein, 212 aa, Streptococcus pyogenes
MNLLIMGLPGAGKGTQAAKIVEEFGIAHISTGDMFRAAMANQTEMGRLAKSYIDKGELVPDEVTNGIVKERLAEDDIAEKGFLLDGYPRTIEQAHALDATLEELGLRLDGVINIKVDPSCLVERLSGRIINRKTGETFHKVFNPPVDYKEEDYYQREDDKPETVKRRLDVNMAQGEPILEHYRKLGLVTDIEGNQEITDVFADVEKALLELK

SEQ ID NO: 74337 - protein, 72 aa, Streptococcus pyogenes
MAKEDVIEIEGKVVETMPNAMFTVELENGHQILATVSGKIRKNYIRILVGDRVTVEMSPYDLTRGRITYRFK

SEQ ID NO: 74338 - protein, 38 aa, Streptococcus pyogenes; identical to SEQ ID NO: 72207

SEQ ID NO: 74339 - protein, 121 aa, Streptococcus pyogenes
MARIAGVDIPNDKRVVISLTYVYGIGLATSKKILAAAGISEDIRVKDLTSDQEDAIRREVDAIKVEGDLRREVNMNIKRLMEIGSYRGIRHRRGLPVRGQNTKNNARTRKGKAVAIAGKKK

SEQ ID NO: 74340 - protein, 127 aa, Streptococcus pyogenes
MAKPTRKRRVKKDIESGVAHIHATFNNTIVMITDVHGNALAWSSAGALGFKGSRKSTPFAAQMAAEAAAKSAQEHGLKTVEVTVKGPGSGRESAIRALAAAGLEVTAIRDVTPVPHNGARPPKRRRV

SEQ ID NO: 74341 - protein, 312 aa, Streptococcus pyogenes
MIEFEKPIITKIDENKDYGRFVIEPLERGYGTTLGNSLRRVLLSSLPGAAVTSIKIDGVLHEFDTIPGVREDVMQIILNVKGLAVKSYVEDEKIIELEVEGPAEVTAGDILTDSDIELVNPDHYLFTIAEGHSLRATMTVAKKRGYVPAEGNKKDDAPVGTLAVDSIYTPVKKVNYQVEPARVGSNDGFDKLTIEIMTNGTIIPEDALGLSARVLIEHLNLFTDLTEVAKATEVMKETEKVNDEKVLDRTIEELDLSVRSYNCLKRAGINTVFDLTEKSEPEMMKVRNLGRKSLEEVKVKLADLGLGLKNDK

SEQ ID NO: 74342 - protein, 418 aa, Streptococcus pyogenes
MNIFEELKARGLVFQTTDEQALVKALTEGQVSYYTGYDPTADSLHLGHLVAILTSRRLQLAGHKPYALVGGATGLIGDPSFKDAERSLQTKETVLEWSDKIKGQLSTFLDFENGDNKAELVNNYDWFSQISFIDFLRDVGKYFTVNYMMSKDSVKKRIETGISYTEFAYQIMQGYDFYELNDKHNVTLQIGGSDQWGNMTAGTELLRKKADKTGHVMTVPLITDSTGKKFGKSEGNAVWLDADKTSPYEMYQFWLNVMDDDAVRFLKIFTFLSLDEIAEIETQFNAARHERLAQKTLAREVVTLVHGEEAYKQALNITEQLFAGNIKNLSANELKQGLSNVPNYHVQSIDNHNIVEILVAAKISPSKRQAREDVQNGAIYINGDRVQDLDYQLSNDDKIDDQLTVIRRGKKKYAVLTY

SEQ ID NO: 74343 - protein, 1188 aa, Streptococcus pyogenes
MAGHEVRYGKHRTRRSFSRIKEVLDLPNLIEIQTDSFQDFLDSGLKEVFEDVLPISNFTDTMELEFVGYEFKEPKYTLEEARIHDASYSAPIFVTFRLVNKETGEIKTQEVFFGDFPIMTEMGTFIINGGERIIVSQLVRSPGVYFNDKVDKNGKVGYGSTVIPNRGAWLELETDSKDIAYTRIDRTRKIPFTTLVRALGFSGDDEIVDIFGESDLVRNTIEKDIHKNPSDSRTDEALKEIYERLRPGEPKTADSSRSLLIARFFDARRYDLAAVGRYKVNKKLNIKTRLLNQIIAENLVDAETGEILVEAGTEMTRSVIESIEEHLDGDLNKFVYTPNDYAVVTEPVVLQKFKVVSPIDPDRVVTIVGNANPDDKVRALTPADILAEMSYFLNLAEGLGKVDDIDHLGNRRIRAVGELLANQFRIGLARMERNVRERMSVQDNDVLTPQQIINIRPVTAAVKEFFGSSQLSQFMDQHNPLSELSHKRRLSALGPGGLTRDRAGYEVRDVHYTHYGRMCPIETPEGPNIGLINNLSSFGHLNKYGFIQTPYRKVDRATGTVTNEIVWLTADEEDEYTVAQANSKLNEDGTFAEEIVMGRHQGNNQEFSASVVDFVDVSPKQVVAVATACIPFLENDDSNRALMGANMQRQAVPLIDPKAPYVGTGMEYQAAHDSGAAVIAQQNGKVVFSDAEKVEIRRQDGSLDVYHITKFRRSNSGTAYNQRTLVKVGDIVEKGDFIADGPSMENGEMALGQNPVVAYMTWEGYNFEDAVIMSERLVKEDVYTSVHLEEFESETRDTKLGPEEITREIPNVGEEALKDLDEMGIIRIGAEVKEGDILVGKVTPKGEKDLSAEERLLHAIFGDKSREVRDTSLRVPHGGDGIVRDVKIFTRANGDELQSGVNMLVRVYIAQKRKIKVGDKMAGRHGNKGVVSRIVPVEDMPYLPDGTPVDIMLNPLGVPSRMNIGQVMELHLGMAARNLGIHIATPVFDGASSEDLWDTVREAGMDSDAKTVLYDGRTGEPFDNRVSVGVMYMIKLHHMVDDKLHARSVGPYSLVTQQPLGGKAQFGGQRFGEMEVWALEAYGASNVLQEILTYKSDDVTGRLKAYEAITKGKPIPKPGVPESFRVLVKELQSLGLDMRVLDEDDNEVELRDLDEGEDDDIMHVDDLEKAREKQAQETQEVSETTDEK

SEQ ID NO: 74344 - protein, 1213 aa, Streptococcus pyogenes
MVDVNRFKSMQITLASPSKVRSWSYGEVKKPETINYRTLKPEREGLFDEVIFGPTKDWECACGKYKRIRYKGIVCDRCGVEVTRAKVRRERMGHIELKAPVSHIWYFKGIPSRMGLTLDMSPRALEEVIYFAAYVVIDPKDTPLEPKSLLTEREYREKLQEYGHGSFVAKMGAEAIQDLLKRVDLAAEIAELKEELKSASGQKRIKAVRRLDVLDAFNKSGNKPEWMVLNILPVIPPDLRPMVQLDGGRFAASDLNDLYRRVINRNNRLARLLELNAPGIIVQNEKRMLQEAVDALIDNGRRGRPITGPGSRPLKSLSHMLKGKQGRFRQNLLGKRVDFSGRSVIAVGPTLKMYQCGVPREMAIELFKPFVMREIVAKEYAGNVKAAKRMVERGDERIWDILEEVIKEHPVLLNRAPTLHRLGIQAFEPVLIDGKALRLHPLVCEAYNADFDGDQMAIHVPLSEEAQAEARLLMLAAEHILNPKDGKPVVTPSQDMVLGNYYLTMEDAGREGEGMIFKDKDEAVMAYRNGYAHLHSRVGIAVDSMPNKPWKDNQRHKIMVTTVGKILFNDIMPEDLPYLQEPNNANLTEGTPDKYFLEPGQDIQEVIDRLDINVPFKKKNLGNIIAETFKRFRTTETSAFLDRLKDLGYYHSTLAGLTVGIADIPVIDNKAEIIDAAHHRVEEINKAFRRGLMTDDDRYVAVTTTWREAKEALEKRLIETQDPKNPIVMMMDSGARGNISNFSQLAGMRGLMAAPNGRIMELPILSNFREGLSVLEMFFSTHGARKGMTDTALKTADSGYLTRRLVDVAQDVIIREDDCGTDRGLLIRAITDGKEVTETLEERLQGRYTRKSVKHPETGEVLIGADQLITEDMARKIVDAGVEEVTIRSVFTCATRHGVCRHCYGINLATGDAVEVGEAVGTIAAQSIGEPGTQLTMRTFHTGGVASNTDITQGLPRIQEIFEARNPKGEAVITEVKGNVVEIEEDASTRTKKVYVQGKTGMGEYVIPFTARMKVEVGDEVNRGAALTEGSIQPKRLLEVRDTLSVETYLLAEVQKVYRSQGVEIGDKHVEVMVRQMLRKVRVMDPGDTDLLPGTLMDISDFTDANKDIVISGGIPATSRPVLMGITKASLETNSFLSAASFQETTRVLTDAAIRGKKDHLLGLKENVIIGKIIPAGTGMARYRNIEPQAMNEIEVIDHTEVSAEAVFTAEAE

SEQ ID NO: 74345 - protein, 317 aa, Streptococcus pyogenes
MTFEKIEEAYQLLLENCQLIENDLKTHIYDAIVEQNSFYLGAEGASPQVAQNSDKLKALCLTKEEWRKAYQFLFIKAAQTEQLQANHQFTPDAIGFILLYLLEQLSDKDSLEVLEIGSGTGNLAQTLLNNTSKSLDYVGIELDDLLIDLSASIAEIMDSSAHFIQEDAVRPQLLKESDIVISDLPVGYYPNDDIAKRYKVASSDKHTYAHHLLMEQSLKYLKKDGFAIFLAPVNLLTSPQSQLLKQWLKDYAQVVTLITLPDSIFGHPSNAKSIIVLQKQTDHPMETFVYPIRDLKLAENIHDFMENFKKWKLSNVN

SEQ ID NO: 74346 - protein, 325 aa, Streptococcus pyogenes
MIKLNSSFRIGDVEIPHRTVLAPMAGVTNSAFRTIAKEFGAGLVVMEMISEKGLLYNNEKTLHMLHIDENEHPMSIQLFGGDAEGLKRAADFIQTNTKADIVDINMGCPVNKVVKNEAGAKWLRDPDKIYHIVKEVTSVLDIPLTVKMRTGWADSSLAVENALAAESAGVSALAMHGRTREQMYTGTCDHETLARVSKAITKIPFIGNGDVRSVQDAKFMIEEIGVDAVMIGRAAMNNPYLFTQINHFFETGQELPDLPFAKKLDIAKDHLKRLINLKGETIAVREFRGLAPHYLRGTAGAAKVRGAVSRAETLAEVEAIFETVR

SEQ ID NO: 74347 - protein, 290 aa, Streptococcus pyogenes
MDKIIKSIAQSGAFRAYVLDSTETVALAQEKHNTLSSSTVALGRTLIANQILAANQKGDSKITVKVIGDSSFGHIISVADTKGHVKGYIQNTGVDIKKTATGEVLVGPFMGNGHFVTIIDYGTGNPYTSTTPLITGEIGEDFAYYLTESEQTPSAIGLNVLLDENDKVKVAGGFMVQVLPGASEEEIARYEKRLQEMPAISHLLASKNHVDALLEAIYGDEPYKRLSEEPLSFQCDCSRERFEAALMTLPKADLQAMIDEDKGAEIVCQFCGTKYQFNESDLEAIISDKA

SEQ ID NO: 74348 - protein, 237 aa, Streptococcus pyogenes
MIVRLIKLLDKLINVIVLCFFFLCLLIAALGIYDALTVYQGANATNYQQYKKKGVQFDDLLAINSDVMAWLTVKGTHIDYPIVQGENNLEYINKSVEGEYSLSGSVFLDYRNKVTFEDKYSLIYAHHMAGNVMFGELPNFRKKSFFNKHKEFSIETKTKQKLKINIFACIQTDAFDSLLFNPIDVDISSKNEFLNHIKQKSVQYREILTTNESRFVALSTCEDMTTDGRIIVIGQIE

SEQ ID NO: 74349 - protein, 458 aa, Streptococcus pyogenes
MDRYIDGFMKWMPESLFICFILTFLVVTMSVLMTDSPFIGTEKTGGIIYGWVNGFWGLLSFAMQMTILLATGNAVASSPPAHKMFKSLAKLPQTRTQIFIFSIVVGSIFGFLHWGLGMMVAIVFGKELLVQARQKGIKVHTPLFVATLFFTFLPATSGLSGAAVLYSATPDYLRNSVADAYKQVVPESVPLTESVLNLPFISLLVVCMLVPLCFALLAHPKDETKIMELDDEIYHHSLDTASHVVIARNTPAEKMNASRLVMYLVGGAIVSYSLYHFSVVGLSGLDLNCFNFLFLGLGLLLCGQQGPEYYGSLFKDGVMSSWGLVLQFPFYAGIFGIIQSTGLGLEISHFFVAISNGTTWPVFAYLYSALLNIAVPSGGSKFVIEAPYIVPATIEVGNDLGKILQAYQLGDATTNLIVPFWALSYLSNFKLKFNQIVAYTIPCVLVVTGIAIIYLFVF

SEQ ID NO: 74350 - protein, 394 aa, Streptococcus pyogenes
MTKEVVITSAYRTPIGNFGGVFKSLSAVDLGVTVVTKILADTGLKSDAIDEVIFGNVLHAGLGQNVARQVALNAGLSYDTPAFTIDMVCGSGLKAVELGAQKIQTGNADIVLVGGTENMSQAPYVLQGQRWGSRMGDSKVVDTMLKDGLSDAFAGYHMGITAENIVQQYGLTREEQDAFAADSQRKAQLAIEKGRFKEEIAPVTIPQRKGEPLLVDQDEYPKFGTTVDKLAKLRPAFIKDEGTVTAGNASGINDGAAAILLMSKEKAEELGLPILAKITSYASAGVDPSIMGCGPIPATKKALAKAQLTIDDIDLIEANEAFAAQALAVSRDLGFDNEKVNVNGGAIALGHPIGASGARILVTLLAEMAKRDVRHGLATLCIGGGQGQSIIVTR

SEQ ID NO: 74351 - protein, 430 aa, Streptococcus pyogenes
MTSVVVVGTQWGDEGKGKITDFLSADAEVIARYQGGDNAGHTIVIDGKKFKLHLIPSGIFFPQKISVIGNGVVVNPKSLVKELAYLHDEGVTTDNLRISDRAHVILPYHIQLDQLQEDAKGDNKIGTTIKGIGPAYMDKAARVGIRIADLLDKDIFAERLRINLAEKNRLFEKMYDSTPLDFDAIFEEYYAYGQEIKQYVTDTSVILNDALDAGKRVLFEGAQGVMLDIDQGTYPFVTSSNPVAGGVTIGSGVGPNKINKVVGVCKAYTSRVGDGPFPTELFDEVGERIREVGHEYGTTTGRPRRVGWFDSVVMRHSRRVSGITNLSLNSIDVLSGLDTVKICVAYDLDGKRIDYYPANLEQLKRCKPIYEELPGWQEDITGVRSLDELPENARNYVRRVGELVGVRISTFSVGPGREQTNILESVWASI

SEQ ID NO: 74352 - protein, 179 aa, Streptococcus pyogenes
MLDSFDKGWFVLQTYSGYENKVKENLLQRAQTYNMLDNILRVEIPTQTVNVEKNGQTKEIEENRFPGYVLVEMVMTDEAWFVVRNTPNVTGFVGSHGNRSKPTPLLEEEIRAILLSMGQTIDVFDTNIKEGDVVQIIDGAFMGQEGRVVEIENNKVKLMLNMFGSETVAEVELYQIAEL

SEQ ID NO: 74353 - protein, 833 aa, Streptococcus pyogenes
MTFYDHTAIEPKWQAFWADNHTFKTGTDASKPKFYALDMFPYPSGAGLHVGHPEGYTATDILSRFKRAQGHNILHPMGWDAFGLPAEQYAMDTGNDPAEFTAENIANFKRQINALGFSYDWDREVNTTDPNYYKWTQWIFTKLYEKGLAYEAEVPVNWVEELGTAIANEEVLPDGTSERGGYPVVRKPMRQWMLKITAYAERLLEDLEEVDWPESIKDMQRNWIGKSTGANVTFKVKDTDKDFTVFTTRPDTLFGATYAVLAPEHALVDAITTADQAEAVAKYKRQASLKSDLARTDLAKEKTGVWTGAYAINPVNGNEMPVWIADYVLASYGTGAIMAVPAHDERDWEFAKQFKLDIIPVLEGGNVEEAAFTEDGLHINSGFLDGLDKASAIAKMVEWLEAEGVGNEKVTYRLRDWLFSRQRYWGEPIPIIHWEDGTSTAVPESELPLVLPVTKDIRPSGTGESPLANVTDWLEVTREDGVKGRRETNTMPQWAGSSWYYLRYIDPHNTEKLADEELLKQWLPVDIYVGGAEHAVLHLLYARFWHKVLYDLGVVPTKEPFQKLFNQGMILGTSYRDSRGALVATDKVEKRDGSFFHVETGEELEQAPAKMSKSLKNVVNPDDVVEQYGADTLRVYEMFMGPLDASIAWSEEGLEGSRKFLDRVYRLITTKEITEENSGALDKVYNETVKAVTEQVDQMKFNTAIAQLMVFVNAANKEDKLFSDYAKGFVQLIAPFAPHLGEELWQALTASGESISYVPWPSYDESKLVENDVEIVVQIKGKVKAKLVVAKDLSREELQEVALANEKVQAEIAGKDIIKVIAVPNKLVNIVIK

SEQ ID NO: 74354 - protein, 234 aa, Streptococcus pyogenes
MAKNLQEMRERVCAANKSLPQHGLVKFTWGNVSEVCRELGRIVIKPSGVDYDLLTPENMVVTDLDGNVVEGDLNPSSDLPTHVELYKAWPEVGGIVHTHSTEAVGWAQAGRDIPFYGTTHADYFYGPVPCARSLTKAEVDGAYEQETGNVILEEFSKRGLDPMAVPGIVVRNHGPFTWGKTPEQAVYHSVVLEEVARMNRLTEQINPRVEPAPRYIMDKHYLRKHGPNAYYGQK

SEQ ID NO: 74355 - protein, 880 aa, Streptococcus pyogenes
MENKNKLLLIDGSSVAFRAFFALYNQIDRFKNHSGLHTNAIYGFHLMLDHMMKRVQPTHVLVAFDAGKTTFRTEMYADYKAGRAKTPEEFREQFPYIREMLTALGIAYYELEHYEADDIIGTLDKMAERTEVPFDVTIVSGDKDLIQLTDENTVVEISKKGVAEFEEFTPAYLMEKMGLTPNQFIDLKALMGDKSDNIPGVTKIGEKTGLKLLHEFGSLEGIYEHIDGFKTSKMKENLINDRDQAFLSKTLATINTASPITIGLDDIVYNGPDVASLSQFYDEMDFVQLKKGLASQMPQEPVAVISYQEVTNVSADLFSAEDIFYFETLRDNYHREAIIGFAWGHGEQIYASTDLGLLATDSFKQVFQKPIATYDFKRSKVLLSHLGIELVAPSYDARLANYLLSTVEDNELSTIARIFTDISLEEDDTVYGKGAKRAVPDKDVLLEHLARKVKVLLDSKSQMLDKLTAHEQLDLYQNIELPLANVLAKMEIEGIKVNRATLQDMAEQNKVIIEALTQEIYDMAGQEFNINSPKQLGSILFEKMQLPLEMTKKTKTGYSTAVNVLERLAPIAPIVAKILDYRQITKLQSTYVIGLQDYILADGKIHTRYVQDLTQTGRLSSVDPNLQNIPIRLEQGRLIRKAFTPSHEDAVLLSSDYSQIELRVLAHISGDEHLIAAFNEGADIHTSTAMRVFGIDRAADVTANDRRNAKAVNFGIVYGISDFGLSNNLGITRKQAKSYIDTYFERYPGIKAYMENVVREAKDKGYVETLFKRRRELPDINSRNFNVRSFAERTAINSPIQGSAADILKIAMINLDKALQAGGFRAKMLLQVHDEIVLEVPNDELTAIKKLVKDTMEAAVDLAVPLCVDESTGHSWYEAK

SEQ ID NO: 74356 - protein, 268 aa, Streptococcus pyogenes
MLLEILDLSRSTYYYQVKRLAQGDKDIELKHVIREIYDEHKGNYGYRRIHMELRNRGFVVNHKKVQRLMKVMGLAARIRRKRKYSSYKGEVGKKADNLIKRHFEGSKPYEKCYTDVTELALPEGKLYLSPVLDGYNSEIIDFTLSRSPNLKQVQTMLEKTFPADSYSGTILHSDQGWQYQHQSYHDFLESKGILASMSRKGNSPDNGMMESFFGILKSEMFYGLETTYQSLDKLEEAITDYIFYYNNKRIKAKLKGFSPVQYRTKSFQ

SEQ ID NO: 74357 - protein, 171 aa, Streptococcus pyogenes
MKFNQETKVKIYELRQMGESIKSISKKFDMAESDLKYMIRLIDRYGVTIVQKCKNHYYSPELKQEIINKVLIDGQSQKQTSLDYALPTSSMLSRWIAQYKKNGYTILEKPRGRPSKMGRKRKKNLEEMTEVERLQKELEYPRAENAVLKKLREYRLRDEAKLKEQQKSFKH

SEQ ID NO: 74358 - protein, 380 aa, Streptococcus pyogenes
MTDYPIKYRLIKAEKHTGARLGEIITPHGTFPTPMFMPVGTQATVKTQSPEELKAIGSGIILSNTYHLWLRPGDELIARSGGLHKFMNWDQPILTDSGGFQVYSLADSRNITEEGVTFKNHLNGSKMFLSPEKAISIQNNLGSDIMMSFDECPQFYQPYDYVKKSIERTSRWAERGLKAHRRPHDQGLFGIVQGAGFEDLRRQSAADLVAMDFPGYSIGGLAVGESHEEMNAVLDFTTPLLPENKPRYLMGVGAPDSLIDGVIRGVDMFDCVLPTRIARNGTCMTSEGRLVIKNAKFAEDFTPLDHDCDCYTCQNYSRAYIRHLLKADETFGIRLTSYHNLYFLVNLMKKVRQAIMDDNLLEFRQDFLERYGYNKSNRNF

SEQ ID NO: 74359 - protein, 103 aa, Streptococcus pyogenes
MTDCFGIDLDQEYRCLHYHTPLDIVGLKCASCQTYYACYHCHDQLTDHAFVPTGHQETSPVICGHCRKLLSRAEYGCGCCPYCQSPFNPACHRHKDIYFLKES

SEQ ID NO: 74360 - protein, 449 aa, Streptococcus pyogenes
MSHITFDYSKVLESFAGQHEIDFLQGQVTEADKLLREGTGPGSDFLGWLDLPENYDKDEFARILTAAEKIKADSEVLVVIGIGGSYLGAKAAIDFLNHHFANLQTAKERKAPQILYAGNSISSTYLADLVEYVQDKEFSVNVISKSGTTTEPAIAFRVFKELLVKKYGQEEANKRIYATTDKVKGAVKVEADANNWETFVVPDNVGGRFSVLTAVGLLPIAASGADITALMEGANAARKDLSSDKISENIAYQYAAVRNVLYRKGYITEILANYEPSLQYFGEWWKQLAGESEGKDQKGIYPTSANFSTDLHSLGQFIQEGYRNLFETVIRVDNPRKNVIIPELAEDLDGLGYLQGKDVDFVNKKATDGVLLAHTDGGVPNMFVTLPAQDEFTLGYTIYFFELAIAVSGYMNAVNPFDQPGVEAYKRNMFALLGKPGFEALSAELNARL

SEQ ID NO: 74361 - protein, 299 aa, Streptococcus pyogenes
MTKVRKAIIPAAGLGTRFLPATKALAKEMLPIVDKPTIQFIVEEALKSGIEEILIVTGKSKRSIEDHFDSNFELEYNLQAKGKIELLKLVDETTSINLHFIRQSHPRGLGDAVLQAKTFVGNEPFVVMLGDDLMDITNPNVKPLTKQLIDDYEETHAATIAVMRVPHEDVSNYGIIAPQAKAVKGLYSVDTFVEKPQPQDAPSDLAIIGRYLLTPEIFSILEKQEPGAGNEVQLTDAIDTLNKTQRVFAREFKGKRYDVGDKFGFMKTSLDYALKHPQVKDDLKAYIIQLGKALEKTKP

SEQ ID NO: 74362 - protein, 338 aa, Streptococcus pyogenes
MTKQKVAILGPGSWGTALSQVLNDNGHDVRLWGNIPDQIEEINTKHTNRHYFKDIVLDKNITATLDLGQALSDVDAVLFVVPTKVTRLVARQVAAILDHKVVVMHASKGLEPETHERLSTILEEEIPAHFRSEVVVVSGPSHAEETIVRDITLITAASKDIEAAKYVQSLFSNHYFRLYTNTDVIGVETAGALKNIIAVGAGALHGLGYGDNAKAAVITRGLAEITRLGVKLGADPLTYSGLSGVGDLIVTGTSVHSRNWRAGAALGRGEKLEDIERNMGMVIEGIATTKVAYEIAQDLGVYMPITTAIYKSIYEGADIKESILGMMSNEFRSENEWH

SEQ ID NO: 74363 - protein, 568 aa, Streptococcus pyogenes
MLKDAILRYKWYALGSFFMVIGVVASSLLQPHYLKSVLSAVIQNNQEKIYEVGKPLLIIALLGLMSGAINTVLAAKIAQGVSADMREKTFRKIQDFSYANIEAFNAGNLVVRLTNDINQIQSLVMMMFQILFRLPILFIGAFIMAVQTFPQLWWVIVVMVILIALIMGLVMRQMGPRFGKFQRLMDKINRIAKENLRGVRVVKSFVQEQQQYTKFKETSNDLLALNLSIGYGFSLMQPALMLVSYLAVYVSINVVSTMVETDPTVIGNIASFMTYMMQIMFSIIVVGSMGMQVSRAFVSMARIRQILSTEPAMTFENEKEETISGSIVFDDVSFTYPNDDEPTLKHISFAIEPGQMVGIVGATGSGKSTLAQLIPRLFDPQDGQILLGGKPIKTLSQTTLRQSVSIVLQKAILFSGTIADNLRQGSAKADIDAMQKAAQIAQAKEFIDRMDSRYESQVEERGSNLSGGQKQRLSIARGVINHPKILILDDSTSALDAKSEKRVQEALSHKLEGTTTVIVAQKISSVVKADKILVLDQGQLIGEGTHAELVANNAIYREIYETQKGREE

SEQ ID NO: 74364 - protein, 453 aa, Streptococcus pyogenes
MAKKKATFICQECGYQSPKYLGRCPNCSAWSSFVEEVEVKEVKNARVSLAGEKSRPVKLKDVDNISYHRTQTDMSEFNRVLGGGVVPGSLILIGGDPGIGKSTLLLQVSTQLANKGTVLYVSGEESAEQIKLRSERLGDIDNEFYLYAETNMQAIRTEIENIKPDFLIIDSIQTIMSPDITGVQGSVSQVREVTAELMQLAKTNNIATFIVGHVTKEGTLAGPRMLEHMVDTVLYFEGERHHTFRILRAVKNRFGSTNEIGIFEMQSGGLVEVLNPSQVFLEERLDGATGSAVVVTMEGSRPILAEVQSLVTPTVFGNARRTTTGLDFNRVSLIMAVLEKRCGLLLQNQDAYLKSAGGVKLDEPAIDLAVAVAIASSYKEKPTSPQEAFLGEIGLTGEIRRVTRIEQRINEAAKLGFTKVYAPKNALQGIDIPQGIEVVGVTTVGQVLNAVFS

SEQ ID NO: 74365 - protein, 481 aa, Streptococcus pyogenes
MSKPIRVRYAPSPTGLLHIGNARTALFNYLYARRHGGTFIIRIEDTDRKRHVEDGERSQLENLKWLGMDWDESPETHENYRQSERLALYQQYIDQLLAEGKAYKSYVTEEELAAERERQEAAGETPRYINEFIGMSADEKAKYIAEREAAGIVPTVRLAVNESGIYKWTDMVKGDIEFEGGNIGGDWVIQKKDGYPTYNFAVVVDDHDMQISHVIRGDDHIANTPKQLMVYEALGWEAPEFGHMTLIINSETGKKLSKRDTNTLQFIEDYRKKGYMPEAVFNFIALLGWNPGGEEEIFSREQLIALFDENRLSKSPAAFDQKKMDWMSNEYLKHADFETVYALCKPFLEEAGRLTEKAEKLVELYKPQLKSADEIIPLTDLFFSDFPELTEAEKEVMAGETVSTVLQAFKAKLEAMSDEDFKPENIFPQIKAVQKETGIKGKNLFMPIRIAVSGEMHGPELPNTIYLLGRDKSIEHIKNML

SEQ ID NO: 74366 - protein, 119 aa, Streptococcus pyogenes
MKKTYRVKREKDFQAIFKDGKSTANRKFVIYHLNRGQDHFRVGISVGKKIGNAVTRNAVKRKIRHVIMALGHQLKSEDFVVIARKGVHSLEYQELQQNLHHVLKLAQLLEKGFESEEKH

SEQ ID NO: 74367 - protein, 275 aa, Streptococcus pyogenes
MRKVLRVKKNIKIARIVPLVLLLVACGRGEVTAQSSSGWDQLVYLFARAIQWLSFDGSIGVGIILFTLTIRLMLMPLFNMQIKSSQKMQDIQPELRELQRKYAGKDTQTRMKLAEESQALYKKYGVNPYASLLPLLIQMPVMIALFQALTRVSFLKTGTFLWVELAQHDHLYLLPVLAAVFTFLSTWLTNLAAKEKNVMMTVMIYVMPLMIFFMGFNLASGVVLYWTVSNAFQVVQLLLLNNPFKIIAERQRLANEEKERRLRERRARKKAMKRK

SEQ ID NO: 74368 - protein, 44 aa, Streptococcus pyogenes
MKRTYQPSKIRRQRKHGFRHRMSTKNGRRVLAARRRKGRKVLSA

SEQ ID NO: 74369 - protein, 312 aa, Streptococcus pyogenes
MKHYLAIDIGGTAIKYGLISETGDLLEKEEMATEAYKGGPSILEKVKGLVKTYQDQMDLAGVAISSAGMVNPDEGEIFYAGPQIPNYAGTQFKKEIEETFGLPCEVENDVNCAGLAEAISGSAKDYPVALCLTIGTGIGGCLLFNSQVFHGSSHSACEVGYLHLSDGQFQDLASTTALVQEVVLAYGDDISQWDGRRIFEQAKAGDAICIAAISKQVDYLGQGIANICYVVNPNVVVLGGGIMAQKDYLADKLKTALDSYLVSSLAKKTQLKFASHGNNAGILGAYYHFKQKNERSCSFITLEKIENNLASS

SEQ ID NO: 74370 - protein, 276 aa, Streptococcus pyogenes
MPKNHRLITKIEASLEHMTSLEKGIAHFFITTDLTPQELTASEIVKRLHISQAALTRFAKKCGFTGYRAFAFDYLHSLQESQETFQSIHLELTKRVLMDYDALINKTYELVNEEKLLNLAKLIDSSERVYFFGKGSSGLVAREMKLRFMRLGLICDAYSDTDGFTWANSLVNENCLVFGFSLSGKTNSVITALHQASQRGAKTVLLTTDNQTEFDDSLDIIPVSSTHQLHYGNRVSPQFPLLIMMDIIYAYVLAIDKPHKEKIFKNTIIDKENNDL

SEQ ID NO: 74371 - protein, 274 aa, Streptococcus pyogenes
MWLRSLCYNNIMTNKVEKLTIFDTHTHLNVAEFQGHETEELTLAQEMGVAYHNVVGFDQATISGALTLANKYANIYATIGWHPTEAGSYSEAVEEAIVSQLSHSKVIALGEIGLDYYWMEDPKEVQIEVFKRQMQLAKDHDLPFVVHTRDALEDTYEVIKAAGVGPRGGIMHSYSGSLEMAERFIELGMMISFSGVVTFKKALDIQEAAQHLPLDKILVETDAPYLTPVPKRGKQNHTAYTRYVVDKIAELRGMTVEEVAKATTANAKRVFKLD

SEQ ID NO: 74372 - protein, 189 aa, Streptococcus pyogenes
MTEKINIQEVLVVEGKDDTANLRRFYEVDTYETRGSAITEEDLERINRLNDLRGVIVLTDPDYNGERIRKLIMAAVPTARHAFLNRNEAVPSSKSKGRSLGVEHANFEDLQKALAHVTQQYDDESYFDIRQTDLIRLGLLMASDSRKRREYLGEKLRIGYANGKQLLKRLELFGITLAEVEEVMETYEE

SEQ ID NO: 74373 - protein, 290 aa, Streptococcus pyogenes
MRIADYSVTKAVLDRHGFTFKKSFGQNFLTDTNILQKIVDTAEIDQNVNVIEIGPGIGALTEFLAENAAEVMAFEIDDRLVPILADTLRDFDNVQVVNQDILKADLQTQIKQFKNPDLPIKVVANLPYYITTPILMHLIESKIPFQEFVVMMQREVADRISAEPNTKAYGSLSIAVQYYMTAKVAFIVPRTVFVPAPNVDSAILKMVRRDQPLIEVKDEDFFFRVSRLSFVHRRKTLWNNLTSHFGKSEDIKAKLEKGLALADIKPSIRGEALSIQDFGKLADALKEVGL

SEQ ID NO: 74374 - protein, 312 aa, Streptococcus pyogenes
MKINQMKKDQLFEGFYLIKSAEVRKTRAGKDFISLTFQDDTGEISGNLWDAQPYNVEEFTAGKVVFMKGRREVYNGTPQVNQITLRNVRPGEPNDPKDFKEKAPVSVTEVRDYLEQMLFKIENATWQRIVRALYRKYDKEFYTYPAAKTNHHAFESGLAYHTATMVRLADSIGDIYPDLNKSLLFAGIMLHDLAKVIELTGPDNTEYTVRGNLIGHISLINEEITKVISELQIDDTKEEVIVLRHVILSHHGQLEYGSPVRPRIMEAEIIHMIDNIDANMMMMTTALSRVSEGEMTNRIFAMDNRSFYKPNY

SEQ ID NO: 74375 - protein, 873 aa, Streptococcus pyogenes
MDLEQTKPNQVKQKIALTSTIALLSASVGVSHQVKADDRASGETKASNTHDDSLPKPETIQEAKATIDAVEKTLSQQKAELTELATALTKTTAEINHLKEQQDNEQKALTSAQEIYTNTLASSEETLLAQGAEHQRELTATETELHNAQADQHSKETALSEQKASISAETTRAQDLVEQVKTSEQNIAKLNAMISNPDAITKAAQTANDNTKALSSELEKAKADLENQKAKVKKQLTEELAAQKAALAEKEAELSRLKSSAPSTQDSIVGNNTMKAPQGYPLEELKKLEASGYIGSASYNNYYKEHADQIIAKASPGNQLNQYQDIPADRNRFVDPDNLTPEVQNELAQFAAHMINSVRRQLGLPPVTVTAGSQEFARLLSTSYKKTHGNTRPSFVYGQPGVSGHYGVGPHDKTIIEDSAGASGLIRNDDNMYENIGAFNDVHTVNGIKRGIYDSIKYMLFTDHLHGNTYGHAINFLRVDKHNPNAPVYLGFSTSNVGSLNEHFVMFPESNIANHQRFNKTPIKAVGSTKDYAQRVGTVSDTIAAIKGKVSSLENRLSAIHQEADIMAAQAKVSQLQGKLASTLKQSDSLNLQVRQLNDTKGSLRTELLAAKAKQAQLEATRDQSLAKLASLKAALHQTEALAEQAAARVTALVAKKAHLQYLRDFKLNPNRLQVIRERIDNTKQDLAKTTSSLLNAQEALAALQAKQSSLEATIATTEHQLTLLKTLANEKEYRHLDEDIATVPDLQVAPPLTGVKPLSYSKIDTTPLVQEMVKETKQLLEASARLAAENTSLVAEALVGQTSEMVASNAIVSKITSSITQPSSKTSYGSGSSTTSNLISDVDESTQRALKAGVVMLAAVGLTGFRFRKESK

SEQ ID NO: 74376 - protein, 137 aa, Streptococcus pyogenes
MPTINQLVRKPRKSKIEKSDSPALNIGYNSHKKVQTKMAAPQKRGVATRVGTMTPKKPNSALRKFARVRLSNLIEVTAYIPGIGHNLQEHSVVLIRGGRVKDLPGVRYHIVRGALDTAGVADRKQGRSKYGAKRPKG

SEQ ID NO: 74377 - protein, 156 aa, Streptococcus pyogenes
MSRKNQAPKREVLPDPLYNSKIVTRLINRVMLDGKRGTAATIVYDAFNAIKEATGNDALEVFETAMDNIMPVLEVRARRVGGSNYQVPVEVRPERRTTLGLRWLVNASRARGEHTMKDRLAKEIMDAANNTGASVKKREDTHKMAEANRAFAHFRW

SEQ ID NO: 74378 - protein, 692 aa, Streptococcus pyogenes
MAREFSLAKTRNIGIMAHVDAGKTTTTERILYYTGKIHKIGETHEGASQMDWMEQEQERGITITSAATTAQWDGHRVNIIDTPGHVDFTIEVQRSLRVLDGAVTVLDSQSGVEPQTETVWRQATEYGVPRIVFANKMDKIGADFLYSVQTLHDRLQANAHPIQLPIGAEDDFRGIIDLIKMKAEIYTNDLGTDILEEDIPEEYLEQAQEYREKLIEAVAETDEDLMMKYLEGEEITNDELIAGIRKATINVEFFPVLCGSAFKNKGVQLMLDAVIAYLPSPLDIPAIKGVNPDTDAEEERPASDEEPFAALAFKIMTDPFVGRLTFFRVYSGVLNSGSYVMNTSKGKRERIGRILQMHANSRQEIETVYAGDIAAAVGLKDTTTGDSLTDEKAKVILESIEVPEPVIQLMVEPKSKADQDKMGVALQKLAEEDPTFRVETNVETGETVIAGMGELHLDVLVDRMKREFKVEANVGAPQVSYRETFRASTQARGFFKRQSGGKGQFGDVWIEFTPNEEGKGFEFENAIVGGVVPREFIPAVEKGLIESMANGVLAGYPMVDVKAKLYDGSYHDVDSSETAFKIAASLALKEAAKSAQPAILEPMMLVTITAPEDNLGDVMGHVTARRGRVDGMEAHGNSQIVRAYVPLAEMFGYATVLRSATQGRGTFMMVFDHYEDVPKSVQEEIIKKNKGE

SEQ ID NO: 74379 - protein, 336 aa, Streptococcus pyogenes
MVVKVGINGFGRIGRLAFRRIQNIEGVEVTRINDLTDPNMLAHLLKYDTTQGRFDGTVEVKEGGFEVNGNFIKVSAERDPENIDWATDGVEIVLEATGFFAKKEAAEKHLHANGAKKVVITAPGGNDVKTVVFNTNHDILDGTETVISGASCTTNCLAPMAKALHDAFGIQKGLMTTIHAYTGDQMILDGPHRGGDLRRARAGAANIVPNSTGAAKAIGLVIPELNGKLDGAAQRVPVPTGSVTELVVTLDKNVSVDEINAAMKAASNDSFGYTEDPIVSSDIVGVSYGSLFDATQTKVMEVDGSQLVKVVSWYDNEMSYTAQLVRTLEYFAKIAK

SEQ ID NO: 74380 - protein, 522 aa, Streptococcus pyogenes
MKKLILSCLVALALLFGGMSRAQANQYLRVGMEAAYAPFNWTQDDASNGAVPIEGTSQYANGYDVQVAKKVAKAMNKELLVVKTSWTGLIPALTSGKIDMIAAGMSPTKERRNEISFSNSSYTSQPVLVVTANGKYADATSLKDFSGAKVTAQQGVWHVNLLTQLKGAKLQTPMGDFSQMRQALTSGVIDAYISERPEAMTAEAADSRLKMITLKKGFAVAESDAAIAVGMKKNDDRMATVNQVLEGFSQTDRMALMDDMVTKQPVEKKAEDAKASFLGQMWAIFKGNWKQFLRGTGMTLLISMVGTITGLFIGLLIGIFRTAPKAKHKVAALGQKLFGWLLTIYIEIFRGTPMIVQSMVIYYGTAQAFGISIDRTLAAIFIVSINTGAYMSEIVRGGIFAVDKGQFKAATALGFTHGQTMRKIVLPQVVRNILPATGNEFVINIKDTSVLNVISVVELYFSGNTVATQTYQYFQTFTIIAIIYFVLTFTVTRILRYIERRFDADTYTTGANQMQIAEVSNV

SEQ ID NO: 74381 - protein, 389 aa, Streptococcus pyogenes
MFSFTIDYVLVLIGALLMSLFLTPLVRFLAFRVGAVDNPNARRVNKVPMPTSGGLAIFMSFLVASLGLIPIASKGAMFFGQTYFSYILPVVIGATVITLTGFLDDLYELSPKLKMFGILIGAVIVWAFTDFKFDSFKIPFGGPLLVFGPFLTLFLTVLWIVSITNAINLIDGLDGLVSGVSIISLVTMAIVSYFFLPQKDFFLTLTILVLISAIAGFFPYNYHPAMIYLGDTGALFIGFMIGVLSLQGLKNSTAVAVVTPVIILGVPIMDTIVAIIRRSLSGQKFYEPDKMHLHHRLLSMGFTHRGAVLVVYGITMLFSLISLLLNVSSRIGGVLLMLGLLFGLEVFIEGLEIWGEKRTPLFNLLKFIGNSDYRQAMLLKWKEKKDLKH

SEQ ID NO: 74382 - protein, 256 aa, Streptococcus pyogenes
MSILEINNLHVSIEGKEILKGVNLTLKTGEVAAIMGPNGTGKSTLSAAIMGNPNYEVTQGQILLDGVNILDLEVDERARLGLFLAMQYPSEIPGITNAEFMRAAMNAGKADEDKISVRDFITKLDEKMALLGMKEEMAERYLNEGFSGGEKKRNEILQLLMLEPKFALLDEIDSGLDIDALKVVSKGVNEMRGKDFGAMIITHYQRLLNYITPDLVHVMMDGRIVLSGDAALATRLEKEGYAGIAQDLGIEYKEES

SEQ ID NO: 74383 - protein, 159 aa, Streptococcus pyogenes
MALSKLNHLYMAVVADHSKRPHHHGQLDGVEAVQLNNPTCGDVISLTVKFDEDKIEDIAFAGNGCTISTASSSMMTDAVIGKSKEEALALADIFSEMVQGQENPAQKELGEAELLAGVAKFPQRIKCSTLAWNALKEAIKRSANAQHLTDQNVKEGKNV

SEQ ID NO: 74384 - protein, 356 aa, Streptococcus pyogenes
MTKENNVILTAKDVVVEFDVRDRVLTAIRNVSLELVEGEVLAFVGESGSGKSVLTKTFTGMLESNGRIANGSIVYRGQELTDLKTNKEWAKIRGSKIATIFQDPMTSLSPIKTIGSQITEVIIKHQKVSHAKAKEMALDYMNKVGIPNAKKRFEDYPFEYSGGMRQRIVIAIALACRPDILICDEPTTALDVTIQAQIVELLKSLQREYHFTIIFITHDLGVVASIADKVAVMYAGEIVEFGTVEEIFYDPRHPYTWSLLSSLPQLADESGELYAIPGTPPSLYSPIIGDAFALRSEYAMVLDFEKAPPAINVSETHWAKTWLLHPEAPKVQKPEVIQDLHQKILRKMSQQEEGNV

SEQ ID NO: 74385 - protein, 307 aa, Streptococcus pyogenes
MSEKLVEVKDLEISFGEGKKKFVAVKNANFFIKKGETFSLVGESGSGKTTIGRAIIGLNDTSSGQILYDGKVINGRKSKSEANELIRKIQMIFQDPAASLNERATVDYIISEGLYNFNLFKTEEERKEKIKNMMAEVGLLSEHLTRYPHEFSGGQRQRIGIARALVMNPEFVIADEPISALDVSVRAQVLNLLKRMQAEKGLTYLFIAHDLSVVRFISDRIAVIHKGVIVEVAETEELFNNPIHPYTQSLLSAVPIPDPILERQKELVVYHPDQHDYTLDKPSMVEIKPNHFVWANQAEIEKYQKEL

SEQ ID NO: 74386 - protein, 372 aa, Streptococcus pyogenes
MEELFCIGCGIQIQTEDKEKAGFTPAAALKKGMETGELYCQRCFRLRHYNEITDVHITDDEFLRLLHEVGDSDALVVNVIDIFDFNGSIIPGLSRFISGNDVLLVGNKKDILPKSVKDGKVTQWLTERAHEEGLRPLDVMLTSAQNKYAIKDLIGRINELRNGRDVYVVGVTNVGKSTLINAIIQEITGNKDVITTSRFPGTTLDKIEIPLDDGTFIFDTPGIIHRHQMAHYLSPKELKIVSPKKEIKPKTYQLNPEQTLFLGGLARFDFINGERQGFTAFFDNQLELHRTKLAGADAFYDKHVGTLLTPPDKKELTAFPKLVRHEFTIDQKMDIVFSGLGWIRVNGQKDSKAIVAAWAPEGVAVIVRKAII

SEQ ID NO: 74387 - protein, 197 aa, Streptococcus pyogenes
MTYEDYLPYSRTELLAKIAEQMSPKRFKHVLGVEKAALSLAECYGCNPDKAGLAALLHDYAKECPDQVFLDLIDKYQLSPELAKWNNNVWHGMVGIYKIQEDLGLKDKDILRAIEIHTVGAAEMTLLDKVLYVADYIEEGRIFPLVDDARKIAKLDLNQAVAYETVNTVAYLASKAQPIFPQTLDTYNAFCSYLKEY

SEQ ID NO: 74388 - protein, 238 aa, Streptococcus pyogenes
MGRKWANIVAKKTAKDGATSKVYAKFGVEIYVAAKQGEPDPELNTALKFVIDRAKQAQVPKHVIDKAIDKAKGNTDETFVEGRYEGFGPNGSMIIVDTLTSNVNRTAANVRTAYGKNGGNMGASGSVSYLFDKKGVIVFAGDDADSVFEQLLEADVDVDDVEAEEGTITVYTAPTDLHKGIQALRDNGVEEFQVTELEMIPQSEVVLEGDDLETFEKLIDALESDDDVQKVYHNVADF

SEQ ID NO: 74389 - protein, 281 aa, Streptococcus pyogenes
MSFKKWIGIVGIALASTVLVACSEKQDDKNTLTIGVMTKTESDQARWDKVEELLKKDNITLKYKEFTDYSQPNKAVANGEVDINAFQHYNFLNNWNKENKEHLVAIADTYISPINLFSGTSQDGKAKYKSVADLPNGTQIAVPNDATNESRALYVLQSAGLIKLNVSGDQLATIANISENKKKLDIKELDASQTARALVSADAAVVNNSYAVPAKIDYKTSLFKEKADDNSKQWINIIAGQKDWEKSEKADAIKKLIKAYQTDEVKKVVEKTSNGIDVSVW

SEQ ID NO: 74390 - protein, 220 aa, Streptococcus pyogenes
MFMNSDGHGDAGWGLAIWNTLYMTIVPFIVGGAIGLLLGLLLVLTGPDGVIENKTICWVIDKVTSIFRAIPFVILIAILASFTYLLLRTTLGATAALVPLTFATFPFYARQVQVVFSELDKGVIEAAQASGATFWDIVKVYLSEGLPDLIRVSTVTLISLVGETAMAGAIGAGGLGNVAISYGYNRFNNDVTWVATIIILLIIFAIQFIGDSLTRRFSHK

SEQ ID NO: 74391 - protein, 456 aa, Streptococcus pyogenes
MKQKNVYIVIGFMLFALFFGAANLIYPAFLGIYSGHQILWSIIGFCLTGVSLPLLGVIAVAKSGSGDVESLARPISKWYAIFYSSILYLSIGPFFAIPRTGATSFSVGIAPILGDNTTNKAIYAILFFGLSYFLAIKPSKLAENIGKFLTPTLLVVISILVIASFVHPAGNYGDAFNAGVGVNNAFKDFPFIAGLIQGYGTMDALASLVFAILVIEATKQFGAKTDKEMTKITLISGAIAILLLALVYIFVGRIGATSQSLFPFIDGSFTLHGNPVNGGQILSHASRFYLGGIGQAFLAVVIFLACLTTSTGLITSSAEYFHKLVPALSHIAWATIFTLLSAFFYFGGLSVIINWSAPVLFLLYPLTVDLIFLVLAQKCFNNDPIVYRTTIGLTFIPAIFDALLTLSQMTGLFHLPEAVVTFFQKTVPLGQFSMGWIIFAAIGFLIGLILSKTKKS

SEQ ID NO: 74392 - protein, 224 aa, Streptococcus pyogenes
MLKRKTVGVLGLGIFGRTVARELSNFDQDVIAIDIRESHVKEVADLVTKAAVGDITDKEFLLAVGIEHCDTVVIASGNNLESSVLAVMHCKKLGVPTIIAKAKNKIFEEVLYGIGATKVITPERDSGKRVASNLLRRHIESIIYLEHGISMIEFVIPKSWEGQSLSELDVRRKYELNVIGMRQKEVKTLDTNVKPFEPLEPNTIIVAIANDHTFEKFDYLGYLK

SEQ ID NO: 74393 - protein, 237 aa, Streptococcus pyogenes
MTPQDFYRTLEEDGFSLSSKQKEQFDTYFKSLVEWNTKINLTAITEENEVYLKHFYDSIAPILQGFLANEPIKLLDIGAGAGFPSLPMKILFPNLEVTIIDSLNKRISFLTLLAQELGLENVHFFHGRAEDFGQDKAFRGQFDVVTARAVARMQVLSELTIPFLKIGGKLIALKAQAADQELEEAKNALCLLFGKVIKNHSYQLPNGDSRFITIVEKKKETPNKYPRKAGLPNKKPL

SEQ ID NO: 74394 - protein, 436 aa, Streptococcus pyogenes
MVLPTVAIVGRPNVGKSTLFNRIAGERISIVEDVEGVTRDRIYATGEWLNRQFSLIDTGGIDDVDAPFMEQIKHQAQIAMEEADVIVFVVSGKEGVTDADEYVSKILYRTNTPVILAVNKVDNPEMRNDIYDFYSLGLGDPYPVSSVHGIGTGDVLDAIVENLPVEEAEENDDIIRFSLIGRPNVGKSSLINAILGEDRVIASPVAGTTRDAIDTHFTDADGQEFTMIDTAGMRKSGKIYENTEKYSVMRAMRAIDRSDVVLMVINAEEGIREYDKRIAGFAHEAGKGMIIVVNKWDTIDKDNHTVAKWEADIRDQFQFLTYAPIIFVSALTKQRLNKLPDLIKRISESQNKRIPSAVLNDVIMDAIAINPTPTDKGKRLKIFYATQVSVKPPTFVVFVNEEELMHFSYLRFLENQIRAAFTFEGTPIHLIARKRK

SEQ ID NO: 74395 - protein, 442 aa, Streptococcus pyogenes
MSKTYHFIGIKGSGMSALALMLHQMGHKVQGSDVEKYYFTQRGLEQAGITILPFSEDNITPDMELIVGNAFRENNKEVAYALRHQIPFKRYHDFLGDFMKSFISFAVAGAHGKTSTTGLLSHVLKNITDTSYLIGDGTGRGSANAQYFVFESDEYERHFMPYHPEYSIITNIDFDHPDYFTGIADVRNAFNDYAKQVKKALFVYGEDDELKKIEAPAPIYYYGFEEGNDFIAYDITRTTNGSDFKVKHQGEVIGQFHVPAYGKHNILNATAVIANLFVAGIDMALVADHLKTFSGVKRRFTEKIINDTIIIDDFAHHPTEIVATIDAARQKYPSKEIVAIFQPHTFTRTIALLEDFACALNEADSVYLAQIYGSAREVDKGEVKVEDLAAKIIKPSQVVTVENVSPLLDHDNAVYVFMGAGDIQLYEHSFEELLANLTKNNQ

SEQ ID NO: 74396 - protein, 307 aa, Streptococcus pyogenes
MKLTLNRILFSGLALSILLTLTGCVGRDAHGNPKGMIWEFLGKPMSYFIDYFANNAGLGYGLAIIIVTIIVRTLILPLGLYQSWKASYQSEKMAFLKPVFEPINKRIKQANSQEEKMAAQTELMAAQRAHGINPLGGIGCLPLLIQMPFFSAMYFAAQYTKGVSTSTFMGIDLGSRSLVLTAIIAALYFFQSWLSMMAVSEEQREQMKTMMYTMPIMMIFMSFSLPAGVGLYWLVGGFFSIIQQLITTYLLKPRLHKQIKEEYAKNPPKAYQSTSSRKDVTPSQNMEQANLPKKIKSNRNAGKQRKR

SEQ ID NO: 74397 - protein, 245 aa, Streptococcus pyogenes
MVITSKANQLIKQTKKLLQKKHRKQSYLIEGWHLFEEAQKSGQVFRHIFVLEEMVERLAGEQELVIVSPQVLKELTDSPSPQGIVAEVEIPKLAFPSDYKGKYLVLEDVQDPGNLGTIIRTADAARFDGVFLSEKSADIYNQKTLRSMQGSHFHLPIWRTDVYQLCRELQEYETPILATTLSKKSVDYKSLTHHERLALVLGNEGQGISAEMAALADQLVHITMPGQAESLNVAVAAGILIFSLI

SEQ ID NO: 74398 - protein, 264 aa, Streptococcus pyogenes
MDTRPIGFLDSGVGGLTVVCELIRQLPHEKIVYIGDSARAPYGPRPKKQIKEYTWELVNFLLTQNVKMIVFACNTATAVAWEEVKAALDIPVLGVVLPGASAAIKSTTKGQVGVIGTPMTVASDIYRKKIQLLAPSIQVRSLACPKFVPIVESNEMCSSIAKKIVYDSLAPLVGKIDTLVLGCTHYPLLRPIIQNVMGPSVKLIDSGAECVRDISVLLNYFDINGNYHQKAVEHRFFTTANPEIFQEIASIWLKQKINVEHVTL

SEQ ID NO: 74399 - protein, 328 aa, Streptococcus pyogenes
MSEKIYEYKDENNWFIGKMTGHNLISGWGVKHTTIKKIDDLLDGIAATLDWENPKGYDVSVVRHQSPLSLITFIIDMINQETQREIKVTPHAGTILLMENAKLLAVYLPEGGVSTATFFATSEQGFGDIILIATRNEGKTKEFRNLFGQLGYRVENLNDYPELPEVAETGTTFEENARLKAETISRLTGKMVLADDSGLKVDALGGLPGVWSARFSGPDATDAKNNAKLLHELAMVFDQKKRSAQFHTTLVVAAPNKDSLVVEADWPGYIATQPKGENGFGYDPVFIVGETGHHAAELEADQKNQLSHRGQAVRKLMEVFPAWQAKQS

SEQ ID NO: 74400 - protein, 240 aa, Streptococcus pyogenes
MRINKYIAHAGIASRRKAEELIKQGLVTLNGQVITDLATTVKSGDVVEIEGSPIYNEEKVYYLLNKPRGAISSVSDDKGRKTVLDLLPQVKERIYPVGRLDWDTSGVLILTNDGDFTDTMIHPRNEIDKVYLARVKGIATKENLRPLTRGIVIDGKKTKPARYNIVRVEADKSRSIVELTIHEGRNHQVKKMFESVGLLVDKLSRTRFGTVDLKGLRPGEARRLNKKEISQLHNLANTKK

SEQ ID NO: 74401 - protein, 182 aa, Streptococcus pyogenes
MTTKELINKNDKVKKARNHIVLFQPQIPQNTGNIARTCAATNAPLHIIKPMGFPIDDRKMKRAGLDYWDKLELHFYDHLEQFINQCHGQLHLISKFAVNNYSQATYADGDSHYFLFGREDTGLPEDFMREHAEKALRIPMNDEHVRSLNVSNTVCMVIYEALRQQGFQGLELKHTYEHDKLK

SEQ ID NO: 74402 - protein, 217 aa, Streptococcus pyogenes
MMTNKQTHFLIASFALLIFVIIGYTVKFFPERLALLDNTIQAEIRGNLPIVLTQFFRGVTVFGNVMTQVLLVIVSVLVLFFMKWKIEALFILSNGAIAAFLITTLKLFYQRPRPAIEHLVYAGGYSFPSGHAMGSMLIFGSLLIICYQRLHSKLLQFVTSMIFIILILLIGLSRIYLGVHYPSDILAGFVLGFGILHFIYPFYKQKRFEWRFLLKQD

SEQ ID NO: 74403 - protein, 444 aa, Streptococcus pyogenes
MEDPVSQSLVIQFLLLVVLTLLNAFFSASEMALVSLNRSRVEQKAADGDKKYARLLRVLEEPNHFLSTIQVGITFISLLSGASLSASLGKVISGWLGNSATARTAGTIISLVFLTYVSIVLGELYPKRIAMNLKDKLAIVSAPIIIGLGRLVSPFVWLLSASTNLLSRLTPMTFDDADEQMTRDEIEYMLSKSEATLDAEEIEMLQGVFSLDEMMAREVMVPRTDAFMIDINDDPLENIQEILKQSFSRIPVYDVDKDKIIGLIHTKRLLESGFRQGFDQINMRKMLQEPLFVPETIFVDDLLRQLRNTQNQMAILLDEYGGVAGLVTLEDLLEEIVGEIDDETDKAEQFVHEIGDNTYIVVGTMTLNEFNDYFDTELESDDVDTIAGFYLTGIGTIPSQEQKEAYEIDNKDKHLVLINDKVKDGRITKLKLILSNIEQIIEED

SEQ ID NO: 74404 - protein, 311 aa, Streptococcus pyogenes
MSKILVFGHQNPDTDAIASSYAFDYLSQKAFGLDTEVVALGTPNEETAFALDYFGVEAPRVVESAKAQGSEQVILTDHNEFQQSIADIREVEVYGVVDHHRVANFETANPLYMRVEPVGSASSIVYRMFKENGIEVPKAIAGMLLSGLISDTLLLKSPTTHVSDHLVAEELAELAEVNLEDYGMALLKAGTNLASKSEVELIGIDAKTFELNGNAVRVAQVNTVDIAEVLERQEAIEAAIKDAMAAEGYSDFVLMITDIVNSNSEILAIGANMDKVEAAFNFTLDNNHAFLAGAVSRKKQVVPQLTESFGA

SEQ ID NO: 74405 - protein, 310 aa, Streptococcus pyogenes
MKKLTLLLTLCLTTITLIACGNQATNHSNTASKSLSPMPQIAGVTYYGDIPKQPKRVVSLASTYTGYLKKLDMNLVGVTSYDKKNPILAKTVKKAKQVAATDLEAVTTLKPDLIVVGSTEENIKQLAEIAPVISIEYRKRDYLQVLSDFGRIFNKEDKAKKWLKDWKTKTAAYEKEVKAVTGDKATFTIMGLYEKDVYLFGKDWGRGGEIIHQAFHYDAPEKVKTEVFKQGYLSLSQEVLPDYIGDYVVVAAEDDKTGSALYESKLWQSIPAVKKHHVIKVNANVFYFTDPLSLEYQLETLREAILSSEN

SEQ ID NO: 74406 - protein, 260 aa, Streptococcus pyogenes
MTTISAEDLTIAYEQRTIIDKLSFYIPEGKITTIIGANGCGKSSLLKALTRLLPPKQGVVYLNGQNIATLETKEVAKKLALLPQVQEATNGITVYELVSYGRFPHQSYFGNLSPADKKAIHWAMQATNVMAYADQPVDALSGGQRQRVWLAMALAQGTDTIFLDEPTTYLDLNHQLEILELVKSLNKDAGKTIVMVLHDLNLSARYSDHLIAMKHGKIHYTGTIADVMTSPIIQDIFQIKPVLVDDPIHNCPIVLTYQLQ

SEQ ID NO: 74407 - protein, 481 aa, Streptococcus pyogenes
MITIEQLLDILKKDHNFREVLDADGYHYHYQGFSFERLSYDSRQVDGKTLFFAKGATFKADYLKEAITNGLQLYISEVDYELGIPVVLVTDIKKAMSLIAMAFYGNPQEKLKLLAFTGTKGKTTAAYFAYHMLKESYKPAMFSTMNTTLDGKTFFKSQLTTPESLDLFAMMAECVTNGMTHLIMEVSSQAYLVDRVYGLTFDVGVFLNISPDHIGPIEHPTFEDYFYHKRLLMENSRAVVINSGMDHFSFLADQVADQEHVFYGPLSDNQITTSQAFSFEAKGQLAGHYDIQLIGHFNQENAMAAGLACLRLGASLADIQKGIAKTRVPGRMEVLTMTNHAKVFVDYAHNGDSLEKLLSVVEEHQTGKLMLILGAPGNKGESRRADFGRVIHQHPNLTVILTADDPNFEDPEDISKEIASHIARPVEIISDREQAIQKAMSLCQGAKDAVIIAGKGADAYQIVKGQQVAYAGDLAIAKHYL

SEQ ID NO: 74408 - protein, 544 aa, Streptococcus pyogenes
MSTEKKQLTQEELMVQGAAWSTAGNFISRLLGVLYIIPWYIWMGQYAIQANALFNMGYNVYAYFLLISTTGLNVAIAKQVAKYNSMGQTEHSYQLIRSTLKLMLGLGLIFSAIMYLGSPLFASLSGGDDTLVPIMHSLSLAVFIFPVMSVIRGIFQGHNNIKPYAVSQIAEQLIRVIWMLLTTFFIMKLGSGDYASAVTQSTFAAFIGMVASMGVLGYYLWKQGLLAAIFSKPDHTVSIDIKGLLLETLKESIPFIVTGSAIQAFQLIDQWTFVNTMTLFTDYSRSQLLVLFGYFNANPAKITMVLIAVAASIGGVGIALLTENYVKKDMKAAARLIINNIEMLVMFLLPALTGAIILARPLYSVFYGASEERAIHLFVAVLFQTLLLALYTLFSPMLQALFENRKAIYYFAYGILIKLVLQIPLIYLLHAYGPLLATTIALVVPIYLMYRRLYQVTHFNRKLLQKRLLLTLIETLLMGLVVFVANWLLGYAFKPTGRLTSLLYLLIIGGLGMTVYTALTLLTHQLDKLIGSKASRLRQKLGWH

SEQ ID NO: 74409 - protein, 209 aa, Streptococcus pyogenes
MGKCQVISHPLIQHKLSILRRQTTSTKDFRELVNEIAMLMGYEVSRDLPLEDVDIQTPVSKTVQKQLAGKKLAIVPILRAGIGMVDGLLSLVPAAKVGHIGMYRNEETLEPVEYLVKLPEDINQRQIFLVDPMLATGGSAILAVDSLKKRGAANIKFVCLVAAPEGVKKLQEAHPDIDIFTAALDDHLNEHGYIVPGLGDAGDRLFGTK

SEQ ID NO: 74410 - protein, 211 aa, Streptococcus pyogenes
MITGKLITVEGPDGAGKTTVLEQLIPLLKQKVAQDILTTREPGGVAISEHIRELILDINHTAMDPKTELLLYIAARRQHLVEKVLPALEAGQLVFIDRFIDSSVAYQGAGRGLIKADIQWLNEFATDGLEPDLTLYFDVPSEIGLARINANQQREVNRLDLETIEIHQRVRKGYLALAKEHPKRIVTIDATKPLKEVVSVALEHVLALLLA

SEQ ID NO: 74411 - protein, 291 aa, Streptococcus pyogenes
MDLAQKAPNVYQAFQTILKKDRLNHAYLFSGDFANEEMALFLAKVIFCEQKKDQTPCGHCRSCQLIEQGDFADVTVLEPTGQVIKTDVVKEMMANFSQTGYENKRQVFIIKDCDKMHINAANSLLKYIEEPQGEAYIFLLTNDDNKVLPTIKSRTQVFQFPKNEAYLYQLAQEKGLLNHQAKLVAKLATNTSHLERLLQTSKLLELITQAERFVSIWLKDQLQAYLALNRLVQLATEKEEQDLVLTLLTLLLARERAQTPLTQLEAVYQARLMWQSNVNFQNTLEYMVMSE

SEQ ID NO: 74412 - protein, 287 aa, Streptococcus pyogenes
MQVQKSFKDKKTSGTLYLVPTPIGNLQDMTFRAVATLKEVDFICAEDTRNTGLLLKHFDIATKQISFHEHNAYEKIPDLIDLLISGRSLAQVSDAGMPSISDPGHDLVKAAIDSDIAVVALPGASAGITALIASGLAPQPHVFYGFLPRKAGQQKAFFEDKHHYPETQMFYESPYRIKDTLTNMLACYGDRQVVLVRELTKLFEEYQRGSISEILSYLEETPLKGECLLIVAGAQADSEVELTADVDLVSLVQKEIQAGAKPNQAIKTIAKAYQVNRQELYQQFHDL

SEQ ID NO: 74413 - protein, 395 aa, Streptococcus pyogenes
MSMAQKTVITEETTDFVMDFKTSSAEGNVDFINVFDLEKMAQQVIPKGAFGYIASGAGDTFTLHENIRSFNHKLIVPHSLKGVENPSTEITFDGDYLTSPLILAPVAAHKLANEQGEVASAKGLKEFGSIYTTSSYSTTDLPEISAALGGTPHWFQFYYSKDDGINRNIMDRVKAQGCKAIVLTADATVGGNREVDRRNGFVFPVGMPIVQEYLPDGAGKTMDYVYKSAKQALTSKDIEYIATYSGLPVYVKGPQCAEDTLRALDAGASGIWVTNHGGRQLDGGPAAFDSLQEVAEAVDQKVPIVFDSGIRRGQHIFKALASGADLVALGRPAIYGLAMGGSIGTRQVFEKLNDELKMVMQLAGTQTIQDVKAFNLRHNPYDSSIPFDQNALRLD

SEQ ID NO: 74414 - protein, 1647 aa, Streptococcus pyogenes
MEKKQRFSLRKYKSGTFSVLIGSVFLVMTTTVAADELSTMSEPTITNHAQQQAQHLTNTELSSAESKSQDTSQITLKTNREKEQSQDLVSEPTTTELADTDAASMANTGSDATQKSASLPPVNTDVHDWVKTKGAWDKGYKGQGKVVAVIDTGIDPAHQSMRISDVSTAKVKSKEDMLARQKAAGINYGSWINDKVVFAHNYVENSDNIKENQFEDFDEDWENFEFDAEAEPKAIKKHKIYRPQSTQAPKETVIKTEETDGSHDIDWTQTDDDTKYESHGMHVTGIVAGNSKEAAATGERFLGIAPEAQVMFMRVFANDIMGSAESLFIKAIEDAVALGADVINLSLGTANGAQLSGSKPLMEAIEKAKKAGVSVVVAAGNERVYGSDHDDPLATNPDYGLVGSPSTGRTPTSVAAINSKWVIQRLMTVKELENRADLNHGKAIYSESVDFKDIKDSLGYDKSHQFAYVKESTDAGYNAQDVKGKIALIERDPNKTYDEMIALAKKHGALGVLIFNNKPGQSNRSMRLTANGMGIPSAFISHEFGKAMSQLNGNGTGSLEFDSVVSKAPSQKGNEMNHFSNWGLTSDGYLKPDITAPGGDIYSTYNDNHYGSQTGTSMASPQIAGASLLVKQYLEKTQPNLPKEKIADIVKNLLMSNAQIHVNPETKTTTSPRQQGAGLLNIDGAVTSGLYVTGKDNYGSISLGNITDTMTFDVTVHNLSNKDKTLRYDTELLTDHVDPQKGRFTLTSHSLKTYQGGEVTVPANGKVTVRVTMDVSQFTKELTKQMPNGYYLEGFVRFRDSQDDQLNRVNIPFVGFKGQFENLAVAEESIYRLKSQGKTGFYFDESGPKDDIYVGKHFTGLVTLGSETNVSTKTISDNGLHTLGTFKNADGKFILEKNAQGNPVLAISPNGDNNQDFAAFKGVFLRKYQGLKASVYHASDKEHKNPLWVSPESFKGDKNFNSDIRFAKSTTLLGTAFSGKSLTGAELPDGHYHYVVSYYPDVVGAKRQEMTFDMILDRQKPVLSQATFDPETNRFKPEPLKDRGLAGVRKDSVFYLERKDNKPYTVTINDSYKYVSVEDNKTFVERQADGSFILPLDKAKLGDFYYMVEDFAGNVAIAKLGDHLPQTLGKTPIKLKLTDGNYQTKETLKDNLEMTQSDTGLVTNQAQLAVVHRNQPQSQLTKMNQDFFISPNEDGNKDFVAFKGLKNNVYNDLTVNVYAKDDHQKQTPIWSSQAGASVSAIESTAWYGITARGSKVMPGDYQYVVTYRDEHGKEHQKQYTISVNDKKPMITQGRFDTINGVDHFTPDKTKALDSSGIVREEVFYLAKKNGRKFDVTEGKDGITVSDNKVYIPKNPDGSYTISKRDGVTLSDYYYLVEDRAGNVSFATLRDLKAVGKDKAVVNFGLDLPVPEDKQIVNFTYLVRDADGKPIENLEYYNNSGNSLILPYGKYTVELLTYDTNAAKLESDKIVSFTLSADNNFQQVTFKITMLATSQITAHFDHLLPEGSRVSLKTAQDQLIPLEQSLYVPKAYGKTVQEGTYEVVVSLPKGYRIEGNTKVNTLPNEVHELSLRLVKVGDASDSTGDHKVMSKNNSQALTASATPTKSTTSATAKALPSTGEKMGLKLRIVGLVLLGLTCVFSRKKSTKD

SEQ ID NO: 74415 - protein, 666 aa, Streptococcus pyogenes
MMKKPFYITTPIYYPSGKLHIGSAYTTIACDVLARYKRLMGHEVFYLTGLDEHGQKIQTKAKEAGITPQTYVDNMAKDVKALWQLLDISYDTFIRTTDDYHEEVVAAVFEKLLAQDDIYLGEYSGWYSVSDEEFFTESQLKEVFRDEDGQVIGGIAPSGHEVEWVSEESYFLRLSKYDDRLVAFFKERPDFIQPDGRMNEMVKNFIEPGLEDLAVSRTTFTWGVPVPSDPKHVVYVWIDALLNYATALGYRQANHANFDKFWNGTVFHMVGKDILRFHSIYWPILLMMLDLPMPDRLIAHGWFVMKDGKMSKSKGNVVYPEMLVERFGLDPLRYYLMRSLPVGSDGTFTPEDYVGRINYELANDLGNLLNRTVAMINKYFDGTVPAYVDNGTAFDADLSQLIDAQLADYHKHMEAVDYPRALEAVWTIIARTNKYIDETAPWVLAKEDGDKAQLASVMAHLAASLRLVAHVIQPFMMETSAAIMAQLGLEPVSDLSTLALADFPANTKVVAKGTPIFPRLDMEAEIDYIKAQMGDSSAISQEKEWVPEEVALKSEKDVITFETFDAVEIRVAEVKEVSKVEGSEKLLRFRVDAGDGQDRQILSGIAKFYPNEQELVGKKLQIVANLKPRKMMKKYISQGMILSAEHGDQLTVLTVDSSVPNGSIIG

SEQ ID NO: 74416 - protein, 162 aa, Streptococcus pyogenes
MAELIIVYFSSKSNNTHRFVQKLGLPAQRIPVDNRPLEVSTHYLLIVPTYAAGGSDAKGAVSKQVIRFLNNPNNRKHCKGVISSGNTNFGDTFALAGPIISQKLQVPLLHQFELLGTATDVKKVQAIFARLKHHTHDKQKQTNNLITERTHPCHKPMRHTSH

SEQ ID NO: 74417 - protein, 726 aa, Streptococcus pyogenes
MSQTNASYLSLNALTRFKKPDGSYHFDSDKEAVRRYLEEHVSPNQMAFNSLEDKLAYLINEGYYEQAIFDAYPNDLIKEAFHYAYQQGYRFLNLMGAMKFYQSYALKTLDGKQYLETFEDRAVMNALFLADGDQTFVFDVIDAILHRRFQPATPTFLNAGKKRRGEYISCYLLRVEDNMESISRAISTSLQLSKRGGGVALCLTNLREIGAPIKGIENQATGIVPVMKLLEDSFSYANQLGQRQGAGAVYLHAHHPEVLTFLDTKRENADEKIRIKSLALGLVIPDITFQLAKENKDMALFSPYDIKRAYGKDMSDISITEEYDKLLANPAIKKTYISARKFFQLIAELHFESGYPYLLFDDTVNKRNPHAKKGRIVMSNLCSEIAQVSTPSTFKEDLSFETIGEDICCNLGSINIAQAMADAPHFEQLITTSIRALDRVSRVSDLNCAPSVETGNAANHAVGLGAMNLHGFLATNHIYYDTKEAVDFTDLFFHAMAYYAFKASCQLAKEKGAFAGFSLSTYSDGTYFAKYLQEDAKPQTAKVATLLQDYGFTLPTVADWQALVADIKQFGLANAHLLAVAPTGSISYLSSCTPSLQPVVAPVEVRKEGSLGRIYVPAYQIDQANYAYYERGAYEVGPKAIIDVVAAAQKHVDQAISLTLFMTDQATTRDLNRSYIQAFKQNCASIYYVRVRQDVLAGSEQYDEDSLVTAPGASDETTTECQSCMI

SEQ ID NO: 74418 - protein, 319 aa, Streptococcus pyogenes
MKLAVLGTGMIVKEVLPVLQKIDGIDLVAILSTVRSLTTAKDLAKAHHMPLATSKYEAILGNEEIDTVYIGLPNHLHFAYAKEALLAGKHVICEKPFTMTAGELDELVVIARKRKLILLEAITNQYLSNMTFIKEHLDQLGDIKIVECNYSQYSSRYDAFKRGDIAPAFNPKMGGGALRDLNIYNIHFVVGLFGRPKTVQYLANVEKGIDTSGMLVMDYEQFKVVCIGAKDCTAEIKSTIQGNKGSLAVLGATNTLPQVQLSLHGHEPQVINHNKHDHRMYEEFVAFRDMIDQRDFEKVNQALEHSRAVMAVLERAVHS

SEQ ID NO: 74419 - protein, 460 aa, Streptococcus pyogenes
MTNYAIILAAGKGTRMTSDLPKVLHKVSGLTMLEHVFRSVKAISPEKSVTVIGHKSEMVRAVLADQSAFVHQTEQLGTGHAVMMAETQLEGLEGHTLVIAGDTPLITGESLKSLIDFHVNHKNVATILTATAQDPFGYGRIVRNKDGEVIKIVEQKDANEYEQQLKEINTGTYVFDNKRLFEALKCITTNNAQGEYYLTDVVAIFRANKEKVGAYILRDFNESLGVNDRVALAIAETVMRQRITQKHMVNGVTFQNPETVYIESDVEIAPDVLIEGNVTLKGRTHIGSGTVLTNGTYIVDSEIGDNCVVTNSMIESSVLAAGVTVGPYAHLRPGTTLDREVHIGNFVEVKGSHIGEKTKAGHLTYIGNAQVGSSVNVGAGTITVNYDGQNKYETVIGDHAFIGSNSTLIAPLEVGDHALTAAGSTISKTVPIDSIAIGRSRQVTKEGYAKRLAHHPSRSK

SEQ ID NO: 74420 - protein, 231 aa, Streptococcus pyogenes
MKIGIIAAMEEELSLLLANLLDAQEHQVLSKTYYTGRFGKHELILVQSGVGKVMSAMTVAILVEHFKAQAIINTGSAGAVASHLAIGDVVVADRLVYHDVDATAFGYAYGQMAGQPLYYDCDPQFVAIFKQVLKHEKTNGQVGLIATGDSFVAGQDKIDQIKTAFSDVLAVEMEGAAIAQAAHTAGKPFIVVRAMSDTAAHDANITFDQFIIEAGKRSAQTLMTFLENLPV

SEQ ID NO: 74421 - protein, 801 aa, Streptococcus pyogenes
MVKRNQRKKSAPKKRLTKAEVEKQRAIKRMILSVLMALLLIFAMLRLGVFGVTTYNMIRFLVGSLAYPFMFAWLIYLFCFKWLRQKDGMIAGVVIAFLGLLVEWHAFLFAMPRMLDQDIFLGTARLITRDLLALRVTEFVGGGMLGALLYKPIAFLFSNIGSYFIGFLFILLGLFLMTPWDIYDVSHFVKEAVDKLAVAYQENKEKRFIKREEHRLQAEKEALEKQAQEEEKRLAELTVDPETGEIVEDSQSQVSYDLAEDMTKEPEILAYDSHLKDDETSLFDQEDLAYAHEEIGAYDSLSALASSEDEMDMDEPVEVDFTPKTHLLYKLPTIDLFAPDKPKNQSKEKNLVRKNIKVLEDTFQSFGIDVKVERAEIGPSVTKYEIKPAVGVRVNRISNLADDLALALAAKDVRIEAPIPGKSLIGIEVPNSEIATVSFRELWEQSDANPENLLEVPLGKAVNGNARSFNLARMPHLLVAGSTGSGKSVAVNGIISSILMKARPDQVKFMMIDPKMVELSVYNDIPHLLIPVVTNPRKASKALQKVVDEMENRYELFSKIGVRNIAGYNTKVEEFNASSEQKQIPLPLIVVIVDELADLMMVASKEVEDAIIRLGQKARAAGIHMILATQRPSVDVISGLIKANVPSRMAFAVSSGTDSRTILDENGAEKLLGRGDMLFKPIDENHPVRLQGSFISDDDVERIVNFIKDQTEADYDDAFDPGEVSDNDPGFSGNGGAAEGDPLFEEAKALVLETQKASASMIQRRLSVGFNRATRLMDELEEAGVIGPAEGTKPRKVLQTN

SEQ ID NO: 74422 - protein, 141 aa, Streptococcus pyogenes
MAKKVEKLVKLQIPAGKATPAPPVGPALGQAGINIMGFTKEFNARTADQAGMIIPVVISVYEDKSFDFITKTPPAAVLLKKAAGVEKGSGTPNTTKVATVTRAQVQEIAETKMPDLNAANIEAAMRMIEGTARSMGFTVTD

SEQ ID NO: 74423 - protein, 229 aa, Streptococcus pyogenes
MAKKSKQMRAALEKVDSTKAYSVEEAVALVKETNFAKFDASVEVAYNLNIDVRKADQQIRGAMVLPNGTGKTQRVLVFARGAKAEEAKAAGADFVGEDDLVAKINGGWLDFDVVIATPDMMAIVGRLGRVLGPRNLMPNPKTGTVTMDVAKAVEESKGGKITYRADKAGNVQALIGKVSFDADKLVENFKAFHDVMAKAKPATAKGTYMANVSITSTQGVGIKVDPNSL

SEQ ID NO: 74424 - protein, 242 aa, Streptococcus pyogenes
MEPKYQRILIKLSGEALAGEKGVGIDIPTVQAIAKEIAEVHVSGVQIALVIGGGNLWRGEPAADAGMDRVQADYTGMLGTVMNALVMADSLQHYGVDTRVQTAIPMQNVAEPYIRGRALRHLEKNRIVVFGAGIGSPYFSTDTTAALRAAEIEADAILMAKNGVDGVYNADPKKDANAVKFDELTHGEVIKRGLKIMDATASTLSMDNDIDLVVFNMNEAGNIQRVVFGEHIGTTVSNKVCD

SEQ ID NO: 74425 - protein, 185 aa, Streptococcus pyogenes
MANAIIETAKERFAQSHQSLSREYASIRAGRANASLLDRIQVDYYGAPTPLNQLASITVPEARVLLISPFDKSSIKDIERALNASDLGITPANDGSVIRLVIPALTEETRKELAKEVKKVGENAKIAIRNIRRDAMDDAKKQEKAKEITEDELKTLEKDIQKATDDAIKEIDRMTAEKEKELLSV

SEQ ID NO: 74426 - protein, 590 aa, Streptococcus pyogenes
MYYTSGNYEAFATPRKPEGVDQKSAYIVGTGLAGLAAAVFLIRDGHMAGERIHLFEELPLAGGSLDGIEKPHLGFVTRGGREMENHFECMWDMYRSIPSLEIPGASYLDEFYWLDKDDPNSSNCRLIHKRGNRVDDDGQYTLGKQSKELIHLIMKTEESLGDQTIEEFFSEDFFKSNFWVYWATMFAFEKWHSAVEMRRYAMRFIHHIDGLPDFTSLKFNKYNQYDSMVKPIIAYLESHDVDIQFDTKVTDIQVEQTAGKKVAKTIHMTVSGEAKAIELTPDDLVFVTNGSITESSTYGSHHEVAKPTKALGGSWNLWENLAAQSDDFGHPKVFYQDLPAESWFVSATATIKHPAIEPYIERLTHRDLHDGKVNTGGIITITDSNWMMSFAIHRQPHFKEQKENETTVWIYGLYSNSEGNYVHKKIEECTGQEITEEWLYHLGVPVDKIKDLASQDYINTVPVYMPYITSYFMPRVKGDRPKVIPDGSVNLAFIGNFAESPSRDTVFTTEYSIRTAMEAVYSFLNVERGIPEVFNSAYDIRELLKAFYYLNDKKAIKDMDLPIPALIEKIGHKKIKDTFIEELLKDANLM

SEQ ID NO: 74427 - protein, 135 aa, Streptococcus pyogenes
MALHDNNTTKRKWKNRTITSSLEFALTGVFTAFKEERNLRSHLLSACLACVAGLFFSISAIEWLFLLLAIFLVITLEIVNSAIENVVDLASDYHFSMLAKNAKDMAAGAVLMISGYAVLTGLIIFIPKIWNIFVH

SEQ ID NO: 74428 - protein, 298 aa, Streptococcus pyogenes
MFKSGFVAILGRPNVGKSTFLNHVMGQKIAIMSDKAQTTRNKIMGIYTTETEQIVFIDTPGIHKPKTALGDFMVESAYSTLREVETVLFMVPADEKRGKGDDMIIERLKAAKIPVILVINKIDKVHPDQLLEQIDDFHSQMDFKEVVPISALEGNNVPTLIKLLTDNLEEGFQYFPEDQITDHPERFLVSEMVREKVLHLTQQEVPHSVAVVVESMKRDEETDKVHIRATIMVERDSQKGIIIGKQGAMLKKIGKMARRDIELMLGDKVYLETWVKVKKNWRDKKLDLADFGYNEKEY

SEQ ID NO: 74429 - protein, 275 aa, Streptococcus pyogenes
MPELPEVETVRRGLETLVLGQEIVAVTLKVPKMVKTDLETFALTLPGQIIQSVGRRGKYLLIDLGQLVLVSHLRMEGKYLLFPDEVPDNKHFHVFFELKNGSTLVYQDVRKFGTFDLIAKSQLSAFFAKRKLGPEPKKETFKLKTFEAALLSSQKPIKPHLLDQTLVAGLGNIYVDEVLWAAKVHPETASSRLNKAEIKRLHDETIRILALGIEKGGSTVRTYRNALGADGTMQDYLQVYGQTGKPCPRCGQAIVKLKVGGRGTHICPKCQKKRL

SEQ ID NO: 74430 - protein, 397 aa, Streptococcus pyogenes
MNWRQNLKVAWLGNFFTGASFSLVMPFMALYVENLGTPTELVEYYAGLAVAVTALASALFAPVWGKLADRYGRKPMMLRASFVMTFTMGGLAIIPNVFWLLILRLLTGVSAGYVPNATALIASQAPKEESGYALGTLATGVTAGALIGPLLGGILAELLGIRQVFLLVGVILFLCSLMTAVYVKEEFKPVRRFEMIPTKVILKQVKSPQIMLGLFVTSMIIQISAQSVAPILSLYIRHLGQTHNLMFTSGLVVSAMGFSSLFSSSYLGKLGDRFGNHRLLLAALCYSFIMYFSSALAQTSFQLGVLRFAYGFGVGALMPSINSLLTKLTPKEGISRVFAYNQMFSNLGQVIGPFIGSNVAVVLGYRSVFYVTSLIVFVNLIWSLIIFRKYIKVKDIV

SEQ ID NO: 74431 - protein, 155 aa, Streptococcus pyogenes
MAKGEGHILAQNKKARHDYHIVETVEAGIVLTGTEIKSVRAARIQLKDGFAQIKNGEAWLVNVHIAPFEQGNIWNADPERTRKLLLKKREITHLANELKGSGMTLVPLKVYLKDGFAKVLIGLAKGKHEYDKRETIKRRDQERDIKKQMKHYNAR

SEQ ID NO: 74432 - protein, 444 aa, Streptococcus pyogenes
MRIGLFTDTYFPQVSGVATSIRTLKEELEKEGHEVYIFTTTDRDVKRFEDPTIIRLPSVPFVSFTDRRVVYRGLISSYKIAKHYNLDIIHTQTEFSLGLLGKMIGKALRIPVVHTYHTQYEDYVSYIANGKIIRPSMVKPLLRGYLKDLDGVICPSRIVLNLLEGYEVTIPKRVIPTGIPLEKYIRDDITAEEVTNLKAELGIAGDETMLLSLSRISYEKNIQAIINQMPAILAENAKIKLIIVGNGPYLQDLKHLAMQLEVDKHVTFTGMVPHDKVALYYKACDFFISASTSETQGLTYIESLASGTPIIAHGNPYLDDVVTDKMFGTLYYAETDLTDAIIDAILKTPVMDKRLLAKKRYEISAQHFGKSIYTFYLDTLIARNSKEAQKLSLYLNHSGKSSSLKLVQGAIHLPKRAAKVTAITSVKVVKAPIKLVHAIKDFLD

SEQ ID NO: 74433 - protein, 647 aa, Streptococcus pyogenes
MIKITFPDGAVREFESGVTTFDIAESISKSLAKKALAGKFNDQLIDTTRAIEEDGSIEIVTPDHKDAYEVLRHSAAHLFAQAAKRLFPNLHLGVGPAIAEGFYYDTDNAEGQISNEDLPRIEAEMQKIVTENYPCIREEVTKEEALELFKDDPYKVELINEHAGAGLTVYRQGEFVDLCRGPHVPSTGRIQVFHLLNVAGAYWRGNSDNNMMQRIYGTAWFDKKDLKAYLTRLEEAKERDHRKLGKELDLFMISQEVGQGLPFWLPDGATIRRTLERYITDKELASGYQHVYTPPLASVELYKTSGHWDHYQEDMFPVMDMGDGEEFVLRPMNCPHHIQVYKNHVRSYRELPIRIAELGMMHRYEKSGALSGLQRVREMTLNDGHIFVTPEQIQEEFQRALQLIIDVYADFNLTDYRFRLSYRDPNDTHKYYDNDEMWENAQSMLKAALDEMGVDYFEAEGEAAFYGPKLDIQVKTALGNEETLSTIQLDFLLPERFDLKYIGADGEEHRPVMIHRGVISTMERFTAILIETYKGAFPTWLAPHQVTVIPISNEAHIDYAWEVAKTLRDRGVRADVDDRNEKMQYKIRASQTSKIPYQLIVGDKEMEDKSVNVRRYGSKTTHTESVEEFVENILADIARKSRPDAQA

SEQ ID NO: 74434 - protein, 236 aa, Streptococcus pyogenes
MKKILIVDDEKPISDIIKFNLTKEGYDIVTAFDGREAVTIFEEEKPDLIILDLMLPELDGLEVAKEIRKTSHVPIIMLSAKDSEFDKVIGLEIGADDYVTKPFSNRELLARVKAHLRRTETIETAVAEENASSGTQELTIGNLQILPDAFVAKKHGQEVELTHREFELLHHLANHMGQVMTREHLLEIVWGYDYFGDVRTVDVTVRRLREKIEDTPSRPEYILTRRGVGYYMKSYD

SEQ ID NO: 74435 - protein, 450 aa, Streptococcus pyogenes
MTRDIIGNLSTFELAILILLVFVAFYFIHLAVRDYRNARIIRMMSHKIRDLINGRYTDIIDEKADIELMELSDQLNDLSDVFRLTHENLAQEKNRLASILAYMSDGVLATDRSGKIIMINETARKQLNLSKEEALKKNITDLLEGDTSYTYRDLVSKTPVVTVNSRNDMGEFVSLRLRFALNRRESGFISGLVVVLHDTTEQEKEERERRLFVSNVSHELRTPLTSVKSYLEALDEGALKEDIAPSFIKVSLDETNRMMRMISDLLNLSRIDNQVTQLAVEMTNFTAFITSILNRFDLVKNQHTGTGKVYEIVRDYPITSVWIEIDNDKMTQVIENILNNAIKYSPDGGKITVRMKTTDTQLIISISDQGLGIPKTDLPLIFDRFYRVDKARSRAQGGTGLGLAIAKEIIKQHHGFIWAKSDYGKGSTFTIVLPYEKDAAIYEEWEEDVD

SEQ ID NO: 74436 - protein, 1179 aa, Streptococcus pyogenes
MFLKEIELEGFKSFADKTKIEFDKGVTAVVGPNGSGKSNITESLRWALGESSAKNLRGGKMPDVIFAGTQNRNPLNYAKVAVVLDNSDHFIKTAKKEIRVERHIYRNGDSDYLIDGRKVRLRDIHDLFMDTGLGRDSFSIISQGRVEEIFNSKPEERRAIFEEAAGVLKYKTRKKETQIKLNQTQDNLDRLEDIIYELDTQLAPLEKQAKVAKQFLELDANRKQLQLDILVKDIDIAQERQTKDTEALAALQQDLASYYAKRQSMEEDYQKFKQKKQVLSQESDQTQTTLLELTKLIADLEKQIELVKLESGQEAEKKAEAKKHLEQLQEQLDGFQAEEKQCTEQLLHIDQQLCDVKQQLNELSNALERFSSDPDQLMETLREEFVLLMQKEAALSNQLTALKAHLDKEKQARQHKAQEYQLLVTKLDQLNDESQKAQAHYKAQKEQVEMLLQNYQEGDKRVQELERDYQLNQERLFDLLDQKKGKEARKASLESIQKSHSQFYAGVRAVLQSQKKLGGIIGAVSEHLSFDSDYQTALEVALGANSQHIIVTDEAAAKRAIAYLKKNRQGRATFLPLTTIKARSLSEHYHRQLATCEGYLGTAESLIRYDDSLSAIIQNLLSSTAIFETIDQANIAARLLGYKVRIVTLDGTELRPGGSFSGGANRQSNTTFIKPELEQISEELTRLVEQLKITEKEVAALQSDLIAKKEELTQLKLAGDQARLAEQRAQMAYQQLQEKQEDSKALLAALDQSQTTHSDESLLAEQARIEEALTAIAKKKNALTCDIDDIKENKDLIRQKTQNIHQALSQARLQERDLLNEKKFEQANQSRLRTQLKQCQQNILKLESILNNNVSQDSIQRLPQWQKQLQDATEHKSGAQKRLVQLRFEIEDYEARLEETAEKITKESEKNDTFIRRQTKLETHLEQVANRLRAYAKSLSEDFQMTLADAKEVTNSIDHLESAKEKLHHLQKTIRALGPINSDAINQYEEVHERLTFLTSQKTDLTKAKNLLLETINSMDSEVKARFKVTFEAIQKSFKETFTQMFGGGSADLVLTETDLLSAGIEISVQPPGKKIQSLNLMSGGEKALSALALLFAIIRVKTIPFVILDEVEAALDEANVKRFGDFLNRFDKDSQFIVVTHRKGTMAAADSIYGITMQESGVSKIVSVKLKEAQEMTN

SEQ ID NO: 74437 - protein, 265 aa, Streptococcus pyogenes
MIKLIATDMDGTFLAEDGTYNQEQLAALLPKLAEKGILFAVSSGRSLLAIDQLFEPFLDQIAVIAENGSVVQYRGEILFADMMTKEQYTEVAKKILANPHYVETGMVFSGQKAAYILKGASEEYIQKTKHYYANVKVINGFEDMENDAIFKVSTNFTGHTVLEGSDWLNQALPYATAVTTGFDSIDIILKEVNKGFGMEHLCQALGIKKAETIAFGDNFNDYQMLEFAGRAIATENARPEIKVISDQVIGHCNDGAVLTYLKGLV

SEQ ID NO: 74438 - protein, 516 aa, Streptococcus pyogenes
MGLFDRLFGKKETPKVAEEKLEENLLTETTQKEELSEKANEQDKIEAVQQEDVSSEGAGSVENGPEAASVNALVEEETGDNSNHPSEDTNEFAADKTDLKVSELSQSTASEPKDLVDQPVVEQFPTKQAQADASNDSANEEAVDTSKEQSSSQQVMEDYYRRKAALEKSLQEKAAATVPVMPEEVPQENQASTSAEASQNKATHDTIPETDQEKYKRSLKKTRTGFSARLNSFFANFRRVDEEFFEDLEEMLILSDVGVHVATTLTEELRYEAKLENAKKPDALKRVIVEKLVDIYEKDGRYNEAINYQDGLTVMLFVGVNGVGKTTSIGKLAYRYKQEGKKVMLVAADTFRAGAVAQLVEWGRRVDVPVITGPEKADPASVVFDGMEKAVAKGVDILLIDTAGRLQNKENLMAELEKMGRIIKRVLPDAPHETLLALDASTGQNALSQAKEFSKITPLTGLILTKIDGTAKGGVVLAIRQELDIPVKFIGFGEKVDDIGEFHSEDFMKGLLEGIL

SEQ ID NO: 74439 - protein, 620 aa, Streptococcus pyogenes
MTYQETAKAILAAVGGKTNIQRVTHCVTRLRLVLKNDEKVKDQQVKAISNVIGVMRKNGQYQIILGNDVNNYYQAFLSLGHFDNQDEDHSSKAKGSILERLIETIAGVITPLIPALLGGGMLKVVGILLPMLGLASADSQTVAFINFFGDAAYYFMPVMIAYSAAARFKVTPVLAATIAGILLHPAFVAMVAEGKPLTLFGAPVTPASYGSSVIPILMMVYLMQYIEKWVNRLVPSVMKSFLQPTLIILISGFLALVVVGPLGVIIGQGLSNTMLAIYHVAPWLALAILGAIMPLVVMTGMHWAFAPIFLAASVATPDVLILPAMLASNLAQGAASLAVAFKTKQKQTRQVALAAGISALLAGITEPALYGVTLKFKKPLYAAMISGGLVGAFIGFVNIASYTFVVPSIIGLPQYINPSGGANFTNALIAGTATIVLAFSLTWFMGIDEESPKQVSVAADMSQVKSGLSTKQTLYAPMTGEMLFLSEVPDETFSSKLLGEGFAILPSEGEVYAPFDGEVITFFPTKHAVALKNTRGVEVLIHVGIDTVELKGQGFEQLVSVGDVVKRGQALLKMDIDFITSKGYSLISPVVVTNSAEQLEIIIQDDKKMVTKEDALLVIL

SEQ ID NO: 74440 - protein, 474 aa, Streptococcus pyogenes
MGIFPKDFLWGGAVAANQVEGAFEADAKGLSVQDVLPNGGLGEWTDSPTSDNLTLEAIDFYHRYKEDIALFAEMGFKVFRTSIAWSRIFPNGDDDQPNEAGLQFYDDLFDELLNYGIEPLVTLSHYETPLHLAKAYNGWTDRRLIGFFERFAQTVMERYKDKVKYWLTFNEVNSILHMPFTSGGIMTEKEKLSLQDLYQAIHHELVASASVTKLAHEINPDVKVGCMILAMPAYPMTSDPRDILAAHAFENLNLLFSDIHVRGKYPSYIKSYFKENGIEIVFEDGDKELLAEHTVDFLSFSYYMSVTQAHNPEAYTSGQGNILGGLSNPYLESSEWGWQIDPIGLRLVLNQYYDRYQIPLFIVENGLGAKDQLVQTADGSMTVHDDYRIDYMSQHLVQVAKAIEDGVEVMGYTSWGCIDCVSMSTAQLSKRYGFIYVDRNDDGTGQLTRYKKKSFDWYRQVIQTNGRYLEDNFS

SEQ ID NO: 74441 - protein, 710 aa, Streptococcus pyogenes
MENNNNHNIAEALSVSLHQIEQVLALTAQGNTIPFIARYRKEVTGNLDEVVIKSIIDMDKSLTTLNERKATILAKIEEQGKLTDQLRTSIEATEKLADLEELYLPYKEKRRTKATIAREAGLFPLARLILQNAQNLETAAEPFVTEGFASPQEALAGAVDILVEAMSEDAKLRSWTYNEIWQYSRLVSTLKDEQLDEKKVFQIYYDFSDQVSNMQGYRTLALNRGEKLGILKVSFEHNLEKMQRFFSVRFKETNPYIEEVINQTIKKKIVPAMERRVRSELSDAAEDGAIHLFSENLRHLLLVSPLKGKMVLGFDPAFRTGAKLAIVDQTGKLLTTQVIYPVAPASQTKIQAAKETLTQLIETYQIDIIAIGNGTASRESEAFVADVLKDFPNTSYVIVNESGASVYSASELARHEFPDLTVEKRSAISIARRLQDPLAELVKIDPKSIGVGQYQHDVSQKKLSENLGFVVDTVVNQVGVNVNTASPSLLAHVSGLNKTISENIVKYREENGALTSRADIKKVPRLGAKAFEQAAGFLRIPGAKNILDNTGVHPESYPAVKELFKVLGIQDLDDAAKATLAAVQVPQMAETLAIGQETLKDIIADLLKPGRDLRDDFEAPILRQDILDLKDLEIGQKLEGTVRNVVDFGAFVDIGVHEDGLIHISEMSKTFVNHPSQVVSVGDLVTVWVSKIDLDRHKVNLSLLPPRDTH

SEQ ID NO: 74442 - protein, 310 aa, Streptococcus pyogenes
MTVTVKMLVQKVKLDVVYATDNLLSKEITTSDISRPGLEMTGYFDYYAPERLQLFGMKEWSYLTQMTSHNRYSVLKEMFKKDTPAVVVSRNLAIPKEMVQAAKEEGISLLSSRVSTSRLAGEMSYFLDASLAERTSVHGVLMDIYGMGVLIQGDSGIGKSETGLELVKRGHRLVADDRVDVYAKDEETLWGEPAEILRHLLEIRGVGIIDVMSLYGASAVKDSSQVQLAIYLENFEAGKVFDRLGNGNEEITFSGVRIPRIRIPVKTGRNVSVVIEAAAMNHRAKEMGFDATKTFEDRLTQLITKNEVSQ

SEQ ID NO: 74443 - protein, 428 aa, Streptococcus pyogenes
MSHMKKRPEVLSPAGTLEKLKVAIDYGADAVFVGGQAYGLRSRAGNFSMEELQEGIDYAHARGAKVYVAANMVTHEGNEIGAGEWFRQLRDMGLDAVIVSDPALIVICSTEAPGLEIHLSTQASSTNYETFEFWKAMGLTRVVLAREVNMAELAEIRKRTDVEIEAFVHGAMCISYSGRCVLSNHMSHRDANRGGCSQSCRWKYDLYDMPFGGERRSLKGEIPEDYSMSSVDMCMIDHIPDLIENGVDSLKIEGRMKSIHYVSTVTNCYKAAVGAYMESPEAFYAIKEELIDELWKVAQRELATGFYYGIPTENEQLFGARRKIPQYKFVGEVVAFDSASMTATIRQRNVIMEGDRIECYGPGFRHFETVVKDLHDADGQKIDRAPNPMELLTISLPREVKPGDMIRACKEGLVNLYQKDGTSKTVRT

SEQ ID NO: 74444 - protein, 497 aa, Streptococcus pyogenes
MSNQHIEELNDQQIVRREKMTALAEQGIDPFGKRFDRTANSAELKEKYADKTKEELHELNETAIVAGRLMTKRGKGKVGFAHLQDREGQIQLYVRKDSVGEDNYEIFKKADLGDFIGVEGEVMRTDMGELSIKATKLTHLSKSLRPLPEKFHGLTDIETIYRKRHLDLISNRESFDRFVTRSKMISEIRRYLDGLDFLEVETPVLHNEAGGAAARPFVTHHNAQNIDMVLRIATELHLKRLIVGGMERVYEIGRIFRNEGMDATHNPEFTSIEVYQAYADYLDIMNLTEGIIQHAAKAVRGDGPIDYQGTEIRINEPFKRVHMVDAIKEVTGADFWPEMTVEEAIALAKEKQVPLEKHFISVGHIINAFFEEFVEETLVQPTFVFGHPVEVSPLAKKNPEDTRFTDRFELFIMTKEYANAFTELNDPIDQLSRFEAQAQAKELGDDEATGIDYDFVEALEYGMPPTGGLGIGIDRLCMLLTNTTTIRDVLLFPTMKP

SEQ ID NO: 74445 - protein, 434 aa, Streptococcus pyogenes
MIISRSRGKTMKIDKRHLLNYSILLPYLILSVIGLIMVYSTTSVSLIQAHANPFKSVINQGVFWIISLVAITFIYKLKLNFLTNTRVLTVVMLGEAFLLIIARFFTTAIKGAHGWIVIGPVSFQPAEYLKIIMVWYLALTFAKIQKNISLYDYQALTRRKWWPTQWNDLRDWRVYSLLMVLLVAAQPDLGNASIIVLTAIIMFSISGIGYRWFSAILVMITGLSTVFLGTIAVIGVERVAKIPVFGYVAKRFSAFFNPFHDLTDSGHQLANSYYAMSNGGWFGQGLGNSIEKRGYLPEAQTDFVFSVVIEELGLIGAGFILALVFFLILRIMNVGIKAKNPFNAMMALGVGGMMLMQVFVNIGGISGLIPSTGVTFPFLSQGGNSLLVLSVAVGFVLNIDASEKRDDIFKEAELSYRKDTRKENSKVVNIKQFQ

SEQ ID NO: 74446 - protein, 398 aa, Streptococcus pyogenes
MAKEKYDRSKPHVNIGTIGHVDHGKTTLTAAITTVLARRLPSSVNQPKDYASIDAAPEERERGITINTAHVEYETATRHYAHIDAPGHADYVKNMITGAAQMDGAILVVASTDGPMPQTREHILLSRQVGVKHLIVFMNKVDLVDDEELLELVEMEIRDLLSEYDFPGDDLPVIQGSALKALEGDTKFEDIIMELMDTVDSYIPEPERDTDKPLLLPVEDVFSITGRGTVASGRIDRGTVRVNDEIEIVGIKEETKKAVVTGVEMFRKQLDEGLAGDNVGILLRGVQRDEIERGQVIAKPSSINPHTKFKGEVYILSKDEGGRHTPFFNNYRPQFYFRTTDVTGSIELPAGTEMVMPGDNVTINVELIHPIAVEQGTTFSIREGGRTVGSGIVSEIEA

SEQ ID NO: 74447 - protein, 411 aa, Streptococcus pyogenes
MALIEISQEQFDHYCHSLVHHSFIQTSEMASLMAKRGAKPQFLGLEKDGELKVAAMVFSQKVAGGWRMELNAGPNTNHPEELEHFYTQLKDYAKQKDVIELILKPYDNYQSFDTDGIPISRPNTDLISLLTALGYKHDGLKTGYPEGEPVWHYVKKLEGIDSSRLTRSFSKKGKALIKKANTFGIKLRQLKRDELHHFKEITEATSDRRDYLDKSLSYYQDFYDSFGDSCEFMVATLNFEDYLNNLKQRQLQLATSINKVKGDLGKNPHSEKKQNRLKELSSQFETFQVRISEALHFLEEYGTKDVFLAGSLFIYTEQEAVYLFSGSYPKFNKFYSPALLQEHAMLKAIHKGIKQYNFLGITGKFDGSDGVLRFKQNFNGFILQKPGTFRCYPFPIKYHFIRLAKKLLNRY

SEQ ID NO: 74448 - protein, 408 aa, Streptococcus pyogenes
MYTYKIGISPEEHDQFVLAQPQAGLLQSSKWGKVKDNWKHERISFYENGVQVAAAACLIRKLPLGFTMIYIPRGPIMDYANFELLDFVIKTLKTFGKSKRALFIKIDPSLVIKQTLEGKESKENDVTLSIIAFLKKLGVEWSGRTKELEDTIQPRIQANIYAKDFDFDSLPKKAKQSIRTATNKGVNVTIGGSELLDDFSALMKKTENRKGIILRGKSYYQKLLGIYAGQSYITMASLDLPEQKKLLIQQLDKALAEQARLTDKSKPSKVAENQKTIARLQKDLTILSEQLATGQTRIPLAATLTLIYGETSENLYAGMDDDYRNYQAPLLTWYETAKEAFKRGCRWHNLGGVENQQDGGLYHFKARLNPTIEEFAGEFNIPVGLVSSLAILTYNLRKKLRSTTNGTN

SEQ ID NO: 74449 - protein, 269 aa, Streptococcus pyogenes
MSIKLVAVDIDGTLLTDDRRITDDVFQAVQEAKAQGVHVVIATGRPIAGVISLLEQLELNHKGNHVITFNGGLVQDAETGEEIVKELMTYDDYLETEFLSRKLGVHMHAITKEGIYTANRNIGKYTVHESTLVNMPIFYRTPEEMTNKEIIKMMMIDEPDLLDAAIKQIPQHFFDKYTIVKSTPFYLEFMPKTVSKGNAIKHLAKKLGLDMSQTMAIGDAENDRAMLEVVANPVVMENGVPELKKIAKYITKSNNDSGVAHAIRKWVLN

SEQ ID NO: 74450 - protein, 893 aa, Streptococcus pyogenes
MSKEQRHEAFYTQSEETVLAQLETSREGLTSAQAKERLAEYGRNELDEGEKRSLFMKFLDQFKDLMIIILIVAALLSVLTEGMEGLTDAIIILAVVILNAAFGVYQEGQAEAAIEALKSMSSPLARIRRDGHVTEIDSKELVPGDIVLLEAGDVVPADLRLLEANSLKIEEAALTGESVPVEKDLSTAVSEDAGIGDRVNMGYQNSNVTYGRGIGVITNTGMYTEVGHIAGMLANADETDTPLKQNLDNLSKILTYAILVIAAVTFAVGVFLRGQHPLEGLMTSVALAVAAIPEGLPAIVTVVLSLGTQVLAKRNAIIRKLPAVETLGSTEIIASDKTGTLTMNQMTVEKVYTNGTLQSSSADIAFDNTTLRVMNFANDTKVDPSGKLIGDPTETALVEFGLDHNFDVREAMVAEPRVAELPFDSDRKLMSTIHKQADGKYFIAVKGAPDQLLKRVTQIEENGQIRPITDADKKTILDTNKSLAKQALRVLMMAYKYSDALPTLETEIVEANLVFSGLVGMIDPERPEAAQAVKVAKEAGIRPIMITGDHQDTAKAIAKRLGIIEEDGVDHVFTGAELNELSDEEFQKVFKQYSVYARVSPEHKVRIVKAWQNEGKVVAMTGDGVNDAPSLKTADIGIGMGITGTEVSKGASDMVLADDNFATIIVAVEEGRKVFSNIQKTIQYLLSANMAEVFTIFLATLFGWDVLQPVHLLWINLVTDTLPAIALGVEPAEPGVMKHKPRGRKSSFFDGGVKEAILYQGAFQTILVLGVYGFALMFPEHTSYHDVHADALTMAYVTLGLIQLVHAYNVKSVYQSIFTVGLFKNKLFNYSIPVAFVALMATVVVPGFNQFFHVTHLTITQWLVVIIGSLLMVVLVELVKAVQRSLGQDEKAI

SEQ ID NO: 74451 - protein, 264 aa, Streptococcus pyogenes
MENMFSLQGKIALITGASYGIGFEIAKAYAQAGATIVFNDIKQELVDKGLAAYRELGIEAHGYVCDVTDEAGIQQMVSQIEDEVGAIDILVNNAGIIRRTPMLEMAAEDFRQVIDIDLNAPFIVSKAVLPSMIAKGHGKIINICSMMSELGRETVSAYAAAKGGLKMLTKNIASEFGEANIQCNGIGPGYIATPQTAPLRERQADGSRHPFDQFIIAKTPAARWGTTEDLAGPAVFLASDASNFVNGHILYVDGGILAYIGKQP

SEQ ID NO: 74452 - protein, 337 aa, Streptococcus pyogenes
MEEEIALLENHMTEPDFWNDNIAAQKTSQELNELKGKYDTFHNMQELSDETELLLEMLDEDDSLKEELEENLMQLDKIMGAYEMTLLLSEPYDHNNAILEIHPGSGGTEAQDWGDLLLRMYTRFGNANGFKIEVLDYQAGDEAGIKSVTLSFEGPNAYGLLKSEMGVHRLVRISPFDSAKRRHTSFASVEVMPELDDTIEVEVRDDDIKMDTFRSGGAGGQNVNKVSTGVRLTHIPTGIVVSSTVDRTQYGNRDRAMKMLQAKLYQLEQEKKAQEVDALKGDKKEITWGSQIRSYVFTPYTMVKDHRTNFELAQVDKVMDGEINGFIDAYLKWRIED

SEQ ID NO: 74453 - protein, 397 aa, Streptococcus pyogenes
MPKLSKRVLEMKESVTLAAGARAKALKAQGRDVLNLTLGEPDFFTPKHIQDKAIESIQNGTASFYTNASGLPELKAAIATYLKNQYGYHLSPDQIVAGTGAKFILYAFFMAVLNPGDQVLIPTPYWVSYSDQVKMAEGQPIFVQGLEENQFKVTVDQLERARTSKTKVVLINSPSNPTGMIYGAEELRAIGEWAVHNDILILADDIYGSLVYNGNQFVPISTLSEAIRRQTITVNGVAKSYAMTGWRVGFAAGEPEIISAMSKIIGQTTSNLTTVSQYAAIEAFCGSQSSLEEMRLAFEERLNITYPLLCQVPGFEVVKPQGAFYFFPNVKKAMEMTGFSDVTSFANAILEEVGLAVVSGAGFGAPENVRLSYATDIETLKEAVRRLHVFMESNEIN

SEQ ID NO: 74454 - protein, 448 aa, Streptococcus pyogenes
MSKKLISIVDVKDYVGQEVTIGAWVANKSGKGKIAFVQLRDGSAFFQGVAFKPNFIEKYGEESGLEKFDVIKRLNQETSVYVTGIVKEDERSKFGYELDITDLEIIGESHEYPITPKEHGTDFLMDNRHLWLRSRKQMAVMQIRNAIIYATYEFFDQNGFIKFDSPILSENAAEDSTELFETDYFGKPAFLSQSGQLYLEAGAMALGRVFDFGPVFRAEKSKTRRHLTEFWMMDAEYSFLSHEESLDLQEAYVKALIQGVLDRAPQALDILERDVEALKRYITEPFKRVSYDDAITLLQEHEADEDTDYEHLEHGDDFGSPHETWISNYFGVPTFVVNYPASFKAFYMKPVPGNPERVLCADLLAPEGYGEIIGGSMREDNYDALVAKMDELGMDKSEYDFYLDLRKYGSVPHGGFGIGIERMVTFVAGTKHIREAIPFPRMLHRIRP

SEQ ID NO: 74455 - protein, 296 aa, Streptococcus pyogenes
MSDKHINLVIVTGMSGAGKTVAIQSFEDLGYFTIDNMPPALVPKFLELIEQTNENRRVALVVDMRSRLFFKEINSTLDSIESNPSIDFRILFLDATDGELVSRYKETRRSHPLAADGRVLDGIRLERELLSPLKSMSQHVVDTTKLTPRQLRKTISDQFSEGSNQASFRIEVMSFGFKYGLPLDADLVFDVRFLPNPYYQVELREKTGLDEDVFNYVMSHPESEVFYKHLLNLIVPILPAYQKEGKSVLTVAIGCTGGQHRSVAFAHCLAESLATDWSVNESHRDQNRRKETVNRS

SEQ ID NO: 74456 - protein, 325 aa, Streptococcus pyogenes
MKNPKMTVIGGGTGISIILKSLRNEAVDITAVVTVADDGGSSGELRNAMQLAPPGDLRNVLLAMSDMPKFYERVFQYRFNESDGALAGHPLGNLIIAGISEMQGSTYNAIQILTKFFHITGKIYPSSEQALTLHAVFKDGHEVAGESSIAKYPGMIDHVYVTNTYNDQKPQASRKVVEAILESDMIVLGPGSLFTSILPNLVIPEIKEALRQTKAEVVYICNIMTQYGETEQFSDADHVAVLNQHLGRDLIDTVLVNVAKVPQAYMNSNKFDEYLVQVDHDFAGLCRAAKRVISSYFLRLENGGAFHDGNLVVEELMNLVRIVKQ

SEQ ID NO: 74457 - protein, 303 aa, Streptococcus pyogenes
MSFTTKVKEELIHLSTGDNNELAAIIKLSGSLGLAHQSLHLSITTENAKIARYIYSLIEDAYVIVPEIRYHQKTNLRKNRVYTVYVEQGVETILADLKLADSFFGLETGIEPQVLSDDNAGRSYLKGAFLAAGSIRDPESGKYQLEIYSVYLDHAQDLAQLMQKFMLDAKTIEHKSGAVTYLQKAEDIMDFLIIIGAMSCKEDFEAIKLLREARNDINRANNAETANIAKTISASMKTINNIIKIMDTIGLESLPIELQQVAQLRVKHPDYSIQQVADALEFPITKSGVNHRLRKINKIADDL

SEQ ID NO: 74458 - protein, 1086 aa, Streptococcus pyogenes
MAADGKVTILVDVDGKQVKVLNSELDKVAKHGDKGSSSLKKFAVGAGVFKLASAAVDLVSQSLGKAITRFDTLEKYPRVMKAMGHSAEYVARSTDKLANGIDGLPTTLDEVVGTAQRLTSITKDINKSTNLTLALNNAFLASGASSEAASRGLEQYAQMLSAGKVDMQAWKTLQETMPYALQQTAEAFGFAGASAQKDFYEALKNGQITFDQFSNKLIELNDGVGGFAELAKENSKGIETSFNNIKNAIAKGVANSIKALDDLSKAATGKGIADHFDSLKVVINASFSAINASIKASTSLFKLLFSVIGAGISVVKALSPALVGVASGLAAMRAVNETITMIKALNRAWVMASASMSIGATTIKTVTAVQAVSTTMTKADMVARLSQLGVLKASTVIYGVMTGAISLSTAATIASTAAVTALKAALVALTGPVGWVVGAIGALVAVGVSLWSWLTKESDETKKLKKEQEGLVESNKQLRDSVREGVQERKKGLESVKESTAAHQKLADEIIKLAAKENKTAGEKQNLKNKIDQLNGSIDGLNLAYDKNSNSLSHNADQIKSRISAMEAESTWQTAQQNLLNIEQKRSEVSKKLAENAELRKKWNEEANVSDSVRKEKIAELTEEEGKLKNMQTQLQEEYNKTSATQQAAADAMAAAEESGSARQVIAYENMSEAQRTAIDNMRTKYSELLETTTSIFDAIEQKTALSVEQMNANLEKNRAATEQWATNLEILAQRGVDQGILEQLRRMGPEGATQTQVFVDATDAELAPLQENFRAATETAKNAMGSVLDSAGVEMPEKVKGMVTNVSTGLQAELQAANFAQLGQEIPNGVSQGISQGAGKASDASVKMGQEVKRSFQGELGIHSPSRVFTEYGGHITDGLSNGVTNGTSKVMQTMQSLAQQMSQKGQQIVNDMRSKSNQITDAFSTMSGPMHSHGVNAMQGLANGIYAGSGAALAAAQSIAARITATIQSALDIHSPSRVMRDEVGRFIPQGIAVGIDADRKVIDSSMQKLKESMTINATPEIASGFGGGVAGIANQTTNNSNNSFTLNVKVDESDGNSREKYQRLFREFSWYIQQQQGRLGDVK

SEQ ID NO: 74459 - protein, 86 aa, Streptococcus pyogenes
MRKDIHPDYRPVVFLDTTTGYQFLSGSTKASKETVEFEGETYPLIRVEISSDSHPFYTGRQKFTQADGRVDRFNKKYGLKDANAAK

SEQ ID NO: 74460 - protein, 115 aa, Streptococcus pyogenes
MNPLIQSLTEGQLRSDIPNFRPGDTVRVHAKVVEGTRERIQIFEGVVISRKGQGISEMYTVRKISGGIGVERTFPIHTPRVDKIEVIRHGKVRRAKLYYLRALQGKAARIKEIRR

SEQ ID NO: 74461 - protein, 650 aa, Streptococcus pyogenes
MIEENKHFEKKMQEYDASQIQVLEGLEAVRMRPGMYIGSTAKEGLHHLVWEIVDNSIDEALAGFASHIKVFIEADNSITVVDDGRGIPVDIQAKTGRPAVETVFTVLHAGGKFGGGGYKVSGGLHGVGSSVVNALSTQLDVRVYKNGQIHYQEFKRGAVVADLEVIGTTDVTGTTVHFTPDPEIFTETTQFDYSVLAKRIQELAFLNRGLKISITDKRSGMEQEEHFLYEGGIGSYVEFLNDKKDVIFETPIYTDGELEGIAVEVAMQYTTSYQETVMSFANNIHTHEGGTHEQGFRAALTRVINDYAKKNKILKENEDNLTGEDVREGLTAVISVKHPNPQFEGQTKTKLGNSEVVKITNRLFSEAFQRFLLENPQVARKIVEKGILASKARIAAKRAREVTRKKSGLEISNLPGKLADCSSNDANQNELFIVEGDSAGGSAKSGRNREFQAILPIRGKILNVEKATMDKILANEEIRSLFTAMGTGFGADFDVSKARYQKLVIMTDADVDGAHIRTLLLTLIYRFMRPVLEAGYVYIAQPPIYGVKVGSEIKEYIQPGIDQEDQLKTALEKYSIGRSKPTVQRYKGLGEMDDHQLWETTMDPENRLMARVTVDDAAEADKVFDMLMGDRVEPRRDFIEENAVYSTLDI

SEQ ID NO: 74462 - protein, 435 aa, Streptococcus pyogenes
MSIITDVYAREVLDSRGNPTLEVEVYTESGAFGRGMVPSGASTGEHEAVELRDGDKSRYLGLGTQKAVDNVNNIIAEAIIGYDVRDQQAIDRAMIALDGTPNKGKLGANAILGVSIAVARAAADYLEVPLYTYLGGFNTKVLPTPMMNIINGGSHSDAPIAFQEFMIMPVGAPTFKEGLRWGAEVFHALKKILKERGLVTAVGDEGGFAPKFEGTEDGVETILKAIEAAGYEAGENGIMIGFDCASSEFYDKERKVYDYTKFEGEGAAVRTSAEQVDYLEELVNKYPIITIEDGMDENDWDGWKVLTERLGKRVQLVGDDFFVTNTEYLARGIKENAANSILIKVNQIGTLTETFEAIEMAKEAGYTAVVSHRSGETEDSTIADIAVATNAGQIKTGSLSRTDRIAKYNQLLRIEDQLGEVAQYKGIKSFYNLKK

SEQ ID NO: 74463 - protein, 2045 aa, Streptococcus pyogenes
MRKVKKVFVSSCMLLTVGLGVAVPTGFSQSNGVMVVKAAEVPATDLSRQASDSERVDESSLLQKENLSVDSFKLENLNGWEAENDTAGNLGKFKDPDSSGYQNILTSSGKNISVAVAPKGSGKMNIKVTKRSNFQGGYYVGGLRTQTPVLKLNDVYRYSFTTKKLSGNSSEFKTRVKPVESNNKLGKELVIRVDNKNVSTKHDWLPDISDGTHTVDFTGLDKKLSVAFRFSPRQTSNVVYEFSNINIKNISPASVPAIPSKVLEGTSVLSGTAISSGDTLEKRKSFDGDILRVYKDSKIIARTVIKGNKWDVKLSKPLIAGEKLDFEILHPRSQNVSKKISKQVEAKPFDPASYKEKVIAKLKPVYEATSEKITNDAWLDENAKDLQKQKLEEQYISGKVAISEAGTKQEAIDAAYNKYSSQTDPDSLPSQYKQGNKENEQEKGRQDLIQTRDLTLKAIQEDKWLTEQEKTIQKEEALKAFETGIESVNQTVSLEQLKQRLIVYKASEKDSEKKEYPESIPNQHIPGKEKEVKAAKQEELKKLHDTTLEKINQDKWLTPDQQAEQLKQAEVTFKKGQEAIKSAQTLTQLETDLADYVSENEGKGNSIPDKYKSGNKDDLVNKAEVKLKEAHEATKQAIEKDPWLSPEQKKAQKEKAKARLDEGLKALKAADSLEILKVTEEAFVDKEKNPDSIPNQHKAGTADQARKQALDSLDKEVQKELESIDNDNTLTTDEKAAAKKKVNDAYDVAKQTAMEANSYEDLTTIKDEFLSNLPHKQGTPLKDQQSDAIAELEKKQQEIEKAIEGDKTLPRDEKEKQIADSKERLKSDTQKVKDAKNADAIKKAFEEGKVNIPQAHIPGDLNKDKEKLLAELKQKADDTEKAIDVDKTLTEDEKKEQKVKTKAELEKAKTDVKNTQTREELDKKVPELKKAIEDTHVKGNLEGVKNKAIEDLKKAHTETVAKINGDDTLDKATKEAQVKEADKALAAGKDAITKADDADKVSTAVTEHTPKIKAAHKTGDLKKAQVDANTALDKAAEKERGEINKDATLTTEDKAKQLKEVETALTKAKDNVKAAKTADAINDARDKGVATIDAVHKAGQDLGARKSGQVAKLEEAAKATKDKISADPTLTSKEKEEQSKAVDAELKKAIEAVNAADTADKVDDALGEGVTDIKNQHKSGDSIDARREAHGKELDRVAQETKGAIEKDPTLTTEEKAKQVKDVDAAKERGMAKLNEAKDADALDKAYGEGVTDIKNQHKSGDPVDARRGLHNKSIDEVAQATKDAITADTTLTEAEKETQRGNVDKEATKAKEELAKAKDADALDKAYGDGVTSIKNQHKSGKGLDVRKDEHKKALEAVAKRVTAEIEADPTLTPEVREQQKAEVQKELELATDKIAEAKDADEADKAYGDGVTAIENAHVIGKGIEARKDLAKKDLAEAAAKTKALIIEDKTLTDDQRKEQLLGVDTEYAKGIENIDAAKDAAGVDKAYSDGVRDILAQYKEGQNLNDRRNAAKEFLLKEADKVTKLINDDPTLTHDQKVDQINKVEQAKLDAIKSVDDAQTADAINDALGKGIENINNQYQHGDGVDVRKATAKGDLEKEAAKVKALIAKDPTLTQADKDKQTAAVDAAKNTAIAAVDKATTTEGINQELGKGITAINKAYRPGEGVKARKEAAKADLEKEAAKVKALITNDPTLTKADKAKQTEAVAKALKAAIAAVDKATTAEGINQELGKGITAINKAYRPGEGVKARKEAAKADLEREAAKVREAIANDPTLTKADKAKQTEAVAKALKAAIAAVDKATTAEGINQELGKGITAINKAYRPGEGVEAHKEAAKANLEKVAKETKALISGDRYLSETEKAVQKQAVEQALAKALGQVEAAKTVEAVKLAENLGTVAIRSAYVAGLAKDTDQATAALNEAKQAAIEALKQAAAETLAKITTDAKLTEAQKAEQSENVSLALKTAIATVRSAQSIASVKEAKDKGITAIRAAYVPNKAVAKSSSANHLPKSGDANSIVLVGLGVMSLLLGMVLYSKKKESKD

SEQ ID NO: 74464 - protein, 307 aa, Streptococcus pyogenes
MSFVQLTNVVKSYKNGKKAVNDVSLSIEAGNIYGLLGPNGAGKSTLINLILGLIPLSSGKITVLGQSQKTIRKISSQIGYVPQDIAVYPDLTAYENVELFGSLYGLKGAQLKKQVLKSLEFVGLHSQAKQFPSQFSGGMKRRLNIACALVHSPKLIIFDEPTVGIDPQSRNHILESIRLLNKEGATVIYTTHYMEEVEALCDYIFIMDHGQVIEEGPKFELEKRYVANLANQIIVTLTDSRHLELADKPDWSLIEDGEKLMLKIDNSDMTSVVHQLTQANITFSEIRHNHLNLEEIFLHLTGKKLRD

SEQ ID NO: 74465 - protein, 652 aa, Streptococcus pyogenes
MKKRIKELTDLLNRYRYDYYTKDAPSVSDSDYDKLYRELVTLEQSYPEYVLQDSPTQQVGGTILKGFEKYRHQYPLFSLQDAFSREELDAFDKRVKAEFPNATYLAELKIDGLSISLSYENGFLQVGATRGDGNIGENITENIKKIKDIPYQLSEPLTITVRGEAYMSRQSFKAINEARQENGETEFANPRNAAAGTLRQLDTSVVAKRQLATFLYQEASPTARNQQNEVLAELADLGFSVNPYYQLTSSMDEIWDFIKTIEAKRDQLAYDIDGVVIKVNSLAMQEELGFTVKAPRWAIAYKFPAEEKEAEILSVDWTVGRTGVVTPTANLTPVQLAGTTVSRATLHNVDYIAEKDIRIGDTVIVYKAGDIIPAVLNVVMSKRNQQEVMLIPKLCPSCGSELVHFEDEVALRCINPLCPSLIQRSLEHFASRDAMNITGLGPAIVEKLFLAGFVHDVADIYQLTKEDFMQLDGIKEKSADKLLAAIEASKSNSAEKLLFGLGIRHIGSKVSRLILEVYGDISALLTAKEEEIARIDGLGSTIAQSLTQYFEQKTAAILVDELKTAGVNMHYSGQKVNSDAALFGLTVVLTGKLNQLNRNEAKDKLEALGAKVTGSVSKKTDLVIAGSDAGSKLEKAKSLGIRIEDEDWLRQL

SEQ ID NO: 74466 - protein, 340 aa, Streptococcus pyogenes
MKKQLRARLIYNPTSGQELMRKSVPEVLDILEGFGYETSAFQTTAQKNSALNEARRAAKAGFDLLIAAGGDGTINEVVNGIAPLKKRPKMAIIPTGTTNDFARALKVPRGNPSQAAKLIGKNQTIQMDIGRAKKDTYFINIAAAGSLTELTYSVPSQLKTMFGYLAYLAKGVELLPRVSNVPVKITHDKGVFEGQVSMIFAAITNSVGGFEMIAPDAKLDDGMFTLILIKTANLFEIVHLLRLILDGGKHITDRRVEYIKTSKIVIEPQCGKRMMINLDGEYGGDAPITLENLKNHITFFADTDLISDDALVLDQDELEIEEIVKKFAHEVEDLGQELEE

SEQ ID NO: 74467 - protein, 238 aa, Streptococcus pyogenes
MEEAKIPMLKLGPITFNLTLLAVCIVTIAIVFAFVFWASRQMKLKPEGKQTALEYLISFVDGIGEEHLDHNLQKSYSLLLFTIFLFVAVANNLGLFTKLETVNGYNLWTSPTANLAFDLALSLFITLMVHIEGVRRRGLVAHLKRLATPWPMTPMNLLEEFTNFLSLAIRLFGNIFAGEVVTGLIVQLANYRVYWWPIAFLVNMAWTAFSVFISCIQAFVFTKLTATYLGKKVNESEE

SEQ ID NO: 74468 - protein, 164 aa, Streptococcus pyogenes
MSITFGELVGNFILVTGSVIVLLLLIKKFAWGAIESILQTRSQQISRDIDQAEQSRLSAQQLEAKSQANLDASRLQASKIISDAKEIGQLQGDKLVAEATDEAKRLKEKALTDIEQSKSDAISAVKTEMSDLTVLLAEKIMGANLDKTAQSQLIDSYLDDLGEA

SEQ ID NO: 74469 - protein, 178 aa, Streptococcus pyogenes
MTKKEQALIEQYAKSLVEVASEHHSLDALQADVLAILETFVTTNLDQSLSSQAVPHAEKIKLLTLLKGNNSVYMNNFLNLILQNEREAYLYQMLQAVLNEIAIVSNQYDVTVTSSLPLTEEQKSRVRAVVAKKFAVTAGRLIEKVDPSLIGGFIISVNNKVIDTSIRRQLQAFKMNLK

SEQ ID NO: 74470 - protein, 502 aa, Streptococcus pyogenes
MAINAQEISALIKKQIENFQPNFDVTETGIVTYIGDGIARARGLDNAMSGELLEFENGAYGMAQNLESNDVGIIILGDFSAIREGDVVKRTGKIMEVPVGEALIGRVVNPLGQPVDGLGDIETTGFRPVETPAPGVMQRKSVSEPLQTGLKAIDALVPIGRGQRELIIGDRQTGKTSVAIDAILNQKGQDMICIYVAIGQKESTVRTQVETLRRYGALDYTIVVTASASQPSPLLFIAPYAGVAMAEEFMYQGKHVLIVYDDLSKQAVAYRELSLLLRRPPGREAYPGDVFYLHSRLLERSAKVSDDLGGGSITALPFIETQAGDISAYIATNVISITDGQIFLQENLFNSGIRPAIDAGSSVSRVGGSAQIKAMKKVAGTLRLDLASYRELEAFTQFGSDLDAATQAKLNRGRRTVEILKQPLHKPLPVEKQVVILYALTHGFLDDVPVDDILAFEEALYDYFDVHYNDLFETIRTTKDLPEEAALDAAIKAFKEHSNFKS

SEQ ID NO: 74471 - protein, 423 aa, Streptococcus pyogenes
MDKIIIEGGQTRLEGEVVIEGAKNAVLPLLAASILPSKGKTILRNVPILSDVFTMNNVVRGLDIRVDFNEAANEITVDASGHILDEAPYEYVSQMRASIVVLGPILARNGHAKVSMPGGCTIGSRPINLHLKGLEAMGATITQKGGDITAQADRLQGAMIYMDFPSVGATQNLMMAATLADGVTTIENAAREPEIVDLAQFLNKMGARIRGAGTETLTITGVTHLRGVEHDVVQDRIEAGTFMVAAAMTSGNVLIRDAVWEHNRPLISKLMEMGVSVTEEEYGIRVQANTPKLKPVTVKTLPHPGFPTDMQAQFTALMAVVNGESTMVETVFENRFQHLEEMRRMGLQSEILRETAMIHGGRQLQGAPVMSTDLRASAALILTGIVAQGVTIVNNLVHLDRGYYQFHEKLAKLGATISRSSEV

SEQ ID NO: 74472 - protein, 373 aa, Streptococcus pyogenes
MVPRVNAPLIKWRSGMLFSSPKEGKTMDLQAQLEELKTKTLETLQSLTGNHTKELQDLRVAVLGKKGSLTELLKGLKDLSNDLRPVVGKQVNEVRDLLTKAFEEQAKIVEAAKIQAQLDAESIDVTLPGRQMTLGHRHVLTQTSEEIEDIFLGMGFQIVDGFEVEKDYYNFERMNLPKDHPARDMQDTFYITEEILLRTHTSPVQARTLDQHDFSKGPLKMVSPGRVFRRDTDDATHSHQFHQIEGLVVGKNISMGDLKGTLEMIIKKMFGDERSIRLRPSYFPFTEPSVEVDVSCFKCGGKGCNVCKKTGWIEILGAGMVHPSVLEMSGVDAKEYSGFAFGLGQERIAMLRYGINDIRGFYQGDQRFSEQFN

SEQ ID NO: 74473 - protein, 801 aa, Streptococcus pyogenes
MLVSYKWLKELVDIDVTPAALAEKMSTTGIEVEGIEVPADGLSKLVVGHVLSCEDVPETHLHLCQVDTGDETPRQIVCGAPNVKAGIKVIVAVPGARIADNYKIKKGKIRGMESLGMICSLQELGLSDSIIPKEFSDGIQILPEEAVPGDAIFKYLDLDDHIIELSITPNRADALSMRGVAHEVAAIYGKSVSFPQKNLQESDKATSEAIEVAIASDNVLTYASRVVENVKVKPSPQWLQNLLMNAGIRPINNVVDVTNYVLLYFGQPMHAFDYDKFEDHKIVARAARQGESLVTLDGEKRDLTTEDLVITVADKPVALAGVMGGQATEIDANSQTVVLEAAVFDGKSIRKTSGRLNLRSESSSRFEKGVNYATVLEALDFAAAMLQELAEGQVLSGHVQAGQLPTEPVEVSTSLDYVNVRLGTELTFADIQRIFDQLGFGLTGDETSFTVAVPRRRWDVSIPADLVEEIARIYGYDKLPTTLPEAGGTAAELTPTQALRRKVRGLAEGLGLTEIISYALTTPEKAVEFAVAPSHLTELMWPMSVERSALRQNMVSGMLDTVAYNVARKQSNLALYEIGKIFEQEANPKEDLPNEVNHFAFAICGLVAQKDFQTQAQAVDFYHAKGNLDTLFANLNLKVQYVPTKDLANMHPGRTALILLDEQVIGFVGQVHPGTAKAYSIPETYVAELDMAALEAALPSDQTFAEITKFPAMTRDVALLLDREVSHQAIVTAIESAGVKRLTSIKLFDVYEGATIQAGKKSMAYSLTFQNPNDNLTDEEVAKYMEKITKALTEQVGAEVR

SEQ ID NO: 74474 - protein, 128 aa, Streptococcus pyogenes
MSDASLKTYQKQWAYQKYWVMAHSQQHYNALRELFKGNQWSEEKVLTFHCLIEEAQAIPPTVKSLRTAYQHVWGYFKKVASQEEKDHFKDLDAQLETKSEEMLCFLQEMTAHYQPSYLLSCRLITKGP

SEQ ID NO: 74475 - protein, 1071 aa, Streptococcus pyogenes
MKLIYTEMSYSMTEILVNEARKAADQGYRVFYIAPNSLSFEKEREVLTLLPERGTFSIIVTRFVQMSRYFTVESSPSKQHLDDTTLAMIFYRALMQLKPEDLPSYGRLQNNSVFIEQLVELYKELKNAQLSVHDLTGLDHPQKQEDLIKIIELAETIMIQQDYNQDSPLQSFARAIKLGLLNNQLSKTVVVIDGFSRFSAEEDYLLSLLNNNCQEVIIGSYVSQKAYQKSFIKGNIYEASLHFLQDLAQKYHIKPVFATSNQVFKPAFSRLTQLFEATHDFSQVDWQLQKSDLDHFSLWQCHHQKEEIEHVAKSIRQKLYEGYRYKDILVLLGDMDAYQLQIGPIFDKFEIPYYLGKAEPMAAHPLVQFIESLERSQRYNWRREDILNMLKSGLFGCFDDSDIDRFEEYTQFADIKGFTKFSKPFTINSSRQYPLDFLNEMRQDIVLPLQELFKSQKQLGASLVDKLILFLKKIRLAENMQGLAQSQLEVEKNEEVWKRFTDILTSFHHIFGQEKLRLSDCLALIKTGMKSAQYRVVPATLDVVTIKSYDLVQPHSKPFVYAIGLTQSHFPKQIHHSGLLSDQERARINEIRNYRHFDIASAENSKKNHQTALSLFNAATKELVLSVSTVINETFDDLSPYLKELINFGLPLLDKGKNYLSYDNSDIGNYKALLSQIIAINRQDLIEMSDQDKMFWTVVLRYLRKQLRKQQLELPTSDYRLSTKPLSKEVIEVCFPKGIPLKLSATALTVFYNNQYNYFLKYVLNLNKTESIHPDSRIHGQYLHRVFERLMKDHTQEPFDNKLKQAIYHTNQESFFQQVYQDNAEAEYSLAILEDIVRSTAPILQLNQNIQVIDQEKNFQLDMGNEILVHGIIDRIDQLSDGSLGIVDYKSSANQFDIGTFYNGLSPQLMTYLAALKQIAPHDINQLFGAMYLHLQDPKLDLVTFKQIDNTLVESIYKALTYKGIFSEVEKEHLSTGAYQTKNALYSNDELETLLNYNKYLYLKAAKHIKKGHFLINPYTSDGKTVQGDQLKAITRFEADLDMGQARRLVTLPAKEKKECFLTLMRKESHL

SEQ ID NO: 74476 - protein, 1210 aa, Streptococcus pyogenes
MISFAPFLSPEAIKHLQENERCRDQSQKRTAQQIEAIYTSGQNILVSASAGSGKTFVMVERILDKILRGVSIDRLFISTFTVKAATELRERIENKLYSQIAQTTDFQMKVYLTEQLQSLCQADIGTMDAFAQKVVSRYGYSIGISSQFRIMQDKAEQDVLKQEVFSKLFNEFMNQKEAPVFRALVKNFSGNCKDTSAFRELVYTCYSFSQSTENPKIWLQENFLSAAKTYQRLEDIPDHDIELLLLAMQDTANQLRDVTDMEDYGQLTKAGSRSAKYTKHLTIIEKLSDWVRDFKCLYGKAGLDRLIRDVTGLIPSGNDVTVSKVKYPVFKTLHQKLKQFRHLETILMYQKDCFSLLEQLQDFVLAFSEAYLAVKIQESAFEFSDIAHFAIKILEENTDIRQSYQQHYHEVMVDEYQDNNHMQERLLTLLSNGHNRFMVGDIKQSIYRFRQADPQIFNQKFRDYQKKPEQGKVILLKENFRSQSEVLNVSNAVFSHLMDESVGDVLYDEQHQLIAGSHAQTVPYLDRRAQLLLYNSDKDDGNAPSDSEGISFSEVTIVAKEIIKLHNDKGVPFEDITLLVSSRTRNDIISHTFNQYGIPIATDGGQQNYLKSVEVMVMLDTLRTINNPRNDYALVALLRSPMFAFDEDDLARIALQKDNELDKDCLYDKIQRAVIGRGAHPELIHDTLLGKLNVFLKTLKSWRRYAKLGSLYDLIWKIFNDRFYFDFVASQAKAEQAQANLYALALRANQFEKSGYKGLYRFIKMIDKVLETQNDLADVEVATPKQAVNLMTIHKSKGLQFPYVFILNCDKRFSMTDIHKSFILNRQHGIGIKYLADIKGLLGETTLNSVKVSMETLPYQLNKQELRLATLSEEMRLLYVAMTRAEKKVYFIGKASKSKSQEITDPKKLGKLLPLALREQLLTFQDWLLAIADIFSTEDLYFDVRFIEDSDLTQESVGRLQTPQLLNPDDLKDNRQSETIARALDMLEAVSQLNANYEAAIHLPTVRTPSQLKATYEPLLEPIGVDIIEKSSRSLSDFTLPHFSKKAKVEASHIGSALHQLMQVLPLSKPINQQTLLDALRGIDSNEEVKTALDLKKIESFFCDTSLGQFFQTYQKHLYREAPFAILKLDPISQEEYVLRGIIDAYFLFDDHIVLVDYKTDKYKQPIELKKRYQQQLELYAEALTQTYKLPVTKRYLVLMGGGKPEIVEV

SEQ ID NO: 74477 - protein, 58 aa, Streptococcus pyogenes
MSKTVVRKNESLDDALRRFKRSVTKAGTLQESRKREFYEKPSVKRKRKSEAARKRKKF

SEQ ID NO: 74478 - protein, 604 aa, Streptococcus pyogenes
MGFLWGGDDLAIDKEMISQVKNSVNIVDVIGEVVKLSRSGRHYLGLCPFHKEKTPSFNVVEDRQFFHCFGCGKSGDVFKFIEEYRQVPFLESVQIIADKTGMSLNIPPSQAVLASQHKHPNHALMTLHEDAAKFYHAVLMTTTIGQEARKYLYQRGLDDQLIEHFNIGLAPDESDYLYQALSKKYEEGQLVASGLFHLSDQSNTIYDAFRNRIMFPLSDDRGHIIAFSGRIWTAADMEKRQAKYKNSRGTVLFNKSYELYHLDKARPVIAKTHEVFLMEGFMDVIAAYRSGYENAVASMGTALTQEHVNHLKQVTKKVVLIYDGDDAGQHAIAKSLELLKDFVVEIVRIPNKMDPDEFVQRHSPEAFADLLKQSRISSVEFFIDYLKPTNVDNLQSQIVYVEKMAPLIAQSPSITAQHSYINKIADLLPNFDYFQVEQSVNALRIQDRQKHQGQIAQAVSNLVTLPMPKSLTAIAKTESHLMHRLLHHDYLLNEFRHRDDFYFDTSTLELLYQRLKQQGHITSYDLSEMSEEVNRAYYNVLEENLPKEVALGEIDDILSKRAKLLAERDLHKQGKKVRESSNKGDHQAALEVLEHFIAQKRKME

SEQ ID NO: 74479 - protein, 369 aa, Streptococcus pyogenes
MTKQKEITTFNVQVAEFIRHHKKEGTAIDDDVTEKLVIPFALDADQIDDLLERLTDGGISITDKEGNPSSKYIVEEPKPEELTDEELIGSNSAKVNDPVRMYLKEIGVVPLLTSEEEKELAVAVAKGDLMAKQRLAEANLRLVVSIAKRYVGRGMQFLDLIQEGNMGLMKAVDKFDYSKGFKFSTYATWWIRQAITRAIADQARTIRIPVHMVETINKLVREQRNLLQELGQDPTPEQIAERMEMTPDKVREILKIAQEPVSLETPIGEEDDSHLGDFIEDEVIENPVDYTTRVVLREQLDEVLDTLTDREENVLRLRFGLDDGKMRTLEDVGKVFNVTRERIRQIEAKALRKLRHPSRSKQLRDFIED

SEQ ID NO: 74480 - protein, 310 aa, Streptococcus pyogenes
MNINILLSTYNGERFLAEQIQSIQRQTVNDWTLLIRDDGSTDGTQDIIRTFVKEDKRIQWINEGQTENLGVIKNFYTLLKHQKADVYFFSDQDDIWLDNKLEVTLLEAQKHEMTAPLLVYTDLKVVTQHLAVCHDSMIKTQSGHANTSLLQELTENTVTGGTMMITHALAEEWTTCDGLLMHDWYLALLASAIGKLVYLDIPTELYRQHDANVLGARTWSKRMKNWLTPHHLVNKYWWLITSSQKQAQLLLDLPLKPNDHELVTAYVSLLDMPFTKRLATLKRYGFRKNRIFHTFIFRSLVVTLFGYRRK

SEQ ID NO: 74481 - protein, 401 aa, Streptococcus pyogenes
MINREIAVKVQHVSKTFKLPTEATKSFRTTLVNRLRGIKGFTEQHVLKDINFDVYKGDFFGIVGRNGSGKSTLLKIISQIYVPEKGQVTVDGKMVSFIELGVGFNPELTGRENVYMNGAMLGFTKDEVDDMYNDIVDFAELHHFMNQKLKNYSSGMQVRLAFSVAIKAQGDVLILDEVLAVGDEAFQRKCNDYFMERKDSGKTTILVTHDMGAVKKYCNRAVLIEDGLVKAYGEPFDVANQYSVDNTETAEDAMNAEKISVSDIAKDLKVSLISNPRITPNDTITFEVSYEVLKDDFTYIAFSLTDIDRNIWVYNDNSLDYPTQGIGRKCISYQCQLSQLNDIKLKLEVTVRDKNGQMLLFSTAEQSPQIVIQRNDIDQDDLSALDSASGLYQRNGKWVFH

SEQ ID NO: 74482 - protein, 335 aa, Streptococcus pyogenes
MYKVSIICTNYNKAPWISDALDSFLSQVTDFEVEIIVIDDASTDDSREILKSYQKKSSGKIKLLFNETNIGITKTWIKACLYAKGKYIARCDGDDYWTDSFKLQKQVDVLEASKRSRWCNTDFDFVNSQGDLLYANAFSSGHTPLTDTYEKVLALKGMTMASTWLVDADLMRQVNQKINVDTPDDTFDIQLELFQLTQLTYIKDSTTIYRMTTDSDSRPTDTPKMIYRIQKLLDTQLNYLKKYNQVDTKEVSELLLQQDAKQEIRIHELSCFIQELQQTIVDKTKQQETREVELQNVIEEQKNQLSELRQQYHAIINSRQWKYTSKLIAFIRRKK

SEQ ID NO: 74483 - protein, 407 aa, Streptococcus pyogenes
MKYDNLLDRFIKYVKVNTRSVPDSETTPSTESQEAFALTILKPEMEAIGLQDVHYNPVNGYLIGTLPANNPTLTRKIGFIAHMDTADFNAENVNPQIIDNYQGGDITLGSSNYKLDPKAFPNLNNYIGQTLITTDGTTLLGADDKSGIAEIMTAIEFLTSQPQIEHCDIKVAFGPDEEIGVGADKFEVADFEVDFAYTMDGGPLGELQYETFSAAALEVTFLGRNVHPGTAKDQMINALELAIDFHEKLPAKDRPEYTDGYQGFYHLTGLTGTVEEARASYIIRDFEEASFEARKVKVENIAQSMNAQLGTKRVLVELNDQYYNMKKVIEKDMTAIELAKEVMEELAIKPVIEPIRGGTDGSKISFMGIPTPNIFAGGENMHGRFEFVSLQTMERAVDVIIGLVCKA

SEQ ID NO: 74484 - protein, 65 aa, Streptococcus pyogenes
MKVSIIPEKCIACGLCQTYSSLFDYHDNGIVTFSSSSETSQSICPSDKDAILAVKSCPTKALTLE

SEQ ID NO: 74485 - protein, 226 aa, Streptococcus pyogenes
MKAIKIAIDGPASSGKSTVAKIIAKNLGYTYLDTGAMYRSATYIALTHGYTGKEVALILEELEKNPIFFKKAKDGSQLVFLGDEDVTLAIRQNDVTNNVSWISALPEIREELVHQQRRIAQAGGIIMDGRDIGTVVLPDAELKIFLVASVEERAERRYKENLEKGIESDFETLKEEIAARDYKDSHRKVSPLKAAEDALIFDTTGVSIDGVVQFIQEKAEKIVDMS

SEQ ID NO: 74486 - protein, 176 aa, Streptococcus pyogenes
MKIIAKKDLFINDEIRVREVRLVGLEGEQLGIKPLSEAQSLADASNVDLVLIQPQAVPPVAKLMDYGKFKFEYQKKQKEQRKKQSVVTVKEVRLSPVIDKGDFETKLRNGRKFLEKGNKVKVSIRFKGRMITHKEIGAKVLADFAEATQDIAIIEQRAKMDGRQMFMQLAPISDKK

SEQ ID NO: 74487 - protein, 65 aa, Streptococcus pyogenes
MPKQKTHRASAKRFKRTGSGGLKRFRAFTSHRFHGKTKKQRRHLRKAGLVSSGDFKRIKAMVTGL

SEQ ID NO: 74488 - protein, 119 aa, Streptococcus pyogenes
MARVKGGVVSRKRRKRILKLAKGYYGAKHILFRTAKEQVMNSYYYAYRDRRQKKRDFRKLWITRINAAARMNGLSYSQLMHGLKLAEIEVNRKMLADLAVADAAAFTALADAAKAKLGK

SEQ ID NO: 74489 - protein, 736 aa, Streptococcus pyogenes
MTSLGKNDKEVATVKKFKTLITGFINTRLGFIITLLFCYWIKTLWAYHTDFSLDLGNIYQVFLTIINPIPLAFLLLGVALYVKNTRAFYICSWVVYIILNILLISNSIYYREFSDFITVSAMLASSKVSAGLGDSALNLLRIWDIIYILDFIILISLSIAKKIKNDQRPFNKRAAFAITALSSLLLSINLFLAEIDRPELLTRGFSNTYIVRALGLPAFTLYSGNQTYQAQKERNGATAEELIDVKTYVKGHYAAPDPQYFGIGKGKNIIVLHLESFQQFLIDYKLKEGDKEYEVTPFINSLYHSNATLAFPNFFHQVKAGKTSDAETMMENSLFGLNSGSFMVNYGGENTQFATPSILAQKGGYTSAVFHGNVGTFWNRNNAYKQWGYNYFFDSSYFSKQNSKNSFQYGLNDKYMFKDSIKYLEQMQQPFYTKFITVSNHYPYTSLKGESSEEGFPLAKTDDETINGYFATANYLDAALKSFFDYLKATGLYDNSIFVLYGDHYGISNSRNSSLAPLLGKDSETWSEYDNAMLQRVPYMIHIPGYTNGSIKETFGGEIDALPTLLHILGIDTSQFVQLGQDLLSPQNSQIVAQRTSGTYMTPEYTNYSGRLYNTQTGLEITNPDEMTIAKTKEIRSAVAQQLAASDAIQTGDLLRFDTQNGLKAIDPNQFIYTKQLKQLKDISAKLGSESTSLYSKNGHKSTQKLFKAPSYLELNPVEADAATSELKEDNPKNKE

SEQ ID NO: 74490 - protein, 387 aa, Streptococcus pyogenes
MNKLYIDSFVEKKLTAGVQLLDEKDFSNIKEKNQLVQLVTKSNRPIGTAYISKQNKGIGWYLGPEKIDLSISYFVSLFSVAKAKRQDFAQSDETNAYRLFNQEGDGFGGVTIDLYKDFAVFSWYNAFVYDKKEMIMEAFQQVFPEVKGAYEKCRFKGPDTETAHLYGELAQETFSILENGIAYQVFLNEGLMTGIFLDQHDVRRALVDGLAMGKSLLNLFSYTAAFSVAAAMGGAIETTSVDLAKRSRELSLAHFEHNQLNLASHHFVVMDVFEYFKYAKRKKLIFDVIVIDPPSFARNKKQTFSVSRDYHKLITEALDILSPKGTIIASTNAANMTVSQFKKQIIKGFGSRRPESMTLQQLPSDFTINKADERSNYLKVFTIKVRE

SEQ ID NO: 74491 - protein, 228 aa, Streptococcus pyogenes
MRIVAPVMPRHFDEAQAIDISKYEDVNLIEWRADFLPKDEIVAVAPAIFEKFAGKEIIFTLRTVQEGGNITLSSQEYVDIIKEINAIYNPDYIDFEYFTHKSVFQEMLDFPNLILSYHNFEETPENLMEAFSEMTKLAPRVVKIAVMPQSEQDVLDLMNYTRGFKTLNPEQEFATISMGKLGRLSRFAGDVIGSSWTYVSLDHVSGPGQVTLNDMKRIIEVLEMDISN

SEQ ID NO: 74492 - protein, 388 aa, Streptococcus pyogenes
MRYLTAGESHGPSLTAIIEGIPAGLTLHPADIDHELQRRQGGYGRGARMSIETDRVQISSGVRHGKTTGAPITLTVINKDHQKWLDVMAVGDIEETLKLKRRVKHPRPGHADLVGGIKYHFNDLRDALERSSARETTMRVAVGAVAKRILAELGIDMLHHILIFGGITITIPSKLSFRELQERALHSELSIVNPKQEEEIKTYIDKIKKEGDTIGGIIETIVQGVPAGLGSYVQWDKKLDAKLAQAVLSINAFKGVEFGAGFDMGFQKGSQVMDEITWTPTQGYGRQTNHLGGFEGGMTTGQPLVVKGVMKPIPTLYKPLMSVDIDSHEPYKATVERSDPTALPAAGVIMENVVATVLAKEILETFSSTTMSELQKAFSDYRAYVKQF

SEQ ID NO: 74493 - protein, 450 aa, Streptococcus pyogenes
MVIPYDYIVIGGGSAGIASANRAAMHGAKVLLAEGKEIGGTCVNLGCVPKKVMWYGAQVADILGTYAKDYGFDFKEKAFDFKQLKANRQAYIDRIHASYERGFEQNGVDRIYDYAVFKDAHTVEIAGQLYTAPHILIATGGHPVFPDIEGAQYGISSDGFFALDEVPKRTAVVGAGYIAVELAGVLHALGSKTDLFIRHDRPLRSFDKTIVDVLVDEMAVNGPRLHTHAEVAKVVKNTDESLTLYLKDGQEVEVDQLIWAIGRKPNLEGFSLDKTGVTLNDKGYIETDAYENTSVKGIYAVGDVNGKLALTPVAVAAGRRLSERLFNGKTDEKLDYQNVATVIFSHPVIGSVGLSEEAAVKQYGQEAVKTYQSRFTSMFTAITNHRQPCLMKLVTVGDTEKIVGLHGIGYGVDEMIQGFAVAIKMGATKADFDNTVAIHPTGSEEFVTMR

SEQ ID NO: 74494 - protein, 104 aa, Streptococcus pyogenes
MSTYAIIKTGGKQVKVEVGQAIYVEKIDAEAGAEVTFNEVVLVGGDKTVVGTPVVEGATVVGTVEKQGKQKKVVTFKYKPKKGSHRKQGHRQPYTKVVINAINA

SEQ ID NO: 74495 - protein, 108 aa, Streptococcus pyogenes
MIKAIFTRQKNGQLSSVTLTGHAGSGKHGFDIVCASVSTLAINFVNSLEVLADCQALVDLNDVEGGYMAITIPPHDNKEEVQLLFESFLLGMTSLAKDSSKFVNTQVI

SEQ ID NO: 74496 - protein, 97 aa, Streptococcus pyogenes
MLKMNLANLQLFAHKKGGGSTSNGRDSQAKRLGAKAADGQTVSGGSILYRQRGTHIYPGVNVGRGGDDTLFAKVEGVVRFERKGRDKKQVSVYPVAK

SEQ ID NO: 74497 - protein, 360 aa, Streptococcus pyogenes
MTKRLLILEDGTIFEGEPFGADIDVTGEIVFNTGMTGYQESITDQSYNGQILTFTYPLIGNYGINRDDYESISPTCKGVVVSEVSRLASNWRKQMTLDAFLKIKGIPGISGIDTRALTKIIRQHGTMKATMADDGDSIQHLKDQLRATVLPTNTIEQVSTKTAYPAPGIGKNIVLVDFGLKHSILREFSKRQCNITVVPFNITAEEVLQLNPDGLMLSNGPGNPEDLPEALDMIRGVQGKIPIFGICMGHQLFSLANGAKTCKMTFGHRGFNHAVREIATGRIDFTSQNHGYAVERSSLPDTLMVTHEDINDKTVEGVKHRDFPAFSVQFHPDAAPGPHDASYLFDEFLEMIDSWRCTSK

SEQ ID NO: 74498 - protein, 1058 aa, Streptococcus pyogenes
MPKRKDIQKIMVIGSGPIIIGQAAEFDYAGTQACLALKEEGYKVILVNSNPATIMTDKEIADKVYIEPLTLEFVNRIIRKERPDAILPTLGGQTGLNMAMALSKAGILDDLEIELLGTKLSAIDQAEDRDLFKQLMQELDQPIPESTIVKTVDEAVTFARDIGYPVIVRPAFTLGGTGGGICSSEEELCEITENGLKLSPVTQCLIERSIAGFKEIEYEVMRDSADNALVVCNMENFDPVGIHTGDSIVFAPTQTLSDIENQMLRDASLKIIRALKIEGGCNVQLALDPYSFKYYVIEVNPRVSRSSALASKATGYPIAKLAAKIAVGLTLDEMINPITGTTYAMFEPALDYVVAKIPRFPFDKFEHGERQLGTQMKATGEVMAIGRNLEESLLKACRSLEIGVCHNEMTSLSNISDEELVTKVIKAQDDRLFYLSEAIRRGYSIEELESLTKIDLFFLDKLLHIVEIEQELQMHVDHLESLKKAKRYGFSDQKIAEIWQKDESDIRAMRHSHSLYPVYKMVDTCAAEFDAKTPYFYSTYELENESVQSNKESILVLGSGPIRIGQGVEFDYATVHSVKAIQKAGYEAIIMNSNPETVSTDFSVSDKLYFEPLTFEDVMNVIDLEQPKGVIVQFGGQTAINLAQALSEAGVTILGTQVEDLDRAEDRDLFEKALKELGIPQPQGQTATNEEEALEAAKKIGFPVLVRPSYVLGGRAMEIVENKEDLREYIRTAVKASPEHPILVDSYIFGKECEVDAISDGKSVLIPGIMEHIERAGVHSGDSMAVYPPQQLSKQIQETIAEYTKRLAIGLNCIGMMNVQFVIKNEQVYVIEVNPRASRTVPFLSKVTGIPMAQIATKLILGQTLKDLGYEDGLYPQSPLVHIKAPVFSFTKLAQVDSLLGPEMKSTGEVMGSDTSLEKALYKAFEANNSHLSEFGQIVFTIADDSKAEALSLARRFKAIGYQIMATQGTAAYFAEQGLSACLVGKIGDAANDIPTLVRHGHVQAIVNTVGIKRTADKDGQMIRSSAIEQGVPLFTALDTAKAMLTVLESRCFNIEAI

SEQ ID NO: 74499 - protein, 90 aa, Streptococcus pyogenes
MAVKIRLTRMGSKKKPFYRINVADSRAPRDGRFIETVGTYNPLVAENQITIKEDRVLEWLSKGAQPSDTVRNILSKAGVMAKFHDQKFSK

SEQ ID NO: 74500 - protein, 79 aa, Streptococcus pyogenes
MDTIENLIIAIVKPLISQPDNLTIKIEDTPDFLEYHLDLDAQDIGRVIGKKGRTITAIRSIVYSVPTLGKKVRLVIDEK

SEQ ID NO: 74501 - protein, 172 aa, Streptococcus pyogenes
MEYFNVGKIVNTQGLQGEMRVLSVSDFAEERFKKGSQLALFDDKDRFVQEVTIVSHRKQKHFDIIKFKDMYHINAIEKYKGYTLKVSKDNQGDLQEGEFYYHQIIGMAVYEKDVLIGHVKEILQPGANDVWIVKRQGKRDLLLPYIPPVVLNVDVPNKRVDVELMEGLDDED

SEQ ID NO: 74502 - protein, 243 aa, Streptococcus pyogenes
MKIDILTLFPEMFAPLEHSIVGKAKEKGLLDIHYHNFRDYAEKARHVDDEPYGGGQGMLLRAQPIFDTIEQIEAKKPRIILLDPAGKPFTQAYAEELALEEELIFICGHYEGYDERIKTLVTDEISLGDFVLTGGELAAMTMVDATVRLIPQVLGKESSHQDDSFSSGLLEYPQYTRPYDYRGMTVPDVLMSGHHERIRLWRLEESLKKTYLRRPDLLEHYNFSEEERKLLDKIKEALDQGED

SEQ ID NO: 74503 - protein, 330 aa, Streptococcus pyogenes
MKDKAYDITIIGGGPIGLFAAFYAGLRGVTVKIIESLSELGGQPAILYPEKMIYDIPAYPSLTGVELTENLIKQLSRFEDRTTICLKEEVLTFDKVKGGFSIRTNKAEHFSKAIIIACGNGAFAPRTLGLESEENFADHNLFYNVHQLDQFAGQKVVICGGGDSAVDWALALEDIAESVTVVHRRDAFRAHEHSVELLKASTVNLLTPYVPKALKGIGNLAEKLVIQKVKEDEVLELELDSLIVSFGFSTSNKNLKNWNLDYKRSSITVSPLFQTSQEGIFAIGDAAAYNGKVDLIATGFGEAPTAVNQAINYIYPDRDNRVVHSTSLID

SEQ ID NO: 74504 - protein, 303 aa, Streptococcus pyogenes
MIYTVTLNPSIDFIVRIDQINLGSVNRMASDDKFAGGKGINVSRILQRLDIASTATGFLGGFTGRFIEESLSAEGVKTDFVKGDQDTRINVKIKSQEETELNGQGPIISQEQLEDLKTKLSQLTAEDTVVFAGSAPANLGNAVYKELLPLVRQSGAQVVCDFEGQTLIDALAYNPLLVKPNNHELEAIFGTILTSLDDVETYARRLLEMGAQNVIISMAGDGALLVTKEATYFAKPIKGEVKNSVGAGDSMVAGFTGEFMKSQNPIEALKWGVACGTATAFSDDLATIAFIKETYHKVEVEKR

SEQ ID NO: 74505 - protein, 648 aa, Streptococcus pyogenes
MKIQDLLRKDIMILDLQAISKEVAIDEMITKLVEKDIVHDFDVFKKSIMTREEQTSTGLGDGIAMPHSKNIVVDKPAVLFAKSNKGVDYKALDGQPTDLFFMIAAPQGANDTHLAALAELSQYLLKDGFADKLRAAATPEAVIAVFDEASTAKEEVVAPTSGQDFIVAVTACPTGIAHTYMAEEALKKQAAEMGVAIKVETNGASGVANRLTAEDIQRAKGVIVAADKAVEMDRFDGKQFIARPVADGIKKSQELISLILNNEGNTYHAKNGKSETAVSTEKTSLGGAFYKHLMGGVSQMLPFVIGGGIMIALAFLLDNMLGVPNDQLGSLGSYHEIAAIFMNIGGAAFSFMLPVLAGYIAYSIAEKPGLVAGFVAGAIASNGLAFGKVPFAAGGEVSLGLTGVPSGFLGALVGGFLAGGVILALRKLLAGLPRSLEGVKSILLYPLLGVLVTGFLMLFVNIPMAAINTALNDFLQGLSGSSAVLMGLLVGGMMAVDMGGPVNKAAYVFGTGTLAATVANGGSVVMAAVMAGGMVPPLAVFVATLLFKDKFTKEERESGLTNIVMGLSFITEGAIPFGAADPARAIPSFIAGSALTGALVGLAGIKLMAPHGGIFVIALTSNPILYLVFVVIGALVSGILFGALRKKA

SEQ ID NO: 74506 - protein, 397 aa, Streptococcus pyogenes
MPSEFQKALPILTKIKEAGYEAYFVGGSVRDVLLERPIHDVDIATSSYPEETKAIFNRTVDVGIEHGTVLVLENGGEYEITTFRTEDIYVDYRRPSQVSFVRSLEEDLKRRDFTVNALALDENGQVIDKFRGLIDLKQKRLRAVGKAEERFEEDALRIMRGFRFAASLDFDIEAITFEAMRSHSPLLEKISVERSFTEFDKLLMAPHWRKGISAMIACQAYDYLPGLKQQEAGLNHLIVSLKDNFTFSDYHQAWAYVMISLAIEDPKSFLKAWKTSNDFQRYVTKLIALYRIRQERSFEKLDIYQYGKKMASLVEDLRKAQSLSVDMDRINTLDQALVIHDKHDIVLNGSHLIKDFGMKSGPQLGLMLEKVELAIVEGRLDNDFTTIEAFVREELAT

SEQ ID NO: 74507 - protein, 625 aa, Streptococcus pyogenes
MSHFLVEKLTKTVGDKTVFQDISFIIHDFDRIGIIGVNGTGKTTLLDVLSGRLGFDGDHSPFSKANDYKIAYLTQDPEFNDAASVLDTVLSADVKAIQLIRQYELLMANYTEDKQESLESLMSEMDRLDAWSIESDVKTVLSKLGITDLEQKVGDLSGGMRRRVQLAQVLLGAADLLLLDEPTNHLDIDTIAWLTTYLKTAKKTVLFITHDRYFLDHVATRIFELDKAGLTEYQGNYQDYVRLKAEQDERDAANLHKKKQLYKQELAWMRTQPQARATKQQARINRFSDLKKEVHQDSSADKLEMTFETSRIGKKVIHFEDLSFAYGDRQLIKDFNLIIQNKDRIGIVGDNGVGKSTLLNIINGDLKPTSGKLDIGDTIRVGYFSQQLKDMDETKRVINYLQEVADEVKTSVGTTSISELLEQFLFPRSSHGTLIAKLSGGEKKRLYLLKLLIEKPNVLLLDEPTNDLDIATLKVLENFLANFAGPVITVSHDRYFLDKVATKILAFEEGDIRVFYGNYSDYLDEKVFEKETVEADLAKTTVTEEVPLPQKEERKRMSYLEKQEWAQIEDKIATIEANIEEIENQMLTVVSDYGQLAQLQKELDQRNNDLLLAYERFEYLSGLDI

SEQ ID NO: 74508 - protein, 670 aa, Streptococcus pyogenes
MKKYFILKSSVLSILTSFTLLVTDVQADQVDVQFLGVNDFHGALDNTGTAYTPSGKIPNAGTAAQLGAYMDDAEIDFKQANQDGTSIRVQAGDMVGASPANSALLQDEPTVKVFNKMKFEYGTLGNHEFDEGLDEFNRIMTGQAPDPESTINDITKQYEHEASHQTIVIANVIDKKTKDIPYGWKPYAIKDIAINDKIVKIGFIGVVTTEIPNLVLKQNYEHYQFLDVAETIAKYAKELQEQHVHAIVVLAHVPATSKDGVVDHEMATVMEKVNQIYPEHSIDIIFAGHNHQYTNGTIGKTRIVQALSQGKAYADVRGTLDTDTNDFIKTPSANVVAVAPGIKTENSDIKAIINHANDIVKTVTERKIGTATNSSTISKTENIDKESPVGNLATTAQLTIAKKTFPTVDFAMTNNGGIRSDLVVKNDRTITWGAAQAVQPFGNILQVIQMTGQHIYDVLNQQYDENQTYFLQMSGLTYTYTDNDPKNSDTPFKIVKVYKDNGEEINLTTTYTVVVNDFLYGGGDGFSAFKKAKLIGAINTDTEAFITYITNLEASGKTVNATIKGVKNYVTSNLESSTKVNSAGKHSIISKVFRNRDGNTVSSEVISDLLTSTENTNNSLGKKETTTNKNTISSSTLPITGDNYKMSPIMTILALISLGGLNAFIKKRKS

SEQ ID NO: 74509 - protein, 314 aa, Streptococcus pyogenes
MDPNVITVTSYANIAIIKYWGKENQAKMIPSTSSISLTLENMFTTTSVSFLPDTATSDQFYINGILQNDEEHTKISAIIDQFRQPGQAFVKMETQNNMPTAAGLSSSSSGLSALVKACDQLFDTQLDQKALAQKAKFASGSSSRSFFGPVAAWDKDSGAIYKVETDLKMAMIMLVLNAAKKPISSREGMKLCRDTSTTFDQWVEQSAIDYQHMLTYLKTNNFEKVGQLTEANALAMHATTKTANPPFSYLTKESYQAMEAVKELRQEGFACYFTMDAGPNVKVLCLEKDLAQLAERLGKNYRIIVSKTKDLPDV

SEQ ID NO: 74510 - protein, 335 aa, Streptococcus pyogenes
MSNYCVQTGGKLYLTGEYAILTPGQKALIHFIPLMMTAEISPAAHIQLASDMFSHKAGMTPDASYALIQATVKTFADYLGQSIDQLEPFSLIITGKMERDGKKFGIGSSGSVTLLTLKALSAYYQITLTPELLFKLAAYTLLKQGDNGSMGDIACIAYQTLVAYTSFDREQVSNWLQTMPLKKLLVKDWGYHIQVIQPALPCDFLVGWTKIPAISRQMIQQVTASITPAFLRTSYQLTQSAMVALQEGHKEELKKSLAGASHLLKELHPAIYHPKLVTLVAACQKQDAVAKSSGSGGGDCGIALAFNQDARDTLISKWQEADIALLYQERWGEND

SEQ ID NO: 74511 - protein, 329 aa, Streptococcus pyogenes
MTNRKDDHIKYALKYQSPYNAFDDIELIHHSLPSYDLSDIDLSTHFAGQDFDFPFYINAMTGGSQKGKAVNEKLAKVAAATGIVMVTGSYSAALKNPNDDSYRLHEVADNLKLATNIGLDKPVALGQQTVQEMQPLFLQVHVNVMQELLMPEGERVFHTWKKHLAEYASQIPVPVILKEVGFGMDVNSIKLAHDLGIQTFDISGRGGTSFAYIENQRGGDRSYLNDWGQTTVQCLLNAQGLMDQVEILASGGVRHPLDMIKCFVLGARAVGLSRTVLELVEKYPTERVIAIVNGWKEELKIIMCALDCKTIKELKGVDYLLYGRLQQVN

SEQ ID NO: 74512 - protein, 425 aa, Streptococcus pyogenes
MTKTNLNWSGFSKKTFEERLQLIEKFKLLNAENLNQLKTDVLLPIQTANQMTENVLGRLALPFSIAPDFLVNGSTYQMPFVTEEPSVVAAASFAAKLIKRSGGFKAQTLNRQMIGQIVLYDIDQIDNAKAAILHKTKKLIALANKAYPSIVKRGGGARTIHLEEKGEFLIFYLTVDTQEAMGANMVNTMMEALVPDLTRLSKGHCLMAILSNYATESLVTTSCEIPVRLLDHDKTKSLQLAQKIELASRLAQVDPYRATTHNKGIFNGIDAVVIATGNDWRAIEAGAHAYASRNGSYQGLSQWHFDQDKQVLLGQMTLPMPIASKGGSIGLNPTVSIAHDLLNQPDAKTLAQLIASVGLAQNFAALKALTSSGIQAGHMKLHAKSLALLAGATQDEIAPLVNALLADKPINLEKAHFYLSQLRQS

SEQ ID NO: 74513 - protein, 279 aa, Streptococcus pyogenes
MTKADQIFKANIQKIINEGSLSEQARPKYKDGRTAHSKYITGAFAEYDLAKGEFPITTLRPIPIKSAIKELFWIYQDQSNSLDVLEAKYNVHYWNEWEVDQTRTIGQRYGAVVKKHDIISKILKQLAENPWNRRNVISLWDYEAFEETKGLLPCAFQIMFDVRRVGEDLYLDASLTQRSNDILVAHHINAMQYVALQMMIAKHFGWKIGKFFYFVNNLHIYDNQFDQAQELLKRQPVASQPKLVLNVPDRTNFFDIKPDDFELQNYDPVKPQLHFDLAI

SEQ ID NO: 74514 - protein, 165 aa, Streptococcus pyogenes
MTKEIIAIWAEDEAGLIGIAGKLPWYLPKELEHFKKTTLHQAILMGRVTFEGMNCKRLPQRQTLVMTRNRDYQVDEVLTMTSIEKVLEWYHAQDKTLYIIGGNKVLEAFNGYFDRIIKTVIHHRFKGDTYRPNLDFSHFTQESQTFYARDAKNPYDFTVTALKHK

SEQ ID NO: 74515 - protein, 409 aa, Streptococcus pyogenes
MAGSRTNDIKVYCSFCGKSQDDVKKIIAGNNVFICNECVALSQEIIKEELAEEVLADLTEVPKPKELLDVLNQYVVGQDRAKRALSVAVYNHYKRVSFTESRDDDDVDLQKSNILMIGPTGSGKTFLAQTLAKSLNVPFAIADATSLTEAGYVGEDVENILLKLIQAADYNVERAERGIIYVDEIDKIAKKGENVSITRDVSGEGVQQALLKIIEGTVASVPPQGGRKHPNQEMIQIDTKNILFIVGGAFDGIEEIVKQRLGEKVIGFGQNSRKIDDNASYMQEIISEDIQKFGLIPEFIGRLPVVAALEQLNTSDLIQILTEPRNALVKQYQALLSYDGVELAFDKEALEAIANKAIERKTGARGLRSIIEETMLDIMFEIPSQEDVTKVRITKAAVEGKSKPVLETA

SEQ ID NO: 74516 - protein, 699 aa, Streptococcus pyogenes
MTHFSGKDPFVNMDDIFNQLMANMGGYRSENPRYLVNGREITPEEFQHYRQTGQLPVATTKATNSQMLTPKADSVLTQLGTNLTQEARQGHLDPVIGRNKEIQDTAEILARRTKNNPVLVGDAGVGKTAVIEGLAQAIVNGDVPAAIKNKEIVSIDISSLEAGTQYRGSFEETIQNLIQEVKEAGNIILFFDEIHQIVGAGATSSDSGSKGLADILKPALSRGELTLIGATTQDEYRNTILKNAALARRFNEVKVNAPSAEDTFHILMGIRNLYEQHHHITLPDNVLKAAVDYSIQYIPQRSLPDKAIDLLDMTAAHLAAQHPVTDLKTLETEIAKQKESQEKAVAKEDFEKALAAKTRIETLQKQIEQHNQSQNVTATVNDIAESVERLTGIPVSNMGTNDLERLKGISSRLKSHVIGQDEAVAAVARAIRRNRAGFDDGKRPIGSFLFVGPTGVGKTELAKQLALDLFGSKDAIIRLDMSEYNDRTAVSKLIGTTAGYVGYDDNNNTLTERVRRNPYAIVLLDEIEKADPQIITLLLQVLDDGRLTDGQGNTINFKNTVIIATSNAGFGQQDTETSESNIMDRIAPYFRPEFLNRFNSIIKFNHLQKESLEEIVDLMLAEVNQTTAKKGISLTITDDAKAHLIDLGYNHAMGARPLRRIIEQEIRDRITDYYLDHPEVKKLQAILKEGQLVIRQNDQ

SEQ ID NO: 74517 - protein, 209 aa, Streptococcus pyogenes
MTLASQIATQLLDIKAVYLKPEDPFTWASGIKSPIYTDNRVTLSYPKTRDLIENGFVETIKAHFPEVEVIAGTATAGIPHGAIIADKMTLPFAYIRSKPKDHGAGNQIEGRVLKGQKMVIIEDLISTGGSVLDAAAAASREGADVLGVVAIFTYELPKASQNFKEAGIKLITLSNYTELIAVAKLQGYITNDGLHLLKKFKEDQVNWQQ

SEQ ID NO: 74518 - protein, 422 aa, Streptococcus pyogenes
MILIKNGRVMDPKSQRDQVADVLIDGKQIVKIASAIECQEAQVIDASGLIVAPGLVDIHVHFREPGQTHKEDIHTGALAAAAGGVTTVVMMANTNPVISDVETLQEVLASAAKEKIHIYTNASVTQAFNGKDVTDFKALLEAGAVSFSDDGIPLESSKVLKEAFDLANANQTFISLHEEDPQLNGVLGFNEGIAEEHFHFCGATGVAEYSMIARDVMIAYDRQAHVHIQHLSKAESVQVVAFAQQLGAKVTAEVSPQHFSTTEDLLLIAGTSAKMNPPLRTQRDRLAVIEGLKSGVITVIATDHAPHHKDEKTVDDMTKAPSGMTGLETSLSLGLTHLVEPGHLTLMSLLEKMTLNPALLYGFDAGYLAENGPADLVIFADKQERLITENFASKASNSPFIGNKLKGVVKYTIADGEVVYPN

SEQ ID NO: 74519 - protein, 213 aa, Streptococcus pyogenes
MKLLLFITIAYLLGSIPTGLWIGQYFYHINLREHGSGNTGTTNTFRILGVKAGTATLAIDMFKGTLSILLPIIFGMTSISSIAIGFFAVLGHTFPIFANFKGGKAVATSAGVLLGFAPLYLFFLASIFVLVLYLFSMISLASVVSAIVGVLSVLTFPAIHFLLPNYDYFLTFIVILLAFIIIIRHKDNISRIKHHTENLIPWGLNLSKQVPKK

SEQ ID NO: 74520 - protein, 650 aa, Streptococcus pyogenes
MLTKKEITINNYNDDAIQVLEGLDAVRKRPGMYIGSTDATGLHHLIWEIVDNAVDEALSGFGDDIKVVINKDGSVSVADSGRGMPTGQHAMGIPTVQVIFTILHAGGKFGQGGYKTSGGLHGVGSSVVNALSAWLEVEITRDGSVYRQRFENGGKPVTTLKKVGTAPKSKSGTVVTFMPDDKIFSTIDFKFNTISERLKESAFLLKNVKMSLTDLRGDDPIIEEFHYENGVQDFVEYLNEDKETLTPVIYMEGQDQDFQVEVALQYNDGFSDNILSFVNNVRTKDGGSHETGLKSAITKAMNDYARKTNLLKEKDKNLEGSDYREGLSAVLSILVPEQHLQFEGQTKDKLGSPLARPIVESIVSEKLTFFLLENGEVASHLVRKAIKARDAREAARKARDDSRNGKKNKKDKGLLSGKLTPAQSKNAKKNELYLVEGDSAGGSAKQGRDRKFQAILPLRGKVLNTEKAKMADILKNEEINTMVYTIGAGVGADFNLEDINYDKIIIMTDADTDGAHIQTLLLTFFYRYMRPLVEAGHVYIALPPLYKMSKGKGKTEKIAYAWTDGELEDLRREFGKGAILQRYKGLGEMNANQLWETTMDPETRTLIRVTIDDLARAERRVSVLMGDKAAPRRQWIEDNVKFTLEENTVF

SEQ ID NO: 74521 - protein, 819 aa, Streptococcus pyogenes
MSNIQNMSLEDIMGERFGRYSKYIIQERALPDIRDGLKPVQRRILYSMNKDGNTFEKGYRKSAKSVGNIMGNFHPHGDSSIYDAMVRMSQDWKNREILVEMHGNNGSMDGDPPAAMRYTEARLSEIAGYLLQDIEKNTVSFAWNFDDTEKEPTVLPAAFPNLLVNGSSGISAGYATDIPPHNLSEVIDAVVYMIDHPKASLEKLMEFLPGPDFPTGGIIQGADEIKKAYETGKGRVVVRSRTEIEELKGGKQQIIVTEIPYEVNKAVLVKKIDDVRVNNKVPGIVEVRDESDRTGLRIAIELKKEADSQTILNYLLKYTDLQVNYNFNMVAIDHFTPRQVGLQKILSSYISHRKDIIIERSKFDKAKAEKRLHIVEGLIRVLSILDEIIALIRSSDNKADAKENLKVSYDFSEEQAEAIVTLQLYRLTNTDIVTLQNEENDLRDLITTLSAIIGDEATMYNVMKRELREVKKKFANPRLSELQAESQIIEIDTASLIAEEETFVSVTRGGYLKRTSPRSFNASSLEEVGKRDDDELIFVKQAKTTEHLLLFTTLGNVIYRPIHELTDLRWKDIGEHLSQTISNFATEEEILYADIVTSFDQGLYVAVTQNGFIKRFDRKELSPWRTYKSKSTKYVKLKDDKDRVVTLSPVIMEDLLLVTKNGYALRFSSQEVPIQGLKSAGVKGINLKNDDSLASAFAVTSNSFFVLTQRGSLKRMAVDDIPQTSRANRGLLVLRELKTKPHRVFLAGGVQSDTSAEQFDLFTDIPEEETNQQMLEVISKTGQTYEIALETLSLSERISNGSFISDTISDQEVLVARTR

SEQ ID NO: 74522 - protein, 340 aa, Streptococcus pyogenes
MTIAIDWDNLGFEYHKLPFRYISYYKNGQWDKGQLTEDATLHISESAPALHYGQQAFEGLKAYRTKDGSIQLFRPDRNAVRLQATADRLLMPQVSTEQFIDAAKQVVKANEDFVPPYGTGATLYLRPLLIGVGDIIGVKPAEEYIFTIFAMPVGNYFKGGLAPTNFIVSEAFDRAAPYGTGAAKVGGNYAGSLLPGKAAKSAGFSDVIYLDPATHTKIEEVGAANFFGITANNEFVTPLSPSILPSITKYSLLQLAEERLGMTVIEGDVPINELDKFVEAGACGTAAVISPIGGIQYKDNLHVFYSETEVGPVTRRLYDELVGIQFGDIEAPEGWIVKVD

SEQ ID NO: 74523 - protein, 401 aa, Streptococcus pyogenes
MNEFEDLLNSVSEVNPGDVVTAEVLTVDNGQANVVIEGTGVEGVLTLRELTNDRDADINDFVKAGDTVEVLVLRQVVGKDTDTVTFLVSKKRLEARKAWDKLVGREGEVVTVKGTRAVKGGLSVEFEGLRGFIPASMIDTRFVRNTEKFVGQEFDAKIKEVDAAENRFILSRREVIEEAAKEARAEVFSKISEGAVVTGTVARLTSFGAFIDLGGVDGLVHVTELSHERNVSPKSVVSVGEEVEVKVLSIDEEAGRVSLSLKATTPGPWDGVEQKLAQGDVVEGKVKRLTDFGAFVEVLPGIDGLVHISQISHKRVENPKDVLSVGQEVTVKVLEVNAADERVSLSIKALEERPAQAEGDNKEEKRQSRPRRPKRESRRDYELPETQTGFSMADLFGDIEL

SEQ ID NO: 74524 - protein, 328 aa, Streptococcus pyogenes
MSEKIRVLLYYKYVSIENAQEYAAKHLEFCKSIGLKGRILIADEGINGTVSGDYETTQKYMDWVHSDERFADLWFKIDEENQQAFRKMFVRYKKEIVHLGLEDNNFDSDINPLETTGEYLNPKQFKEALLDEDTVVLDTRNDYEYDLGHFRGAIRPDIRNFRELPQWVRDNKDKFMEKRVVVYCTGGVRCEKFSGWMVREGFKDVGQLHGGIATYGKDPEVQGELWDGAMYVFDDRISVPINHVNPTVISKDYFDGTPCERYVNCANPFCNKQIFASEENETKYVRGCSPECRAHERNRYVQENGLSRQEWAERLEAIGESLPEFVGA

SEQ ID NO: 74525 - protein, 302 aa, Streptococcus pyogenes
MKHLKTPPLVMSGLALGTLSFGNLLATYVSIFNYLGILAALFIYGILLVGMVRNLNDTKMQLRQPLIASVFPTFFMTGMLLSSLFLKVTGGCWLGFLTWWLFFLGNLVLIAYYQYRFVFSFSWDNVFPSWSVLFVGIAMAALTAPASRQFLLGQVIFWVCLLLTAVILPFMAKKTYGIGLGQAVMPNISTFCAPLSLLSASYLATFPRPQVGMVIFLLVSSQLLYAFVVVQLPRLLNRPFNPGFSAFTFPFVISATSLKMTLSFLGWQGLGWQVLLLGEVLLATALVTYVYGAYLRFLFQNK

SEQ ID NO: 74526 - protein, 736 aa, Streptococcus pyogenes
MIKSKYSWKIKDKKPDDGFFKLAKTKGLTQTAAQLIYDRGIRTEEALDEFLTADLSQLHDPYLLHDMAKAVPRIRQAIEEGERILIYGDYDADGMTSASIVKETLDMMGAEPLVYLPNRFTDGYGPNQSVYKYFIEQEAVSLIITVDNGVAGHEAIRYAQEQEVDVIVTDHHSLPEELPEAFAIIHPEHPDADYPFKHLAGCGVAFKLATALLESLPTDCLDLVAIGTIADMVSLTGENRVLVKNGLAMLKHTERVGLQELMSLSPIDLEHFNEDAIGFQIAPQLNALGRLDDPNPAIELLTGFDDQEAQAIALMIKKKNEERKALVQDIFDQAMAMVDPQKPVQVLAQAGWHPGVLGIVAGRIMETIGQTVVVLTIDNGFAKGSARSLEAINIFEALNGKRELFTAFGGHAGAAGMTLPVDNLEALSDFLCQFVIERGLDQTAKNTLTIDERLSLDDLSLDILKSLDKLAPYGMDHQKPVFYVKDIRVSQARTIGQDQSHLKFKVSQGKASFDVLAFGQGSQLQEFRQATGLELAVTLSVNHWNGNTSLQFMLVDARVDGVQLLDLRTKTAKVPEGIPTIEEDPNARVILINDIPEDFKTWRNQFVHKDFDAIYFKNQMKHPYYLTGFGSREQFAKLYKTIYQFPEFDLRHKLTELSHYLNIEKLLLIKLIQIFEELSFVTIDDGLMTVNPQAQKREISESHIYQDLKELVKFQEIMALASPKEMYDYLVKSNDQ

SEQ ID NO: 74527 - protein, 263 aa, Streptococcus pyogenes
MANQLSTQQVKRDITTDPTLLTGADIKKYFDPQNLLSEKQVGQALALCKGRNLNPFANEVYIVAYKNNSGTDFSLIVSKEAFMKRAERCEGYDGFEAGITVMRNGEMVEIEGSLKLPDDVLIGGWAIVYRKDRSHRYKVTVDFNEYVKLDKYGNPRSTWKSMPGTMIRKTALVQTLREAFPDELGNMYTDIDGGDTFDAIKDVTPQETQEEVRARKMAQIEQYKQEQTQKQTQKADTSYPVDEVSEHTDDPVQGELLDGELEY

SEQ ID NO: 74528 - protein, 188 aa, Streptococcus pyogenes
METQLEAKQGIHSILLFRLLKEASSEAATKLAFQTEHEVGKSRDVDGQKTKDGIIQSVGALEYDFKATSILAKGDVLAAKLEKAMENGELVEIWDIDLEETSKNGDSDNKLANVWGIDKNGTNRGNGKYLATYYQGYISSFSAKKNAEENIEIEMEFAINGVGQKGFATLTDAQKAAVQYAFKDTTKG

SEQ ID NO: 74529 - protein, 98 aa, Streptococcus pyogenes
MIDFVQIGAFCGAALSILGVWGFIVNPFKKAMEANEFAMAQLKDSIKELAYELKNLDREREITKKIIDRHEERLGRVEDEVIINKERIITLFKKGEEK

SEQ ID NO: 74530 - protein, 550 aa, Streptococcus pyogenes
MSFDGFFLHHLTNELKENLLYGRIQKVNQPFERELVLTIRNHRKNYKLLLSAHPVFGRVQITQADFQNPQVPNTFTMIMRKYLQGAVIEQLEQIDNDRIIEIKVSNKNEIGDAIQATLIIEIMGKHSNIILVDRAENKIIESIKHVGFSQNSYRTILPGSTYIEPPKTAAVNPFTITDVPLFEILQTQELTVKSLQQHFQGLGRDTAKELAELLTTDKLKRFREFFARPTQANLTTASFAPVLFSDSHATFETLSDMLDHFYQDKAERDRINQQASDLIHRVQTELDKNRNKLSKQEAELLATENAELFRQKGELLTTYLSLVPNNQDSVILDNYYTGEKIEIALDKALTPNQNAQRYFKKYQKLKEAVKHLSGLIADTKQSITYFESVDYNLSQASIDDIEDIREELYQAGFLKSRQRDKRHKRKKPEQYLASDGTTILMVGRNNLQNEELTFKMAKKGELWFHAKDIPGSHVIIKDNLDPSDEVKTDAAELAAYYSKARLSNLVQVDMIEAKKLHKPSGAKPGFVTYTGQKTLRVTPDQAKILSMKLS

SEQ ID NO: 74531 - protein, 289 aa, Streptococcus pyogenes
MIISSVSQGLIWGVLGLGIYLTFRILNFPDMTTEGSFPLGGAVAVTAISLGWNPFLSTLLGMLSGALAGFLTGLLYTKGKMPTLLAGILVMTSCNSIMLMVMGRANLGLHDHKRIQDCLPFSIDLNSLLTGLITVVIVISVLIYFLYTNLGQAYIATGDNKDMAKSFGINTDWMEVMGLVVSNSLIALSGALVSQQDGYADVSKGIGVIVIGLASIIVGEVLYSTGLTLLERLIAIVIGSILYQFLISVVITLGFNTSYLKLISALVLALCLMIPVVKERFFKGVRLTR

SEQ ID NO: 74532 - protein, 553 aa, Streptococcus pyogenes
MTDIKMIALGGVREYGKNFYLVEINDSMFILDAGLKYPENEQLGVDLVIPNLDYVIENKGKVQGIFLSHGHADAIGALPYLLAEVSAPVFGSELTIELAKLFVKSNNSTKKFNNFHVVDSDTEIEFKDGLVSFFRTTHSIPESMGIVIGTDKGNIIYTGDFKFDQAAREGYQTDLLRLAEIGKEGVLALLSDSVNATSNDQIASESEVGEEMDSVISDADGRVIVAAVASNLVRIQQVFDSATAHGRRVVLTGTDAENIVRTALRLEKLMITDERLLIKPKDMSKFEDHELIILEAGRMGEPINSLQKMAAGRHRYVQIKEGDLVYIVTTPSTAKEAMVARVENLIYKAGGSVKLITQNLRVSGHANGRDLQLLMNLLKPQYLFPVQGEYRDLAAHAKLAEEVGIFPENIHILKRGDIMVLNDEGFLHEGGVPASDVMIDGNAIGDVGNIVLRDRKVLSEDGIFIVAITVSKKEKRIISKAKVNTRGFVYVKKSHDILRESAELVNTTVGNYLKKDTFDWGELKGNVRDDLSKFLFEQTKRRPAILPVVMEVR

SEQ ID NO: 74533 - protein, 635 aa, Streptococcus pyogenes
MIILQGNKLERSFSGDVLFQNISLQVDERDRIALVGPNGAGKSTLLKLLVGEETPTSGEVNTKKDLTLSYLAQNSRFESDQTIYEEMLKVFEALRQDEKRLRQMEMDMATVSGQVLTRLMTDYDLLTEHFRQQGGFTYESDIKAILNGFKFDESMWQMTIAELSGGQNTRLALAKMLLEKPELLVLDEPTNHLDIETIAWLENYLANYQGALIIVSHDRYFLDKVATVTLDLTPNGLDRYSGNYSRFMALKAEKLVAEEKQFDKQQKEIAKLEDFVQKNIVRASTTKRAQARRKQLEKIERLDKPTGGRKSAHMTFHAEKPSGNVVLRVEEAAIGYGDQVLSEPINVDINKLDAIAVVGPNGIGKSTLIKSIIGQLPLLKGQLKYGANVETGYYDQTQSHLTSSNTVLEELWQDFSTTPEVDIRNRLGAFLFSGDDVKKSVAMLSGGEKARLLLAKLSMENNNFLVLDEPTNHLDIDSKEVLENALIDFDGTLLFVSHDRYFINRLATKVLEITENGSTLYLGDYDYYLEKKAELEELARLAAGETVEETKEASATDYQLQKANQKERRRLTRRYEEIEARLETIEERIGAIQEDMHASNDTAQLIAWQKEWDQLDQEQEALMEEWETIAEQIES

SEQ ID NO: 74534 - protein, 322 aa, Streptococcus pyogenes
MVTVSKEQHLDMFLKMERIREFDSRINKLVRRGFVQGMTHFSVGEEAANVGAVAHLSYDDIIFSNHRGHGQSIAKDMDLNKMMAELAGKATGVSKGRGGSMHLADFEKGNYGTNGIVGGGYALAVGAALTQQYKGTNNIAVAFSGDGATNEGSFHESVNMAATWKLPVIFFIINNRYGISMSINNATNTPHLYTRAEAYGVPGFYCEDGNDVMAVYETMGKAVEHVRGGNGPAIVEVESYRWFGHSTADAGKYRTKEEVDEWKEKDPMIKYRTYLTSEGIATDDELDAIQAQVKKEVDDAYEFAQNSPDPELSVAFEDVWVD

SEQ ID NO: 74535 - protein, 332 aa, Streptococcus pyogenes
MSETKLMALREAVNLAMTEEMRKDENIFLMGEDVGVYGGDFGTSVGMIEEFGPKRVKDTPISEAAISGAAIGAAITGLRPIVDVTFMDFLTIMMDAIVNNGAKNNYMFGGGLITPVTFRVASGSGIGSAAQHSQSLEAWLTHIPGIKVVAPGNANDAKGLLKSAIRDNNIVLFMEPKALYGKKEEVNQDPDFYIPLGKGDIKREGTDLTIVSYGRMLERVLQAAEEVAADGINVEVVDPRTLIPLDKELIIESVKKTGKLMLVNDAYKTGGFIGEIATMITESEAFDYLDHPIVRLASEDVPVPYARVLEQAILPDVEKIKAAIVKMANKGN

SEQ ID NO: 74536 - protein, 469 aa, Streptococcus pyogenes
MAFEIIMPKLGVDMQEGEIIEWKKQEGDTVNEGDILLEIMSDKTNMELEAEDSGVLLKITRQAGDTVPVTEVIGYIGAEGESVDTIASSEKTTEIPVPASADAGPAVAPKENVASPAPQVAATAIPQGNGGKVRATPAARKAAAEMGIDLGQVPGTGPKGRVHKEDVENFKGAQPKASPLARKIAADKGIDLATVSGTGFNGKVMKEDIMAILEAAKPAEAKAPAAKEEKVVDLPEGVEHKPMSAMRKAISKGMTNSYLTAPTFTLNYDIDMTEMIALRKKLIDPIMAKTGLKVSFTDLIGMAVVKTLMKPEHEYMNASLINDANDIELHRFVNLGIAVGLDDGLIVPVIHGANKMCLSDFVLASKDVIKKAQTGKLKAAEMSGSTFSITNLGMFGTKTFNPIINQPNSAILGVGATIPTPTVVDGEIVSRPIMAMCLTIDHRLVDGMNGAKFMVDLKKLMENPFELLI

SEQ ID NO: 74537 - protein, 587 aa, Streptococcus pyogenes
MAVEIIMPKLGVDMQEGEIIEWKKQEGDTVNEGDILLEIMSDKTNMELEAEDSGVLLKITRQAGETVPVTEVIGYIGAEGESVEVSSPAASDVNVARTTEDLEAAGLEVPKAPAQAASAAPKAALADDEYDIIVVGGGPAGYYAAIRGAQLGGKIAIVEKSEFGGTCLNVGCIPTKTYLKNAEILDGIKIAAGRGINLASTNYTIDMDKTVDFKNTVVKTLTGGVQGLLKANKVTIFNGLGQVNPDKTVTIGSQTIKGRNVILATGSKVSRINIPGIDSKLVLTSDDILDLREMPKSLAVMGGGVVGIELGLVWASYGVDVTVIEMADRIIPAMDKEVSLELQKILSKKGMKIKTSVGVSEIVEANNQLTLKLNNGEEVVAEKALLSIGRVSQMNGLENLNLEMDRNRIKVNDYQETSIPGIYAPGDVNGTKMLAHAAYRMGEVAAENAMHGNTTRKANLKYTPAAVYTHPEVAMVGLTEEQAREQYGDVLIGKNSFTGNGRAIASNEAHGFVKVIADAKYHEILGVHIIGPAAAEMINEAATIMESELTVDELLLSIHGHPTFSEVMYEAFADVLGEAIHNPPKRK

SEQ ID NO: 74538 - protein, 263 aa, Streptococcus pyogenes
MTYTSLKSPENQDYIYDLTIAHLYGNLMNTYGDNGNILMLKYVAEKLGARVTVDIVSINDTFEQDDYDIVFFGGGQDYEQSIVAKDLPSKKAALADYIANNKVVLAICGGFQLLGQYYVQANGVKIDGLGIMGHYTLNQHQNRFIGDIKIHNDEFNETYYGFENHQGRTFLSGDEKPLGRVVYGNGNNKEDQTEGVHYKNVYGSYFHGPILSRNVNLAYRLVTTALKKKYGSAISLPSYDDILKQEITEEYADLKSKASFNKV

SEQ ID NO: 74539 - protein, 445 aa, Streptococcus pyogenes
MKTLLGIIAGKAAQSILTKLGRGSTYPGRLALACDKDILKDLSKDYDIVVVTGTNGKTLTTALTVGILKEAFGEIITNPSGANMITGITSTFLAAKKGKSERQIAVLEIDEASLPRITTYLKPSLFVYTNIFRDQMDRYGEIYTTYQMIVDGARNAPKATILANGDSPIFSSKDIVNPVQYYGFDTAKHAPQLAHYNTEGILCPKCEHILQYRLNTYANLGDFVCLNCQFQRPTLDYQLTELTAITHQSSEFVIDGQNYKINVGGLYNIYNALAAVSVAEFFGVSPEKIKAGFNKSKAVFGRQETFTVGDKSCTLILIKNPVGASQALEMIQLADYPFSLSVLLNANYADGIDTSWIWDANFELITQMPITEINAGGVRHSEIARRLRVTGFDDTKIKQAEKLEQIIETIEKQEAKHAYILATYTAMLEFRSLLADRHVVEKEMI

SEQ ID NO: 74540 - protein, 318 aa, Streptococcus pyogenes
MKRFLNSRPWLGMVSVFFAILLFLTAASSNHNNSSSQIYSPIETYTHSLKDVPIDMKYDSDKYFISGYSYGAEVYLTSTNRIKLDSEVNNDTRNFKIVADLTHSHPGTVSVNLRVENLPSGVTATVSPDKISVTIGKKESKVFPVRGSVDAKQIANGYEISKIETGVNKVEVTSDESTIALIDHVVAKLPDDQVLDRNYSSRVTLQAVSADGTILASAIDPAKTNLSVAVKKITKSVPIRVEAVGMMDDSLSDIQYKLSKQTAVISGSREVLEDIDEIIAEVNISDVTKNTSKTVSLSSSQVSIEPSVVTVQLTTTKK

SEQ ID NO: 74541 - protein, 451 aa, Streptococcus pyogenes
MGKYFGTDGVRGEANVELTPELAFKLGRFGGYVLSQHETERPKVFVARDTRISGEMLESALIAGLLSVGIEVYKLGVLATPGVSYLVRTEKASAGVMISASHNPALDNGIKFFGNDGFKLADDQELEIEALLDAPEDTLPRPSAEGLGTLVDYPEGLRKYEKFLVTTGTDLSGMTVALDTANGAASVSARDVFLDLNAEIAVIGEKPNGLNINDGVGSTRPEQLQELVKETGADLGLAFDGDSDRLIAVDETGEIVDGDRIMFIIGKYLSEKGLLAHNTIVTTVMSNLGFHKALDKQGINKAITAVGDRYVVEEMRSSGYNLGGEQSGHVIIMDYNTTGDGQLTAIQLAKVMKETGKSLSELAAEVTIYPQKLVNIRVENSMKERAMEVPAIANIIAKMEDEMAGNGRILVRPSGTEPLLRVMAEAPTDAEVDYYVDTIADVVRTEIGCDN

SEQ ID NO: 74542 - protein, 188 aa, Streptococcus pyogenes
MTTEFDKMTRGEWYDANFDSELIQKRMMAQDLCFDLNQLKPSREEERSAVLNQLFGQSFEGLVLLSPFICDYGKNITFGKNCFINSNCYFMDGAKIALGDNVFVGPSTGFYTANHPLDYKRRNEGLEKALPITIGDNVWFGANVNVMPGVTIGSGCVIASGSVVTHDIPVNSLAAGVPCQVVRKIEQE

SEQ ID NO: 74543 - protein, 465 aa, Streptococcus pyogenes
MAYQTIYPYTNEVLHTFDNMTDQGLADVLERAHLLYKKWRKEDHLEERKAQLHQVANILRRDRDKYAEIMTKDMGKLFTEAQGEVNLCADIADYYADKADEFLMSTPLETDSGQAYYLKQSTGVILAVEPWNFPYYQIMRVFAPNFIVGNPMVLKHASICPRSAQSFEELVLEAGAEAGSITNLFISYDQVSQVIADKRVVGVCLTGSERGGASIAEEAGKNLKKTTLELGGDDAFIILDDADWDQLEKVLYFSRLYNAGQVCTSSKRFIVLDKDYDRFKELLTKVFKTAKWGDPMDPETTLAPLSSAQAKADVLDQIKLALDHGAELVYGGEAIDHPGHFVMPTIIAGLTKDNPIYYQEIFGPVGEIYKVSSEEEAIEVANDSNYGLGGTIFSSNQEHAKAVAAKIETGMSFINSGWTSLPELPFGGIKHSGYGRELSELGFTSFVNEHLIYIPNKTNNGNTKV

SEQ ID NO: 74544 - protein, 469 aa, Streptococcus pyogenes
MTTIDFKAEVDKRKKAMLADLVDLLRINSERDDQLADDKHPFGPGPVKALEHFLAMAERDGYKTRNIDNYAGDFEFGQGDEVLGIFGHLDVVPAGSGWDTDPYEPVIKDDRIYARGSSDDKGPTMACYYALKIIKELGLPVSKKVRFIVGTDEESGWGDMDYYFAHNGLKNPDFGFSPDAEFPIINGEKGNITEYLHFAGDNKGAFVLHRFQGGLRENMVPESATAVITAPHDLDVLEAALEQFLSEHGVKGSMKATDGKIEVTIIGKSAHGSTPEAGVNGATLLAKFLNQFTFEGAAKDYLHVAGEVLHEDFAAEKLGLAYTDDRMGALSMNAGVFTFDSQSADNTIALNFRYPKGTDAATLKAGLEKLPGLTKVSLSEHEHTPHYVPMDDELVATLLAVYEKQTGLKGYEQVIGGGTFGRLLERGVAFGAMFPGDENTMHQANEYMPLENIYRSAAIYAEAIYELIK

SEQ ID NO: 74545 - protein, 458 aa, Streptococcus pyogenes
MSITKEFDTITAISTPLGEGAIGIVRLSGTDALAIAQSVFKGKNLEQVASHTINYGHIINPKTGTIIDEVMVSVMLAPKTFTRENVVEINTHGGIAVTNEILQLLIRQGARMAEPGEFTKRAFLNGRVDLTQAEAVMDIIRAKTDKAMTIAVKQLDGSLSQLINDTRQEILNTLAQVEVNIDYPEYDDVEEMTTALLREKTQEFQSLLESLLRTAKRGKILREGLSTAIIGRPNVGKSSLLNNLLREDKAIVTDIAGTTRDVIEEYVNIKGVPLKLVDTAGIRETDDLVEQIGVERSKKALQEADLVLLVLNASEKLTDQDRALLNLSQDSNRIILLNKTDLEQKIELEQLPDDYIPISVLTNQNINLIEDRINQLFFDNAGLVEQDATYLSNARHISLIEKAVQSLEAVNDGLALGMPVDLLQVDLTRTWEILGEITGDAAPDELITQLFSQFCLGK

SEQ ID NO: 74546 - protein, 166 aa, Streptococcus pyogenes
MSEAIIAKKAEQVELIAEKMKAAASIVIVDSRGLTVDQDTVLRRSLRESGVEFKVIKNSILTRAAEKAGLDELKDVFVGPSAVAFSNEDVIAPAKVINDFTKTADALEIKGGAIEGAVSSKEEIQALATLPNREGMLSMLLSVLQAPVRNVAYAVKAVAENKEGAA

SEQ ID NO: 74547 - protein, 121 aa, Streptococcus pyogenes
MALNIENIIAEIKEASILELNDLVKAIEEEFGVTAAAPVAAAAAGGAEEAAKDSFDVELTSAGDKKVGVIKAVREITGLGLKEAKGLVDGAPANVKEGVAAAEAEEIKAKLEEAGATITLK

SEQ ID NO: 74548 - protein, 240 aa, Streptococcus pyogenes
MKSYLCSNFLKIKNTSYLLIHILAALLFPLLLFFYWSQRGGLQSRTVLFSYFQIVGVLLPFVASIVCIQLKNLEESSGKYKYLLGYSQSNYKPFIVELVFLWLCYCIVLIISITIFILLLKTIGINVSLRLLILNSLIYIIFAYVTYLINHIISYIFSTGVALGISMVGVIAAAFCETSLGDKVWFLIPWAWLLRISDTLYNQQKMAIVPLIVIFFVSCTVALLHIRIFKRWNQDCLTSS

SEQ ID NO: 74549 - protein, 266 aa, Streptococcus pyogenes
MKIGKFVIEGNAAIMGILNVTPDSFSDGGSYTTVQKALDHVEQMIADGAKIIDVGGESTRPGCQFVSATDEIDRVVPVIKAIKENYDILISIDTYKTETARAALEAGADILNDVWAGLYDGQMFALAAEYDAPIILMHNQDEEVYQEVTQDVCDFLGNRAQAALDAGVPKNNIWVDPGFGFAKSVQQNTELLKGLDRVCQLGYPVLFGISRKRVVDALLGGNTKAKERDGATAALSAYALGKGCQIVRVHDVKANQDIVAVLSQLM

SEQ ID NO: 74550 - protein, 166 aa, Streptococcus pyogenes
MTIVYLSLGTNMGDRAAYLQKALEALADLPQTRLLAQSSIYETTAWGKTGQADFLNMACQLDTQLTAADFLKETQAIEQSLGRVRHEKWGSRTIDIDILLFGEEVYDTKELKVPHPYMTERAFVLIPLLELQPDLKLPPNHKFLRDYLAALDQSDITLFSAQQTEF

SEQ ID NO: 74551 - protein, 295 aa, Streptococcus pyogenes
MITELHGIDIRENEPLKHYTYTKVGGPADFLAFPRNHYELSRIVAYANKENMPWLVLGNASNLIVRDGGIRGFVIMFDKLNAVHLNGYTLEAEAGANLIETTKIAKFHSLTGFEFACGIPGSIGGAVFMNAGAYGGEISHIFLSAKVLTPSGEIKTISARDMAFGYRHSAIQETGDIVISAKFALKPGNYDTISQEMNRLNHLRQLKQPLEFPSCGSVFKRPPGHFAGQLIMEANLKGHRIGGVEVSEKHTGFMINVADGTAKDYEDLIAYVIETVENHSGVRLEPEVRIIGENL

SEQ ID NO: 74552 - protein, 357 aa, Streptococcus pyogenes
MRKLYSFLAGVLGVIVILTSLSFILQKKSGSGSQSDKLVIYNWGDYIDPALLKKFTKETGIEVQYETFDSNEAMYTKIKQGGTTYDIAVPSDYTIDKMIKENLLNKLDKSKLVGMDNIGKEFLGKSFDPQNDYSLPYFWGTVGIVYNDQLVDKAPMHWEDLWRPEYKNSIMLIDGAREMLGVGLTTFGYSVNSKNLEQLQAAERKLQQLTPNVKAIVADEMKGYMIQGDAAIGITFSGEASEMLDSNEHLHYIVPSEGSNLWFDNLVLPKTMKHEKEAYAFLNFINRPENAAQNAAYIGYATPNKKAKALLPDEIKNDPAFYPTDDIIKKLEVYDNLGSRWLGIYNDLYLQFKMYRK

SEQ ID NO: 74553 - protein, 513 aa, Streptococcus pyogenes
MKKPLRLWASLSLILVSMIVVTTSLFYGIMLHDTHQSIKNQETHLLTSTGKMLASHQAIKELLLNNQPNAKTTAYTNSIASIYNLDYVVVMNMKGIRLTHPNPKNIGKPFQGGDEEAVLAGKKVISTAKGTLGKSLRYLVPVFDGDKQIGAIAVGIKLTTLNDVALTSKRNYTLSLLLCLLISLLVTSFISFRLKRQLHQLEPSEIYQLFEERNAMLDQIEAAVFVVDKAGILQLCNQAGQKLIARKCQLGKPTGNSFNYLFPDFPKLSLQEGHEQLFRYGEEDYLLAISPICVKNDHRGHIIFMREAVKAIDTLDQLAYTTAYASALQAQTHKFMNQLHVIYGLVDIAYYDQLKIYLDSILEPENEILTSLSVLVKEPLLASFLIGEQEKYQELNVHLKIDVLSEIPHSATKNQLNNGLMIYRFIHTNLLTTLRPKSLVLSIQHDQNHLISHYTLTDNWIDLERVQPIFDLPYFQQLLTDTNSQFHQHQTVTELQFSVTTPYVGGQHERFNH

SEQ ID NO: 74554 - protein, 510 aa, Streptococcus pyogenes
MENHKNEFTFSNKSIIAYVWRGVVVGIIAGVIVSLFRLLIEVTADWVIEWYRYAHINSLLLLPILSVSLLAVLFVGFLVKSDSDIKGSGIPHVEGELKGLMSPDWWSVLWKKFLGGIMAISMGFMLGREGPSIQLGAMSAKGLAKFLKSSRLEKRVLIASGAAAGLSAAFNAPIAGLLFVVEEIYHHFSRLIWITALVASLVANFISLNIFGLKPVLAMSEAMPFLGLNQYWLLLLLGLFLGCLGYLYEIVILNFNKLYVILGSWLHLPDYFYGIIMVFLILPIGYYLPQLLGGGHGLILSLSNQQLPLMTIFFYFIIRFIVSMFSYGSGLPGGIFLPILTLGALAGLLFGQIASQLGLLNQSFLSLFLILGMAGYFAAISKAPLTGMILVTEMVGDLKPLMAIAVVTFVSYLVMDLLNGQPIYEAMLDKMAMKHPTNLVEPTLIELTVGDKIAGKYVKELKLPENVLITTQIHHQKSQVVSGNTRLLSGATIFLVVNEADTGFVREVLM

SEQ ID NO: 74555 - protein, 226 aa, Streptococcus pyogenes
MYSIKCDDNKAMPRERLMRLGAESLSNQELLAILLRTGNKEKHVLELSSYLLSHLDSLADFKKMSLQELQHLAGIGKVKAIEIKAMIELVSRILATDKTLTDSVLTSVQVAEKMMAALGDKKQEHLVVLYLDNQNRIIEEKTIFIGTVRRSLAEPREILYYACKNMATSLIVIHNHPSGNIEPSSNDYCFTEKIKRSCEDLGIICLDHIIVSYKDYYSFREKSTLF

SEQ ID NO: 74556 - protein, 223 aa, Streptococcus pyogenes
MTLDWEEFLDPYIQTVGELKIKLRGIRKQYRKQNRYSPIEFVTGRVKSIESIKEKMILRGVIEENIAQDIQDIAGLRIMVQFVDDVEEVLALLRQRQDMTIVYERDYIRNMKSSGYRSYHVVVEYPVDTIEGQKKVLAEIQIRTLAMNFWATIEHSLNYKYGGDFPEEIKKRLEVTAKIALELDEEMRKIREDIREAQLLFDPVTRNLSDGVGNSDDTDELYR

SEQ ID NO: 74557 - protein, 278 aa, Streptococcus pyogenes
MTQMNYTGKVKRVAIIANGKYQSKRVASKLFSVFKDDPDFYLSKKNPDIVISIGGDGMLLSAFHMYEKELDKVRFVGIHTGHLGFYTDYRDFEVDKLIDNLRKDKGEQISYPILKVAITLDDGRVVKARALNEATVKRIEKTMVADVIINHVKFESFRGDGISVSTPTGSTAYNKSLGGAVLHPTIEALQLTEISSLNNRVFRTLGSSIIIPKKDKIELVPKRLGIYTISIDNKTYQLKNVTKVEYFIDDEKIHFVSSPSHTSFWERVKDAFIGEIDS

SEQ ID NO: 74558 - protein, 301 aa, Streptococcus pyogenes
MRFEFVADKRIKVKTLLKSYDVSKGLLAKIKYKGGNILVNGIEQNAIYLLQVGDVVTIDIPNEEPFEKLEAIPFDLDIVHEDDHFLVINKPIGFASIPSAIHSNTIANFIKAYYVDNHYLDQQVHIVTRLDRDTSGLMLFAKHGYAHARLDKQLQTRSIEKRYFALVSGNGMLPDEGDIIAPIGRSKDSIITRAVDPMGKYAKTSYKVVARYSENVHLVDIKLHTGRTHQIRVHFAHIGFPLLGDDLYGGRLDLGITRQALHCHYLNFKDPFTESDCSYAIHLTDDFDSVIIGLQKKDRGY

SEQ ID NO: 74559 - protein, 331 aa, Streptococcus pyogenes
MSIRSLFGGLREKILGKNMKIVFPEGNDERVVRAAARLKFEGLLEPIILGQSEEVRNLLTKLGFADQDYTIINPNEYADFDKMKEAFVEVRKGKATLEDADKMLRDVNYFGVMLVKMGLADGMVSGAIHSTADTVRPALQIIKTKPGISRTSGVFLMNRENTSERYVFADCAINIDPTAQELAEIAVNTAETAKIFDIDPKIAMLSFSTKGSGKAPQVDKVREATEIATGLNPDLALDGELQFDAAFVPETAAIKAPDSAVAGQANTFVFPDLQSGNIGYKIAQRLGMFDAIGPILQGLNKPVNDLSRGSSAEDIYKLAIITAAQAIESQG

SEQ ID NO: 74560 - protein, 229 aa, Streptococcus pyogenes
MKNAISILALLTPENQLEETFIRELSHHFSHLFEVTILTSKANIQSNQLSTFQGIFSFHEHDIDLPTLYFKTSQHGQGFLVTESVFDQATAVLSLSQYLTGFYQKFDGHFLQYLPLQARLSDANGNIIVDNHAFNGSFLPTTDKEIEDWILAELRLSDNPCKTFLLPSGSLDHIYMQHYQALKNPQGQLVGVLDTVQDIKPLLNQYLEETGQAIVGWSDVTSGPSILDH

SEQ ID NO: 74561 - protein, 510 aa, Streptococcus pyogenes
MSMPSLFVTFQNRFNEWLAALGEHLQISLLSLMIALLIGVPLAALLSRSKRWSDIMLQVTGVFQTIPSLALLGLFIPLMGIGTLPAVTALVIYAIFPILQNTITGLNGIDPSLVEAGIAFGMTKWERLKTFEIPIAMPVIMSGVRTSAVMIIGTATLASLIGAGGLGSFILLGIDRNNANLILIGAISSALLAIIFNSLLQYLEKASLRRIMISFGITLLALLASYTPMALSQFSKGKDTVVIAGKLGAEPDILINLYKELIEDQSDISVELKSNFGKTSFLYEALKSGDIDMYPEFTGTITSSLLRDKPPLSNDPKQVYEDAKKGIAKQDKLTLLKPFAYQNTYAVAMPEKLAKEYQIETISDLKAHADTLKAGFTLEFKDRADGYKGMQSQYGLQLSVATMEPALRYQAIQSGDIQVTDAYSTDAEITKYHLKVLKDDKQLFPPYQGAPLMKTSLLTKHPELKGILNQLAGKITEKEMQDMNYEVSVKGADANKVARDYLLKTGLIQK

SEQ ID NO: 74562 - protein, 327 aa, Streptococcus pyogenes
MFNDIPVFDYEDIQLIPNKCIITSRSQADTSVTLGKYQFKLPVIPANMQTIIDETIAEQLAKEGYFYIMHRFDEDSRKPFIKRMHEQGLIASISVGVKACEYEFVTSLKEDAPEFITIDIAHGHANSVIDMIKHIKTELPETFVIAGNVGTPEAVRELENAGADATKVGIGPGKVCITKVKTGFGTGGWQLAALRWCAKAARKPIIADGGIRTHGDIAKSIRFGASMVMIGSLFAGHFESPGKTVEVDGETFKEYYGSASEYQKGEHKNVEGKKILLPTKGHLSDTLTEMQQDLQSSISYAGGKDLDSLRHVDYVIVKNSIWNGDSI

SEQ ID NO: 74563 - protein, 189 aa, Streptococcus pyogenes
MAQLYYKYGTMNSGKTIEILKVAHNYEEQGKPVVIMTSALDTRDGFGIVSSRIGMRREAIPISNDMDIFTFIAQLEEKPYCVLIDESQFLSKQNVYDLARVVDELNVPVMAFGLKNDFQNNLFEGSKHLLLLADKIDEIKTICQYCSKKATMVLRTENGKPVYEGDQIQIGGNETYIPVCRKHYFNPDI

SEQ ID NO: 74564 - protein, 359 aa, Streptococcus pyogenes
MNIYDQLQAVEDRYEELGELLSDPDVVSDTKRFMELSREETNTRETVTAYREYKQVIQTISDAEEMIKDASGDPELEEMAKEELKESKAAKEEYEEKLKILLLPKDPNDDKNIILEIRGAAGGDEAALFAGDLLTMYQKYAETQGWRFEVMESSVNGVGGIKEVVAMVSGQSVYSKLKYESGAHRVQRVPVTESQGRVHTSTATVLVMPEVEEVEYDIDPKDLRVDIYHASGAGGQNVNKVATAVRMVHIPTGIKVEMQEERTQQKNRDKAMKIIRARVADHFAQIAQDEQDAERKSTVGTGDRSERIRTYNFPQNRVTDHRIGLTLQKLDTILSGKMDEVIDALVMYDQTKKLESLNN

SEQ ID NO: 74565 - protein, 279 aa, Streptococcus pyogenes
MNYATLIRTYEDKLEQIDEDRENLAYVFREIKEWSSLDMLIHQNQAVTPEDAVLLEHIFCSLSQHLSPQYITGNAYFRDLKLAVDKRVLIPRPETEELVDMILAENLDAPLNVLDIGTGSGAIAISLKKERPNWQVTASDISRAALDLAKANADAYQLDITFIESDVFSLISETFDIIVSNPPYISYEDKEEVSLNVLQSEPHLALFAKENGYAIYRKIIEQADNYLTKEGKLYFEIGYKQAEGIKDMLQAYFPQRHIRAVTDIFGKERMVVVDYGVSS

SEQ ID NO: 74566 - protein, 418 aa, Streptococcus pyogenes
MIFDKGNVEDFDKELWDAIHAEEERQEHHIELIASENMVSKAVMAAQGSVLTNKYAEGYPGNRYYGGTECVDIVETLAIERAKKLFGAAFANVQAHSGSQANAAAYMALIEAGDTVLGMDLAAGGHLTHGSPVNFSGKTYHFVGYSVDTDTEMLNYEAILEQAKAVQPKLIVAGASAYSRSIDFEKFRAIADHVGAYLMVDMAHIAGLVAAGVHPSPVPYAHIVTSTTHKTLRGPRGGLILTNDEALAKKINSAVFPGLQGGPLEHVIAAKAVAFKEALDPAFKDYAQAIIDNTAAMAAVFAQDDRFRLISGGTDNHVFLVDVTKVIANGKLAQNLLDEVNITLNKNAIPFETLSPFKTSGIRIGCAAITSRGMGVKESQTIARLIIKALVNHDQETILEEVRQEVRQLTDAFPLYKK

SEQ ID NO: 74567 - protein, 828 aa, Streptococcus pyogenes
MQDRNLIDVNLTSEMKTSFIDYAMSVIVARALPDVRDGLKPVHRRILYGMNELGVTPDKPHKKSARITGDVMGKYHPHGDSSIYEAMVRMAQWWSYRHMLVDGHGNFGSMDGDGAAAQRYTEARMSKIALELLRDINKNTVNFQDNYDGSEREPVVLPARFPNLLVNGATGIAVGMATNIPPHNLAESIDAVKMVMEHPDCTTRELMEVIPGPDFPTGALVMGRSGIHRAYDTGKGSIVLRSRTEIETTQTGRERIVVTEFPYGVNKTKVHEHIVRLAQEKRLEGITAVRDESSREGVRFVIEIRREASATVILNNLFKLTSLQTNFSFNMLAIENGVPKILSLRQIIDNYISHQKEVIIRRTRFDKDKAEARAHILEGLLIALDHLDEVIAIIRNSETDVIAQTELMSRFDLSERQSQAILDMRLRRLTGLERDKIQSEYDDLLALIADLSDILAKPERIITIIKEEMDEIKRKYANPRRTELMVGEVLSLEDEDLIEEEDVLITLSNKGYIKRLAQDEFRAQKRGGRGVQGTGVNNDDFVRELISTSTHDTLLFFTNFGRVYRLKAYEIPEYGRTAKGLPIVNLLKLEDGETIQTIINARKEETAGKSFFFTTKQGIVKRTEVSEFNNIRQNGLRALKLKEGDQLINVLLTSGQDDIIIGTHSGYSVRFNEASIRNMGRSATGVRGVKLREDDRVVGASRIQDNQEVLVITENGFGKRTSATDYPTKGRGGKGIKTANITPKNGQLAGLVTVDGTEDIMVITNKGVIIRTNVANISQTGRATLGVKIMKLDADAKIVTFTLVQPEDSSIAEINTDRENSISKNKDN

SEQ ID NO: 74568 - protein, 249 aa, Streptococcus pyogenes
MVKKQKRRKIKSMSWARKLLIAVLLILGLALLFNKPIRNTLIARNSNKYQVTKVSKKQIKKNKEAKSTFDFQAVEPVSTESVLQAQMAAQQLPVIGGIAIPELGINLPIFKGLGNTELIYGAGTMKEEQVMGGENNYSLASHHIFGITGSSQMLFSPLERAQNGMSIYLTDKEKIYEYIIKDVFTVAPERVDVIDDTAGLKEVTLVTCTDIEATERIIVKGELKTEYDFDKAPADVLKAFNHSYNQVST

SEQ ID NO: 74569 - protein, 122 aa, Streptococcus pyogenes
MTKKNHGVFWGLLLGSAAASIAYLSLSSSKKDQLLKDSAKKIDDLNAYLQDKSKQVLDAVSEKVQESKDAVEVYGGIAAETVEESLGQAKEKVEGIGEATSQTIQSKMEKLTSDKTDADDEK

SEQ ID NO: 74570 - protein, 216 aa, Streptococcus pyogenes
MNQTFKQSLPLSFSEEVANSVTHAIGAFAMLILLPISASYAYQTYDLKAAIGISIFVISLFLMFLSSTIYHSMAYGSVHKYILRIIDHSMIYIAIAGSYTPVALSLVSGWLGYIIIVLQWGITLFGILYKIFAKRINEKFSLMLYIVMGWLVVFILPVIIQKTSLAFGLLMLFGGLSYTIGAVFYAKKRPYFHMIWHLFILLASALQFIAITFFML

SEQ ID NO: 74571 - protein, 282 aa, Streptococcus pyogenes
MAMIQWFPGHMSKARRQVQENVKHVDFVTILVDARLPLSSQNPMLTKIVGDKPKLMILNKADLADATRTKEWKAYYESQGIKTLAINSKEQSTVKKVTEAAKELMADKIQRLRERGIQKETLRTMIIGIPNAGKSTLMNRLAGKKIAVVGNKPGVTKGQQWLKSNKELEILDTPGILWPKFEDELVGLKLALTGAIKDQLLPMDEVTIFGLNYFREYYPNRLTKRFKNIPLEEEAPEIIMTLTRQLGFKDDYDRFYTLFVKEVRDGKLGQYTLDQVGDMDAD

SEQ ID NO: 74572 - protein, 263 aa, Streptococcus pyogenes
MPTSIKAIKESLEAVTSLLDPLFQELATDTRSGVQKALKSRQKVIQAELAEEERLEAMLSYEKALYKKGYKAIAGIDEVGRGPLAGPVVAACVILPKYCKIKGLNDSKKIPKAKHETIYQAVKEKALAIGIGIIDNQLIDEVNIYEATKLAMLEAIKQLEGQLTQPDYLLIDAMTLDIAISQQSILKGDANSLSIAAASIVAKVTRDQMMANYDRIFPGYDFAKNAGYGTKEHLQGLKAYGITPIHRKSFEPVKSMCCDSTNP

SEQ ID NO: 74573 - protein, 709 aa, Streptococcus pyogenes
MGTKTTTKPKTGTKKSTTKKKSTAKKNLVIVESPAKAKTIEKYLGRSYKVVASVGHIRDLKKSSMSIDFDNNYEPQYINIRGKGPLINSLKKEAKAAKKVYLASDPDREGEAISWHLSHILGLDPQDNNRVVFNEITKDAVKHAFVEPRQIDMDLVDSQQARRVLDRIVGYSISPILWKKVKKGLSAGRVQSVALKLIIDRENDIKAFVPKEYWSIDGLFKKGTKKFQATFYGINGKKTKLDNNNDVKEVLAKLTNEDFLVSKVDKKERRRNAPLPYTTSSLQQDAANKINFRTRKTMMVAQQLYEGIHLGENGTQGLITYMRTDSTRISPVAQNDAAQFIINRFGANYSKHGNRVKNTSGVQDAHEAIRPSSVNHTPDSIAKYLNKDQLKLYTLIWNRFVASQMTAAVFDTVKVNLEQNGVIFVANGSQMKFDGYMAVYNDSDKNKMLPEMAEGETVKKISTSPEQHFTQPPARYSEATLIKTLEENGVGRPSTYAPTLEVIQRRYYVKLSAKRFEPTELGEIVNKLIVEFFPDIVDVAFTAEMEGKLDQVEIGEEQWQHVIDQFYQPFVKELNKAESEIEKIQIKDEPAGFDCDVCGHPMVIKLGRFGKFYACSNFPECRNTKAITKEIGVTCPVCHKGQVIERKTKKNRIFYGCDQYPDCEFISWDLPIGRACPKSGDYLIEKKVRGGKQVMCSNETCDYKEEKIK

SEQ ID NO: 74574 - protein, 448 aa, Streptococcus pyogenes
MSQSTATYINVIGAGLAGSEAAYQIAKRGIPVKLYEMRGVKATPQHKTTNFAELVCSNSFRGDSLTNAVGLLKEEMRRLDSIIMRNGEANRVPAGGAMAVDREGYAESVTAELENHPLIEVIRGEITEIPDDAITVIATGPLTSDALAEKIHALNGGDGFYFYDAAAPIIDKSTIDMSKVYLKSRYDKGEAAYLNCPMTKEEFMAFHEALTTAEEAPLNAFEKEKYFEGCMPIEVMAKRGIKTMLYGPMKPVGLEYPDDYTGPRDGEFKTPYAVVQLRQDNAAGSLYNIVGFQTHLKWGEQKRVFQMIPGLENAEFVRYGVMHRNSYMDSPNLLTETFQSRSNPNLFFAGQMTGVEGYVESAASGLVAGINAARLFKREEALIFPQTTAIGSLPHYVTHADSKHFQPMNVNFGIIKELEGPRIRDKKERYEAIASRALADLDTCLASL

SEQ ID NO: 74575 - protein, 468 aa, Streptococcus pyogenes
MIQFGGFSMQQQVAITETVLRDGHQSLMATRLSIEDMLPVLTILDKIGYYSLECWGGATFDACIRFLNEDPWERLRTLKKGLPNTRLQMLLRGQNLLGYRHYADDIVDKFISLSAQNGIDVFRIFDALNDPRNIQQALRAVKKTGKEAQLCIAYTTSPVHTLNYYLSLVKELVEMGADSICIKDMAGILTPKAAKELVSGIKAMTNLPLIVHTHATSGISQMTYLAAVEAGADRIDTALSPFSEGTSQPATESMYLALKEASYDITLDETLLEQAANHLRQARQKYLADGILDPSLLFPDPRTLQYQVPGGMLSNMLSQLKQANAESKLEEVLAEVPRVRKDLGYPPLVTPLSQMVGTQAAMNVILGKPYQMVSKEIKQYLAGDYGKTPAPVNEDLKRSQIGSAPVTTNRPADQLSPEFEVLKAEVADLAQTDEDVLTYALFPSVAKPFLTTKYQTDDVIKVTAFIKA
